United States Patent Application Publication US 2021/0272652 A1 - sequence listing, part 3

SEQ ID NO: 36782 - DNA, 96 bp, Fusarium azukicola
  misc_feature: 101
agatatagctaggaaagagatatagctaggaaaaagagatatagctaagagagagaggtaaagctaagaaagagagatatagctagaaaagagaga

SEQ ID NO: 36783 - DNA, 96 bp, Fusarium azukicola
  misc_feature: 101
aataagattttaataaatagcttactaaggcatttatttaaaaatctaaaaaatttattttttaaaattagatttcttaatttatatattcttaga

SEQ ID NO: 36784 - DNA, 96 bp, Fusarium azukicola
  misc_feature: 101
aaagagagagagggagaggggagagaagaggataaagaataaaaagagagagaagggaaaagaaagagggaaaaaagaaataaaagaggaagagga

SEQ ID NO: 36785 - DNA, 96 bp, Fusarium azukicola
  misc_feature: 101
tatatataaatatataaataaaaatctctctttaagttttaatagggctatacctcctattttaactaataatctagcagctaagtaattagctga

SEQ ID NO: 36786 - DNA, 96 bp, Fusarium azukicola
  misc_feature: 101
tatttaaaattaagaaaagccttatatagcctaaaataaagccctagattatggtataaccttctctctaaattattaaataatttaggcttctac

SEQ ID NO: 36787 - DNA, 96 bp, Fusarium azukicola
  misc_feature: 101
tattctcttctatcttgcctctctctcggtcggtctgaatctcttgtcggaattgagcagagaagtctaatggttggtaggtcccattctcaatct

SEQ ID NO: 36788 - DNA, 96 bp, Fusarium azukicola
  misc_feature: 101
atatattcctttatattatctgagaaaactgattttattcttattttattaggattattttctatttcttttctaaattccttaaattttataata

SEQ ID NO: 36789 - DNA, 96 bp, Fusarium azukicola
  misc_feature: 101
ataatacaaaggaatatatatataagctaagaccctattatataaagaatggaataaaatataatataagtccgcctcataataaataagctaata

SEQ ID NO: 36790 - DNA, 96 bp, Fusarium azukicola
  misc_feature: 101
tataatgttaatgttctatattatattaccaactatagtgatatatccctataaaccacatattatattatagaatttttactctatttttaggta

SEQ ID NO: 36791 - DNA, 96 bp, Fusarium azukicola
  misc_feature: 101
tataaaatagctagaaatataaaaaaagtatttttataaatctaactatataaagaacctaaaaatatcttttttagatttttaaaaaaattgctt

SEQ ID NO: 36792 - DNA, 96 bp, Fusarium azukicola
  misc_feature: 101
tagtaatatatccctataaactatatattatattatagaatttttactctatttttaggtatatttacctaacctatagctactataggtagctag

SEQ ID NO: 36793 - DNA, 96 bp, Fusarium azukicola
  misc_feature: 101
tactaaccccaactataaccctaaccctagttccggttccggttccggttccggttccggtttctagttagaccgtgcctgtacgctccttttcta

SEQ ID NO: 36794 - DNA, 96 bp, Fusarium azukicola
  misc_feature: 101
attactatatccttagatagaatatttactattctttctatatcttctttataagggcccgaaaatataaggttatctatataaatagctatagta

SEQ ID NO: 36795 - DNA, 96 bp, Fusarium azukicola
  misc_feature: 101
taattctagaaaaaataatttaatcctaaaatagatatactttctagaatagcttattaggcttatatatatttttatagaattttttggagctac

SEQ ID NO: 36796 - DNA, 96 bp, Fusarium azukicola
  misc_feature: 101
atattactatagttagtaatataatatagaatattaatagcctcctttaaagttataatcttataagggttatagctttatatattcttattatta

SEQ ID NO: 36797 - DNA, 96 bp, Fusarium azukicola
  misc_feature: 101
taagattataactttaaaggaggctattaatattctatattatattactaactatagtgatatatccctataaactatatattatattatagaatt

SEQ ID NO: 36798 - DNA, 96 bp, Fusarium azukicola
  misc_feature: 101
taaataagaagtccttcttttaaataagcaaggaaaaataatatcataaggaaaagagaaaaataacctatatataataatagctaaggttatttc

SEQ ID NO: 36799 - DNA, 96 bp, Fusarium azukicola
  misc_feature: 101
gatcagacgattacgataatatatcgaggttctactcgaacctcaaagccgcgtgtggcatagacgaggccttaagaaggaagcaagctcggaaac

SEQ ID NO: 36800 - DNA, 96 bp, Fusarium azukicola
  misc_feature: 101
attattttttaccttttccttttattttactttaaattttccctctttattaaattaaccctatttactttacccctttatttttctattaataac

SEQ ID NO: 36801 - DNA, 96 bp, Fusarium azukicola
  misc_feature: 101
gttataatcttataagggttatagctttatatattcttattattagaggaaaaaattaaacctctattattattatatatatcttagtaaaaaccc

SEQ ID NO: 36802 - DNA, 96 bp, Fusarium azukicola
  misc_feature: 101
gttaagggttagggttaattggttgaaattagggttaggggtagtagtagagttaagggttagggttaattggttgaaattagggttaggggtagg

SEQ ID NO: 36803 - DNA, 96 bp, Fusarium azukicola
  misc_feature: 101
gtataaagctataacccttataagattataactttaaaggaggctgttaatattctatattatattactaactatagtgatatatccctataaacc

SEQ ID NO: 36804 - DNA, 96 bp, Fusarium azukicola
  misc_feature: 101
gggttagactatatgggtagggtatagataagagggttattagctagggtaaggcgattagggattaataagtactaagagaggtaaaggaaaccg

SEQ ID NO: 36805 - DNA, 96 bp, Fusarium azukicola
  misc_feature: 101
gggcttctatctatagctgacccaaagcctgaccctaaccctgacctaatgtatgaccctgaccctgaccctaacctctagaatctcctagaatct

SEQ ID NO: 36806 - DNA, 96 bp, Fusarium azukicola
  misc_feature: 101
gacgaacgcgaatacaacaagcaagcagatgggattggcaatgtgctcaattggatgattgagaagatcaatccacactacgtcgagacatgctcc

SEQ ID NO: 36807 - DNA, 96 bp, Fusarium azukicola
  misc_feature: 101
gctatttttgcctccctttatctcttatctcttatttcttatttctttatctcttatctcttatctcttatctcttatctcttatctcttatctct

SEQ ID NO: 36808 - DNA, 96 bp, Fusarium azukicola
  misc_feature: 101
atatacctaaaaatagagtaaaaattctataatataatatgtggtttatagggatatatcactatagttggtaatataatatagaatattaatagc

SEQ ID NO: 36809 - DNA, 96 bp, Fusarium azukicola
  misc_feature: 101
gcaagctcggaaacggtatttcgaagtgctaaaggcagctttaagcggcataacgcactggggagactggatcactagttgggaacaagcaatgcg

SEQ ID NO: 36810 - DNA, 96 bp, Fusarium azukicola
  misc_feature: 101
aggagtattctcttctatcttgcctctctctcggtcggtctgaatctcttgtcggaattgagcagagaagtctaatggttggtaggtcccattctc

SEQ ID NO: 36811 - DNA, 96 bp, Fusarium azukicola
  misc_feature: 101
gaaccttcttctccagaagatataaagtaattccaaaaggaaataggttctttaatatttctagctataaaaactagacctaatatagcttatgct

SEQ ID NO: 36812 - DNA, 96 bp, Fusarium azukicola
  misc_feature: 101
ctttctccctttctttcctttatctttctttatttttctttttaaccttaaccctctctttccttcctttttttcctttctctttttcttcttttc

SEQ ID NO: 36813 - DNA, 96 bp, Fusarium azukicola
  misc_feature: 101
ctttctataaatttaataggtactttagaagttcctatttcttatttattatatttccttattattttatttatatattttgcttatgaaaaagat

SEQ ID NO: 36814 - DNA, 96 bp, Fusarium azukicola
  misc_feature: 101
ctttaaaggaggctattaatgttctatattatattaccaactatagtgatatatccctataaaccacatattatattatagaatttttactctatt

SEQ ID NO: 36815 - DNA, 96 bp, Fusarium azukicola
  misc_feature: 101
agataagagataagagataagggataagagataagagataaagaaataagaaataagagataagagataaagggaggcaaaaatagccttaagaag

SEQ ID NO: 36816 - DNA, 96 bp, Fusarium azukicola
  misc_feature: 101
cttccctatataaagaaataactaggatatttaaataaggtaaataaacctgatttttctactaataaagataatataactaattttatatatgat

SEQ ID NO: 36817 - DNA, 96 bp, Fusarium azukicola
  misc_feature: 101
agggagaagagaaagaagataggtagttagaagagaaagaaagaaggggaatagaaaaagaaaagaagaagaaaaagagaaataaaggaggggaag

SEQ ID NO: 36818 - DNA, 96 bp, Fusarium azukicola
  misc_feature: 101
cttataaatggcttagttatagcaaaaaccggttttaatggatagaatgcaacgctgaaggttttaggaaccttcctagccaatcggcaggtattt

SEQ ID NO: 36819 - DNA, 96 bp, Fusarium azukicola
  misc_feature: 101
ctataagattactttttttaagtttctagctattttatagcagtttttagaaacttaggttttagcgatttttagttatacagtatgctgtctcgt

SEQ ID NO: 36820 - DNA, 96 bp, Fusarium azukicola
  misc_feature: 101
cctcacgagccttcttgattgctggcacctttgcaaactcaacattgccatctgtgataaccttacgccttttcttgggtcgaagctcttgatttt

SEQ ID NO: 36821 - DNA, 96 bp, Fusarium azukicola
  misc_feature: 101
ccctataaaccatatattatattatagaatttttactctatttttaggtatatttacctaacctatagctactataggtagctagatattaagagt

SEQ ID NO: 36822 - DNA, 96 bp, Fusarium azukicola
  misc_feature: 101
catactgtacttaactagccgtcccttcgcgataccctcttcctagccataataaccctccccgtcgccctagatattaacggttagccactattt

SEQ ID NO: 36823 - DNA, 96 bp, Fusarium azukicola
  misc_feature: 101
aaatagcttagatagtaaatactaaccccaactataaccctaaccctagttccggttccggttccggttccggttccggtttctagttagaccgtg

SEQ ID NO: 36824 - DNA, 96 bp, Fusarium azukicola
  misc_feature: 101
atcttataagggttatagctttatatattcttattattagaggaaaaaattaaacctctattattattatatatatcttagtaaaaacccctttat

SEQ ID NO: 36825 - DNA, 96 bp, Fusarium azukicola
  misc_feature: 101
atctatttaaaattaagaaaagccttatatagcctaaaataaagccctagattatggtataaccttctctctaaattattaaataatttaggcttt

SEQ ID NO: 36826 - DNA, 96 bp, Fusarium azukicola
  misc_feature: 101
atactaaccccaactataaccctaaccctagttccggttccggttccggttccggttccggtttctagttagaccgtgcctgtacgctccttttct

SEQ ID NO: 36827 - DNA, 96 bp, Fusarium azukicola
  misc_feature: 101
aggagcgtacaggcacggtctaactagaaaccggaaccggaaccggaaccggaaccggaactagggttagggttatagttggggttagtatttact

SEQ ID NO: 36828 - DNA, 96 bp, Fusarium azukicola
  misc_feature: 101
agattactttttttaagtttctagctattttatagcagtttttagaaacttaggttttagcgatttttagttatacagtatgctgtctcgttcgct

SEQ ID NO: 36829 - DNA, 96 bp, Fusarium azukicola
  misc_feature: 101
agcatgtctcgacgtagtgtggattgatcttctcaatcatccaattgagcacattgccaatcccatctgcttgcttgttgtattcgcgttcgtctt

SEQ ID NO: 36830 - DNA, 96 bp, Fusarium azukicola
  misc_feature: 101
acttaatttctctccttaaacctttttattactttctaacccttttttctcttctttaacctaacttacttatttattttattctccctctttctt

SEQ ID NO: 36831 - DNA, 96 bp, Fusarium azukicola
  misc_feature: 101
aaatctaagagactagaaaaaatagattctaatgagatatatttttctaagacttctaagccttagaaaaagaagaaaactgccttaaaatgcagt

SEQ ID NO: 36832 - DNA, 96 bp, Fusarium azukicola
  misc_feature: 101
actcttttatcagtggcaatggtagagaagacaactagacaactatcataatggattatactccctacctgttccatcatcatcatcatgggtcgt

SEQ ID NO: 36833 - DNA, 96 bp, Fusarium azukicola
  misc_feature: 101
aaaggttttattttttatagcttaaagctgatatatataaattcttaaaaaattatttttatatactagatttataagcaaatacagaaaaaaatt

SEQ ID NO: 36834 - DNA, 96 bp, Fusarium azukicola
  misc_feature: 101
aatcttataagggttatagctttatatattcttattattagaggaaaaattaaacctctattattattatatatatatcttagtaaaaaccccttt

SEQ ID NO: 36835 - DNA, 96 bp, Fusarium azukicola
  misc_feature: 101
aataaataagaagtccttcttttaaataagcaaggaaaaataatatcataaggaaaagagaaaaataacctatatataataatagctaaggttatt

SEQ ID NO: 36836 - DNA, 96 bp, Fusarium azukicola
  misc_feature: 100
agggtattattctaattggttaaaaaggttcctacagaccttcatgactgccgtcattaatgcatcaaagtataataactgccgattggctaaaaa

SEQ ID NO: 36837 - DNA, 96 bp, Fusarium azukicola
  misc_feature: 100
tagaattaggtttagattcctttttcttagaagtcttatgcaccttattggcttcctgaattttccagttttttggagccttattagggtgcaaaa

SEQ ID NO: 36838 - DNA, 96 bp, Fusarium azukicola
  misc_feature: 100
ttttattactttctaacccttttttctcttctttaacctaacttacttatttattttattctccctctttcttctttatttaataaaccttaaaac

SEQ ID NO: 36839 - DNA, 96 bp, Fusarium azukicola
  misc_feature: 100
tttacccttaaataaactataaataatttttatagatttttaaaaaatttcgtttataaagaaattataatttacacagtgtaaatagacttttta

SEQ ID NO: 36840 - DNA, 96 bp, Fusarium azukicola
  misc_feature: 100
aataagagtatatctttttcataagtaaaatatataaataaaataataaggaaatataataaataagaaataggaacttctaaagtacctattaaa

SEQ ID NO: 36841 - DNA, 96 bp, Fusarium azukicola
  misc_feature: 100
ttcttcgacccggataaatacttcaaagtggtcgtcaaggacttctctgaggtcatcgaaccacgtattagggtgcattgcttcgaccactcctct

SEQ ID NO: 36842 - DNA, 96 bp, Fusarium azukicola
  misc_feature: 100
aaaagaaggttattaaagagggaggagagtttaataagtaagtatagaggagaggaagagagaagagaaagaaaggagaggaaggggagaagagaa

SEQ ID NO: 36843 - DNA, 96 bp, Fusarium azukicola
  misc_feature: 100
aaggagagaagtaaggaaggttaagaaaggagagaagtaaggaaggttaagaaaggagagaagtaaggaaggttaagaaaggagagaaggaaggaa

SEQ ID NO: 36844 - DNA, 96 bp, Fusarium azukicola
  misc_feature: 100
ttattttcttatttttcttttttttatttttctctttctttttttatctttttttctttttttttctttttcctctcttttatttctctttttctt

SEQ ID NO: 36845 - DNA, 96 bp, Fusarium azukicola
  misc_feature: 100
ttattaaataaagaagaaagagggagaataaaataaataagtaagttaggttaaagaagagaaaaaagggttagaaagtaataaaaaggtttaagg

SEQ ID NO: 36846 - DNA, 96 bp, Fusarium azukicola
  misc_feature: 100
atcagttttctcagataatgcaaaggaatatatatataagctaaggccctattgtataaagaatggaataaaatataatacaagtccgcctcataa

SEQ ID NO: 36847 - DNA, 96 bp, Fusarium azukicola
  misc_feature: 100
atcagttttctcagataatgcaaaggaatatatatataagctaagaccctattgtataaagaatggaataaaatataatataagtccgcctcataa

SEQ ID NO: 36848 - DNA, 96 bp, Fusarium azukicola
  misc_feature: 100
gaataagttagaagctattataaaatttaaggaatttagaaaagaaatagaaaataatcctaataaaataagaataaaattagttttcttagataa

SEQ ID NO: 36849 - DNA, 96 bp, Fusarium azukicola
  misc_feature: 100
ttatataatagggtcttagcttatatatatattcctttatattatctgagaaaactgattttattcttattttattaggattattttctatttctt

SEQ ID NO: 36850 - DNA, 96 bp, Fusarium azukicola
  misc_feature: 100
ttagatagtaaatactaaccccaactataaccctaaccctagttccggttccggttccggttccggttccggtttctagttagaccgtgcctgtac

SEQ ID NO: 36851 - DNA, 96 bp, Fusarium azukicola
  misc_feature: 100
aaaaggttttaaggtttattaaataaagaagaaagagggagaataaaataaataagtaagttaggttaaagaagagaaaaaagggttagaaagtaa

SEQ ID NO: 36852 - DNA, 96 bp, Fusarium azukicola
  misc_feature: 100
tataaagctataacccttataagattataactttaaaggaggctgttaatattctatattatattactaactatagtgatatatccctataaacca

SEQ ID NO: 36853 - DNA, 96 bp, Fusarium azukicola
  misc_feature: 100
cctaacccttaacgtaactactacccctaaccctaatttcaaccaattaaccctaacccttaacgtaactactacccctaaccataatttcaacca

SEQ ID NO: 36854 - DNA, 96 bp, Fusarium azukicola
  misc_feature: 100
tggtaatataatatagaacattaatagcctcctttaaagttataatcttataagggttatagctttatacgttcttattattagaggaaaaaatta

SEQ ID NO: 36855 - DNA, 96 bp, Fusarium azukicola
  misc_feature: 100
tggcgagatcaagaggttggaggacatgagaagagtgaggaataaggaataaaaggaagatattattatcgtagcactcaaagaggaattcctcag

SEQ ID NO: 36856 - DNA, 96 bp, Fusarium azukicola
  misc_feature: 100
cactcttctcatgtcctccaacctcttgatctcgccatttttggccctctgaagcaggcataccgtcggcttctttctgacctcgctagagtcgca

SEQ ID NO: 36857 - DNA, 96 bp, Fusarium azukicola
  misc_feature: 100
ctatcttagagcatgaaaatcaagagcttcgacccaagaaaaggcgtaaggttatcacagatggcaatgttgagtttgcaaaggtgccagcaatca

SEQ ID NO: 36858 - DNA, 96 bp, Fusarium azukicola
  misc_feature: 100
tctttttcataagcaaaatatataaataaaataataaggaaatataataaataagaaataggaacttctaaagtacctattaaatttatagaaaga

SEQ ID NO: 36859 - DNA, 96 bp, Fusarium azukicola
  misc_feature: 100
tcttgttaatgttctatattatattaccaactatagtgatatatccctataaaccatatattatattatagaatttttactctatttttaggtata

SEQ ID NO: 36860 - DNA, 96 bp, Fusarium azukicola
  misc_feature: 100
tcttatctcttatcttttatttctctcttttctagctatatctctctttcttagctttacctctctctcttagctatatctctttttcctagctat

SEQ ID NO: 36861 - DNA, 96 bp, Fusarium azukicola
  misc_feature: 100
tcttatctcttatctcttatctcttatctcttatctcttatctcttatctcttatctcttatttctctcttttctagctatatctctctttcttag

SEQ ID NO: 36862 - DNA, 96 bp, Fusarium azukicola
  misc_feature: 100
aaaataataataataataataaaaaagaaatcttcttaggataaccctaggataatagaagatatatatatatatgaccctaaccttaaggtaaga

SEQ ID NO: 36863 - DNA, 96 bp, Fusarium azukicola
  misc_feature: 100
gtttcttctagctaaggtatagcttataaatagaggggagattttctaagaaatataaaaagaaaagaaatataaaagatatagctaggaaagaga

SEQ ID NO: 36864 - DNA, 96 bp, Fusarium azukicola
  misc_feature: 100
ggttttttatttatattatttttagttaattttcctagtttatagtttttatagtttttaacttaatataggtccttattagtatatttaaagaga

SEQ ID NO: 36865 - DNA, 96 bp, Fusarium azukicola
  misc_feature: 100
tctattactttctattactttcttacttttctttcttttactcttccccttctccttttatcttcttctctttttctttactcttcccctccttta

SEQ ID NO: 36866 - DNA, 96 bp, Fusarium azukicola
  misc_feature: 100
tccttcttttaaataagcaaggaaaaataatatcataaggaaaagagaaaaataacctatatataataacagctaaggttatttctaataagaata

SEQ ID NO: 36867 - DNA, 96 bp, Fusarium azukicola
  misc_feature: 100
cacactcagagggtattttgggtgcttttggcggtgtttttggcgtctcaggggtcttcgtgaccatcgggttcattaggaccttagtcatattga

SEQ ID NO: 36868 - DNA, 96 bp, Fusarium azukicola
  misc_feature: 100
gggtagtaatgaagttaatttaaaaagaaaagagaagaaaggatttaaaaataagagaaagagttaaataaaaaagttaggatttaaggagaaata

SEQ ID NO: 36869 - DNA, 96 bp, Fusarium azukicola
  misc_feature: 100
tattctttatataatagggtcttagcttatatatatattcctttatattatctaagaaaactaattttattcttattttattaggattattttcta

SEQ ID NO: 36870 - DNA, 96 bp, Fusarium azukicola
  misc_feature: 100
agctattataaaatttaaggaatttagaaaagaaatagaaaataatcctaataaaataagaataaaatcagttttctcagataatacaaaggaata

SEQ ID NO: 36871 - DNA, 96 bp, Fusarium azukicola
  misc_feature: 100
aacaaagggaagattgagaatgggacctaccaaccattagacttctctgctcaattccgacaagagattcagaccgaccgagagagaggcaagata

SEQ ID NO: 36872 - DNA, 96 bp, Fusarium azukicola
  misc_feature: 100
tatatataataataatagaggtttaatttttcctctaataataagaatatataaagctataacccttataagattataactttaaaggaggctatt

SEQ ID NO: 36873 - DNA, 96 bp, Fusarium azukicola
  misc_feature: 100
atagataagcgaattaaacacttttcttaacctttaatatataaatcactataaaaacactataaactatctaattaattaaaactaattactata

SEQ ID NO: 36874 - DNA, 96 bp, Fusarium azukicola
  misc_feature: 100
tatagtaatatatccctataaactatatattatattatagaatttttactctatttttaggtatatttacctaacctatagctactataggtagct

SEQ ID NO: 36875 - DNA, 96 bp, Fusarium azukicola
  misc_feature: 100
gagtgtagggtattgatgtcgcgctgttcgtcacgatgtgctgtcgagtttgatcagtgtcggcataaagtggcaatgtaagcaattgaaggtata

SEQ ID NO: 36876 - DNA, 96 bp, Fusarium azukicola
  misc_feature: 100
tataatatgcctagtagcacctatattatatataaaattagttatattatctttattagtagaaaaatcaggtttatttaccttatttaaatatcc

SEQ ID NO: 36877 - DNA, 96 bp, Fusarium azukicola
  misc_feature: 100
aagaatatataaagctataacccttataagattataactttaaaggaggctattaatattctatattatattactaactatagtaatatatcccta

SEQ ID NO: 36878 - DNA, 96 bp, Fusarium azukicola
  misc_feature: 100
ctctataaagcaatttttttaaaaatctaaaaaagatatttttaggttctttatatagttagatttataaaaatactttttttatatttctagcta

SEQ ID NO: 36879 - DNA, 96 bp, Fusarium azukicola
  misc_feature: 100
cctttatattatctaagaaaactaattttattcttattttattaggattattttctatttcttttctaaattccttaaattttataatagcttcta

SEQ ID NO: 36880 - DNA, 96 bp, Fusarium azukicola
  misc_feature: 100
taatacaaaggaatatatatataagctaagaccctattatataaagaatggaataaaatataatataagtccgcctcataataaataagctaatag

SEQ ID NO: 36881 - DNA, 96 bp, Fusarium azukicola
  misc_feature: 100
ctcttatctcttatctcttatctcttatctcttatctcttatctcttatctcttatctcttatttctctcttttctagctatatctctctttctta

SEQ ID NO: 36882 - DNA, 96 bp, Fusarium azukicola
  misc_feature: 100
taactagaaattcttttctatatataatatgcctagtagcacctatattatatataaaattagttatattatctttattagtagaaaaattaggtt

SEQ ID NO: 36883 - DNA, 96 bp, Fusarium azukicola
  misc_feature: 100
atttattatattcctccttaacttaatttctctccttaaacctttttattactttctaacccttttttctcttctttaacctaacttacttattta

SEQ ID NO: 36884 - DNA, 96 bp, Fusarium azukicola
  misc_feature: 100
aaaggaggctattaatgttctatattatattaccaactatagtgatatatccctataaaccacatattatattatagaatttttactctattttta

SEQ ID NO: 36885 - DNA, 96 bp, Fusarium azukicola
  misc_feature: 100
aaaaaaagctatttatatagtgcgaataattctttttctaaactaccttataagggattttttaaaaagttttaaaaaatcataataggtttttta

SEQ ID NO: 36886 - DNA, 96 bp, Fusarium azukicola
  misc_feature: 100
ctctctttaaatatactaataaggacctatattaagttaaaaactataaaaactataaactaggaaaattaactaaaaataatataaataaaaaac

SEQ ID NO: 36887 - DNA, 96 bp, Fusarium azukicola
  misc_feature: 100
gtttctttatatagggaaggtttcttattaaaggtcctagtatattattagttatattattttattgagaaattaaggaattatatacctctaaat

SEQ ID NO: 36888 - DNA, 96 bp, Fusarium azukicola
  misc_feature: 100
gttccggttccggttccggttccggtttctagttagaccgtgcctgtacgctccttttctaccctttcaagctctaacacagctctgcgtcgccct

SEQ ID NO: 36889 - DNA, 96 bp, Fusarium azukicola
  misc_feature: 100
aaacctaattctaagaaggaagaaagagaaaagaaataagaaaagctatttatagctaattcttcttcttcattatctcctaaagccgaggaagac

SEQ ID NO: 36890 - DNA, 96 bp, Fusarium azukicola
  misc_feature: 100
gtcttatgcaccttattggcttcctgaattttccagttttttggagccttattagggtgcaaaaaatagcaatctgggtctttatgacctggcagt

SEQ ID NO: 36891 - DNA, 96 bp, Fusarium azukicola
  misc_feature: 100
gtacataagacttctaagaaaaaggaatctaaacctaattctaagaaggaagaaagagaaaagaaacaagaaaagctatttatagctaattcttct

SEQ ID NO: 36892 - DNA, 96 bp, Fusarium azukicola
  misc_feature: 100
ggtgttaatgttctatattatattaccaactatagtgatatatccctataaaccacatattatattatagaatttttactctatttttaggtatat

SEQ ID NO: 36893 - DNA, 96 bp, Fusarium azukicola
  misc_feature: 100
gggttaggggtagtagttacgttaagggttagggttaattggttgaaattagggttaggggtagtagtagagttaagggttagggttaattggttg

SEQ ID NO: 36894 - DNA, 96 bp, Fusarium azukicola
  misc_feature: 100
ggccctattgtataaagaatggaataaaatataatacaagtccgcctcataataaacaagctaatggctttgtagaaaggataaataggactatat

SEQ ID NO: 36895 - DNA, 96 bp, Fusarium azukicola
  misc_feature: 100
ggattaataagtactaagagaggtaaaggaaaccgctactatccggaggggagataacctctactgtccggggaagaagagtaaccgctagccgct

SEQ ID NO: 36896 - DNA, 96 bp, Fusarium azukicola
  misc_feature: 100
ggaatatgcttgtggcctcctcctctgcctcctcctgggcctcccgctcatcgcttgacccgtcctcctcctgctgcctgtccatcttggcctgct

SEQ ID NO: 36897 - DNA, 96 bp, Fusarium azukicola
  misc_feature: 100
acaaacaaagatgctagcaagactcttttatcagtggcaatggtagagaagacaactagacaactatcataatggattatactccctacctgttcc

SEQ ID NO: 36898 - DNA, 96 bp, Fusarium azukicola
  misc_feature: 100
gcccgaagggcttctatctatagctgacccaaagcctgaccctaaccctgacctaatgtatgaccctgaccctgaccctaacctctagaatctcct

SEQ ID NO: 36899 - DNA, 96 bp, Fusarium azukicola
  misc_feature: 100
gattatactccctacctgttccatcatcatcatcatgggtcgtcgtgcgcttacagcagaggaaaaggcaaacaaggccaaccgtgagagagagcg

SEQ ID NO: 36900 - DNA, 96 bp, Fusarium azukicola
  misc_feature: 100
cctctcctttcctcttcctcttttatttcttttttccctctttcttttcccttctctctctttttattctttatcctcttctctcccctctccctc

SEQ ID NO: 36901 - DNA, 96 bp, Fusarium azukicola
  misc_feature: 100
ctcacgagccttcttgattgctggcacctttgcaaactcaacattgccatctgtgataaccttacgccttttcttgggtcgaagctcttgattttc

SEQ ID NO: 36902 - DNA, 96 bp, Fusarium azukicola
  misc_feature: 100
gaaaaattataaacttataacttttttagttagacttataaaattactctttttaggcttatagctattttatagctgtttttagaaatttaaggt

SEQ ID NO: 36903 - DNA, 96 bp, Fusarium azukicola
  misc_feature: 100
aaagaaggttattaaagagggaggagagtttaataagtaagtatagaggagaggaagagagaagagaaagaaaggagaggaaggggagaagagaag

SEQ ID NO: 36904 - DNA, 96 bp, Fusarium azukicola
  misc_feature: 100
ctaataaggctccaaaaaactggaaaactcaggaagccaataaggtgcataagacttctaagaaaaaggaatctaaacctaattctaagaaggaag

SEQ ID NO: 36905 - DNA, 96 bp, Fusarium azukicola
  misc_feature: 100
agaggtataactaggaaaaagagatatagctaagagagagaggtaaagctaagaaagagagatatagctagaaaagagagaaataaaagataagag

SEQ ID NO: 36906 - DNA, 96 bp, Fusarium azukicola
  misc_feature: 100
ctattgttaatgttctatattatattaccaactatagtgatatatccctataaaccatatattatattatagaatttttactctatttttaggtat

SEQ ID NO: 36907 - DNA, 96 bp, Fusarium azukicola
  misc_feature: 100
agtcctatttatcctttctacaaagccattagcttgtttattatgaggcggacttgtattatattttattccattctttatacaatagggccttag

SEQ ID NO: 36908 - DNA, 96 bp, Fusarium azukicola
  misc_feature: 100
atttaaaattaagaaaagccttatatagcctaaaataaagccctagattgtggtataaccttctctctaaattattaaataatttaggcttctatg

SEQ ID NO: 36909 - DNA, 96 bp, Fusarium azukicola
  misc_feature: 100
attactttgcaagagcaggacctgagactagatcagggaccacgaggctcgaaagaggcgaacgcgccgcgaatacagtcagcgaactgcaccctg

SEQ ID NO: 36910 - DNA, 96 bp, Fusarium azukicola
  misc_feature: 100
attcctttatattatctgagaaaactgattttattcttattttattaggattattttctatttcttttctaaattccttaaattttataatagctt

SEQ ID NO: 36911 - DNA, 96 bp, Fusarium azukicola
  misc_feature: 100
attcctaaaaagtctttaacttctcctaaggattagattactatatccttagatagaatatttactattctttctatatcttctttataagggcct

SEQ ID NO: 36912 - DNA, 96 bp, Fusarium azukicola
  misc_feature: 100
attattagaggaaaaaattaaacctctattattattatatatcttagtaaaaacccctttattatagacctaatattataagggaaaatctaagat

SEQ ID NO: 36913 - DNA, 96 bp, Fusarium azukicola
  misc_feature: 100
atataataataatagaggtttaatttttcctctaataataagaatatataaagctataacccttataagattataactttaaaggaggctattaat

SEQ ID NO: 36914 - DNA, 96 bp, Fusarium azukicola
  misc_feature: 100
aaaacgctatttatactatctcatactgtacttaactagccgtcccttcgcgataccctcttcctagccataataaccctccccgtcgccctagat

SEQ ID NO: 36915 - DNA, 96 bp, Fusarium azukicola
  misc_feature: 100
atatagtttatagggatatattactatagttagtaatataatatagaatattaatagcctcctttaaagttataatcttataagggttatagcttt

SEQ ID NO: 36916 - DNA, 96 bp, Fusarium azukicola
  misc_feature: 100
agtgttaatgttctatattatattactaactatagtgatatatccctataaaccatatattatattatagaatttttactctatttttaggtatat

SEQ ID NO: 36917 - DNA, 96 bp, Fusarium azukicola
  misc_feature: 100
ataatatgcctagtagcacctatattatatataaaattagttatattatctttattagtagaaaaatcaggtttatttaccttatttaaatatcct

SEQ ID NO: 36918 - DNA, 96 bp, Fusarium azukicola
  misc_feature: 100
agcacctatattatatataaaattagttatattatctttattagtagaaaaattaggtttatttaccttatttaaatatcctagttatttctttat

SEQ ID NO: 36919 - DNA, 96 bp, Fusarium azukicola
  misc_feature: 100
aagagttagaaagtaaagctaacctctagggtaaggaaggggttagcctctaaggtctagggaagaagtataatggctaaccactagtgtgagagt

SEQ ID NO: 36920 - DNA, 96 bp, Fusarium azukicola
  misc_feature: 100
aagggtagaaaaggagcgtacaggcacggtctaactagaaaccggaaccggaaccggaaccggaaccggaactagggttagggttatagttggggt

SEQ ID NO: 36921 - DNA, 96 bp, Fusarium azukicola
  misc_feature: 100
aaatagctaagaattattctttttaggtctataactattttattttagcttttattaagctttaaagttttatgttttagtgcacagtatagctgt

SEQ ID NO: 36922 - DNA, 96 bp, Fusarium azukicola
  misc_feature: 100
aattctaagaatatataaattaagaaatctaattttaaaaaataaattttttagatttttaaataaatgccttagtaagctatttattaaaatctt

SEQ ID NO: 36923 - DNA, 96 bp, Fusarium azukicola
  misc_feature: 100
aaaattaactagaaattcttttctacatacaatatgcctagtagcaccttatttaaatatcctagttgtttctttatatagggaaggtttcttatt

SEQ ID NO: 36924 - DNA, 96 bp, Fusarium azukicola
  misc_feature: 99
ttttgtttgagatgccctatcgcctctgacttcctcctaggtggttctgcgtcttgatctctgcctcagacctgttatccgactagactaccaact

SEQ ID NO: 36925 - DNA, 96 bp, Fusarium azukicola
  misc_feature: 99
gtaaaggaagctgtctatacccatcatatatatatatatgatatggtatggatatagatgatgttattatttattattataatcgtaataacgaaa

SEQ ID NO: 36926 - DNA, 96 bp, Fusarium azukicola
  misc_feature: 99
tccttaaggattataaaaagaaatatcctaatagtaatataaataagctataaatctatttaaaattaagaaaagccttatatagcctaaaataaa

SEQ ID NO: 36927 - DNA, 96 bp, Fusarium azukicola
  misc_feature: 99
tttatttctctcttttctagctatatctctctttcttagctttacctctctctcttagctatatctctttttcctagttatacctctctttcttag

SEQ ID NO: 36928 - DNA, 96 bp, Fusarium azukicola
  misc_feature: 99
tgtttctttatatagggaaggtttcttattaaaggtcctagtatattattagttatattattttattgagaaattaaggaattatatacctctaaa

SEQ ID NO: 36929 - DNA, 96 bp, Fusarium azukicola
  misc_feature: 99
taataaatataattataaagcctataataatagcgagtataaatataattatatcgcctatagactattaaaaaactaagagaaccgactattaaa

SEQ ID NO: 36930 - DNA, 96 bp, Fusarium azukicola
  misc_feature: 99
ctttttgtttgagatgccctatcgcctctgacttcctcctaggtggttctgcgtcttgatctctgcctcagacctgttatccgactagactaccaa

SEQ ID NO: 36931 - DNA, 96 bp, Fusarium azukicola
  misc_feature: 99
ttcttacttttctttcttttactcttccccttctccttttatcttcttctctttttctttactcttcccctcctttatttctctttttcttcttct

SEQ ID NO: 36932 - DNA, 96 bp, Fusarium azukicola
  misc_feature: 99
ttcttacatggatcgggttagactatatgggtagggtatagataagagggttattagctagggtaaggcgattagggattaataagtactaagaga

SEQ ID NO: 36933 - DNA, 96 bp, Fusarium azukicola
  misc_feature: 99
ataagattttaataaatagcttactaaggcatttatttaaaaatctaaaaaatttattttttaaaattagatttcttaatttatatattcttagaa

SEQ ID NO: 36934 - DNA, 96 bp, Fusarium azukicola
  misc_feature: 99
ttatctaagagagaagagttagaaagtaaagctaacctctagggtaaggaaggggttagcctctaaggtctagggaagaagtataatggctaacca

SEQ ID NO: 36935 - DNA, 96 bp, Fusarium azukicola
  misc_feature: 99
ttatattatctaagaaaactaattttattcttattttattaggattattttctatttcttttctaaattccttaaattttataatagcttctaact

SEQ ID NO: 36936 - DNA, 96 bp, Fusarium azukicola
  misc_feature: 99
gattattacctaggttttaaataacctagataatagctattctagctatataactaatatctcataagctttaaggagtaatcctaaggcttataa

SEQ ID NO: 36937 - DNA, 96 bp, Fusarium azukicola
  misc_feature: 99
ttataagcaaaatatataaataaaataataaggaaatataataaataagaaataggaacttctaaagtacctattaaatttatagaaagactctta

SEQ ID NO: 36938 - DNA, 96 bp, Fusarium azukicola
  misc_feature: 99
atatatattcctttatattatctaagaaaactgattttattcttattttattaggattattttctatttcttttctaaattccttaaattttataa

SEQ ID NO: 36939 - DNA, 96 bp, Fusarium azukicola
  misc_feature: 99
ttagaaataaccttagctgttattatatataggttatttttctcttttccttatgatattatttttccttgcttatttaaaagaaggacttcttat

SEQ ID NO: 36940 - DNA, 96 bp, Fusarium azukicola
  misc_feature: 99
ttaatttctctccttaaacctttttattactttctaacccttttttctcttctttaacctaacttacttatttattttattctccctctttcttct

SEQ ID NO: 36941 - DNA, 96 bp, Fusarium azukicola
  misc_feature: 99
ttaatatctaaggaaatattatctctaacttctagaggggatttattatttaaagccgaatgcgggcttctattatatatatatacggctggttcc

SEQ ID NO: 36942 - DNA, 96 bp, Fusarium azukicola
  misc_feature: 99
tataattattttttaccttttccttttattttactttaaattttccctctttattaaattaaccctatttactttacccctttatttttctattaa

SEQ ID NO: 36943 - DNA, 96 bp, Fusarium azukicola
  misc_feature: 99
ttaactagaaattcttttctatatataatatgcctagtagcacctatattatatataaaattagttatattatctttattagtagaaaaattaggt

SEQ ID NO: 36944 - DNA, 96 bp, Fusarium azukicola
  misc_feature: 99
atgctagcaagactcttttatcagtggcaatggtagagaagacaactagacaactatcataatggattatactccctacctgttccatcatcatca

SEQ ID NO: 36945 - DNA, 96 bp, Fusarium azukicola
  misc_feature: 99
ctagcaagactcttttatcagtggcaatggtagagaagacaactagacaactatcataatggattatactccctacctgttccatcatcatcatca

SEQ ID NO: 36946 - DNA, 96 bp, Fusarium azukicola
  misc_feature: 99
tcctttgtattatctgagaaaactgattttattcttattttattaggattattttctatttcttttctaaattccttaaattttataatagcttct

SEQ ID NO: 36947 - DNA, 96 bp, Fusarium azukicola
  misc_feature: 99
ctaggtatagcggtctcttccgacggtatttctggaagtgactcgactagaggtgttgatgatgcatgggtgtttgtgctatgaagaagaggatga

SEQ ID NO: 36948 - DNA, 96 bp, Fusarium azukicola
  misc_feature: 99
ataaatatataaataaaaatctctctttaagttttaatagggctatacctcctattttaactaataatctagtagctaagtaattagctgaaaata

SEQ ID NO: 36949 - DNA, 96 bp, Fusarium azukicola
  misc_feature: 99
ataaatataactataaatagagagaataagagtatatctttttcataagcaaaatatataaataaaataataaggaaatataataaataagaaata

SEQ ID NO: 36950 - DNA, 96 bp, Fusarium azukicola
  misc_feature: 99
gaaaaagagaaataaaagagaggaaaaagaaaaaaaaagaaaaaaagataaaaaaagaaagagaaaaataaaaaaaagaaaaataagaaaataata

SEQ ID NO: 36951 - DNA, 96 bp, Fusarium azukicola
  misc_feature: 99
tatcctttctacaaagccattagcttgtttattatgaggcggacttgtattatattttattccattctttatacaatagggccttagcttatatat

SEQ ID NO: 36952 - DNA, 96 bp, Fusarium azukicola
  misc_feature: 99
aaatatataaataaaaatctctctttaagttttaatagggctatacctcctattttaactaataatctagtagctaagtaattagctgaaaatata

SEQ ID NO: 36953 - DNA, 96 bp, Fusarium azukicola
  misc_feature: 99
tatatatttttaactccccttcctctttctccttccttcttttccctcctctttctcttaatcttcttctctttctttcccttttatttttttctt

SEQ ID NO: 36954 - DNA, 96 bp, Fusarium azukicola
  misc_feature: 99
tatatattcctttatattatctaagaaaactgattttattcttattttattaggattattttctatttcttttctaaattccttaaattttataat

SEQ ID NO: 36955 - DNA, 96 bp, Fusarium azukicola
  misc_feature: 99
tatataccttcaattgcttacattgccactttatgccgacactgatcaaactcgacagcacatcgtgacgaacagcgcgacatcaataccctacac

SEQ ID NO: 36956 - DNA, 96 bp, Fusarium azukicola
  misc_feature: 99
tataactattcctattggatttaaagaccttataattaaggatttccttaaggattataaaaagaaacatcctaatagtagtataaatgagctata

SEQ ID NO: 36957 - DNA, 96 bp, Fusarium azukicola
  misc_feature: 99
tataaagctataacccttataagattataactttaaaggaggctattaatattctatattatattactaactatagtaatatatccctataaacta

SEQ ID NO: 36958 - DNA, 96 bp, Fusarium azukicola
  misc_feature: 99
tagggttaggggtagtagttacgttaagggttagggttaattggttgaaattagggttaggggtagtagtagagttaagggttagggttaattggt

SEQ ID NO: 36959 - DNA, 96 bp, Fusarium azukicola
  misc_feature: 99
tagcttttcttgtttcttttctctttcttccttcttagaattaggtttagattcctttttcttagaagtcttatgcaccttattggctttctgagt

SEQ ID NO: 36960 - DNA, 96 bp, Fusarium azukicola
  misc_feature: 99
tagcaatctgggtctttatgacctagcagtttgcaataactgcattttaaggcagttttcttctttttctaaggcttagaagtcttagaaaaatat

SEQ ID NO: 36961 - DNA, 96 bp, Fusarium azukicola
  misc_feature: 99
aatataagagtaagtaaaggcctaagcctaaccctaagtctaaccctaagtctaagtctaagtctaagtctaagtctaaccctaagtctaagtcta

SEQ ID NO: 36962 - DNA, 96 bp, Fusarium azukicola
  misc_feature: 99
cttagatagtaaatactaaccccaactataaccctaaccctagttccggttccggttccggttccggttccggtttctagttagaccgtgcctgta

SEQ ID NO: 36963 - DNA, 96 bp, Fusarium azukicola
  misc_feature: 99
taatttctctccttaaacctttttattactttctaacccttttttctcttctttaacctaacttacttatttattttattctccctctttcttctt

SEQ ID NO: 36964 - DNA, 96 bp, Fusarium azukicola
  misc_feature: 99
agatgggattggcaatgtgctcaattggatgattgagaagatcaatccacactacgtcgagacatgctcccctgctgctaatggatcagacgatta

SEQ ID NO: 36965 - DNA, 96 bp, Fusarium azukicola
  misc_feature: 99
aaacctctattattattatatatcttagtaaaaacccctttattatagacctaatattataagggaaaatctaagattatatagggaaaagtatta

SEQ ID NO: 36966 - DNA, 96 bp, Fusarium azukicola
  misc_feature: 99
gcaatagaggtactatatactaaaactaggttttttaaaaaatcctagaaaattcaaactaactctaaaatagctaaaatttaaagtttagactta

SEQ ID NO: 36967 - DNA, 96 bp, Fusarium azukicola
  misc_feature: 99
cgaacgagacagcatactgtataactaaaaatcgctaaaacctaagtttctaaaaactgctataaaatagctagaaacttaaaaaaagtaatctta

SEQ ID NO: 36968 - DNA, 96 bp, Fusarium azukicola
  misc_feature: 99
taagataatggttagggttaatggattgtagtaaaggttagggggagtaattaagattaaggttagttagagtaatagaaaaggaagagaaggggt

SEQ ID NO: 36969 - DNA, 96 bp, Fusarium azukicola
  misc_feature: 99
agctttaaataataaatcccctctagaagttagagataatatttccttagatattaaggaattaaataaaataaaaacctttaggtctatagttta

SEQ ID NO: 36970 - DNA, 96 bp, Fusarium azukicola
  misc_feature: 99
cttataggatttcacttaattaacctaatctaaaattttaagttatttttaccttaatttgaatttttaaagaattcttttctatttagtgtaaac

SEQ ID NO: 36971 - DNA, 96 bp, Fusarium azukicola
  misc_feature: 99
acactcagagggtattttgggtgcttttggcggtgtttttggcgtctcaggggtcttcgtgaccatcgggttcattaggaccttagtcatattgac

SEQ ID NO: 36972 - DNA, 96 bp, Fusarium azukicola
  misc_feature: 99
actataactacttaaccctaacccttaacttaaccacttaaccctaacctttactataactacttaaccctaacccttaacttaaccacttaaccc

SEQ ID NO: 36973 - DNA, 96 bp, Fusarium azukicola
  misc_feature: 99
ctcctctcctttcctcttcctcttttatttcttttttccctctttcttttcccttctctctctttttattctttatcctcttctctcccctctccc

SEQ ID NO: 36974 - DNA, 96 bp, Fusarium azukicola
  misc_feature: 99
atttacctaacctatagctactataggtagctagatattaagggtattattctaattggttaaaaaggttcctatagacctttatgactgccgtcc

SEQ ID NO: 36975 - DNA, 96 bp, Fusarium azukicola
  misc_feature: 99
ggacaggcagcaggaggaggacgggtcaagcgatgagcgggaggcccaggaggaggcagaggaggaggccacaagcatattccgacgcgtgcgcat

SEQ ID NO: 36976 - DNA, 96 bp, Fusarium azukicola
  misc_feature: 99
atattcctttatattatctgagaaaactgattttattcttattttattaggattattttctatttcttttctaaattccttaaattttataatagc

SEQ ID NO: 36977 - DNA, 96 bp, Fusarium azukicola
  misc_feature: 99
agacgaacgcgaatacaacaagcaagcagatgggattggcaatgtgctcaattggatgattgagaagatcaatccacactacgtcgagacatgctc

SEQ ID NO: 36978 - DNA, 96 bp, Fusarium azukicola
  misc_feature: 99
gagaggataaggagtgaaaagagagagagggagaggggagaggagaggataaggagtgaaaagagagagagggagaggggagaggagaggagaagg

SEQ ID NO: 36979 - DNA, 96 bp, Fusarium azukicola
  misc_feature: 99
cagggtcagctatagatagaagccctctgggcttctatagagattctagagctttctatagaggttagggtcagggtcagggtcatacattgggtc

SEQ ID NO: 36980 - DNA, 96 bp, Fusarium azukicola
  misc_feature: 99
gaatacttctagggcttcttaaggctatttttgcctccctttatctcttatctcttatttcttatttctttatctcttatctcttatcccttatct

SEQ ID NO: 36981 - DNA, 96 bp, Fusarium azukicola
  misc_feature: 99
gaagttaaagactttttaggaatgaatataactataaatagagagaataagagtatatctttttcataagcaaaatatataaataaaataataagg

SEQ ID NO: 36982 - DNA, 96 bp, Fusarium azukicola
  misc_feature: 99
cttttatcagtggcaatggtagagaagacaactagacaactatcataatggattatactccctacctgttccatcatcatcatcatgggtcgtcgt

SEQ ID NO: 36983 - DNA, 96 bp, Fusarium azukicola
  misc_feature: 99
aataagaataaaatcagttttcttagataatacaaaggaatatatatataagctaagaccctattatataaagaatggaataaaatataatataag

SEQ ID NO: 36984 - DNA, 96 bp, Fusarium azukicola
  misc_feature: 99
ctctcttctgcggaaggagtattctcttctatcttgcctctctctcggtcggtctgaatctcttgtcggaattgagcagagaagtctaatggttgg

SEQ ID NO: 36985 - DNA, 96 bp, Fusarium azukicola
  misc_feature: 99
aggaatatatatataagctaagaccctattatataaagaatagaataaaatataatataagtccgccttataataaataagctaatagctttatag

SEQ ID NO: 36986 - DNA, 96 bp, Fusarium azukicola
  misc_feature: 99
aaggaatttttttaaaaatttagaaaaaatatttttaagtcttatatatagctaaatagttaaaatcgtttttttaagtttctagctattttatag

SEQ ID NO: 36987 - DNA, 96 bp, Fusarium azukicola
  misc_feature: 99
ctaggcaataattacttttttaggaatagtaatttctctagcttctagcttatttttaacctcttttatcttattaagatatatttctatattctt

SEQ ID NO: 36988 - DNA, 96 bp, Fusarium azukicola
  misc_feature: 99
cggaagatgcgctttataatctattactaaagccttataaatggcttagttatagcaaaaaccggttttgatggatagaatgcaacgctgaagggt

SEQ ID NO: 36989 - DNA, 96 bp, Fusarium azukicola
  misc_feature: 99
aaggaatttagaaaagaaatagaaaataatcctaataaaataagaataaaatcagttttctcagataatgcaaaggaatatatatataagctaagg

SEQ ID NO: 36990 - DNA, 96 bp, Fusarium azukicola
  misc_feature: 99
ataatgatatataatctattactaaagccttataaatggcttagttatagcaaaaaccggttttaatggatagaatgcaacgctgaagggttttgg

SEQ ID NO: 36991 - DNA, 96 bp, Fusarium azukicola
  misc_feature: 99
aaaatagctaagaattattctttttaggtctataactattttattttagcttttattaagctttaaagttttatgttttagtgcacagtatagctg

SEQ ID NO: 36992 - DNA, 96 bp, Fusarium azukicola
  misc_feature: 99
agtctaacccgatccatgtaagaaaacgctatttatactatctcatactgtacttaactagccgtcccttcgcgataccctcttcctagccataat

SEQ ID NO: 36993 - DNA, 96 bp, Fusarium azukicola
  misc_feature: 99
atatttccttattattttatttatatattttacttataaaaaagatatactcttattctctctatttatagttatatttattcctaaaaagtcttt

SEQ ID NO: 36994 - DNA, 96 bp, Fusarium azukicola
  misc_feature: 99
atatacctaaaaatagagtaaaaattctataatataatatgtggtttatagggatatatcactatagttggtaatataatatagaatattaacact

SEQ ID NO: 36995 - DNA, 96 bp, Fusarium azukicola
  misc_feature: 99
atagtcctatttatcctttctacaaagccattagcttgtttattatgaggcggacttgtattatattttattccattctttatacaatagggcctt

SEQ ID NO: 36996 - DNA, 96 bp, Fusarium azukicola
  misc_feature: 99
atagtaattagttttaattaattagatagtttatagtgtttttatagtgatttatatattaaaggttaagaaaagtgtttaattcgcttatctatt

SEQ ID NO: 36997 - DNA, 96 bp, Fusarium azukicola
  misc_feature: 99
ataaggtacataagacttctaagaaaaaggaatctaaacctaattctaagaaggaagaaagagaaaagaaacaagaaaagctatttatagctaatt

SEQ ID NO: 36998 - DNA, 96 bp, Fusarium azukicola
  misc_feature: 99
aaaggaatatatatataagctaagaccctattatataaagaatagaataaaatataatataagtccgccttataataaataagctaatagctttat

SEQ ID NO: 36999 - DNA, 96 bp, Fusarium azukicola
  misc_feature: 99
ataaaaaacctattatgattttttaaaactttttaaaaaatcccttataaggtagtttagaaaaagaattattcgcactatataaatagctttttt

SEQ ID NO: 37000 - DNA, 96 bp, Fusarium azukicola
  misc_feature: 99
aattctagaaaaaataatttaatcctaaaatagatatactttctagaatagcttattaggcttatatatatttttatagaattttttggagctact

SEQ ID NO: 37001 - DNA, 96 bp, Fusarium azukicola
  misc_feature: 99
agcttttcttgtttcttttctctttcttccttcttagaattaggtttagattcctttttcttagaagtcttatgcaccttattggctttctgagtt

SEQ ID NO: 37002 - DNA, 96 bp, Fusarium azukicola
  misc_feature: 99
agcaagcgccgcactaaactgtataactaaaaatcgttaaatctttaattttaaaaactgctataaaatagctagaaatataaaaaaagtattttt

SEQ ID NO: 37003 - DNA, 96 bp, Fusarium azukicola
  misc_feature: 99
aaggtacataagacttctaagaaaaaggaatctaaacctaattctaagaaggaagaaagagaaaagaaacaagaaaagctatttatagctaattct

SEQ ID NO: 37004 - DNA, 96 bp, Fusarium azukicola
  misc_feature: 99
aaatagagagaataagagtatatcttttttataagtaaaatatataaataaaataataaggaaatataataaataagaaataggaacttctaaagt

SEQ ID NO: 37005 - DNA, 96 bp, Fusarium azukicola
  misc_feature: 99
aaaagcccgcatttagctttaaataataaatcccctctagaagttagagataatatttccttagatattaaggaattagataaaataaaaaccttt

SEQ ID NO: 37006 - DNA, 96 bp, Fusarium cuneirostrum
  misc_feature: 1113
tttcactttcactttcactttcactttcactttcactttcactttcactttcactttcactttcactttcactttcactttcactttcactttcac

SEQ ID NO: 37007 - DNA, 96 bp, Fusarium cuneirostrum
  misc_feature: 1078
agtgaaagtgaaagtgaaagtgaaagtgaaagtgaaagtgaaagtgaaagtgaaagtgaaagtgaaagtgaaagtgaaagtgaaagtgaaagtgaa

SEQ ID NO: 37008 - DNA, 96 bp, Fusarium cuneirostrum
  misc_feature: 1065
cactttcactttcactttcactttcactttcactttcactttcactttcactttcactttcactttcactttcactttcactttcactttcacttt

SEQ ID NO: 37009 - DNA, 96 bp, Fusarium cuneirostrum
  misc_feature: 1049
tcactttcactttcactttcactttcactttcactttcactttcactttcactttcactttcactttcactttcactttcactttcactttcactt

SEQ ID NO: 37010 - DNA, 96 bp, Fusarium cuneirostrum
  misc_feature: 966
actttcactttcactttcactttcactttcactttcactttcactttcactttcactttcactttcactttcactttcactttcactttcactttc

SEQ ID NO: 37011 - DNA, 96 bp, Fusarium cuneirostrum
  misc_feature: 840
ctttcactttcactttcactttcactttcactttcactttcactttcactttcactttcactttcactttcactttcactttcactttcactttca

SEQ ID NO: 37012 - DNA, 96 bp, Fusarium cuneirostrum
  misc_feature: 351
actacgggacacgggacagtgagggacgaacgtgtggactgagtctgcctttagtcagcttgctgacattggcatcccagttggtaaagatgacgg

SEQ ID NO: 37013 - DNA, 96 bp, Fusarium cuneirostrum
  misc_feature: 349
ctacgggacacgggacagtgagggacgaacgtgtggactgagtctgcctttagtcagcttgctgacattggcatcccagttggtaaagatgacgga

SEQ ID NO: 37014 - DNA, 96 bp, Fusarium cuneirostrum
  misc_feature: 319
gactacgggacacgggacagtgagggacgaacgtgtggactgagtctgcctttagtcagcttgctgacattggcatcccagttggtaaagatgacg

SEQ ID NO: 37015 - DNA, 96 bp, Fusarium cuneirostrum
  misc_feature: 311
tacgggacacgggacagtgagggacgaacgtgtggactgagtctgcctttagtcagcttgctgacattggcatcccagttggtaaagatgacggag

SEQ ID NO: 37016 - DNA, 96 bp, Fusarium cuneirostrum
  misc_feature: 288
gagattgtggacggaacgttcgtacctctctcatttgtccgtccaacaaaaccgacctccactcagtcccttcgttcccggtcttacttactccac

SEQ ID NO: 37017 - DNA, 96 bp, Fusarium cuneirostrum
  misc_feature: 286
agattgtggacggaacgttcgtacctctctcatttgtccgtccaacaaaaccgacctccactcagtcccttcgttcccggtcttacttactccact

SEQ ID NO: 37018 - DNA, 96 bp, Fusarium cuneirostrum
  misc_feature: 277
gattgtggacggaacgttcgtacctctctcatttgtccgtccaacaaaaccgacctccactcagtcccttcgttcccggtcttacttactccactt

SEQ ID NO: 37019 - DNA, 96 bp, Fusarium cuneirostrum
  misc_feature: 269
aattctaatctcttttttaattttattttccttatttattatatatatatattctttttttattattttctcttttttttcttttttataattata

SEQ ID NO: 37020 - DNA, 96 bp, Fusarium cuneirostrum
  misc_feature: 262
agatcatgaaatgtgtgaatggaatcaacttcatgaagtgaagatgtaatacggagtagaagacatcatgatggcttcaaataaaaatgatcgagc

SEQ ID NO: 37021 - DNA, 96 bp, Fusarium cuneirostrum
  misc_feature: 259
tgagattgtggacggaacgttcgtacctctctcatttgtccgtccaacaaaaccgacctccactcagtcccttcgttcccggtcttacttactcca

SEQ ID NO: 37022 - DNA, 96 bp, Fusarium cuneirostrum
  misc_feature: 253
tagatcatgaaatgtgtgaatggaatcaacttcatgaagtgaagatgtaatacggagtagaagacatcatgatggcttcaaataaaaatgatcgag

SEQ ID NO: 37023 - DNA, 96 bp, Fusarium cuneirostrum
  misc_feature: 250
attctaatctcttttttaattttattttccttatttattatatatatatattctttttttattattttctcttttttttcttttttataattatat

SEQ ID NO: 37024 - DNA, 96 bp, Fusarium cuneirostrum
  misc_feature: 244
gatcatgaaatgtgtgaatggaatcaacttcatgaagtgaagatgtaatacggagtagaagacatcatgatggcttcaaataaaaatgatcgagcg

SEQ ID NO: 37025 - DNA, 96 bp, Fusarium cuneirostrum
  misc_feature: 234
atgagattgtggacggaacgttcgtacctctctcatttgtccgtccaacaaaaccgacctccactcagtcccttcgttcccggtcttacttactcc

SEQ ID NO: 37026 - DNA, 96 bp, Fusarium cuneirostrum
  misc_feature: 229
acgggacacgggacagtgagggacgaacgtgtggactgagtctgcctttagtcagcttgctgacattggcatcccagttggtaaagatgacggaga

SEQ ID NO: 37027 - DNA, 96 bp, Fusarium cuneirostrum
  misc_feature: 218
ctagatcatgaaatgtgtgaatggaatcaacttcatgaagtgaagatgtaatacggagtagaagacatcatgatggcttcaaataaaaatgatcga

SEQ ID NO: 37028 - DNA, 96 bp, Fusarium cuneirostrum
  misc_feature: 216
ggactacgggacacgggacagtgagggacgaacgtgtggactgagtctgcctttagtcagcttgctgacattggcatcccagttggtaaagatgac

SEQ ID NO: 37029 - DNA, 96 bp, Fusarium cuneirostrum
  misc_feature: 210
ttctaatctcttttttaattttattttccttatttattatatatatatattctttttttattattttctcttttttttcttttttataattatatc

SEQ ID NO: 37030 - DNA, 96 bp, Fusarium cuneirostrum
  misc_feature: 210
ggcgaggtgttgtcagagcacgaggcacgagtgcgtatgactactagatcatgaaatgtgtgaatggaatcaacttcatgaagtgaagatgtaata

SEQ ID NO: 37031 - DNA, 96 bp, Fusarium cuneirostrum
  misc_feature: 206
gcgaggtgttgtcagagcacgaggcacgagtgcgtatgactactagatcatgaaatgtgtgaatggaatcaacttcatgaagtgaagatgtaatac

SEQ ID NO: 37032 - DNA, 96 bp, Fusarium cuneirostrum
  misc_feature: 206
aggcgaggtgttgtcagagcacgaggcacgagtgcgtatgactactagatcatgaaatgtgtgaatggaatcaacttcatgaagtgaagatgtaat

SEQ ID NO: 37033 - DNA, 96 bp, Fusarium cuneirostrum
  misc_feature: 193
taattctaatctcttttttaattttattttccttatttattatatatatatattctttttttattattttctcttttttttcttttttataattat

SEQ ID NO: 37034 - DNA, 96 bp, Fusarium cuneirostrum
  misc_feature: 191
actagatcatgaaatgtgtgaatggaatcaacttcatgaagtgaagatgtaatacggagtagaagacatcatgatggcttcaaataaaaatgatcg

SEQ ID NO: 37035 - DNA, 96 bp, Fusarium cuneirostrum
  misc_feature: 182
cgaggtgttgtcagagcacgaggcacgagtgcgtatgactactagatcatgaaatgtgtgaatggaatcaacttcatgaagtgaagatgtaatacg

SEQ ID NO: 37036 - DNA, 96 bp, Fusarium cuneirostrum
  misc_feature: 176
gtcttctactccgtattacatcttcacttcatgaagttgattccattcacacatttcatgatctagtagtcatacgcactcgtgcctcgtgctctg

SEQ ID NO: 37037 - DNA, 96 bp, Fusarium cuneirostrum
  misc_feature: 173
attgtggacggaacgttcgtacctctctcatttgtccgtccaacaaaaccgacctccactcagtcccttcgttcccggtcttacttactccacttc

SEQ ID NO: 37038 - DNA, 96 bp, Fusarium cuneirostrum
  misc_feature: 173
attaatcgccttcccgcctccgtgattaccatccagagcaatctggaaagcacggcaataatgtggatgatccttaaagatcacagggcagtccgt

SEQ ID NO: 37039 - DNA, 96 bp, Fusarium cuneirostrum
  misc_feature: 172
ttaatcgccttcccgcctccgtgattaccatccagagcaatctggaaagcacggcaataatgtggatgatccttaaagatcacagggcagtccgtc

SEQ ID NO: 37040 - DNA, 96 bp, Fusarium cuneirostrum
  misc_feature: 171
taatcgccttcccgcctccgtgattaccatccagagcaatctggaaagcacggcaataatgtggatgatccttaaagatcacagggcagtccgtct

SEQ ID NO: 37041 - DNA, 96 bp, Fusarium cuneirostrum
  misc_feature: 171
gtcagagcacgaggcacgagtgcgtatgactactagatcatgaaatgtgtgaatggaatcaacttcatgaagtgaagatgtaatacggagtagaag

SEQ ID NO: 37042 - DNA, 96 bp, Fusarium cuneirostrum
  misc_feature: 170
agagcacgaggcacgagtgcgtatgactactagatcatgaaatgtgtgaatggaatcaacttcatgaagtgaagatgtaatacggagtagaagaca

SEQ ID NO: 37043 - DNA, 96 bp, Fusarium cuneirostrum
  misc_feature: 170
tctaatctcttttttaattttattttccttatttattatatatatatattctttttttattattttctcttttttttcttttttataattatatct

SEQ ID NO: 37044 - DNA, 96 bp, Fusarium cuneirostrum
  misc_feature: 170
tataccttttttctctttctttctctttctttctctctcttcctctcttctttatctctctcttcctctttatttctcttttctcttttctctttt

SEQ ID NO: 37045 - DNA, 96 bp, Fusarium cuneirostrum
  misc_feature: 168
aaggcgaggtgttgtcagagcacgaggcacgagtgcgtatgactactagatcatgaaatgtgtgaatggaatcaacttcatgaagtgaagatgtaa

SEQ ID NO: 37046 - DNA, 96 bp, Fusarium cuneirostrum
  misc_feature: 168
tcagagcacgaggcacgagtgcgtatgactactagatcatgaaatgtgtgaatggaatcaacttcatgaagtgaagatgtaatacggagtagaaga

SEQ ID NO: 37047 - DNA, 96 bp, Fusarium cuneirostrum
  misc_feature: 167
gatgactcactcgttcctcgttctccgtcatctttaccaactgggatgccaatgtcagcaagctgactaaaggcagactcagtccacacgttcgtc

SEQ ID NO: 37048 - DNA, 96 bp, Fusarium cuneirostrum
  misc_feature: 164
atcatgaaatgtgtgaatggaatcaacttcatgaagtgaagatgtaatacggagtagaagacatcatgatggcttcaaataaaaatgatcgagcgt

SEQ ID NO: 37049 - DNA, 96 bp, Fusarium cuneirostrum
  misc_feature: 160
ctttatatctatactttattatcttcttttttatttttatttttttccttttttttcttatctcttattttttttctttttatttatttttatatt

SEQ ID NO: 37050 - DNA, 96 bp, Fusarium cuneirostrum
  misc_feature: 159
tgtcagagcacgaggcacgagtgcgtatgactactagatcatgaaatgtgtgaatggaatcaacttcatgaagtgaagatgtaatacggagtagaa

SEQ ID NO: 37051 - DNA, 96 bp, Fusarium cuneirostrum
  misc_feature: 158
tttatatctatactttattatcttcttttttatttttatttttttccttttttttcttatctcttattttttttctttttatttatttttatattt

SEQ ID NO: 37052 - DNA, 96 bp, Fusarium cuneirostrum
  misc_feature: 157
tgactcactcgttcctcgttctccgtcatctttaccaactgggatgccaatgtcagcaagctgactaaaggcagactcagtccacacgttcgtccc

SEQ ID NO: 37053 - DNA, 96 bp, Fusarium cuneirostrum
  misc_feature: 157
cgcagacagagtcgaggagtataagacagcgtcttttcccccgagaggttgagtgagcaggcgaactctgacttgttttatttttttcgaggacgg

SEQ ID NO: 37054 - DNA, 96 bp, Fusarium cuneirostrum
  misc_feature: 154
aatcgccttcccgcctccgtgattaccatccagagcaatctggaaagcacggcaataatgtggatgatccttaaagatcacagggcagtccgtctt

SEQ ID NO: 37055 - DNA, 96 bp, Fusarium cuneirostrum
  misc_feature: 148
ttgtcagagcacgaggcacgagtgcgtatgactactagatcatgaaatgtgtgaatggaatcaacttcatgaagtgaagatgtaatacggagtaga

SEQ ID NO: 37056 - DNA, 96 bp, Fusarium cuneirostrum
  misc_feature: 148
atgactcactcgttcctcgttctccgtcatctttaccaactgggatgccaatgtcagcaagctgactaaaggcagactcagtccacacgttcgtcc

SEQ ID NO: 37057 - DNA, 96 bp, Fusarium cuneirostrum
  misc_feature: 148
ctctcatttgtccgtccaacaaaaccgacctccactcagtcccttcgttcccggtcttacttactccacttcatactcgtccctcgtctgagtggc

SEQ ID NO: 37058 - DNA, 96 bp, Fusarium cuneirostrum
  misc_feature: 147
gagcacgaggcacgagtgcgtatgactactagatcatgaaatgtgtgaatggaatcaacttcatgaagtgaagatgtaatacggagtagaagacat

SEQ ID NO: 37059 - DNA, 96 bp, Fusarium cuneirostrum
  misc_feature: 146
tctcatttgtccgtccaacaaaaccgacctccactcagtcccttcgttcccggtcttacttactccacttcatactcgtccctcgtctgagtggct

SEQ ID NO: 37060 - DNA, 96 bp, Fusarium cuneirostrum
  misc_feature: 146
gactcactcgttcctcgttctccgtcatctttaccaactgggatgccaatgtcagcaagctgactaaaggcagactcagtccacacgttcgtccct

SEQ ID NO: 37061 - DNA, 96 bp, Fusarium cuneirostrum
  misc_feature: 145
ttatatctatactttattatcttcttttttatttttatttttttccttttttttcttatctcttattttttttctttttatttatttttatattta

SEQ ID NO: 37062 - DNA, 96 bp, Fusarium cuneirostrum
  misc_feature: 145
tagccactcagacgagggacgagtatgaagtggagtaagtaagaccgggaacgaagggactgagtggaggtcggttttgttggacggacaaatgag

SEQ ID NO: 37063 - DNA, 96 bp, Fusarium cuneirostrum
  misc_feature: 145
gatttagttgcctttcttagtagttgtgatagcttcatttatctttatgcgagcacttatctggaaccaacagctcgccgtaatgaatccaaaaag

SEQ ID NO: 37064 - DNA, 96 bp, Fusarium cuneirostrum
  misc_feature: 145
gaacgtgtggactgagtctgcctttagtcagcttgctgacattggcatcccagttggtaaagatgacggagaacgaggaacgagtgagtcatcagg

SEQ ID NO: 37065 - DNA, 96 bp, Fusarium cuneirostrum
  misc_feature: 144
gaggtgttgtcagagcacgaggcacgagtgcgtatgactactagatcatgaaatgtgtgaatggaatcaacttcatgaagtgaagatgtaatacgg

SEQ ID NO: 37066 - DNA, 96 bp, Fusarium cuneirostrum
  misc_feature: 143
cgaacgtgtggactgagtctgcctttagtcagcttgctgacattggcatcccagttggtaaagatgacggagaacgaggaacgagtgagtcatcag

SEQ ID NO: 37067 - DNA, 96 bp, Fusarium cuneirostrum
  misc_feature: 140
cgggacacgggacagtgagggacgaacgtgtggactgagtctgcctttagtcagcttgctgacattggcatcccagttggtaaagatgacggagaa

SEQ ID NO: 37068 - DNA, 96 bp, Fusarium cuneirostrum
  misc_feature: 140
gcacgaggcacgagtgcgtatgactactagatcatgaaatgtgtgaatggaatcaacttcatgaagtgaagatgtaatacggagtagaagacatca

SEQ ID NO: 37069 - DNA, 96 bp, Fusarium cuneirostrum
  misc_feature: 139
gcagacagagtcgaggagtataagacagcgtcttttcccccgagaggttgagtgagcaggcgaactctgacttgttttatttttttcgaggacgga

SEQ ID NO: 37070 - DNA, 96 bp, Fusarium cuneirostrum
  misc_feature: 139
taaggcgaggtgttgtcagagcacgaggcacgagtgcgtatgactactagatcatgaaatgtgtgaatggaatcaacttcatgaagtgaagatgta

SEQ ID NO: 37071 - DNA, 96 bp, Fusarium cuneirostrum
  misc_feature: 139
ggttttgttggacggacaaatgagagaggtacgaacgttccgtccacaatctcataccccgcagacagagtcgaggagtataagacagcgtctttt

SEQ ID NO: 37072 - DNA, 96 bp, Fusarium cuneirostrum
  misc_feature: 139
agcacgaggcacgagtgcgtatgactactagatcatgaaatgtgtgaatggaatcaacttcatgaagtgaagatgtaatacggagtagaagacatc

SEQ ID NO: 37073 - DNA, 96 bp, Fusarium cuneirostrum
  misc_feature: 139
actcactcgttcctcgttctccgtcatctttaccaactgggatgccaatgtcagcaagctgactaaaggcagactcagtccacacgttcgtccctc

SEQ ID NO: 37074 - DNA, 96 bp, Fusarium cuneirostrum
  misc_feature: 138
ccgaacggaagtgaggggacaggaggcccagagggccgacaagaatccatttcaaaatttgtacaaattttgtatgggaagatttctgagattgta

SEQ ID NO: 37075 - DNA, 96 bp, Fusarium cuneirostrum
  misc_feature: 138
ctaattctaatctcttttttaattttattttccttatttattatatatatatattctttttttattattttctcttttttttcttttttataatta

SEQ ID NO: 37076 - DNA, 96 bp, Fusarium cuneirostrum
  misc_feature: 138
aacgtgtggactgagtctgcctttagtcagcttgctgacattggcatcccagttggtaaagatgacggagaacgaggaacgagtgagtcatcaggc

SEQ ID NO: 37077 - DNA, 96 bp, Fusarium cuneirostrum
  misc_feature: 137
caggacatgacgagccggtgggtgagtagtaacggagtaactgtacatcgcaagactcaaaatctaccggattttgggacttttcagaaactggca

SEQ ID NO: 37078 - DNA, 96 bp, Fusarium cuneirostrum
  misc_feature: 137
gttgtcagagcacgaggcacgagtgcgtatgactactagatcatgaaatgtgtgaatggaatcaacttcatgaagtgaagatgtaatacggagtag

SEQ ID NO: 37079 - DNA, 96 bp, Fusarium cuneirostrum
  misc_feature: 136
catagccactcagacgagggacgagtatgaagtggagtaagtaagaccgggaacgaagggactgagtggaggtcggttttgttggacggacaaatg

SEQ ID NO: 37080 - DNA, 96 bp, Fusarium cuneirostrum
  misc_feature: 136
atttagttgcctttcttagtagttgtgatagcttcatttatctttatgcgagcacttatctggaaccaacagctcgccgtaatgaatccaaaaagt

SEQ ID NO: 37081 - DNA, 96 bp, Fusarium cuneirostrum
  misc_feature: 135
tatgagattgtggacggaacgttcgtacctctctcatttgtccgtccaacaaaaccgacctccactcagtcccttcgttcccggtcttacttactc

SEQ ID NO: 37082 - DNA, 96 bp, Fusarium cuneirostrum
  misc_feature: 135
tatatctatactttattatcttcttttttatttttatttttttccttttttttcttatctcttattttttttctttttatttatttttatatttat

SEQ ID NO: 37083 - DNA, 96 bp, Fusarium cuneirostrum
  misc_feature: 134
agaaattaaaaaaaaaaagaaatattaaaaagaaaagaaaaaagaaaaaagaatcaagaattaaaaataaataaataattaaaagaaaaaaaaaaa

SEQ ID NO: 37084 - DNA, 96 bp, Fusarium cuneirostrum
  misc_feature: 134
cgaacggaagtgaggggacaggaggcccagagggccgacaagaatccatttcaaaatttgtacaaattttgtatgggaagatttctgagattgtat

SEQ ID NO: 37085 - DNA, 96 bp, Fusarium cuneirostrum
  misc_feature: 133
cgttgttgcggtaaactcgtcctccgtcctcgaaaaaaataaaacaagtcagagttcgcctgctcactcaacctctcgggggaaaagacgctgtct

SEQ ID NO: 37086 - DNA, 96 bp, Fusarium cuneirostrum
  misc_feature: 131
tcatttgtccgtccaacaaaaccgacctccactcagtcccttcgttcccggtcttacttactccacttcatactcgtccctcgtctgagtggctat

SEQ ID NO: 37087 - DNA, 96 bp, Fusarium cuneirostrum
  misc_feature: 131
acaggacatgacgagccggtgggtgagtagtaacggagtaactgtacatcgcaagactcaaaatctaccggattttgggacttttcagaaactggc

SEQ ID NO: 37088 - DNA, 96 bp, Fusarium cuneirostrum
  misc_feature: 130
gttgttgcggtaaactcgtcctccgtcctcgaaaaaaataaaacaagtcagagttcgcctgctcactcaacctctcgggggaaaagacgctgtctt

SEQ ID NO: 37089 - DNA, 96 bp, Fusarium cuneirostrum
  misc_feature: 130
aggacatgacgagccggtgggtgagtagtaacggagtaactgtacatcgcaagactcaaaatctaccggattttgggacttttcagaaactggcac

SEQ ID NO: 37090 - DNA, 96 bp, Fusarium cuneirostrum
  misc_feature: 129
gacaggacatgacgagccggtgggtgagtagtaacggagtaactgtacatcgcaagactcaaaatctaccggattttgggacttttcagaaactgg

SEQ ID NO: 37091 - DNA, 96 bp, Fusarium cuneirostrum
  misc_feature: 127
tttagttgcctttcttagtagttgtgatagcttcatttatctttatgcgagcacttatctggaaccaacagctcgccgtaatgaatccaaaaagta

SEQ ID NO: 37092 - DNA, 96 bp, Fusarium cuneirostrum
  misc_feature: 127
ggaataaacagaactgattccagtcgaaatcagactcgactccgtctcacacaaaaaaataaatacagtctcaagtcttcgactgcgtcctcgcag

SEQ ID NO: 37093 - DNA, 96 bp, Fusarium cuneirostrum
  misc_feature: 127
acgttgttgcggtaaactcgtcctccgtcctcgaaaaaaataaaacaagtcagagttcgcctgctcactcaacctctcgggggaaaagacgctgtc

SEQ ID NO: 37094 - DNA, 96 bp, Fusarium cuneirostrum
  misc_feature: 126
tataaagagaagaatataaaatagaataaaggaaataaaagaaaagaaaaataaagggttagggttagggttagggttagggttagggttagggtt

SEQ ID NO: 37095 - DNA, 96 bp, Fusarium cuneirostrum
  misc_feature: 126
gttttgttggacggacaaatgagagaggtacgaacgttccgtccacaatctcataccccgcagacagagtcgaggagtataagacagcgtcttttc

SEQ ID NO: 37096 - DNA, 96 bp, Fusarium cuneirostrum
  misc_feature: 126
cagacagagtcgaggagtataagacagcgtcttttcccccgagaggttgagtgagcaggcgaactctgacttgttttatttttttcgaggacggag

SEQ ID NO: 37097 - DNA, 96 bp, Fusarium cuneirostrum
  misc_feature: 125
tcatgaaatgtgtgaatggaatcaacttcatgaagtgaagatgtaatacggagtagaagacatcatgatggcttcaaataaaaatgatcgagcgta

SEQ ID NO: 37098 - DNA, 96 bp, Fusarium cuneirostrum
  misc_feature: 125
gaccgaacggaagtgaggggacaggaggcccagagggccgacaagaatccatttcaaaatttgtacaaattttgtatgggaagatttctgagattg

SEQ ID NO: 37099 - DNA, 96 bp, Fusarium cuneirostrum
  misc_feature: 125
cctaccggtccgggtccacatacgtcctcgtgccctgcatctcggctcattccatttcattcatgtgcgacgaagccatcgtcgagtagaaaaaag

SEQ ID NO: 37100 - DNA, 96 bp, Fusarium cuneirostrum
  misc_feature: 125
aaagagaaaagagaaaagagaaataaagaggaagagagagataaagaagagaggaagagagagaaagaaagagaaagaaagagaaaaaaggtatag

SEQ ID NO: 37101 - DNA, 96 bp, Fusarium cuneirostrum
  misc_feature: 124
ttccggtaagtctcacaaagcatcgttggagttactcctccacacttgacccaactcaaacacagcatcatcaaatctacttcgaaactcccttct

SEQ ID NO: 37102 - DNA, 96 bp, Fusarium cuneirostrum
  misc_feature: 124
cattaatcgccttcccgcctccgtgattaccatccagagcaatctggaaagcacggcaataatgtggatgatccttaaagatcacagggcagtccg

SEQ ID NO: 37103 - DNA, 96 bp, Fusarium cuneirostrum
  misc_feature: 124
cacgaggcacgagtgcgtatgactactagatcatgaaatgtgtgaatggaatcaacttcatgaagtgaagatgtaatacggagtagaagacatcat

SEQ ID NO: 37104 - DNA, 96 bp, Fusarium cuneirostrum
  misc_feature: 124
caataacagttcactcttctcgttcacaaatgcacaatcaattcaaatcacaagtcatacatcaaagtcatgtctgctcgcataaaatagtaattg

SEQ ID NO: 37105 - DNA, 96 bp, Fusarium cuneirostrum
  misc_feature: 123
ccgcagacagagtcgaggagtataagacagcgtcttttcccccgagaggttgagtgagcaggcgaactctgacttgttttatttttttcgaggacg

SEQ ID NO: 37106 - DNA, 96 bp, Fusarium cuneirostrum
  misc_feature: 122
accgaacggaagtgaggggacaggaggcccagagggccgacaagaatccatttcaaaatttgtacaaattttgtatgggaagatttctgagattgt

SEQ ID NO: 37107 - DNA, 96 bp, Fusarium cuneirostrum
  misc_feature: 121
ccctaccggtccgggtccacatacgtcctcgtgccctgcatctcggctcattccatttcattcatgtgcgacgaagccatcgtcgagtagaaaaaa

SEQ ID NO: 37108 - DNA, 96 bp, Fusarium cuneirostrum
  misc_feature: 121
acgaacgtgtggactgagtctgcctttagtcagcttgctgacattggcatcccagttggtaaagatgacggagaacgaggaacgagtgagtcatca

SEQ ID NO: 37109 - DNA, 96 bp, Fusarium cuneirostrum
  misc_feature: 121
gtaagctctaggtttttcagcctcgctccctacctacttagtactcgctctaaaatctacgtaattgaagtcatcatcacttccacatcaggcaac

SEQ ID NO: 37110 - DNA, 96 bp, Fusarium cuneirostrum
  misc_feature: 120
gtgatttagttgcctttcttagtagttgtgatagcttcatttatctttatgcgagcacttatctggaaccaacagctcgccgtaatgaatccaaaa

SEQ ID NO: 37111 - DNA, 96 bp, Fusarium cuneirostrum
  misc_feature: 120
atcatgatgtcttctactccgtattacatcttcacttcatgaagttgattccattcacacatttcatgatctagtagtcatacgcactcgtgcctc

SEQ ID NO: 37112 - DNA, 96 bp, Fusarium cuneirostrum
  misc_feature: 119
tgatttagttgcctttcttagtagttgtgatagcttcatttatctttatgcgagcacttatctggaaccaacagctcgccgtaatgaatccaaaaa

SEQ ID NO: 37113 - DNA, 96 bp, Fusarium cuneirostrum
  misc_feature: 119
tactagatcatgaaatgtgtgaatggaatcaacttcatgaagtgaagatgtaatacggagtagaagacatcatgatggcttcaaataaaaatgatc

SEQ ID NO: 37114 - DNA, 96 bp, Fusarium cuneirostrum
  misc_feature: 118
ttgtggacggaacgttcgtacctctctcatttgtccgtccaacaaaaccgacctccactcagtcccttcgttcccggtcttacttactccacttca

SEQ ID NO: 37115 - DNA, 96 bp, Fusarium cuneirostrum
  misc_feature: 117
actacgggacacgggacagtgaagaatgaacgtgtgtacccaggagtaatcgtcttgagtcagcttgctgaccttgacgaccccagtcaatagaca

SEQ ID NO: 37116 - DNA, 96 bp, Fusarium cuneirostrum
  misc_feature: 117
gagaagggagtttcgaagtagatttgatgatgctgtgtttgagttgggtcaagtgtggaggagtaactccaacgatgctttgtgagacttaccgga

SEQ ID NO: 37117 - DNA, 96 bp, Fusarium cuneirostrum
  misc_feature: 117
gggactacgggacacgggacagtgagggacgaacgtgtggactgagtctgcctttagtcagcttgctgacattggcatcccagttggtaaagatga

SEQ ID NO: 37118 - DNA, 96 bp, Fusarium cuneirostrum
  misc_feature: 117
ggtgttgtcagagcacgaggcacgagtgcgtatgactactagatcatgaaatgtgtgaatggaatcaacttcatgaagtgaagatgtaatacggag

SEQ ID NO: 37119 - DNA, 96 bp, Fusarium cuneirostrum
  misc_feature: 117
agatagatgcaatgtgaacttggtgagatttgtagagttgcctgatgtggaagtgatgatgacttcaattacgtagattttagagcgagtactaag

SEQ ID NO: 37120 - DNA, 96 bp, Fusarium cuneirostrum
  misc_feature: 117
acgaggcacgagtgcgtatgactactagatcatgaaatgtgtgaatggaatcaacttcatgaagtgaagatgtaatacggagtagaagacatcatg

SEQ ID NO: 37121 - DNA, 96 bp, Fusarium cuneirostrum
  misc_feature: 117
catatctggaagatgaagtgaaggatgaacgcaatgctaatagcaaacaggagcggagcgactggaatgatcgaacggagagagcttgtcaacttt

SEQ ID NO: 37122 - DNA, 96 bp, Fusarium cuneirostrum
  misc_feature: 116
ctaccggtccgggtccacatacgtcctcgtgccctgcatctcggctcattccatttcattcatgtgcgacgaagccatcgtcgagtagaaaaaaga

SEQ ID NO: 37123 - DNA, 96 bp, Fusarium cuneirostrum
  misc_feature: 116
gaaattaaaaaaaaaaagaaatattaaaaagaaaagaaaaaagaaaaaagaatcaagaattaaaaataaataaataattaaaagaaaaaaaaaaag

SEQ ID NO: 37124 - DNA, 96 bp, Fusarium cuneirostrum
  misc_feature: 115
tgttgtcagagcacgaggcacgagtgcgtatgactactagatcatgaaatgtgtgaatggaatcaacttcatgaagtgaagatgtaatacggagta

SEQ ID NO: 37125 - DNA, 96 bp, Fusarium cuneirostrum
  misc_feature: 115
aggtgttgtcagagcacgaggcacgagtgcgtatgactactagatcatgaaatgtgtgaatggaatcaacttcatgaagtgaagatgtaatacgga

SEQ ID NO: 37126 - DNA, 96 bp, Fusarium cuneirostrum
  misc_feature: 115
gtggaataaacagaactgattccagtcgaaatcagactcgactccgtctcacacaaaaaaataaatacagtctcaagtcttcgactgcgtcctcgc

SEQ ID NO: 37127 - DNA, 96 bp, Fusarium cuneirostrum
  misc_feature: 114
agacagagtcgaggagtataagacagcgtcttttcccccgagaggttgagtgagcaggcgaactctgacttgttttatttttttcgaggacggagg

SEQ ID NO: 37128 - DNA, 96 bp, Fusarium cuneirostrum
  misc_feature: 114
ataaggcgaggtgttgtcagagcacgaggcacgagtgcgtatgactactagatcatgaaatgtgtgaatggaatcaacttcatgaagtgaagatgt

SEQ ID NO: 37129 - DNA, 96 bp, Fusarium cuneirostrum
  misc_feature: 113
acaataacagttcactcttctcgttcacaaatgcacaatcaattcaaatcacaagtcatacatcaaagtcatgtctgctcgcataaaatagtaatt

SEQ ID NO: 37130 - DNA, 96 bp, Fusarium cuneirostrum
  misc_feature: 112
acgtgtggactgagtctgcctttagtcagcttgctgacattggcatcccagttggtaaagatgacggagaacgaggaacgagtgagtcatcaggca

SEQ ID NO: 37131 - DNA, 96 bp, Fusarium cuneirostrum
  misc_feature: 112
tccctttcactttcactttcactttcactttcactttcactttcactttcactttcactttcactttcactttcactttcactttcactttcactt

SEQ ID NO: 37132 - DNA, 96 bp, Fusarium cuneirostrum
  misc_feature: 112
taaagttgacaagctctctccgttcgatcattccagtcgctccgctcctgtttgctattagcattgcgttcatccttcacttcatcttccagatat

SEQ ID NO: 37133 - DNA, 96 bp, Fusarium cuneirostrum
  misc_feature: 112
ggcgaactctgacttgttttatttttttcgaggacggaggacgagtttaccgcaacaacgtgaggagacgaacagagtgagtttgtattctatccg

SEQ ID NO: 37134 - DNA, 96 bp, Fusarium cuneirostrum
  misc_feature: 112
cctttcactttcactttcactttcactttcactttcactttcactttcactttcactttcactttcactttcactttcactttcactttcactttc

SEQ ID NO: 37135 - DNA, 96 bp, Fusarium cuneirostrum
  misc_feature: 112
acagacatcacacagagatggtgatgacttcaattgacagcagtcaaacatgaatgcaggatgcgactgaagtgagtgcacgaggagaaataaaag

SEQ ID NO: 37136 - DNA, 96 bp, Fusarium cuneirostrum
  misc_feature: 111
gagaaattaaaaaaaaaaagaaatattaaaaagaaaagaaaaaagaaaaaagaatcaagaattaaaaataaataaataattaaaagaaaaaaaaaa

SEQ ID NO: 37137 - DNA, 96 bp, Fusarium cuneirostrum
  misc_feature: 111
cgaggcacgagtgcgtatgactactagatcatgaaatgtgtgaatggaatcaacttcatgaagtgaagatgtaatacggagtagaagacatcatga

SEQ ID NO: 37138 - DNA, 96 bp, Fusarium cuneirostrum
  misc_feature: 111
agtaagtaagaccgggaacgaagggactgagtggaggtcggttttgttggacggacaaatgagagaggtacgaacgttccgtccacaatctcatac

SEQ ID NO: 37139 - DNA, 96 bp, Fusarium cuneirostrum
  misc_feature: 111
gatagatgcaatgtgaacttggtgagatttgtagagttgcctgatgtggaagtgatgatgacttcaattacgtagattttagagcgagtactaagt

SEQ ID NO: 37140 - DNA, 96 bp, Fusarium cuneirostrum
  misc_feature: 110
tgtaagctctaggtttttcagcctcgctccctacctacttagtactcgctctaaaatctacgtaattgaagtcatcatcacttccacatcaggcaa

SEQ ID NO: 37141 - DNA, 96 bp, Fusarium cuneirostrum
  misc_feature: 110
tctctcatttgtccgtccaacaaaaccgacctccactcagtcccttcgttcccggtcttacttactccacttcatactcgtccctcgtctgagtgg

SEQ ID NO: 37142 - DNA, 96 bp, Fusarium cuneirostrum
  misc_feature: 110
ctgcggggtatgagattgtggacggaacgttcgtacctctctcatttgtccgtccaacaaaaccgacctccactcagtcccttcgttcccggtctt

SEQ ID NO: 37143 - DNA, 96 bp, Fusarium cuneirostrum
  misc_feature: 110
ctacgggacacgggacagtgaagaatgaacgtgtgtacccaggagtaatcgtcttgagtcagcttgctgaccttgacgaccccagtcaatagacat

SEQ ID NO: 37144 - DNA, 96 bp, Fusarium cuneirostrum
  misc_feature: 110
cggttttgttggacggacaaatgagagaggtacgaacgttccgtccacaatctcataccccgcagacagagtcgaggagtataagacagcgtcttt

SEQ ID NO: 37145 - DNA, 96 bp, Fusarium cuneirostrum
  misc_feature: 109
gcgaactctgacttgttttatttttttcgaggacggaggacgagtttaccgcaacaacgtgaggagacgaacagagtgagtttgtattctatccgg

SEQ ID NO: 37146 - DNA, 96 bp, Fusarium cuneirostrum
  misc_feature: 109
gaataaacagaactgattccagtcgaaatcagactcgactccgtctcacacaaaaaaataaatacagtctcaagtcttcgactgcgtcctcgcagg

SEQ ID NO: 37147 - DNA, 96 bp, Fusarium cuneirostrum
  misc_feature: 109
aataacagttcactcttctcgttcacaaatgcacaatcaattcaaatcacaagtcatacatcaaagtcatgtctgctcgcataaaatagtaattgg

SEQ ID NO: 37148 - DNA, 96 bp, Fusarium cuneirostrum
  misc_feature: 108
ttttgttggacggacaaatgagagaggtacgaacgttccgtccacaatctcataccccgcagacagagtcgaggagtataagacagcgtcttttcc

SEQ ID NO: 37149 - DNA, 96 bp, Fusarium cuneirostrum
  misc_feature: 108
gactacgggacacgggacagtgaagaatgaacgtgtgtacccaggagtaatcgtcttgagtcagcttgctgaccttgacgaccccagtcaatagac

SEQ ID NO: 37150 - DNA, 96 bp, Fusarium cuneirostrum
  misc_feature: 108
attccggtaagtctcacaaagcatcgttggagttactcctccacacttgacccaactcaaacacagcatcatcaaatctacttcgaaactcccttc

SEQ ID NO: 37151 - DNA, 96 bp, Fusarium cuneirostrum
  misc_feature: 108
atgcctgatgactcactcgttcctcgttctccgtcatctttaccaactgggatgccaatgtcagcaagctgactaaaggcagactcagtccacacg

SEQ ID NO: 37152 - DNA, 96 bp, Fusarium cuneirostrum
  misc_feature: 107
cccctaccggtccgggtccacatacgtcctcgtgccctgcatctcggctcattccatttcattcatgtgcgacgaagccatcgtcgagtagaaaaa

SEQ ID NO: 37153 - DNA, 96 bp, Fusarium cuneirostrum
  misc_feature: 107
gatatgtgagcacaaccgagagagtagtggagcgaacactaaataaaaggctccaacagaagtgagcgacacgtaattgtgatgttgtgcgtataa

SEQ ID NO: 37154 - DNA, 96 bp, Fusarium cuneirostrum
  misc_feature: 107
gggacacgggacagtgagggacgaacgtgtggactgagtctgcctttagtcagcttgctgacattggcatcccagttggtaaagatgacggagaac

SEQ ID NO: 37155 - DNA, 96 bp, Fusarium cuneirostrum
  misc_feature: 107
catcttcacttcatgaagttgattccattcacacatttcatgatctagtagtcatacgcactcgtgcctcgtgctctgacaacacctcgccttatg

SEQ ID NO: 37156 - DNA, 96 bp, Fusarium cuneirostrum
  misc_feature: 106
cctaattctaatctcttttttaattttattttccttatttattatatatatatattctttttttattattttctcttttttttcttttttataatt

SEQ ID NO: 37157 - DNA, 96 bp, Fusarium cuneirostrum
  misc_feature: 106
caattacaattacaattacaatcagtcacgatggctcgccattagggagggaaatggtgctcgacaagtttaaagaagtgtatttaaatgttattg

SEQ ID NO: 37158 - DNA, 96 bp, Fusarium cuneirostrum
  misc_feature: 105
atatgtgagcacaaccgagagagtagtggagcgaacactaaataaaaggctccaacagaagtgagcgacacgtaattgtgatgttgtgcgtataaa

SEQ ID NO: 37159 - DNA, 96 bp, Fusarium cuneirostrum
  misc_feature: 105
ttgttgcggtaaactcgtcctccgtcctcgaaaaaaataaaacaagtcagagttcgcctgctcactcaacctctcgggggaaaagacgctgtctta

SEQ ID NO: 37160 - DNA, 96 bp, Fusarium cuneirostrum
  misc_feature: 105
tgcgaggacgcagtcgaagacttgagactgtatttatttttttgtgtgagacggagtcgagtctgatttcgactggaatcagttctgtttattcca

SEQ ID NO: 37161 - DNA, 96 bp, Fusarium cuneirostrum
  misc_feature: 105
tgagaagggagtttcgaagtagatttgatgatgctgtgtttgagttgggtcaagtgtggaggagtaactccaacgatgctttgtgagacttaccgg

SEQ ID NO: 37162 - DNA, 96 bp, Fusarium cuneirostrum
  misc_feature: 105
ctaaagttgacaagctctctccgttcgatcattccagtcgctccgctcctgtttgctattagcattgcgttcatccttcacttcatcttccagata

SEQ ID NO: 37163 - DNA, 96 bp, Fusarium cuneirostrum
  misc_feature: 105
taagctctaggtttttcagcctcgctccctacctacttagtactcgctctaaaatctacgtaattgaagtcatcatcacttccacatcaggcaact

SEQ ID NO: 37164 - DNA, 96 bp, Fusarium cuneirostrum
  misc_feature: 104
gtgttgtcagagcacgaggcacgagtgcgtatgactactagatcatgaaatgtgtgaatggaatcaacttcatgaagtgaagatgtaatacggagt

SEQ ID NO: 37165 - DNA, 96 bp, Fusarium cuneirostrum
  misc_feature: 104
aattacaattacaattacaatcagtcacgatggctcgccattagggagggaaatggtgctcgacaagtttaaagaagtgtatttaaatgttattgt

SEQ ID NO: 37166 - DNA, 96 bp, Fusarium cuneirostrum
  misc_feature: 103
taagagaaattaaaaaaaaaaagaaatattaaaaagaaaagaaaaaagaaaaaagaatcaagaattaaaaataaataaataattaaaagaaaaaaa

SEQ ID NO: 37167 - DNA, 96 bp, Fusarium cuneirostrum
  misc_feature: 103
aagctctaggtttttcagcctcgctccctacctacttagtactcgctctaaaatctacgtaattgaagtcatcatcacttccacatcaggcaactc

SEQ ID NO: 37168 - DNA, 96 bp, Fusarium cuneirostrum
  misc_feature: 103
attacaattacaattacaatcagtcacgatggctcgccattagggagggaaatggtgctcgacaagtttaaagaagtgtatttaaatgttattgtc

SEQ ID NO: 37169 - DNA, 96 bp, Fusarium cuneirostrum
  misc_feature: 103
gaacggaagtgaggggacaggaggcccagagggccgacaagaatccatttcaaaatttgtacaaattttgtatgggaagatttctgagattgtatg

SEQ ID NO: 37170 - DNA, 96 bp, Fusarium cuneirostrum
  misc_feature: 103
acatatctggaagatgaagtgaaggatgaacgcaatgctaatagcaaacaggagcggagcgactggaatgatcgaacggagagagcttgtcaactt

SEQ ID NO: 37171 - DNA, 96 bp, Fusarium cuneirostrum
  misc_feature: 102
tctacactaaaaatctccaagatcgtcatcgacccattcatcaccaaactcgtccacaccctcgacgagtgtcttcacctcttctacagccctcgg

SEQ ID NO: 37172 - DNA, 96 bp, Fusarium cuneirostrum
  misc_feature: 102
tacgggacacgggacagtgaagaatgaacgtgtgtacccaggagtaatcgtcttgagtcagcttgctgaccttgacgaccccagtcaatagacatc

SEQ ID NO: 37173 - DNA, 96 bp, Fusarium cuneirostrum
  misc_feature: 102
gcatagccactcagacgagggacgagtatgaagtggagtaagtaagaccgggaacgaagggactgagtggaggtcggttttgttggacggacaaat

SEQ ID NO: 37174 - DNA, 96 bp, Fusarium cuneirostrum
  misc_feature: 102
gaactctgacttgttttatttttttcgaggacggaggacgagtttaccgcaacaacgtgaggagacgaacagagtgagtttgtattctatccggag

SEQ ID NO: 37175 - DNA, 96 bp, Fusarium cuneirostrum
  misc_feature: 101
aaattaaaaaaaaaaagaaatattaaaaagaaaagaaaaaagaaaaaagaatcaagaattaaaaataaataaataattaaaagaaaaaaaaaaaga

SEQ ID NO: 37176 - DNA, 96 bp, Fusarium cuneirostrum
  misc_feature: 101
tatgtgagcacaaccgagagagtagtggagcgaacactaaataaaaggctccaacagaagtgagcgacacgtaattgtgatgttgtgcgtataaat

SEQ ID NO: 37177 - DNA, 96 bp, Fusarium cuneirostrum
  misc_feature: 101
atagatgcaatgtgaacttggtgagatttgtagagttgcctgatgtggaagtgatgatgacttcaattacgtagattttagagcgagtactaagta

SEQ ID NO: 37178 - DNA, 96 bp, Fusarium cuneirostrum
  misc_feature: 100
gaggcaaataataatttaaataaactcgtttgacgagccctggttattctttttattagattagtgagcatgatgttactgtagatggagttgtga

SEQ ID NO: 37179 - DNA, 96 bp, Fusarium cuneirostrum
  misc_feature: 100
ctaatctcttttttaattttattttccttatttattatatatatatattctttttttattattttctcttttttttcttttttataattatatctt

SEQ ID NO: 37180 - DNA, 96 bp, Fusarium cuneirostrum
  misc_feature: 99
atgactactagatcatgaaatgtgtgaatggaatcaacttcatgaagtgaagatgtaatacggagtagaagacatcatgatggcttcaaataaaaa

SEQ ID NO: 37181 - DNA, 96 bp, Fusarium cuneirostrum
  misc_feature: 99
gacacgggacagtgagggacgaacgtgtggactgagtctgcctttagtcagcttgctgacattggcatcccagttggtaaagatgacggagaacga

SEQ ID NO: 37182 - DNA, 96 bp, Fusarium cuneirostrum
  misc_feature: 99
atcggaacgagaagtgacgagcaataggagtggagcgacgatcgattatttatttcgagtaaggacgaggctgggacgagtattattcttggaaac

SEQ ID NO: 37183 - DNA, 96 bp, Fusarium cuneirostrum
  misc_feature: 99
gtaagtaagaccgggaacgaagggactgagtggaggtcggttttgttggacggacaaatgagagaggtacgaacgttccgtccacaatctcatacc

SEQ ID NO: 37184 - DNA, 96 bp, Fusarium cuneirostrum
  misc_feature: 99
ggacagtgagggacgaacgtgtggactgagtctgcctttagtcagcttgctgacattggcatcccagttggtaaagatgacggagaacgaggaacg

SEQ ID NO: 37185 - DNA, 96 bp, Fusarium cuneirostrum
  misc_feature: 99
gacggaacgttcgtacctctctcatttgtccgtccaacaaaaccgacctccactcagtcccttcgttcccggtcttacttactccacttcatactc

SEQ ID NO: 37186 - DNA, 96 bp, Fusarium cuneirostrum
  misc_feature: 99
ccctttcactttcactttcactttcactttcactttcactttcactttcactttcactttcactttcactttcactttcactttcactttcacttt

SEQ ID NO: 37187 - DNA, 96 bp, Fusarium cuneirostrum
  misc_feature: 99
aggcacgagtgcgtatgactactagatcatgaaatgtgtgaatggaatcaacttcatgaagtgaagatgtaatacggagtagaagacatcatgatg

SEQ ID NO: 37188 - DNA, 96 bp, Fusarium cuneirostrum
  misc_feature: 99
aagccgagggctgtagaagaggtgaagacactcgtcgagggtgtggacgagtttggtgatgaatgggtcgatgacgatcttggagatttttagtgt

SEQ ID NO: 37189 - DNA, 96 bp, Fusarium cuneirostrum
  misc_feature: 98
agagaaattaaaaaaaaaaagaaatattaaaaagaaaagaaaaaagaaaaaagaatcaagaattaaaaataaataaataattaaaagaaaaaaaaa

SEQ ID NO: 37190 - DNA, 96 bp, Fusarium cuneirostrum
  misc_feature: 98
gacagtgagggacgaacgtgtggactgagtctgcctttagtcagcttgctgacattggcatcccagttggtaaagatgacggagaacgaggaacga

SEQ ID NO: 37191 - DNA, 96 bp, Fusarium cuneirostrum
  misc_feature: 98
aactctgacttgttttatttttttcgaggacggaggacgagtttaccgcaacaacgtgaggagacgaacagagtgagtttgtattctatccggagg

SEQ ID NO: 37192 - DNA, 96 bp, Fusarium cuneirostrum
  misc_feature: 98
atatctatactttattatcttcttttttatttttatttttttccttttttttcttatctcttattttttttctttttatttatttttatatttatt

SEQ ID NO: 37193 - DNA, 96 bp, Fusarium cuneirostrum
  misc_feature: 97
tgcggggtatgagattgtggacggaacgttcgtacctctctcatttgtccgtccaacaaaaccgacctccactcagtcccttcgttcccggtctta

SEQ ID NO: 37194 - DNA, 96 bp, Fusarium cuneirostrum
  misc_feature: 97
ctttattatcttcttttttatttttatttttttccttttttttcttatctcttattttttttctttttatttatttttatatttattttatttctt

SEQ ID NO: 37195 - DNA, 96 bp, Fusarium cuneirostrum
  misc_feature: 97
ctgagaagggagtttcgaagtagatttgatgatgctgtgtttgagttgggtcaagtgtggaggagtaactccaacgatgctttgtgagacttaccg

SEQ ID NO: 37196 - DNA, 96 bp, Fusarium cuneirostrum
  misc_feature: 97
ctctctcatttgtccgtccaacaaaaccgacctccactcagtcccttcgttcccggtcttacttactccacttcatactcgtccctcgtctgagtg

SEQ ID NO: 37197 - DNA, 96 bp, Fusarium cuneirostrum
  misc_feature: 97
aagatttctgagattgtatgggcaacgacctggaatcagagtgagaatctggtacagattgttagcgaccgaagggagctttccagcttatagact

SEQ ID NO: 37198 - DNA, 96 bp, Fusarium cuneirostrum
  misc_feature: 96
aagagaaattaaaaaaaaaaagaaatattaaaaagaaaagaaaaaagaaaaaagaatcaagaattaaaaataaataaataattaaaagaaaaaaaa

SEQ ID NO: 37199 - DNA, 96 bp, Fusarium cuneirostrum
  misc_feature: 96
gagagcagcgctcgaggtggatttgacggagtctcaaaactggaacagtttttgtatggactcgattctggcatttggtgagccaaatcctgagaa

SEQ ID NO: 37200 - DNA, 96 bp, Fusarium cuneirostrum
  misc_feature: 96
tctttatatctatactttattatcttcttttttatttttatttttttccttttttttcttatctcttattttttttctttttatttatttttatat

SEQ ID NO: 37201 - DNA, 96 bp, Fusarium cuneirostrum
  misc_feature: 96
ggacaggacatgacgagccggtgggtgagtagtaacggagtaactgtacatcgcaagactcaaaatctaccggattttgggacttttcagaaactg

SEQ ID NO: 37202 - DNA, 96 bp, Fusarium cuneirostrum
  misc_feature: 96
ctacactaaaaatctccaagatcgtcatcgacccattcatcaccaaactcgtccacaccctcgacgagtgtcttcacctcttctacagccctcggc

SEQ ID NO: 37203 - DNA, 96 bp, Fusarium cuneirostrum
  misc_feature: 96
gattgtcaatgtaatttattcagggaataattacccttccaagcaggaactgtgaaatagagaccgagccataaggcgaggtgttgtcagagcacg

SEQ ID NO: 37204 - DNA, 96 bp, Fusarium cuneirostrum
  misc_feature: 96
catggctcaggtttctattacttcttcgatctcgtttcactccatctcttttcatgatctagtgaagttattcgcacttcacctcttcacattatc

SEQ ID NO: 37205 - DNA, 96 bp, Fusarium cuneirostrum
  misc_feature: 95
tttccctttcactttcactttcactttcactttcactttcactttcactttcactttcactttcactttcactttcactttcactttcactttcac

SEQ ID NO: 37206 - DNA, 96 bp, Fusarium cuneirostrum
  misc_feature: 95
ttccctttcactttcactttcactttcactttcactttcactttcactttcactttcactttcactttcactttcactttcactttcactttcact

SEQ ID NO: 37207 - DNA, 96 bp, Fusarium cuneirostrum
  misc_feature: 94
ttttatttctcctcgtgcactcacttcagtcgcatcctgcattcatgtttgactgctgtcaattgaagtcatcaccatctctgtgtgatgtctgta

SEQ ID NO: 37208 - DNA, 96 bp, Fusarium cuneirostrum
  misc_feature: 94
taagaaataaaataaatataaaaataaataaaaagaaaaaaaataagagataagaaaaaaaaggaaaaaaataaaaataaaaaagaagataataaa

SEQ ID NO: 37209 - DNA, 96 bp, Fusarium cuneirostrum
  misc_feature: 94
tagatagatgcaatgtgaacttggtgagatttgtagagttgcctgatgtggaagtgatgatgacttcaattacgtagattttagagcgagtactaa

SEQ ID NO: 37210 - DNA, 96 bp, Fusarium cuneirostrum
  misc_feature: 94
ggcgagacaaataattattaaaaccacttttaatgtgtcgagaaccactactttttttcacttggcgagcatgatttcagattgtgaatgtttatg

SEQ ID NO: 37211 - DNA, 96 bp, Fusarium cuneirostrum
  misc_feature: 94
ggatagaatacaaactcactctgttcgtctcctcacgttgttgcggtaaactcgtcctccgtcctcgaaaaaaataaaacaagtcagagttcgcct

SEQ ID NO: 37212 - DNA, 96 bp, Fusarium cuneirostrum
  misc_feature: 94
acagtgagggacgaacgtgtggactgagtctgcctttagtcagcttgctgacattggcatcccagttggtaaagatgacggagaacgaggaacgag

SEQ ID NO: 37213 - DNA, 96 bp, Fusarium cuneirostrum
  misc_feature: 94
cgtggaataaacagaactgattccagtcgaaatcagactcgactccgtctcacacaaaaaaataaatacagtctcaagtcttcgactgcgtcctcg

SEQ ID NO: 37214 - DNA, 96 bp, Fusarium cuneirostrum
  misc_feature: 94
cctctctcatttgtccgtccaacaaaaccgacctccactcagtcccttcgttcccggtcttacttactccacttcatactcgtccctcgtctgagt

SEQ ID NO: 37215 - DNA, 96 bp, Fusarium cuneirostrum
  misc_feature: 94
cctaaccctaaccctaaccctaaccctaaccctaaccctaaccctttatttttcttttcttttatttcctttattctattttatattcttctcttt

SEQ ID NO: 37216 - DNA, 96 bp, Fusarium cuneirostrum
  misc_feature: 94
actaaagttgacaagctctctccgttcgatcattccagtcgctccgctcctgtttgctattagcattgcgttcatccttcacttcatcttccagat

SEQ ID NO: 37217 - DNA, 96 bp, Fusarium cuneirostrum
  misc_feature: 93
tttgtccgtccaacaaaaccgacctccactcagtcccttcgttcccggtcttacttactccacttcatactcgtccctcgtctgagtggctatgcc

SEQ ID NO: 37218 - DNA, 96 bp, Fusarium cuneirostrum
  misc_feature: 93
ctgtaagctctaggtttttcagcctcgctccctacctacttagtactcgctctaaaatctacgtaattgaagtcatcatcacttccacatcaggca

SEQ ID NO: 37219 - DNA, 96 bp, Fusarium cuneirostrum
  misc_feature: 93
tctgcggggtatgagattgtggacggaacgttcgtacctctctcatttgtccgtccaacaaaaccgacctccactcagtcccttcgttcccggtct

SEQ ID NO: 37220 - DNA, 96 bp, Fusarium cuneirostrum
  misc_feature: 93
tctataccttttttctctttctttctctttctttctctctcttcctctcttctttatctctctcttcctctttatttctcttttctcttttctctt

SEQ ID NO: 37221 - DNA, 96 bp, Fusarium cuneirostrum
  misc_feature: 93
tacaataacagttcactcttctcgttcacaaatgcacaatcaattcaaatcacaagtcatacatcaaagtcatgtctgctcgcataaaatagtaat

SEQ ID NO: 37222 - DNA, 96 bp, Fusarium cuneirostrum
  misc_feature: 93
ggttattctttttattagattagtgagcatgatgttactgtagatggagttgtgaatggcctcattttcatccacactggaatagtcccgaatccc

SEQ ID NO: 37223 - DNA, 96 bp, Fusarium cuneirostrum
  misc_feature: 93
cctaaccctaaccctaaccctaaccctaaccctaaccctaaccctaaccctttatttttcttttcttttatttcctttattctattttatattctt

SEQ ID NO: 37224 - DNA, 96 bp, Fusarium cuneirostrum
  misc_feature: 92
ggcacgagtgcgtatgactactagatcatgaaatgtgtgaatggaatcaacttcatgaagtgaagatgtaatacggagtagaagacatcatgatgg

SEQ ID NO: 37225 - DNA, 96 bp, Fusarium cuneirostrum
  misc_feature: 92
gcaggcgaactctgacttgttttatttttttcgaggacggaggacgagtttaccgcaacaacgtgaggagacgaacagagtgagtttgtattctat

SEQ ID NO: 37226 - DNA, 96 bp, Fusarium cuneirostrum
  misc_feature: 92
aaccctaaccctaaccctaaccctaaccctaaccctaaccctaaccctttatttttcttttcttttatttcctttattctattttatattcttctc

SEQ ID NO: 37227 - DNA, 96 bp, Fusarium cuneirostrum
  misc_feature: 92
cggaacgagaagtgacgagcaataggagtggagcgacgatcgattatttatttcgagtaaggacgaggctgggacgagtattattcttggaaacag

SEQ ID NO: 37228 - DNA, 96 bp, Fusarium cuneirostrum
  misc_feature: 92
cgagattgtgtcgagcccgaatgtgaaatttttcgagattttggtgaggaacaagcaaaatcggattcaaattggactcaaatcgacatacttttt

SEQ ID NO: 37229 - DNA, 96 bp, Fusarium cuneirostrum
  misc_feature: 91
tcggaacgagaagtgacgagcaataggagtggagcgacgatcgattatttatttcgagtaaggacgaggctgggacgagtattattcttggaaaca

SEQ ID NO: 37230 - DNA, 96 bp, Fusarium cuneirostrum
  misc_feature: 91
ataagacagcgtcttttcccccgagaggttgagtgagcaggcgaactctgacttgttttatttttttcgaggacggaggacgagtttaccgcaaca

SEQ ID NO: 37231 - DNA, 96 bp, Fusarium cuneirostrum
  misc_feature: 91
tggacgagtttggtgatgaatgggtcgatgacgatcttggagatttttagtgtagatagatgcaatgtgaacttggtgagatttgtagagttgcct

SEQ ID NO: 37232 - DNA, 96 bp, Fusarium cuneirostrum
  misc_feature: 91
aagaatccatttcaaaatttgtacaaattttgtatgggaagatttctgagattgtatgggcaacgacctggaatcagagtgagaatctggtacaga

SEQ ID NO: 37233 - DNA, 96 bp, Fusarium cuneirostrum
  misc_feature: 91
tctgcctttagtcagcttgctgacattggcatcccagttggtaaagatgacggagaacgaggaacgagtgagtcatcaggcatagccactcagacg

SEQ ID NO: 37234 - DNA, 96 bp, Fusarium cuneirostrum
  misc_feature: 91
taccggtccgggtccacatacgtcctcgtgccctgcatctcggctcattccatttcattcatgtgcgacgaagccatcgtcgagtagaaaaaagat

SEQ ID NO: 37235 - DNA, 96 bp, Fusarium cuneirostrum
  misc_feature: 91
agccgagggctgtagaagaggtgaagacactcgtcgagggtgtggacgagtttggtgatgaatgggtcgatgacgatcttggagatttttagtgta

SEQ ID NO: 37236 - DNA, 96 bp, Fusarium cuneirostrum
  misc_feature: 91
aatctcagaaatcttcccatacaaaatttgtacaaattttgaaatggattcttgtcggccctctgggcctcctgtcccctcacttccgttcggtcc

SEQ ID NO: 37237 - DNA, 96 bp, Fusarium cuneirostrum
  misc_feature: 91
ggacacgggacagtgagggacgaacgtgtggactgagtctgcctttagtcagcttgctgacattggcatcccagttggtaaagatgacggagaacg

SEQ ID NO: 37238 - DNA, 96 bp, Fusarium cuneirostrum
  misc_feature: 91
gcgagattgtgtcgagcccgaatgtgaaatttttcgagattttggtgaggaacaagcaaaatcggattcaaattggactcaaatcgacatactttt

SEQ ID NO: 37239 - DNA, 96 bp, Fusarium cuneirostrum
  misc_feature: 91
caggcgaactctgacttgttttatttttttcgaggacggaggacgagtttaccgcaacaacgtgaggagacgaacagagtgagtttgtattctatc

SEQ ID NO: 37240 - DNA, 96 bp, Fusarium cuneirostrum
  misc_feature: 91
gactctgtctgcggggtatgagattgtggacggaacgttcgtacctctctcatttgtccgtccaacaaaaccgacctccactcagtcccttcgttc

SEQ ID NO: 37241 - DNA, 96 bp, Fusarium cuneirostrum
  misc_feature: 91
gactactagatcatgaaatgtgtgaatggaatcaacttcatgaagtgaagatgtaatacggagtagaagacatcatgatggcttcaaataaaaatg

SEQ ID NO: 37242 - DNA, 96 bp, Fusarium cuneirostrum
  misc_feature: 91
agctctaggtttttcagcctcgctccctacctacttagtactcgctctaaaatctacgtaattgaagtcatcatcacttccacatcaggcaactct

SEQ ID NO: 37243 - DNA, 96 bp, Fusarium cuneirostrum
  misc_feature: 91
acaattacaattacaattacaatcagtcacgatggctcgccattagggagggaaatggtgctcgacaagtttaaagaagtgtatttaaatgttatt

SEQ ID NO: 37244 - DNA, 96 bp, Fusarium cuneirostrum
  misc_feature: 90
tttgttggacggacaaatgagagaggtacgaacgttccgtccacaatctcataccccgcagacagagtcgaggagtataagacagcgtcttttccc

SEQ ID NO: 37245 - DNA, 96 bp, Fusarium cuneirostrum
  misc_feature: 90
tcactcgttcctcgttctccgtcatctttaccaactgggatgccaatgtcagcaagctgactaaaggcagactcagtccacacgttcgtccctcac

SEQ ID NO: 37246 - DNA, 96 bp, Fusarium cuneirostrum
  misc_feature: 90
taaccctaaccctaaccctaaccctaaccctaaccctaaccctttatttttcttttcttttatttcctttattctattttatattcttctctttat

SEQ ID NO: 37247 - DNA, 96 bp, Fusarium cuneirostrum
  misc_feature: 90
ggacggaacgttcgtacctctctcatttgtccgtccaacaaaaccgacctccactcagtcccttcgttcccggtcttacttactccacttcatact

SEQ ID NO: 37248 - DNA, 96 bp, Fusarium cuneirostrum
  misc_feature: 90
cattccagtcgctccgctcctgtttgctattagcattgcgttcatccttcacttcatcttccagatatgtatagacactcacctgttcgtgtttcc

SEQ ID NO: 37249 - DNA, 96 bp, Fusarium cuneirostrum
  misc_feature: 90
acggcgaagccgtttcttaaccttggtatagggggggactacgggacacgggacagtgagggacgaacgtgtggactgagtctgcctttagtcagc

SEQ ID NO: 37250 - DNA, 96 bp, Fusarium cuneirostrum
  misc_feature: 90
gacttgtgatttgaattgattgtgcatttgtgaacgagaagagtgaactgttattgtagtggtaaaagagaaccacgagctagacggcgagtggtg

SEQ ID NO: 37251 - DNA, 96 bp, Fusarium cuneirostrum
  misc_feature: 90
cgtttctgagattgtatgggttggaacccagaatcgaggtgggaaatgggtaccatttgttagtgagcgcagcgaacttaggcgaggaacgagcct

SEQ ID NO: 37252 - DNA, 96 bp, Fusarium cuneirostrum
  misc_feature: 89
aggcaaataataatttaaataaactcgtttgacgagccctggttattctttttattagattagtgagcatgatgttactgtagatggagttgtgaa

SEQ ID NO: 37253 - DNA, 96 bp, Fusarium cuneirostrum
  misc_feature: 89
tgagtctgcctttagtcagcttgctgacattggcatcccagttggtaaagatgacggagaacgaggaacgagtgagtcatcaggcatagccactca

SEQ ID NO: 37254 - DNA, 96 bp, Fusarium cuneirostrum
  misc_feature: 89
tcttcacttcatgaagttgattccattcacacatttcatgatctagtagtcatacgcactcgtgcctcgtgctctgacaacacctcgccttatggc

SEQ ID NO: 37255 - DNA, 96 bp, Fusarium cuneirostrum
  misc_feature: 89
agatttctgagattgtatgggcaacgacctggaatcagagtgagaatctggtacagattgttagcgaccgaagggagctttccagcttatagacta

SEQ ID NO: 37256 - DNA, 96 bp, Fusarium cuneirostrum
  misc_feature: 89
ggattgtcaatgtaatttattcagggaataattacccttccaagcaggaactgtgaaatagagaccgagccataaggcgaggtgttgtcagagcac

SEQ ID NO: 37257 - DNA, 96 bp, Fusarium cuneirostrum
  misc_feature: 89
gcgagagcagcgctcgaggtggatttgacggagtctcaaaactggaacagtttttgtatggactcgattctggcatttggtgagccaaatcctgag

SEQ ID NO: 37258 - DNA, 96 bp, Fusarium cuneirostrum
  misc_feature: 89
cccctcgcctgcacgctacgcgctcggctcgtggactcttttgaggttatcaccatctactttatatatgctcgcgtaacacaagtgcgggagctc

SEQ ID NO: 37259 - DNA, 96 bp, Fusarium cuneirostrum
  misc_feature: 89
ctcgactctgtctgcggggtatgagattgtggacggaacgttcgtacctctctcatttgtccgtccaacaaaaccgacctccactcagtcccttcg

SEQ ID NO: 37260 - DNA, 96 bp, Fusarium cuneirostrum
  misc_feature: 89
cgaggcaaataataatttaaataaactcgtttgacgagccctggttattctttttattagattagtgagcatgatgttactgtagatggagttgtg

SEQ ID NO: 37261 - DNA, 96 bp, Fusarium cuneirostrum
  misc_feature: 89
cgactctgtctgcggggtatgagattgtggacggaacgttcgtacctctctcatttgtccgtccaacaaaaccgacctccactcagtcccttcgtt

SEQ ID NO: 37262 - DNA, 96 bp, Fusarium cuneirostrum
  misc_feature: 89
agtgagggacgaacgtgtggactgagtctgcctttagtcagcttgctgacattggcatcccagttggtaaagatgacggagaacgaggaacgagtg

SEQ ID NO: 37263 - DNA, 96 bp, Fusarium cuneirostrum
  misc_feature: 89
agagcagcgctcgaggtggatttgacggagtctcaaaactggaacagtttttgtatggactcgattctggcatttggtgagccaaatcctgagaat

SEQ ID NO: 37264 - DNA, 96 bp, Fusarium cuneirostrum
  misc_feature: 88
attaagagaaattaaaaaaaaaaagaaatattaaaaagaaaagaaaaaagaaaaaagaatcaagaattaaaaataaataaataattaaaagaaaaa

SEQ ID NO: 37265 - DNA, 96 bp, Fusarium cuneirostrum
  misc_feature: 88
tgactactagatcatgaaatgtgtgaatggaatcaacttcatgaagtgaagatgtaatacggagtagaagacatcatgatggcttcaaataaaaat

SEQ ID NO: 37266 - DNA, 96 bp, Fusarium cuneirostrum
  misc_feature: 88
ctaaccctaaccctaaccctaaccctaaccctaaccctaaccctttatttttcttttcttttatttcctttattctattttatattcttctcttta

SEQ ID NO: 37267 - DNA, 96 bp, Fusarium cuneirostrum
  misc_feature: 88
gaagatttctgagattgtatgggcaacgacctggaatcagagtgagaatctggtacagattgttagcgaccgaagggagctttccagcttatagac

SEQ ID NO: 37268 - DNA, 96 bp, Fusarium cuneirostrum
  misc_feature: 88
gtcagtggacagtaatacacgcggagtgatgcgtagttggcggagaccaattgcttttagcgaactggtgagcatgtgtcggcagacaggcagggt

SEQ ID NO: 37269 - DNA, 96 bp, Fusarium cuneirostrum
  misc_feature: 88
gtaagaccgggaacgaagggactgagtggaggtcggttttgttggacggacaaatgagagaggtacgaacgttccgtccacaatctcataccccgc

SEQ ID NO: 37270 - DNA, 96 bp, Fusarium cuneirostrum
  misc_feature: 88
ggggactacgggacacgggacagtgagggacgaacgtgtggactgagtctgcctttagtcagcttgctgacattggcatcccagttggtaaagatg

SEQ ID NO: 37271 - DNA, 96 bp, Fusarium cuneirostrum
  misc_feature: 88
ggcaaataataatttaaataaactcgtttgacgagccctggttattctttttattagattagtgagcatgatgttactgtagatggagttgtgaat

SEQ ID NO: 37272 - DNA, 96 bp, Fusarium cuneirostrum
  misc_feature: 88
caggcaactctacaaatctcaccaagttcacattgcatctatctacactaaaaatctccaagatcgtcatcgacccattcatcaccaaactcgtcc

SEQ ID NO: 37273 - DNA, 96 bp, Fusarium cuneirostrum
  misc_feature: 88
actgtaagctctaggtttttcagcctcgctccctacctacttagtactcgctctaaaatctacgtaattgaagtcatcatcacttccacatcaggc

SEQ ID NO: 37274 - DNA, 96 bp, Fusarium cuneirostrum
  misc_feature: 88
gcacgagtgcgtatgactactagatcatgaaatgtgtgaatggaatcaacttcatgaagtgaagatgtaatacggagtagaagacatcatgatggc

SEQ ID NO: 37275 - DNA, 96 bp, Fusarium cuneirostrum
  misc_feature: 88
gcaagacagaggatttctggaaatccgacaatttttttccttctttacattcgggttgaactgtgttcatcgctttgcaagagcaaacgaacccgt

SEQ ID NO: 37276 - DNA, 96 bp, Fusarium cuneirostrum
  misc_feature: 88
gagtctgcctttagtcagcttgctgacattggcatcccagttggtaaagatgacggagaacgaggaacgagtgagtcatcaggcatagccactcag

SEQ ID NO: 37277 - DNA, 96 bp, Fusarium cuneirostrum
  misc_feature: 87
tattaagagaaattaaaaaaaaaaagaaatattaaaaagaaaagaaaaaagaaaaaagaatcaagaattaaaaataaataaataattaaaagaaaa

SEQ ID NO: 37278 - DNA, 96 bp, Fusarium cuneirostrum
  misc_feature: 87
gacttgagactgtatttatttttttgtgtgagacggagtcgagtctgatttcgactggaatcagttctgtttattccacggccgtggaaacacgaa

SEQ ID NO: 37279 - DNA, 96 bp, Fusarium cuneirostrum
  misc_feature: 87
cctgattccctcgtgccccgcactcggtgtcatcttcgaccaccgtctcagttcatctctgatgaagttatcgccaaccactgtcgggcgcaatca

SEQ ID NO: 37280 - DNA, 96 bp, Fusarium cuneirostrum
  misc_feature: 87
gaaacacgaacaggtgagtgtctatacatatctggaagatgaagtgaaggatgaacgcaatgctaatagcaaacaggagcggagcgactggaatga

SEQ ID NO: 37281 - DNA, 96 bp, Fusarium cuneirostrum
  misc_feature: 87
gtggacgagtttggtgatgaatgggtcgatgacgatcttggagatttttagtgtagatagatgcaatgtgaacttggtgagatttgtagagttgcc

SEQ ID NO: 37282 - DNA, 96 bp, Fusarium cuneirostrum
  misc_feature: 87
ggaacgttcgtacctctctcatttgtccgtccaacaaaaccgacctccactcagtcccttcgttcccggtcttacttactccacttcatactcgtc

SEQ ID NO: 37283 - DNA, 96 bp, Fusarium cuneirostrum
  misc_feature: 87
attaatgtaagtagatgatcgctcactcgttcactcctcctccggatagaatacaaactcactctgttcgtctcctcacgttgttgcggtaaactc

SEQ ID NO: 37284 - DNA, 96 bp, Fusarium cuneirostrum
  misc_feature: 87
caaaaagtatgtcgatttgagtccaatttgaatccgattttgcttgttcctcaccaaaatctcgaaaaatttcacattcgggctcgacacaatctc

SEQ ID NO: 37285 - DNA, 96 bp, Fusarium cuneirostrum
  misc_feature: 86
ttaagagaaattaaaaaaaaaaagaaatattaaaaagaaaagaaaaaagaaaaaagaatcaagaattaaaaataaataaataattaaaagaaaaaa

SEQ ID NO: 37286 - DNA, 96 bp, Fusarium cuneirostrum
  misc_feature: 86
gtatgactactagatcatgaaatgtgtgaatggaatcaacttcatgaagtgaagatgtaatacggagtagaagacatcatgatggcttcaaataaa

SEQ ID NO: 37287 - DNA, 96 bp, Fusarium cuneirostrum
  misc_feature: 86
gtttctgagattgtatgggttggaacccagaatcgaggtgggaaatgggtaccatttgttagtgagcgcagcgaacttaggcgaggaacgagccta

SEQ ID NO: 37288 - DNA, 96 bp, Fusarium cuneirostrum
  misc_feature: 86
ctactagatcatgaaatgtgtgaatggaatcaacttcatgaagtgaagatgtaatacggagtagaagacatcatgatggcttcaaataaaaatgat

SEQ ID NO: 37289 - DNA, 96 bp, Fusarium cuneirostrum
  misc_feature: 86
cgagtatgaagtggagtaagtaagaccgggaacgaagggactgagtggaggtcggttttgttggacggacaaatgagagaggtacgaacgttccgt

SEQ ID NO: 37290 - DNA, 96 bp, Fusarium cuneirostrum
  misc_feature: 86
cgagacaaataattattaaaaccacttttaatgtgtcgagaaccactactttttttcacttggcgagcatgatttcagattgtgaatgtttatgtt

SEQ ID NO: 37291 - DNA, 96 bp, Fusarium cuneirostrum
  misc_feature: 86
agaatgaacgtgtgtacccaggagtaatcgtcttgagtcagcttgctgaccttgacgaccccagtcaatagacatccgaggtcacgaggaatgtgg

SEQ ID NO: 37292 - DNA, 96 bp, Fusarium cuneirostrum
  misc_feature: 86
atgtgagcacaaccgagagagtagtggagcgaacactaaataaaaggctccaacagaagtgagcgacacgtaattgtgatgttgtgcgtataaatg

SEQ ID NO: 37293 - DNA, 96 bp, Fusarium cuneirostrum
  misc_feature: 85
ctgattccctcgtgccccgcactcggtgtcatcttcgaccaccgtctcagttcatctctgatgaagttatcgccaaccactgtcgggcgcaatcaa

SEQ ID NO: 37294 - DNA, 96 bp, Fusarium cuneirostrum
  misc_feature: 85
cgggacagtgagggacgaacgtgtggactgagtctgcctttagtcagcttgctgacattggcatcccagttggtaaagatgacggagaacgaggaa

SEQ ID NO: 37295 - DNA, 96 bp, Fusarium cuneirostrum
  misc_feature: 85
ttactgtagatggagttgtgaatggcctcattttcatccacactggaatagtcccgaatcccgaggacgaaggacgcagggtgagggattgacaag

SEQ ID NO: 37296 - DNA, 96 bp, Fusarium cuneirostrum
  misc_feature: 85
cgagagcagcgctcgaggtggatttgacggagtctcaaaactggaacagtttttgtatggactcgattctggcatttggtgagccaaatcctgaga

SEQ ID NO: 37297 - DNA, 96 bp, Fusarium cuneirostrum
  misc_feature: 85
tcgactctgtctgcggggtatgagattgtggacggaacgttcgtacctctctcatttgtccgtccaacaaaaccgacctccactcagtcccttcgt

SEQ ID NO: 37298 - DNA, 96 bp, Fusarium cuneirostrum
  misc_feature: 85
gtagatagatgcaatgtgaacttggtgagatttgtagagttgcctgatgtggaagtgatgatgacttcaattacgtagattttagagcgagtacta

SEQ ID NO: 37299 - DNA, 96 bp, Fusarium cuneirostrum
  misc_feature: 85
ataacagttcactcttctcgttcacaaatgcacaatcaattcaaatcacaagtcatacatcaaagtcatgtctgctcgcataaaatagtaattggg

SEQ ID NO: 37300 - DNA, 96 bp, Fusarium cuneirostrum
  misc_feature: 84
gggattgtcaatgtaatttattcagggaataattacccttccaagcaggaactgtgaaatagagaccgagccataaggcgaggtgttgtcagagca

SEQ ID NO: 37301 - DNA, 96 bp, Fusarium cuneirostrum
  misc_feature: 84
ctcactcgttcctcgttctccgtcatctttaccaactgggatgccaatgtcagcaagctgactaaaggcagactcagtccacacgttcgtccctca

SEQ ID NO: 37302 - DNA, 96 bp, Fusarium cuneirostrum
  misc_feature: 84
agctcccgcacttgtgttacgcgagcatatataaagtagatggtgataacctcaaaagagtccacgagccgagcgcgtagcgtgcaggcgagggga

SEQ ID NO: 37303 - DNA, 96 bp, Fusarium cuneirostrum
  misc_feature: 84
tacgccttttaaattggcgagcactttgtgaatgaacgacttaatcaccacttgaggcccgagccgacgagcgagcgtagcgaaggaggagcggag

SEQ ID NO: 37304 - DNA, 96 bp, Fusarium cuneirostrum
  misc_feature: 84
tacatatctggaagatgaagtgaaggatgaacgcaatgctaatagcaaacaggagcggagcgactggaatgatcgaacggagagagcttgtcaact

SEQ ID NO: 37305 - DNA, 96 bp, Fusarium cuneirostrum
  misc_feature: 84
ctggaaggtcatctgaacttggttcagtttgttgattgaggcagcgccgagacttgacgattaggcaagaatgatagagcgaaagcgatcacgaac

SEQ ID NO: 37306 - DNA, 96 bp, Fusarium cuneirostrum
  misc_feature: 84
caagaatccatttcaaaatttgtacaaattttgtatgggaagatttctgagattgtatgggcaacgacctggaatcagagtgagaatctggtacag

SEQ ID NO: 37307 - DNA, 96 bp, Fusarium cuneirostrum
  misc_feature: 84
accctaaccctaaccctaaccctaaccctaaccctaaccctaaccctttatttttcttttcttttatttcctttattctattttatattcttctct

SEQ ID NO: 37308 - DNA, 96 bp, Fusarium cuneirostrum
  misc_feature: 83
tatgactactagatcatgaaatgtgtgaatggaatcaacttcatgaagtgaagatgtaatacggagtagaagacatcatgatggcttcaaataaaa

SEQ ID NO: 37309 - DNA, 96 bp, Fusarium cuneirostrum
  misc_feature: 83
tttcgctccctggcggtcgctcatgttagcgtctataagagattaatgctccctccggtcgcattcgtgccttcggcactaacagaagtgacctaa

SEQ ID NO: 37310 - DNA, 96 bp, Fusarium cuneirostrum
  misc_feature: 83
gtggacggaacgttcgtacctctctcatttgtccgtccaacaaaaccgacctccactcagtcccttcgttcccggtcttacttactccacttcata

SEQ ID NO: 37311 - DNA, 96 bp, Fusarium cuneirostrum
  misc_feature: 83
atttcgctccctggcggtcgctcatgttagcgtctataagagattaatgctccctccggtcgcattcgtgccttcggcactaacagaagtgaccta

SEQ ID NO: 37312 - DNA, 96 bp, Fusarium cuneirostrum
  misc_feature: 83
acttgagactgtatttatttttttgtgtgagacggagtcgagtctgatttcgactggaatcagttctgtttattccacggccgtggaaacacgaac

SEQ ID NO: 37313 - DNA, 96 bp, Fusarium cuneirostrum
  misc_feature: 83
gttattctttttattagattagtgagcatgatgttactgtagatggagttgtgaatggcctcattttcatccacactggaatagtcccgaatcccg

SEQ ID NO: 37314 - DNA, 96 bp, Fusarium cuneirostrum
  misc_feature: 83
gcgagacaaataattattaaaaccacttttaatgtgtcgagaaccactactttttttcacttggcgagcatgatttcagattgtgaatgtttatgt

SEQ ID NO: 37315 - DNA, 96 bp, Fusarium cuneirostrum
  misc_feature: 83
cgtcagtatccacttatgcccggatcgctacgctgcaccttattcgtcgttcctcctcataacgttccgtccacccgcacttcagtcggtcccctc

SEQ ID NO: 37316 - DNA, 96 bp, Fusarium cuneirostrum
  misc_feature: 83
acacgggacagtgagggacgaacgtgtggactgagtctgcctttagtcagcttgctgacattggcatcccagttggtaaagatgacggagaacgag

SEQ ID NO: 37317 - DNA, 96 bp, Fusarium cuneirostrum
  misc_feature: 83
cacgttgttgcggtaaactcgtcctccgtcctcgaaaaaaataaaacaagtcagagttcgcctgctcactcaacctctcgggggaaaagacgctgt

SEQ ID NO: 37318 - DNA, 96 bp, Fusarium cuneirostrum
  misc_feature: 83
aattaaaaaaaaaaagaaatattaaaaagaaaagaaaaaagaaaaaagaatcaagaattaaaaataaataaataattaaaagaaaaaaaaaaagat

SEQ ID NO: 37319 - DNA, 96 bp, Fusarium cuneirostrum
  misc_feature: 83
atcaggcaactctacaaatctcaccaagttcacattgcatctatctacactaaaaatctccaagatcgtcatcgacccattcatcaccaaactcgt

SEQ ID NO: 37320 - DNA, 96 bp, Fusarium cuneirostrum
  misc_feature: 82
ctgttccattcacattctacgtcacaattccatctaacactacaattacaattacaattacaatcagtcacgatggctcgccattagggagggaaa

SEQ ID NO: 37321 - DNA, 96 bp, Fusarium cuneirostrum
  misc_feature: 82
tttccaagaataatactcgtcccagcctcgtccttactcgaaataaataatcgatcgtcgctccactcctattgctcgtcacttctcgttccgata

SEQ ID NO: 37322 - DNA, 96 bp, Fusarium cuneirostrum
  misc_feature: 82
gttactgtagatggagttgtgaatggcctcattttcatccacactggaatagtcccgaatcccgaggacgaaggacgcagggtgagggattgacaa

SEQ ID NO: 37323 - DNA, 96 bp, Fusarium cuneirostrum
  misc_feature: 82
cctgttccattcacattctacgtcacaattccatctaacactacaattacaattacaattacaatcagtcacgatggctcgccattagggagggaa

SEQ ID NO: 37324 - DNA, 96 bp, Fusarium cuneirostrum
  misc_feature: 82
tgtgagcacaaccgagagagtagtggagcgaacactaaataaaaggctccaacagaagtgagcgacacgtaattgtgatgttgtgcgtataaatgg

SEQ ID NO: 37325 - DNA, 96 bp, Fusarium cuneirostrum
  misc_feature: 82
agtctgcctttagtcagcttgctgacattggcatcccagttggtaaagatgacggagaacgaggaacgagtgagtcatcaggcatagccactcaga

SEQ ID NO: 37326 - DNA, 96 bp, Fusarium cuneirostrum
  misc_feature: 82
cgaactctgacttgttttatttttttcgaggacggaggacgagtttaccgcaacaacgtgaggagacgaacagagtgagtttgtattctatccgga

SEQ ID NO: 37327 - DNA, 96 bp, Fusarium cuneirostrum
  misc_feature: 82
tatgttatgtcaagggctcacaagtagtcatcatcacagtcaaagtctcaaagtcacaaagtcaaaaaaaggtgaggctatcaccatatccatttt

SEQ ID NO: 37328 - DNA, 96 bp, Fusarium cuneirostrum
  misc_feature: 82
attaaacagtggcgagcaaagtatgtggagtcggcagaagtgaagtcatcaccaactcccgtttcagcatagtcgggaaaacggtcccgttacata

SEQ ID NO: 37329 - DNA, 96 bp, Fusarium cuneirostrum
  misc_feature: 82
tagatgcaatgtgaacttggtgagatttgtagagttgcctgatgtggaagtgatgatgacttcaattacgtagattttagagcgagtactaagtag

SEQ ID NO: 37330 - DNA, 96 bp, Fusarium cuneirostrum
  misc_feature: 82
caagacagaggatttctggaaatccgacaatttttttccttctttacattcgggttgaactgtgttcatcgctttgcaagagcaaacgaacccgta

SEQ ID NO: 37331 - DNA, 96 bp, Fusarium cuneirostrum
  misc_feature: 82
gatcacgactacgattcaaaataataataatgtcacatatgcacagctcgctcgattaaataaagtatgaagtggtgctcgtcaaaagtatattta

SEQ ID NO: 37332 - DNA, 96 bp, Fusarium cuneirostrum
  misc_feature: 82
gttcctcgttctccgtcatctttaccaactgggatgccaatgtcagcaagctgactaaaggcagactcagtccacacgttcgtccctcactgtccc

SEQ ID NO: 37333 - DNA, 96 bp, Fusarium cuneirostrum
  misc_feature: 82
ggaacgagaagtgacgagcaataggagtggagcgacgatcgattatttatttcgagtaaggacgaggctgggacgagtattattcttggaaacagg

SEQ ID NO: 37334 - DNA, 96 bp, Fusarium cuneirostrum
  misc_feature: 82
cgcaagacagaggatttctggaaatccgacaatttttttccttctttacattcgggttgaactgtgttcatcgctttgcaagagcaaacgaacccg

SEQ ID NO: 37335 - DNA, 96 bp, Fusarium cuneirostrum
  misc_feature: 82
actgagtctgcctttagtcagcttgctgacattggcatcccagttggtaaagatgacggagaacgaggaacgagtgagtcatcaggcatagccact

SEQ ID NO: 37336 - DNA, 96 bp, Fusarium cuneirostrum
  misc_feature: 81
tgatcacgactacgattcaaaataataataatgtcacatatgcacagctcgctcgattaaataaagtatgaagtggtgctcgtcaaaagtatattt

SEQ ID NO: 37337 - DNA, 96 bp, Fusarium cuneirostrum
  misc_feature: 81
cagacatcacacagagatggtgatgacttcaattgacagcagtcaaacatgaatgcaggatgcgactgaagtgagtgcacgaggagaaataaaaga

SEQ ID NO: 37338 - DNA, 96 bp, Fusarium cuneirostrum
  misc_feature: 81
tcaggcaactctacaaatctcaccaagttcacattgcatctatctacactaaaaatctccaagatcgtcatcgacccattcatcaccaaactcgtc

SEQ ID NO: 37339 - DNA, 96 bp, Fusarium cuneirostrum
  misc_feature: 81
atgttatgtcaagggctcacaagtagtcatcatcacagtcaaagtctcaaagtcacaaagtcaaaaaaaggtgaggctatcaccatatccatttta

SEQ ID NO: 37340 - DNA, 96 bp, Fusarium cuneirostrum
  misc_feature: 81
ggggaccgactgaagtgcgggtggacggaacgttatgaggaggaacgacgaataaggtgcagcgtagcgatccgggcataagtggatactgacgag

SEQ ID NO: 37341 - DNA, 96 bp, Fusarium cuneirostrum
  misc_feature: 81
ggaggtgaagccgagggctgtagaagaggtgaagacactcgtcgagggtgtggacgagtttggtgatgaatgggtcgatgacgatcttggagattt

SEQ ID NO: 37342 - DNA, 96 bp, Fusarium cuneirostrum
  misc_feature: 81
gctcaggtttctattacttcttcgatctcgtttcactccatctcttttcatgatctagtgaagttattcgcacttcacctcttcacattatctagc

SEQ ID NO: 37343 - DNA, 96 bp, Fusarium cuneirostrum
  misc_feature: 81
agtggacgcctccaaaatggatgagattgggatgattgctgaccttggtgtgtttgctggtgtagctggtaagtaaacgcctctaaaatggacaag

SEQ ID NO: 37344 - DNA, 96 bp, Fusarium cuneirostrum
  misc_feature: 81
ctgcgaaggcaggatcacatggaatgtgggcgacgaggacggagagtccgagtggggaggccgaaggccgaccggggaaagtgtgtcgagagcgag

SEQ ID NO: 37345 - DNA, 96 bp, Fusarium cuneirostrum
  misc_feature: 81
agaaaaagtgacttcgttaacagaagtgaccgatttctcggcccattctcaggatttggctcaccaaatgccagaatcgagtccatacaaaaactg

SEQ ID NO: 37346 - DNA, 96 bp, Fusarium cuneirostrum
  misc_feature: 80
gttccattcacattctacgtcacaattccatctaacactacaattacaattacaattacaatcagtcacgatggctcgccattagggagggaaatg

SEQ ID NO: 37347 - DNA, 96 bp, Fusarium cuneirostrum
  misc_feature: 80
acaagctctctccgttcgatcattccagtcgctccgctcctgtttgctattagcattgcgttcatccttcacttcatcttccagatatgtatagac

SEQ ID NO: 37348 - DNA, 96 bp, Fusarium cuneirostrum
  misc_feature: 80
ggttgagtgagcaggcgaactctgacttgttttatttttttcgaggacggaggacgagtttaccgcaacaacgtgaggagacgaacagagtgagtt

SEQ ID NO: 37349 - DNA, 96 bp, Fusarium cuneirostrum
  misc_feature: 80
gaaaaagtgacttcgttaacagaagtgaccgatttctcggcccattctcaggatttggctcaccaaatgccagaatcgagtccatacaaaaactgt

SEQ ID NO: 37350 - DNA, 96 bp, Fusarium cuneirostrum
  misc_feature: 80
cggaggtgaagccgagggctgtagaagaggtgaagacactcgtcgagggtgtggacgagtttggtgatgaatgggtcgatgacgatcttggagatt

SEQ ID NO: 37351 - DNA, 96 bp, Fusarium cuneirostrum
  misc_feature: 80
agatgcaatgtgaacttggtgagatttgtagagttgcctgatgtggaagtgatgatgacttcaattacgtagattttagagcgagtactaagtagg

SEQ ID NO: 37352 - DNA, 96 bp, Fusarium cuneirostrum
  misc_feature: 80
cagtgagggacgaacgtgtggactgagtctgcctttagtcagcttgctgacattggcatcccagttggtaaagatgacggagaacgaggaacgagt

SEQ ID NO: 37353 - DNA, 96 bp, Fusarium cuneirostrum
  misc_feature: 80
aagaatgaacgtgtgtacccaggagtaatcgtcttgagtcagcttgctgaccttgacgaccccagtcaatagacatccgaggtcacgaggaatgtg

SEQ ID NO: 37354 - DNA, 96 bp, Fusarium cuneirostrum
  misc_feature: 80
atgatcacgactacgattcaaaataataataatgtcacatatgcacagctcgctcgattaaataaagtatgaagtggtgctcgtcaaaagtatatt

SEQ ID NO: 37355 - DNA, 96 bp, Fusarium cuneirostrum
  misc_feature: 79
tttttagtttatgtgcgctccgtctttatttaatgctcgcccataatacatgtgaagctatcgtcactacaacatcaggtaatcatagaacaaaac

SEQ ID NO: 37356 - DNA, 96 bp, Fusarium cuneirostrum
  misc_feature: 79
aataacatttttcctagtccgtgcacgcttctcggatctcgtaacaagactgtcgcataacattcgtgtgaccggatgtaactatccggtttcaca

SEQ ID NO: 37357 - DNA, 96 bp, Fusarium cuneirostrum
  misc_feature: 79
aactaaagttgacaagctctctccgttcgatcattccagtcgctccgctcctgtttgctattagcattgcgttcatccttcacttcatcttccaga

SEQ ID NO: 37358 - DNA, 96 bp, Fusarium cuneirostrum
  misc_feature: 79
gtctgcctttagtcagcttgctgacattggcatcccagttggtaaagatgacggagaacgaggaacgagtgagtcatcaggcatagccactcagac

SEQ ID NO: 37359 - DNA, 96 bp, Fusarium cuneirostrum
  misc_feature: 79
cctcgactctgtctgcggggtatgagattgtggacggaacgttcgtacctctctcatttgtccgtccaacaaaaccgacctccactcagtcccttc

SEQ ID NO: 37360 - DNA, 96 bp, Fusarium cuneirostrum
  misc_feature: 79
ctaaccctaaccctaaccctaaccctaaccctaaccctaaccctaaccctttatttttcttttcttttatttcctttattctattttatattcttc

SEQ ID NO: 37361 - DNA, 96 bp, Fusarium cuneirostrum
  misc_feature: 79
cgtgtttccacggccgtggaataaacagaactgattccagtcgaaatcagactcgactccgtctcacacaaaaaaataaatacagtctcaagtctt

SEQ ID NO: 37362 - DNA, 96 bp, Fusarium cuneirostrum
  misc_feature: 79
atcgccttcccgcctccgtgattaccatccagagcaatctggaaagcacggcaataatgtggatgatccttaaagatcacagggcagtccgtcttg

SEQ ID NO: 37363 - DNA, 96 bp, Fusarium cuneirostrum
  misc_feature: 79
atggctcaggtttctattacttcttcgatctcgtttcactccatctcttttcatgatctagtgaagttattcgcacttcacctcttcacattatct

SEQ ID NO: 37364 - DNA, 96 bp, Fusarium cuneirostrum
  misc_feature: 78
ggactacgggacacgggacagtgaagaatgaacgtgtgtacccaggagtaatcgtcttgagtcagcttgctgaccttgacgaccccagtcaataga

SEQ ID NO: 37365 - DNA, 96 bp, Fusarium cuneirostrum
  misc_feature: 78
agacttgagactgtatttatttttttgtgtgagacggagtcgagtctgatttcgactggaatcagttctgtttattccacggccgtggaaacacga

SEQ ID NO: 37366 - DNA, 96 bp, Fusarium cuneirostrum
  misc_feature: 78
tcggttttgttggacggacaaatgagagaggtacgaacgttccgtccacaatctcataccccgcagacagagtcgaggagtataagacagcgtctt

SEQ ID NO: 37367 - DNA, 96 bp, Fusarium cuneirostrum
  misc_feature: 78
tcgcaacatccaaaacaggaaacaatgtagactaatctaagatacaaaacctccgaaaacgcccagcgtatttcagtccgaaaatagttccgcccc

SEQ ID NO: 37368 - DNA, 96 bp, Fusarium cuneirostrum
  misc_feature: 78
gaatgaacgtgtgtacccaggagtaatcgtcttgagtcagcttgctgaccttgacgaccccagtcaatagacatccgaggtcacgaggaatgtgga

SEQ ID NO: 37369 - DNA, 96 bp, Fusarium cuneirostrum
  misc_feature: 78
tcagtggacagtaatacacgcggagtgatgcgtagttggcggagaccaattgcttttagcgaactggtgagcatgtgtcggcagacaggcagggtg

SEQ ID NO: 37370 - DNA, 96 bp, Fusarium cuneirostrum
  misc_feature: 78
tattaaacagtggcgagcaaagtatgtggagtcggcagaagtgaagtcatcaccaactcccgtttcagcatagtcgggaaaacggtcccgttacat

SEQ ID NO: 37371 - DNA, 96 bp, Fusarium cuneirostrum
  misc_feature: 78
taccaactgggatgccaatgtcagcaagctgactaaaggcagactcagtccacacgttcgtccctcactgtcccgtgtcccgtagtccccccctat

SEQ ID NO: 37372 - DNA, 96 bp, Fusarium cuneirostrum
  misc_feature: 78
atacatatctggaagatgaagtgaaggatgaacgcaatgctaatagcaaacaggagcggagcgactggaatgatcgaacggagagagcttgtcaac

SEQ ID NO: 37373 - DNA, 96 bp, Fusarium cuneirostrum
  misc_feature: 78
gtgtttccacggccgtggaataaacagaactgattccagtcgaaatcagactcgactccgtctcacacaaaaaaataaatacagtctcaagtcttc

SEQ ID NO: 37374 - DNA, 96 bp, Fusarium cuneirostrum
  misc_feature: 78
gactgagtctgcctttagtcagcttgctgacattggcatcccagttggtaaagatgacggagaacgaggaacgagtgagtcatcaggcatagccac

SEQ ID NO: 37375 - DNA, 96 bp, Fusarium cuneirostrum
  misc_feature: 78
cccgcagacagagtcgaggagtataagacagcgtcttttcccccgagaggttgagtgagcaggcgaactctgacttgttttatttttttcgaggac

SEQ ID NO: 37376 - DNA, 96 bp, Fusarium cuneirostrum
  misc_feature: 78
catattaaacagtggcgagcaaagtatgtggagtcggcagaagtgaagtcatcaccaactcccgtttcagcatagtcgggaaaacggtcccgttac

SEQ ID NO: 37377 - DNA, 96 bp, Fusarium cuneirostrum
  misc_feature: 78
atcgcaacatccaaaacaggaaacaatgtagactaatctaagatacaaaacctccgaaaacgcccagcgtatttcagtccgaaaatagttccgccc

SEQ ID NO: 37378 - DNA, 96 bp, Fusarium cuneirostrum
  misc_feature: 78
ggctcaggtttctattacttcttcgatctcgtttcactccatctcttttcatgatctagtgaagttattcgcacttcacctcttcacattatctag

SEQ ID NO: 37379 - DNA, 96 bp, Fusarium cuneirostrum
  misc_feature: 78
gagacaaataattattaaaaccacttttaatgtgtcgagaaccactactttttttcacttggcgagcatgatttcagattgtgaatgtttatgttg

SEQ ID NO: 37380 - DNA, 96 bp, Fusarium cuneirostrum
  misc_feature: 78
aatcatatcaaattttgctacaacacaatttccaccatcacctttcgctatgcaaaataacacttttcaacttttatgccgtgaacctccctgttc

SEQ ID NO: 37381 - DNA, 96 bp, Fusarium cuneirostrum
  misc_feature: 78
actgtagatggagttgtgaatggcctcattttcatccacactggaatagtcccgaatcccgaggacgaaggacgcagggtgagggattgacaagag

SEQ ID NO: 37382 - DNA, 96 bp, Fusarium cuneirostrum
  misc_feature: 78
acgccttttaaattggcgagcactttgtgaatgaacgacttaatcaccacttgaggcccgagccgacgagcgagcgtagcgaaggaggagcggagg

SEQ ID NO: 37383 - DNA, 96 bp, Fusarium cuneirostrum
  misc_feature: 78
ccctaattctaatctcttttttaattttattttccttatttattatatatatatattctttttttattattttctcttttttttcttttttataat

SEQ ID NO: 37384 - DNA, 96 bp, Fusarium cuneirostrum
  misc_feature: 78
ccctaaccctaaccctaaccctaaccctaaccctaaccctaaccctttatttttcttttcttttatttcctttattctattttatattcttctctt

SEQ ID NO: 37385 - DNA, 96 bp, Fusarium cuneirostrum
  misc_feature: 78
atcttcacttcatgaagttgattccattcacacatttcatgatctagtagtcatacgcactcgtgcctcgtgctctgacaacacctcgccttatgg

SEQ ID NO: 37386 - DNA, 96 bp, Fusarium cuneirostrum
  misc_feature: 78
atcctgtcatgtcaaccgagcggggcgaggggattgagtttaggcgtttgcctaacaaagtgcaggaagcacttgaatgtccgatggagtcggatg

SEQ ID NO: 37387 - DNA, 96 bp, Fusarium cuneirostrum
  misc_feature: 78
aaacacgaacaggtgagtgtctatacatatctggaagatgaagtgaaggatgaacgcaatgctaatagcaaacaggagcggagcgactggaatgat

SEQ ID NO: 37388 - DNA, 96 bp, Fusarium cuneirostrum
  misc_feature: 78
aaagtgcaggaagcacttgaatgtccgatggagtcggatgatatgctattcttgagagcatattactgcgtcgcttatctgacgcatatcttttct

SEQ ID NO: 37389 - DNA, 96 bp, Fusarium cuneirostrum
  misc_feature: 77
gttaggctcgttcctcgcctaagttcgctgcgctcactaacaaatggtacccatttcccacctcgattctgggttccaacccatacaatctcagaa

SEQ ID NO: 37390 - DNA, 96 bp, Fusarium cuneirostrum
  misc_feature: 77
cgaaataaataatcgatcgtcgctccactcctattgctcgtcacttctcgttccgatatggatatacgggttcgtttgctcttgcaaagcgatgaa

SEQ ID NO: 37391 - DNA, 96 bp, Fusarium cuneirostrum
  misc_feature: 77
tgttccattcacattctacgtcacaattccatctaacactacaattacaattacaattacaatcagtcacgatggctcgccattagggagggaaat

SEQ ID NO: 37392 - DNA, 96 bp, Fusarium cuneirostrum
  misc_feature: 77
atagggggggactacgggacacgggacaagctgggacagctcgtggactgagtacagcttccaggcgtagccggttgctgccccagtttttaggca

SEQ ID NO: 37393 - DNA, 96 bp, Fusarium cuneirostrum
  misc_feature: 77
acgggacagtgagggacgaacgtgtggactgagtctgcctttagtcagcttgctgacattggcatcccagttggtaaagatgacggagaacgagga

SEQ ID NO: 37394 - DNA, 96 bp, Fusarium cuneirostrum
  misc_feature: 77
ggcgagagcagcgctcgaggtggatttgacggagtctcaaaactggaacagtttttgtatggactcgattctggcatttggtgagccaaatcctga

SEQ ID NO: 37395 - DNA, 96 bp, Fusarium cuneirostrum
  misc_feature: 77
tattaaaactgtgccagtttctgaaaagtcccaaaatccggtagattttgagtcttgcgatgtacagttactccgttactactcacccaccggctc

SEQ ID NO: 37396 - DNA, 96 bp, Fusarium cuneirostrum
  misc_feature: 77
tatagggggggactacgggacacgggacaagctgggacagctcgtggactgagtacagcttccaggcgtagccggttgctgccccagtttttaggc

SEQ ID NO: 37397 - DNA, 96 bp, Fusarium cuneirostrum
  misc_feature: 77
aaccctaaccctaaccctaaccctaaccctaaccctaaccctatatttttcttttcttttatttcctttattctattttatattcttctctttata

SEQ ID NO: 37398 - DNA, 96 bp, Fusarium cuneirostrum
  misc_feature: 77
cattctcagaatcgaactcatacaaaatttgtacaaatttcagatcaaactgaaatgcgaccggcgcagagacagcagcggccgtgtgtgttagta

SEQ ID NO: 37399 - DNA, 96 bp, Fusarium cuneirostrum
  misc_feature: 77
atcaccatctactttatatatgctcgcgtaacacaagtgcgggagctcaccctactgtaagctctaggtttttcagcctcgctccctacctactta

SEQ ID NO: 37400 - DNA, 96 bp, Fusarium cuneirostrum
  misc_feature: 77
taaccctaaccctaaccctaaccctaaccctaaccctaaccctaaccctttatttttcttttcttttatttcctttattctattttatattcttct

SEQ ID NO: 37401 - DNA, 96 bp, Fusarium cuneirostrum
  misc_feature: 77
gtgtggacgagtttggtgatgaatgggtcgatgacgatcttggagatttttagtgtagatagatgcaatgtgaacttggtgagatttgtagagttg

SEQ ID NO: 37402 - DNA, 96 bp, Fusarium cuneirostrum
  misc_feature: 77
aaaatctacgtaattgaagtcatcatcacttccacatcaggcaactctacaaatctcaccaagttcacattgcatctatctacactaaaaatctcc

SEQ ID NO: 37403 - DNA, 96 bp, Fusarium cuneirostrum
  misc_feature: 77
aagcagaactatgttctgaataccgaccgaacggagtgagggaaggtgcggaatggagtgggagcagagcgaccacggaatgaggttactataatc

SEQ ID NO: 37404 - DNA, 96 bp, Fusarium cuneirostrum
  misc_feature: 77
gatcctgtcatgtcaaccgagcggggcgaggggattgagtttaggcgtttgcctaacaaagtgcaggaagcacttgaatgtccgatggagtcggat

SEQ ID NO: 37405 - DNA, 96 bp, Fusarium cuneirostrum
  misc_feature: 77
ctgagtctgcctttagtcagcttgctgacattggcatcccagttggtaaagatgacggagaacgaggaacgagtgagtcatcaggcatagccactc

SEQ ID NO: 37406 - DNA, 96 bp, Fusarium cuneirostrum
  misc_feature: 77
gaggttgagtgagcaggcgaactctgacttgttttatttttttcgaggacggaggacgagtttaccgcaacaacgtgaggagacgaacagagtgag

SEQ ID NO: 37407 - DNA, 96 bp, Fusarium cuneirostrum
  misc_feature: 77
gagggccgacaagaatccatttcaaaatttgtacaaattttgtatgggaagatttctgagattgtatgggcaacgacctggaatcagagtgagaat

SEQ ID NO: 37408 - DNA, 96 bp, Fusarium cuneirostrum
  misc_feature: 77
attctcagaatcgaactcatacaaaatttgtacaaatttcagatcaaactgaaatgcgaccggcgcagagacagcagcggccgtgtgtgttagtag

SEQ ID NO: 37409 - DNA, 96 bp, Fusarium cuneirostrum
  misc_feature: 77
actttattatcttcttttttatttttatttttttccttttttttcttatctcttattttttttctttttatttatttttatatttattttatttct

SEQ ID NO: 37410 - DNA, 96 bp, Fusarium cuneirostrum
  misc_feature: 76
attgctcgtcacttctcgttccgatatggatatacgggttcgtttgctcttgcaaagcgatgaacacagttcaacccgaatgtaaagaaggaaaaa

SEQ ID NO: 37411 - DNA, 96 bp, Fusarium cuneirostrum
  misc_feature: 76
ttaggctcgttcctcgcctaagttcgctgcgctcactaacaaatggtacccatttcccacctcgattctgggttccaacccatacaatctcagaaa

SEQ ID NO: 37412 - DNA, 96 bp, Fusarium cuneirostrum
  misc_feature: 76
ttaccaactgggatgccaatgtcagcaagctgactaaaggcagactcagtccacacgttcgtccctcactgtcccgtgtcccgtagtcccccccta

SEQ ID NO: 37413 - DNA, 96 bp, Fusarium cuneirostrum
  misc_feature: 76
tgtcgcaagacagaggatttctggaaatccgacaatttttttccttctttacattcgggttgaactgtgttcatcgctttgcaagagcaaacgaac

SEQ ID NO: 37414 - DNA, 96 bp, Fusarium cuneirostrum
  misc_feature: 76
ccctcgcctgcacgctacgcgctcggctcgtggactcttttgaggttatcaccatctactttatatatgctcgcgtaacacaagtgcgggagctca

SEQ ID NO: 37415 - DNA, 96 bp, Fusarium cuneirostrum
  misc_feature: 76
tctacgaacacggcatcaagatatgacaccagcagagcgacacaaagtagcaagagatatcgcgagaattcccggaatcatcaaagaccagcttgc

SEQ ID NO: 37416 - DNA, 96 bp, Fusarium cuneirostrum
  misc_feature: 76
gtcagtatccacttatgcccggatcgctacgctgcaccttattcgtcgttcctcctcataacgttccgtccacccgcacttcagtcggtcccctcc

SEQ ID NO: 37417 - DNA, 96 bp, Fusarium cuneirostrum
  misc_feature: 76
atagtaaagatctctttagctataaaattaataaattaagattatttaatagaagtttaattaactttagataactttaatcttagttagaaagtc

SEQ ID NO: 37418 - DNA, 96 bp, Fusarium cuneirostrum
  misc_feature: 76
agacatcacacagagatggtgatgacttcaattgacagcagtcaaacatgaatgcaggatgcgactgaagtgagtgcacgaggagaaataaaagag

SEQ ID NO: 37419 - DNA, 96 bp, Fusarium cuneirostrum
  misc_feature: 76
cggggcttgctcatccgttcgggactcaagtggtgtaactctcaccactcctgttccattcacattctacgtcacaattccatctaacactacaat

SEQ ID NO: 37420 - DNA, 96 bp, Fusarium cuneirostrum
  misc_feature: 76
ataacatttttcctagtccgtgcacgcttctcggatctcgtaacaagactgtcgcataacattcgtgtgaccggatgtaactatccggtttcacat

SEQ ID NO: 37421 - DNA, 96 bp, Fusarium cuneirostrum
  misc_feature: 76
agaatccatttcaaaatttgtacaaattttgtatgggaagatttctgagattgtatgggcaacgacctggaatcagagtgagaatctggtacagat

SEQ ID NO: 37422 - DNA, 96 bp, Fusarium cuneirostrum
  misc_feature: 75
cctggaaggtcatctgaacttggttcagtttgttgattgaggcagcgccgagacttgacgattaggcaagaatgatagagcgaaagcgatcacgaa

SEQ ID NO: 37423 - DNA, 96 bp, Fusarium cuneirostrum
  misc_feature: 75
ttagtcagcttgctgacattggcatcccagttggtaaagatgacggagaacgaggaacgagtgagtcatcaggcatagccactcagacgagggacg

SEQ ID NO: 37424 - DNA, 96 bp, Fusarium cuneirostrum
  misc_feature: 75
tgtgtgaccgagacagatgtcgaggggaaagggtacatggcgagagcagcgctcgaggtggatttgacggagtctcaaaactggaacagtttttgt

SEQ ID NO: 37425 - DNA, 96 bp, Fusarium cuneirostrum
  misc_feature: 75
tggctcaggtttctattacttcttcgatctcgtttcactccatctcttttcatgatctagtgaagttattcgcacttcacctcttcacattatcta

SEQ ID NO: 37426 - DNA, 96 bp, Fusarium cuneirostrum
  misc_feature: 75
tgcgaaggcaggatcacatggaatgtgggcgacgaggacggagagtccgagtggggaggccgaaggccgaccggggaaagtgtgtcgagagcgagg

SEQ ID NO: 37427 - DNA, 96 bp, Fusarium cuneirostrum
  misc_feature: 75
aggaggcccagagggccgacaagaatccatttcaaaatttgtacaaattttgtatgggaagatttctgagattgtatgggcaacgacctggaatca

SEQ ID NO: 37428 - DNA, 96 bp, Fusarium cuneirostrum
  misc_feature: 75
actactagatcatgaaatgtgtgaatggaatcaacttcatgaagtgaagatgtaatacggagtagaagacatcatgatggcttcaaataaaaatga

SEQ ID NO: 37429 - DNA, 96 bp, Fusarium cuneirostrum
  misc_feature: 75
tattccggtaagtctcacaaagcatcgttggagttactcctccacacttgacccaactcaaacacagcatcatcaaatctacttcgaaactccctt

SEQ ID NO: 37430 - DNA, 96 bp, Fusarium cuneirostrum
  misc_feature: 75
tagaagaggtgaagacactcgtcgagggtgtggacgagtttggtgatgaatgggtcgatgacgatcttggagatttttagtgtagatagatgcaat

SEQ ID NO: 37431 - DNA, 96 bp, Fusarium cuneirostrum
  misc_feature: 75
ggcgagattgtgtcgagcccgaatgtgaaatttttcgagattttggtgaggaacaagcaaaatcggattcaaattggactcaaatcgacatacttt

SEQ ID NO: 37432 - DNA, 96 bp, Fusarium cuneirostrum
  misc_feature: 75
attgaagtcatcatcacttccacatcaggcaactctacaaatctcaccaagttcacattgcatctatctacactaaaaatctccaagatcgtcatc

SEQ ID NO: 37433 - DNA, 96 bp, Fusarium cuneirostrum
  misc_feature: 75
gagcagcgctcgaggtggatttgacggagtctcaaaactggaacagtttttgtatggactcgattctggcatttggtgagccaaatcctgagaatg

SEQ ID NO: 37434 - DNA, 96 bp, Fusarium cuneirostrum
  misc_feature: 75
cctttccctttcactttcactttcactttcactttcactttcactttcactttcactttcactttcactttcactttcactttcactttcactttc

SEQ ID NO: 37435 - DNA, 96 bp, Fusarium cuneirostrum
  misc_feature: 75
actcttgtcaatccctcaccctgcgtccttcgtcctcgggattcgggactattccagtgtggatgaaaatgaggccattcacaactccatctacag

SEQ ID NO: 37436 - DNA, 96 bp, Fusarium cuneirostrum
  misc_feature: 75
caaatgaaatgtcagtttcgattttgcgggcgaaatcgaaactgacatttcatttgtatgggttcgtttctggcagagccggttttttgtaaggag

SEQ ID NO: 37437 - DNA, 96 bp, Fusarium cuneirostrum
  misc_feature: 75
acgagtatgaagtggagtaagtaagaccgggaacgaagggactgagtggaggtcggttttgttggacggacaaatgagagaggtacgaacgttccg

SEQ ID NO: 37438 - DNA, 96 bp, Fusarium cuneirostrum
  misc_feature: 75
cacgggacagtgagggacgaacgtgtggactgagtctgcctttagtcagcttgctgacattggcatcccagttggtaaagatgacggagaacgagg

SEQ ID NO: 37439 - DNA, 96 bp, Fusarium cuneirostrum
  misc_feature: 75
cacgagtgcgtatgactactagatcatgaaatgtgtgaatggaatcaacttcatgaagtgaagatgtaatacggagtagaagacatcatgatggct

SEQ ID NO: 37440 - DNA, 96 bp, Fusarium cuneirostrum
  misc_feature: 75
atcctgattccctcgtgccccgcactcggtgtcatcttcgaccaccgtctcagttcatctctgatgaagttatcgccaaccactgtcgggcgcaat

SEQ ID NO: 37441 - DNA, 96 bp, Fusarium cuneirostrum
  misc_feature: 75
aatgaacgtgtgtacccaggagtaatcgtcttgagtcagcttgctgaccttgacgaccccagtcaatagacatccgaggtcacgaggaatgtggat

SEQ ID NO: 37442 - DNA, 96 bp, Fusarium cuneirostrum
  misc_feature: 75
agtgtctatacatatctggaagatgaagtgaaggatgaacgcaatgctaatagcaaacaggagcggagcgactggaatgatcgaacggagagagct

SEQ ID NO: 37443 - DNA, 96 bp, Fusarium cuneirostrum
  misc_feature: 75
aaaaaactgttccagttttgagctcgtttctggctcgggtctgctcgaccctcgacacacttctgtcggtcgcgcatccgcactccctcatctact

SEQ ID NO: 37444 - DNA, 96 bp, Fusarium cuneirostrum
  misc_feature: 74
ctttttagtttatgtgcgctccgtctttatttaatgctcgcccataatacatgtgaagctatcgtcactacaacatcaggtaatcatagaacaaaa

SEQ ID NO: 37445 - DNA, 96 bp, Fusarium cuneirostrum
  misc_feature: 74
tgtgaaatttttcgagattttggtgaggaacaagcaaaatcggattcaaattggactcaaatcgacatactttttgtatgtgaacgaaactgagaa

SEQ ID NO: 37446 - DNA, 96 bp, Fusarium cuneirostrum
  misc_feature: 74
tgattccctcgtgccccgcactcggtgtcatcttcgaccaccgtctcagttcatctctgatgaagttatcgccaaccactgtcgggcgcaatcaac

SEQ ID NO: 37447 - DNA, 96 bp, Fusarium cuneirostrum
  misc_feature: 74
tcggaggtgaagccgagggctgtagaagaggtgaagacactcgtcgagggtgtggacgagtttggtgatgaatgggtcgatgacgatcttggagat

SEQ ID NO: 37448 - DNA, 96 bp, Fusarium cuneirostrum
  misc_feature: 74
tcacgttgttgcggtaaactcgtcctccgtcctcgaaaaaaataaaacaagtcagagttcgcctgctcactcaacctctcgggggaaaagacgctg

SEQ ID NO: 37449 - DNA, 96 bp, Fusarium cuneirostrum
  misc_feature: 74
gcgtccttcgtcctcgggattcgggactattccagtgtggatgaaaatgaggccattcacaactccatctacagtaacatcatgctcactaatcta

SEQ ID NO: 37450 - DNA, 96 bp, Fusarium cuneirostrum
  misc_feature: 74
cctcgcctgcacgctacgcgctcggctcgtggactcttttgaggttatcaccatctactttatatatgctcgcgtaacacaagtgcgggagctcac

SEQ ID NO: 37451 - DNA, 96 bp, Fusarium cuneirostrum
  misc_feature: 74
ctaaaaactggggcagcaaccggctacgcctggaagctgtactcagtccacgagctgtcccagcttgtcccgtgtcccgtagtccccccctatacc

SEQ ID NO: 37452 - DNA, 96 bp, Fusarium cuneirostrum
  misc_feature: 74
actgagaagggagtttcgaagtagatttgatgatgctgtgtttgagttgggtcaagtgtggaggagtaactccaacgatgctttgtgagacttacc

SEQ ID NO: 37453 - DNA, 96 bp, Fusarium cuneirostrum
  misc_feature: 74
atcatatcaaattttgctacaacacaatttccaccatcacctttcgctatgcaaaataacacttttcaacttttatgccgtgaacctccctgttcc

SEQ ID NO: 37454 - DNA, 96 bp, Fusarium cuneirostrum
  misc_feature: 74
aaaaactgttccagttttgagctcgtttctggctcgggtctgctcgaccctcgacacacttctgtcggtcgcgcatccgcactccctcatctactc

SEQ ID NO: 37455 - DNA, 96 bp, Fusarium cuneirostrum
  misc_feature: 74
ctttttttattattttctcttttttttcttttttataattatatctttttttttttcttttaattatttatttatttttaattcttgattcttttt

SEQ ID NO: 37456 - DNA, 96 bp, Fusarium cuneirostrum
  misc_feature: 74
cacaaaaaaataaatacagtctcaagtcttcgactgcgtcctcgcaggggcagacgttccgtcttatacttcctcgccccctcgtcagtatccact

SEQ ID NO: 37457 - DNA, 96 bp, Fusarium cuneirostrum
  misc_feature: 74
agacactcacctgttcgtgtttccacggccgtggaataaacagaactgattccagtcgaaatcagactcgactccgtctcacacaaaaaaataaat

SEQ ID NO: 37458 - DNA, 96 bp, Fusarium cuneirostrum
  misc_feature: 74
atacgggttcgtttgctcttgcaaagcgatgaacacagttcaacccgaatgtaaagaaggaaaaaaattgtcggatttccagaaatcctctgtctt

SEQ ID NO: 37459 - DNA, 96 bp, Fusarium cuneirostrum
  misc_feature: 74
aagaaaaagtgacttcgttaacagaagtgaccgatttctcggcccattctcaggatttggctcaccaaatgccagaatcgagtccatacaaaaact

SEQ ID NO: 37460 - DNA, 96 bp, Fusarium cuneirostrum
  misc_feature: 73
tattgctcgtcacttctcgttccgatatggatatacgggttcgtttgctcttgcaaagcgatgaacacagttcaacccgaatgtaaagaaggaaaa

SEQ ID NO: 37461 - DNA, 96 bp, Fusarium cuneirostrum
  misc_feature: 73
tttcaatcggagatttagtgagacgggcgaacgtggtttattcttttgtatcacggagtgatgaacgagatggttcgagtgcgaggaaggacgacg

SEQ ID NO: 37462 - DNA, 96 bp, Fusarium cuneirostrum
  misc_feature: 73
aagtggacgcctccaaaatggatgagattgggatgattgctgaccttggtgtgtttgctggtgtagctggtaagtaaacgcctctaaaatggacaa

SEQ ID NO: 37463 - DNA, 96 bp, Fusarium cuneirostrum
  misc_feature: 73
gtagaagaggtgaagacactcgtcgagggtgtggacgagtttggtgatgaatgggtcgatgacgatcttggagatttttagtgtagatagatgcaa

SEQ ID NO: 37464 - DNA, 96 bp, Fusarium cuneirostrum
  misc_feature: 73
aaatggatatggtgatagcctcacctttttttgactttgtgactttgagactttgactgtgatgatgactacttgtgagcccttgacataacataa

SEQ ID NO: 37465 - DNA, 96 bp, Fusarium cuneirostrum
  misc_feature: 73
ttatactcctcgactctgtctgcggggtatgagattgtggacggaacgttcgtacctctctcatttgtccgtccaacaaaaccgacctccactcag

SEQ ID NO: 37466 - DNA, 96 bp, Fusarium cuneirostrum
  misc_feature: 73
aaatctacgtaattgaagtcatcatcacttccacatcaggcaactctacaaatctcaccaagttcacattgcatctatctacactaaaaatctcca

SEQ ID NO: 37467 - DNA, 96 bp, Fusarium cuneirostrum
  misc_feature: 73
ggttaggctcgttcctcgcctaagttcgctgcgctcactaacaaatggtacccatttcccacctcgattctgggttccaacccatacaatctcaga

SEQ ID NO: 37468 - DNA, 96 bp, Fusarium cuneirostrum
  misc_feature: 73
tatactcctcgactctgtctgcggggtatgagattgtggacggaacgttcgtacctctctcatttgtccgtccaacaaaaccgacctccactcagt

SEQ ID NO: 37469 - DNA, 96 bp, Fusarium cuneirostrum
  misc_feature: 73
tacgaacacggcatcaagatatgacaccagcagagcgacacaaagtagcaagagatatcgcgagaattcccggaatcatcaaagaccagcttgcac

SEQ ID NO: 37470 - DNA, 96 bp, Fusarium cuneirostrum
  misc_feature: 73
gtgtctatacatatctggaagatgaagtgaaggatgaacgcaatgctaatagcaaacaggagcggagcgactggaatgatcgaacggagagagctt

SEQ ID NO: 37471 - DNA, 96 bp, Fusarium cuneirostrum
  misc_feature: 73
gggcgagacaaataattattaaaaccacttttaatgtgtcgagaaccactactttttttcacttggcgagcatgatttcagattgtgaatgtttat

SEQ ID NO: 37472 - DNA, 96 bp, Fusarium cuneirostrum
  misc_feature: 73
ccctccggtcgtccgtactaaggatatagtcatagactcggccctccgcgggcgctcgtaactcttcatgggttgccaacatactcttgtcaatcc

SEQ ID NO: 37473 - DNA, 96 bp, Fusarium cuneirostrum
  misc_feature: 73
ggactgcgaaggcaggatcacatggaatgtgggcgacgaggacggagagtccgagtggggaggccgaaggccgaccggggaaagtgtgtcgagagc

SEQ ID NO: 37474 - DNA, 96 bp, Fusarium cuneirostrum
  misc_feature: 73
caggaggcccagagggccgacaagaatccatttcaaaatttgtacaaattttgtatgggaagatttctgagattgtatgggcaacgacctggaatc

SEQ ID NO: 37475 - DNA, 96 bp, Fusarium cuneirostrum
  misc_feature: 73
gaggaagtataagacggaacgtctgcccctgcgaggacgcagtcgaagacttgagactgtatttatttttttgtgtgagacggagtcgagtctgat

SEQ ID NO: 37476 - DNA, 96 bp, Fusarium cuneirostrum
  misc_feature: 73
gaatgggtcgatgacgatcttggagatttttagtgtagatagatgcaatgtgaacttggtgagatttgtagagttgcctgatgtggaagtgatgat

SEQ ID NO: 37477 - DNA, 96 bp, Fusarium cuneirostrum
  misc_feature: 73
aacattgctgctgaattgttggtaggatacggagctattcccttcttgaatatttctgagccaagacatccttaggtcagcaatcattttgtcgag

SEQ ID NO: 37478 - DNA, 96 bp, Fusarium cuneirostrum
  misc_feature: 73
aatgtgaaatttttcgagattttggtgaggaacaagcaaaatcggattcaaattggactcaaatcgacatactttttgtatgtgaacgaaactgag

SEQ ID NO: 37479 - DNA, 96 bp, Fusarium cuneirostrum
  misc_feature: 73
cagttggaggatccaacggatccaacgattggaagtagttggttgattacgcactctgactccacggccaattccttgagccctaactcggctcgg

SEQ ID NO: 37480 - DNA, 96 bp, Fusarium cuneirostrum
  misc_feature: 73
catgaagataactgaaccacatcttgtggtgttttagtaacgtcgctacgtgttccttcgtcacactcactccgcacgtcgccctccgggctccgt

SEQ ID NO: 37481 - DNA, 96 bp, Fusarium cuneirostrum
  misc_feature: 72
acggggcttgctcatccgttcgggactcaagtggtgtaactctcaccactcctgttccattcacattctacgtcacaattccatctaacactacaa

SEQ ID NO: 37482 - DNA, 96 bp, Fusarium cuneirostrum
  misc_feature: 72
ttacaattacaattacaatcagtcacgatggctcgccattagggagggaaatggtgctcgacaagtttaaagaagtgtatttaaatgttattgtct

SEQ ID NO: 37483 - DNA, 96 bp, Fusarium cuneirostrum
  misc_feature: 72
tgtctatacatatctggaagatgaagtgaaggatgaacgcaatgctaatagcaaacaggagcggagcgactggaatgatcgaacggagagagcttg

SEQ ID NO: 37484 - DNA, 96 bp, Fusarium cuneirostrum
  misc_feature: 72
cgttcgtgatcgctttcgctctatcattcttgcctaatcgtcaagtctcggcgctgcctcaatcaacaaactgaaccaagttcagatgaccttcca

SEQ ID NO: 37485 - DNA, 96 bp, Fusarium cuneirostrum
  misc_feature: 72
atgtgaaatttttcgagattttggtgaggaacaagcaaaatcggattcaaattggactcaaatcgacatactttttgtatgtgaacgaaactgaga

SEQ ID NO: 37486 - DNA, 96 bp, Fusarium cuneirostrum
  misc_feature: 72
tcgtcagtatccacttatgcccggatcgctacgctgcaccttattcgtcgttcctcctcataacgttccgtccacccgcacttcagtcggtcccct

SEQ ID NO: 37487 - DNA, 96 bp, Fusarium cuneirostrum
  misc_feature: 72
tcctgattccctcgtgccccgcactcggtgtcatcttcgaccaccgtctcagttcatctctgatgaagttatcgccaaccactgtcgggcgcaatc

SEQ ID NO: 37488 - DNA, 96 bp, Fusarium cuneirostrum
  misc_feature: 72
tcaccatctactttatatatgctcgcgtaacacaagtgcgggagctcaccctactgtaagctctaggtttttcagcctcgctccctacctacttag

SEQ ID NO: 37489 - DNA, 96 bp, Fusarium cuneirostrum
  misc_feature: 72
tagggggggactacgggacacgggacaagctgggacagctcgtggactgagtacagcttccaggcgtagccggttgctgccccagtttttaggcat

SEQ ID NO: 37490 - DNA, 96 bp, Fusarium cuneirostrum
  misc_feature: 72
gtcgcaagacagaggatttctggaaatccgacaatttttttccttctttacattcgggttgaactgtgttcatcgctttgcaagagcaaacgaacc

SEQ ID NO: 37491 - DNA, 96 bp, Fusarium cuneirostrum
  misc_feature: 72
ggaggcccagagggccgacaagaatccatttcaaaatttgtacaaattttgtatgggaagatttctgagattgtatgggcaacgacctggaatcag

SEQ ID NO: 37492 - DNA, 96 bp, Fusarium cuneirostrum
  misc_feature: 72
gcgcagggaagactgagggattggcaatagtcattacaccgccggaggcccgagtcggaactgtataatcctacggagcccggagggcgacgtgcg

SEQ ID NO: 37493 - DNA, 96 bp, Fusarium cuneirostrum
  misc_feature: 72
gcctttagtcagcttgctgacattggcatcccagttggtaaagatgacggagaacgaggaacgagtgagtcatcaggcatagccactcagacgagg

SEQ ID NO: 37494 - DNA, 96 bp, Fusarium cuneirostrum
  misc_feature: 72
cccaccggcctccactcattccattcgttcccgtccttagtcaaccgatcattgcgtcgtccctcctccatgatcctacactcttcgccttcgtgc

SEQ ID NO: 37495 - DNA, 96 bp, Fusarium cuneirostrum
  misc_feature: 72
agggccgacaagaatccatttcaaaatttgtacaaattttgtatgggaagatttctgagattgtatgggcaacgacctggaatcagagtgagaatc

SEQ ID NO: 37496 - DNA, 96 bp, Fusarium cuneirostrum
  misc_feature: 72
cactaaaaatctccaagatcgtcatcgacccattcatcaccaaactcgtccacaccctcgacgagtgtcttcacctcttctacagccctcggcttc

SEQ ID NO: 37497 - DNA, 96 bp, Fusarium cuneirostrum
  misc_feature: 72
caaagtgcaggaagcacttgaatgtccgatggagtcggatgatatgctattcttgagagcatattactgcgtcgcttatctgacgcatatcttttc

SEQ ID NO: 37498 - DNA, 96 bp, Fusarium cuneirostrum
  misc_feature: 72
atccggaggaggagtgaacgagtgagcgatcatctacttacattaattgctggacagcatcttctcgggaagagaagaaaagagtatttgcgatag

SEQ ID NO: 37499 - DNA, 96 bp, Fusarium cuneirostrum
  misc_feature: 72
ccccaccggcctccactcattccattcgttcccgtccttagtcaaccgatcattgcgtcgtccctcctccatgatcctacactcttcgccttcgtg

SEQ ID NO: 37500 - DNA, 96 bp, Fusarium cuneirostrum
  misc_feature: 72
aacggaagtgaggggacaggaggcccagagggccgacaagaatccatttcaaaatttgtacaaattttgtatgggaagatttctgagattgtatgg

SEQ ID NO: 37501 - DNA, 96 bp, Fusarium cuneirostrum
  misc_feature: 72
caattcggtcataaggatcgatgggcgaccacagacggagggcgagactgtgtcgagaccgattgcaaaagttggacaacttttcaactttttctg

SEQ ID NO: 37502 - DNA, 96 bp, Fusarium cuneirostrum
  misc_feature: 72
atgtgtgaccgagacagatgtcgaggggaaagggtacatggcgagagcagcgctcgaggtggatttgacggagtctcaaaactggaacagtttttg

SEQ ID NO: 37503 - DNA, 96 bp, Fusarium cuneirostrum
  misc_feature: 72
aattaatgtaagtagatgatcgctcactcgttcactcctcctccggatagaatacaaactcactctgttcgtctcctcacgttgttgcggtaaact

SEQ ID NO: 37504 - DNA, 96 bp, Fusarium cuneirostrum
  misc_feature: 72
acaaaaaaataaatacagtctcaagtcttcgactgcgtcctcgcaggggcagacgttccgtcttatacttcctcgccccctcgtcagtatccactt

SEQ ID NO: 37505 - DNA, 96 bp, Fusarium cuneirostrum
  misc_feature: 71
ttaatctcttatagactaacgcgagtgacccggaacggggcaaacgagcgtccataactttggtctataagaggtttttttccaaaacgcaccgcg

SEQ ID NO: 37506 - DNA, 96 bp, Fusarium cuneirostrum
  misc_feature: 71
atattaaacagtggcgagcaaagtatgtggagtcggcagaagtgaagtcatcaccaactcccgtttcagcatagtcgggaaaacggtcccgttaca

SEQ ID NO: 37507 - DNA, 96 bp, Fusarium cuneirostrum
  misc_feature: 71
tgatcctgtcatgtcaaccgagcggggcgaggggattgagtttaggcgtttgcctaacaaagtgcaggaagcacttgaatgtccgatggagtcgga

SEQ ID NO: 37508 - DNA, 96 bp, Fusarium cuneirostrum
  misc_feature: 71
gagcgaggctgaaaaacctagagcttacagtagggtgagctcccgcacttgtgttacgcgagcatatataaagtagatggtgataacctcaaaaga

SEQ ID NO: 37509 - DNA, 96 bp, Fusarium cuneirostrum
  misc_feature: 71
gacaagctctctccgttcgatcattccagtcgctccgctcctgtttgctattagcattgcgttcatccttcacttcatcttccagatatgtataga

SEQ ID NO: 37510 - DNA, 96 bp, Fusarium cuneirostrum
  misc_feature: 71
ggaagatttctgagattgtatgggcaacgacctggaatcagagtgagaatctggtacagattgttagcgaccgaagggagctttccagcttataga

SEQ ID NO: 37511 - DNA, 96 bp, Fusarium cuneirostrum
  misc_feature: 71
tcgcaagacagaggatttctggaaatccgacaatttttttccttctttacattcgggttgaactgtgttcatcgctttgcaagagcaaacgaaccc

SEQ ID NO: 37512 - DNA, 96 bp, Fusarium cuneirostrum
  misc_feature: 71
acaaatgaaatgtcagtttcgattttgcgggcgaaatcgaaactgacatttcatttgtatgggttcgtttctggcagagccggttttttgtaagga

SEQ ID NO: 37513 - DNA, 96 bp, Fusarium cuneirostrum
  misc_feature: 71
tccggaggaggagtgaacgagtgagcgatcatctacttacattaattgctggacagcatcttctcgggaagagaagaaaagagtatttgcgatagc

SEQ ID NO: 37514 - DNA, 96 bp, Fusarium cuneirostrum
  misc_feature: 71
ctacgccttttaaattggcgagcactttgtgaatgaacgacttaatcaccacttgaggcccgagccgacgagcgagcgtagcgaaggaggagcgga

SEQ ID NO: 37515 - DNA, 96 bp, Fusarium cuneirostrum
  misc_feature: 71
tatacgggttcgtttgctcttgcaaagcgatgaacacagttcaacccgaatgtaaagaaggaaaaaaattgtcggatttccagaaatcctctgtct

SEQ ID NO: 37516 - DNA, 96 bp, Fusarium cuneirostrum
  misc_feature: 71
aaccctaattctaatctcttttttaattttattttccttatttattatatatatatattctttttttattattttctcttttttttcttttttata

SEQ ID NO: 37517 - DNA, 96 bp, Fusarium cuneirostrum
  misc_feature: 71
aacaaaaccgacctccactcagtcccttcgttcccggtcttacttactccacttcatactcgtccctcgtctgagtggctatgcctgatgactcac

SEQ ID NO: 37518 - DNA, 96 bp, Fusarium cuneirostrum
  misc_feature: 71
agcagaactatgttctgaataccgaccgaacggagtgagggaaggtgcggaatggagtgggagcagagcgaccacggaatgaggttactataatcc

SEQ ID NO: 37519 - DNA, 96 bp, Fusarium cuneirostrum
  misc_feature: 71
attaatctcttatagactaacgcgagtgacccggaacggggcaaacgagcgtccataactttggtctataagaggtttttttccaaaacgcaccgc

SEQ ID NO: 37520 - DNA, 96 bp, Fusarium cuneirostrum
  misc_feature: 71
gcgaggcaaataataatttaaataaactcgtttgacgagccctggttattctttttattagattagtgagcatgatgttactgtagatggagttgt

SEQ ID NO: 37521 - DNA, 96 bp, Fusarium cuneirostrum
  misc_feature: 71
cgcagggaagactgagggattggcaatagtcattacaccgccggaggcccgagtcggaactgtataatcctacggagcccggagggcgacgtgcgg

SEQ ID NO: 37522 - DNA, 96 bp, Fusarium cuneirostrum
  misc_feature: 71
catcaggcaactctacaaatctcaccaagttcacattgcatctatctacactaaaaatctccaagatcgtcatcgacccattcatcaccaaactcg

SEQ ID NO: 37523 - DNA, 96 bp, Fusarium cuneirostrum
  misc_feature: 71
cctttagtcagcttgctgacattggcatcccagttggtaaagatgacggagaacgaggaacgagtgagtcatcaggcatagccactcagacgaggg

SEQ ID NO: 37524 - DNA, 96 bp, Fusarium cuneirostrum
  misc_feature: 71
ccatctctattgatggtggcaaggtacgcagccaggcattttactctgaatattcctttactaacaaggtgtcataggaaaggggagatcgccaat

SEQ ID NO: 37525 - DNA, 96 bp, Fusarium cuneirostrum
  misc_feature: 71
caccatctactttatatatgctcgcgtaacacaagtgcgggagctcaccctactgtaagctctaggtttttcagcctcgctccctacctacttagt

SEQ ID NO: 37526 - DNA, 96 bp, Fusarium cuneirostrum
  misc_feature: 71
aggttgagtgagcaggcgaactctgacttgttttatttttttcgaggacggaggacgagtttaccgcaacaacgtgaggagacgaacagagtgagt

SEQ ID NO: 37527 - DNA, 96 bp, Fusarium cuneirostrum
  misc_feature: 70
atctacgattgccaatccctcagtcttccttcgctacgctcactcatccgctcgggactcatggatgaggaatacatttacagtcaccaacataaa

SEQ ID NO: 37528 - DNA, 96 bp, Fusarium cuneirostrum
  misc_feature: 70
aggcatagccactcagacgagggacgagtatgaagtggagtaagtaagaccgggaacgaagggactgagtggaggtcggttttgttggacggacaa

SEQ ID NO: 37529 - DNA, 96 bp, Fusarium cuneirostrum
  misc_feature: 70
aaagagtccacgagccgagcgcgtagcgtgcaggcgaggggattgtcaatgtaatttattcagggaataattacccttccaagcaggaactgtgaa

SEQ ID NO: 37530 - DNA, 96 bp, Fusarium cuneirostrum
  misc_feature: 70
cgagtttaccgcaacaacgtgaggagacgaacagagtgagtttgtattctatccggaggaggagtgaacgagtgagcgatcatctacttacattaa

SEQ ID NO: 37531 - DNA, 96 bp, Fusarium cuneirostrum
  misc_feature: 70
cttgagactgtatttatttttttgtgtgagacggagtcgagtctgatttcgactggaatcagttctgtttattccacggccgtggaaacacgaaca

SEQ ID NO: 37532 - DNA, 96 bp, Fusarium cuneirostrum
  misc_feature: 70
tggttattctttttattagattagtgagcatgatgttactgtagatggagttgtgaatggcctcattttcatccacactggaatagtcccgaatcc

SEQ ID NO: 37533 - DNA, 96 bp, Fusarium cuneirostrum
  misc_feature: 70
ctacgaacacggcatcaagatatgacaccagcagagcgacacaaagtagcaagagatatcgcgagaattcccggaatcatcaaagaccagcttgca

SEQ ID NO: 37534 - DNA, 96 bp, Fusarium cuneirostrum
  misc_feature: 70
cttatactcctcgactctgtctgcggggtatgagattgtggacggaacgttcgtacctctctcatttgtccgtccaacaaaaccgacctccactca

SEQ ID NO: 37535 - DNA, 96 bp, Fusarium cuneirostrum
  misc_feature: 70
caagtcctttccctttcactttcactttcactttcactttcactttcactttcactttcactttcactttcactttcactttcactttcactttca

SEQ ID NO: 37536 - DNA, 96 bp, Fusarium cuneirostrum
  misc_feature: 70
gtggacgcctccaaaatggatgagattgggatgattgctgaccttggtgtgtttgctggtgtagctggtaagtaaacgcctctaaaatggacaaga

SEQ ID NO: 37537 - DNA, 96 bp, Fusarium cuneirostrum
  misc_feature: 70
actgcgaaggcaggatcacatggaatgtgggcgacgaggacggagagtccgagtggggaggccgaaggccgaccggggaaagtgtgtcgagagcga

SEQ ID NO: 37538 - DNA, 96 bp, Fusarium cuneirostrum
  misc_feature: 70
cgaggaagtataagacggaacgtctgcccctgcgaggacgcagtcgaagacttgagactgtatttatttttttgtgtgagacggagtcgagtctga

SEQ ID NO: 37539 - DNA, 96 bp, Fusarium cuneirostrum
  misc_feature: 70
aaaagagtccacgagccgagcgcgtagcgtgcaggcgaggggattgtcaatgtaatttattcagggaataattacccttccaagcaggaactgtga

SEQ ID NO: 37540 - DNA, 96 bp, Fusarium cuneirostrum
  misc_feature: 70
accaactgggatgccaatgtcagcaagctgactaaaggcagactcagtccacacgttcgtccctcactgtcccgtgtcccgtagtccccccctata

SEQ ID NO: 37541 - DNA, 96 bp, Fusarium cuneirostrum
  misc_feature: 70
gtacctctctcatttgtccgtccaacaaaaccgacctccactcagtcccttcgttcccggtcttacttactccacttcatactcgtccctcgtctg

SEQ ID NO: 37542 - DNA, 96 bp, Fusarium cuneirostrum
  misc_feature: 70
cgcaacatccaaaacaggaaacaatgtagactaatctaagatacaaaacctccgaaaacgcccagcgtatttcagtccgaaaatagttccgccccc

SEQ ID NO: 37543 - DNA, 96 bp, Fusarium cuneirostrum
  misc_feature: 70
cctgagccgagacagattcctcaccctctctcatcctctctcatcctctctcatcctctctcatcctctctcatcctctctcatcctctctcatcc

SEQ ID NO: 37544 - DNA, 96 bp, Fusarium cuneirostrum
  misc_feature: 70
gaacgttcgtacctctctcatttgtccgtccaacaaaaccgacctccactcagtcccttcgttcccggtcttacttactccacttcatactcgtcc

SEQ ID NO: 37545 - DNA, 96 bp, Fusarium cuneirostrum
  misc_feature: 70
gctcccgcacttgtgttacgcgagcatatataaagtagatggtgataacctcaaaagagtccacgagccgagcgcgtagcgtgcaggcgaggggat

SEQ ID NO: 37546 - DNA, 96 bp, Fusarium cuneirostrum
  misc_feature: 70
gatgtgtgaccgagacagatgtcgaggggaaagggtacatggcgagagcagcgctcgaggtggatttgacggagtctcaaaactggaacagttttt

SEQ ID NO: 37547 - DNA, 96 bp, Fusarium cuneirostrum
  misc_feature: 70
aaaatctccaagatcgtcatcgacccattcatcaccaaactcgtccacaccctcgacgagtgtcttcacctcttctacagccctcggcttcacctc

SEQ ID NO: 37548 - DNA, 96 bp, Fusarium cuneirostrum
  misc_feature: 70
aacatcatgctcactaatctaataaaaagaataaccagggctcgtcaaacgagtttatttaaattattatttgcctcgccctgcttatgttatgtc

SEQ ID NO: 37549 - DNA, 96 bp, Fusarium cuneirostrum
  misc_feature: 70
gaagaatgaacgtgtgtacccaggagtaatcgtcttgagtcagcttgctgaccttgacgaccccagtcaatagacatccgaggtcacgaggaatgt

SEQ ID NO: 37550 - DNA, 96 bp, Fusarium cuneirostrum
  misc_feature: 70
ctgagccgagacagattcctcaccctctctcatcctctctcatcctctctcatcctctctcatcctctctcatcctctctcatcctctctcatcct

SEQ ID NO: 37551 - DNA, 96 bp, Fusarium cuneirostrum
  misc_feature: 70
agcgaggctgaaaaacctagagcttacagtagggtgagctcccgcacttgtgttacgcgagcatatataaagtagatggtgataacctcaaaagag

SEQ ID NO: 37552 - DNA, 96 bp, Fusarium cuneirostrum
  misc_feature: 70
cgtacctctctcatttgtccgtccaacaaaaccgacctccactcagtcccttcgttcccggtcttacttactccacttcatactcgtccctcgtct

SEQ ID NO: 37553 - DNA, 96 bp, Fusarium cuneirostrum
  misc_feature: 70
aataaacagaactgattccagtcgaaatcagactcgactccgtctcacacaaaaaaataaatacagtctcaagtcttcgactgcgtcctcgcaggg

SEQ ID NO: 37554 - DNA, 96 bp, Fusarium cuneirostrum
  misc_feature: 70
atgacttgtgatttgaattgattgtgcatttgtgaacgagaagagtgaactgttattgtagtggtaaaagagaaccacgagctagacggcgagtgg

SEQ ID NO: 37555 - DNA, 96 bp, Fusarium cuneirostrum
  misc_feature: 70
catttcgctccctggcggtcgctcatgttagcgtctataagagattaatgctccctccggtcgcattcgtgccttcggcactaacagaagtgacct

SEQ ID NO: 37556 - DNA, 96 bp, Fusarium cuneirostrum
  misc_feature: 70
agaagaggtgaagacactcgtcgagggtgtggacgagtttggtgatgaatgggtcgatgacgatcttggagatttttagtgtagatagatgcaatg

SEQ ID NO: 37557 - DNA, 96 bp, Fusarium cuneirostrum
  misc_feature: 70
aatgggtcgatgacgatcttggagatttttagtgtagatagatgcaatgtgaacttggtgagatttgtagagttgcctgatgtggaagtgatgatg

SEQ ID NO: 37558 - DNA, 96 bp, Fusarium cuneirostrum
  misc_feature: 70
acaaaaagtatgtcgatttgagtccaatttgaatccgattttgcttgttcctcaccaaaatctcgaaaaatttcacattcgggctcgacacaatct

SEQ ID NO: 37559 - DNA, 96 bp, Fusarium cuneirostrum
  misc_feature: 70
acattctcagaatcgaactcatacaaaatttgtacaaatttcagatcaaactgaaatgcgaccggcgcagagacagcagcggccgtgtgtgttagt

SEQ ID NO: 37560 - DNA, 96 bp, Fusarium cuneirostrum
  misc_feature: 69
ttgtagttagtatagacagtgatatgtgagcacaaccgagagagtagtggagcgaacactaaataaaaggctccaacagaagtgagcgacacgtaa

SEQ ID NO: 37561 - DNA, 96 bp, Fusarium cuneirostrum
  misc_feature: 69
gagacagcagtcgaatagagcccagagggcgaacgatctaaacaccaggtagtggtggattgtggtgtggaacacgtttggtgagagagtcaccaa

SEQ ID NO: 37562 - DNA, 96 bp, Fusarium cuneirostrum
  misc_feature: 69
agagggccgacaagaatccatttcaaaatttgtacaaattttgtatgggaagatttctgagattgtatgggcaacgacctggaatcagagtgagaa

SEQ ID NO: 37563 - DNA, 96 bp, Fusarium cuneirostrum
  misc_feature: 69
tatctacgattgccaatccctcagtcttccttcgctacgctcactcatccgctcgggactcatggatgaggaatacatttacagtcaccaacataa

SEQ ID NO: 37564 - DNA, 96 bp, Fusarium cuneirostrum
  misc_feature: 69
agtactcgctctaaaatctacgtaattgaagtcatcatcacttccacatcaggcaactctacaaatctcaccaagttcacattgcatctatctaca

SEQ ID NO: 37565 - DNA, 96 bp, Fusarium cuneirostrum
  misc_feature: 69
cgagtcattccttttttaaataacattttaatgtgacgagcaccactacgccttttaaattggcgagcactttgtgaatgaacgacttaatcacca

SEQ ID NO: 37566 - DNA, 96 bp, Fusarium cuneirostrum
  misc_feature: 69
tggctatgcctgatgactcactcgttcctcgttctccgtcatctttaccaactgggatgccaatgtcagcaagctgactaaaggcagactcagtcc

SEQ ID NO: 37567 - DNA, 96 bp, Fusarium cuneirostrum
  misc_feature: 69
caacaaaaccgacctccactcagtcccttcgttcccggtcttacttactccacttcatactcgtccctcgtctgagtggctatgcctgatgactca

SEQ ID NO: 37568 - DNA, 96 bp, Fusarium cuneirostrum
  misc_feature: 69
tctttaccaactgggatgccaatgtcagcaagctgactaaaggcagactcagtccacacgttcgtccctcactgtcccgtgtcccgtagtcccccc

SEQ ID NO: 37569 - DNA, 96 bp, Fusarium cuneirostrum
  misc_feature: 69
cagagggccgacaagaatccatttcaaaatttgtacaaattttgtatgggaagatttctgagattgtatgggcaacgacctggaatcagagtgaga

SEQ ID NO: 37570 - DNA, 96 bp, Fusarium cuneirostrum
  misc_feature: 69
ctgcctttagtcagcttgctgacattggcatcccagttggtaaagatgacggagaacgaggaacgagtgagtcatcaggcatagccactcagacga

SEQ ID NO: 37571 - DNA, 96 bp, Fusarium cuneirostrum
  misc_feature: 69
gagggattgacaagagtatgttggcaacccatgaagagttacgagcgcccgcggagggccgagtctatgactatatccttagtacggacgaccgga

SEQ ID NO: 37572 - DNA, 96 bp, Fusarium cuneirostrum
  misc_feature: 69
gtgtggactgagtctgcctttagtcagcttgctgacattggcatcccagttggtaaagatgacggagaacgaggaacgagtgagtcatcaggcata

SEQ ID NO: 37573 - DNA, 96 bp, Fusarium cuneirostrum
  misc_feature: 69
agcaggcgaactctgacttgttttatttttttcgaggacggaggacgagtttaccgcaacaacgtgaggagacgaacagagtgagtttgtattcta

SEQ ID NO: 37574 - DNA, 96 bp, Fusarium cuneirostrum
  misc_feature: 69
aaactcactctgttcgtctcctcacgttgttgcggtaaactcgtcctccgtcctcgaaaaaaataaaacaagtcagagttcgcctgctcactcaac

SEQ ID NO: 37575 - DNA, 96 bp, Fusarium cuneirostrum
  misc_feature: 69
gatataagcgtagcttggtgtctccgccaccaagaaaaagtgacttcgttaacagaagtgaccgatttctcggcccattctcaggatttggctcac

SEQ ID NO: 37576 - DNA, 96 bp, Fusarium cuneirostrum
  misc_feature: 69
caataacatttttcctagtccgtgcacgcttctcggatctcgtaacaagactgtcgcataacattcgtgtgaccggatgtaactatccggtttcac

SEQ ID NO: 37577 - DNA, 96 bp, Fusarium cuneirostrum
  misc_feature: 69
cctccggtcgtccgtactaaggatatagtcatagactcggccctccgcgggcgctcgtaactcttcatgggttgccaacatactcttgtcaatccc

SEQ ID NO: 37578 - DNA, 96 bp, Fusarium cuneirostrum
  misc_feature: 69
gggaccgactgaagtgcgggtggacggaacgttatgaggaggaacgacgaataaggtgcagcgtagcgatccgggcataagtggatactgacgagg

SEQ ID NO: 37579 - DNA, 96 bp, Fusarium cuneirostrum
  misc_feature: 69
gggaagatttctgagattgtatgggcaacgacctggaatcagagtgagaatctggtacagattgttagcgaccgaagggagctttccagcttatag

SEQ ID NO: 37580 - DNA, 96 bp, Fusarium cuneirostrum
  misc_feature: 69
acgggacacgggacagtgaagaatgaacgtgtgtacccaggagtaatcgtcttgagtcagcttgctgaccttgacgaccccagtcaatagacatcc

SEQ ID NO: 37581 - DNA, 96 bp, Fusarium cuneirostrum
  misc_feature: 69
gcaaataataatttaaataaactcgtttgacgagccctggttattctttttattagattagtgagcatgatgttactgtagatggagttgtgaatg

SEQ ID NO: 37582 - DNA, 96 bp, Fusarium cuneirostrum
  misc_feature: 69
gatttgagtccaatttgaatccgattttgcttgttcctcaccaaaatctcgaaaaatttcacattcgggctcgacacaatctcgcccctctgtctt

SEQ ID NO: 37583 - DNA, 96 bp, Fusarium cuneirostrum
  misc_feature: 69
gaggagacgaacagagtgagtttgtattctatccggaggaggagtgaacgagtgagcgatcatctacttacattaattgctggacagcatcttctc

SEQ ID NO: 37584 - DNA, 96 bp, Fusarium cuneirostrum
  misc_feature: 69
catcgtgccatcctaccttctgccacactctactgagtcgtgaagccgtcgtgcactcctacatgaaatggtaacacacatatccatggtgttctc

SEQ ID NO: 37585 - DNA, 96 bp, Fusarium cuneirostrum
  misc_feature: 69
aaaacaccacaagatgtggttcagttatcttcatgagagtgcatgatgacctcaagtggaggtgcatggactgcgaaggcaggatcacatggaatg

SEQ ID NO: 37586 - DNA, 96 bp, Fusarium cuneirostrum
  misc_feature: 69
catgatcacgactacgattcaaaataataataatgtcacatatgcacagctcgctcgattaaataaagtatgaagtggtgctcgtcaaaagtatat

SEQ ID NO: 37587 - DNA, 96 bp, Fusarium cuneirostrum
  misc_feature: 69
aaaatctcgaaaaatttcacattcgggctcgacacaatctcgcccctctgtcttacggtcgccccacaggctccctcctactttactcacgtcatg

SEQ ID NO: 37588 - DNA, 96 bp, Fusarium cuneirostrum
  misc_feature: 69
cagctttgtaatcagctaaagcttgaaaacaaaacctcttatagaccaaagttatggacgctcgtttgccccgttccgggtcactcgcgttagtct

SEQ ID NO: 37589 - DNA, 96 bp, Fusarium cuneirostrum
  misc_feature: 68
cctttttagtttatgtgcgctccgtctttatttaatgctcgcccataatacatgtgaagctatcgtcactacaacatcaggtaatcatagaacaaa

SEQ ID NO: 37590 - DNA, 96 bp, Fusarium cuneirostrum
  misc_feature: 68
tttagtcagcttgctgacattggcatcccagttggtaaagatgacggagaacgaggaacgagtgagtcatcaggcatagccactcagacgagggac

SEQ ID NO: 37591 - DNA, 96 bp, Fusarium cuneirostrum
  misc_feature: 68
tatacatatctggaagatgaagtgaaggatgaacgcaatgctaatagcaaacaggagcggagcgactggaatgatcgaacggagagagcttgtcaa

SEQ ID NO: 37592 - DNA, 96 bp, Fusarium cuneirostrum
  misc_feature: 68
tgtggacggaacgttcgtacctctctcatttgtccgtccaacaaaaccgacctccactcagtcccttcgttcccggtcttacttactccacttcat

SEQ ID NO: 37593 - DNA, 96 bp, Fusarium cuneirostrum
  misc_feature: 68
tgtcagtggacagtaatacacgcggagtgatgcgtagttggcggagaccaattgcttttagcgaactggtgagcatgtgtcggcagacaggcaggg

SEQ ID NO: 37594 - DNA, 96 bp, Fusarium cuneirostrum
  misc_feature: 68
tacggggcttgctcatccgttcgggactcaagtggtgtaactctcaccactcctgttccattcacattctacgtcacaattccatctaacactaca

SEQ ID NO: 37595 - DNA, 96 bp, Fusarium cuneirostrum
  misc_feature: 68
tggcgagagcagcgctcgaggtggatttgacggagtctcaaaactggaacagtttttgtatggactcgattctggcatttggtgagccaaatcctg

SEQ ID NO: 37596 - DNA, 96 bp, Fusarium cuneirostrum
  misc_feature: 68
tgacttgtgatttgaattgattgtgcatttgtgaacgagaagagtgaactgttattgtagtggtaaaagagaaccacgagctagacggcgagtggt

SEQ ID NO: 37597 - DNA, 96 bp, Fusarium cuneirostrum
  misc_feature: 68
tactgtagatggagttgtgaatggcctcattttcatccacactggaatagtcccgaatcccgaggacgaaggacgcagggtgagggattgacaaga

SEQ ID NO: 37598 - DNA, 96 bp, Fusarium cuneirostrum
  misc_feature: 68
attgtcaatgtaatttattcagggaataattacccttccaagcaggaactgtgaaatagagaccgagccataaggcgaggtgttgtcagagcacga

SEQ ID NO: 37599 - DNA, 96 bp, Fusarium cuneirostrum
  misc_feature: 68
tcatgaagataactgaaccacatcttgtggtgttttagtaacgtcgctacgtgttccttcgtcacactcactccgcacgtcgccctccgggctccg

SEQ ID NO: 37600 - DNA, 96 bp, Fusarium cuneirostrum
  misc_feature: 68
aattcggtcataaggatcgatgggcgaccacagacggagggcgagactgtgtcgagaccgattgcaaaagttggacaacttttcaactttttctga

SEQ ID NO: 37601 - DNA, 96 bp, Fusarium cuneirostrum
  misc_feature: 68
accatctactttatatatgctcgcgtaacacaagtgcgggagctcaccctactgtaagctctaggtttttcagcctcgctccctacctacttagta

SEQ ID NO: 37602 - DNA, 96 bp, Fusarium cuneirostrum
  misc_feature: 68
agacagcagtcgaatagagcccagagggcgaacgatctaaacaccaggtagtggtggattgtggtgtggaacacgtttggtgagagagtcaccaac

SEQ ID NO: 37603 - DNA, 96 bp, Fusarium cuneirostrum
  misc_feature: 68
gtggtgattaagtcgttcattcacaaagtgctcgccaatttaaaaggcgtagtggtgctcgtcacattaaaatgttatttaaaaaaggaatgactc

SEQ ID NO: 37604 - DNA, 96 bp, Fusarium cuneirostrum
  misc_feature: 68
aagtcctttccctttcactttcactttcactttcactttcactttcactttcactttcactttcactttcactttcactttcactttcactttcac

SEQ ID NO: 37605 - DNA, 96 bp, Fusarium cuneirostrum
  misc_feature: 68
cctaaaaactggggcagcaaccggctacgcctggaagctgtactcagtccacgagctgtcccagcttgtcccgtgtcccgtagtccccccctatac

SEQ ID NO: 37606 - DNA, 96 bp, Fusarium cuneirostrum
  misc_feature: 68
ctacggggcttgctcatccgttcgggactcaagtggtgtaactctcaccactcctgttccattcacattctacgtcacaattccatctaacactac

SEQ ID NO: 37607 - DNA, 96 bp, Fusarium cuneirostrum
  misc_feature: 68
ggtgtggacgagtttggtgatgaatgggtcgatgacgatcttggagatttttagtgtagatagatgcaatgtgaacttggtgagatttgtagagtt

SEQ ID NO: 37608 - DNA, 96 bp, Fusarium cuneirostrum
  misc_feature: 68
atataagcgtagcttggtgtctccgccaccaagaaaaagtgacttcgttaacagaagtgaccgatttctcggcccattctcaggatttggctcacc

SEQ ID NO: 37609 - DNA, 96 bp, Fusarium cuneirostrum
  misc_feature: 68
ggggattgtcaatgtaatttattcagggaataattacccttccaagcaggaactgtgaaatagagaccgagccataaggcgaggtgttgtcagagc

SEQ ID NO: 37610 - DNA, 96 bp, Fusarium cuneirostrum
  misc_feature: 68
gcgaaggcaggatcacatggaatgtgggcgacgaggacggagagtccgagtggggaggccgaaggccgaccggggaaagtgtgtcgagagcgaggg

SEQ ID NO: 37611 - DNA, 96 bp, Fusarium cuneirostrum
  misc_feature: 68
ctccggtcgtccgtactaaggatatagtcatagactcggccctccgcgggcgctcgtaactcttcatgggttgccaacatactcttgtcaatccct

SEQ ID NO: 37612 - DNA, 96 bp, Fusarium cuneirostrum
  misc_feature: 68
agtaagaccgggaacgaagggactgagtggaggtcggttttgttggacggacaaatgagagaggtacgaacgttccgtccacaatctcataccccg

SEQ ID NO: 37613 - DNA, 96 bp, Fusarium cuneirostrum
  misc_feature: 68
cccacggtcgggtgtgtctgggtcgacgtccgtctccccctcttttatttctcctcgtgcactcacttcagtcgcatcctgcattcatgtttgact

SEQ ID NO: 37614 - DNA, 96 bp, Fusarium cuneirostrum
  misc_feature: 68
aggaagtataagacggaacgtctgcccctgcgaggacgcagtcgaagacttgagactgtatttatttttttgtgtgagacggagtcgagtctgatt

SEQ ID NO: 37615 - DNA, 96 bp, Fusarium cuneirostrum
  misc_feature: 68
aaaaagtgacttcgttaacagaagtgaccgatttctcggcccattctcaggatttggctcaccaaatgccagaatcgagtccatacaaaaactgtt

SEQ ID NO: 37616 - DNA, 96 bp, Fusarium cuneirostrum
  misc_feature: 67
tttttttattattttctcttttttttcttttttataattatatctttttttttttcttttaattatttatttatttttaattcttgattctttttt

SEQ ID NO: 37617 - DNA, 96 bp, Fusarium cuneirostrum
  misc_feature: 67
ctattgctcgtcacttctcgttccgatatggatatacgggttcgtttgctcttgcaaagcgatgaacacagttcaacccgaatgtaaagaaggaaa

SEQ ID NO: 37618 - DNA, 96 bp, Fusarium cuneirostrum
  misc_feature: 67
tagacactcacctgttcgtgtttccacggccgtggaataaacagaactgattccagtcgaaatcagactcgactccgtctcacacaaaaaaataaa

SEQ ID NO: 37619 - DNA, 96 bp, Fusarium cuneirostrum
  misc_feature: 67
caaactcactctgttcgtctcctcacgttgttgcggtaaactcgtcctccgtcctcgaaaaaaataaaacaagtcagagttcgcctgctcactcaa

SEQ ID NO: 37620 - DNA, 96 bp, Fusarium cuneirostrum
  misc_feature: 67
accctaattctaatctcttttttaattttattttccttatttattatatatatatattctttttttattattttctcttttttttcttttttataa

SEQ ID NO: 37621 - DNA, 96 bp, Fusarium cuneirostrum
  misc_feature: 67
tgtggacgagtttggtgatgaatgggtcgatgacgatcttggagatttttagtgtagatagatgcaatgtgaacttggtgagatttgtagagttgc

SEQ ID NO: 37622 - DNA, 96 bp, Fusarium cuneirostrum
  misc_feature: 67
tctcacacgcattaggaaacatctctttctgaaaagaagaaagaagaaagaagaaagaagaaagaagaaagaagaaagaagaaagaagaaagaaga

SEQ ID NO: 37623 - DNA, 96 bp, Fusarium cuneirostrum
  misc_feature: 67
tcgtttgctcttgcaaagcgatgaacacagttcaacccgaatgtaaagaaggaaaaaaattgtcggatttccagaaatcctctgtcttgcgacacc

SEQ ID NO: 37624 - DNA, 96 bp, Fusarium cuneirostrum
  misc_feature: 67
tcagtatccacttatgcccggatcgctacgctgcaccttattcgtcgttcctcctcataacgttccgtccacccgcacttcagtcggtcccctcct

SEQ ID NO: 37625 - DNA, 96 bp, Fusarium cuneirostrum
  misc_feature: 67
tacaaatgaaatgtcagtttcgattttgcgggcgaaatcgaaactgacatttcatttgtatgggttcgtttctggcagagccggttttttgtaagg

SEQ ID NO: 37626 - DNA, 96 bp, Fusarium cuneirostrum
  misc_feature: 67
gagtgagcaggcgaactctgacttgttttatttttttcgaggacggaggacgagtttaccgcaacaacgtgaggagacgaacagagtgagtttgta

SEQ ID NO: 37627 - DNA, 96 bp, Fusarium cuneirostrum
  misc_feature: 67
gtaaagatctctttagctataaaattaataaattaagattatttaatagaagtttaattaactttagataactttaatcttagttagaaagtctta

SEQ ID NO: 37628 - DNA, 96 bp, Fusarium cuneirostrum
  misc_feature: 67
taaaacaccacaagatgtggttcagttatcttcatgagagtgcatgatgacctcaagtggaggtgcatggactgcgaaggcaggatcacatggaat

SEQ ID NO: 37629 - DNA, 96 bp, Fusarium cuneirostrum
  misc_feature: 67
attacctattccggtaagtctcacaaagcatcgttggagttactcctccacacttgacccaactcaaacacagcatcatcaaatctacttcgaaac

SEQ ID NO: 37630 - DNA, 96 bp, Fusarium cuneirostrum
  misc_feature: 67
ctttaccaactgggatgccaatgtcagcaagctgactaaaggcagactcagtccacacgttcgtccctcactgtcccgtgtcccgtagtccccccc

SEQ ID NO: 37631 - DNA, 96 bp, Fusarium cuneirostrum
  misc_feature: 67
ggcgcagggaagactgagggattggcaatagtcattacaccgccggaggcccgagtcggaactgtataatcctacggagcccggagggcgacgtgc

SEQ ID NO: 37632 - DNA, 96 bp, Fusarium cuneirostrum
  misc_feature: 67
ggagacgaacagagtgagtttgtattctatccggaggaggagtgaacgagtgagcgatcatctacttacattaattgctggacagcatcttctcgg

SEQ ID NO: 37633 - DNA, 96 bp, Fusarium cuneirostrum
  misc_feature: 67
gcgaggaagtataagacggaacgtctgcccctgcgaggacgcagtcgaagacttgagactgtatttatttttttgtgtgagacggagtcgagtctg

SEQ ID NO: 37634 - DNA, 96 bp, Fusarium cuneirostrum
  misc_feature: 67
gcacgctacgcgctcgggctcaggactatcttgggtacatgatcacgactacgattcaaaataataataatgtcacatatgcacagctcgctcgat

SEQ ID NO: 37635 - DNA, 96 bp, Fusarium cuneirostrum
  misc_feature: 67
ccgtggaataaacagaactgattccagtcgaaatcagactcgactccgtctcacacaaaaaaataaatacagtctcaagtcttcgactgcgtcctc

SEQ ID NO: 37636 - DNA, 96 bp, Fusarium cuneirostrum
  misc_feature: 67
aatggatatggtgatagcctcacctttttttgactttgtgactttgagactttgactgtgatgatgactacttgtgagcccttgacataacataag

SEQ ID NO: 37637 - DNA, 96 bp, Fusarium cuneirostrum
  misc_feature: 67
caactaaagttgacaagctctctccgttcgatcattccagtcgctccgctcctgtttgctattagcattgcgttcatccttcacttcatcttccag

SEQ ID NO: 37638 - DNA, 96 bp, Fusarium cuneirostrum
  misc_feature: 67
atctacgaacacggcatcaagatatgacaccagcagagcgacacaaagtagcaagagatatcgcgagaattcccggaatcatcaaagaccagcttg

SEQ ID NO: 37639 - DNA, 96 bp, Fusarium cuneirostrum
  misc_feature: 67
aattgaagtcatcatcacttccacatcaggcaactctacaaatctcaccaagttcacattgcatctatctacactaaaaatctccaagatcgtcat

SEQ ID NO: 37640 - DNA, 96 bp, Fusarium cuneirostrum
  misc_feature: 67
aagtcacagtcgctcgcctttaggcttactttttggattcattacggcgagctgttggttccagataagtgctcgcataaagataaatgaagctat

SEQ ID NO: 37641 - DNA, 96 bp, Fusarium cuneirostrum
  misc_feature: 66
tttcgatgtgcgcattgactgttggtcaattgatgatgttatcgtgagcagtgaccttgcgaccttgctcattattataacctcgcgacgggttcg

SEQ ID NO: 37642 - DNA, 96 bp, Fusarium cuneirostrum
  misc_feature: 66
accatctctattgatggtggcaaggtacgcagccaggcattttactctgaatattcctttactaacaaggtgtcataggaaaggggagatcgccaa

SEQ ID NO: 37643 - DNA, 96 bp, Fusarium cuneirostrum
  misc_feature: 66
ttcgtttgctcttgcaaagcgatgaacacagttcaacccgaatgtaaagaaggaaaaaaattgtcggatttccagaaatcctctgtcttgcgacac

SEQ ID NO: 37644 - DNA, 96 bp, Fusarium cuneirostrum
  misc_feature: 66
cgtccttcgtcctcgggattcgggactattccagtgtggatgaaaatgaggccattcacaactccatctacagtaacatcatgctcactaatctaa

SEQ ID NO: 37645 - DNA, 96 bp, Fusarium cuneirostrum
  misc_feature: 66
tggacggaacgttcgtacctctctcatttgtccgtccaacaaaaccgacctccactcagtcccttcgttcccggtcttacttactccacttcatac

SEQ ID NO: 37646 - DNA, 96 bp, Fusarium cuneirostrum
  misc_feature: 66
tgatatgtgagcacaaccgagagagtagtggagcgaacactaaataaaaggctccaacagaagtgagcgacacgtaattgtgatgttgtgcgtata

SEQ ID NO: 37647 - DNA, 96 bp, Fusarium cuneirostrum
  misc_feature: 66
tcgaaataaataatcgatcgtcgctccactcctattgctcgtcacttctcgttccgatatggatatacgggttcgtttgctcttgcaaagcgatga

SEQ ID NO: 37648 - DNA, 96 bp, Fusarium cuneirostrum
  misc_feature: 66
gacagagtcgaggagtataagacagcgtcttttcccccgagaggttgagtgagcaggcgaactctgacttgttttatttttttcgaggacggagga

SEQ ID NO: 37649 - DNA, 96 bp, Fusarium cuneirostrum
  misc_feature: 66
acaaaaggcgcggagcgcccacctggaaggtcatctgaacttggttcagtttgttgattgaggcagcgccgagacttgacgattaggcaagaatga

SEQ ID NO: 37650 - DNA, 96 bp, Fusarium cuneirostrum
  misc_feature: 66
gacactcacctgttcgtgtttccacggccgtggaataaacagaactgattccagtcgaaatcagactcgactccgtctcacacaaaaaaataaata

SEQ ID NO: 37651 - DNA, 96 bp, Fusarium cuneirostrum
  misc_feature: 66
tatagtaaagatctctttagctataaaattaataaattaagattatttaatagaagtttaattaactttagataactttaatcttagttagaaagt

SEQ ID NO: 37652 - DNA, 96 bp, Fusarium cuneirostrum
  misc_feature: 66
taaaatctacgtaattgaagtcatcatcacttccacatcaggcaactctacaaatctcaccaagttcacattgcatctatctacactaaaaatctc

SEQ ID NO: 37653 - DNA, 96 bp, Fusarium cuneirostrum
  misc_feature: 66
caattaatgtaagtagatgatcgctcactcgttcactcctcctccggatagaatacaaactcactctgttcgtctcctcacgttgttgcggtaaac

SEQ ID NO: 37654 - DNA, 96 bp, Fusarium cuneirostrum
  misc_feature: 66
acacaaaaaaataaatacagtctcaagtcttcgactgcgtcctcgcaggggcagacgttccgtcttatacttcctcgccccctcgtcagtatccac

SEQ ID NO: 37655 - DNA, 96 bp, Fusarium cuneirostrum
  misc_feature: 66
gtgaaatttttcgagattttggtgaggaacaagcaaaatcggattcaaattggactcaaatcgacatactttttgtatgtgaacgaaactgagaat

SEQ ID NO: 37656 - DNA, 96 bp, Fusarium cuneirostrum
  misc_feature: 66
gtcggttttgttggacggacaaatgagagaggtacgaacgttccgtccacaatctcataccccgcagacagagtcgaggagtataagacagcgtct

SEQ ID NO: 37657 - DNA, 96 bp, Fusarium cuneirostrum
  misc_feature: 66
gtatgacttgtgatttgaattgattgtgcatttgtgaacgagaagagtgaactgttattgtagtggtaaaagagaaccacgagctagacggcgagt

SEQ ID NO: 37658 - DNA, 96 bp, Fusarium cuneirostrum
  misc_feature: 66
ctccgatgctctcctgtcctcctccgtcgtccttcctcgcactcgaaccatctcgttcatcactccgtgatacaaaagaataaaccacgttcgccc

SEQ ID NO: 37659 - DNA, 96 bp, Fusarium cuneirostrum
  misc_feature: 66
atgcactctcatgaagataactgaaccacatcttgtggtgttttagtaacgtcgctacgtgttccttcgtcacactcactccgcacgtcgccctcc

SEQ ID NO: 37660 - DNA, 96 bp, Fusarium cuneirostrum
  misc_feature: 66
ccgttcgtgatcgctttcgctctatcattcttgcctaatcgtcaagtctcggcgctgcctcaatcaacaaactgaaccaagttcagatgaccttcc

SEQ ID NO: 37661 - DNA, 96 bp, Fusarium cuneirostrum
  misc_feature: 66
atccataacctacaggagatagggcgagacaataacatttaaatacacttctttaaacttgtcgagcaccatttccctccctaatggcgagccatc

SEQ ID NO: 37662 - DNA, 96 bp, Fusarium cuneirostrum
  misc_feature: 66
ctcaccactcgccgtctagctcgtggttctcttttaccactacaataacagttcactcttctcgttcacaaatgcacaatcaattcaaatcacaag

SEQ ID NO: 37663 - DNA, 96 bp, Fusarium cuneirostrum
  misc_feature: 66
cctaaattaattcagggccggcaatttccccacttttaacgacattaaataaagaggcgctcgataatagcgcaataggatatatagcgtaattag

SEQ ID NO: 37664 - DNA, 96 bp, Fusarium cuneirostrum
  misc_feature: 66
aaacagtggccggtgactccaatcatcatcgttgagagattgatctggaacgtcttgatttttgaagcttaacgggagagttcgtcttcgcttcgg

SEQ ID NO: 37665 - DNA, 96 bp, Fusarium cuneirostrum
  misc_feature: 66
caaaaggcgcggagcgcccacctggaaggtcatctgaacttggttcagtttgttgattgaggcagcgccgagacttgacgattaggcaagaatgat

SEQ ID NO: 37666 - DNA, 96 bp, Fusarium cuneirostrum
  misc_feature: 66
acaggaggcccagagggccgacaagaatccatttcaaaatttgtacaaattttgtatgggaagatttctgagattgtatgggcaacgacctggaat

SEQ ID NO: 37667 - DNA, 96 bp, Fusarium cuneirostrum
  misc_feature: 66
ataagacagcgtcttttcccccgagagggcagagggaagagtttccctcctacatcatctgtctgagctcagagagcgagtcgatcttggattcct

SEQ ID NO: 37668 - DNA, 96 bp, Fusarium cuneirostrum
  misc_feature: 65
aactacaataccacttgaggtcatcaccattacctattccggtaagtctcacaaagcatcgttggagttactcctccacacttgacccaactcaaa

SEQ ID NO: 37669 - DNA, 96 bp, Fusarium cuneirostrum
  misc_feature: 65
atattaagagaaattaaaaaaaaaaagaaatattaaaaagaaaagaaaaaagaaaaaagaatcaagaattaaaaataaataaataattaaaagaaa

SEQ ID NO: 37670 - DNA, 96 bp, Fusarium cuneirostrum
  misc_feature: 65
tcacacgcattaggaaacatctctttctgaaaagaagaaagaagaaagaagaaagaagaaagaagaaagaagaaagaagaaagaagaaagaagaaa

SEQ ID NO: 37671 - DNA, 96 bp, Fusarium cuneirostrum
  misc_feature: 65
tttatttctcctcgtgcactcacttcagtcgcatcctgcattcatgtttgactgctgtcaattgaagtcatcaccatctctgtgtgatgtctgtaa

SEQ ID NO: 37672 - DNA, 96 bp, Fusarium cuneirostrum
  misc_feature: 65
ctcacacgcattaggaaacatctctttctgaaaagaagaaagaagaaagaagaaagaagaaagaagaaagaagaaagaagaaagaagaaagaagaa

SEQ ID NO: 37673 - DNA, 96 bp, Fusarium cuneirostrum
  misc_feature: 65
ttaatctcttatagactaacgcgagtgacccggaacggggcaaacgagcgtccataactttggtctataagaggtttttttgacaaacgctgcgcg

SEQ ID NO: 37674 - DNA, 96 bp, Fusarium cuneirostrum
  misc_feature: 65
ttaaacagtggcgagcaaagtatgtggagtcggcagaagtgaagtcatcaccaactcccgtttcagcatagtcgggaaaacggtcccgttacatag

SEQ ID NO: 37675 - DNA, 96 bp, Fusarium cuneirostrum
  misc_feature: 65
actcggactctccgtcctcgtcgcccacattccatgtgatcctgccttcgcagtccatgcacctccacttgaggtcatcatgcactctcatgaaga

SEQ ID NO: 37676 - DNA, 96 bp, Fusarium cuneirostrum
  misc_feature: 65
atcggaggtgaagccgagggctgtagaagaggtgaagacactcgtcgagggtgtggacgagtttggtgatgaatgggtcgatgacgatcttggaga

SEQ ID NO: 37677 - DNA, 96 bp, Fusarium cuneirostrum
  misc_feature: 65
gattgacaagagtatgttggcaacccatgaagagttacgagcgcccgcggagggccgagtctatgactatatccttagtacggacgaccggaggga

SEQ ID NO: 37678 - DNA, 96 bp, Fusarium cuneirostrum
  misc_feature: 65
cctacggggcttgctcatccgttcgggactcaagtggtgtaactctcaccactcctgttccattcacattctacgtcacaattccatctaacacta

SEQ ID NO: 37679 - DNA, 96 bp, Fusarium cuneirostrum
  misc_feature: 65
agctttgtaatcagctaaagcttgaaaacaaaacctcttatagaccaaagttatggacgctcgtttgccccgttccgggtcactcgcgttagtcta

SEQ ID NO: 37680 - DNA, 96 bp, Fusarium cuneirostrum
  misc_feature: 65
attgtagttagtatagacagtgatatgtgagcacaaccgagagagtagtggagcgaacactaaataaaaggctccaacagaagtgagcgacacgta

SEQ ID NO: 37681 - DNA, 96 bp, Fusarium cuneirostrum
  misc_feature: 65
gtttctattacttcttcgatctcgtttcactccatctcttttcatgatctagtgaagttattcgcacttcacctcttcacattatctagcaccact

SEQ ID NO: 37682 - DNA, 96 bp, Fusarium cuneirostrum
  misc_feature: 65
gtctgcggggtatgagattgtggacggaacgttcgtacctctctcatttgtccgtccaacaaaaccgacctccactcagtcccttcgttcccggtc

SEQ ID NO: 37683 - DNA, 96 bp, Fusarium cuneirostrum
  misc_feature: 65
caactgggatgccaatgtcagcaagctgactaaaggcagactcagtccacacgttcgtccctcactgtcccgtgtcccgtagtccccccctatacc

SEQ ID NO: 37684 - DNA, 96 bp, Fusarium cuneirostrum
  misc_feature: 65
atctttaccaactgggatgccaatgtcagcaagctgactaaaggcagactcagtccacacgttcgtccctcactgtcccgtgtcccgtagtccccc

SEQ ID NO: 37685 - DNA, 96 bp, Fusarium cuneirostrum
  misc_feature: 65
ataaactaaaaagggcacacatattagtgagctcccgcatttatatatagcgagcatgttttaatctgatgtgaataacttcaaaagtattttccc

SEQ ID NO: 37686 - DNA, 96 bp, Fusarium cuneirostrum
  misc_feature: 65
gcaacatccaaaacaggaaacaatgtagactaatctaagatacaaaacctccgaaaacgcccagcgtatttcagtccgaaaatagttccgccccct

SEQ ID NO: 37687 - DNA, 96 bp, Fusarium cuneirostrum
  misc_feature: 65
gatgcaatgtgaacttggtgagatttgtagagttgcctgatgtggaagtgatgatgacttcaattacgtagattttagagcgagtactaagtaggt

SEQ ID NO: 37688 - DNA, 96 bp, Fusarium cuneirostrum
  misc_feature: 65
ccaacaaaaccgacctccactcagtcccttcgttcccggtcttacttactccacttcatactcgtccctcgtctgagtggctatgcctgatgactc

SEQ ID NO: 37689 - DNA, 96 bp, Fusarium cuneirostrum
  misc_feature: 65
gagcaggcgaactctgacttgttttatttttttcgaggacggaggacgagtttaccgcaacaacgtgaggagacgaacagagtgagtttgtattct

SEQ ID NO: 37690 - DNA, 96 bp, Fusarium cuneirostrum
  misc_feature: 65
cgagtgcgtatgactactagatcatgaaatgtgtgaatggaatcaacttcatgaagtgaagatgtaatacggagtagaagacatcatgatggcttc

SEQ ID NO: 37691 - DNA, 96 bp, Fusarium cuneirostrum
  misc_feature: 65
aaggaacacgtagcgacgttacagacatcacacagagatggtgatgacttcaattgacagcagtcaaacatgaatgcaggatgcgactgaagtgag

SEQ ID NO: 37692 - DNA, 96 bp, Fusarium cuneirostrum
  misc_feature: 65
ctaaaatctacgtaattgaagtcatcatcacttccacatcaggcaactctacaaatctcaccaagttcacattgcatctatctacactaaaaatct

SEQ ID NO: 37693 - DNA, 96 bp, Fusarium cuneirostrum
  misc_feature: 65
cgaatgatgaatgcggattgttgtatgtctaggagacttttctgtggaagtgagatttcccgaacgggagttgggaatagcttcaatgcgtgactg

SEQ ID NO: 37694 - DNA, 96 bp, Fusarium cuneirostrum
  misc_feature: 65
acggaagtgaggggacaggaggcccagagggccgacaagaatccatttcaaaatttgtacaaattttgtatgggaagatttctgagattgtatggg

SEQ ID NO: 37695 - DNA, 96 bp, Fusarium cuneirostrum
  misc_feature: 65
caagcagaactatgttctgaataccgaccgaacggagtgagggaaggtgcggaatggagtgggagcagagcgaccacggaatgaggttactataat

SEQ ID NO: 37696 - DNA, 96 bp, Fusarium cuneirostrum
  misc_feature: 65
aaacggcgaagccgtttcttaaccttggtatagggggggactacgggacacgggacagtgaagaatgaacgtgtgtacccaggagtaatcgtcttg

SEQ ID NO: 37697 - DNA, 96 bp, Fusarium cuneirostrum
  misc_feature: 65
ataatcatatcaaattttgctacaacacaatttccaccatcacctttcgctatgcaaaataacacttttcaacttttatgccgtgaacctccctgt

SEQ ID NO: 37698 - DNA, 96 bp, Fusarium cuneirostrum
  misc_feature: 65
agtggtgattaagtcgttcattcacaaagtgctcgccaatttaaaaggcgtagtggtgctcgtcacattaaaatgttatttaaaaaaggaatgact

SEQ ID NO: 37699 - DNA, 96 bp, Fusarium cuneirostrum
  misc_feature: 64
ttgctcgtcacttctcgttccgatatggatatacgggttcgtttgctcttgcaaagcgatgaacacagttcaacccgaatgtaaagaaggaaaaaa

SEQ ID NO: 37700 - DNA, 96 bp, Fusarium cuneirostrum
  misc_feature: 64
tttctattacttcttcgatctcgtttcactccatctcttttcatgatctagtgaagttattcgcacttcacctcttcacattatctagcaccactt

SEQ ID NO: 37701 - DNA, 96 bp, Fusarium cuneirostrum
  misc_feature: 64
cctattgctcgtcacttctcgttccgatatggatatacgggttcgtttgctcttgcaaagcgatgaacacagttcaacccgaatgtaaagaaggaa

SEQ ID NO: 37702 - DNA, 96 bp, Fusarium cuneirostrum
  misc_feature: 64
ctaaaacaccacaagatgtggttcagttatcttcatgagagtgcatgatgacctcaagtggaggtgcatggactgcgaaggcaggatcacatggaa

SEQ ID NO: 37703 - DNA, 96 bp, Fusarium cuneirostrum
  misc_feature: 64
ggacatgacgagccggtgggtgagtagtaacggagtaactgtacatcgcaagactcaaaatctaccggattttgggacttttcagaaactggcaca

SEQ ID NO: 37704 - DNA, 96 bp, Fusarium cuneirostrum
  misc_feature: 64
ccttcgtcacactcactccgcacgtcctccctccggtcgtccgtactaaggatatagtcatagactcggccctccgcgggcgctcgtaactcttca

SEQ ID NO: 37705 - DNA, 96 bp, Fusarium cuneirostrum
  misc_feature: 64
aaaagaatcaagaattaaaaataaataaataattaaaagaaaaaaaaaaagatataattataaaaaagaaaaaaaagagaaaataataaaaaaaga

SEQ ID NO: 37706 - DNA, 96 bp, Fusarium cuneirostrum
  misc_feature: 64
gaggcgaggaggaacgacgcagccggaaggattgtcaaagtcttctcatctgccagggaagagttacttccccaagcaggaactgtgaaatagaga

SEQ ID NO: 37707 - DNA, 96 bp, Fusarium cuneirostrum
  misc_feature: 64
gactcggccctccgcgggcgctcgtaactcttcatgggttgccaacatactcttgtcaatccctcaccctgcgtccttcgtcctcgggattcggga

SEQ ID NO: 37708 - DNA, 96 bp, Fusarium cuneirostrum
  misc_feature: 64
gaatgtgaaatttttcgagattttggtgaggaacaagcaaaatcggattcaaattggactcaaatcgacatactttttgtatgtgaacgaaactga

SEQ ID NO: 37709 - DNA, 96 bp, Fusarium cuneirostrum
  misc_feature: 64
gcaaggtacgcagccaggcattttactctgaatattcctttactaacaaggtgtcataggaaaggggagatcgccaatttaattttcattgaaata

SEQ ID NO: 37710 - DNA, 96 bp, Fusarium cuneirostrum
  misc_feature: 64
aaaaggcgcggagcgcccacctggaaggtcatctgaacttggttcagtttgttgattgaggcagcgccgagacttgacgattaggcaagaatgata

SEQ ID NO: 37711 - DNA, 96 bp, Fusarium cuneirostrum
  misc_feature: 64
taagtcacagtcgctcgcctttaggcttactttttggattcattacggcgagctgttggttccagataagtgctcgcataaagataaatgaagcta

SEQ ID NO: 37712 - DNA, 96 bp, Fusarium cuneirostrum
  misc_feature: 64
taaacattcacaatctgaaatcatgctcgccaagtgaaaaaaagtagtggttctcgacacattaaaagtggttttaataattatttgtctcgcccc

SEQ ID NO: 37713 - DNA, 96 bp, Fusarium cuneirostrum
  misc_feature: 64
acgaggtgagtagatgagggagtgcggatgcgcgaccgacagaagtgtgtcgagggtcgagcagacccgagccagaaacgagctcaaaactggaac

SEQ ID NO: 37714 - DNA, 96 bp, Fusarium cuneirostrum
  misc_feature: 64
gttcatcgctttgcaagagcaaacgaacccgtatatccatatcggaacgagaagtgacgagcaataggagtggagcgacgatcgattatttatttc

SEQ ID NO: 37715 - DNA, 96 bp, Fusarium cuneirostrum
  misc_feature: 64
caagtctataaaaatttcagacttgatctactcttttgtgctgctttgccggtcacagtttttgtctgaattctactgatttcagaaagaaataac

SEQ ID NO: 37716 - DNA, 96 bp, Fusarium cuneirostrum
  misc_feature: 64
ggtttctattacttcttcgatctcgtttcactccatctcttttcatgatctagtgaagttattcgcacttcacctcttcacattatctagcaccac

SEQ ID NO: 37717 - DNA, 96 bp, Fusarium cuneirostrum
  misc_feature: 64
ctctgggctacagtaacacctgctggtgactcgcttgttcaagctcgagcaggcacaaaagtaaaaaaacagaagcaagttcatgttttgcgcgac

SEQ ID NO: 37718 - DNA, 96 bp, Fusarium cuneirostrum
  misc_feature: 64
attcggtcataaggatcgatgggcgaccacagacggagggcgagactgtgtcgagaccgattgcaaaagttggacaacttttcaactttttctgac

SEQ ID NO: 37719 - DNA, 96 bp, Fusarium cuneirostrum
  misc_feature: 64
gggccgacaagaatccatttcaaaatttgtacaaattttgtatgggaagatttctgagattgtatgggcaacgacctggaatcagagtgagaatct

SEQ ID NO: 37720 - DNA, 96 bp, Fusarium cuneirostrum
  misc_feature: 64
gcagaactatgttctgaataccgaccgaacggagtgagggaaggtgcggaatggagtgggagcagagcgaccacggaatgaggttactataatcct

SEQ ID NO: 37721 - DNA, 96 bp, Fusarium cuneirostrum
  misc_feature: 64
aacacgaacaggtgagtgtctatacatatctggaagatgaagtgaaggatgaacgcaatgctaatagcaaacaggagcggagcgactggaatgatc

SEQ ID NO: 37722 - DNA, 96 bp, Fusarium cuneirostrum
  misc_feature: 64
gaagacactcgtcgagggtgtggacgagtttggtgatgaatgggtcgatgacgatcttggagatttttagtgtagatagatgcaatgtgaacttgg

SEQ ID NO: 37723 - DNA, 96 bp, Fusarium cuneirostrum
  misc_feature: 64
cactcggactctccgtcctcgtcgcccacattccatgtgatcctgccttcgcagtccatgcacctccacttgaggtcatcatgcactctcatgaag

SEQ ID NO: 37724 - DNA, 96 bp, Fusarium cuneirostrum
  misc_feature: 64
caattgacgcagagtcaaacacgacagtgaagaatgacccggagtgtgggtcatgacgtgagtaaagtaggagggagcctgtggggcgaccgtaag

SEQ ID NO: 37725 - DNA, 96 bp, Fusarium cuneirostrum
  misc_feature: 64
cgccttttaaattggcgagcactttgtgaatgaacgacttaatcaccacttgaggcccgagccgacgagcgagcgtagcgaaggaggagcggaggg

SEQ ID NO: 37726 - DNA, 96 bp, Fusarium cuneirostrum
  misc_feature: 64
atctacactaaaaatctccaagatcgtcatcgacccattcatcaccaaactcgtccacaccctcgacgagtgtcttcacctcttctacagccctcg

SEQ ID NO: 37727 - DNA, 96 bp, Fusarium cuneirostrum
  misc_feature: 64
aggagacgaacagagtgagtttgtattctatccggaggaggagtgaacgagtgagcgatcatctacttacattaattgctggacagcatcttctcg

SEQ ID NO: 37728 - DNA, 96 bp, Fusarium cuneirostrum
  misc_feature: 63
gggagcgaggctgaaaaacctagagcttacagtagggtgagctcccgcacttgtgttacgcgagcatatataaagtagatggtgataacctcaaaa

SEQ ID NO: 37729 - DNA, 96 bp, Fusarium cuneirostrum
  misc_feature: 63
ttttagtttatgtgcgctccgtctttatttaatgctcgcccataatacatgtgaagctatcgtcactacaacatcaggtaatcatagaacaaaaca

SEQ ID NO: 37730 - DNA, 96 bp, Fusarium cuneirostrum
  misc_feature: 63
aagagtccacgagccgagcgcgtagcgtgcaggcgaggggattgtcaatgtaatttattcagggaataattacccttccaagcaggaactgtgaaa

SEQ ID NO: 37731 - DNA, 96 bp, Fusarium cuneirostrum
  misc_feature: 63
ttctcagaatcgaactcatacaaaatttgtacaaatttcagatcaaactgaaatgcgaccggcgcagagacagcagcggccgtgtgtgttagtagc

SEQ ID NO: 37732 - DNA, 96 bp, Fusarium cuneirostrum
  misc_feature: 63
gatttctgagattgtatgggcaacgacctggaatcagagtgagaatctggtacagattgttagcgaccgaagggagctttccagcttatagactaa

SEQ ID NO: 37733 - DNA, 96 bp, Fusarium cuneirostrum
  misc_feature: 63
cgaggtgagtagatgagggagtgcggatgcgcgaccgacagaagtgtgtcgagggtcgagcagacccgagccagaaacgagctcaaaactggaaca

SEQ ID NO: 37734 - DNA, 96 bp, Fusarium cuneirostrum
  misc_feature: 63
tgtagaagaggtgaagacactcgtcgagggtgtggacgagtttggtgatgaatgggtcgatgacgatcttggagatttttagtgtagatagatgca

SEQ ID NO: 37735 - DNA, 96 bp, Fusarium cuneirostrum
  misc_feature: 63
acaaactcactctgttcgtctcctcacgttgttgcggtaaactcgtcctccgtcctcgaaaaaaataaaacaagtcagagttcgcctgctcactca

SEQ ID NO: 37736 - DNA, 96 bp, Fusarium cuneirostrum
  misc_feature: 63
cttgatcaaccttcgcatggctcaggtttctattacttcttcgatctcgtttcactccatctcttttcatgatctagtgaagttattcgcacttca

SEQ ID NO: 37737 - DNA, 96 bp, Fusarium cuneirostrum
  misc_feature: 63
tcttatttttctattagctatttatatattaactattatcgctttatatataaacctctatactactttatcttaagatttagaccctctataatt

SEQ ID NO: 37738 - DNA, 96 bp, Fusarium cuneirostrum
  misc_feature: 63
tcgtttctgagattgtatgggttggaacccagaatcgaggtgggaaatgggtaccatttgttagtgagcgcagcgaacttaggcgaggaacgagcc

SEQ ID NO: 37739 - DNA, 96 bp, Fusarium cuneirostrum
  misc_feature: 63
ccccgcagacagagtcgaggagtataagacagcgtcttttcccccgagaggttgagtgagcaggcgaactctgacttgttttatttttttcgagga

SEQ ID NO: 37740 - DNA, 96 bp, Fusarium cuneirostrum
  misc_feature: 63
gcagggaagactgagggattggcaatagtcattacaccgccggaggcccgagtcggaactgtataatcctacggagcccggagggcgacgtgcgga

SEQ ID NO: 37741 - DNA, 96 bp, Fusarium cuneirostrum
  misc_feature: 63
atttgaaagtgaaagtgaaagtgaaagtgaaagtgaaagtgaaagtgaaagtgaaagtgaaagtgaaagtgaaagtgaaagtgaaagtgaaagtga

SEQ ID NO: 37742 - DNA, 96 bp, Fusarium cuneirostrum
  misc_feature: 63
agaggttgagtgagcaggcgaactctgacttgttttatttttttcgaggacggaggacgagtttaccgcaacaacgtgaggagacgaacagagtga

SEQ ID NO: 37743 - DNA, 96 bp, Fusarium cuneirostrum
  misc_feature: 63
atttaaaatatcttatagagttcttatttaaaaaagatttttagtattattttagtgatatttatagtattttcgaaaagcctataatagctaata

SEQ ID NO: 37744 - DNA, 96 bp, Fusarium cuneirostrum
  misc_feature: 63
attaaaaaaaaaaagaaatattaaaaagaaaagaaaaaagaaaaaagaatcaagaattaaaaataaataaataattaaaagaaaaaaaaaaagata

SEQ ID NO: 37745 - DNA, 96 bp, Fusarium cuneirostrum
  misc_feature: 63
tagtaaagatctctttagctataaaattaataaattaagattatttaatagaagtttaattaactttagataactttaatcttagttagaaagtct

SEQ ID NO: 37746 - DNA, 96 bp, Fusarium cuneirostrum
  misc_feature: 63
tactttattatcttcttttttatttttatttttttccttttttttcttatctcttattttttttctttttatttatttttatatttattttatttc

SEQ ID NO: 37747 - DNA, 96 bp, Fusarium cuneirostrum
  misc_feature: 63
atgaagataactgaaccacatcttgtggtgttttagtaacgtcgctacgtgttccttcgtcacactcactccgcacgtcgccctccgggctccgta

SEQ ID NO: 37748 - DNA, 96 bp, Fusarium cuneirostrum
  misc_feature: 63
taagcgatagccggcaggcgtccccagctagctctagttcagatgatcaaatagttgacgtcgacgataaccaggagatagacctagccggcctag

SEQ ID NO: 37749 - DNA, 96 bp, Fusarium cuneirostrum
  misc_feature: 63
taacatttttcctagtccgtgcacgcttctcggatctcgtaacaagactgtcgcataacattcgtgtgaccggatgtaactatccggtttcacatc

SEQ ID NO: 37750 - DNA, 96 bp, Fusarium cuneirostrum
  misc_feature: 63
cggaggcccgagtcggaactgtataatcctacggagcccggagggcgacgtgcggagtgagtgtgacgaaggaacacgtagcgacgttactaaaac

SEQ ID NO: 37751 - DNA, 96 bp, Fusarium cuneirostrum
  misc_feature: 63
gtttgctcttgcaaagcgatgaacacagttcaacccgaatgtaaagaaggaaaaaaattgtcggatttccagaaatcctctgtcttgcgacaccct

SEQ ID NO: 37752 - DNA, 96 bp, Fusarium cuneirostrum
  misc_feature: 63
ggcgaggaagtataagacggaacgtctgcccctgcgaggacgcagtcgaagacttgagactgtatttatttttttgtgtgagacggagtcgagtct

SEQ ID NO: 37753 - DNA, 96 bp, Fusarium cuneirostrum
  misc_feature: 63
gagtttggtgatgaatgggtcgatgacgatcttggagatttttagtgtagatagatgcaatgtgaacttggtgagatttgtagagttgcctgatgt

SEQ ID NO: 37754 - DNA, 96 bp, Fusarium cuneirostrum
  misc_feature: 63
cgaacgttccgtccacaatctcataccccgcagacagagtcgaggagtataagacagcgtcttttcccccgagaggttgagtgagcaggcgaactc

SEQ ID NO: 37755 - DNA, 96 bp, Fusarium cuneirostrum
  misc_feature: 63
catgcactctcatgaagataactgaaccacatcttgtggtgttttagtaacgtcgctacgtgttccttcgtcacactcactccgcacgtcgccctc

SEQ ID NO: 37756 - DNA, 96 bp, Fusarium cuneirostrum
  misc_feature: 63
gacatcacacagagatggtgatgacttcaattgacagcagtcaaacatgaatgcaggatgcgactgaagtgagtgcacgaggagaaataaaagagg

SEQ ID NO: 37757 - DNA, 96 bp, Fusarium cuneirostrum
  misc_feature: 63
gaatccatttcaaaatttgtacaaattttgtatgggaagatttctgagattgtatgggcaacgacctggaatcagagtgagaatctggtacagatt

SEQ ID NO: 37758 - DNA, 96 bp, Fusarium cuneirostrum
  misc_feature: 63
acattgcatctatctacactaaaaatctccaagatcgtcatcgacccattcatcaccaaactcgtccacaccctcgacgagtgtcttcacctcttc

SEQ ID NO: 37759 - DNA, 96 bp, Fusarium cuneirostrum
  misc_feature: 63
atctcacacgcattaggaaacatctctttctgaaaagaagaaagaagaaagaagaaagaagaaagaagaaagaagaaagaagaaagaagaaagaag

SEQ ID NO: 37760 - DNA, 96 bp, Fusarium cuneirostrum
  misc_feature: 63
agactcggccctccgcgggcgctcgtaactcttcatgggttgccaacatactcttgtcaatccctcaccctgcgtccttcgtcctcgggattcggg

SEQ ID NO: 37761 - DNA, 96 bp, Fusarium cuneirostrum
  misc_feature: 63
caagtgcgtgtcattggatgacacttgttctcacaggagttgcggtccccgcagcatggacggaacgttctacgtcccgccataggccaaggtcgt

SEQ ID NO: 37762 - DNA, 96 bp, Fusarium cuneirostrum
  misc_feature: 63
atagacagtgatatgtgagcacaaccgagagagtagtggagcgaacactaaataaaaggctccaacagaagtgagcgacacgtaattgtgatgttg

SEQ ID NO: 37763 - DNA, 96 bp, Fusarium cuneirostrum
  misc_feature: 63
aacgagatggttcgagtgcgaggaaggacgacggaggaggacaggagagcatcggagatgcacatgggcgcagagcgccagagacaatctttgttg

SEQ ID NO: 37764 - DNA, 96 bp, Fusarium cuneirostrum
  misc_feature: 63
atattaaaactgtgccagtttctgaaaagtcccaaaatccggtagattttgagtcttgcgatgtacagttactccgttactactcacccaccggct

SEQ ID NO: 37765 - DNA, 96 bp, Fusarium cuneirostrum
  misc_feature: 63
acgaacacggcatcaagatatgacaccagcagagcgacacaaagtagcaagagatatcgcgagaattcccggaatcatcaaagaccagcttgcact

SEQ ID NO: 37766 - DNA, 96 bp, Fusarium cuneirostrum
  misc_feature: 63
acatcgtgccatcctaccttctgccacactctactgagtcgtgaagccgtcgtgcactcctacatgaaatggtaacacacatatccatggtgttct

SEQ ID NO: 37767 - DNA, 96 bp, Fusarium cuneirostrum
  misc_feature: 63
aacggagtaactgtacatcgcaagactcaaaatctaccggattttgggacttttcagaaactggcacagttttaatatgggttgcgatctggcgtt

SEQ ID NO: 37768 - DNA, 96 bp, Fusarium cuneirostrum
  misc_feature: 62
cgtatgactactagatcatgaaatgtgtgaatggaatcaacttcatgaagtgaagatgtaatacggagtagaagacatcatgatggcttcaaataa

SEQ ID NO: 37769 - DNA, 96 bp, Fusarium cuneirostrum
  misc_feature: 62
tataagcgtagcttggtgtctccgccaccaagaaaaagtgacttcgttaacagaagtgaccgatttctcggcccattctcaggatttggctcacca

SEQ ID NO: 37770 - DNA, 96 bp, Fusarium cuneirostrum
  misc_feature: 62
ggctatgcctgatgactcactcgttcctcgttctccgtcatctttaccaactgggatgccaatgtcagcaagctgactaaaggcagactcagtcca

SEQ ID NO: 37771 - DNA, 96 bp, Fusarium cuneirostrum
  misc_feature: 62
tggacgcctccaaaatggatgagattgggatgattgctgaccttggtgtgtttgctggtgtagctggtaagtaaacgcctctaaaatggacaagag

SEQ ID NO: 37772 - DNA, 96 bp, Fusarium cuneirostrum
  misc_feature: 62
tgctcttgcaaagcgatgaacacagttcaacccgaatgtaaagaaggaaaaaaattgtcggatttccagaaatcctctgtcttgcgacacccttct

SEQ ID NO: 37773 - DNA, 96 bp, Fusarium cuneirostrum
  misc_feature: 62
cctgttcgtgtttccacggccgtggaataaacagaactgattccagtcgaaatcagactcgactccgtctcacacaaaaaaataaatacagtctca

SEQ ID NO: 37774 - DNA, 96 bp, Fusarium cuneirostrum
  misc_feature: 62
ctttccctttcactttcactttcactttcactttcactttcactttcactttcactttcactttcactttcactttcactttcactttcactttca

SEQ ID NO: 37775 - DNA, 96 bp, Fusarium cuneirostrum
  misc_feature: 62
tccttcgtcacactcactccgcacgtcctccctccggtcgtccgtactaaggatatagtcatagactcggccctccgcgggcgctcgtaactcttc

SEQ ID NO: 37776 - DNA, 96 bp, Fusarium cuneirostrum
  misc_feature: 62
gtacgaggtgagtagatgagggagtgcggatgcgcgaccgacagaagtgtgtcgagggtcgagcagacccgagccagaaacgagctcaaaactgga

SEQ ID NO: 37777 - DNA, 96 bp, Fusarium cuneirostrum
  misc_feature: 62
tcagctacggctttcatacttactaagttgatcttggcagttgtctttaaactggctgagcttaacgtgttattgcgtaggtgcttaggcgttccg

SEQ ID NO: 37778 - DNA, 96 bp, Fusarium cuneirostrum
  misc_feature: 62
gctctaggtttttcagcctcgctccctacctacttagtactcgctctaaaatctacgtaattgaagtcatcatcacttccacatcaggcaactcta

SEQ ID NO: 37779 - DNA, 96 bp, Fusarium cuneirostrum
  misc_feature: 62
tacaagaagggtgtcgcaagacagaggatttctggaaatccgacaatttttttccttctttacattcgggttgaactgtgttcatcgctttgcaag

SEQ ID NO: 37780 - DNA, 96 bp, Fusarium cuneirostrum
  misc_feature: 62
taatcatatcaaattttgctacaacacaatttccaccatcacctttcgctatgcaaaataacacttttcaacttttatgccgtgaacctccctgtt

SEQ ID NO: 37781 - DNA, 96 bp, Fusarium cuneirostrum
  misc_feature: 62
gtcattccttttttaaataacattttaatgtgacgagcaccactacgccttttaaattggcgagcactttgtgaatgaacgacttaatcaccactt

SEQ ID NO: 37782 - DNA, 96 bp, Fusarium cuneirostrum
  misc_feature: 62
ccaactgggatgccaatgtcagcaagctgactaaaggcagactcagtccacacgttcgtccctcactgtcccgtgtcccgtagtccccccctatac

SEQ ID NO: 37783 - DNA, 96 bp, Fusarium cuneirostrum
  misc_feature: 62
ggaggcgaggaggaacgacgcagccggaaggattgtcaaagtcttctcatctgccagggaagagttacttccccaagcaggaactgtgaaatagag

SEQ ID NO: 37784 - DNA, 96 bp, Fusarium cuneirostrum
  misc_feature: 62
ggagcgaggctgaaaaacctagagcttacagtagggtgagctcccgcacttgtgttacgcgagcatatataaagtagatggtgataacctcaaaag

SEQ ID NO: 37785 - DNA, 96 bp, Fusarium cuneirostrum
  misc_feature: 62
ggaagatgaagtgaaggatgaacgcaatgctaatagcaaacaggagcggagcgactggaatgatcgaacggagagagcttgtcaactttagttgag

SEQ ID NO: 37786 - DNA, 96 bp, Fusarium cuneirostrum
  misc_feature: 62
gcttcatttatctttatgcgagcacttatctggaaccaacagctcgccgtaatgaatccaaaaagtaagcctaaaggcgagcgactgtgacttagt

SEQ ID NO: 37787 - DNA, 96 bp, Fusarium cuneirostrum
  misc_feature: 62
atggatatggtgatagcctcacctttttttgactttgtgactttgagactttgactgtgatgatgactacttgtgagcccttgacataacataagc

SEQ ID NO: 37788 - DNA, 96 bp, Fusarium cuneirostrum
  misc_feature: 62
acattgctgctgaattgttggtaggatacggagctattcccttcttgaatatttctgagccaagacatccttaggtcagcaatcattttgtcgagc

SEQ ID NO: 37789 - DNA, 96 bp, Fusarium cuneirostrum
  misc_feature: 62
gcaacattgctgctgaattgttggtaggatacggagctattcccttcttgaatatttctgagccaagacatccttaggtcagcaatcattttgtcg

SEQ ID NO: 37790 - DNA, 96 bp, Fusarium cuneirostrum
  misc_feature: 62
aaactacaacggtttctcgaaagccgcagttaactctgctcctaaaagccgctctaacagatcggaagagcgtcgtgtagggaaagagtgtagatc

SEQ ID NO: 37791 - DNA, 96 bp, Fusarium cuneirostrum
  misc_feature: 62
atcgctccgctcggggtagaattatacagtcatggactcggccctgcgggcagctgcactactcttgccaatccggctccgtcgtccctcctcctc

SEQ ID NO: 37792 - DNA, 96 bp, Fusarium cuneirostrum
  misc_feature: 62
agtatccacttatgcccggatcgctacgctgcaccttattcgtcgttcctcctcataacgttccgtccacccgcacttcagtcggtcccctccttc

SEQ ID NO: 37793 - DNA, 96 bp, Fusarium cuneirostrum
  misc_feature: 62
gaaaggaagggacccgcttatggtcgaacagaatgtacgaccgtaatcatggacggagctagtgagcgagtacataatgggcggacgcccacttct

SEQ ID NO: 37794 - DNA, 96 bp, Fusarium cuneirostrum
  misc_feature: 62
cggcctcgggaaaatacttttgaagttattcacattcacatctacgattacaatttaatcaatcactcgcacactaagtcacagtcgctcgccttt

SEQ ID NO: 37795 - DNA, 96 bp, Fusarium cuneirostrum
  misc_feature: 62
atgatcctgtcatgtcaaccgagcggggcgaggggattgagtttaggcgtttgcctaacaaagtgcaggaagcacttgaatgtccgatggagtcgg

SEQ ID NO: 37796 - DNA, 96 bp, Fusarium cuneirostrum
  misc_feature: 62
cagtatccacttatgcccggatcgctacgctgcaccttattcgtcgttcctcctcataacgttccgtccacccgcacttcagtcggtcccctcctt

SEQ ID NO: 37797 - DNA, 96 bp, Fusarium cuneirostrum
  misc_feature: 61
ttttagtaacgtcgctacgtgttccttcgtcacactcactccgcacgtcgccctccgggctccgtaggattatacagttccgactcgggcctccgg

SEQ ID NO: 37798 - DNA, 96 bp, Fusarium cuneirostrum
  misc_feature: 61
taagcgtagcttggtgtctccgccaccaagaaaaagtgacttcgttaacagaagtgaccgatttctcggcccattctcaggatttggctcaccaaa

SEQ ID NO: 37799 - DNA, 96 bp, Fusarium cuneirostrum
  misc_feature: 61
tttaaaatatcttatagagttcttatttaaaaaagatttttagtattattttagtgatatttatagtattttcgaaaagcctataatagctaataa

SEQ ID NO: 37800 - DNA, 96 bp, Fusarium cuneirostrum
  misc_feature: 61
gattgattaaattgtaatcgtagatgtgaatgtgaataacttcaaaagtattttcccgaggccgaggacgtaggacgcaggctgagggattgacaa

SEQ ID NO: 37801 - DNA, 96 bp, Fusarium cuneirostrum
  misc_feature: 61
ataagcgtagcttggtgtctccgccaccaagaaaaagtgacttcgttaacagaagtgaccgatttctcggcccattctcaggatttggctcaccaa

SEQ ID NO: 37802 - DNA, 96 bp, Fusarium cuneirostrum
  misc_feature: 61
ttgagactgtatttatttttttgtgtgagacggagtcgagtctgatttcgactggaatcagttctgtttattccacggccgtggaaacacgaacag

SEQ ID NO: 37803 - DNA, 96 bp, Fusarium cuneirostrum
  misc_feature: 61
ccttcgtcctcgggattcgggactattccagtgtggatgaaaatgaggccattcacaactccatctacagtaacatcatgctcactaatctaataa

SEQ ID NO: 37804 - DNA, 96 bp, Fusarium cuneirostrum
  misc_feature: 61
tgtaattgtaattgtaattgtagtgttagatggaattgtgacgtagaatgtgaatggaacaggagtggtgagagttacaccacttgagtcccgaac

SEQ ID NO: 37805 - DNA, 96 bp, Fusarium cuneirostrum
  misc_feature: 61
tcggtcgcgggaagtctctatacttccttaacatttgtgaccaaattcccactccgttctcacgtttgctcacaccaaacgccagatcgcaaccca

SEQ ID NO: 37806 - DNA, 96 bp, Fusarium cuneirostrum
  misc_feature: 61
tggggcgagacaaataattattaaaaccacttttaatgtgtcgagaaccactactttttttcacttggcgagcatgatttcagattgtgaatgttt

SEQ ID NO: 37807 - DNA, 96 bp, Fusarium cuneirostrum
  misc_feature: 61
ctatacatatctggaagatgaagtgaaggatgaacgcaatgctaatagcaaacaggagcggagcgactggaatgatcgaacggagagagcttgtca

SEQ ID NO: 37808 - DNA, 96 bp, Fusarium cuneirostrum
  misc_feature: 61
gagtggaggtcggttttgttggacggacaaatgagagaggtacgaacgttccgtccacaatctcataccccgcagacagagtcgaggagtataaga

SEQ ID NO: 37809 - DNA, 96 bp, Fusarium cuneirostrum
  misc_feature: 61
tctccgatgctctcctgtcctcctccgtcgtccttcctcgcactcgaaccatctcgttcatcactccgtgatacaaaagaataaaccacgttcgcc

SEQ ID NO: 37810 - DNA, 96 bp, Fusarium cuneirostrum
  misc_feature: 61
tattctatccggaggaggagtgaacgagtgagcgatcatctacttacattaattgctggacagcatcttctcgggaagagaagaaaagagtatttg

SEQ ID NO: 37811 - DNA, 96 bp, Fusarium cuneirostrum
  misc_feature: 61
cttatttttctattagctatttatatattaactattatcgctttatatataaacctctatactactttatcttaagatttagaccctctataatta

SEQ ID NO: 37812 - DNA, 96 bp, Fusarium cuneirostrum
  misc_feature: 61
taatgtgaagaggtgaagtgcgaataacttcactagatcatgaaaagagatggagtgaaacgagatcgaagaagtaatagaaacctgagccatgcg

SEQ ID NO: 37813 - DNA, 96 bp, Fusarium cuneirostrum
  misc_feature: 61
actacaataccacttgaggtcatcaccattacctattccggtaagtctcacaaagcatcgttggagttactcctccacacttgacccaactcaaac

SEQ ID NO: 37814 - DNA, 96 bp, Fusarium cuneirostrum
  misc_feature: 61
caggtttctattacttcttcgatctcgtttcactccatctcttttcatgatctagtgaagttattcgcacttcacctcttcacattatctagcacc

SEQ ID NO: 37815 - DNA, 96 bp, Fusarium cuneirostrum
  misc_feature: 61
atctcagaaatcttcccatacaaaatttgtacaaattttgaaatggattcttgtcggccctctgggcctcctgtcccctcacttccgttcggtccc

SEQ ID NO: 37816 - DNA, 96 bp, Fusarium cuneirostrum
  misc_feature: 61
attctatccggaggaggagtgaacgagtgagcgatcatctacttacattaattgctggacagcatcttctcgggaagagaagaaaagagtatttgc

SEQ ID NO: 37817 - DNA, 96 bp, Fusarium cuneirostrum
  misc_feature: 61
gatttgaaagtgaaagtgaaagtgaaagtgaaagtgaaagtgaaagtgaaagtgaaagtgaaagtgaaagtgaaagtgaaagtgaaagtgaaagtg

SEQ ID NO: 37818 - DNA, 96 bp, Fusarium cuneirostrum
  misc_feature: 61
agtcacagtcgctcgcctttaggcttactttttggattcattacggcgagctgttggttccagataagtgctcgcataaagataaatgaagctatc

SEQ ID NO: 37819 - DNA, 96 bp, Fusarium cuneirostrum
  misc_feature: 61
gactgcgaaggcaggatcacatggaatgtgggcgacgaggacggagagtccgagtggggaggccgaaggccgaccggggaaagtgtgtcgagagcg

SEQ ID NO: 37820 - DNA, 96 bp, Fusarium cuneirostrum
  misc_feature: 61
ccagctttgtaatcagctaaagcttgaaaacaaaacctcttatagaccaaagttatggacgctcgtttgccccgttccgggtcactcgcgttagtc

SEQ ID NO: 37821 - DNA, 96 bp, Fusarium cuneirostrum
  misc_feature: 61
cccaattcggtcataaggatcgatgggcgaccacagacggagggcgagactgtgtcgagaccgattgcaaaagttggacaacttttcaactttttc

SEQ ID NO: 37822 - DNA, 96 bp, Fusarium cuneirostrum
  misc_feature: 61
aggcgagcgactgtgacttagtgtgcgagtgattgattaaattgtaatcgtagatgtgaatgtgaataacttcaaaagtattttcccgaggccgag

SEQ ID NO: 37823 - DNA, 96 bp, Fusarium cuneirostrum
  misc_feature: 61
cgccccctcgtcagtatccacttatgcccggatcgctacgctgcaccttattcgtcgttcctcctcataacgttccgtccacccgcacttcagtcg

SEQ ID NO: 37824 - DNA, 96 bp, Fusarium cuneirostrum
  misc_feature: 61
cgaagcgaagacgaactctcccgttaagcttcaaaaatcaagacgttccagatcaatctctcaacgatgatgattggagtcaccggccactgtttg

SEQ ID NO: 37825 - DNA, 96 bp, Fusarium cuneirostrum
  misc_feature: 61
catcatctgtctgagctcagagagcgagtcgatcttggattcctatgcaagtcgtctttcaattgcgctggcgcgcgactaggaacagagtgacgg

SEQ ID NO: 37826 - DNA, 96 bp, Fusarium cuneirostrum
  misc_feature: 61
agttggaggatccaacggatccaacgattggaagtagttggttgattacgcactctgactccacggccaattccttgagccctaactcggctcggg

SEQ ID NO: 37827 - DNA, 96 bp, Fusarium cuneirostrum
  misc_feature: 61
caacatccaaaacaggaaacaatgtagactaatctaagatacaaaacctccgaaaacgcccagcgtatttcagtccgaaaatagttccgccccctt

SEQ ID NO: 37828 - DNA, 96 bp, Fusarium cuneirostrum
  misc_feature: 61
agtaaagatctctttagctataaaattaataaattaagattatttaatagaagtttaattaactttagataactttaatcttagttagaaagtctt

SEQ ID NO: 37829 - DNA, 96 bp, Fusarium cuneirostrum
  misc_feature: 61
aagtgcgtgtcattggatgacacttgttctcacaggagttgcggtccccgcagcatggacggaacgttctacgtcccgccataggccaaggtcgtt

SEQ ID NO: 37830 - DNA, 96 bp, Fusarium cuneirostrum
  misc_feature: 61
aaaatacttttgaagttattcacattcacatctacgattacaatttaatcaatcactcgcacactaagtcacagtcgctcgcctttaggcttactt

SEQ ID NO: 37831 - DNA, 96 bp, Fusarium cuneirostrum
  misc_feature: 61
aagaagtgggcgtccgcccattatgtactcgctcactagctccgtccatgattacggtcgtacattctgttcgaccataagcgggtcccttccttt

SEQ ID NO: 37832 - DNA, 96 bp, Fusarium cuneirostrum
  misc_feature: 60
ttgttggacggacaaatgagagaggtacgaacgttccgtccacaatctcataccccgcagacagagtcgaggagtataagacagcgtcttttcccc

SEQ ID NO: 37833 - DNA, 96 bp, Fusarium cuneirostrum
  misc_feature: 60
tacgaggtgagtagatgagggagtgcggatgcgcgaccgacagaagtgtgtcgagggtcgagcagacccgagccagaaacgagctcaaaactggaa

SEQ ID NO: 37834 - DNA, 96 bp, Fusarium cuneirostrum
  misc_feature: 60
ttattctttttattagattagtgagcatgatgttactgtagatggagttgtgaatggcctcattttcatccacactggaatagtcccgaatcccga

SEQ ID NO: 37835 - DNA, 96 bp, Fusarium cuneirostrum
  misc_feature: 60
ctacaataacagttcactcttctcgttcacaaatgcacaatcaattcaaatcacaagtcatacatcaaagtcatgtctgctcgcataaaatagtaa

SEQ ID NO: 37836 - DNA, 96 bp, Fusarium cuneirostrum
  misc_feature: 60
ttacctattccggtaagtctcacaaagcatcgttggagttactcctccacacttgacccaactcaaacacagcatcatcaaatctacttcgaaact

SEQ ID NO: 37837 - DNA, 96 bp, Fusarium cuneirostrum
  misc_feature: 60
caggcatagccactcagacgagggacgagtatgaagtggagtaagtaagaccgggaacgaagggactgagtggaggtcggttttgttggacggaca

SEQ ID NO: 37838 - DNA, 96 bp, Fusarium cuneirostrum
  misc_feature: 60
taaaaactggggcagcaaccggctacgcctggaagctgtactcagtccacgagctgtcccagcttgtcccgtgtcccgtagtccccccctatacca

SEQ ID NO: 37839 - DNA, 96 bp, Fusarium cuneirostrum
  misc_feature: 60
tagatggaattgtgacgtagaatgtgaatggaacaggagtggtgagagttacaccacttgagtcccgaacggatgagcaagccccgtaggggcgca

SEQ ID NO: 37840 - DNA, 96 bp, Fusarium cuneirostrum
  misc_feature: 60
ctgggtcgacgtccgtctccccctcttttatttctcctcgtgcactcacttcagtcgcatcctgcattcatgtttgactgctgtcaattgaagtca

SEQ ID NO: 37841 - DNA, 96 bp, Fusarium cuneirostrum
  misc_feature: 60
taattgaagtcatcatcacttccacatcaggcaactctacaaatctcaccaagttcacattgcatctatctacactaaaaatctccaagatcgtca

SEQ ID NO: 37842 - DNA, 96 bp, Fusarium cuneirostrum
  misc_feature: 60
acatcatgctcactaatctaataaaaagaataaccagggctcgtcaaacgagtttatttaaattattatttgcctcgccctgcttatgttatgtca

SEQ ID NO: 37843 - DNA, 96 bp, Fusarium cuneirostrum
  misc_feature: 60
tcttgatcaaccttcgcatggctcaggtttctattacttcttcgatctcgtttcactccatctcttttcatgatctagtgaagttattcgcacttc

SEQ ID NO: 37844 - DNA, 96 bp, Fusarium cuneirostrum
  misc_feature: 60
caacattgctgctgaattgttggtaggatacggagctattcccttcttgaatatttctgagccaagacatccttaggtcagcaatcattttgtcga

SEQ ID NO: 37845 - DNA, 96 bp, Fusarium cuneirostrum
  misc_feature: 60
tcgaagacttgagactgtatttatttttttgtgtgagacggagtcgagtctgatttcgactggaatcagttctgtttattccacggccgtggaaac

SEQ ID NO: 37846 - DNA, 96 bp, Fusarium cuneirostrum
  misc_feature: 60
tccccaccggcctccactcattccattcgttcccgtccttagtcaaccgatcattgcgtcgtccctcctccatgatcctacactcttcgccttcgt

SEQ ID NO: 37847 - DNA, 96 bp, Fusarium cuneirostrum
  misc_feature: 60
acagctactctaacaccagctggaaccaagaggcgtgagcttgaccgaatcaaagactgcattcccatcacgtccagcaatcgtgatgtccttgga

SEQ ID NO: 37848 - DNA, 96 bp, Fusarium cuneirostrum
  misc_feature: 60
tcaccactcgccgtctagctcgtggttctcttttaccactacaataacagttcactcttctcgttcacaaatgcacaatcaattcaaatcacaagt

SEQ ID NO: 37849 - DNA, 96 bp, Fusarium cuneirostrum
  misc_feature: 60
tatttaaaatatcttatagagttcttatttaaaaaagatttttagtattattttagtgatatttatagtattttcgaaaagcctataatagctaat

SEQ ID NO: 37850 - DNA, 96 bp, Fusarium cuneirostrum
  misc_feature: 60
taacagttcactcttctcgttcacaaatgcacaatcaattcaaatcacaagtcatacatcaaagtcatgtctgctcgcataaaatagtaattgggg

SEQ ID NO: 37851 - DNA, 96 bp, Fusarium cuneirostrum
  misc_feature: 60
caagaaaaagtgacttcgttaacagaagtgaccgatttctcggcccattctcaggatttggctcaccaaatgccagaatcgagtccatacaaaaac

SEQ ID NO: 37852 - DNA, 96 bp, Fusarium cuneirostrum
  misc_feature: 60
gtctccgccaccaagaaaaagtgacttcgttaacagaagtgaccgatttctcggcccattctcaggatttggctcaccaaatgccagaatcgagtc

SEQ ID NO: 37853 - DNA, 96 bp, Fusarium cuneirostrum
  misc_feature: 60
cataacataagcagggcgaggcaaataataatttaaataaactcgtttgacgagccctggttattctttttattagattagtgagcatgatgttac

SEQ ID NO: 37854 - DNA, 96 bp, Fusarium cuneirostrum
  misc_feature: 60
cctcggcctcgggaaaatacttttgaagttattcacattcacatctacgattacaatttaatcaatcactcgcacactaagtcacagtcgctcgcc

SEQ ID NO: 37855 - DNA, 96 bp, Fusarium cuneirostrum
  misc_feature: 60
ggaccgactgaagtgcgggtggacggaacgttatgaggaggaacgacgaataaggtgcagcgtagcgatccgggcataagtggatactgacgaggg

SEQ ID NO: 37856 - DNA, 96 bp, Fusarium cuneirostrum
  misc_feature: 60
ggaattgggattatgatgtattgtgttaggaaattcctctttgagttagatcggccgtgccgaaatataacatattacgttcgaacctttaagaat

SEQ ID NO: 37857 - DNA, 96 bp, Fusarium cuneirostrum
  misc_feature: 60
gctccttacaaaaaaccggctctgccagaaacgaacccatacaaatgaaatgtcagtttcgatttcgcccgcaaaatcgaaactgacatttcattt

SEQ ID NO: 37858 - DNA, 96 bp, Fusarium cuneirostrum
  misc_feature: 60
cagctacggctttcatacttactaagttgatcttggcagttgtctttaaactggctgagcttaacgtgttattgcgtaggtgcttaggcgttccgc

SEQ ID NO: 37859 - DNA, 96 bp, Fusarium cuneirostrum
  misc_feature: 60
attaatctcttatagactaacgcgagtgacccggaacggggcaaacgagcgtccataactttggtctataagaggtttttttgacaaacgctgcgc

SEQ ID NO: 37860 - DNA, 96 bp, Fusarium cuneirostrum
  misc_feature: 60
actcaacaaccctttcgggtctctacaaaatcaaaacatttacatctgctgggctccctctcggcacacgcccaagatactgtccacaacctcatc

SEQ ID NO: 37861 - DNA, 96 bp, Fusarium cuneirostrum
  misc_feature: 60
gagaggttgagtgagcaggcgaactctgacttgttttatttttttcgaggacggaggacgagtttaccgcaacaacgtgaggagacgaacagagtg

SEQ ID NO: 37862 - DNA, 96 bp, Fusarium cuneirostrum
  misc_feature: 60
gagacgaacagagtgagtttgtattctatccggaggaggagtgaacgagtgagcgatcatctacttacattaattgctggacagcatcttctcggg

SEQ ID NO: 37863 - DNA, 96 bp, Fusarium cuneirostrum
  misc_feature: 60
atactcctcgactctgtctgcggggtatgagattgtggacggaacgttcgtacctctctcatttgtccgtccaacaaaaccgacctccactcagtc

SEQ ID NO: 37864 - DNA, 96 bp, Fusarium cuneirostrum
  misc_feature: 60
acctctctcatttgtccgtccaacaaaaccgacctccactcagtcccttcgttcccggtcttacttactccacttcatactcgtccctcgtctgag

SEQ ID NO: 37865 - DNA, 96 bp, Fusarium cuneirostrum
  misc_feature: 60
cggcgaagccgtttcttaaccttggtatagggggggactacgggacacgggacagtgagggacgaacgtgtggactgagtctgcctttagtcagct

SEQ ID NO: 37866 - DNA, 96 bp, Fusarium cuneirostrum
  misc_feature: 60
ccaagtgcgtgtcattggatgacacttgttctcacaggagttgcggtccccgcagcatggacggaacgttctacgtcccgccataggccaaggtcg

SEQ ID NO: 37867 - DNA, 96 bp, Fusarium cuneirostrum
  misc_feature: 60
cctaaccctaaccctaaccctaaccctaaccctaaccctaaccctatatttttcttttcttttatttcctttattctattttatattcttctcttt

SEQ ID NO: 37868 - DNA, 96 bp, Fusarium cuneirostrum
  misc_feature: 60
agacaaataattattaaaaccacttttaatgtgtcgagaaccactactttttttcacttggcgagcatgatttcagattgtgaatgtttatgttgg

SEQ ID NO: 37869 - DNA, 96 bp, Fusarium cuneirostrum
  misc_feature: 60
catccataacctacaggagatagggcgagacaataacatttaaatacacttctttaaacttgtcgagcaccatttccctccctaatggcgagccat

SEQ ID NO: 37870 - DNA, 96 bp, Fusarium cuneirostrum
  misc_feature: 60
acggacgaccggagggaggacgtgcggagtgagtgtgacgaaggaacacgtagcgacgttacagacatcacacagagatggtgatgacttcaattg

SEQ ID NO: 37871 - DNA, 96 bp, Fusarium cuneirostrum
  misc_feature: 60
caaacggcgaagccgtttcttaaccttggtatagggggggactacgggacacgggacagtgaagaatgaacgtgtgtacccaggagtaatcgtctt

SEQ ID NO: 37872 - DNA, 96 bp, Fusarium cuneirostrum
  misc_feature: 60
agagtccacgagccgagcgcgtagcgtgcaggcgaggggattgtcaatgtaatttattcagggaataattacccttccaagcaggaactgtgaaat

SEQ ID NO: 37873 - DNA, 96 bp, Fusarium cuneirostrum
  misc_feature: 60
acaaagtgcaggaagcacttgaatgtccgatggagtcggatgatatgctattcttgagagcatattactgcgtcgcttatctgacgcatatctttt

SEQ ID NO: 37874 - DNA, 96 bp, Fusarium cuneirostrum
  misc_feature: 59
tcccctaccggtccgggtccacatacgtcctcgtgccctgcatctcggctcattccatttcattcatgtgcgacgaagccatcgtcgagtagaaaa

SEQ ID NO: 37875 - DNA, 96 bp, Fusarium cuneirostrum
  misc_feature: 59
tttagtttatgtgcgctccgtctttatttaatgctcgcccataatacatgtgaagctatcgtcactacaacatcaggtaatcatagaacaaaacac

SEQ ID NO: 37876 - DNA, 96 bp, Fusarium cuneirostrum
  misc_feature: 59
tgaaacgggagttggtgatgacttcacttctgccgactccacatactttgctcgccactgtttaatatggggcgaggcaaataaatacgttttaaa

SEQ ID NO: 37877 - DNA, 96 bp, Fusarium cuneirostrum
  misc_feature: 59
ttgaagtcatcatcacttccacatcaggcaactctacaaatctcaccaagttcacattgcatctatctacactaaaaatctccaagatcgtcatcg

SEQ ID NO: 37878 - DNA, 96 bp, Fusarium cuneirostrum
  misc_feature: 59
gtgagttcgtttctgagattgtatgggttggaacccagaatcgaggtgggaaatgggtaccatttgttagtgagcgcagcgaacttaggcgaggaa

SEQ ID NO: 37879 - DNA, 96 bp, Fusarium cuneirostrum
  misc_feature: 59
gacaggaggcccagagggccgacaagaatccatttcaaaatttgtacaaattttgtatgggaagatttctgagattgtatgggcaacgacctggaa

SEQ ID NO: 37880 - DNA, 96 bp, Fusarium cuneirostrum
  misc_feature: 59
caaggggcaattggggtaagcgtttgtgtagatttgaattgaattgtgattgcgagccatcattcataacgaaatggggcgagacctaaaatataa

SEQ ID NO: 37881 - DNA, 96 bp, Fusarium cuneirostrum
  misc_feature: 59
ttactttttggattcattacggcgagctgttggttccagataagtgctcgcataaagataaatgaagctatcacaactactaagaaaggcaactaa

SEQ ID NO: 37882 - DNA, 96 bp, Fusarium cuneirostrum
  misc_feature: 59
cacacaaaaaaataaatacagtctcaagtcttcgactgcgtcctcgcaggggcagacgttccgtcttatacttcctcgccccctcgtcagtatcca

SEQ ID NO: 37883 - DNA, 96 bp, Fusarium cuneirostrum
  misc_feature: 59
tgagggattgacaagagtatgttggcaacccatgaagagttacgagcgcccgcggagggccgagtctatgactatatccttagtacggacgaccgg

SEQ ID NO: 37884 - DNA, 96 bp, Fusarium cuneirostrum
  misc_feature: 59
aattgacgcagagtcaaacacgacagtgaagaatgacccggagtgtgggtcatgacgtgagtaaagtaggagggagcctgtggggcgaccgtaaga

SEQ ID NO: 37885 - DNA, 96 bp, Fusarium cuneirostrum
  misc_feature: 59
aaggcgagcgactgtgacttagtgtgcgagtgattgattaaattgtaatcgtagatgtgaatgtgaataacttcaaaagtattttcccgaggccga

SEQ ID NO: 37886 - DNA, 96 bp, Fusarium cuneirostrum
  misc_feature: 59
actctgacttgttttatttttttcgaggacggaggacgagtttaccgcaacaacgtgaggagacgaacagagtgagtttgtattctatccggagga

SEQ ID NO: 37887 - DNA, 96 bp, Fusarium cuneirostrum
  misc_feature: 59
gaaggaacacgtagcgacgttacagacatcacacagagatggtgatgacttcaattgacagcagtcaaacatgaatgcaggatgcgactgaagtga

SEQ ID NO: 37888 - DNA, 96 bp, Fusarium cuneirostrum
  misc_feature: 59
tataatttaaaatcccatataaattaaaatagcgctaaaaattataggagggtaatataatttaaaataaggggggcaatattataaagaactaat

SEQ ID NO: 37889 - DNA, 96 bp, Fusarium cuneirostrum
  misc_feature: 59
cttactttttggattcattacggcgagctgttggttccagataagtgctcgcataaagataaatgaagctatcacaactactaagaaaggcaacta

SEQ ID NO: 37890 - DNA, 96 bp, Fusarium cuneirostrum
  misc_feature: 59
ataagcgatagccggcaggcgtccccagctagctctagttcagatgatcaaatagttgacgtcgacgataaccaggagatagacctagccggccta

SEQ ID NO: 37891 - DNA, 96 bp, Fusarium cuneirostrum
  misc_feature: 59
atttgagtccaatttgaatccgattttgcttgttcctcaccaaaatctcgaaaaatttcacattcgggctcgacacaatctcgcccctctgtctta

SEQ ID NO: 37892 - DNA, 96 bp, Fusarium cuneirostrum
  misc_feature: 59
gttatctacgattgccaatccctcagtcttccttcgctacgctcactcatccgctcgggactcatggatgaggaatacatttacagtcaccaacat

SEQ ID NO: 37893 - DNA, 96 bp, Fusarium cuneirostrum
  misc_feature: 59
gtgatatgtgagcacaaccgagagagtagtggagcgaacactaaataaaaggctccaacagaagtgagcgacacgtaattgtgatgttgtgcgtat

SEQ ID NO: 37894 - DNA, 96 bp, Fusarium cuneirostrum
  misc_feature: 59
gtgaatgtgaataacttcaaaagtattttcccgaggccgaggacgtaggacgcaggctgagggattgacaatagactgaactcaagtgaagagttc

SEQ ID NO: 37895 - DNA, 96 bp, Fusarium cuneirostrum
  misc_feature: 59
atttcaatcggagatttagtgagacgggcgaacgtggtttattcttttgtatcacggagtgatgaacgagatggttcgagtgcgaggaaggacgac

SEQ ID NO: 37896 - DNA, 96 bp, Fusarium cuneirostrum
  misc_feature: 59
gtccccaccggcctccactcattccattcgttcccgtccttagtcaaccgatcattgcgtcgtccctcctccatgatcctacactcttcgccttcg

SEQ ID NO: 37897 - DNA, 96 bp, Fusarium cuneirostrum
  misc_feature: 59
ccccacggtcgggtgtgtctgggtcgacgtccgtctccccctcttttatttctcctcgtgcactcacttcagtcgcatcctgcattcatgtttgac

SEQ ID NO: 37898 - DNA, 96 bp, Fusarium cuneirostrum
  misc_feature: 59
gacaagaatccatttcaaaatttgtacaaattttgtatgggaagatttctgagattgtatgggcaacgacctggaatcagagtgagaatctggtac

SEQ ID NO: 37899 - DNA, 96 bp, Fusarium cuneirostrum
  misc_feature: 59
ggcgaggaggaacgacgcagccggaaggattgtcaaagtcttctcatctgccagggaagagttacttccccaagcaggaactgtgaaatagagacc

SEQ ID NO: 37900 - DNA, 96 bp, Fusarium cuneirostrum
  misc_feature: 59
gggtcgacgtccgtctccccctcttttatttctcctcgtgcactcacttcagtcgcatcctgcattcatgtttgactgctgtcaattgaagtcatc

SEQ ID NO: 37901 - DNA, 96 bp, Fusarium cuneirostrum
  misc_feature: 59
aacgttcgtacctctctcatttgtccgtccaacaaaaccgacctccactcagtcccttcgttcccggtcttacttactccacttcatactcgtccc

SEQ ID NO: 37902 - DNA, 96 bp, Fusarium cuneirostrum
  misc_feature: 59
gctttgtaatcagctaaagcttgaaaacaaaacctcttatagaccaaagttatggacgctcgtttgccccgttccgggtcactcgcgttagtctat

SEQ ID NO: 37903 - DNA, 96 bp, Fusarium cuneirostrum
  misc_feature: 59
gcgaggctgaaaaacctagagcttacagtagggtgagctcccgcacttgtgttacgcgagcatatataaagtagatggtgataacctcaaaagagt

SEQ ID NO: 37904 - DNA, 96 bp, Fusarium cuneirostrum
  misc_feature: 59
atctccgatgctctcctgtcctcctccgtcgtccttcctcgcactcgaaccatctcgttcatcactccgtgatacaaaagaataaaccacgttcgc

SEQ ID NO: 37905 - DNA, 96 bp, Fusarium cuneirostrum
  misc_feature: 59
gattgtaattgtaattgtaattgtagtgttagatggaattgtgacgtagaatgtgaatggaacaggagtggtgagagttacaccacttgagtcccg

SEQ ID NO: 37906 - DNA, 96 bp, Fusarium cuneirostrum
  misc_feature: 59
gaaacgggagttggtgatgacttcacttctgccgactccacatactttgctcgccactgtttaatatggggcgaggcaaataaatacgttttaaat

SEQ ID NO: 37907 - DNA, 96 bp, Fusarium cuneirostrum
  misc_feature: 59
gaaaatacttttgaagttattcacattcacatctacgattacaatttaatcaatcactcgcacactaagtcacagtcgctcgcctttaggcttact

SEQ ID NO: 37908 - DNA, 96 bp, Fusarium cuneirostrum
  misc_feature: 59
caagaagggtgtcgcaagacagaggatttctggaaatccgacaatttttttccttctttacattcgggttgaactgtgttcatcgctttgcaagag

SEQ ID NO: 37909 - DNA, 96 bp, Fusarium cuneirostrum
  misc_feature: 59
ctcgtcgagggtgtggacgagtttggtgatgaatgggtcgatgacgatcttggagatttttagtgtagatagatgcaatgtgaacttggtgagatt

SEQ ID NO: 37910 - DNA, 96 bp, Fusarium cuneirostrum
  misc_feature: 59
ctcgccccctcgtcagtatccacttatgcccggatcgctacgctgcaccttattcgtcgttcctcctcataacgttccgtccacccgcacttcagt

SEQ ID NO: 37911 - DNA, 96 bp, Fusarium cuneirostrum
  misc_feature: 59
ctattccggtaagtctcacaaagcatcgttggagttactcctccacacttgacccaactcaaacacagcatcatcaaatctacttcgaaactccct

SEQ ID NO: 37912 - DNA, 96 bp, Fusarium cuneirostrum
  misc_feature: 59
acacgaacaggtgagtgtctatacatatctggaagatgaagtgaaggatgaacgcaatgctaatagcaaacaggagcggagcgactggaatgatcg

SEQ ID NO: 37913 - DNA, 96 bp, Fusarium cuneirostrum
  misc_feature: 59
cgaaggcaggatcacatggaatgtgggcgacgaggacggagagtccgagtggggaggccgaaggccgaccggggaaagtgtgtcgagagcgagggg

SEQ ID NO: 37914 - DNA, 96 bp, Fusarium cuneirostrum
  misc_feature: 59
ccaattcggtcataaggatcgatgggcgaccacagacggagggcgagactgtgtcgagaccgattgcaaaagttggacaacttttcaactttttct

SEQ ID NO: 37915 - DNA, 96 bp, Fusarium cuneirostrum
  misc_feature: 59
atggcgagagcagcgctcgaggtggatttgacggagtctcaaaactggaacagtttttgtatggactcgattctggcatttggtgagccaaatcct

SEQ ID NO: 37916 - DNA, 96 bp, Fusarium cuneirostrum
  misc_feature: 59
acggagtaactgtacatcgcaagactcaaaatctaccggattttgggacttttcagaaactggcacagttttaatatgggttgcgatctggcgttt

SEQ ID NO: 37917 - DNA, 96 bp, Fusarium cuneirostrum
  misc_feature: 58
tttgaaagtgaaagtgaaagtgaaagtgaaagtgaaagtgaaagtgaaagtgaaagtgaaagtgaaagtgaaagtgaaagtgaaagtgaaagtgaa

SEQ ID NO: 37918 - DNA, 96 bp, Fusarium cuneirostrum
  misc_feature: 58
gcaattaatgtaagtagatgatcgctcactcgttcactcctcctccggatagaatacaaactcactctgttcgtctcctcacgttgttgcggtaaa

SEQ ID NO: 37919 - DNA, 96 bp, Fusarium cuneirostrum
  misc_feature: 58
aatctacgtaattgaagtcatcatcacttccacatcaggcaactctacaaatctcaccaagttcacattgcatctatctacactaaaaatctccaa

SEQ ID NO: 37920 - DNA, 96 bp, Fusarium cuneirostrum
  misc_feature: 58
cgcaaatactcttttcttctcttcccgagaagatgctgtccagcaattaatgtaagtagatgatcgctcactcgttcactcctcctccggatagaa

SEQ ID NO: 37921 - DNA, 96 bp, Fusarium cuneirostrum
  misc_feature: 58
ttccattcacattctacgtcacaattccatctaacactacaattacaattacaattacaatcagtcacgatggctcgccattagggagggaaatgg

SEQ ID NO: 37922 - DNA, 96 bp, Fusarium cuneirostrum
  misc_feature: 58
ttatttttctattagctatttatatattaactattatcgctttatatataaacctctatactactttatcttaagatttagaccctctataattac

SEQ ID NO: 37923 - DNA, 96 bp, Fusarium cuneirostrum
  misc_feature: 58
acaagaatccatttcaaaatttgtacaaattttgtatgggaagatttctgagattgtatgggcaacgacctggaatcagagtgagaatctggtaca

SEQ ID NO: 37924 - DNA, 96 bp, Fusarium cuneirostrum
  misc_feature: 58
tgggtcgacgtccgtctccccctcttttatttctcctcgtgcactcacttcagtcgcatcctgcattcatgtttgactgctgtcaattgaagtcat

SEQ ID NO: 37925 - DNA, 96 bp, Fusarium cuneirostrum
  misc_feature: 58
tggactgcgaaggcaggatcacatggaatgtgggcgacgaggacggagagtccgagtggggaggccgaaggccgaccggggaaagtgtgtcgagag

SEQ ID NO: 37926 - DNA, 96 bp, Fusarium cuneirostrum
  misc_feature: 58
tgagccgagacagattcctcaccctctctcatcctctctcatcctctctcatcctctctcatcctctctcatcctctctcatcctctctcatcctt

SEQ ID NO: 37927 - DNA, 96 bp, Fusarium cuneirostrum
  misc_feature: 58
tgagcaggcgaactctgacttgttttatttttttcgaggacggaggacgagtttaccgcaacaacgtgaggagacgaacagagtgagtttgtattc

SEQ ID NO: 37928 - DNA, 96 bp, Fusarium cuneirostrum
  misc_feature: 58
tgaagacactcgtcgagggtgtggacgagtttggtgatgaatgggtcgatgacgatcttggagatttttagtgtagatagatgcaatgtgaacttg

SEQ ID NO: 37929 - DNA, 96 bp, Fusarium cuneirostrum
  misc_feature: 58
acaagaagggtgtcgcaagacagaggatttctggaaatccgacaatttttttccttctttacattcgggttgaactgtgttcatcgctttgcaaga

SEQ ID NO: 37930 - DNA, 96 bp, Fusarium cuneirostrum
  misc_feature: 58
tctacgattgccaatccctcagtcttccttcgctacgctcactcatccgctcgggactcatggatgaggaatacatttacagtcaccaacataaac

SEQ ID NO: 37931 - DNA, 96 bp, Fusarium cuneirostrum
  misc_feature: 58
attgtaattgtaattgtaattgtagtgttagatggaattgtgacgtagaatgtgaatggaacaggagtggtgagagttacaccacttgagtcccga

SEQ ID NO: 37932 - DNA, 96 bp, Fusarium cuneirostrum
  misc_feature: 58
tcgccccctcgtcagtatccacttatgcccggatcgctacgctgcaccttattcgtcgttcctcctcataacgttccgtccacccgcacttcagtc

SEQ ID NO: 37933 - DNA, 96 bp, Fusarium cuneirostrum
  misc_feature: 58
ggtgagttcgtttctgagattgtatgggttggaacccagaatcgaggtgggaaatgggtaccatttgttagtgagcgcagcgaacttaggcgagga

SEQ ID NO: 37934 - DNA, 96 bp, Fusarium cuneirostrum
  misc_feature: 58
actaaaacaccacaagatgtggttcagttatcttcatgagagtgcatgatgacctcaagtggaggtgcatggactgcgaaggcaggatcacatgga

SEQ ID NO: 37935 - DNA, 96 bp, Fusarium cuneirostrum
  misc_feature: 58
tattctttttattagattagtgagcatgatgttactgtagatggagttgtgaatggcctcattttcatccacactggaatagtcccgaatcccgag

SEQ ID NO: 37936 - DNA, 96 bp, Fusarium cuneirostrum
  misc_feature: 58
tatgacttgtgatttgaattgattgtgcatttgtgaacgagaagagtgaactgttattgtagtggtaaaagagaaccacgagctagacggcgagtg

SEQ ID NO: 37937 - DNA, 96 bp, Fusarium cuneirostrum
  misc_feature: 58
tactgtaagctctaggtttttcagcctcgctccctacctacttagtactcgctctaaaatctacgtaattgaagtcatcatcacttccacatcagg

SEQ ID NO: 37938 - DNA, 96 bp, Fusarium cuneirostrum
  misc_feature: 58
caaaaaaataaatacagtctcaagtcttcgactgcgtcctcgcaggggcagacgttccgtcttatacttcctcgccccctcgtcagtatccactta

SEQ ID NO: 37939 - DNA, 96 bp, Fusarium cuneirostrum
  misc_feature: 58
ccttataatatagctagcatatttcctaacttatattccactacttaagttaccgtatttagctacttcttctatttagcgctatagctaatctta

SEQ ID NO: 37940 - DNA, 96 bp, Fusarium cuneirostrum
  misc_feature: 58
taaaaatctccaagatcgtcatcgacccattcatcaccaaactcgtccacaccctcgacgagtgtcttcacctcttctacagccctcggcttcacc

SEQ ID NO: 37941 - DNA, 96 bp, Fusarium cuneirostrum
  misc_feature: 58
gttcacggcataaaagttgaaaagtgttattttgcatagcgaaaggtgatggtggaaattgtgttgtagcaaaatttgatatgattatggtgatgt

SEQ ID NO: 37942 - DNA, 96 bp, Fusarium cuneirostrum
  misc_feature: 58
gtgaagacactcgtcgagggtgtggacgagtttggtgatgaatgggtcgatgacgatcttggagatttttagtgtagatagatgcaatgtgaactt

SEQ ID NO: 37943 - DNA, 96 bp, Fusarium cuneirostrum
  misc_feature: 58
attatagagggtctaaatcttaagataaagtagtatagaggtttatatataaagcgataatagttaatatataaatagctaatagaaaaataagac

SEQ ID NO: 37944 - DNA, 96 bp, Fusarium cuneirostrum
  misc_feature: 58
aatctcgaaaaatttcacattcgggctcgacacaatctcgcccctctgtcttacggtcgccccacaggctccctcctactttactcacgtcatgac

SEQ ID NO: 37945 - DNA, 96 bp, Fusarium cuneirostrum
  misc_feature: 58
gtaattgaagtcatcatcacttccacatcaggcaactctacaaatctcaccaagttcacattgcatctatctacactaaaaatctccaagatcgtc

SEQ ID NO: 37946 - DNA, 96 bp, Fusarium cuneirostrum
  misc_feature: 58
ctcgcctgcacgctacgcgctcggctcgtggactcttttgaggttatcaccatctactttatatatgctcgcgtaacacaagtgcgggagctcacc

SEQ ID NO: 37947 - DNA, 96 bp, Fusarium cuneirostrum
  misc_feature: 58
cgtttgctcttgcaaagcgatgaacacagttcaacccgaatgtaaagaaggaaaaaaattgtcggatttccagaaatcctctgtcttgcgacaccc

SEQ ID NO: 37948 - DNA, 96 bp, Fusarium cuneirostrum
  misc_feature: 58
ggcaaggtacgcagccaggcattttactctgaatattcctttactaacaaggtgtcataggaaaggggagatcgccaatttaattttcattgaaat

SEQ ID NO: 37949 - DNA, 96 bp, Fusarium cuneirostrum
  misc_feature: 58
ggattgcccgttgcacttggagtgcttttggcgcccggggcgtcaaccttttttctgacgcgtttcattacgcgctcgctcgaacggattgtgagc

SEQ ID NO: 37950 - DNA, 96 bp, Fusarium cuneirostrum
  misc_feature: 58
cataaactaaaaagggcacacatattagtgagctcccgcatttatatatagcgagcatgttttaatctgatgtgaataacttcaaaagtattttcc

SEQ ID NO: 37951 - DNA, 96 bp, Fusarium cuneirostrum
  misc_feature: 58
gagtgtctatacatatctggaagatgaagtgaaggatgaacgcaatgctaatagcaaacaggagcggagcgactggaatgatcgaacggagagagc

SEQ ID NO: 37952 - DNA, 96 bp, Fusarium cuneirostrum
  misc_feature: 58
gcgaaacgagggctgataactttggtctataagcggtttcctttcaaacgcgtgcgttgattggaagctgggggaacaccgaggaacgaggggatg

SEQ ID NO: 37953 - DNA, 96 bp, Fusarium cuneirostrum
  misc_feature: 58
ataatgtgaagaggtgaagtgcgaataacttcactagatcatgaaaagagatggagtgaaacgagatcgaagaagtaatagaaacctgagccatgc

SEQ ID NO: 37954 - DNA, 96 bp, Fusarium cuneirostrum
  misc_feature: 58
gatggagttgtgaatggcctcattttcatccacactggaatagtcccgaatcccgaggacgaaggacgcagggtgagggattgacaagagtatgtt

SEQ ID NO: 37955 - DNA, 96 bp, Fusarium cuneirostrum
  misc_feature: 58
gatgaatgggtcgatgacgatcttggagatttttagtgtagatagatgcaatgtgaacttggtgagatttgtagagttgcctgatgtggaagtgat

SEQ ID NO: 37956 - DNA, 96 bp, Fusarium cuneirostrum
  misc_feature: 58
gatcctgccttcgcagtccatgcacctccacttgaggtcatcatgcactctcatgaagataactgaaccacatcttgtggtgttttagtaacgtcg

SEQ ID NO: 37957 - DNA, 96 bp, Fusarium cuneirostrum
  misc_feature: 58
aaccctaaccctaaccctaaccctaaccctaaccctaaccctaaccctatatttttcttttcttttatttcctttattctattttatattcttctc

SEQ ID NO: 37958 - DNA, 96 bp, Fusarium cuneirostrum
  misc_feature: 58
gaattgggattatgatgtattgtgttaggaaattcctctttgagttagatcggccgtgccgaaatataacatattacgttcgaacctttaagaatg

SEQ ID NO: 37959 - DNA, 96 bp, Fusarium cuneirostrum
  misc_feature: 58
gaagataactgaaccacatcttgtggtgttttagtaacgtcgctacgtgttccttcgtcacactcactccgcacgtcgccctccgggctccgtagg

SEQ ID NO: 37960 - DNA, 96 bp, Fusarium cuneirostrum
  misc_feature: 58
ctttcgatgtgcgcattgactgttggtcaattgatgatgttatcgtgagcagtgaccttgcgaccttgctcattattataacctcgcgacgggttc

SEQ ID NO: 37961 - DNA, 96 bp, Fusarium cuneirostrum
  misc_feature: 58
cttcggtcgattagtatatatgtgtgcccgtctcgtgcacatgtgtccagacacaaatcattatcactcacccgttcgtgatcgctttcgctctat

SEQ ID NO: 37962 - DNA, 96 bp, Fusarium cuneirostrum
  misc_feature: 58
attaaccttataattactaattcttaggttttataatttcttttacgagaattattaattattaatcttaattacctttccgatataattaataag

SEQ ID NO: 37963 - DNA, 96 bp, Fusarium cuneirostrum
  misc_feature: 58
agatggaattgtgacgtagaatgtgaatggaacaggagtggtgagagttacaccacttgagtcccgaacggatgagcaagccccgtaggggcgcag

SEQ ID NO: 37964 - DNA, 96 bp, Fusarium cuneirostrum
  misc_feature: 58
cctcgccccctcgtcagtatccacttatgcccggatcgctacgctgcaccttattcgtcgttcctcctcataacgttccgtccacccgcacttcag

SEQ ID NO: 37965 - DNA, 96 bp, Fusarium cuneirostrum
  misc_feature: 58
catggactgcgaaggcaggatcacatggaatgtgggcgacgaggacggagagtccgagtggggaggccgaaggccgaccggggaaagtgtgtcgag

SEQ ID NO: 37966 - DNA, 96 bp, Fusarium cuneirostrum
  misc_feature: 58
agcttcatttatctttatgcgagcacttatctggaaccaacagctcgccgtaatgaatccaaaaagtaagcctaaaggcgagcgactgtgacttag

SEQ ID NO: 37967 - DNA, 96 bp, Fusarium cuneirostrum
  misc_feature: 58
atcacgactacgattcaaaataataataatgtcacatatgcacagctcgctcgattaaataaagtatgaagtggtgctcgtcaaaagtatatttag

SEQ ID NO: 37968 - DNA, 96 bp, Fusarium cuneirostrum
  misc_feature: 58
cgtcgagggtgtggacgagtttggtgatgaatgggtcgatgacgatcttggagatttttagtgtagatagatgcaatgtgaacttggtgagatttg

SEQ ID NO: 37969 - DNA, 96 bp, Fusarium cuneirostrum
  misc_feature: 58
cggagtaactgtacatcgcaagactcaaaatctaccggattttgggacttttcagaaactggcacagttttaatatgggttgcgatctggcgtttg

SEQ ID NO: 37970 - DNA, 96 bp, Fusarium cuneirostrum
  misc_feature: 58
aacgacgcagcctgaaggattgactagtagagtctcatctgcatgtgaagagttcatctccaagcagagactgtggtctcaataccgagcgaagcg

SEQ ID NO: 37971 - DNA, 96 bp, Fusarium cuneirostrum
  misc_feature: 58
atgaatgggtcgatgacgatcttggagatttttagtgtagatagatgcaatgtgaacttggtgagatttgtagagttgcctgatgtggaagtgatg

SEQ ID NO: 37972 - DNA, 96 bp, Fusarium cuneirostrum
  misc_feature: 58
ataacataagcagggcgaggcaaataataatttaaataaactcgtttgacgagccctggttattctttttattagattagtgagcatgatgttact

SEQ ID NO: 37973 - DNA, 96 bp, Fusarium cuneirostrum
  misc_feature: 58
aaaaatctccaagatcgtcatcgacccattcatcaccaaactcgtccacaccctcgacgagtgtcttcacctcttctacagccctcggcttcacct

SEQ ID NO: 37974 - DNA, 96 bp, Fusarium cuneirostrum
  misc_feature: 57
tgtgatttagttgcctttcttagtagttgtgatagcttcatttatctttatgcgagcacttatctggaaccaacagctcgccgtaatgaatccaaa

SEQ ID NO: 37975 - DNA, 96 bp, Fusarium cuneirostrum
  misc_feature: 57
tttaccaactgggatgccaatgtcagcaagctgactaaaggcagactcagtccacacgttcgtccctcactgtcccgtgtcccgtagtccccccct

SEQ ID NO: 37976 - DNA, 96 bp, Fusarium cuneirostrum
  misc_feature: 57
taactacaataccacttgaggtcatcaccattacctattccggtaagtctcacaaagcatcgttggagttactcctccacacttgacccaactcaa

SEQ ID NO: 37977 - DNA, 96 bp, Fusarium cuneirostrum
  misc_feature: 57
ttcgacctcgttcctcggtctcgtactgcacgtcggcttacgcctccgtaattctttacacagttcttgcttgggcaatgaactcttcacttgagt

SEQ ID NO: 37978 - DNA, 96 bp, Fusarium cuneirostrum
  misc_feature: 57
ttataatatagctagcatatttcctaacttatattccactacttaagttaccgtatttagctacttcttctatttagcgctatagctaatcttagc

SEQ ID NO: 37979 - DNA, 96 bp, Fusarium cuneirostrum
  misc_feature: 57
ctgcgtcctacgtcctcggcctcgggaaaatacttttgaagttattcacatcagattaaaacatgctcgctatatataaatgcgggagctcactaa

SEQ ID NO: 37980 - DNA, 96 bp, Fusarium cuneirostrum
  misc_feature: 57
tcaattgacgcagagtcaaacacgacagtgaagaatgacccggagtgtgggtcatgacgtgagtaaagtaggagggagcctgtggggcgaccgtaa

SEQ ID NO: 37981 - DNA, 96 bp, Fusarium cuneirostrum
  misc_feature: 57
tataatatagctagcatatttcctaacttatattccactacttaagttaccgtatttagctacttcttctatttagcgctatagctaatcttagca

SEQ ID NO: 37982 - DNA, 96 bp, Fusarium cuneirostrum
  misc_feature: 57
tgaatgggtcgatgacgatcttggagatttttagtgtagatagatgcaatgtgaacttggtgagatttgtagagttgcctgatgtggaagtgatga

SEQ ID NO: 37983 - DNA, 96 bp, Fusarium cuneirostrum
  misc_feature: 57
gataatccaacctcacataagtaaactgacacccacccaaccctctctccacagtagatatcaagccatggcgtttgtgaggcccaggaagcaaga

SEQ ID NO: 37984 - DNA, 96 bp, Fusarium cuneirostrum
  misc_feature: 57
tctgggtcgacgtccgtctccccctcttttatttctcctcgtgcactcacttcagtcgcatcctgcattcatgtttgactgctgtcaattgaagtc

SEQ ID NO: 37985 - DNA, 96 bp, Fusarium cuneirostrum
  misc_feature: 57
tcgtcgagggtgtggacgagtttggtgatgaatgggtcgatgacgatcttggagatttttagtgtagatagatgcaatgtgaacttggtgagattt

SEQ ID NO: 37986 - DNA, 96 bp, Fusarium cuneirostrum
  misc_feature: 57
ctttagtcagcttgctgacattggcatcccagttggtaaagatgacggagaacgaggaacgagtgagtcatcaggcatagccactcagacgaggga

SEQ ID NO: 37987 - DNA, 96 bp, Fusarium cuneirostrum
  misc_feature: 57
attgggattatgatgtattgtgttaggaaattcctctttgagttagatcggccgtgccgaaatataacatattacgttcgaacctttaagaatgga

SEQ ID NO: 37988 - DNA, 96 bp, Fusarium cuneirostrum
  misc_feature: 57
tcacggcataaaagttgaaaagtgttattttgcatagcgaaaggtgatggtggaaattgtgttgtagcaaaatttgatatgattatggtgatgtta

SEQ ID NO: 37989 - DNA, 96 bp, Fusarium cuneirostrum
  misc_feature: 57
gcctcacctttttttgactttgtgactttgagactttgactgtgatgatgactacttgtgagcccttgacataacataagcagggcgaggcaaata

SEQ ID NO: 37990 - DNA, 96 bp, Fusarium cuneirostrum
  misc_feature: 57
tattgtagttagtatagacagtgatatgtgagcacaaccgagagagtagtggagcgaacactaaataaaaggctccaacagaagtgagcgacacgt

SEQ ID NO: 37991 - DNA, 96 bp, Fusarium cuneirostrum
  misc_feature: 57
tattcagacgagctttggtgaaagatcgaaaagaatggcaagggaaccaatacagcccaatatgcaatccaaatatcgacttccactatttccctt

SEQ ID NO: 37992 - DNA, 96 bp, Fusarium cuneirostrum
  misc_feature: 57
tatcaccatctactttatatatgctcgcgtaacacaagtgcgggagctcaccctactgtaagctctaggtttttcagcctcgctccctacctactt

SEQ ID NO: 37993 - DNA, 96 bp, Fusarium cuneirostrum
  misc_feature: 57
gtgtgaccgagacagatgtcgaggggaaagggtacatggcgagagcagcgctcgaggtggatttgacggagtctcaaaactggaacagtttttgta

SEQ ID NO: 37994 - DNA, 96 bp, Fusarium cuneirostrum
  misc_feature: 57
acgagtttaccgcaacaacgtgaggagacgaacagagtgagtttgtattctatccggaggaggagtgaacgagtgagcgatcatctacttacatta

SEQ ID NO: 37995 - DNA, 96 bp, Fusarium cuneirostrum
  misc_feature: 57
taactttggtgatataagaggatttttgggaaacgcatgcgttgggacccaaactgacttccaggctttagccggttggcagagtccgcggcttta

SEQ ID NO: 37996 - DNA, 96 bp, Fusarium cuneirostrum
  misc_feature: 57
taacggagtaactgtacatcgcaagactcaaaatctaccggattttgggacttttcagaaactggcacagttttaatatgggttgcgatctggcgt

SEQ ID NO: 37997 - DNA, 96 bp, Fusarium cuneirostrum
  misc_feature: 57
taaactaaaaagggcacacatattagtgagctcccgcatttatatatagcgagcatgttttaatctgatgtgaataacttcaaaagtattttcccg

SEQ ID NO: 37998 - DNA, 96 bp, Fusarium cuneirostrum
  misc_feature: 57
ggtattgtagttagtatagacagtgatatgtgagcacaaccgagagagtagtggagcgaacactaaataaaaggctccaacagaagtgagcgacac

SEQ ID NO: 37999 - DNA, 96 bp, Fusarium cuneirostrum
  misc_feature: 57
gtcttatactcctcgactctgtctgcggggtatgagattgtggacggaacgttcgtacctctctcatttgtccgtccaacaaaaccgacctccact

SEQ ID NO: 38000 - DNA, 96 bp, Fusarium cuneirostrum
  misc_feature: 57
gtcctcggtctcgaccttgctcttgtcctcggtctcgaccttgctcttgtcctcggtctcgaccttgctcttgtcctcggtctcgaccttgctctt

SEQ ID NO: 38001 - DNA, 96 bp, Fusarium cuneirostrum
  misc_feature: 57
acactcacctgttcgtgtttccacggccgtggaataaacagaactgattccagtcgaaatcagactcgactccgtctcacacaaaaaaataaatac

SEQ ID NO: 38002 - DNA, 96 bp, Fusarium cuneirostrum
  misc_feature: 57
cttcggtcgcgggaagtctctatacttccttaacatttgtgaccaaattcccactccgttctcacgtttgctcacaccaaacgccagatcgcaacc

SEQ ID NO: 38003 - DNA, 96 bp, Fusarium cuneirostrum
  misc_feature: 57
acgacagctcaatatataaccctacgggtaatcgagtcgctcacaatccgttcgagcgagcgcgtaatgaaacgcgtcagaaaaaaggttgacgcc

SEQ ID NO: 38004 - DNA, 96 bp, Fusarium cuneirostrum
  misc_feature: 57
ggagtaactgtacatcgcaagactcaaaatctaccggattttgggacttttcagaaactggcacagttttaatatgggttgcgatctggcgtttgg

SEQ ID NO: 38005 - DNA, 96 bp, Fusarium cuneirostrum
  misc_feature: 57
gctcttgcaaagcgatgaacacagttcaacccgaatgtaaagaaggaaaaaaattgtcggatttccagaaatcctctgtcttgcgacacccttctt

SEQ ID NO: 38006 - DNA, 96 bp, Fusarium cuneirostrum
  misc_feature: 57
atcctgccttcgcagtccatgcacctccacttgaggtcatcatgcactctcatgaagataactgaaccacatcttgtggtgttttagtaacgtcgc

SEQ ID NO: 38007 - DNA, 96 bp, Fusarium cuneirostrum
  misc_feature: 57
aatgatgaatgcggattgttgtatgtctaggagacttttctgtggaagtgagatttcccgaacgggagttgggaatagcttcaatgcgtgactggc

SEQ ID NO: 38008 - DNA, 96 bp, Fusarium cuneirostrum
  misc_feature: 57
ctggttattctttttattagattagtgagcatgatgttactgtagatggagttgtgaatggcctcattttcatccacactggaatagtcccgaatc

SEQ ID NO: 38009 - DNA, 96 bp, Fusarium cuneirostrum
  misc_feature: 57
gatggaattgtgacgtagaatgtgaatggaacaggagtggtgagagttacaccacttgagtcccgaacggatgagcaagccccgtaggggcgcagg

SEQ ID NO: 38010 - DNA, 96 bp, Fusarium cuneirostrum
  misc_feature: 57
gagtgattgattaaattgtaatcgtagatgtgaatgtgaataacttcaaaagtattttcccgaggccgaggacgtaggacgcaggctgagggattg

SEQ ID NO: 38011 - DNA, 96 bp, Fusarium cuneirostrum
  misc_feature: 57
gaggtgagtagatgagggagtgcggatgcgcgaccgacagaagtgtgtcgagggtcgagcagacccgagccagaaacgagctcaaaactggaacag

SEQ ID NO: 38012 - DNA, 96 bp, Fusarium cuneirostrum
  misc_feature: 57
gacagaggatttctggaaatccgacaatttttttccttctttacattcgggttgaactgtgttcatcgctttgcaagagcaaacgaacccgtatat

SEQ ID NO: 38013 - DNA, 96 bp, Fusarium cuneirostrum
  misc_feature: 57
cacatcgtgccatcctaccttctgccacactctactgagtcgtgaagccgtcgtgcactcctacatgaaatggtaacacacatatccatggtgttc

SEQ ID NO: 38014 - DNA, 96 bp, Fusarium cuneirostrum
  misc_feature: 57
cgatttgagtccaatttgaatccgattttgcttgttcctcaccaaaatctcgaaaaatttcacattcgggctcgacacaatctcgcccctctgtct

SEQ ID NO: 38015 - DNA, 96 bp, Fusarium cuneirostrum
  misc_feature: 57
actacgccttttaaattggcgagcactttgtgaatgaacgacttaatcaccacttgaggcccgagccgacgagcgagcgtagcgaaggaggagcgg

SEQ ID NO: 38016 - DNA, 96 bp, Fusarium cuneirostrum
  misc_feature: 57
catcttttttctactcgacgatggcttcgtcgcacatgaatgaaatggaatgagccgagatgcagggcacgaggacgtatgtggacccggaccggt

SEQ ID NO: 38017 - DNA, 96 bp, Fusarium cuneirostrum
  misc_feature: 57
caaaagagtccacgagccgagcgcgtagcgtgcaggcgaggggattgtcaatgtaatttattcagggaataattacccttccaagcaggaactgtg

SEQ ID NO: 38018 - DNA, 96 bp, Fusarium cuneirostrum
  misc_feature: 57
attgattaaattgtaatcgtagatgtgaatgtgaataacttcaaaagtattttcccgaggccgaggacgtaggacgcaggctgagggattgacaat

SEQ ID NO: 38019 - DNA, 96 bp, Fusarium cuneirostrum
  misc_feature: 57
aagtctataaaaatttcagacttgatctactcttttgtgctgctttgccggtcacagtttttgtctgaattctactgatttcagaaagaaataact

SEQ ID NO: 38020 - DNA, 96 bp, Fusarium cuneirostrum
  misc_feature: 57
acaaaaccgacctccactcagtcccttcgttcccggtcttacttactccacttcatactcgtccctcgtctgagtggctatgcctgatgactcact

SEQ ID NO: 38021 - DNA, 96 bp, Fusarium cuneirostrum
  misc_feature: 57
agtcctttccctttcactttcactttcactttcactttcactttcactttcactttcactttcactttcactttcactttcactttcactttcact

SEQ ID NO: 38022 - DNA, 96 bp, Fusarium cuneirostrum
  misc_feature: 57
acgagtgcgtatgactactagatcatgaaatgtgtgaatggaatcaacttcatgaagtgaagatgtaatacggagtagaagacatcatgatggctt

SEQ ID NO: 38023 - DNA, 96 bp, Fusarium cuneirostrum
  misc_feature: 56
tttgagtccaatttgaatccgattttgcttgttcctcaccaaaatctcgaaaaatttcacattcgggctcgacacaatctcgcccctctgtcttac

SEQ ID NO: 38024 - DNA, 96 bp, Fusarium cuneirostrum
  misc_feature: 56
cattacctattccggtaagtctcacaaagcatcgttggagttactcctccacacttgacccaactcaaacacagcatcatcaaatctacttcgaaa

SEQ ID NO: 38025 - DNA, 96 bp, Fusarium cuneirostrum
  misc_feature: 56
ttgtaattgtaattgtaattgtagtgttagatggaattgtgacgtagaatgtgaatggaacaggagtggtgagagttacaccacttgagtcccgaa

SEQ ID NO: 38026 - DNA, 96 bp, Fusarium cuneirostrum
  misc_feature: 56
aaaaactggggcagcaaccggctacgcctggaagctgtactcagtccacgagctgtcccagcttgtcccgtgtcccgtagtccccccctataccaa

SEQ ID NO: 38027 - DNA, 96 bp, Fusarium cuneirostrum
  misc_feature: 56
ttctattacttcttcgatctcgtttcactccatctcttttcatgatctagtgaagttattcgcacttcacctcttcacattatctagcaccacttc

SEQ ID NO: 38028 - DNA, 96 bp, Fusarium cuneirostrum
  misc_feature: 56
ttccttcgtcacactcactccgcacgtcctccctccggtcgtccgtactaaggatatagtcatagactcggccctccgcgggcgctcgtaactctt

SEQ ID NO: 38029 - DNA, 96 bp, Fusarium cuneirostrum
  misc_feature: 56
ttcaataataaagacgtctggcttcctccctctgtaggagggtgcgagcgccctgcagtatcgcgcatgggcaatctaagttagattctcatttgc

SEQ ID NO: 38030 - DNA, 96 bp, Fusarium cuneirostrum
  misc_feature: 56
ttatctacgattgccaatccctcagtcttccttcgctacgctcactcatccgctcgggactcatggatgaggaatacatttacagtcaccaacata

SEQ ID NO: 38031 - DNA, 96 bp, Fusarium cuneirostrum
  misc_feature: 56
ctacaataccacttgaggtcatcaccattacctattccggtaagtctcacaaagcatcgttggagttactcctccacacttgacccaactcaaaca

SEQ ID NO: 38032 - DNA, 96 bp, Fusarium cuneirostrum
  misc_feature: 56
tctgggctacagtaacacctgctggtgactcgcttgttcaagctcgagcaggcacaaaagtaaaaaaacagaagcaagttcatgttttgcgcgaca

SEQ ID NO: 38033 - DNA, 96 bp, Fusarium cuneirostrum
  misc_feature: 56
cactcacctgttcgtgtttccacggccgtggaataaacagaactgattccagtcgaaatcagactcgactccgtctcacacaaaaaaataaataca

SEQ ID NO: 38034 - DNA, 96 bp, Fusarium cuneirostrum
  misc_feature: 56
tggtgagttcgtttctgagattgtatgggttggaacccagaatcgaggtgggaaatgggtaccatttgttagtgagcgcagcgaacttaggcgagg

SEQ ID NO: 38035 - DNA, 96 bp, Fusarium cuneirostrum
  misc_feature: 56
tggaggcgaggaggaacgacgcagccggaaggattgtcaaagtcttctcatctgccagggaagagttacttccccaagcaggaactgtgaaataga

SEQ ID NO: 38036 - DNA, 96 bp, Fusarium cuneirostrum
  misc_feature: 56
attccagtcgctccgctcctgtttgctattagcattgcgttcatccttcacttcatcttccagatatgtatagacactcacctgttcgtgtttcca

SEQ ID NO: 38037 - DNA, 96 bp, Fusarium cuneirostrum
  misc_feature: 56
tgcacgctacgcgctcgggctcaggactatcttgggtacatgatcacgactacgattcaaaataataataatgtcacatatgcacagctcgctcga

SEQ ID NO: 38038 - DNA, 96 bp, Fusarium cuneirostrum
  misc_feature: 56
tctttcgatgtgcgcattgactgttggtcaattgatgatgttatcgtgagcagtgaccttgcgaccttgctcattattataacctcgcgacgggtt

SEQ ID NO: 38039 - DNA, 96 bp, Fusarium cuneirostrum
  misc_feature: 56
tctccgccaccaagaaaaagtgacttcgttaacagaagtgaccgatttctcggcccattctcaggatttggctcaccaaatgccagaatcgagtcc

SEQ ID NO: 38040 - DNA, 96 bp, Fusarium cuneirostrum
  misc_feature: 56
tcgtgccatcctaccttctgccacactctactgagtcgtgaagccgtcgtgcactcctacatgaaatggtaacacacatatccatggtgttctcgt

SEQ ID NO: 38041 - DNA, 96 bp, Fusarium cuneirostrum
  misc_feature: 56
tagtcagcttgctgacattggcatcccagttggtaaagatgacggagaacgaggaacgagtgagtcatcaggcatagccactcagacgagggacga

SEQ ID NO: 38042 - DNA, 96 bp, Fusarium cuneirostrum
  misc_feature: 56
gacgagggacgagtatgaagtggagtaagtaagaccgggaacgaagggactgagtggaggtcggttttgttggacggacaaatgagagaggtacga

SEQ ID NO: 38043 - DNA, 96 bp, Fusarium cuneirostrum
  misc_feature: 56
tcgctccgctcggggtagaattatacagtcatggactcggccctgcgggcagctgcactactcttgccaatccggctccgtcgtccctcctcctcc

SEQ ID NO: 38044 - DNA, 96 bp, Fusarium cuneirostrum
  misc_feature: 56
gcatggactgcgaaggcaggatcacatggaatgtgggcgacgaggacggagagtccgagtggggaggccgaaggccgaccggggaaagtgtgtcga

SEQ ID NO: 38045 - DNA, 96 bp, Fusarium cuneirostrum
  misc_feature: 56
aaatctcgaaaaatttcacattcgggctcgacacaatctcgcccctctgtcttacggtcgccccacaggctccctcctactttactcacgtcatga

SEQ ID NO: 38046 - DNA, 96 bp, Fusarium cuneirostrum
  misc_feature: 56
gaaaaaaataaaacaagtcagagttcgcctgctcactcaacctctcgggggaaaagacgctgtcttatactcctcgactctgtctgcggggtatga

SEQ ID NO: 38047 - DNA, 96 bp, Fusarium cuneirostrum
  misc_feature: 56
gcgtatgactactagatcatgaaatgtgtgaatggaatcaacttcatgaagtgaagatgtaatacggagtagaagacatcatgatggcttcaaata

SEQ ID NO: 38048 - DNA, 96 bp, Fusarium cuneirostrum
  misc_feature: 56
tagcaaatgagaatctaacttagattgcccatgcgcgatactgcagggcgctcgcaccctcctacagagggaggaagccagacgtctttattattg

SEQ ID NO: 38049 - DNA, 96 bp, Fusarium cuneirostrum
  misc_feature: 56
tacctattccggtaagtctcacaaagcatcgttggagttactcctccacacttgacccaactcaaacacagcatcatcaaatctacttcgaaactc

SEQ ID NO: 38050 - DNA, 96 bp, Fusarium cuneirostrum
  misc_feature: 56
tacaattacaattacaattacaatcagtcacgatggctcgccattagggagggaaatggtgctcgacaagtttaaagaagtgtatttaaatgttat

SEQ ID NO: 38051 - DNA, 96 bp, Fusarium cuneirostrum
  misc_feature: 56
gagcgaacactaaataaaaggctccaacagaagtgagcgacacgtaattgtgatgttgtgcgtataaatggtatcgtgaatgtgtttgtgattgta

SEQ ID NO: 38052 - DNA, 96 bp, Fusarium cuneirostrum
  misc_feature: 56
taatggcgagccatcgtgactgattgtaattgtaattgtaattgtagtgttagatggaattgtgacgtagaatgtgaatggaacaggagtggtgag

SEQ ID NO: 38053 - DNA, 96 bp, Fusarium cuneirostrum
  misc_feature: 56
taatctcttatagactaacgcgagtgacccggaacggggcaaacgagcgtccataactttggtctataagaggtttttttgacaaacgctgcgcgt

SEQ ID NO: 38054 - DNA, 96 bp, Fusarium cuneirostrum
  misc_feature: 56
taatccaacctcacataagtaaactgacacccacccaaccctctctccacagtagatatcaagccatggcgtttgtgaggcccaggaagcaagact

SEQ ID NO: 38055 - DNA, 96 bp, Fusarium cuneirostrum
  misc_feature: 56
ccatattaaacagtggcgagcaaagtatgtggagtcggcagaagtgaagtcatcaccaactcccgtttcagcatagtcgggaaaacggtcccgtta

SEQ ID NO: 38056 - DNA, 96 bp, Fusarium cuneirostrum
  misc_feature: 56
gtctgggtcgacgtccgtctccccctcttttatttctcctcgtgcactcacttcagtcgcatcctgcattcatgtttgactgctgtcaattgaagt

SEQ ID NO: 38057 - DNA, 96 bp, Fusarium cuneirostrum
  misc_feature: 56
gtcgaggagtataagacagcgtcttttcccccgagaggttgagtgagcaggcgaactctgacttgttttatttttttcgaggacggaggacgagtt

SEQ ID NO: 38058 - DNA, 96 bp, Fusarium cuneirostrum
  misc_feature: 56
gtattctatccggaggaggagtgaacgagtgagcgatcatctacttacattaattgctggacagcatcttctcgggaagagaagaaaagagtattt

SEQ ID NO: 38059 - DNA, 96 bp, Fusarium cuneirostrum
  misc_feature: 56
cacggcataaaagttgaaaagtgttattttgcatagcgaaaggtgatggtggaaattgtgttgtagcaaaatttgatatgattatggtgatgttac

SEQ ID NO: 38060 - DNA, 96 bp, Fusarium cuneirostrum
  misc_feature: 56
gggggggactacgggacacgggacaagctgggacagctcgtggactgagtacagcttccaggcgtagccggttgctgccccagtttttaggcatcc

SEQ ID NO: 38061 - DNA, 96 bp, Fusarium cuneirostrum
  misc_feature: 56
gggcgagattgtgtcgagcccgaatgtgaaatttttcgagattttggtgaggaacaagcaaaatcggattcaaattggactcaaatcgacatactt

SEQ ID NO: 38062 - DNA, 96 bp, Fusarium cuneirostrum
  misc_feature: 56
atcatgcactctcatgaagataactgaaccacatcttgtggtgttttagtaacgtcgctacgtgttccttcgtcacactcactccgcacgtcgccc

SEQ ID NO: 38063 - DNA, 96 bp, Fusarium cuneirostrum
  misc_feature: 56
ggcgaggcaaataataatttaaataaactcgtttgacgagccctggttattctttttattagattagtgagcatgatgttactgtagatggagttg

SEQ ID NO: 38064 - DNA, 96 bp, Fusarium cuneirostrum
  misc_feature: 56
cacgcattgaagctattcccaactcccgttcgggaaatctcacttccacagaaaagtctcctagacatacaacaatccgcattcatcattcgggcc

SEQ ID NO: 38065 - DNA, 96 bp, Fusarium cuneirostrum
  misc_feature: 56
ccaccggcctccactcattccattcgttcccgtccttagtcaaccgatcattgcgtcgtccctcctccatgatcctacactcttcgccttcgtgcc

SEQ ID NO: 38066 - DNA, 96 bp, Fusarium cuneirostrum
  misc_feature: 56
ctcatgaagataactgaaccacatcttgtggtgttttagtaacgtcgctacgtgttccttcgtcacactcactccgcacgtcgccctccgggctcc

SEQ ID NO: 38067 - DNA, 96 bp, Fusarium cuneirostrum
  misc_feature: 56
gagaaggatgtcggacgacatgacagcgctgtcatgtcgtccgacatccttctcactgacttacgcacgttcaggtaacccagctgcgtatacagc

SEQ ID NO: 38068 - DNA, 96 bp, Fusarium cuneirostrum
  misc_feature: 56
gcgaggaggaacgacgcagccggaaggattgtcaaagtcttctcatctgccagggaagagttacttccccaagcaggaactgtgaaatagagaccg

SEQ ID NO: 38069 - DNA, 96 bp, Fusarium cuneirostrum
  misc_feature: 56
gccttttaaattggcgagcactttgtgaatgaacgacttaatcaccacttgaggcccgagccgacgagcgagcgtagcgaaggaggagcggagggc

SEQ ID NO: 38070 - DNA, 96 bp, Fusarium cuneirostrum
  misc_feature: 56
aaataataatttaaataaactcgtttgacgagccctggttattctttttattagattagtgagcatgatgttactgtagatggagttgtgaatggc

SEQ ID NO: 38071 - DNA, 96 bp, Fusarium cuneirostrum
  misc_feature: 56
gattgcccgttgcacttggagtgcttttggcgcccggggcgtcaaccttttttctgacgcgtttcattacgcgctcgctcgaacggattgtgagcg

SEQ ID NO: 38072 - DNA, 96 bp, Fusarium cuneirostrum
  misc_feature: 56
ctcagttcatctctgatgaagttatcgccaaccactgtcgggcgcaatcaactcatgtctcatgaggattatagtaacctcattccgtggtcgctc

SEQ ID NO: 38073 - DNA, 96 bp, Fusarium cuneirostrum
  misc_feature: 56
gaatgatgaatgcggattgttgtatgtctaggagacttttctgtggaagtgagatttcccgaacgggagttgggaatagcttcaatgcgtgactgg

SEQ ID NO: 38074 - DNA, 96 bp, Fusarium cuneirostrum
  misc_feature: 56
gaagaagtgggcgtccgcccattatgtactcgctcactagctccgtccatgattacggtcgtacattctgttcgaccataagcgggtcccttcctt

SEQ ID NO: 38075 - DNA, 96 bp, Fusarium cuneirostrum
  misc_feature: 56
gaacgagatggttcgagtgcgaggaaggacgacggaggaggacaggagagcatcggagatgcacatgggcgcagagcgccagagacaatctttgtt

SEQ ID NO: 38076 - DNA, 96 bp, Fusarium cuneirostrum
  misc_feature: 56
ctacgcttatatcactaccgaatgagacccggaacgggtcgaaatgaggtggcataactttggtgatataagcggattccgggattgaacttgttc

SEQ ID NO: 38077 - DNA, 96 bp, Fusarium cuneirostrum
  misc_feature: 56
cttataatatagctagcatatttcctaacttatattccactacttaagttaccgtatttagctacttcttctatttagcgctatagctaatcttag

SEQ ID NO: 38078 - DNA, 96 bp, Fusarium cuneirostrum
  misc_feature: 56
ctcgaaataaataatcgatcgtcgctccactcctattgctcgtcacttctcgttccgatatggatatacgggttcgtttgctcttgcaaagcgatg

SEQ ID NO: 38079 - DNA, 96 bp, Fusarium cuneirostrum
  misc_feature: 56
atctattatgcattagcctaaacggggcatactagccttagtagccttattagagagtatcccgattgcctacgtcctctagcttatatcggcacg

SEQ ID NO: 38080 - DNA, 96 bp, Fusarium cuneirostrum
  misc_feature: 56
ataatgggcggacgcccacttcttcagcgctgtcgcgcaaaacatgaacttgcttctgtttttttacttttgtgcctgctcgagcttgaacaagcg

SEQ ID NO: 38081 - DNA, 96 bp, Fusarium cuneirostrum
  misc_feature: 56
atcgtgccatcctaccttctgccacactctactgagtcgtgaagccgtcgtgcactcctacatgaaatggtaacacacatatccatggtgttctcg

SEQ ID NO: 38082 - DNA, 96 bp, Fusarium cuneirostrum
  misc_feature: 56
catgatcctgtcatgtcaaccgagcggggcgaggggattgagtttaggcgtttgcctaacaaagtgcaggaagcacttgaatgtccgatggagtcg

SEQ ID NO: 38083 - DNA, 96 bp, Fusarium cuneirostrum
  misc_feature: 56
caaaatctcgaaaaatttcacattcgggctcgacacaatctcgcccctctgtcttacggtcgccccacaggctccctcctactttactcacgtcat

SEQ ID NO: 38084 - DNA, 96 bp, Fusarium cuneirostrum
  misc_feature: 56
aaggggcaattggggtaagcgtttgtgtagatttgaattgaattgtgattgcgagccatcattcataacgaaatggggcgagacctaaaatataat

SEQ ID NO: 38085 - DNA, 96 bp, Fusarium cuneirostrum
  misc_feature: 56
atgatgaatgcggattgttgtatgtctaggagacttttctgtggaagtgagatttcccgaacgggagttgggaatagcttcaatgcgtgactggct

SEQ ID NO: 38086 - DNA, 96 bp, Fusarium cuneirostrum
  misc_feature: 56
aagacactcgtcgagggtgtggacgagtttggtgatgaatgggtcgatgacgatcttggagatttttagtgtagatagatgcaatgtgaacttggt

SEQ ID NO: 38087 - DNA, 96 bp, Fusarium cuneirostrum
  misc_feature: 56
aacaaagtgcaggaagcacttgaatgtccgatggagtcggatgatatgctattcttgagagcatattactgcgtcgcttatctgacgcatatcttt

SEQ ID NO: 38088 - DNA, 96 bp, Fusarium cuneirostrum
  misc_feature: 55
aaacatctctttctgaaaagaagaaagaagaaagaagaaagaagaaagaagaaagaagaaagaagaaagaagaaagaagaaagaagaaagaagaaa

SEQ ID NO: 38089 - DNA, 96 bp, Fusarium cuneirostrum
  misc_feature: 55
ttggcaacccatgaagagttacgagcgcccgcggagggccgagtctatgactatatccttagtacggacgaccggagggaggacgtgcggagtgag

SEQ ID NO: 38090 - DNA, 96 bp, Fusarium cuneirostrum
  misc_feature: 55
ttccagtcgctccgctcctgtttgctattagcattgcgttcatccttcacttcatcttccagatatgtatagacactcacctgttcgtgtttccac

SEQ ID NO: 38091 - DNA, 96 bp, Fusarium cuneirostrum
  misc_feature: 55
ccactcggactctccgtcctcgtcgcccacattccatgtgatcctgccttcgcagtccatgcacctccacttgaggtcatcatgcactctcatgaa

SEQ ID NO: 38092 - DNA, 96 bp, Fusarium cuneirostrum
  misc_feature: 55
ttcacggcataaaagttgaaaagtgttattttgcatagcgaaaggtgatggtggaaattgtgttgtagcaaaatttgatatgattatggtgatgtt

SEQ ID NO: 38093 - DNA, 96 bp, Fusarium cuneirostrum
  misc_feature: 55
ccaagcagaactatgttctgaataccgaccgaacggagtgagggaaggtgcggaatggagtgggagcagagcgaccacggaatgaggttactataa

SEQ ID NO: 38094 - DNA, 96 bp, Fusarium cuneirostrum
  misc_feature: 55
taccatctctattgatggtggcaaggtacgcagccaggcattttactctgaatattcctttactaacaaggtgtcataggaaaggggagatcgcca

SEQ ID NO: 38095 - DNA, 96 bp, Fusarium cuneirostrum
  misc_feature: 55
acttcgtgctcgctacgctctcactccgttccgcaccttcgcttcgctcggtattgagaccacagtctctgcttggagatgaactcttcacatgca

SEQ ID NO: 38096 - DNA, 96 bp, Fusarium cuneirostrum
  misc_feature: 55
acctggaaggtcatctgaacttggttcagtttgttgattgaggcagcgccgagacttgacgattaggcaagaatgatagagcgaaagcgatcacga

SEQ ID NO: 38097 - DNA, 96 bp, Fusarium cuneirostrum
  misc_feature: 55
tccgatgctctcctgtcctcctccgtcgtccttcctcgcactcgaaccatctcgttcatcactccgtgatacaaaagaataaaccacgttcgcccg

SEQ ID NO: 38098 - DNA, 96 bp, Fusarium cuneirostrum
  misc_feature: 55
tcatgcactctcatgaagataactgaaccacatcttgtggtgttttagtaacgtcgctacgtgttccttcgtcacactcactccgcacgtcgccct

SEQ ID NO: 38099 - DNA, 96 bp, Fusarium cuneirostrum
  misc_feature: 55
aaacgggagttggtgatgacttcacttctgccgactccacatactttgctcgccactgtttaatatggggcgaggcaaataaatacgttttaaata

SEQ ID NO: 38100 - DNA, 96 bp, Fusarium cuneirostrum
  misc_feature: 55
tagctcggatacatgaggctcaaggattaggcgggaacaaagaggaattggaaatggggaccattcgttcatttgtagaggatctcgacctgtatc

SEQ ID NO: 38101 - DNA, 96 bp, Fusarium cuneirostrum
  misc_feature: 55
gtaagtctcacaaagcatcgttggagttactcctccacacttgacccaactcaaacacagcatcatcaaatctacttcgaaactcccttctcagta

SEQ ID NO: 38102 - DNA, 96 bp, Fusarium cuneirostrum
  misc_feature: 55
tactcctcgactctgtctgcggggtatgagattgtggacggaacgttcgtacctctctcatttgtccgtccaacaaaaccgacctccactcagtcc

SEQ ID NO: 38103 - DNA, 96 bp, Fusarium cuneirostrum
  misc_feature: 55
tacaataccacttgaggtcatcaccattacctattccggtaagtctcacaaagcatcgttggagttactcctccacacttgacccaactcaaacac

SEQ ID NO: 38104 - DNA, 96 bp, Fusarium cuneirostrum
  misc_feature: 55
tacaaaaagtatgtcgatttgagtccaatttgaatccgattttgcttgttcctcaccaaaatctcgaaaaatttcacattcgggctcgacacaatc

SEQ ID NO: 38105 - DNA, 96 bp, Fusarium cuneirostrum
  misc_feature: 55
gtctctgcttggagatgaactcttcacatgcagatgagactctactagtcaatccttcaggctgcgtcgttcctcctcgccctcaggactcattta

SEQ ID NO: 38106 - DNA, 96 bp, Fusarium cuneirostrum
  misc_feature: 55
taaagtggtggctcgctcaatcaatcaagttatgtcacaggttacacaaaatgaggttatcacgatatctacattgggaaaagtctactactacgc

SEQ ID NO: 38107 - DNA, 96 bp, Fusarium cuneirostrum
  misc_feature: 55
ggcctcgggaaaatacttttgaagttattcacattcacatctacgattacaatttaatcaatcactcgcacactaagtcacagtcgctcgccttta

SEQ ID NO: 38108 - DNA, 96 bp, Fusarium cuneirostrum
  misc_feature: 55
atttctgagattgtatgggcaacgacctggaatcagagtgagaatctggtacagattgttagcgaccgaagggagctttccagcttatagactaac

SEQ ID NO: 38109 - DNA, 96 bp, Fusarium cuneirostrum
  misc_feature: 55
gtggggcgagacaaataattattaaaaccacttttaatgtgtcgagaaccactactttttttcacttggcgagcatgatttcagattgtgaatgtt

SEQ ID NO: 38110 - DNA, 96 bp, Fusarium cuneirostrum
  misc_feature: 55
ataatccaacctcacataagtaaactgacacccacccaaccctctctccacagtagatatcaagccatggcgtttgtgaggcccaggaagcaagac

SEQ ID NO: 38111 - DNA, 96 bp, Fusarium cuneirostrum
  misc_feature: 55
gcgagtcattccttttttaaataacattttaatgtgacgagcaccactacgccttttaaattggcgagcactttgtgaatgaacgacttaatcacc

SEQ ID NO: 38112 - DNA, 96 bp, Fusarium cuneirostrum
  misc_feature: 55
ggggggactacgggacacgggacaagctgggacagctcgtggactgagtacagcttccaggcgtagccggttgctgccccagtttttaggcatccg

SEQ ID NO: 38113 - DNA, 96 bp, Fusarium cuneirostrum
  misc_feature: 55
ctgcgtccttcgtcctcgggattcgggactattccagtgtggatgaaaatgaggccattcacaactccatctacagtaacatcatgctcactaatc

SEQ ID NO: 38114 - DNA, 96 bp, Fusarium cuneirostrum
  misc_feature: 55
gacagcagtcgaatagagcccagagggcgaacgatctaaacaccaggtagtggtggattgtggtgtggaacacgtttggtgagagagtcaccaact

SEQ ID NO: 38115 - DNA, 96 bp, Fusarium cuneirostrum
  misc_feature: 55
cttgtggtgttttagtaacgtcgctacgtgttccttcgtcacactcactccgcacgtcgccctccgggctccgtaggattatacagttccgactcg

SEQ ID NO: 38116 - DNA, 96 bp, Fusarium cuneirostrum
  misc_feature: 55
ctgcacgctacgcgctcgggctcaggactatcttgggtacatgatcacgactacgattcaaaataataataatgtcacatatgcacagctcgctcg

SEQ ID NO: 38117 - DNA, 96 bp, Fusarium cuneirostrum
  misc_feature: 55
atggcgagccatcgtgactgattgtaattgtaattgtaattgtagtgttagatggaattgtgacgtagaatgtgaatggaacaggagtggtgagag

SEQ ID NO: 38118 - DNA, 96 bp, Fusarium cuneirostrum
  misc_feature: 55
acatcatctgtctgagctcagagagcgagtcgatcttggattcctatgcaagtcgtctttcaattgcgctggcgcgcgactaggaacagagtgacg

SEQ ID NO: 38119 - DNA, 96 bp, Fusarium cuneirostrum
  misc_feature: 55
aattgggattatgatgtattgtgttaggaaattcctctttgagttagatcggccgtgccgaaatataacatattacgttcgaacctttaagaatgg

SEQ ID NO: 38120 - DNA, 96 bp, Fusarium cuneirostrum
  misc_feature: 55
ccacggtcgggtgtgtctgggtcgacgtccgtctccccctcttttatttctcctcgtgcactcacttcagtcgcatcctgcattcatgtttgactg

SEQ ID NO: 38121 - DNA, 96 bp, Fusarium cuneirostrum
  misc_feature: 55
aaggtacgcagccaggcattttactctgaatattcctttactaacaaggtgtcataggaaaggggagatcgccaatttaattttcattgaaatatg

SEQ ID NO: 38122 - DNA, 96 bp, Fusarium cuneirostrum
  misc_feature: 55
attcccatataaatattacaagatcttactaagtatatttaaaacatagtaaatagtttttattaatttcgtgcctctaggcataacgtatgtgat

SEQ ID NO: 38123 - DNA, 96 bp, Fusarium cuneirostrum
  misc_feature: 55
actcgaaataaataatcgatcgtcgctccactcctattgctcgtcacttctcgttccgatatggatatacgggttcgtttgctcttgcaaagcgat

SEQ ID NO: 38124 - DNA, 96 bp, Fusarium cuneirostrum
  misc_feature: 55
aactacaacggtttctcgaaagccgcagttaactctgctcctaaaagccgctctaacagatcggaagagcgtcgtgtagggaaagagtgtagatct

SEQ ID NO: 38125 - DNA, 96 bp, Fusarium cuneirostrum
  misc_feature: 55
accctaaccctaaccctaaccctaaccctaaccctaaccctaaccctatatttttcttttcttttatttcctttattctattttatattcttctct

SEQ ID NO: 38126 - DNA, 96 bp, Fusarium cuneirostrum
  misc_feature: 54
gaaattaaaaaaaaaaagaaatattaaaaagaaaagaaaaaagaaaaaagaatcaagaattaaaaataaataaataattaaaagaaaaaaaaaaaa

SEQ ID NO: 38127 - DNA, 96 bp, Fusarium cuneirostrum
  misc_feature: 54
ttttaaggcaataaggctttattttatatatatattcctttgcattattgtaagagactgagctcttatctaagccgccgagaaaggctgcttaat

SEQ ID NO: 38128 - DNA, 96 bp, Fusarium cuneirostrum
  misc_feature: 54
gtcgaagacttgagactgtatttatttttttgtgtgagacggagtcgagtctgatttcgactggaatcagttctgtttattccacggccgtggaaa

SEQ ID NO: 38129 - DNA, 96 bp, Fusarium cuneirostrum
  misc_feature: 54
aaagaatcaagaattaaaaataaataaataattaaaagaaaaaaaaaaagatataattataaaaaagaaaaaaaagagaaaataataaaaaaagaa

SEQ ID NO: 38130 - DNA, 96 bp, Fusarium cuneirostrum
  misc_feature: 54
ttcggtcgcgggaagtctctatacttccttaacatttgtgaccaaattcccactccgttctcacgtttgctcacaccaaacgccagatcgcaaccc

SEQ ID NO: 38131 - DNA, 96 bp, Fusarium cuneirostrum
  misc_feature: 54
ttcagctacggctttcatacttactaagttgatcttggcagttgtctttaaactggctgagcttaacgtgttattgcgtaggtgcttaggcgttcc

SEQ ID NO: 38132 - DNA, 96 bp, Fusarium cuneirostrum
  misc_feature: 54
ccgtcgtccttcctcgcactcgaaccatctcgttcatcactccgtgatacaaaagaataaaccacgttcgcccgtctcactaaatctccgattgaa

SEQ ID NO: 38133 - DNA, 96 bp, Fusarium cuneirostrum
  misc_feature: 54
agcaattaatgtaagtagatgatcgctcactcgttcactcctcctccggatagaatacaaactcactctgttcgtctcctcacgttgttgcggtaa

SEQ ID NO: 38134 - DNA, 96 bp, Fusarium cuneirostrum
  misc_feature: 54
gtgagaaggatgtcggacgacatgacagcgctgtcatgtcgtccgacatccttctcactgacttacgcacgttcaggtaacccagctgcgtataca

SEQ ID NO: 38135 - DNA, 96 bp, Fusarium cuneirostrum
  misc_feature: 54
tggaagatgaagtgaaggatgaacgcaatgctaatagcaaacaggagcggagcgactggaatgatcgaacggagagagcttgtcaactttagttga

SEQ ID NO: 38136 - DNA, 96 bp, Fusarium cuneirostrum
  misc_feature: 54
agaaggatgtcggacgacatgacagcgctgtcatgtcgtccgacatccttctcactgacttacgcacgttcaggtaacccagctgcgtatacagca

SEQ ID NO: 38137 - DNA, 96 bp, Fusarium cuneirostrum
  misc_feature: 54
tgcgtatgactactagatcatgaaatgtgtgaatggaatcaacttcatgaagtgaagatgtaatacggagtagaagacatcatgatggcttcaaat

SEQ ID NO: 38138 - DNA, 96 bp, Fusarium cuneirostrum
  misc_feature: 54
tgagaaggatgtcggacgacatgacagcgctgtcatgtcgtccgacatccttctcactgacttacgcacgttcaggtaacccagctgcgtatacag

SEQ ID NO: 38139 - DNA, 96 bp, Fusarium cuneirostrum
  misc_feature: 54
gagtgcgtatgactactagatcatgaaatgtgtgaatggaatcaacttcatgaagtgaagatgtaatacggagtagaagacatcatgatggcttca

SEQ ID NO: 38140 - DNA, 96 bp, Fusarium cuneirostrum
  misc_feature: 54
tgaagataactgaaccacatcttgtggtgttttagtaacgtcgctacgtgttccttcgtcacactcactccgcacgtcgccctccgggctccgtag

SEQ ID NO: 38141 - DNA, 96 bp, Fusarium cuneirostrum
  misc_feature: 54
gaggcccagagggccgacaagaatccatttcaaaatttgtacaaattttgtatgggaagatttctgagattgtatgggcaacgacctggaatcaga

SEQ ID NO: 38142 - DNA, 96 bp, Fusarium cuneirostrum
  misc_feature: 54
tctcatgaagataactgaaccacatcttgtggtgttttagtaacgtcgctacgtgttccttcgtcacactcactccgcacgtcgccctccgggctc

SEQ ID NO: 38143 - DNA, 96 bp, Fusarium cuneirostrum
  misc_feature: 54
aatggcgagccatcgtgactgattgtaattgtaattgtaattgtagtgttagatggaattgtgacgtagaatgtgaatggaacaggagtggtgaga

SEQ ID NO: 38144 - DNA, 96 bp, Fusarium cuneirostrum
  misc_feature: 54
tcgcaaatactcttttcttctcttcccgagaagatgctgtccagcaattaatgtaagtagatgatcgctcactcgttcactcctcctccggataga

SEQ ID NO: 38145 - DNA, 96 bp, Fusarium cuneirostrum
  misc_feature: 54
aactcaagtgaagagttcattgcccaagcaagaactgtgtaaagaattacggaggcgtaagccgacgtgcagtacgagaccgaggaacgaggtcga

SEQ ID NO: 38146 - DNA, 96 bp, Fusarium cuneirostrum
  misc_feature: 54
tcctgccttcgcagtccatgcacctccacttgaggtcatcatgcactctcatgaagataactgaaccacatcttgtggtgttttagtaacgtcgct

SEQ ID NO: 38147 - DNA, 96 bp, Fusarium cuneirostrum
  misc_feature: 54
gttggcaacccatgaagagttacgagcgcccgcggagggccgagtctatgactatatccttagtacggacgaccggagggaggacgtgcggagtga

SEQ ID NO: 38148 - DNA, 96 bp, Fusarium cuneirostrum
  misc_feature: 54
aacggcgaagccgtttcttaaccttggtatagggggggactacgggacacgggacagtgaagaatgaacgtgtgtacccaggagtaatcgtcttga

SEQ ID NO: 38149 - DNA, 96 bp, Fusarium cuneirostrum
  misc_feature: 54
ataatttaaaatcccatataaattaaaatagcgctaaaaattataggagggtaatataatttaaaataaggggggcaatattataaagaactaata

SEQ ID NO: 38150 - DNA, 96 bp, Fusarium cuneirostrum
  misc_feature: 54
ccgccaccaagaaaaagtgacttcgttaacagaagtgaccgatttctcggcccattctcaggatttggctcaccaaatgccagaatcgagtccata

SEQ ID NO: 38151 - DNA, 96 bp, Fusarium cuneirostrum
  misc_feature: 54
aaaacgccgtcggcgcggttcgtgatcaattccggaatcgtcgatgatgttcgtccacggaacaaagagagcttatcttgcacgaaagttgatata

SEQ ID NO: 38152 - DNA, 96 bp, Fusarium cuneirostrum
  misc_feature: 54
ggaatccaagatcgactcgctctctgagctcagacagatgatgtaggagggaaactcttccctctgccctctcgggggaaaagacgctgtcttata

SEQ ID NO: 38153 - DNA, 96 bp, Fusarium cuneirostrum
  misc_feature: 54
aatactaaatcgaggtattataggaatataataagatctataaatactaataagcggatcgatataataggctactatataataattaaatcacta

SEQ ID NO: 38154 - DNA, 96 bp, Fusarium cuneirostrum
  misc_feature: 54
tagacagtgatatgtgagcacaaccgagagagtagtggagcgaacactaaataaaaggctccaacagaagtgagcgacacgtaattgtgatgttgt

SEQ ID NO: 38155 - DNA, 96 bp, Fusarium cuneirostrum
  misc_feature: 54
taatctcttatagactaacgcgagtgacccggaacggggcaaacgagcgtccataactttggtctataagaggtttttttccaaaacgcaccgcgt

SEQ ID NO: 38156 - DNA, 96 bp, Fusarium cuneirostrum
  misc_feature: 54
taagtctcacaaagcatcgttggagttactcctccacacttgacccaactcaaacacagcatcatcaaatctacttcgaaactcccttctcagtac

SEQ ID NO: 38157 - DNA, 96 bp, Fusarium cuneirostrum
  misc_feature: 54
acataacataagcagggcgaggcaaataataatttaaataaactcgtttgacgagccctggttattctttttattagattagtgagcatgatgtta

SEQ ID NO: 38158 - DNA, 96 bp, Fusarium cuneirostrum
  misc_feature: 54
gctatgcctgatgactcactcgttcctcgttctccgtcatctttaccaactgggatgccaatgtcagcaagctgactaaaggcagactcagtccac

SEQ ID NO: 38159 - DNA, 96 bp, Fusarium cuneirostrum
  misc_feature: 54
gtgattgattaaattgtaatcgtagatgtgaatgtgaataacttcaaaagtattttcccgaggccgaggacgtaggacgcaggctgagggattgac

SEQ ID NO: 38160 - DNA, 96 bp, Fusarium cuneirostrum
  misc_feature: 54
aatacaaactcactctgttcgtctcctcacgttgttgcggtaaactcgtcctccgtcctcgaaaaaaataaaacaagtcagagttcgcctgctcac

SEQ ID NO: 38161 - DNA, 96 bp, Fusarium cuneirostrum
  misc_feature: 54
gtaccatctctattgatggtggcaaggtacgcagccaggcattttactctgaatattcctttactaacaaggtgtcataggaaaggggagatcgcc

SEQ ID NO: 38162 - DNA, 96 bp, Fusarium cuneirostrum
  misc_feature: 54
acctattccggtaagtctcacaaagcatcgttggagttactcctccacacttgacccaactcaaacacagcatcatcaaatctacttcgaaactcc

SEQ ID NO: 38163 - DNA, 96 bp, Fusarium cuneirostrum
  misc_feature: 54
acaatcacaaacacattcacgataccatttatacgcacaacatcacaattacgtgtcgctcacttctgttggagccttttatttagtgttcgctcc

SEQ ID NO: 38164 - DNA, 96 bp, Fusarium cuneirostrum
  misc_feature: 54
gaacgacgcagcctgaaggattgactagtagagtctcatctgcatgtgaagagttcatctccaagcagagactgtggtctcaataccgagcgaagc

SEQ ID NO: 38165 - DNA, 96 bp, Fusarium cuneirostrum
  misc_feature: 54
gctgtgtttgagttgggtcaagtgtggaggagtaactccaacgatgctttgtgagacttaccggaataggtaatggtgatgacctcaagtggtatt

SEQ ID NO: 38166 - DNA, 96 bp, Fusarium cuneirostrum
  misc_feature: 54
gacagtgatatgtgagcacaaccgagagagtagtggagcgaacactaaataaaaggctccaacagaagtgagcgacacgtaattgtgatgttgtgc

SEQ ID NO: 38167 - DNA, 96 bp, Fusarium cuneirostrum
  misc_feature: 54
ccttcacttcatcttccagatatgtatagacactcacctgttcgtgtttccacggccgtggaataaacagaactgattccagtcgaaatcagactc

SEQ ID NO: 38168 - DNA, 96 bp, Fusarium cuneirostrum
  misc_feature: 54
attcagacgagctttggtgaaagatcgaaaagaatggcaagggaaccaatacagcccaatatgcaatccaaatatcgacttccactatttcccttc

SEQ ID NO: 38169 - DNA, 96 bp, Fusarium cuneirostrum
  misc_feature: 54
aggggattgtcaatgtaatttattcagggaataattacccttccaagcaggaactgtgaaatagagaccgagccataaggcgaggtgttgtcagag

SEQ ID NO: 38170 - DNA, 96 bp, Fusarium cuneirostrum
  misc_feature: 54
aagtagatgatcgctcactcgttcactcctcctccggatagaatacaaactcactctgttcgtctcctcacgttgttgcggtaaactcgtcctccg

SEQ ID NO: 38171 - DNA, 96 bp, Fusarium cuneirostrum
  misc_feature: 54
cgaacgttccgtccacaatctcataccccgcagacagagtcgaggagtataagacagcgtcttttcccccgagagggcagagggaagagtttccct

SEQ ID NO: 38172 - DNA, 96 bp, Fusarium cuneirostrum
  misc_feature: 54
cctcgaaaaaaataaaacaagtcagagttcgcctgctcactcaacctctcgggggaaaagacgctgtcttatactcctcgactctgtctgcggggt

SEQ ID NO: 38173 - DNA, 96 bp, Fusarium cuneirostrum
  misc_feature: 54
caaataataatttaaataaactcgtttgacgagccctggttattctttttattagattagtgagcatgatgttactgtagatggagttgtgaatgg

SEQ ID NO: 38174 - DNA, 96 bp, Fusarium cuneirostrum
  misc_feature: 54
cacgctacgcgctcgggctcaggactatcttgggtacatgatcacgactacgattcaaaataataataatgtcacatatgcacagctcgctcgatt

SEQ ID NO: 38175 - DNA, 96 bp, Fusarium cuneirostrum
  misc_feature: 54
acgaacgttccgtccacaatctcataccccgcagacagagtcgaggagtataagacagcgtcttttcccccgagaggttgagtgagcaggcgaact

SEQ ID NO: 38176 - DNA, 96 bp, Fusarium cuneirostrum
  misc_feature: 53
gtgcgtatgactactagatcatgaaatgtgtgaatggaatcaacttcatgaagtgaagatgtaatacggagtagaagacatcatgatggcttcaaa

SEQ ID NO: 38177 - DNA, 96 bp, Fusarium cuneirostrum
  misc_feature: 53
ttgatcatcttttttctactcgacgatggcttcgtcgcacatgaatgaaatggaatgagccgagatgcagggcacgaggacgtatgtggacccgga

SEQ ID NO: 38178 - DNA, 96 bp, Fusarium cuneirostrum
  misc_feature: 53
tgcggagtgagtgtgacgaaggaacacgtagcgacgttactaaaacaccacaagatgtggttcagttatcttcatgagagtgcatgatgacctcaa

SEQ ID NO: 38179 - DNA, 96 bp, Fusarium cuneirostrum
  misc_feature: 53
gtctcaccctcaccactcgccgtctagctcgtggttctcttttaccactacaataacagttcactcttctcgttcacaaatgcacaatcaattcaa

SEQ ID NO: 38180 - DNA, 96 bp, Fusarium cuneirostrum
  misc_feature: 53
agtgcgtatgactactagatcatgaaatgtgtgaatggaatcaacttcatgaagtgaagatgtaatacggagtagaagacatcatgatggcttcaa

SEQ ID NO: 38181 - DNA, 96 bp, Fusarium cuneirostrum
  misc_feature: 53
tatctcacacgcattaggaaacatctctttctgaaaagaagaaagaagaaagaagaaagaagaaagaagaaagaagaaagaagaaagaagaaagaa

SEQ ID NO: 38182 - DNA, 96 bp, Fusarium cuneirostrum
  misc_feature: 53
ccaagtctataaaaatttcagacttgatctactcttttgtgctgctttgccggtcacagtttttgtctgaattctactgatttcagaaagaaataa

SEQ ID NO: 38183 - DNA, 96 bp, Fusarium cuneirostrum
  misc_feature: 53
ttatttctcctcgtgcactcacttcagtcgcatcctgcattcatgtttgactgctgtcaattgaagtcatcaccatctctgtgtgatgtctgtaac

SEQ ID NO: 38184 - DNA, 96 bp, Fusarium cuneirostrum
  misc_feature: 53
tgcgtccttcgtcctcgggattcgggactattccagtgtggatgaaaatgaggccattcacaactccatctacagtaacatcatgctcactaatct

SEQ ID NO: 38185 - DNA, 96 bp, Fusarium cuneirostrum
  misc_feature: 53
ccaataacatttttcctagtccgtgcacgcttctcggatctcgtaacaagactgtcgcataacattcgtgtgaccggatgtaactatccggtttca

SEQ ID NO: 38186 - DNA, 96 bp, Fusarium cuneirostrum
  misc_feature: 53
tcttgtttatccacgccatgggtactgagaagggagtttcgaagtagatttgatgatgctgtgtttgagttgggtcaagtgtggaggagtaactcc

SEQ ID NO: 38187 - DNA, 96 bp, Fusarium cuneirostrum
  misc_feature: 53
ggaaacatctctttctgaaaagaagaaagaagaaagaagaaagaagaaagaagaaagaagaaagaagaaagaagaaagaagaaagaagaaagaaga

SEQ ID NO: 38188 - DNA, 96 bp, Fusarium cuneirostrum
  misc_feature: 53
aaaaaataaaacaagtcagagttcgcctgctcactcaacctctcgggggaaaagacgctgtcttatactcctcgactctgtctgcggggtatgaga

SEQ ID NO: 38189 - DNA, 96 bp, Fusarium cuneirostrum
  misc_feature: 53
tctattacttcttcgatctcgtttcactccatctcttttcatgatctagtgaagttattcgcacttcacctcttcacattatctagcaccacttcg

SEQ ID NO: 38190 - DNA, 96 bp, Fusarium cuneirostrum
  misc_feature: 53
tcacttcatcttccagatatgtatagacactcacctgttcgtgtttccacggccgtggaataaacagaactgattccagtcgaaatcagactcgac

SEQ ID NO: 38191 - DNA, 96 bp, Fusarium cuneirostrum
  misc_feature: 53
tcacagtcgctcgcctttaggcttactttttggattcattacggcgagctgttggttccagataagtgctcgcataaagataaatgaagctatcac

SEQ ID NO: 38192 - DNA, 96 bp, Fusarium cuneirostrum
  misc_feature: 53
cccaagtctataaaaatttcagacttgatctactcttttgtgctgctttgccggtcacagtttttgtctgaattctactgatttcagaaagaaata

SEQ ID NO: 38193 - DNA, 96 bp, Fusarium cuneirostrum
  misc_feature: 53
tatctattatgcattagcctaaacggggcatactagccttagtagccttattagagagtatcccgattgcctacgtcctctagcttatatcggcac

SEQ ID NO: 38194 - DNA, 96 bp, Fusarium cuneirostrum
  misc_feature: 53
tataagacagcgtcttttcccccgagaggttgagtgagcaggcgaactctgacttgttttatttttttcgaggacggaggacgagtttaccgcaac

SEQ ID NO: 38195 - DNA, 96 bp, Fusarium cuneirostrum
  misc_feature: 53
acagcagtcgaatagagcccagagggcgaacgatctaaacaccaggtagtggtggattgtggtgtggaacacgtttggtgagagagtcaccaacta

SEQ ID NO: 38196 - DNA, 96 bp, Fusarium cuneirostrum
  misc_feature: 53
tagaaaagatatgcgtcagataagcgacgcagtaatatgctctcaagaatagcatatcatccgactccatcggacattcaagtgcttcctgcactt

SEQ ID NO: 38197 - DNA, 96 bp, Fusarium cuneirostrum
  misc_feature: 53
tacggacgaccggagggaggacgtgcggagtgagtgtgacgaaggaacacgtagcgacgttacagacatcacacagagatggtgatgacttcaatt

SEQ ID NO: 38198 - DNA, 96 bp, Fusarium cuneirostrum
  misc_feature: 53
tacattctcagaatcgaactcatacaaaatttgtacaaatttcagatcaaactgaaatgcgaccggcgcagagacagcagcggccgtgtgtgttag

SEQ ID NO: 38199 - DNA, 96 bp, Fusarium cuneirostrum
  misc_feature: 53
aatcgagtcgctcacaatccgttcgagcgagcgcgtaatgaaacgcgtcagaaaaaaggttgacgccccgggcgccaaaagcactccaagtgcaac

SEQ ID NO: 38200 - DNA, 96 bp, Fusarium cuneirostrum
  misc_feature: 53
gtactcgctctaaaatctacgtaattgaagtcatcatcacttccacatcaggcaactctacaaatctcaccaagttcacattgcatctatctacac

SEQ ID NO: 38201 - DNA, 96 bp, Fusarium cuneirostrum
  misc_feature: 53
gtgagcacaaccgagagagtagtggagcgaacactaaataaaaggctccaacagaagtgagcgacacgtaattgtgatgttgtgcgtataaatggt

SEQ ID NO: 38202 - DNA, 96 bp, Fusarium cuneirostrum
  misc_feature: 53
aggcgaggaggaacgacgcagccggaaggattgtcaaagtcttctcatctgccagggaagagttacttccccaagcaggaactgtgaaatagagac

SEQ ID NO: 38203 - DNA, 96 bp, Fusarium cuneirostrum
  misc_feature: 53
aattacgtgtcgctcacttctgttggagccttttatttagtgttcgctccactactctctcggttgtgctcacatatcactgtctatactaactac

SEQ ID NO: 38204 - DNA, 96 bp, Fusarium cuneirostrum
  misc_feature: 53
gatcatcttttttctactcgacgatggcttcgtcgcacatgaatgaaatggaatgagccgagatgcagggcacgaggacgtatgtggacccggacc

SEQ ID NO: 38205 - DNA, 96 bp, Fusarium cuneirostrum
  misc_feature: 53
gcacttggagtgcttttggcgcccggggcgtcaaccttttttctgacgcgtttcattacgcgctcgctcgaacggattgtgagcgactcgattacc

SEQ ID NO: 38206 - DNA, 96 bp, Fusarium cuneirostrum
  misc_feature: 53
ggggcgcagggaagactgagggattggcaatagtcattacaccgccggaggcccgagtcggaactgtataatcctacggagcccggagggcgacgt

SEQ ID NO: 38207 - DNA, 96 bp, Fusarium cuneirostrum
  misc_feature: 53
aatcttaagtctttctaagataataaaacctatataggtaatacttattagattacctacttccttattgtaagagactgagctcttatctaagcc

SEQ ID NO: 38208 - DNA, 96 bp, Fusarium cuneirostrum
  misc_feature: 53
ggctgagggattgacaatagactgaactcaagtgaagagttcattgcccaagcaagaactgtgtaaagaattacggaggcgtaagccgacgtgcag

SEQ ID NO: 38209 - DNA, 96 bp, Fusarium cuneirostrum
  misc_feature: 53
ggcaacattgctgctgaattgttggtaggatacggagctattcccttcttgaatatttctgagccaagacatccttaggtcagcaatcattttgtc

SEQ ID NO: 38210 - DNA, 96 bp, Fusarium cuneirostrum
  misc_feature: 53
catggcgagagcagcgctcgaggtggatttgacggagtctcaaaactggaacagtttttgtatggactcgattctggcatttggtgagccaaatcc

SEQ ID NO: 38211 - DNA, 96 bp, Fusarium cuneirostrum
  misc_feature: 53
cacttgaggtcatcatgcactctcatgaagataactgaaccacatcttgtggtgttttagtaacgtcgctacgtgttccttcgtcacactcactcc

SEQ ID NO: 38212 - DNA, 96 bp, Fusarium cuneirostrum
  misc_feature: 53
gcagacagagtcgaggagtataagacagcgtcttttcccccgagagggcagagggaagagtttccctcctacatcatctgtctgagctcagagagc

SEQ ID NO: 38213 - DNA, 96 bp, Fusarium cuneirostrum
  misc_feature: 53
cacttcgtgctcgctacgctctcactccgttccgcaccttcgcttcgctcggtattgagaccacagtctctgcttggagatgaactcttcacatgc

SEQ ID NO: 38214 - DNA, 96 bp, Fusarium cuneirostrum
  misc_feature: 53
gattgagtttaggcgtttgcctaacaaagtgcaggaagcacttgaatgtccgatggagtcggatgatatgctattcttgagagcatattactgcgt

SEQ ID NO: 38215 - DNA, 96 bp, Fusarium cuneirostrum
  misc_feature: 53
aaaagtgcgtcgcatacttggatgcgtcgcatgcttatcatgtacgttacatcacaagtgagtgaaacacacaagcgagtgaaacaaaaatccctc

SEQ ID NO: 38216 - DNA, 96 bp, Fusarium cuneirostrum
  misc_feature: 53
gagagcatcggagatgcacatgggcgcagagcgccagagacaatctttgttgtcggatgtaagtaagagcgaaggagtgagcgatggactctttgg

SEQ ID NO: 38217 - DNA, 96 bp, Fusarium cuneirostrum
  misc_feature: 53
gacgaaggaacacgtagcgacgttacagacatcacacagagatggtgatgacttcaattgacagcagtcaaacatgaatgcaggatgcgactgaag

SEQ ID NO: 38218 - DNA, 96 bp, Fusarium cuneirostrum
  misc_feature: 53
cccgttcgtgatcgctttcgctctatcattcttgcctaatcgtcaagtctcggcgctgcctcaatcaacaaactgaaccaagttcagatgaccttc

SEQ ID NO: 38219 - DNA, 96 bp, Fusarium cuneirostrum
  misc_feature: 53
cactcatccgctcgggactcatggatgaggaatacatttacagtcaccaacataaacattcacaatctgaaatcatgctcgccaagtgaaaaaaag

SEQ ID NO: 38220 - DNA, 96 bp, Fusarium cuneirostrum
  misc_feature: 53
cttcgacctcgttcctcggtctcgtactgcacgtcggcttacgcctccgtaattctttacacagttcttgcttgggcaatgaactcttcacttgag

SEQ ID NO: 38221 - DNA, 96 bp, Fusarium cuneirostrum
  misc_feature: 53
ctggaggcgaggaggaacgacgcagccggaaggattgtcaaagtcttctcatctgccagggaagagttacttccccaagcaggaactgtgaaatag

SEQ ID NO: 38222 - DNA, 96 bp, Fusarium cuneirostrum
  misc_feature: 53
aagcagagactgtggtctcaataccgagcgaagcgaaggtgcggaacggagtgagagcgtagcgagcacgaagtgaggttacttaaaacaccagag

SEQ ID NO: 38223 - DNA, 96 bp, Fusarium cuneirostrum
  misc_feature: 53
ctctgacttgttttatttttttcgaggacggaggacgagtttaccgcaacaacgtgaggagacgaacagagtgagtttgtattctatccggaggag

SEQ ID NO: 38224 - DNA, 96 bp, Fusarium cuneirostrum
  misc_feature: 53
cagggaagactgagggattggcaatagtcattacaccgccggaggcccgagtcggaactgtataatcctacggagcccggagggcgacgtgcggag

SEQ ID NO: 38225 - DNA, 96 bp, Fusarium cuneirostrum
  misc_feature: 53
attgacaagagtatgttggcaacccatgaagagttacgagcgcccgcggagggccgagtctatgactatatccttagtacggacgaccggagggag

SEQ ID NO: 38226 - DNA, 96 bp, Fusarium cuneirostrum
  misc_feature: 53
ctcccgcacttgtgttacgcgagcatatataaagtagatggtgataacctcaaaagagtccacgagccgagcgcgtagcgtgcaggcgaggggatt

SEQ ID NO: 38227 - DNA, 96 bp, Fusarium cuneirostrum
  misc_feature: 53
cgatgtgtgaccgagacagatgtcgaggggaaagggtacatggcgagagcagcgctcgaggtggatttgacggagtctcaaaactggaacagtttt

SEQ ID NO: 38228 - DNA, 96 bp, Fusarium cuneirostrum
  misc_feature: 53
cgaaggaacacgtagcgacgttacagacatcacacagagatggtgatgacttcaattgacagcagtcaaacatgaatgcaggatgcgactgaagtg

SEQ ID NO: 38229 - DNA, 96 bp, Fusarium cuneirostrum
  misc_feature: 53
ccttcgctcttacttacatccgacaacaaagattgtctctggcgctctgcgcccatgtgcatctccgatgctctcctgtcctcctccgtcgtcctt

SEQ ID NO: 38230 - DNA, 96 bp, Fusarium cuneirostrum
  misc_feature: 53
agcagcgctcgaggtggatttgacggagtctcaaaactggaacagtttttgtatggactcgattctggcatttggtgagccaaatcctgagaatgg

SEQ ID NO: 38231 - DNA, 96 bp, Fusarium cuneirostrum
  misc_feature: 53
ataactcacgcaagatgcgttgtaatcacagtttgtgatggcctcaattgacagtagtcaaacacgagagtgggatgcgacgaatgtggagtcatg

SEQ ID NO: 38232 - DNA, 96 bp, Fusarium cuneirostrum
  misc_feature: 53
cataatcatatcaaattttgctacaacacaatttccaccatcacctttcgctatgcaaaataacacttttcaacttttatgccgtgaacctccctg

SEQ ID NO: 38233 - DNA, 96 bp, Fusarium cuneirostrum
  misc_feature: 53
aagaatcaagaattaaaaataaataaataattaaaagaaaaaaaaaaagatataattataaaaaagaaaaaaaagagaaaataataaaaaaagaat

SEQ ID NO: 38234 - DNA, 96 bp, Fusarium cuneirostrum
  misc_feature: 53
attaagtatagctagttctcgcttactaataattactaccttatttaatctctgtcgttatattgatcgcatatatattacttgctcgtcctaatt

SEQ ID NO: 38235 - DNA, 96 bp, Fusarium cuneirostrum
  misc_feature: 53
aaaaataaaacaagtcagagttcgcctgctcactcaacctctcgggggaaaagacgctgtcttatactcctcgactctgtctgcggggtatgagat

SEQ ID NO: 38236 - DNA, 96 bp, Fusarium cuneirostrum
  misc_feature: 53
aaaaacgccgtcggcgcggttcgtgatcaattccggaatcgtcgatgatgttcgtccacggaacaaagagagcttatcttgcacgaaagttgatat

SEQ ID NO: 38237 - DNA, 96 bp, Fusarium cuneirostrum
  misc_feature: 53
atagctcggatacatgaggctcaaggattaggcgggaacaaagaggaattggaaatggggaccattcgttcatttgtagaggatctcgacctgtat

SEQ ID NO: 38238 - DNA, 96 bp, Fusarium cuneirostrum
  misc_feature: 53
agtctctgcttggagatgaactcttcacatgcagatgagactctactagtcaatccttcaggctgcgtcgttcctcctcgccctcaggactcattt

SEQ ID NO: 38239 - DNA, 96 bp, Fusarium cuneirostrum
  misc_feature: 53
acggtcgggtgtgtctgggtcgacgtccgtctccccctcttttatttctcctcgtgcactcacttcagtcgcatcctgcattcatgtttgactgct

SEQ ID NO: 38240 - DNA, 96 bp, Fusarium cuneirostrum
  misc_feature: 52
ggaaggacgacggaggaggacaggagagcatcggagatgcacatgggcgcagagcgccagagacaatctttgttgtcggatgtaagtaagagcgaa

SEQ ID NO: 38241 - DNA, 96 bp, Fusarium cuneirostrum
  misc_feature: 52
ttcatggcacccacatcgtgccatcctaccttctgccacactctactgagtcgtgaagccgtcgtgcactcctacatgaaatggtaacacacatat

SEQ ID NO: 38242 - DNA, 96 bp, Fusarium cuneirostrum
  misc_feature: 52
cgaagacttgagactgtatttatttttttgtgtgagacggagtcgagtctgatttcgactggaatcagttctgtttattccacggccgtggaaaca

SEQ ID NO: 38243 - DNA, 96 bp, Fusarium cuneirostrum
  misc_feature: 52
tgggaagatttctgagattgtatgggcaacgacctggaatcagagtgagaatctggtacagattgttagcgaccgaagggagctttccagcttata

SEQ ID NO: 38244 - DNA, 96 bp, Fusarium cuneirostrum
  misc_feature: 52
actctcaccactcctgttccattcacattctacgtcacaattccatctaacactacaattacaattacaattacaatcagtcacgatggctcgcca

SEQ ID NO: 38245 - DNA, 96 bp, Fusarium cuneirostrum
  misc_feature: 52
cttatggtcgaacagaatgtacgaccgtaatcatggacggagctagtgagcgagtacataatgggcggacgcccacttcttcagcgctgtcgcgca

SEQ ID NO: 38246 - DNA, 96 bp, Fusarium cuneirostrum
  misc_feature: 52
tgattgtaattgtaattgtaattgtagtgttagatggaattgtgacgtagaatgtgaatggaacaggagtggtgagagttacaccacttgagtccc

SEQ ID NO: 38247 - DNA, 96 bp, Fusarium cuneirostrum
  misc_feature: 52
aacgacacgtcgcctgaaggctccgtaagtttagaacatagttcttgcttggaggatgaactcttcacttgagttcagtctattgtcaatccctca

SEQ ID NO: 38248 - DNA, 96 bp, Fusarium cuneirostrum
  misc_feature: 52
gagccgagcgcgtagcgtgcaggcgaggggattgtcaatgtaatttattcagggaataattacccttccaagcaggaactgtgaaatagagaccga

SEQ ID NO: 38249 - DNA, 96 bp, Fusarium cuneirostrum
  misc_feature: 52
ggacgcaggctgagggattgacaatagactgaactcaagtgaagagttcattgcccaagcaagaactgtgtaaagaattacggaggcgtaagccga

SEQ ID NO: 38250 - DNA, 96 bp, Fusarium cuneirostrum
  misc_feature: 52
tcgaggagtataagacagcgtcttttcccccgagaggttgagtgagcaggcgaactctgacttgttttatttttttcgaggacggaggacgagttt

SEQ ID NO: 38251 - DNA, 96 bp, Fusarium cuneirostrum
  misc_feature: 52
tcctgttccattcacattctacgtcacaattccatctaacactacaattacaattacaattacaatcagtcacgatggctcgccattagggaggga

SEQ ID NO: 38252 - DNA, 96 bp, Fusarium cuneirostrum
  misc_feature: 52
tcccgagaagatgctgtccagcaattaatgtaagtagatgatcgctcactcgttcactcctcctccggatagaatacaaactcactctgttcgtct

SEQ ID NO: 38253 - DNA, 96 bp, Fusarium cuneirostrum
  misc_feature: 52
tacctctctcatttgtccgtccaacaaaaccgacctccactcagtcccttcgttcccggtcttacttactccacttcatactcgtccctcgtctga

SEQ ID NO: 38254 - DNA, 96 bp, Fusarium cuneirostrum
  misc_feature: 52
agcaaatgagaatctaacttagattgcccatgcgcgatactgcagggcgctcgcaccctcctacagagggaggaagccagacgtctttattattga

SEQ ID NO: 38255 - DNA, 96 bp, Fusarium cuneirostrum
  misc_feature: 52
tattagtgagctcccgcatttatatatagcgagcatgttttaatctgatgtgaataacttcaaaagtattttcccgaggccgaggacgtaggacgc

SEQ ID NO: 38256 - DNA, 96 bp, Fusarium cuneirostrum
  misc_feature: 52
tatccggaggaggagtgaacgagtgagcgatcatctacttacattaattgctggacagcatcttctcgggaagagaagaaaagagtatttgcgata

SEQ ID NO: 38257 - DNA, 96 bp, Fusarium cuneirostrum
  misc_feature: 52
atgactccacattcgtcgcatcccactctcgtgtttgactactgtcaattgaggccatcacaaactgtgattacaacgcatcttgcgtgagttata

SEQ ID NO: 38258 - DNA, 96 bp, Fusarium cuneirostrum
  misc_feature: 52
taagacagcgtcttttcccccgagagggcagagggaagagtttccctcctacatcatctgtctgagctcagagagcgagtcgatcttggattccta

SEQ ID NO: 38259 - DNA, 96 bp, Fusarium cuneirostrum
  misc_feature: 52
tacattccccacgcctccgttcattcgctatccagcgatcactccgttattgctcctcattcccagtccatacgtccttcccattcgttattacac

SEQ ID NO: 38260 - DNA, 96 bp, Fusarium cuneirostrum
  misc_feature: 52
tacatcatctgtctgagctcagagagcgagtcgatcttggattcctatgcaagtcgtctttcaattgcgctggcgcgcgactaggaacagagtgac

SEQ ID NO: 38261 - DNA, 96 bp, Fusarium cuneirostrum
  misc_feature: 52
tacaaaaggcgcggagcgcccacctggaaggtcatctgaacttggttcagtttgttgattgaggcagcgccgagacttgacgattaggcaagaatg

SEQ ID NO: 38262 - DNA, 96 bp, Fusarium cuneirostrum
  misc_feature: 52
gggaaaatacttttgaagttattcacattcacatctacgattacaatttaatcaatcactcgcacactaagtcacagtcgctcgcctttaggctta

SEQ ID NO: 38263 - DNA, 96 bp, Fusarium cuneirostrum
  misc_feature: 52
taagacgagcggagcgagcgaatggggaagaagggagtggaacgaccttggcctatggcgggacgtagaacgttccgtccatgctgcggggaccgc

SEQ ID NO: 38264 - DNA, 96 bp, Fusarium cuneirostrum
  misc_feature: 52
gagagcgagtcgatcttggattcctatgcaagtcgtctttcaattgcgctggcgcgcgactaggaacagagtgacggtatttcaatcggagattta

SEQ ID NO: 38265 - DNA, 96 bp, Fusarium cuneirostrum
  misc_feature: 52
gttcctcggtctcgtactgcacgtcggcttacgcctccgtaattctttacacagttcttgcttgggcaatgaactcttcacttgagttcagtctat

SEQ ID NO: 38266 - DNA, 96 bp, Fusarium cuneirostrum
  misc_feature: 52
ataatatagctagcatatttcctaacttatattccactacttaagttaccgtatttagctacttcttctatttagcgctatagctaatcttagcac

SEQ ID NO: 38267 - DNA, 96 bp, Fusarium cuneirostrum
  misc_feature: 52
gtgagggattgacaagagtatgttggcaacccatgaagagttacgagcgcccgcggagggccgagtctatgactatatccttagtacggacgaccg

SEQ ID NO: 38268 - DNA, 96 bp, Fusarium cuneirostrum
  misc_feature: 52
aatctcgcgatttcgcccgccattctcagtttcgttcacatacaaaaagtatgtcgatttgagtccaatttgaatccgattttgcttgttcctcac

SEQ ID NO: 38269 - DNA, 96 bp, Fusarium cuneirostrum
  misc_feature: 52
gtcgagagaaataagctatatagtttaataatagaatttctaactcgtaaaccaaataatctagatttaattcctagtaacgtacatgataagcat

SEQ ID NO: 38270 - DNA, 96 bp, Fusarium cuneirostrum
  misc_feature: 52
gagagttaataatagctaaagaatttatttatctcttttatttctatatcgcgaaaatatatagtatattacttaatattattatagatcgaggac

SEQ ID NO: 38271 - DNA, 96 bp, Fusarium cuneirostrum
  misc_feature: 52
actcggccctccgcgggcgctcgtaactcttcatgggttgccaacatactcttgtcaatccctcaccctgcgtccttcgtcctcgggattcgggac

SEQ ID NO: 38272 - DNA, 96 bp, Fusarium cuneirostrum
  misc_feature: 52
atactcttgtcaatccctcaccctgcgtccttcgtcctcgggattcgggactattccagtgtggatgaaaatgaggccattcacaactccatctac

SEQ ID NO: 38273 - DNA, 96 bp, Fusarium cuneirostrum
  misc_feature: 52
ggtgagggattgacaagagtatgttggcaacccatgaagagttacgagcgcccgcggagggccgagtctatgactatatccttagtacggacgacc

SEQ ID NO: 38274 - DNA, 96 bp, Fusarium cuneirostrum
  misc_feature: 52
ggtataagcgatagccggcaggcgtccccagctagctctagttcagatgatcaaatagttgacgtcgacgataaccaggagatagacctagccggc

SEQ ID NO: 38275 - DNA, 96 bp, Fusarium cuneirostrum
  misc_feature: 52
cgacagctcaatatataaccctacgggtaatcgagtcgctcacaatccgttcgagcgagcgcgtaatgaaacgcgtcagaaaaaaggttgacgccc

SEQ ID NO: 38276 - DNA, 96 bp, Fusarium cuneirostrum
  misc_feature: 52
gggcgcagggaagactgagggattggcaatagtcattacaccgccggaggcccgagtcggaactgtataatcctacggagcccggagggcgacgtg

SEQ ID NO: 38277 - DNA, 96 bp, Fusarium cuneirostrum
  misc_feature: 52
cctattccggtaagtctcacaaagcatcgttggagttactcctccacacttgacccaactcaaacacagcatcatcaaatctacttcgaaactccc

SEQ ID NO: 38278 - DNA, 96 bp, Fusarium cuneirostrum
  misc_feature: 52
ggccgtggaataaacagaactgattccagtcgaaatcagactcgactccgtctcacacaaaaaaataaatacagtctcaagtcttcgactgcgtcc

SEQ ID NO: 38279 - DNA, 96 bp, Fusarium cuneirostrum
  misc_feature: 52
atgtgaataacttcaaaagtattttcccgaggccgaggacgtaggacgcaggctgagggattgacaatagactgaactcaagtgaagagttcatcc

SEQ ID NO: 38280 - DNA, 96 bp, Fusarium cuneirostrum
  misc_feature: 52
ggagtaatcgtcttgagtcagcttgctgaccttgacgaccccagtcaatagacatccgaggtcacgaggaatgtggatgtagccactcgaatgagg

SEQ ID NO: 38281 - DNA, 96 bp, Fusarium cuneirostrum
  misc_feature: 52
ggagagcatcggagatgcacatgggcgcagagcgccagagacaatctttgttgtcggatgtaagtaagagcgaaggagtgagcgatggactctttg

SEQ ID NO: 38282 - DNA, 96 bp, Fusarium cuneirostrum
  misc_feature: 52
gcgagtgattgattaaattgtaatcgtagatgtgaatgtgaataacttcaaaagtattttcccgaggccgaggacgtaggacgcaggctgagggat

SEQ ID NO: 38283 - DNA, 96 bp, Fusarium cuneirostrum
  misc_feature: 52
cacggtcgggtgtgtctgggtcgacgtccgtctccccctcttttatttctcctcgtgcactcacttcagtcgcatcctgcattcatgtttgactgc

SEQ ID NO: 38284 - DNA, 96 bp, Fusarium cuneirostrum
  misc_feature: 52
gatttctggaaatccgacaatttttttccttctttacattcgggttgaactgtgttcatcgctttgcaagagcaaacgaacccgtatatccatatc

SEQ ID NO: 38285 - DNA, 96 bp, Fusarium cuneirostrum
  misc_feature: 52
actaactacaataccacttgaggtcatcaccattacctattccggtaagtctcacaaagcatcgttggagttactcctccacacttgacccaactc

SEQ ID NO: 38286 - DNA, 96 bp, Fusarium cuneirostrum
  misc_feature: 52
gacgagtttaccgcaacaacgtgaggagacgaacagagtgagtttgtattctatccggaggaggagtgaacgagtgagcgatcatctacttacatt

SEQ ID NO: 38287 - DNA, 96 bp, Fusarium cuneirostrum
  misc_feature: 52
gaaagctcccttcggtcgctaacaatctgtaccagattctcactctgattccaggtcgttgcccatacaatctcagaaatcttcccatacaaaatt

SEQ ID NO: 38288 - DNA, 96 bp, Fusarium cuneirostrum
  misc_feature: 52
gaaaatacttttgaagttattcacatcagattaaaacatgctcgctatatataaatgcgggagctcactaatatgtgtgccctttttagtttatgt

SEQ ID NO: 38289 - DNA, 96 bp, Fusarium cuneirostrum
  misc_feature: 52
ctgtgtttgagttgggtcaagtgtggaggagtaactccaacgatgctttgtgagacttaccggaataggtaatggtgatgacctcaagtggtattg

SEQ ID NO: 38290 - DNA, 96 bp, Fusarium cuneirostrum
  misc_feature: 52
ctgcagttccaagagtgctgcattgagtccacatccacacatcaaggcgtcagcgtcttgaatgaaatccatccacttcatctaatggcatcgatt

SEQ ID NO: 38291 - DNA, 96 bp, Fusarium cuneirostrum
  misc_feature: 52
ctcttgatcaaccttcgcatggctcaggtttctattacttcttcgatctcgtttcactccatctcttttcatgatctagtgaagttattcgcactt

SEQ ID NO: 38292 - DNA, 96 bp, Fusarium cuneirostrum
  misc_feature: 52
aggcccagagggccgacaagaatccatttcaaaatttgtacaaattttgtatgggaagatttctgagattgtatgggcaacgacctggaatcagag

SEQ ID NO: 38293 - DNA, 96 bp, Fusarium cuneirostrum
  misc_feature: 52
cgctccttacaaaaaaccggctctgccagaaacgaacccatacaaatgaaatgtcagtttcgatttcgcccgcaaaatcgaaactgacatttcatt

SEQ ID NO: 38294 - DNA, 96 bp, Fusarium cuneirostrum
  misc_feature: 52
acagtgatatgtgagcacaaccgagagagtagtggagcgaacactaaataaaaggctccaacagaagtgagcgacacgtaattgtgatgttgtgcg

SEQ ID NO: 38295 - DNA, 96 bp, Fusarium cuneirostrum
  misc_feature: 52
cagtcaatgcgcacatcgaaagatgataccgaagtgggtgtacgaggtgagtagatgagggagtgcggatgcgcgaccgacagaagtgtgtcgagg

SEQ ID NO: 38296 - DNA, 96 bp, Fusarium cuneirostrum
  misc_feature: 52
caacgacctggaatcagagtgagaatctggtacagattgttagcgaccgaagggagctttccagcttatagactaacgcgagtgacccggaacggg

SEQ ID NO: 38297 - DNA, 96 bp, Fusarium cuneirostrum
  misc_feature: 52
cccagctttgtaatcagctaaagcttgaaaacaaaacctcttatagaccaaagttatggacgctcgtttgccccgttccgggtcactcgcgttagt

SEQ ID NO: 38298 - DNA, 96 bp, Fusarium cuneirostrum
  misc_feature: 52
ccatatttcaatgaaaattaaattggcgatctcccctttcctatgacaccttgttagtaaaggaatattcagagtaaaatgcctggctgcgtacct

SEQ ID NO: 38299 - DNA, 96 bp, Fusarium cuneirostrum
  misc_feature: 52
catcgctccgctcggggtagaattatacagtcatggactcggccctgcgggcagctgcactactcttgccaatccggctccgtcgtccctcctcct

SEQ ID NO: 38300 - DNA, 96 bp, Fusarium cuneirostrum
  misc_feature: 52
agacagtgatatgtgagcacaaccgagagagtagtggagcgaacactaaataaaaggctccaacagaagtgagcgacacgtaattgtgatgttgtg

SEQ ID NO: 38301 - DNA, 96 bp, Fusarium cuneirostrum
  misc_feature: 52
caaggtacgcagccaggcattttactctgaatattcctttactaacaaggtgtcataggaaaggggagatcgccaatttaattttcattgaaatat

SEQ ID NO: 38302 - DNA, 96 bp, Fusarium cuneirostrum
  misc_feature: 52
atctttcgatgtgcgcattgactgttggtcaattgatgatgttatcgtgagcagtgaccttgcgaccttgctcattattataacctcgcgacgggt

SEQ ID NO: 38303 - DNA, 96 bp, Fusarium cuneirostrum
  misc_feature: 52
atacaaactcactctgttcgtctcctcacgttgttgcggtaaactcgtcctccgtcctcgaaaaaaataaaacaagtcagagttcgcctgctcact

SEQ ID NO: 38304 - DNA, 96 bp, Fusarium cuneirostrum
  misc_feature: 52
aagtcgtctttcaattgcgctggcgcgcgactaggaacagagtgacggtatttcaatcggagatttagtgagacgggcgaacgtggtttattcttt

SEQ ID NO: 38305 - DNA, 96 bp, Fusarium cuneirostrum
  misc_feature: 51
ttttttattattttctcttttttttcttttttataattatatctttttttttttcttttaattatttatttatttttaattcttgattcttttttc

SEQ ID NO: 38306 - DNA, 96 bp, Fusarium cuneirostrum
  misc_feature: 51
tctcaccctcaccactcgccgtctagctcgtggttctcttttaccactacaataacagttcactcttctcgttcacaaatgcacaatcaattcaaa

SEQ ID NO: 38307 - DNA, 96 bp, Fusarium cuneirostrum
  misc_feature: 51
tttaaggcaataaggctttattttatatatatattcctttgcattattgtaagagactgagctcttatctaagccgccgagaaaggctgcttaatc

SEQ ID NO: 38308 - DNA, 96 bp, Fusarium cuneirostrum
  misc_feature: 51
cagacgtccttctccatatgaacaactccgctcaactcggcctcgacttgcgcctcctttcaaatgtcgatgcccttaaagctgtggcgattgcaa

SEQ ID NO: 38309 - DNA, 96 bp, Fusarium cuneirostrum
  misc_feature: 51
ttgatcaaccttcgcatggctcaggtttctattacttcttcgatctcgtttcactccatctcttttcatgatctagtgaagttattcgcacttcac

SEQ ID NO: 38310 - DNA, 96 bp, Fusarium cuneirostrum
  misc_feature: 51
ttctttaaacttgtcgagcaccatttccctccctaatggcgagccatcgtgactgattgtaattgtaattgtaattgtagtgttagatggaattgt

SEQ ID NO: 38311 - DNA, 96 bp, Fusarium cuneirostrum
  misc_feature: 51
gaaacatctctttctgaaaagaagaaagaagaaagaagaaagaagaaagaagaaagaagaaagaagaaagaagaaagaagaaagaagaaagaagaa

SEQ ID NO: 38312 - DNA, 96 bp, Fusarium cuneirostrum
  misc_feature: 51
ttcttcagcgctgtcgcgcaaaacatgaacttgcttctgtttttttacttttgtgcctgctcgagcttgaacaagcgagtcaccagcaggtgttac

SEQ ID NO: 38313 - DNA, 96 bp, Fusarium cuneirostrum
  misc_feature: 51
ttcatactttatttaatcgagcgagctgtgcatatgtgacattattattattttgaatcgtagtcgtgatcatgtacccaagatagtcctgagccc

SEQ ID NO: 38314 - DNA, 96 bp, Fusarium cuneirostrum
  misc_feature: 51
atactaaatcgaggtattataggaatataataagatctataaatactaataagcggatcgatataataggctactatataataattaaatcactaa

SEQ ID NO: 38315 - DNA, 96 bp, Fusarium cuneirostrum
  misc_feature: 51
caatagagatggtacccccattaatcgccttcccgcctccgtgattaccatccagagcaatctggaaagcacggcaataatgtggatgatccttaa

SEQ ID NO: 38316 - DNA, 96 bp, Fusarium cuneirostrum
  misc_feature: 51
ttaaagttccccagactctcagttgcagcacgccgcttattatctcatatccgagataatctagaatgacggtaaatgataatcgatgacgacgct

SEQ ID NO: 38317 - DNA, 96 bp, Fusarium cuneirostrum
  misc_feature: 51
tggcaacccatgaagagttacgagcgcccgcggagggccgagtctatgactatatccttagtacggacgaccggagggaggacgtgcggagtgagt

SEQ ID NO: 38318 - DNA, 96 bp, Fusarium cuneirostrum
  misc_feature: 51
ggtgtgatttagttgcctttcttagtagttgtgatagcttcatttatctttatgcgagcacttatctggaaccaacagctcgccgtaatgaatcca

SEQ ID NO: 38319 - DNA, 96 bp, Fusarium cuneirostrum
  misc_feature: 51
tgcttatcatgtacgttactaggaattaaatctagattatttggtttacgagttagaaattctattattaaactatatagcttatttctctcgact

SEQ ID NO: 38320 - DNA, 96 bp, Fusarium cuneirostrum
  misc_feature: 51
aagacgagcggagcgagcgaatggggaagaagggagtggaacgaccttggcctatggcgggacgtagaacgttccgtccatgctgcggggaccgca

SEQ ID NO: 38321 - DNA, 96 bp, Fusarium cuneirostrum
  misc_feature: 51
ctcgtctgagtggctatgcctgatgactcactcgttcctcgttctccgtcatctttaccaactgggatgccaatgtcagcaagctgactaaaggca

SEQ ID NO: 38322 - DNA, 96 bp, Fusarium cuneirostrum
  misc_feature: 51
tgcacttggagtgcttttggcgcccggggcgtcaaccttttttctgacgcgtttcattacgcgctcgctcgaacggattgtgagcgactcgattac

SEQ ID NO: 38323 - DNA, 96 bp, Fusarium cuneirostrum
  misc_feature: 51
tcttccccattcgctcgctccgctcgtcttacatgggtccccaccggcctccactcattccattcgttcccgtccttagtcaaccgatcattgcgt

SEQ ID NO: 38324 - DNA, 96 bp, Fusarium cuneirostrum
  misc_feature: 51
aattacgatttaaataattaaacttattataatatcgcgaagcggatataatatattagtaaaaagagattaagataaatataaataaaaaccaga

SEQ ID NO: 38325 - DNA, 96 bp, Fusarium cuneirostrum
  misc_feature: 51
tctgacttgttttatttttttcgaggacggaggacgagtttaccgcaacaacgtgaggagacgaacagagtgagtttgtattctatccggaggagg

SEQ ID NO: 38326 - DNA, 96 bp, Fusarium cuneirostrum
  misc_feature: 51
atggactgcgaaggcaggatcacatggaatgtgggcgacgaggacggagagtccgagtggggaggccgaaggccgaccggggaaagtgtgtcgaga

SEQ ID NO: 38327 - DNA, 96 bp, Fusarium cuneirostrum
  misc_feature: 51
cagcgaaacgagggctgataactttggtctataagcggtttcctttcaaacgcgtgcgttgattggaagctgggggaacaccgaggaacgagggga

SEQ ID NO: 38328 - DNA, 96 bp, Fusarium cuneirostrum
  misc_feature: 51
tattcccatataaatattacaagatcttactaagtatatttaaaacatagtaaatagtttttattaatttcgtgcctctaggcataacgtatgtga

SEQ ID NO: 38329 - DNA, 96 bp, Fusarium cuneirostrum
  misc_feature: 51
tcaaggggcaattggggtaagcgtttgtgtagatttgaattgaattgtgattgcgagccatcattcataacgaaatggggcgagacctaaaatata

SEQ ID NO: 38330 - DNA, 96 bp, Fusarium cuneirostrum
  misc_feature: 51
catactcttgtcaatccctcaccctgcgtccttcgtcctcgggattcgggactattccagtgtggatgaaaatgaggccattcacaactccatcta

SEQ ID NO: 38331 - DNA, 96 bp, Fusarium cuneirostrum
  misc_feature: 51
ccttcggtcgcgggaagtctctatacttccttaacatttgtgaccaaattcccactccgttctcacgtttgctcacaccaaacgccagatcgcaac

SEQ ID NO: 38332 - DNA, 96 bp, Fusarium cuneirostrum
  misc_feature: 51
gtcgagggtgtggacgagtttggtgatgaatgggtcgatgacgatcttggagatttttagtgtagatagatgcaatgtgaacttggtgagatttgt

SEQ ID NO: 38333 - DNA, 96 bp, Fusarium cuneirostrum
  misc_feature: 51
gtatttcaatcggagatttagtgagacgggcgaacgtggtttattcttttgtatcacggagtgatgaacgagatggttcgagtgcgaggaaggacg

SEQ ID NO: 38334 - DNA, 96 bp, Fusarium cuneirostrum
  misc_feature: 51
gtataagcgatagccggcaggcgtccccagctagctctagttcagatgatcaaatagttgacgtcgacgataaccaggagatagacctagccggcc

SEQ ID NO: 38335 - DNA, 96 bp, Fusarium cuneirostrum
  misc_feature: 51
caaaaaactgttccagttttgagctcgtttctggctcgggtctgctcgaccctcgacacacttctgtcggtcgcgcatccgcactccctcatctac

SEQ ID NO: 38336 - DNA, 96 bp, Fusarium cuneirostrum
  misc_feature: 51
ccatctactttatatatgctcgcgtaacacaagtgcgggagctcaccctactgtaagctctaggtttttcagcctcgctccctacctacttagtac

SEQ ID NO: 38337 - DNA, 96 bp, Fusarium cuneirostrum
  misc_feature: 51
cttacattccccacgcctccgttcattcgctatccagcgatcactccgttattgctcctcattcccagtccatacgtccttcccattcgttattac

SEQ ID NO: 38338 - DNA, 96 bp, Fusarium cuneirostrum
  misc_feature: 51
ggaaaatacttttgaagttattcacattcacatctacgattacaatttaatcaatcactcgcacactaagtcacagtcgctcgcctttaggcttac

SEQ ID NO: 38339 - DNA, 96 bp, Fusarium cuneirostrum
  misc_feature: 51
gtaagacgagcggagcgagcgaatggggaagaagggagtggaacgaccttggcctatggcgggacgtagaacgttccgtccatgctgcggggaccg

SEQ ID NO: 38340 - DNA, 96 bp, Fusarium cuneirostrum
  misc_feature: 51
gtaaagtggtggctcgctcaatcaatcaagttatgtcacaggttacacaaaatgaggttatcacgatatctacattgggaaaagtctactactacg

SEQ ID NO: 38341 - DNA, 96 bp, Fusarium cuneirostrum
  misc_feature: 51
aagtctcacaaagcatcgttggagttactcctccacacttgacccaactcaaacacagcatcatcaaatctacttcgaaactcccttctcagtacc

SEQ ID NO: 38342 - DNA, 96 bp, Fusarium cuneirostrum
  misc_feature: 51
cgtcgccctacgggctccgtatttaaaaaaggaatggaagacctctctccgcgaggctcgtaactctttactcgagtttattagatagtccatccc

SEQ ID NO: 38343 - DNA, 96 bp, Fusarium cuneirostrum
  misc_feature: 51
ggcaacgacctggaatcagagtgagaatctggtacagattgttagcgaccgaagggagctttccagcttatagactaacgcgagtgacccggaacg

SEQ ID NO: 38344 - DNA, 96 bp, Fusarium cuneirostrum
  misc_feature: 51
ccattaatcgccttcccgcctccgtgattaccatccagagcaatctggaaagcacggcaataatgtggatgatccttaaagatcacagggcagtcc

SEQ ID NO: 38345 - DNA, 96 bp, Fusarium cuneirostrum
  misc_feature: 51
atgatccacaggcttccgcctgattgggtctccgaccccaccaagtgcgtgtcattggatgacacttgttctcacaggagttgcggtccccgcagc

SEQ ID NO: 38346 - DNA, 96 bp, Fusarium cuneirostrum
  misc_feature: 51
gctgcagttccaagagtgctgcattgagtccacatccacacatcaaggcgtcagcgtcttgaatgaaatccatccacttcatctaatggcatcgat

SEQ ID NO: 38347 - DNA, 96 bp, Fusarium cuneirostrum
  misc_feature: 51
gcatctccgatgctctcctgtcctcctccgtcgtccttcctcgcactcgaaccatctcgttcatcactccgtgatacaaaagaataaaccacgttc

SEQ ID NO: 38348 - DNA, 96 bp, Fusarium cuneirostrum
  misc_feature: 51
attgagtttaggcgtttgcctaacaaagtgcaggaagcacttgaatgtccgatggagtcggatgatatgctattcttgagagcatattactgcgtc

SEQ ID NO: 38349 - DNA, 96 bp, Fusarium cuneirostrum
  misc_feature: 51
gaatcagttctgtttattccacggccgtggaaacacgaacaggtgagtgtctatacatatctggaagatgaagtgaaggatgaacgcaatgctaat

SEQ ID NO: 38350 - DNA, 96 bp, Fusarium cuneirostrum
  misc_feature: 51
cttctttaaacttgtcgagcaccatttccctccctaatggcgagccatcgtgactgattgtaattgtaattgtaattgtagtgttagatggaattg

SEQ ID NO: 38351 - DNA, 96 bp, Fusarium cuneirostrum
  misc_feature: 51
aaaaaaataaaacaagtcagagttcgcctgctcactcaacctctcgggggaaaagacgctgtcttatactcctcgactctgtctgcggggtatgag

SEQ ID NO: 38352 - DNA, 96 bp, Fusarium cuneirostrum
  misc_feature: 51
ctcacgttgttgcggtaaactcgtcctccgtcctcgaaaaaaataaaacaagtcagagttcgcctgctcactcaacctctcgggggaaaagacgct

SEQ ID NO: 38353 - DNA, 96 bp, Fusarium cuneirostrum
  misc_feature: 51
aactttggtgatataagaggatttttgggaaacgcatgcgttgggacccaaactgacttccaggctttagccggttggcagagtccgcggctttag

SEQ ID NO: 38354 - DNA, 96 bp, Fusarium cuneirostrum
  misc_feature: 51
aggggcgcagggaagactgagggattggcaatagtcattacaccgccggaggcccgagtcggaactgtataatcctacggagcccggagggcgacg

SEQ ID NO: 38355 - DNA, 96 bp, Fusarium cuneirostrum
  misc_feature: 51
attttcatccacactggaatagtcccgaatcccgaggacgaaggacgcagggtgagggattgacaagagtatgttggcaacccatgaagagttacg

SEQ ID NO: 38356 - DNA, 96 bp, Fusarium cuneirostrum
  misc_feature: 51
atcttaagtctttctaagataataaaacctatataggtaatacttattagattacctacttccttattgtaagagactgagctcttatctaagccg

SEQ ID NO: 38357 - DNA, 96 bp, Fusarium cuneirostrum
  misc_feature: 51
cgctccgctcggggtagaattatacagtcatggactcggccctgcgggcagctgcactactcttgccaatccggctccgtcgtccctcctcctccg

SEQ ID NO: 38358 - DNA, 96 bp, Fusarium cuneirostrum
  misc_feature: 51
aagtggtattgtagttagtatagacagtgatatgtgagcacaaccgagagagtagtggagcgaacactaaataaaaggctccaacagaagtgagcg

SEQ ID NO: 38359 - DNA, 96 bp, Fusarium cuneirostrum
  misc_feature: 51
atggcccgaatgatgaatgcggattgttgtatgtctaggagacttttctgtggaagtgagatttcccgaacgggagttgggaatagcttcaatgcg

SEQ ID NO: 38360 - DNA, 96 bp, Fusarium cuneirostrum
  misc_feature: 51
cgagtgattgattaaattgtaatcgtagatgtgaatgtgaataacttcaaaagtattttcccgaggccgaggacgtaggacgcaggctgagggatt

SEQ ID NO: 38361 - DNA, 96 bp, Fusarium cuneirostrum
  misc_feature: 51
attaaaactgtgccagtttctgaaaagtcccaaaatccggtagattttgagtcttgcgatgtacagttactccgttactactcacccaccggctcg

SEQ ID NO: 38362 - DNA, 96 bp, Fusarium cuneirostrum
  misc_feature: 51
cgacacacttctgtcggtcgcgcatccgcactccctcatctactcacctcgtacacccacttcggtatcatctttcgatgtgcgcattgactgttg

SEQ ID NO: 38363 - DNA, 96 bp, Fusarium cuneirostrum
  misc_feature: 51
aagcgatagccggcaggcgtccccagctagctctagttcagatgatcaaatagttgacgtcgacgataaccaggagatagacctagccggcctagg

SEQ ID NO: 38364 - DNA, 96 bp, Fusarium cuneirostrum
  misc_feature: 51
attcgtcgttcctcctcataacgttccgtccacccgcacttcagtcggtcccctccttctcgtgcttacttactccactcttcttcgtccctcatt

SEQ ID NO: 38365 - DNA, 96 bp, Fusarium cuneirostrum
  misc_feature: 51
agcgaaacgagggctgataactttggtctataagcggtttcctttcaaacgcgtgcgttgattggaagctgggggaacaccgaggaacgaggggat

SEQ ID NO: 38366 - DNA, 96 bp, Fusarium cuneirostrum
  misc_feature: 51
aatccaagatcgactcgctctctgagctcagacagatgatgtaggagggaaactcttccctctgccctctcgggggaaaagacgctgtcttatact

SEQ ID NO: 38367 - DNA, 96 bp, Fusarium cuneirostrum
  misc_feature: 50
tttttattattttctcttttttttcttttttataattatatctttttttttttcttttaattatttatttatttttaattcttgattcttttttct

SEQ ID NO: 38368 - DNA, 96 bp, Fusarium cuneirostrum
  misc_feature: 50
tttagtaacgtcgctacgtgttccttcgtcacactcactccgcacgtcgccctccgggctccgtaggattatacagttccgactcgggcctccggc

SEQ ID NO: 38369 - DNA, 96 bp, Fusarium cuneirostrum
  misc_feature: 50
ttgtcaatgtaatttattcagggaataattacccttccaagcaggaactgtgaaatagagaccgagccataaggcgaggtgttgtcagagcacgag

SEQ ID NO: 38370 - DNA, 96 bp, Fusarium cuneirostrum
  misc_feature: 50
ttcttccccattcgctcgctccgctcgtcttacatgggtccccaccggcctccactcattccattcgttcccgtccttagtcaaccgatcattgcg

SEQ ID NO: 38371 - DNA, 96 bp, Fusarium cuneirostrum
  misc_feature: 50
ttcggtcgattagtatatatgtgtgcccgtctcgtgcacatgtgtccagacacaaatcattatcactcacccgttcgtgatcgctttcgctctatc

SEQ ID NO: 38372 - DNA, 96 bp, Fusarium cuneirostrum
  misc_feature: 50
ttcctcggtctcgtactgcacgtcggcttacgcctccgtaattctttacacagttcttgcttgggcaatgaactcttcacttgagttcagtctatt

SEQ ID NO: 38373 - DNA, 96 bp, Fusarium cuneirostrum
  misc_feature: 50
cttttaaggcaataaggctttattttatatatatattcctttgcattattgtaagagactgagctcttatctaagccgccgagaaaggctgcttaa

SEQ ID NO: 38374 - DNA, 96 bp, Fusarium cuneirostrum
  misc_feature: 50
ctgaaacgggagttggtgatgacttcacttctgccgactccacatactttgctcgccactgtttaatatggggcgaggcaaataaatacgttttaa

SEQ ID NO: 38375 - DNA, 96 bp, Fusarium cuneirostrum
  misc_feature: 50
ttaaaacaccagagtatgtggtgttgatcatcttttttctactcgacgatggcttcgtcgcacatgaatgaaatggaatgagccgagatgcagggc

SEQ ID NO: 38376 - DNA, 96 bp, Fusarium cuneirostrum
  misc_feature: 50
tatcactgtctatactaactacaataccacttgaggtcatcaccattacctattccggtaagtctcacaaagcatcgttggagttactcctccaca

SEQ ID NO: 38377 - DNA, 96 bp, Fusarium cuneirostrum
  misc_feature: 50
cttacactctctcgtcgatgcatacgcattgaagatattcccaacatgccgtcgggtcagattaactcaactgtcgtgagttcttgtaacctcgca

SEQ ID NO: 38378 - DNA, 96 bp, Fusarium cuneirostrum
  misc_feature: 50
tgagtagatgagggagtgcggatgcgcgaccgacagaagtgtgtcgagggtcgagcagacccgagccagaaacgagctcaaaactggaacagtttt

SEQ ID NO: 38379 - DNA, 96 bp, Fusarium cuneirostrum
  misc_feature: 50
caatctcgcgatttcgcccgccattctcagtttcgttcacatacaaaaagtatgtcgatttgagtccaatttgaatccgattttgcttgttcctca

SEQ ID NO: 38380 - DNA, 96 bp, Fusarium cuneirostrum
  misc_feature: 50
tgaagctatcgtcactacaacatcaggtaatcatagaacaaaacacatgatgtaacatcaccataatcatatcaaattttgctacaacacaatttc

SEQ ID NO: 38381 - DNA, 96 bp, Fusarium cuneirostrum
  misc_feature: 50
tacgcttatatcactaccgaatgagacccggaacgggtcgaaatgaggtggcataactttggtgatataagcggattccgggattgaacttgttca

SEQ ID NO: 38382 - DNA, 96 bp, Fusarium cuneirostrum
  misc_feature: 50
tctcgggggaaaagacgctgtcttatactcctcgactctgtctgcggggtatgagattgtggacggaacgttcgtacctctctcatttgtccgtcc

SEQ ID NO: 38383 - DNA, 96 bp, Fusarium cuneirostrum
  misc_feature: 50
tatttcaatcggagatttagtgagacgggcgaacgtggtttattcttttgtatcacggagtgatgaacgagatggttcgagtgcgaggaaggacga

SEQ ID NO: 38384 - DNA, 96 bp, Fusarium cuneirostrum
  misc_feature: 50
gaacacgtagcgacgttactaaaacaccacaagatgtggttcagttatcttcatgagagtgcatgatgacctcaagtggaggtgcatggactgcga

SEQ ID NO: 38385 - DNA, 96 bp, Fusarium cuneirostrum
  misc_feature: 50
tccgccaccaagaaaaagtgacttcgttaacagaagtgaccgatttctcggcccattctcaggatttggctcaccaaatgccagaatcgagtccat

SEQ ID NO: 38386 - DNA, 96 bp, Fusarium cuneirostrum
  misc_feature: 50
tcccgcacttgtgttacgcgagcatatataaagtagatggtgataacctcaaaagagtccacgagccgagcgcgtagcgtgcaggcgaggggattg

SEQ ID NO: 38387 - DNA, 96 bp, Fusarium cuneirostrum
  misc_feature: 50
cccactcggactctccgtcctcgtcgcccacattccatgtgatcctgccttcgcagtccatgcacctccacttgaggtcatcatgcactctcatga

SEQ ID NO: 38388 - DNA, 96 bp, Fusarium cuneirostrum
  misc_feature: 50
gggaacagggaggttcacggcataaaagttgaaaagtgttattttgcatagcgaaaggtgatggtggaaattgtgttgtagcaaaatttgatatga

SEQ ID NO: 38389 - DNA, 96 bp, Fusarium cuneirostrum
  misc_feature: 50
tcagttctgtttattccacggccgtggaaacacgaacaggtgagtgtctatacatatctggaagatgaagtgaaggatgaacgcaatgctaatagc

SEQ ID NO: 38390 - DNA, 96 bp, Fusarium cuneirostrum
  misc_feature: 50
tcacgcattgaagctattcccaactcccgttcgggaaatctcacttccacagaaaagtctcctagacatacaacaatccgcattcatcattcgggc

SEQ ID NO: 38391 - DNA, 96 bp, Fusarium cuneirostrum
  misc_feature: 50
agaatcaagaattaaaaataaataaataattaaaagaaaaaaaaaaagatataattataaaaaagaaaaaaaagagaaaataataaaaaaagaata

SEQ ID NO: 38392 - DNA, 96 bp, Fusarium cuneirostrum
  misc_feature: 50
acatgatcacgactacgattcaaaataataataatgtcacatatgcacagctcgctcgattaaataaagtatgaagtggtgctcgtcaaaagtata

SEQ ID NO: 38393 - DNA, 96 bp, Fusarium cuneirostrum
  misc_feature: 50
agaaacttaattaatatcattagaaaataggtcaatatatttataagctatattaattaatattaaaatacgcgattagcctatacctaacttata

SEQ ID NO: 38394 - DNA, 96 bp, Fusarium cuneirostrum
  misc_feature: 50
tagtaacgtcgctacgtgttccttcgtcacactcactccgcacgtcgccctccgggctccgtaggattatacagttccgactcgggcctccggcgg

SEQ ID NO: 38395 - DNA, 96 bp, Fusarium cuneirostrum
  misc_feature: 50
tacacaaaatgaggttatcacgatatctacattgggaaaagtctactactacgccgactcaatctcttccaataccttccggaaacgaactctcct

SEQ ID NO: 38396 - DNA, 96 bp, Fusarium cuneirostrum
  misc_feature: 50
taatctaataaaaagaataaccagggctcgtcaaacgagtttatttaaattattatttgcctcgccctgcttatgttatgtcaagggctcacaagt

SEQ ID NO: 38397 - DNA, 96 bp, Fusarium cuneirostrum
  misc_feature: 50
agacgtccttctccatatgaacaactccgctcaactcggcctcgacttgcgcctcctttcaaatgtcgatgcccttaaagctgtggcgattgcaac

SEQ ID NO: 38398 - DNA, 96 bp, Fusarium cuneirostrum
  misc_feature: 50
gttccttcgtcacactcactccgcacgtcctccctccggtcgtccgtactaaggatatagtcatagactcggccctccgcgggcgctcgtaactct

SEQ ID NO: 38399 - DNA, 96 bp, Fusarium cuneirostrum
  misc_feature: 50
gcacctccacttgaggtcatcatgcactctcatgaagataactgaaccacatcttgtggtgttttagtaacgtcgctacgtgttccttcgtcacac

SEQ ID NO: 38400 - DNA, 96 bp, Fusarium cuneirostrum
  misc_feature: 50
cttttcccccgagaggttgagtgagcaggcgaactctgacttgttttatttttttcgaggacggaggacgagtttaccgcaacaacgtgaggagac

SEQ ID NO: 38401 - DNA, 96 bp, Fusarium cuneirostrum
  misc_feature: 50
agtcgatcttggattcctatgcaagtcgtctttcaattgcgctggcgcgcgactaggaacagagtgacggtatttcaatcggagatttagtgagac

SEQ ID NO: 38402 - DNA, 96 bp, Fusarium cuneirostrum
  misc_feature: 50
gtccttcgtcctcgggattcgggactattccagtgtggatgaaaatgaggccattcacaactccatctacagtaacatcatgctcactaatctaat

SEQ ID NO: 38403 - DNA, 96 bp, Fusarium cuneirostrum
  misc_feature: 50
gtattgtagttagtatagacagtgatatgtgagcacaaccgagagagtagtggagcgaacactaaataaaaggctccaacagaagtgagcgacacg

SEQ ID NO: 38404 - DNA, 96 bp, Fusarium cuneirostrum
  misc_feature: 50
gtatacgacggacgtcgctgtctttttctattttctctgtttgcggaagcacggttgagagggattcgagaccctttcttactcagctggagagct

SEQ ID NO: 38405 - DNA, 96 bp, Fusarium cuneirostrum
  misc_feature: 50
gtagtagtagacttttcccaatgtagatatcgtgataacctcattttgtgtaacctgtgacataacttgattgattgagcgagccaccactttact

SEQ ID NO: 38406 - DNA, 96 bp, Fusarium cuneirostrum
  misc_feature: 50
cattttcatccacactggaatagtcccgaatcccgaggacgaaggacgcagggtgagggattgacaagagtatgttggcaacccatgaagagttac

SEQ ID NO: 38407 - DNA, 96 bp, Fusarium cuneirostrum
  misc_feature: 50
ggtgagtagatgagggagtgcggatgcgcgaccgacagaagtgtgtcgagggtcgagcagacccgagccagaaacgagctcaaaactggaacagtt

SEQ ID NO: 38408 - DNA, 96 bp, Fusarium cuneirostrum
  misc_feature: 50
gggaaaagtgcgtcgcatacttggatgcgtcgcatgcttatcatgtacgttacatcacaagtgagtgaaacacacaagcgagtgaaacaaaaatcc

SEQ ID NO: 38409 - DNA, 96 bp, Fusarium cuneirostrum
  misc_feature: 50
ggacgagtttaccgcaacaacgtgaggagacgaacagagtgagtttgtattctatccggaggaggagtgaacgagtgagcgatcatctacttacat

SEQ ID NO: 38410 - DNA, 96 bp, Fusarium cuneirostrum
  misc_feature: 50
actctgtctgcggggtatgagattgtggacggaacgttcgtacctctctcatttgtccgtccaacaaaaccgacctccactcagtcccttcgttcc

SEQ ID NO: 38411 - DNA, 96 bp, Fusarium cuneirostrum
  misc_feature: 50
cactcacttcagtcgcatcctgcattcatgtttgactgctgtcaattgaagtcatcaccatctctgtgtgatgtctgtaacgtcgctacgtgttcc

SEQ ID NO: 38412 - DNA, 96 bp, Fusarium cuneirostrum
  misc_feature: 50
actacgggacacgggacagtgagggacgaacgtagtgtcactaaggcgaccgagctcaagcgaggtaaagccggtactcgtcttcctagcgtcagc

SEQ ID NO: 38413 - DNA, 96 bp, Fusarium cuneirostrum
  misc_feature: 50
cttgaggtcatcatgcactctcatgaagataactgaaccacatcttgtggtgttttagtaacgtcgctacgtgttccttcgtcacactcactccgc

SEQ ID NO: 38414 - DNA, 96 bp, Fusarium cuneirostrum
  misc_feature: 50
caaacactccaagatcagctatcatcgccatctcatccatcttagaggcgttcacttacaaactacatcagtaaacacactaaggtcagcaatcgc

SEQ ID NO: 38415 - DNA, 96 bp, Fusarium cuneirostrum
  misc_feature: 50
gccgtggaataaacagaactgattccagtcgaaatcagactcgactccgtctcacacaaaaaaataaatacagtctcaagtcttcgactgcgtcct

SEQ ID NO: 38416 - DNA, 96 bp, Fusarium cuneirostrum
  misc_feature: 50
gccgcgacctggcgggaggtttccacagctcaagggatataccaaggaggaaggaataacctgatccatcaccttagtcgttcatcagtcactact

SEQ ID NO: 38417 - DNA, 96 bp, Fusarium cuneirostrum
  misc_feature: 50
gcaatgtgaacttggtgagatttgtagagttgcctgatgtggaagtgatgatgacttcaattacgtagattttagagcgagtactaagtaggtagg

SEQ ID NO: 38418 - DNA, 96 bp, Fusarium cuneirostrum
  misc_feature: 50
gattcaaaataataataatgtcacatatgcacagctcgctcgattaaataaagtatgaagtggtgctcgtcaaaagtatatttagtgtttgcctcg

SEQ ID NO: 38419 - DNA, 96 bp, Fusarium cuneirostrum
  misc_feature: 50
cacgtcgccctacgggctccgtatttaaaaaaggaatggaagacctctctccgcgaggctcgtaactctttactcgagtttattagatagtccatc

SEQ ID NO: 38420 - DNA, 96 bp, Fusarium cuneirostrum
  misc_feature: 50
gatcaaccttcgcatggctcaggtttctattacttcttcgatctcgtttcactccatctcttttcatgatctagtgaagttattcgcacttcacct

SEQ ID NO: 38421 - DNA, 96 bp, Fusarium cuneirostrum
  misc_feature: 50
cagaactatgttctgaataccgaccgaacggagtgagggaaggtgcggaatggagtgggagcagagcgaccacggaatgaggttactataatcctc

SEQ ID NO: 38422 - DNA, 96 bp, Fusarium cuneirostrum
  misc_feature: 50
gagcagtacttaaagggccgcatggcccgatttgcgacactgtttggtgtcagacaacattcttgtttgtcttattttttggctgaacagcgtgag

SEQ ID NO: 38423 - DNA, 96 bp, Fusarium cuneirostrum
  misc_feature: 50
ctcactccgcacgtcgccctccgggctccgtaggattatacagttccgactcgggcctccggcggtgtaatgactattgccaatccctcagtcttc

SEQ ID NO: 38424 - DNA, 96 bp, Fusarium cuneirostrum
  misc_feature: 50
cttttaaattggcgagcactttgtgaatgaacgacttaatcaccacttgaggcccgagccgacgagcgagcgtagcgaaggaggagcggagggctt

SEQ ID NO: 38425 - DNA, 96 bp, Fusarium cuneirostrum
  misc_feature: 50
cttcacttcatcttccagatatgtatagacactcacctgttcgtgtttccacggccgtggaataaacagaactgattccagtcgaaatcagactcg

SEQ ID NO: 38426 - DNA, 96 bp, Fusarium cuneirostrum
  misc_feature: 50
aatgatccacaggcttccgcctgattgggtctccgaccccaccaagtgcgtgtcattggatgacacttgttctcacaggagttgcggtccccgcag

SEQ ID NO: 38427 - DNA, 96 bp, Fusarium cuneirostrum
  misc_feature: 50
ctcgatcacctctcgcaggataccaagtcgatcgtacatctccttcactacttcttccttccgaagatagcttaccgtagaaaagatatgcgtcag

SEQ ID NO: 38428 - DNA, 96 bp, Fusarium cuneirostrum
  misc_feature: 50
cgcagacagagtcgaggagtataagacagcgtcttttcccccgagagggcagagggaagagtttccctcctacatcatctgtctgagctcagagag

SEQ ID NO: 38429 - DNA, 96 bp, Fusarium cuneirostrum
  misc_feature: 50
ctcggccctccgcgggcgctcgtaactcttcatgggttgccaacatactcttgtcaatccctcaccctgcgtccttcgtcctcgggattcgggact

SEQ ID NO: 38430 - DNA, 96 bp, Fusarium cuneirostrum
  misc_feature: 50
ctcctcgactctgtctgcggggtatgagattgtggacggaacgttcgtacctctctcatttgtccgtccaacaaaaccgacctccactcagtccct

SEQ ID NO: 38431 - DNA, 96 bp, Fusarium cuneirostrum
  misc_feature: 50
atcgcaaatactcttttcttctcttcccgagaagatgctgtccagcaattaatgtaagtagatgatcgctcactcgttcactcctcctccggatag

SEQ ID NO: 38432 - DNA, 96 bp, Fusarium cuneirostrum
  misc_feature: 50
atcatcttttttctactcgacgatggcttcgtcgcacatgaatgaaatggaatgagccgagatgcagggcacgaggacgtatgtggacccggaccg

SEQ ID NO: 38433 - DNA, 96 bp, Fusarium cuneirostrum
  misc_feature: 50
cgcaagactcaaaatctaccggattttgggactttttgcgaacgagcatcgagatttggtgggaacgaatctggcgttgtatgcgactggatctgg

SEQ ID NO: 38434 - DNA, 96 bp, Fusarium cuneirostrum
  misc_feature: 50
cgaaacgagggctgataactttggtctataagcggtttcctttcaaacgcgtgcgttgattggaagctgggggaacaccgaggaacgaggggatgg

SEQ ID NO: 38435 - DNA, 96 bp, Fusarium cuneirostrum
  misc_feature: 50
ccttttaaattggcgagcactttgtgaatgaacgacttaatcaccacttgaggcccgagccgacgagcgagcgtagcgaaggaggagcggagggct

SEQ ID NO: 38436 - DNA, 96 bp, Fusarium cuneirostrum
  misc_feature: 50
ccgaatgatgaatgcggattgttgtatgtctaggagacttttctgtggaagtgagatttcccgaacgggagttgggaatagcttcaatgcgtgact

SEQ ID NO: 38437 - DNA, 96 bp, Fusarium cuneirostrum
  misc_feature: 50
aacgacctggaatcagagtgagaatctggtacagattgttagcgaccgaagggagctttccagcttatagactaacgcgagtgacccggaacgggg

SEQ ID NO: 38438 - DNA, 96 bp, Fusarium cuneirostrum
  misc_feature: 50
agactgtatttatttttttgtgtgagacggagtcgagtctgatttcgactggaatcagttctgtttattccacggccgtggaaacacgaacaggtg

SEQ ID NO: 38439 - DNA, 96 bp, Fusarium cuneirostrum
  misc_feature: 50
agtttggtgatgaatgggtcgatgacgatcttggagatttttagtgtagatagatgcaatgtgaacttggtgagatttgtagagttgcctgatgtg

SEQ ID NO: 38440 - DNA, 96 bp, Fusarium cuneirostrum
  misc_feature: 50
aagtgaagtcatcaccatgtcttcttactactacgtttacaatttatatttacagtcacaactgttattaaatcatcgctcgccattaagtacaat

SEQ ID NO: 38441 - DNA, 96 bp, Fusarium cuneirostrum
  misc_feature: 50
acgttcgtacctctctcatttgtccgtccaacaaaaccgacctccactcagtcccttcgttcccggtcttacttactccacttcatactcgtccct

SEQ ID NO: 38442 - DNA, 96 bp, Fusarium cuneirostrum
  misc_feature: 50
acttctttaaacttgtcgagcaccatttccctccctaatggcgagccatcgtgactgattgtaattgtaattgtaattgtagtgttagatggaatt

SEQ ID NO: 38443 - DNA, 96 bp, Fusarium cuneirostrum
  misc_feature: 50
actcactccgcacgtcgccctccgggctccgtaggattatacagttccgactcgggcctccggcggtgtaatgactattgccaatccctcagtctt

SEQ ID NO: 38444 - DNA, 96 bp, Fusarium cuneirostrum
  misc_feature: 50
aatctcttatagactaacgcgagtgacccggaacggggcaaacgagcgtccataactttggtctataagaggtttttttccaaaacgcaccgcgtt

SEQ ID NO: 38445 - DNA, 96 bp, Fusarium cuneirostrum
  misc_feature: 49
agggagcgaggctgaaaaacctagagcttacagtagggtgagctcccgcacttgtgttacgcgagcatatataaagtagatggtgataacctcaaa

SEQ ID NO: 38446 - DNA, 96 bp, Fusarium cuneirostrum
  misc_feature: 49
aatagagatggtacccccattaatcgccttcccgcctccgtgattaccatccagagcaatctggaaagcacggcaataatgtggatgatccttaaa

SEQ ID NO: 38447 - DNA, 96 bp, Fusarium cuneirostrum
  misc_feature: 49
agacgagcggagcgagcgaatggggaagaagggagtggaacgaccttggcctatggcgggacgtagaacgttccgtccatgctgcggggaccgcaa

SEQ ID NO: 38448 - DNA, 96 bp, Fusarium cuneirostrum
  misc_feature: 49
catcatgctcactaatctaataaaaagaataaccagggctcgtcaaacgagtttatttaaattattatttgcctcgccctgcttatgttatgtcaa

SEQ ID NO: 38449 - DNA, 96 bp, Fusarium cuneirostrum
  misc_feature: 49
ttctgtttattccacggccgtggaaacacgaacaggtgagtgtctatacatatctggaagatgaagtgaaggatgaacgcaatgctaatagcaaac

SEQ ID NO: 38450 - DNA, 96 bp, Fusarium cuneirostrum
  misc_feature: 49
ttctgtcggtcgcgcatccgcactccctcatctactcacctcgtacacccacttcggtatcatctttcgatgtgcgcattgactgttggtcaattg

SEQ ID NO: 38451 - DNA, 96 bp, Fusarium cuneirostrum
  misc_feature: 49
ttcccatataaatattacaagatcttactaagtatatttaaaacatagtaaatagtttttattaatttcgtgcctctaggcataacgtatgtgata

SEQ ID NO: 38452 - DNA, 96 bp, Fusarium cuneirostrum
  misc_feature: 49
cggagtcgagtctgatttcgactggaatcagttctgtttattccacggccgtggaaacacgaacaggtgagtgtctatacatatctggaagatgaa

SEQ ID NO: 38453 - DNA, 96 bp, Fusarium cuneirostrum
  misc_feature: 49
ttacattccccacgcctccgttcattcgctatccagcgatcactccgttattgctcctcattcccagtccatacgtccttcccattcgttattaca

SEQ ID NO: 38454 - DNA, 96 bp, Fusarium cuneirostrum
  misc_feature: 49
ttaagtatagctagttctcgcttactaataattactaccttatttaatctctgtcgttatattgatcgcatatatattacttgctcgtcctaatta

SEQ ID NO: 38455 - DNA, 96 bp, Fusarium cuneirostrum
  misc_feature: 49
tataataagaaaagaagaataaatagtttatggaaataagaaaaataaataagaataggaattatagtaaaagattaaggataatagtgaatttaa

SEQ ID NO: 38456 - DNA, 96 bp, Fusarium cuneirostrum
  misc_feature: 49
tgtttcctgttttggatgttgcgataccttcgttttttagcgagcctttttgctagtcaatggggcgaggcaaacactaaatatacttttgacgag

SEQ ID NO: 38457 - DNA, 96 bp, Fusarium cuneirostrum
  misc_feature: 49
tgtattctatccggaggaggagtgaacgagtgagcgatcatctacttacattaattgctggacagcatcttctcgggaagagaagaaaagagtatt

SEQ ID NO: 38458 - DNA, 96 bp, Fusarium cuneirostrum
  misc_feature: 49
tctaggtttttcagcctcgctccctacctacttagtactcgctctaaaatctacgtaattgaagtcatcatcacttccacatcaggcaactctaca

SEQ ID NO: 38459 - DNA, 96 bp, Fusarium cuneirostrum
  misc_feature: 49
tgggctacagtaacacctgctggtgactcgcttgttcaagctcgagcaggcacaaaagtaaaaaaacagaagcaagttcatgttttgcgcgacagc

SEQ ID NO: 38460 - DNA, 96 bp, Fusarium cuneirostrum
  misc_feature: 49
ctccgccaccaagaaaaagtgacttcgttaacagaagtgaccgatttctcggcccattctcaggatttggctcaccaaatgccagaatcgagtcca

SEQ ID NO: 38461 - DNA, 96 bp, Fusarium cuneirostrum
  misc_feature: 49
attagtgagctcccgcatttatatatagcgagcatgttttaatctgatgtgaataacttcaaaagtattttcccgaggccgaggacgtaggacgca

SEQ ID NO: 38462 - DNA, 96 bp, Fusarium cuneirostrum
  misc_feature: 49
tgcagttccaagagtgctgcattgagtccacatccacacatcaaggcgtcagcgtcttgaatgaaatccatccacttcatctaatggcatcgattt

SEQ ID NO: 38463 - DNA, 96 bp, Fusarium cuneirostrum
  misc_feature: 49
ctattgtcaatccctcagcctgcgtcctacgtcctcggcctcgggaaaatacttttgaagttattcacattcacatctacgattacaatttaatca

SEQ ID NO: 38464 - DNA, 96 bp, Fusarium cuneirostrum
  misc_feature: 49
agaagatgctgtccagcaattaatgtaagtagatgatcgctcactcgttcactcctcctccggatagaatacaaactcactctgttcgtctcctca

SEQ ID NO: 38465 - DNA, 96 bp, Fusarium cuneirostrum
  misc_feature: 49
tgaatgtgaataacttcaaaagtattttcccgaggccgaggacgtaggacgcaggctgagggattgacaatagactgaactcaagtgaagagttca

SEQ ID NO: 38466 - DNA, 96 bp, Fusarium cuneirostrum
  misc_feature: 49
tcttgtggtgttttagtaacgtcgctacgtgttccttcgtcacactcactccgcacgtcgccctccgggctccgtaggattatacagttccgactc

SEQ ID NO: 38467 - DNA, 96 bp, Fusarium cuneirostrum
  misc_feature: 49
gagtcgatcttggattcctatgcaagtcgtctttcaattgcgctggcgcgcgactaggaacagagtgacggtatttcaatcggagatttagtgaga

SEQ ID NO: 38468 - DNA, 96 bp, Fusarium cuneirostrum
  misc_feature: 49
tctacagctactctaacaccagctggaaccaagaggcgtgagcttgaccgaatcaaagactgcattcccatcacgtccagcaatcgtgatgtcctt

SEQ ID NO: 38469 - DNA, 96 bp, Fusarium cuneirostrum
  misc_feature: 49
tcggtcgctaacaatctgtaccagattctcactctgattccaggtcgttgcccatacaatctcagaaatcttcccatacaaaatttgtacaaattt

SEQ ID NO: 38470 - DNA, 96 bp, Fusarium cuneirostrum
  misc_feature: 49
ggaagagtttccctcctacatcatctgtctgagctcagagagcgagtcgatcttggattcctatgcaagtcgtctttcaattgcgctggcgcgcga

SEQ ID NO: 38471 - DNA, 96 bp, Fusarium cuneirostrum
  misc_feature: 49
caagagcaaggtcgagaccgaggacaagagcaaggtcgagaccgaggacaagagcaaggtcgagaccgaggacaagagcaaggtcgagaccgagga

SEQ ID NO: 38472 - DNA, 96 bp, Fusarium cuneirostrum
  misc_feature: 49
tccataacctacaggagatagggcgagacaataacatttaaatacacttctttaaacttgtcgagcaccatttccctccctaatggcgagccatcg

SEQ ID NO: 38473 - DNA, 96 bp, Fusarium cuneirostrum
  misc_feature: 49
tcattccttttttaaataacattttaatgtgacgagcaccactacgccttttaaattggcgagcactttgtgaatgaacgacttaatcaccacttg

SEQ ID NO: 38474 - DNA, 96 bp, Fusarium cuneirostrum
  misc_feature: 49
cggacgaccggagggaggacgtgcggagtgagtgtgacgaaggaacacgtagcgacgttacagacatcacacagagatggtgatgacttcaattga

SEQ ID NO: 38475 - DNA, 96 bp, Fusarium cuneirostrum
  misc_feature: 49
tattcgtcgttcctcctcataacgttccgtccacccgcacttcagtcggtcccctccttctcgtgcttacttactccactcttcttcgtccctcat

SEQ ID NO: 38476 - DNA, 96 bp, Fusarium cuneirostrum
  misc_feature: 49
cttcatggcacccacatcgtgccatcctaccttctgccacactctactgagtcgtgaagccgtcgtgcactcctacatgaaatggtaacacacata

SEQ ID NO: 38477 - DNA, 96 bp, Fusarium cuneirostrum
  misc_feature: 49
tatcggaggtgaagccgagggctgtagaagaggtgaagacactcgtcgagggtgtggacgagtttggtgatgaatgggtcgatgacgatcttggag

SEQ ID NO: 38478 - DNA, 96 bp, Fusarium cuneirostrum
  misc_feature: 49
tatataataagaaaagaagaataaatagtttatggaaataagaaaaataaataagaataggaattatagtaaaagattaaggataatagtgaattt

SEQ ID NO: 38479 - DNA, 96 bp, Fusarium cuneirostrum
  misc_feature: 49
tataagcgatagccggcaggcgtccccagctagctctagttcagatgatcaaatagttgacgtcgacgataaccaggagatagacctagccggcct

SEQ ID NO: 38480 - DNA, 96 bp, Fusarium cuneirostrum
  misc_feature: 49
taaagttccccagactctcagttgcagcacgccgcttattatctcatatccgagataatctagaatgacggtaaatgataatcgatgacgacgcta

SEQ ID NO: 38481 - DNA, 96 bp, Fusarium cuneirostrum
  misc_feature: 49
cctcgatctataataatattaagtaatatactatatattttcgcgatatagaaataaaagagataaataaattctttagctattattaactctcta

SEQ ID NO: 38482 - DNA, 96 bp, Fusarium cuneirostrum
  misc_feature: 49
tacgacagctcaatatataaccctacgggtaatcgagtcgctcacaatccgttcgagcgagcgcgtaatgaaacgcgtcagaaaaaaggttgacgc

SEQ ID NO: 38483 - DNA, 96 bp, Fusarium cuneirostrum
  misc_feature: 49
atgcaatgtgaacttggtgagatttgtagagttgcctgatgtggaagtgatgatgacttcaattacgtagattttagagcgagtactaagtaggta

SEQ ID NO: 38484 - DNA, 96 bp, Fusarium cuneirostrum
  misc_feature: 49
tacactcttcgccttcgtgcctcaggctccctatttactgggaaggcaatggtgctgcgcacctaaagcctgactcagtccacacgttcgtccctc

SEQ ID NO: 38485 - DNA, 96 bp, Fusarium cuneirostrum
  misc_feature: 49
taaagtagatggtgataacctcaaaagagtccacgagccgagcgcgtagcgtgcaggcgaggggattgtcaatgtaatttattcagggaataatta

SEQ ID NO: 38486 - DNA, 96 bp, Fusarium cuneirostrum
  misc_feature: 49
taacgacacgtcgcctgaaggctccgtaagtttagaacatagttcttgcttggaggatgaactcttcacttgagttcagtctattgtcaatccctc

SEQ ID NO: 38487 - DNA, 96 bp, Fusarium cuneirostrum
  misc_feature: 49
taaccctaattctaatctcttttttaattttattttccttatttattatatatatatattctttttttattattttctcttttttttcttttttat

SEQ ID NO: 38488 - DNA, 96 bp, Fusarium cuneirostrum
  misc_feature: 49
taaccctaaccctaaccctaaccctaaccctaaccctaaccctatatttttcttttcttttatttcctttattctattttatattcttctctttat

SEQ ID NO: 38489 - DNA, 96 bp, Fusarium cuneirostrum
  misc_feature: 49
atataataagaaaagaagaataaatagtttatggaaataagaaaaataaataagaataggaattatagtaaaagattaaggataatagtgaattta

SEQ ID NO: 38490 - DNA, 96 bp, Fusarium cuneirostrum
  misc_feature: 49
taaacagtggcgagcaaagtatgtggagtcggcagaagtgaagtcatcaccaactcccgtttcagcatagtcgggaaaacggtcccgttacatagt

SEQ ID NO: 38491 - DNA, 96 bp, Fusarium cuneirostrum
  misc_feature: 49
gtttggtgatgaatgggtcgatgacgatcttggagatttttagtgtagatagatgcaatgtgaacttggtgagatttgtagagttgcctgatgtgg

SEQ ID NO: 38492 - DNA, 96 bp, Fusarium cuneirostrum
  misc_feature: 49
cttgccaatccggctccgtcgtccctcctcctccgccggactcagtgaaaacaataaaagaagacatttacatttacatttacattcacagtgcac

SEQ ID NO: 38493 - DNA, 96 bp, Fusarium cuneirostrum
  misc_feature: 49
gtgagtagatgagggagtgcggatgcgcgaccgacagaagtgtgtcgagggtcgagcagacccgagccagaaacgagctcaaaactggaacagttt

SEQ ID NO: 38494 - DNA, 96 bp, Fusarium cuneirostrum
  misc_feature: 49
gtgaggagacgaacagagtgagtttgtattctatccggaggaggagtgaacgagtgagcgatcatctacttacattaattgctggacagcatcttc

SEQ ID NO: 38495 - DNA, 96 bp, Fusarium cuneirostrum
  misc_feature: 49
gacgcaggctgagggattgacaatagactgaactcaagtgaagagttcattgcccaagcaagaactgtgtaaagaattacggaggcgtaagccgac

SEQ ID NO: 38496 - DNA, 96 bp, Fusarium cuneirostrum
  misc_feature: 49
gatttgtagagttgcctgatgtggaagtgatgatgacttcaattacgtagattttagagcgagtactaagtaggtagggagcgaggctgaaaaacc

SEQ ID NO: 38497 - DNA, 96 bp, Fusarium cuneirostrum
  misc_feature: 49
ggtgactcgcttgttcaagctcgagcaggcacaaaagtaaaaaaacagaagcaagttcatgttttgcgcgacagcgctgaagaagtgggcgtccgc

SEQ ID NO: 38498 - DNA, 96 bp, Fusarium cuneirostrum
  misc_feature: 49
ggtccccaccggcctccactcattccattcgttcccgtccttagtcaaccgatcattgcgtcgtccctcctccatgatcctacactcttcgccttc

SEQ ID NO: 38499 - DNA, 96 bp, Fusarium cuneirostrum
  misc_feature: 49
aagtaagaccgggaacgaagggactgagtggaggtcggttttgttggacggacaaatgagagaggtacgaacgttccgtccacaatctcatacccc

SEQ ID NO: 38500 - DNA, 96 bp, Fusarium cuneirostrum
  misc_feature: 49
gggatttatcttgtagcaccgaaggaggttacgacggaggatcttgtgagggaactgcacctctgtatacagagtcatctgaaacagacgaagcgg

SEQ ID NO: 38501 - DNA, 96 bp, Fusarium cuneirostrum
  misc_feature: 49
ctcatccataacctacaggagatagggcgagacaataacatttaaatacacttctttaaacttgtcgagcaccatttccctccctaatggcgagcc

SEQ ID NO: 38502 - DNA, 96 bp, Fusarium cuneirostrum
  misc_feature: 49
cttcatactttatttaatcgagcgagctgtgcatatgtgacattattattattttgaatcgtagtcgtgatcatgtacccaagatagtcctgagcc

SEQ ID NO: 38503 - DNA, 96 bp, Fusarium cuneirostrum
  misc_feature: 49
ctccgggtcatcttacacacagtgacatttcatgtttacgtgaggggattcacagagcgcatctctgttgaattaaagtaacatcacatcgtctcc

SEQ ID NO: 38504 - DNA, 96 bp, Fusarium cuneirostrum
  misc_feature: 49
ggacgcctccaaaatggatgagattgggatgattgctgaccttggtgtgtttgctggtgtagctggtaagtaaacgcctctaaaatggacaagagg

SEQ ID NO: 38505 - DNA, 96 bp, Fusarium cuneirostrum
  misc_feature: 49
ggaatgtgggcgacgaggacggagagtccgagtggggaggccgaaggccgaccggggaaagtgtgtcgagagcgagggggagcccgagcgaaatcg

SEQ ID NO: 38506 - DNA, 96 bp, Fusarium cuneirostrum
  misc_feature: 49
ggaagtataagacggaacgtctgcccctgcgaggacgcagtcgaagacttgagactgtatttatttttttgtgtgagacggagtcgagtctgattt

SEQ ID NO: 38507 - DNA, 96 bp, Fusarium cuneirostrum
  misc_feature: 49
agcagtacttaaagggccgcatggcccgatttgcgacactgtttggtgtcagacaacattcttgtttgtcttattttttggctgaacagcgtgagc

SEQ ID NO: 38508 - DNA, 96 bp, Fusarium cuneirostrum
  misc_feature: 49
ctcttgccaatccggctccgtcgtccctcctcctccgccggactcagtgaaaacaataaaagaagacatttacatttacatttacattcacagtgc

SEQ ID NO: 38509 - DNA, 96 bp, Fusarium cuneirostrum
  misc_feature: 49
cttcttccccattcgctcgctccgctcgtcttacatgggtccccaccggcctccactcattccattcgttcccgtccttagtcaaccgatcattgc

SEQ ID NO: 38510 - DNA, 96 bp, Fusarium cuneirostrum
  misc_feature: 49
gcaacgacctggaatcagagtgagaatctggtacagattgttagcgaccgaagggagctttccagcttatagactaacgcgagtgacccggaacgg

SEQ ID NO: 38511 - DNA, 96 bp, Fusarium cuneirostrum
  misc_feature: 49
cgattcaaaataataataatgtcacatatgcacagctcgctcgattaaataaagtatgaagtggtgctcgtcaaaagtatatttagtgtttgcctc

SEQ ID NO: 38512 - DNA, 96 bp, Fusarium cuneirostrum
  misc_feature: 49
cgaggctgaaaaacctagagcttacagtagggtgagctcccgcacttgtgttacgcgagcatatataaagtagatggtgataacctcaaaagagtc

SEQ ID NO: 38513 - DNA, 96 bp, Fusarium cuneirostrum
  misc_feature: 49
gaccgactgaagtgcgggtggacggaacgttatgaggaggaacgacgaataaggtgcagcgtagcgatccgggcataagtggatactgacgagggg

SEQ ID NO: 38514 - DNA, 96 bp, Fusarium cuneirostrum
  misc_feature: 49
aaagtgacatccccagttttaaccaacgcggtgcgttttggaaaaaaacctcttatagaccaaagttatggacgctcgtttgccccgttccgggtc

SEQ ID NO: 38515 - DNA, 96 bp, Fusarium cuneirostrum
  misc_feature: 49
accctaaccctaaccctaaccctaaccctaaccctaaccctaaccctaaccctatatttttcttttcttttatttcctttattctattttatattc

SEQ ID NO: 38516 - DNA, 96 bp, Fusarium cuneirostrum
  misc_feature: 49
cttcagctacggctttcatacttactaagttgatcttggcagttgtctttaaactggctgagcttaacgtgttattgcgtaggtgcttaggcgttc

SEQ ID NO: 38517 - DNA, 96 bp, Fusarium cuneirostrum
  misc_feature: 49
aaaagtgacttcgttaacagaagtgaccgatttctcggcccattctcaggatttggctcaccaaatgccagaatcgagtccatacaaaaactgttc

SEQ ID NO: 38518 - DNA, 96 bp, Fusarium cuneirostrum
  misc_feature: 49
cttctgtcggtcgcgcatccgcactccctcatctactcacctcgtacacccacttcggtatcatctttcgatgtgcgcattgactgttggtcaatt

SEQ ID NO: 38519 - DNA, 96 bp, Fusarium cuneirostrum
  misc_feature: 49
ctgggctacagtaacacctgctggtgactcgcttgttcaagctcgagcaggcacaaaagtaaaaaaacagaagcaagttcatgttttgcgcgacag

SEQ ID NO: 38520 - DNA, 96 bp, Fusarium cuneirostrum
  misc_feature: 49
ctcaacaaccctttcgggtctctacaaaatcaaaacatttacatctgctgggctccctctcggcacacgcccaagatactgtccacaacctcatct

SEQ ID NO: 38521 - DNA, 96 bp, Fusarium cuneirostrum
  misc_feature: 49
acgcaggctgagggattgacaatagactgaactcaagtgaagagttcattgcccaagcaagaactgtgtaaagaattacggaggcgtaagccgacg

SEQ ID NO: 38522 - DNA, 96 bp, Fusarium cuneirostrum
  misc_feature: 49
attgtttcctgttttggatgttgcgataccttcgttttttagcgagcctttttgctagtcaatggggcgaggcaaacactaaatatacttttgacg

SEQ ID NO: 38523 - DNA, 96 bp, Fusarium cuneirostrum
  misc_feature: 49
acttgaggtcatcatgcactctcatgaagataactgaaccacatcttgtggtgttttagtaacgtcgctacgtgttccttcgtcacactcactccg

SEQ ID NO: 38524 - DNA, 96 bp, Fusarium cuneirostrum
  misc_feature: 49
cgatttgaaagtgaaagtgaaagtgaaagtgaaagtgaaagtgaaagtgaaagtgaaagtgaaagtgaaagtgaaagtgaaagtgaaagtgaaagt

SEQ ID NO: 38525 - DNA, 96 bp, Fusarium cuneirostrum
  misc_feature: 49
cgaaaaaaataaaacaagtcagagttcgcctgctcactcaacctctcgggggaaaagacgctgtcttatactcctcgactctgtctgcggggtatg

SEQ ID NO: 38526 - DNA, 96 bp, Fusarium cuneirostrum
  misc_feature: 49
cctgcgtccttcgtcctcgggattcgggactattccagtgtggatgaaaatgaggccattcacaactccatctacagtaacatcatgctcactaat

SEQ ID NO: 38527 - DNA, 96 bp, Fusarium cuneirostrum
  misc_feature: 49
ccctaaccctaaccctaaccctaaccctaaccctaaccctaaccctatatttttcttttcttttatttcctttattctattttatattcttctctt

SEQ ID NO: 38528 - DNA, 96 bp, Fusarium cuneirostrum
  misc_feature: 49
cattgctgctgaattgttggtaggatacggagctattcccttcttgaatatttctgagccaagacatccttaggtcagcaatcattttgtcgagct

SEQ ID NO: 38529 - DNA, 96 bp, Fusarium cuneirostrum
  misc_feature: 49
cacttcatcttccagatatgtatagacactcacctgttcgtgtttccacggccgtggaataaacagaactgattccagtcgaaatcagactcgact

SEQ ID NO: 38530 - DNA, 96 bp, Fusarium cuneirostrum
  misc_feature: 49
agtcgtctttcaattgcgctggcgcgcgactaggaacagagtgacggtatttcaatcggagatttagtgagacgggcgaacgtggtttattctttt

SEQ ID NO: 38531 - DNA, 96 bp, Fusarium cuneirostrum
  misc_feature: 49
agatggagttgtgaatggcctcattttcatccacactggaatagtcccgaatcccgaggacgaaggacgcagggtgagggattgacaagagtatgt

SEQ ID NO: 38532 - DNA, 96 bp, Fusarium cuneirostrum
  misc_feature: 49
agagagcgagtcgatcttggattcctatgcaagtcgtctttcaattgcgctggcgcgcgactaggaacagagtgacggtatttcaatcggagattt

SEQ ID NO: 38533 - DNA, 96 bp, Fusarium cuneirostrum
  misc_feature: 49
aaaaaggctcgctaaaaaacgaaggtatcgcaacatccaaaacaggaaacaatgtagactaatctaagatacaaaacctccgaaaacgcccagcgt

SEQ ID NO: 38534 - DNA, 96 bp, Fusarium cuneirostrum
  misc_feature: 48
ttttcatccacactggaatagtcccgaatcccgaggacgaaggacgcagggtgagggattgacaagagtatgttggcaacccatgaagagttacga

SEQ ID NO: 38535 - DNA, 96 bp, Fusarium cuneirostrum
  misc_feature: 48
tttggtgatgaatgggtcgatgacgatcttggagatttttagtgtagatagatgcaatgtgaacttggtgagatttgtagagttgcctgatgtgga

SEQ ID NO: 38536 - DNA, 96 bp, Fusarium cuneirostrum
  misc_feature: 48
cctcaccactcgccgtctagctcgtggttctcttttaccactacaataacagttcactcttctcgttcacaaatgcacaatcaattcaaatcacaa

SEQ ID NO: 38537 - DNA, 96 bp, Fusarium cuneirostrum
  misc_feature: 48
ttgctcttgcaaagcgatgaacacagttcaacccgaatgtaaagaaggaaaaaaattgtcggatttccagaaatcctctgtcttgcgacacccttc

SEQ ID NO: 38538 - DNA, 96 bp, Fusarium cuneirostrum
  misc_feature: 48
ttgagtccaatttgaatccgattttgcttgttcctcaccaaaatctcgaaaaatttcacattcgggctcgacacaatctcgcccctctgtcttacg

SEQ ID NO: 38539 - DNA, 96 bp, Fusarium cuneirostrum
  misc_feature: 48
ttagtaacgtcgctacgtgttccttcgtcacactcactccgcacgtcgccctccgggctccgtaggattatacagttccgactcgggcctccggcg

SEQ ID NO: 38540 - DNA, 96 bp, Fusarium cuneirostrum
  misc_feature: 48
ttaaccttataattactaattcttaggttttataatttcttttacgagaattattaattattaatcttaattacctttccgatataattaataagg

SEQ ID NO: 38541 - DNA, 96 bp, Fusarium cuneirostrum
  misc_feature: 48
ttaaaaaaaaaaagaaatattaaaaagaaaagaaaaaagaaaaaagaatcaagaattaaaaataaataaataattaaaagaaaaaaaaaaagatat

SEQ ID NO: 38542 - DNA, 96 bp, Fusarium cuneirostrum
  misc_feature: 48
gttcactcctcctccggatagaatacaaactcactctgttcgtctcctcacgttgttgcggtaaactcgtcctccgtcctcgaaaaaaataaaaca

SEQ ID NO: 38543 - DNA, 96 bp, Fusarium cuneirostrum
  misc_feature: 48
tgcacctccacttgaggtcatcatgcactctcatgaagataactgaaccacatcttgtggtgttttagtaacgtcgctacgtgttccttcgtcaca

SEQ ID NO: 38544 - DNA, 96 bp, Fusarium cuneirostrum
  misc_feature: 48
tgattgattaaattgtaatcgtagatgtgaatgtgaataacttcaaaagtattttcccgaggccgaggacgtaggacgcaggctgagggattgaca

SEQ ID NO: 38545 - DNA, 96 bp, Fusarium cuneirostrum
  misc_feature: 48
cgcacgtcgccctacgggctccgtatttaaaaaaggaatggaagacctctctccgcgaggctcgtaactctttactcgagtttattagatagtcca

SEQ ID NO: 38546 - DNA, 96 bp, Fusarium cuneirostrum
  misc_feature: 48
tgatcatcttttttctactcgacgatggcttcgtcgcacatgaatgaaatggaatgagccgagatgcagggcacgaggacgtatgtggacccggac

SEQ ID NO: 38547 - DNA, 96 bp, Fusarium cuneirostrum
  misc_feature: 48
agtaacacctgctggtgactcgcttgttcaagctcgagcaggcacaaaagtaaaaaaacagaagcaagttcatgttttgcgcgacagcgctgaaga

SEQ ID NO: 38548 - DNA, 96 bp, Fusarium cuneirostrum
  misc_feature: 48
tcgatcacctctcgcaggataccaagtcgatcgtacatctccttcactacttcttccttccgaagatagcttaccgtagaaaagatatgcgtcaga

SEQ ID NO: 38549 - DNA, 96 bp, Fusarium cuneirostrum
  misc_feature: 48
tctctattgatggtggcaaggtacgcagccaggcattttactctgaatattcctttactaacaaggtgtcataggaaaggggagatcgccaattta

SEQ ID NO: 38550 - DNA, 96 bp, Fusarium cuneirostrum
  misc_feature: 48
aagatgtggttcagttatcttcatgagagtgcatgatgacctcaagtggaggtgcatggactgcgaaggcaggatcacatggaatgtgggcgacga

SEQ ID NO: 38551 - DNA, 96 bp, Fusarium cuneirostrum
  misc_feature: 48
gaatgtgggcgacgaggacggagagtccgagtggggaggccgaaggccgaccggggaaagtgtgtcgagagcgagggggagcccgagcgaaatcga

SEQ ID NO: 38552 - DNA, 96 bp, Fusarium cuneirostrum
  misc_feature: 48
agagagttaataatagctaaagaatttatttatctcttttatttctatatcgcgaaaatatatagtatattacttaatattattatagatcgagga

SEQ ID NO: 38553 - DNA, 96 bp, Fusarium cuneirostrum
  misc_feature: 48
tccccacggtcgggtgtgtctgggtcgacgtccgtctccccctcttttatttctcctcgtgcactcacttcagtcgcatcctgcattcatgtttga

SEQ ID NO: 38554 - DNA, 96 bp, Fusarium cuneirostrum
  misc_feature: 48
aagacggaacgtctgcccctgcgaggacgcagtcgaagacttgagactgtatttatttttttgtgtgagacggagtcgagtctgatttcgactgga

SEQ ID NO: 38555 - DNA, 96 bp, Fusarium cuneirostrum
  misc_feature: 48
tcatcttttttctactcgacgatggcttcgtcgcacatgaatgaaatggaatgagccgagatgcagggcacgaggacgtatgtggacccggaccgg

SEQ ID NO: 38556 - DNA, 96 bp, Fusarium cuneirostrum
  misc_feature: 48
agagcagtacttaaagggccgcatggcccgatttgcgacactgtttggtgtcagacaacattcttgtttgtcttattttttggctgaacagcgtga

SEQ ID NO: 38557 - DNA, 96 bp, Fusarium cuneirostrum
  misc_feature: 48
tcacagagcgcatctctgttgaattaaagtaacatcacatcgtctccctgtcggtcgactcgttctgcacctcgccctgacgggcttcggtagaac

SEQ ID NO: 38558 - DNA, 96 bp, Fusarium cuneirostrum
  misc_feature: 48
tcaatagacatccgaggtcacgaggaatgtggatgtagccactcgaatgagggacgaagaagagtggagtaagtaagcacgagaaggaggggaccg

SEQ ID NO: 38559 - DNA, 96 bp, Fusarium cuneirostrum
  misc_feature: 48
tcaagtcctttccctttcactttcactttcactttcactttcactttcactttcactttcactttcactttcactttcactttcactttcactttc

SEQ ID NO: 38560 - DNA, 96 bp, Fusarium cuneirostrum
  misc_feature: 48
cagcctgcgtcctacgtcctcggcctcgggaaaatacttttgaagttattcacattcacatctacgattacaatttaatcaatcactcgcacacta

SEQ ID NO: 38561 - DNA, 96 bp, Fusarium cuneirostrum
  misc_feature: 48
gggtgacgaaggagcccgatgcgaggttacgagaacaccatggatatgtgtgttaccatttcatgtaggagtgcacgacggcttcacgactcagta

SEQ ID NO: 38562 - DNA, 96 bp, Fusarium cuneirostrum
  misc_feature: 48
taagtaagaccgggaacgaagggactgagtggaggtcggttttgttggacggacaaatgagagaggtacgaacgttccgtccacaatctcataccc

SEQ ID NO: 38563 - DNA, 96 bp, Fusarium cuneirostrum
  misc_feature: 48
ctaaccctaaccctaaccctaaccctaaccctaaccctaaccctatatttttcttttcttttatttcctttattctattttatattcttctcttta

SEQ ID NO: 38564 - DNA, 96 bp, Fusarium cuneirostrum
  misc_feature: 48
gctgaaacgggagttggtgatgacttcacttctgccgactccacatactttgctcgccactgtttaatatggggcgaggcaaataaatacgtttta

SEQ ID NO: 38565 - DNA, 96 bp, Fusarium cuneirostrum
  misc_feature: 48
gttcgtacctctctcatttgtccgtccaacaaaaccgacctccactcagtcccttcgttcccggtcttacttactccacttcatactcgtccctcg

SEQ ID NO: 38566 - DNA, 96 bp, Fusarium cuneirostrum
  misc_feature: 48
acgacttttttctacttggcgagcacttaatgatacttgtgatttgtatgtgaccttaaatgaaatgtgatatgaacgtagtcgtagtaagaagac

SEQ ID NO: 38567 - DNA, 96 bp, Fusarium cuneirostrum
  misc_feature: 48
attgacgcagagtcaaacacgacagtgaagaatgacccggagtgtgggtcatgacgtgagtaaagtaggagggagcctgtggggcgaccgtaagac

SEQ ID NO: 38568 - DNA, 96 bp, Fusarium cuneirostrum
  misc_feature: 48
gtcgtgccgtccaccacaaagaaacagccctcctgtttccaagaataatactcgtcccagcctcgtccttactcgaaataaataatcgatcgtcgc

SEQ ID NO: 38569 - DNA, 96 bp, Fusarium cuneirostrum
  misc_feature: 48
gtcgtctttcaattgcgctggcgcgcgactaggaacagagtgacggtatttcaatcggagatttagtgagacgggcgaacgtggtttattcttttg

SEQ ID NO: 38570 - DNA, 96 bp, Fusarium cuneirostrum
  misc_feature: 48
gaagagtttccctcctacatcatctgtctgagctcagagagcgagtcgatcttggattcctatgcaagtcgtctttcaattgcgctggcgcgcgac

SEQ ID NO: 38571 - DNA, 96 bp, Fusarium cuneirostrum
  misc_feature: 48
gtcgatcttggattcctatgcaagtcgtctttcaattgcgctggcgcgcgactaggaacagagtgacggtatttcaatcggagatttagtgagacg

SEQ ID NO: 38572 - DNA, 96 bp, Fusarium cuneirostrum
  misc_feature: 48
catttatatatagcgagcatgttttaatctgatgtgaataacttcaaaagtattttcccgaggccgaggacgtaggacgcaggctgagggattgac

SEQ ID NO: 38573 - DNA, 96 bp, Fusarium cuneirostrum
  misc_feature: 48
gtacaaaaggcgcggagcgcccacctggaaggtcatctgaacttggttcagtttgttgattgaggcagcgccgagacttgacgattaggcaagaat

SEQ ID NO: 38574 - DNA, 96 bp, Fusarium cuneirostrum
  misc_feature: 48
ggtaccatctctattgatggtggcaaggtacgcagccaggcattttactctgaatattcctttactaacaaggtgtcataggaaaggggagatcgc

SEQ ID NO: 38575 - DNA, 96 bp, Fusarium cuneirostrum
  misc_feature: 48
gggattgagtttaggcgtttgcctaacaaagtgcaggaagcacttgaatgtccgatggagtcggatgatatgctattcttgagagcatattactgc

SEQ ID NO: 38576 - DNA, 96 bp, Fusarium cuneirostrum
  misc_feature: 48
acgaacgttccgtccacaatctcataccccgcagacagagtcgaggagtataagacagcgtcttttcccccgagagggcagagggaagagtttccc

SEQ ID NO: 38577 - DNA, 96 bp, Fusarium cuneirostrum
  misc_feature: 48
ggctcggtctctatttcacagttcctgcttggggaagtaactcttccctggcagatgagaagactttgacaatccttccggctgcgtcgttcctcc

SEQ ID NO: 38578 - DNA, 96 bp, Fusarium cuneirostrum
  misc_feature: 48
aaagtggtggctcgctcaatcaatcaagttatgtcacaggttacacaaaatgaggttatcacgatatctacattgggaaaagtctactactacgcc

SEQ ID NO: 38579 - DNA, 96 bp, Fusarium cuneirostrum
  misc_feature: 48
cagaggatttctggaaatccgacaatttttttccttctttacattcgggttgaactgtgttcatcgctttgcaagagcaaacgaacccgtatatcc

SEQ ID NO: 38580 - DNA, 96 bp, Fusarium cuneirostrum
  misc_feature: 48
ctggtgactcgcttgttcaagctcgagcaggcacaaaagtaaaaaaacagaagcaagttcatgttttgcgcgacagcgctgaagaagtgggcgtcc

SEQ ID NO: 38581 - DNA, 96 bp, Fusarium cuneirostrum
  misc_feature: 48
caagtggtattgtagttagtatagacagtgatatgtgagcacaaccgagagagtagtggagcgaacactaaataaaaggctccaacagaagtgagc

SEQ ID NO: 38582 - DNA, 96 bp, Fusarium cuneirostrum
  misc_feature: 48
gcgaggcaaacactaaatatacttttgacgagcaccacttcatactttatttaatcgagcgagctgtgcatatgtgacattattattattttgaat

SEQ ID NO: 38583 - DNA, 96 bp, Fusarium cuneirostrum
  misc_feature: 48
gccccctcgtcagtatccacttatgcccggatcgctacgctgcaccttattcgtcgttcctcctcataacgttccgtccacccgcacttcagtcgg

SEQ ID NO: 38584 - DNA, 96 bp, Fusarium cuneirostrum
  misc_feature: 48
gcacgctacgcgctcggctcgtggactcttttgaggttatcaccatctactttatatatgctcgcgtaacacaagtgcgggagctcaccctactgt

SEQ ID NO: 38585 - DNA, 96 bp, Fusarium cuneirostrum
  misc_feature: 48
agggggggactacgggacacgggacaagctgggacagctcgtggactgagtacagcttccaggcgtagccggttgctgccccagtttttaggcatc

SEQ ID NO: 38586 - DNA, 96 bp, Fusarium cuneirostrum
  misc_feature: 48
gaggtgcagaacgagtcgaccgacagggagacgatgtgatgttactttaattcaacagagatgcgctctgtgaatcccctcacgtaaacatgaaat

SEQ ID NO: 38587 - DNA, 96 bp, Fusarium cuneirostrum
  misc_feature: 48
aaacggcgaagccgtttcttaaccttggtatagggggggactacgggacacgggacagtgagggacgaacgtagtgtcactaaggcgaccgagctc

SEQ ID NO: 38588 - DNA, 96 bp, Fusarium cuneirostrum
  misc_feature: 48
gaaggacgacggaggaggacaggagagcatcggagatgcacatgggcgcagagcgccagagacaatctttgttgtcggatgtaagtaagagcgaag

SEQ ID NO: 38589 - DNA, 96 bp, Fusarium cuneirostrum
  misc_feature: 48
cttacgcacgttcaggtaacccagctgcgtatacagcagcagtctcagtgtacaaagacagaagactcacatccacactgttcgtcttccacgttc

SEQ ID NO: 38590 - DNA, 96 bp, Fusarium cuneirostrum
  misc_feature: 48
agtgcgtgtcattggatgacacttgttctcacaggagttgcggtccccgcagcatggacggaacgttctacgtcccgccataggccaaggtcgttc

SEQ ID NO: 38591 - DNA, 96 bp, Fusarium cuneirostrum
  misc_feature: 48
aaaactggggcagcaaccggctacgcctggaagctgtactcagtccacgagctgtcccagcttgtcccgtgtcccgtagtccccccctataccaag

SEQ ID NO: 38592 - DNA, 96 bp, Fusarium cuneirostrum
  misc_feature: 48
cgcttatatcactaccgaatgagacccggaacgggtcgaaatgaggtggcataactttggtgatataagcggattccgggattgaacttgttcaag

SEQ ID NO: 38593 - DNA, 96 bp, Fusarium cuneirostrum
  misc_feature: 48
aggaaacatctctttctgaaaagaagaaagaagaaagaagaaagaagaaagaagaaagaagaaagaagaaagaagaaagaagaaagaagaaagaag

SEQ ID NO: 38594 - DNA, 96 bp, Fusarium cuneirostrum
  misc_feature: 48
cttcggtatcatctttcgatgtgcgcattgactgttggtcaattgatgatgttatcgtgagcagtgaccttgcgaccttgctcattattataacct

SEQ ID NO: 38595 - DNA, 96 bp, Fusarium cuneirostrum
  misc_feature: 48
cagtaacacctgctggtgactcgcttgttcaagctcgagcaggcacaaaagtaaaaaaacagaagcaagttcatgttttgcgcgacagcgctgaag

SEQ ID NO: 38596 - DNA, 96 bp, Fusarium cuneirostrum
  misc_feature: 48
aggattgtcaaagtcttctcatctgccagggaagagttacttccccaagcaggaactgtgaaatagagaccgagccataaggcgaggtgttgtcag

SEQ ID NO: 38597 - DNA, 96 bp, Fusarium cuneirostrum
  misc_feature: 48
agatgtggttcagttatcttcatgagagtgcatgatgacctcaagtggaggtgcatggactgcgaaggcaggatcacatggaatgtgggcgacgag

SEQ ID NO: 38598 - DNA, 96 bp, Fusarium cuneirostrum
  misc_feature: 48
ctcggactctccgtcctcgtcgcccacattccatgtgatcctgccttcgcagtccatgcacctccacttgaggtcatcatgcactctcatgaagat

SEQ ID NO: 38599 - DNA, 96 bp, Fusarium cuneirostrum
  misc_feature: 48
ctccccacggtcgggtgtgtctgggtcgacgtccgtctccccctcttttatttctcctcgtgcactcacttcagtcgcatcctgcattcatgtttg

SEQ ID NO: 38600 - DNA, 96 bp, Fusarium cuneirostrum
  misc_feature: 48
ccagagggccgacaagaatccatttcaaaatttgtacaaattttgtatgggaagatttctgagattgtatgggcaacgacctggaatcagagtgag

SEQ ID NO: 38601 - DNA, 96 bp, Fusarium cuneirostrum
  misc_feature: 48
cgagtcgatcttggattcctatgcaagtcgtctttcaattgcgctggcgcgcgactaggaacagagtgacggtatttcaatcggagatttagtgag

SEQ ID NO: 38602 - DNA, 96 bp, Fusarium cuneirostrum
  misc_feature: 48
aaaggcgcggagcgcccacctggaaggtcatctgaacttggttcagtttgttgattgaggcagcgccgagacttgacgattaggcaagaatgatag

SEQ ID NO: 38603 - DNA, 96 bp, Fusarium cuneirostrum
  misc_feature: 48
ctacactcttcgccttcgtgcctcaggctccctatttactgggaaggcaatggtgctgcgcacctaaagcctgactcagtccacacgttcgtccct

SEQ ID NO: 38604 - DNA, 96 bp, Fusarium cuneirostrum
  misc_feature: 48
agagcgagtcgatcttggattcctatgcaagtcgtctttcaattgcgctggcgcgcgactaggaacagagtgacggtatttcaatcggagatttag

SEQ ID NO: 38605 - DNA, 96 bp, Fusarium cuneirostrum
  misc_feature: 48
ctaaagtgacatccccagttttaaccaacgcggtgcgttttggaaaaaaacctcttatagaccaaagttatggacgctcgtttgccccgttccggg

SEQ ID NO: 38606 - DNA, 96 bp, Fusarium cuneirostrum
  misc_feature: 48
atcgagtcgctcacaatccgttcgagcgagcgcgtaatgaaacgcgtcagaaaaaaggttgacgccccgggcgccaaaagcactccaagtgcaacg

SEQ ID NO: 38607 - DNA, 96 bp, Fusarium cuneirostrum
  misc_feature: 48
atattagtgagctcccgcatttatatatagcgagcatgttttaatctgatgtgaataacttcaaaagtattttcccgaggccgaggacgtaggacg

SEQ ID NO: 38608 - DNA, 96 bp, Fusarium cuneirostrum
  misc_feature: 48
cgtaggggcgcagggaagactgagggattggcaatagtcattacaccgccggaggcccgagtcggaactgtataatcctacggagcccggagggcg

SEQ ID NO: 38609 - DNA, 96 bp, Fusarium cuneirostrum
  misc_feature: 48
cgggaaaatacttttgaagttattcacattcacatctacgattacaatttaatcaatcactcgcacactaagtcacagtcgctcgcctttaggctt

SEQ ID NO: 38610 - DNA, 96 bp, Fusarium cuneirostrum
  misc_feature: 48
cgatggaccgcatttgcactacgacccctgactgtctgcgagatcaccgaagccgcccttattctcgaatccgaggacctgccattggaagatctt

SEQ ID NO: 38611 - DNA, 96 bp, Fusarium cuneirostrum
  misc_feature: 48
actctgttcgtctcctcacgttgttgcggtaaactcgtcctccgtcctcgaaaaaaataaaacaagtcagagttcgcctgctcactcaacctctcg

SEQ ID NO: 38612 - DNA, 96 bp, Fusarium cuneirostrum
  misc_feature: 48
catctccgatgctctcctgtcctcctccgtcgtccttcctcgcactcgaaccatctcgttcatcactccgtgatacaaaagaataaaccacgttcg

SEQ ID NO: 38613 - DNA, 96 bp, Fusarium cuneirostrum
  misc_feature: 48
cctcggtctcgtactgcacgtcggcttacgcctccgtaattctttacacagttcttgcttgggcaatgaactcttcacttgagttcagtctattgt

SEQ ID NO: 38614 - DNA, 96 bp, Fusarium cuneirostrum
  misc_feature: 48
cctaatggcgagccatcgtgactgattgtaattgtaattgtaattgtagtgttagatggaattgtgacgtagaatgtgaatggaacaggagtggtg

SEQ ID NO: 38615 - DNA, 96 bp, Fusarium cuneirostrum
  misc_feature: 48
catctctattgatggtggcaaggtacgcagccaggcattttactctgaatattcctttactaacaaggtgtcataggaaaggggagatcgccaatt

SEQ ID NO: 38616 - DNA, 96 bp, Fusarium cuneirostrum
  misc_feature: 48
attccatctaacactacaattacaattacaattacaatcagtcacgatggctcgccattagggagggaaatggtgctcgacaagtttaaagaagtg

SEQ ID NO: 38617 - DNA, 96 bp, Fusarium cuneirostrum
  misc_feature: 48
actgtctatactaactacaataccacttgaggtcatcaccattacctattccggtaagtctcacaaagcatcgttggagttactcctccacacttg

SEQ ID NO: 38618 - DNA, 96 bp, Fusarium cuneirostrum
  misc_feature: 48
caagtcgtctttcaattgcgctggcgcgcgactaggaacagagtgacggtatttcaatcggagatttagtgagacgggcgaacgtggtttattctt

SEQ ID NO: 38619 - DNA, 96 bp, Fusarium cuneirostrum
  misc_feature: 48
caaacggcgaagccgtttcttaaccttggtatagggggggactacgggacacgggacagtgagggacgaacgtagtgtcactaaggcgaccgagct

SEQ ID NO: 38620 - DNA, 96 bp, Fusarium cuneirostrum
  misc_feature: 48
agcctcacctttttttgactttgtgactttgagactttgactgtgatgatgactacttgtgagcccttgacataacataagcagggcgaggcaaat

SEQ ID NO: 38621 - DNA, 96 bp, Fusarium cuneirostrum
  misc_feature: 48
actcgtcgagggtgtggacgagtttggtgatgaatgggtcgatgacgatcttggagatttttagtgtagatagatgcaatgtgaacttggtgagat

SEQ ID NO: 38622 - DNA, 96 bp, Fusarium cuneirostrum
  misc_feature: 48
atcgtgactgattgtaattgtaattgtaattgtagtgttagatggaattgtgacgtagaatgtgaatggaacaggagtggtgagagttacaccact

SEQ ID NO: 38623 - DNA, 96 bp, Fusarium cuneirostrum
  misc_feature: 48
atcatctgtctgagctcagagagcgagtcgatcttggattcctatgcaagtcgtctttcaattgcgctggcgcgcgactaggaacagagtgacggt

SEQ ID NO: 38624 - DNA, 96 bp, Fusarium cuneirostrum
  misc_feature: 48
aggagagcatcggagatgcacatgggcgcagagcgccagagacaatctttgttgtcggatgtaagtaagagcgaaggagtgagcgatggactcttt

SEQ ID NO: 38625 - DNA, 96 bp, Fusarium cuneirostrum
  misc_feature: 48
actcatccgctcgggactcatggatgaggaatacatttacagtcaccaacataaacattcacaatctgaaatcatgctcgccaagtgaaaaaaagt

SEQ ID NO: 38626 - DNA, 96 bp, Fusarium cuneirostrum
  misc_feature: 48
aatctcttatagactaacgcgagtgacccggaacggggcaaacgagcgtccataactttggtctataagaggtttttttgacaaacgctgcgcgtt

SEQ ID NO: 38627 - DNA, 96 bp, Fusarium cuneirostrum
  misc_feature: 47
tttctattaatttttatccttaagattatttcttgcggctattttccctagtatataacctatatctataattactttgccgtctaatataatatt

SEQ ID NO: 38628 - DNA, 96 bp, Fusarium cuneirostrum
  misc_feature: 47
gaatctatatctattaactaaattattatgggcttaatattatctaatatatttaattaatatctatttagccggaatattaaagtaaaatctaaa

SEQ ID NO: 38629 - DNA, 96 bp, Fusarium cuneirostrum
  misc_feature: 47
gtgtgatttagttgcctttcttagtagttgtgatagcttcatttatctttatgcgagcacttatctggaaccaacagctcgccgtaatgaatccaa

SEQ ID NO: 38630 - DNA, 96 bp, Fusarium cuneirostrum
  misc_feature: 47
cccttcggtcgcgggaagtctctatacttccttaacatttgtgaccaaattcccactccgttctcacgtttgctcacaccaaacgccagatcgcaa

SEQ ID NO: 38631 - DNA, 96 bp, Fusarium cuneirostrum
  misc_feature: 47
atatagagtagtctagcgtaattaaccgatataaaccaagagtagttctcgttagtattagtctcgccttattaccgtactagctcagtcccataa

SEQ ID NO: 38632 - DNA, 96 bp, Fusarium cuneirostrum
  misc_feature: 47
ttaaaatatcttatagagttcttatttaaaaaagatttttagtattattttagtgatatttatagtattttcgaaaagcctataatagctaataag

SEQ ID NO: 38633 - DNA, 96 bp, Fusarium cuneirostrum
  misc_feature: 47
acgagccggtgggtgagtagtaacggagtaactgtacatcgcaagactcaaaatctaccggattttgggacttttcagaaactggcacagttttaa

SEQ ID NO: 38634 - DNA, 96 bp, Fusarium cuneirostrum
  misc_feature: 47
ctcgccgtctagctcgtggttctcttttaccactacaataacagttcactcttctcgttcacaaatgcacaatcaattcaaatcacaagtcataca

SEQ ID NO: 38635 - DNA, 96 bp, Fusarium cuneirostrum
  misc_feature: 47
aggtttctattacttcttcgatctcgtttcactccatctcttttcatgatctagtgaagttattcgcacttcacctcttcacattatctagcacca

SEQ ID NO: 38636 - DNA, 96 bp, Fusarium cuneirostrum
  misc_feature: 47
tggcccgaatgatgaatgcggattgttgtatgtctaggagacttttctgtggaagtgagatttcccgaacgggagttgggaatagcttcaatgcgt

SEQ ID NO: 38637 - DNA, 96 bp, Fusarium cuneirostrum
  misc_feature: 47
ctcaggtttctattacttcttcgatctcgtttcactccatctcttttcatgatctagtgaagttattcgcacttcacctcttcacattatctagca

SEQ ID NO: 38638 - DNA, 96 bp, Fusarium cuneirostrum
  misc_feature: 47
ctatctattatgcattagcctaaacggggcatactagccttagtagccttattagagagtatcccgattgcctacgtcctctagcttatatcggca

SEQ ID NO: 38639 - DNA, 96 bp, Fusarium cuneirostrum
  misc_feature: 47
tcttgccaatccggctccgtcgtccctcctcctccgccggactcagtgaaaacaataaaagaagacatttacatttacatttacattcacagtgca

SEQ ID NO: 38640 - DNA, 96 bp, Fusarium cuneirostrum
  misc_feature: 47
tgcacgctacgcgctcggctcgtggactcttttgaggttatcaccatctactttatatatgctcgcgtaacacaagtgcgggagctcaccctactg

SEQ ID NO: 38641 - DNA, 96 bp, Fusarium cuneirostrum
  misc_feature: 47
tgatgtggaagtgatgatgacttcaattacgtagattttagagcgagtactaagtaggtagggagcgaggctgaaaaacctagagcttacagtagg

SEQ ID NO: 38642 - DNA, 96 bp, Fusarium cuneirostrum
  misc_feature: 47
ctaactacaataccacttgaggtcatcaccattacctattccggtaagtctcacaaagcatcgttggagttactcctccacacttgacccaactca

SEQ ID NO: 38643 - DNA, 96 bp, Fusarium cuneirostrum
  misc_feature: 47
tgagtgtctatacatatctggaagatgaagtgaaggatgaacgcaatgctaatagcaaacaggagcggagcgactggaatgatcgaacggagagag

SEQ ID NO: 38644 - DNA, 96 bp, Fusarium cuneirostrum
  misc_feature: 47
tgactagcaaaaaggctcgctaaaaaacgaaggtatcgcaacatccaaaacaggaaacaatgtagactaatctaagatacaaaacctccgaaaacg

SEQ ID NO: 38645 - DNA, 96 bp, Fusarium cuneirostrum
  misc_feature: 47
actcgatcacctctcgcaggataccaagtcgatcgtacatctccttcactacttcttccttccgaagatagcttaccgtagaaaagatatgcgtca

SEQ ID NO: 38646 - DNA, 96 bp, Fusarium cuneirostrum
  misc_feature: 47
gcaaccctgactcgatcacctctcgcaggataccaagtcgatcgtacatctccttcactacttcttccttccgaagatagcttaccgtagaaaaga

SEQ ID NO: 38647 - DNA, 96 bp, Fusarium cuneirostrum
  misc_feature: 47
cacgacttttttctacttggcgagcacttaatgatacttgtgatttgtatgtgaccttaaatgaaatgtgatatgaacgtagtcgtagtaagaaga

SEQ ID NO: 38648 - DNA, 96 bp, Fusarium cuneirostrum
  misc_feature: 47
tcttcggtcgattagtatatatgtgtgcccgtctcgtgcacatgtgtccagacacaaatcattatcactcacccgttcgtgatcgctttcgctcta

SEQ ID NO: 38649 - DNA, 96 bp, Fusarium cuneirostrum
  misc_feature: 47
tctcgcggcccaaatgatccacaggcttccgcctgattgggtctccgaccccaccaagtgcgtgtcattggatgacacttgttctcacaggagttg

SEQ ID NO: 38650 - DNA, 96 bp, Fusarium cuneirostrum
  misc_feature: 47
atgcgcgaccgacagaagtgtgtcgagggtcgagcagacccgagccagaaacgagctcaaaactggaacagttttttggtgagttcaatcctgaga

SEQ ID NO: 38651 - DNA, 96 bp, Fusarium cuneirostrum
  misc_feature: 47
acgacgcagcctgaaggattgactagtagagtctcatctgcatgtgaagagttcatctccaagcagagactgtggtctcaataccgagcgaagcga

SEQ ID NO: 38652 - DNA, 96 bp, Fusarium cuneirostrum
  misc_feature: 47
aacagtcaatgcgcacatcgaaagatgataccgaagtgggtgtacgaggtgagtagatgagggagtgcggatgcgcgaccgacagaagtgtgtcga

SEQ ID NO: 38653 - DNA, 96 bp, Fusarium cuneirostrum
  misc_feature: 47
attcggtagtgatataagcgtagcttggtgtctccgccaccaagaaaaagtgacttcgttaacagaagtgaccgatttctcggcccattctcagga

SEQ ID NO: 38654 - DNA, 96 bp, Fusarium cuneirostrum
  misc_feature: 47
tccgggtcatcttacacacagtgacatttcatgtttacgtgaggggattcacagagcgcatctctgttgaattaaagtaacatcacatcgtctccc

SEQ ID NO: 38655 - DNA, 96 bp, Fusarium cuneirostrum
  misc_feature: 47
tcatggcacccacatcgtgccatcctaccttctgccacactctactgagtcgtgaagccgtcgtgcactcctacatgaaatggtaacacacatatc

SEQ ID NO: 38656 - DNA, 96 bp, Fusarium cuneirostrum
  misc_feature: 47
tcatgcgcgacgcgccatcacaactcgactcttcgtctcggtccatatcgtcgccggtccccgtctcccactttcagtctccctcttcggtcgatt

SEQ ID NO: 38657 - DNA, 96 bp, Fusarium cuneirostrum
  misc_feature: 47
tcatctgtctgagctcagagagcgagtcgatcttggattcctatgcaagtcgtctttcaattgcgctggcgcgcgactaggaacagagtgacggta

SEQ ID NO: 38658 - DNA, 96 bp, Fusarium cuneirostrum
  misc_feature: 47
tcaaccgagcggggcgaggggattgagtttaggcgtttgcctaacaaagtgcaggaagcacttgaatgtccgatggagtcggatgatatgctattc

SEQ ID NO: 38659 - DNA, 96 bp, Fusarium cuneirostrum
  misc_feature: 47
tatttttctattagctatttatatattaactattatcgctttatatataaacctctatactactttatcttaagatttagaccctctataattacc

SEQ ID NO: 38660 - DNA, 96 bp, Fusarium cuneirostrum
  misc_feature: 47
tattttaatatctggtttttatttatatttatcttaatctctttttactaatatattatatccgcttcgcgatattataataagtttaattattta

SEQ ID NO: 38661 - DNA, 96 bp, Fusarium cuneirostrum
  misc_feature: 47
aatcagttctgtttattccacggccgtggaaacacgaacaggtgagtgtctatacatatctggaagatgaagtgaaggatgaacgcaatgctaata

SEQ ID NO: 38662 - DNA, 96 bp, Fusarium cuneirostrum
  misc_feature: 47
agtctataaaaatttcagacttgatctactcttttgtgctgctttgccggtcacagtttttgtctgaattctactgatttcagaaagaaataacta

SEQ ID NO: 38663 - DNA, 96 bp, Fusarium cuneirostrum
  misc_feature: 47
tagtcttgcttcctgggcctcacaaacgccatggcttgatatctactgtggagagagggttgggtgggtgtcagtttacttatgtgaggttggatt

SEQ ID NO: 38664 - DNA, 96 bp, Fusarium cuneirostrum
  misc_feature: 47
cagcaattaatgtaagtagatgatcgctcactcgttcactcctcctccggatagaatacaaactcactctgttcgtctcctcacgttgttgcggta

SEQ ID NO: 38665 - DNA, 96 bp, Fusarium cuneirostrum
  misc_feature: 47
tacatccgacaacaaagattgtctctggcgctctgcgcccatgtgcatctccgatgctctcctgtcctcctccgtcgtccttcctcgcactcgaac

SEQ ID NO: 38666 - DNA, 96 bp, Fusarium cuneirostrum
  misc_feature: 47
gtttaatatggggcgaggcaaataaatacgttttaaatagactcgtttgacgagccccaattactattttatgcgagcagacatgactttgatgta

SEQ ID NO: 38667 - DNA, 96 bp, Fusarium cuneirostrum
  misc_feature: 47
tacaattacaattacaatcagtcacgatggctcgccattagggagggaaatggtgctcgacaagtttaaagaagtgtatttaaatgttattgtctc

SEQ ID NO: 38668 - DNA, 96 bp, Fusarium cuneirostrum
  misc_feature: 47
gctcatccgttcgggactcaagtggtgtaactctcaccactcctgttccattcacattctacgtcacaattccatctaacactacaattacaatta

SEQ ID NO: 38669 - DNA, 96 bp, Fusarium cuneirostrum
  misc_feature: 47
taatactaaatcgaggtattataggaatataataagatctataaatactaataagcggatcgatataataggctactatataataattaaatcact

SEQ ID NO: 38670 - DNA, 96 bp, Fusarium cuneirostrum
  misc_feature: 47
ccttacattccccacgcctccgttcattcgctatccagcgatcactccgttattgctcctcattcccagtccatacgtccttcccattcgttatta

SEQ ID NO: 38671 - DNA, 96 bp, Fusarium cuneirostrum
  misc_feature: 47
taagtagatgatcgctcactcgttcactcctcctccggatagaatacaaactcactctgttcgtctcctcacgttgttgcggtaaactcgtcctcc

SEQ ID NO: 38672 - DNA, 96 bp, Fusarium cuneirostrum
  misc_feature: 47
taacataagcagggcgaggcaaataataatttaaataaactcgtttgacgagccctggttattctttttattagattagtgagcatgatgttactg

SEQ ID NO: 38673 - DNA, 96 bp, Fusarium cuneirostrum
  misc_feature: 47
cgttcactcctcctccggatagaatacaaactcactctgttcgtctcctcacgttgttgcggtaaactcgtcctccgtcctcgaaaaaaataaaac

SEQ ID NO: 38674 - DNA, 96 bp, Fusarium cuneirostrum
  misc_feature: 47
gttgatcatcttttttctactcgacgatggcttcgtcgcacatgaatgaaatggaatgagccgagatgcagggcacgaggacgtatgtggacccgg

SEQ ID NO: 38675 - DNA, 96 bp, Fusarium cuneirostrum
  misc_feature: 47
atgcacctccacttgaggtcatcatgcactctcatgaagataactgaaccacatcttgtggtgttttagtaacgtcgctacgtgttccttcgtcac

SEQ ID NO: 38676 - DNA, 96 bp, Fusarium cuneirostrum
  misc_feature: 47
gtgacacaagtgtccctccccagctttgtaatcagctaaagcttgaaaacaaaacctcttatagaccaaagttatggacgctcgtttgccccgttc

SEQ ID NO: 38677 - DNA, 96 bp, Fusarium cuneirostrum
  misc_feature: 47
gtctcagttcatctctgatgaagttatcgccaaccactgtcgggcgcaatcaactcatgtctcatgaggattatagtaacctcattccgtggtcgc

SEQ ID NO: 38678 - DNA, 96 bp, Fusarium cuneirostrum
  misc_feature: 47
ctctaggtttttcagcctcgctccctacctacttagtactcgctctaaaatctacgtaattgaagtcatcatcacttccacatcaggcaactctac

SEQ ID NO: 38679 - DNA, 96 bp, Fusarium cuneirostrum
  misc_feature: 47
gtacggacgaccggagggaggacgtgcggagtgagtgtgacgaaggaacacgtagcgacgttacagacatcacacagagatggtgatgacttcaat

SEQ ID NO: 38680 - DNA, 96 bp, Fusarium cuneirostrum
  misc_feature: 47
ggttcacggcataaaagttgaaaagtgttattttgcatagcgaaaggtgatggtggaaattgtgttgtagcaaaatttgatatgattatggtgatg

SEQ ID NO: 38681 - DNA, 96 bp, Fusarium cuneirostrum
  misc_feature: 47
ggtgaagacactcgtcgagggtgtggacgagtttggtgatgaatgggtcgatgacgatcttggagatttttagtgtagatagatgcaatgtgaact

SEQ ID NO: 38682 - DNA, 96 bp, Fusarium cuneirostrum
  misc_feature: 47
gggtgtggacgagtttggtgatgaatgggtcgatgacgatcttggagatttttagtgtagatagatgcaatgtgaacttggtgagatttgtagagt

SEQ ID NO: 38683 - DNA, 96 bp, Fusarium cuneirostrum
  misc_feature: 47
gggaagagtttccctcctacatcatctgtctgagctcagagagcgagtcgatcttggattcctatgcaagtcgtctttcaattgcgctggcgcgcg

SEQ ID NO: 38684 - DNA, 96 bp, Fusarium cuneirostrum
  misc_feature: 47
aataataatttaaataaactcgtttgacgagccctggttattctttttattagattagtgagcatgatgttactgtagatggagttgtgaatggcc

SEQ ID NO: 38685 - DNA, 96 bp, Fusarium cuneirostrum
  misc_feature: 47
ggatttctggaaatccgacaatttttttccttctttacattcgggttgaactgtgttcatcgctttgcaagagcaaacgaacccgtatatccatat

SEQ ID NO: 38686 - DNA, 96 bp, Fusarium cuneirostrum
  misc_feature: 47
ggattgagtttaggcgtttgcctaacaaagtgcaggaagcacttgaatgtccgatggagtcggatgatatgctattcttgagagcatattactgcg

SEQ ID NO: 38687 - DNA, 96 bp, Fusarium cuneirostrum
  misc_feature: 47
acgtcgccctacgggctccgtatttaaaaaaggaatggaagacctctctccgcgaggctcgtaactctttactcgagtttattagatagtccatcc

SEQ ID NO: 38688 - DNA, 96 bp, Fusarium cuneirostrum
  misc_feature: 47
ggagttgtgaatggcctcattttcatccacactggaatagtcccgaatcccgaggacgaaggacgcagggtgagggattgacaagagtatgttggc

SEQ ID NO: 38689 - DNA, 96 bp, Fusarium cuneirostrum
  misc_feature: 47
ggaaagctcccttcggtcgctaacaatctgtaccagattctcactctgattccaggtcgttgcccatacaatctcagaaatcttcccatacaaaat

SEQ ID NO: 38690 - DNA, 96 bp, Fusarium cuneirostrum
  misc_feature: 47
gctcggtctctatttcacagttcctgcttggggaagtaactcttccctggcagatgagaagactttgacaatccttccggctgcgtcgttcctcct

SEQ ID NO: 38691 - DNA, 96 bp, Fusarium cuneirostrum
  misc_feature: 47
gactagcaaaaaggctcgctaaaaaacgaaggtatcgcaacatccaaaacaggaaacaatgtagactaatctaagatacaaaacctccgaaaacgc

SEQ ID NO: 38692 - DNA, 96 bp, Fusarium cuneirostrum
  misc_feature: 47
cctcacgttgttgcggtaaactcgtcctccgtcctcgaaaaaaataaaacaagtcagagttcgcctgctcactcaacctctcgggggaaaagacgc

SEQ ID NO: 38693 - DNA, 96 bp, Fusarium cuneirostrum
  misc_feature: 47
acagaggatttctggaaatccgacaatttttttccttctttacattcgggttgaactgtgttcatcgctttgcaagagcaaacgaacccgtatatc

SEQ ID NO: 38694 - DNA, 96 bp, Fusarium cuneirostrum
  misc_feature: 47
gagtgtatccatgcagatattgctggacctttcccggaagtgggagtagacgggggccagtactgggcctgcttcattgaagacttcactcaaatg

SEQ ID NO: 38695 - DNA, 96 bp, Fusarium cuneirostrum
  misc_feature: 47
accggcctccactcattccattcgttcccgtccttagtcaaccgatcattgcgtcgtccctcctccatgatcctacactcttcgccttcgtgcctc

SEQ ID NO: 38696 - DNA, 96 bp, Fusarium cuneirostrum
  misc_feature: 47
gagcacaaccgagagagtagtggagcgaacactaaataaaaggctccaacagaagtgagcgacacgtaattgtgatgttgtgcgtataaatggtat

SEQ ID NO: 38697 - DNA, 96 bp, Fusarium cuneirostrum
  misc_feature: 47
aaacagtggcgagcaaagtatgtggagtcggcagaagtgaagtcatcaccaactcccgtttcagcatagtcgggaaaacggtcccgttacatagtc

SEQ ID NO: 38698 - DNA, 96 bp, Fusarium cuneirostrum
  misc_feature: 47
catcttccagatatgtatagacactcacctgttcgtgtttccacggccgtggaataaacagaactgattccagtcgaaatcagactcgactccgtc

SEQ ID NO: 38699 - DNA, 96 bp, Fusarium cuneirostrum
  misc_feature: 47
gaagtataagacggaacgtctgcccctgcgaggacgcagtcgaagacttgagactgtatttatttttttgtgtgagacggagtcgagtctgatttc

SEQ ID NO: 38700 - DNA, 96 bp, Fusarium cuneirostrum
  misc_feature: 47
gaaagctccaggctcattggctagcagtgcgtgccgccgactgctaagcagatcaagattttatccaacgctgcaattagcttgctgtttggtaat

SEQ ID NO: 38701 - DNA, 96 bp, Fusarium cuneirostrum
  misc_feature: 47
cttcgtcacactcactccgcacgtcctccctccggtcgtccgtactaaggatatagtcatagactcggccctccgcgggcgctcgtaactcttcat

SEQ ID NO: 38702 - DNA, 96 bp, Fusarium cuneirostrum
  misc_feature: 47
ctgatgtggaagtgatgatgacttcaattacgtagattttagagcgagtactaagtaggtagggagcgaggctgaaaaacctagagcttacagtag

SEQ ID NO: 38703 - DNA, 96 bp, Fusarium cuneirostrum
  misc_feature: 47
ctcttcggtcgattagtatatatgtgtgcccgtctcgtgcacatgtgtccagacacaaatcattatcactcacccgttcgtgatcgctttcgctct

SEQ ID NO: 38704 - DNA, 96 bp, Fusarium cuneirostrum
  misc_feature: 47
ctaatcgaccgaagagggagactgaaagtgggagacggggaccggcgacgatatggaccgagacgaagagtcgagttgtgatggcgcgtcgcgcat

SEQ ID NO: 38705 - DNA, 96 bp, Fusarium cuneirostrum
  misc_feature: 47
cgtgacacaagtgtccctccccagctttgtaatcagctaaagcttgaaaacaaaacctcttatagaccaaagttatggacgctcgtttgccccgtt

SEQ ID NO: 38706 - DNA, 96 bp, Fusarium cuneirostrum
  misc_feature: 47
cgtctcagttcatctctgatgaagttatcgccaaccactgtcgggcgcaatcaactcatgtctcatgaggattatagtaacctcattccgtggtcg

SEQ ID NO: 38707 - DNA, 96 bp, Fusarium cuneirostrum
  misc_feature: 47
cggcttacgcctccgtaattctttacacagttcttgcttgggcaatgaactcttcacttgagttcagtctattgtcaatccctcagcctgcgtcct

SEQ ID NO: 38708 - DNA, 96 bp, Fusarium cuneirostrum
  misc_feature: 47
cagacagagtcgaggagtataagacagcgtcttttcccccgagagggcagagggaagagtttccctcctacatcatctgtctgagctcagagagcg

SEQ ID NO: 38709 - DNA, 96 bp, Fusarium cuneirostrum
  misc_feature: 47
cctcttgatcaaccttcgcatggctcaggtttctattacttcttcgatctcgtttcactccatctcttttcatgatctagtgaagttattcgcact

SEQ ID NO: 38710 - DNA, 96 bp, Fusarium cuneirostrum
  misc_feature: 47
cctctgttgccttaaaaatgcaccccacgtctcgtggatgtgacgcgtcgcgttgttgttaggaaacaaacagaatgaaatctccgatttacaatg

SEQ ID NO: 38711 - DNA, 96 bp, Fusarium cuneirostrum
  misc_feature: 47
attctttttattagattagtgagcatgatgttactgtagatggagttgtgaatggcctcattttcatccacactggaatagtcccgaatcccgagg

SEQ ID NO: 38712 - DNA, 96 bp, Fusarium cuneirostrum
  misc_feature: 47
cctaaccctaaccctaaccctaaccctaaccctaaccctaaccctaaccctatatttttcttttcttttatttcctttattctattttatattctt

SEQ ID NO: 38713 - DNA, 96 bp, Fusarium cuneirostrum
  misc_feature: 47
ccgcgacctggcgggaggtttccacagctcaagggatataccaaggaggaaggaataacctgatccatcaccttagtcgttcatcagtcactactt

SEQ ID NO: 38714 - DNA, 96 bp, Fusarium cuneirostrum
  misc_feature: 47
cagcagtcgaatagagcccagagggcgaacgatctaaacaccaggtagtggtggattgtggtgtggaacacgtttggtgagagagtcaccaactat

SEQ ID NO: 38715 - DNA, 96 bp, Fusarium cuneirostrum
  misc_feature: 47
cactcactccgcacgtcgccctccgggctccgtaggattatacagttccgactcgggcctccggcggtgtaatgactattgccaatccctcagtct

SEQ ID NO: 38716 - DNA, 96 bp, Fusarium cuneirostrum
  misc_feature: 47
aaaatacttttgaagttattcacatcagattaaaacatgctcgctatatataaatgcgggagctcactaatatgtgtgccctttttagtttatgtg

SEQ ID NO: 38717 - DNA, 96 bp, Fusarium cuneirostrum
  misc_feature: 47
cacagagcgcatctctgttgaattaaagtaacatcacatcgtctccctgtcggtcgactcgttctgcacctcgccctgacgggcttcggtagaact

SEQ ID NO: 38718 - DNA, 96 bp, Fusarium cuneirostrum
  misc_feature: 47
caacgtgaggagacgaacagagtgagtttgtattctatccggaggaggagtgaacgagtgagcgatcatctacttacattaattgctggacagcat

SEQ ID NO: 38719 - DNA, 96 bp, Fusarium cuneirostrum
  misc_feature: 47
actccgcacgtcctccctccggtcgtccgtactaaggatatagtcatagactcggccctccgcgggcgctcgtaactcttcatgggttgccaacat

SEQ ID NO: 38720 - DNA, 96 bp, Fusarium cuneirostrum
  misc_feature: 47
atgatgactacttgtgagcccttgacataacataagcagggcgaggcaaataataatttaaataaactcgtttgacgagccctggttattcttttt

SEQ ID NO: 38721 - DNA, 96 bp, Fusarium cuneirostrum
  misc_feature: 47
atcttccagatatgtatagacactcacctgttcgtgtttccacggccgtggaataaacagaactgattccagtcgaaatcagactcgactccgtct

SEQ ID NO: 38722 - DNA, 96 bp, Fusarium cuneirostrum
  misc_feature: 47
atctctattgatggtggcaaggtacgcagccaggcattttactctgaatattcctttactaacaaggtgtcataggaaaggggagatcgccaattt

SEQ ID NO: 38723 - DNA, 96 bp, Fusarium cuneirostrum
  misc_feature: 47
ataaagtagatggtgataacctcaaaagagtccacgagccgagcgcgtagcgtgcaggcgaggggattgtcaatgtaatttattcagggaataatt

SEQ ID NO: 38724 - DNA, 96 bp, Fusarium cuneirostrum
  misc_feature: 47
acgattcaaaataataataatgtcacatatgcacagctcgctcgattaaataaagtatgaagtggtgctcgtcaaaagtatatttagtgtttgcct

SEQ ID NO: 38725 - DNA, 96 bp, Fusarium cuneirostrum
  misc_feature: 47
agctcggatacatgaggctcaaggattaggcgggaacaaagaggaattggaaatggggaccattcgttcatttgtagaggatctcgacctgtatct

SEQ ID NO: 38726 - DNA, 96 bp, Fusarium cuneirostrum
  misc_feature: 47
accttataatatagctagcatatttcctaacttatattccactacttaagttaccgtatttagctacttcttctatttagcgctatagctaatctt

SEQ ID NO: 38727 - DNA, 96 bp, Fusarium cuneirostrum
  misc_feature: 47
acaatcgctacacgattcccacctcaatctcgcgatttcgcccgccattctcagtttcgttcacatacaaaaagtatgtcgatttgagtccaattt

SEQ ID NO: 38728 - DNA, 96 bp, Fusarium cuneirostrum
  misc_feature: 47
aaagctcccttcggtcgctaacaatctgtaccagattctcactctgattccaggtcgttgcccatacaatctcagaaatcttcccatacaaaattt

SEQ ID NO: 38729 - DNA, 96 bp, Fusarium cuneirostrum
  misc_feature: 46
ctcactcatccgctcgggactcatggatgaggaatacatttacagtcaccaacataaacattcacaatctgaaatcatgctcgccaagtgaaaaaa

SEQ ID NO: 38730 - DNA, 96 bp, Fusarium cuneirostrum
  misc_feature: 46
gttctgtttattccacggccgtggaaacacgaacaggtgagtgtctatacatatctggaagatgaagtgaaggatgaacgcaatgctaatagcaaa

SEQ ID NO: 38731 - DNA, 96 bp, Fusarium cuneirostrum
  misc_feature: 46
cgaggtgcagaacgagtcgaccgacagggagacgatgtgatgttactttaattcaacagagatgcgctctgtgaatcccctcacgtaaacatgaaa

SEQ ID NO: 38732 - DNA, 96 bp, Fusarium cuneirostrum
  misc_feature: 46
gcgaacactaaataaaaggctccaacagaagtgagcgacacgtaattgtgatgttgtgcgtataaatggtatcgtgaatgtgtttgtgattgtaaa

SEQ ID NO: 38733 - DNA, 96 bp, Fusarium cuneirostrum
  misc_feature: 46
actaatctaataaaaagaataaccagggctcgtcaaacgagtttatttaaattattatttgcctcgccctgcttatgttatgtcaagggctcacaa

SEQ ID NO: 38734 - DNA, 96 bp, Fusarium cuneirostrum
  misc_feature: 46
ctcaaggtatctacgattgacaatccctctcgcacaccgtcgcatgcgctcctcctgctacgggactattatggtgtgggttgaagctattcgcaa

SEQ ID NO: 38735 - DNA, 96 bp, Fusarium cuneirostrum
  misc_feature: 46
ttgattaaattgtaatcgtagatgtgaatgtgaataacttcaaaagtattttcccgaggccgaggacgtaggacgcaggctgagggattgacaata

SEQ ID NO: 38736 - DNA, 96 bp, Fusarium cuneirostrum
  misc_feature: 46
ttgacaagagtatgttggcaacccatgaagagttacgagcgcccgcggagggccgagtctatgactatatccttagtacggacgaccggagggagg

SEQ ID NO: 38737 - DNA, 96 bp, Fusarium cuneirostrum
  misc_feature: 46
acgcttatatcactaccgaatgagacccggaacgggtcgaaatgaggtggcataactttggtgatataagcggattccgggattgaacttgttcaa

SEQ ID NO: 38738 - DNA, 96 bp, Fusarium cuneirostrum
  misc_feature: 46
ttcgccttcgtgcctcaggctccctatttactgggaaggcaatggtgctgcgcacctaaagcctgactcagtccacacgttcgtccctcactgtcc

SEQ ID NO: 38739 - DNA, 96 bp, Fusarium cuneirostrum
  misc_feature: 46
gcgaggtgcagaacgagtcgaccgacagggagacgatgtgatgttactttaattcaacagagatgcgctctgtgaatcccctcacgtaaacatgaa

SEQ ID NO: 38740 - DNA, 96 bp, Fusarium cuneirostrum
  misc_feature: 46
atagacactcacctgttcgtgtttccacggccgtggaataaacagaactgattccagtcgaaatcagactcgactccgtctcacacaaaaaaataa

SEQ ID NO: 38741 - DNA, 96 bp, Fusarium cuneirostrum
  misc_feature: 46
atataatttaaaatcccatataaattaaaatagcgctaaaaattataggagggtaatataatttaaaataaggggggcaatattataaagaactaa

SEQ ID NO: 38742 - DNA, 96 bp, Fusarium cuneirostrum
  misc_feature: 46
ggaatcagttctgtttattccacggccgtggaaacacgaacaggtgagtgtctatacatatctggaagatgaagtgaaggatgaacgcaatgctaa

SEQ ID NO: 38743 - DNA, 96 bp, Fusarium cuneirostrum
  misc_feature: 46
ttacactctctcgtcgatgcatacgcattgaagatattcccaacatgccgtcgggtcagattaactcaactgtcgtgagttcttgtaacctcgcat

SEQ ID NO: 38744 - DNA, 96 bp, Fusarium cuneirostrum
  misc_feature: 46
ttaaatgaaatgtgatatgaacgtagtcgtagtaagaagacatgggaatggcttcatccataaatgagtcctgagggcgaggaggaacgacgcagc

SEQ ID NO: 38745 - DNA, 96 bp, Fusarium cuneirostrum
  misc_feature: 46
ctacgattgccaatccctcagtcttccttcgctacgctcactcatccgctcgggactcatggatgaggaatacatttacagtcaccaacataaaca

SEQ ID NO: 38746 - DNA, 96 bp, Fusarium cuneirostrum
  misc_feature: 46
ggttatctacgattgccaatccctcagtcttccttcgctacgctcactcatccgctcgggactcatggatgaggaatacatttacagtcaccaaca

SEQ ID NO: 38747 - DNA, 96 bp, Fusarium cuneirostrum
  misc_feature: 46
gagggacgaacccgtcgcgaggttataataatgagcaaggtcgcaaggtcactgctcacgataacatcatcaattgaccaacagtcaatgcgcaca

SEQ ID NO: 38748 - DNA, 96 bp, Fusarium cuneirostrum
  misc_feature: 46
cactaatctaataaaaagaataaccagggctcgtcaaacgagtttatttaaattattatttgcctcgccctgcttatgttatgtcaagggctcaca

SEQ ID NO: 38749 - DNA, 96 bp, Fusarium cuneirostrum
  misc_feature: 46
tgtgaatgtgaataacttcaaaagtattttcccgaggccgaggacgtaggacgcaggctgagggattgacaatagactgaactcaagtgaagagtt

SEQ ID NO: 38750 - DNA, 96 bp, Fusarium cuneirostrum
  misc_feature: 46
tgtagttagtatagacagtgatatgtgagcacaaccgagagagtagtggagcgaacactaaataaaaggctccaacagaagtgagcgacacgtaat

SEQ ID NO: 38751 - DNA, 96 bp, Fusarium cuneirostrum
  misc_feature: 46
tgggtcgatgacgatcttggagatttttagtgtagatagatgcaatgtgaacttggtgagatttgtagagttgcctgatgtggaagtgatgatgac

SEQ ID NO: 38752 - DNA, 96 bp, Fusarium cuneirostrum
  misc_feature: 46
tcatccataacctacaggagatagggcgagacaataacatttaaatacacttctttaaacttgtcgagcaccatttccctccctaatggcgagcca

SEQ ID NO: 38753 - DNA, 96 bp, Fusarium cuneirostrum
  misc_feature: 46
aaatgatccacaggcttccgcctgattgggtctccgaccccaccaagtgcgtgtcattggatgacacttgttctcacaggagttgcggtccccgca

SEQ ID NO: 38754 - DNA, 96 bp, Fusarium cuneirostrum
  misc_feature: 46
tgcaatgtgaacttggtgagatttgtagagttgcctgatgtggaagtgatgatgacttcaattacgtagattttagagcgagtactaagtaggtag

SEQ ID NO: 38755 - DNA, 96 bp, Fusarium cuneirostrum
  misc_feature: 46
cctacaagaagggtgtcgcaagacagaggatttctggaaatccgacaatttttttccttctttacattcgggttgaactgtgttcatcgctttgca

SEQ ID NO: 38756 - DNA, 96 bp, Fusarium cuneirostrum
  misc_feature: 46
ccgcagacagagtcgaggagtataagacagcgtcttttcccccgagagggcagagggaagagtttccctcctacatcatctgtctgagctcagaga

SEQ ID NO: 38757 - DNA, 96 bp, Fusarium cuneirostrum
  misc_feature: 46
tctcagttcatctctgatgaagttatcgccaaccactgtcgggcgcaatcaactcatgtctcatgaggattatagtaacctcattccgtggtcgct

SEQ ID NO: 38758 - DNA, 96 bp, Fusarium cuneirostrum
  misc_feature: 46
caatagacatccgaggtcacgaggaatgtggatgtagccactcgaatgagggacgaagaagagtggagtaagtaagcacgagaaggaggggaccga

SEQ ID NO: 38759 - DNA, 96 bp, Fusarium cuneirostrum
  misc_feature: 46
cctctgggctacagtaacacctgctggtgactcgcttgttcaagctcgagcaggcacaaaagtaaaaaaacagaagcaagttcatgttttgcgcga

SEQ ID NO: 38760 - DNA, 96 bp, Fusarium cuneirostrum
  misc_feature: 46
gtaggggcgcagggaagactgagggattggcaatagtcattacaccgccggaggcccgagtcggaactgtataatcctacggagcccggagggcga

SEQ ID NO: 38761 - DNA, 96 bp, Fusarium cuneirostrum
  misc_feature: 46
tcctcgactctgtctgcggggtatgagattgtggacggaacgttcgtacctctctcatttgtccgtccaacaaaaccgacctccactcagtccctt

SEQ ID NO: 38762 - DNA, 96 bp, Fusarium cuneirostrum
  misc_feature: 46
aagatagtcctgagcccgagcgcgtagcgtgcagggtgaaggattgacagtagtctcctcatctgcatatgaagaatgataagctcccgcagggga

SEQ ID NO: 38763 - DNA, 96 bp, Fusarium cuneirostrum
  misc_feature: 46
tcccacattctcctagtctattagaatttaaattgtcaagatcgtcttattcactgctcagctaccgaactagaagcgtctatatcatctctcgct

SEQ ID NO: 38764 - DNA, 96 bp, Fusarium cuneirostrum
  misc_feature: 46
agagcatcggagatgcacatgggcgcagagcgccagagacaatctttgttgtcggatgtaagtaagagcgaaggagtgagcgatggactctttgga

SEQ ID NO: 38765 - DNA, 96 bp, Fusarium cuneirostrum
  misc_feature: 46
taactcacgcaagatgcgttgtaatcacagtttgtgatggcctcaattgacagtagtcaaacacgagagtgggatgcgacgaatgtggagtcatga

SEQ ID NO: 38766 - DNA, 96 bp, Fusarium cuneirostrum
  misc_feature: 46
ggatgcgcgaccgacagaagtgtgtcgagggtcgagcagacccgagccagaaacgagctcaaaactggaacagttttttggtgagttcaatcctga

SEQ ID NO: 38767 - DNA, 96 bp, Fusarium cuneirostrum
  misc_feature: 46
tcacttcgtgctcgctacgctctcactccgttccgcaccttcgcttcgctcggtattgagaccacagtctctgcttggagatgaactcttcacatg

SEQ ID NO: 38768 - DNA, 96 bp, Fusarium cuneirostrum
  misc_feature: 46
tcacgactacgattcaaaataataataatgtcacatatgcacagctcgctcgattaaataaagtatgaagtggtgctcgtcaaaagtatatttagt

SEQ ID NO: 38769 - DNA, 96 bp, Fusarium cuneirostrum
  misc_feature: 46
ctaatggcgagccatcgtgactgattgtaattgtaattgtaattgtagtgttagatggaattgtgacgtagaatgtgaatggaacaggagtggtga

SEQ ID NO: 38770 - DNA, 96 bp, Fusarium cuneirostrum
  misc_feature: 46
agtgattgattaaattgtaatcgtagatgtgaatgtgaataacttcaaaagtattttcccgaggccgaggacgtaggacgcaggctgagggattga

SEQ ID NO: 38771 - DNA, 96 bp, Fusarium cuneirostrum
  misc_feature: 46
tcaatccctcaccctgcgtccttcgtcctcgggattcgggactattccagtgtggatgaaaatgaggccattcacaactccatctacagtaacatc

SEQ ID NO: 38772 - DNA, 96 bp, Fusarium cuneirostrum
  misc_feature: 46
ctcacttctgttggagccttttatttagtgttcgctccactactctctcggttgtgctcacatatcactgtctatactaactacaataccacttga

SEQ ID NO: 38773 - DNA, 96 bp, Fusarium cuneirostrum
  misc_feature: 46
tcaacaaccctttcgggtctctacaaaatcaaaacatttacatctgctgggctccctctcggcacacgcccaagatactgtccacaacctcatcta

SEQ ID NO: 38774 - DNA, 96 bp, Fusarium cuneirostrum
  misc_feature: 46
aatatagagtagtctagcgtaattaaccgatataaaccaagagtagttctcgttagtattagtctcgccttattaccgtactagctcagtcccata

SEQ ID NO: 38775 - DNA, 96 bp, Fusarium cuneirostrum
  misc_feature: 46
taaaaacgccgtcggcgcggttcgtgatcaattccggaatcgtcgatgatgttcgtccacggaacaaagagagcttatcttgcacgaaagttgata

SEQ ID NO: 38776 - DNA, 96 bp, Fusarium cuneirostrum
  misc_feature: 46
actcgctctaaaatctacgtaattgaagtcatcatcacttccacatcaggcaactctacaaatctcaccaagttcacattgcatctatctacacta

SEQ ID NO: 38777 - DNA, 96 bp, Fusarium cuneirostrum
  misc_feature: 46
gcttatcatgtacgttactaggaattaaatctagattatttggtttacgagttagaaattctattattaaactatatagcttatttctctcgacta

SEQ ID NO: 38778 - DNA, 96 bp, Fusarium cuneirostrum
  misc_feature: 46
tagaaacttaattaatatcattagaaaataggtcaatatatttataagctatattaattaatattaaaatacgcgattagcctatacctaacttat

SEQ ID NO: 38779 - DNA, 96 bp, Fusarium cuneirostrum
  misc_feature: 46
cttttggttttgttttagtcttgtcggaagacatgaagatgcgaccggagagagcactggtttccctgccttgttgggcagatcgcggagcgagta

SEQ ID NO: 38780 - DNA, 96 bp, Fusarium cuneirostrum
  misc_feature: 46
agtgatatgtgagcacaaccgagagagtagtggagcgaacactaaataaaaggctccaacagaagtgagcgacacgtaattgtgatgttgtgcgta

SEQ ID NO: 38781 - DNA, 96 bp, Fusarium cuneirostrum
  misc_feature: 46
cctacgctccgcacgtcgccctacgggctccgtatttaaaaaaggaatggaagacctctctccgcgaggctcgtaactctttactcgagtttatta

SEQ ID NO: 38782 - DNA, 96 bp, Fusarium cuneirostrum
  misc_feature: 46
taagtatagctagttctcgcttactaataattactaccttatttaatctctgtcgttatattgatcgcatatatattacttgctcgtcctaattac

SEQ ID NO: 38783 - DNA, 96 bp, Fusarium cuneirostrum
  misc_feature: 46
gcgagccatcgtgactgattgtaattgtaattgtaattgtagtgttagatggaattgtgacgtagaatgtgaatggaacaggagtggtgagagtta

SEQ ID NO: 38784 - DNA, 96 bp, Fusarium cuneirostrum
  misc_feature: 46
taaatgaaatgtgatatgaacgtagtcgtagtaagaagacatgggaatggcttcatccataaatgagtcctgagggcgaggaggaacgacgcagcc

SEQ ID NO: 38785 - DNA, 96 bp, Fusarium cuneirostrum
  misc_feature: 46
agatttgtagagttgcctgatgtggaagtgatgatgacttcaattacgtagattttagagcgagtactaagtaggtagggagcgaggctgaaaaac

SEQ ID NO: 38786 - DNA, 96 bp, Fusarium cuneirostrum
  misc_feature: 46
gtttcctgttttggatgttgcgataccttcgttttttagcgagcctttttgctagtcaatggggcgaggcaaacactaaatatacttttgacgagc

SEQ ID NO: 38787 - DNA, 96 bp, Fusarium cuneirostrum
  misc_feature: 46
gggcaacgacctggaatcagagtgagaatctggtacagattgttagcgaccgaagggagctttccagcttatagactaacgcgagtgacccggaac

SEQ ID NO: 38788 - DNA, 96 bp, Fusarium cuneirostrum
  misc_feature: 46
gttacacaaaatgaggttatcacgatatctacattgggaaaagtctactactacgccgactcaatctcttccaataccttccggaaacgaactctc

SEQ ID NO: 38789 - DNA, 96 bp, Fusarium cuneirostrum
  misc_feature: 46
ctaatactaaatcgaggtattataggaatataataagatctataaatactaataagcggatcgatataataggctactatataataattaaatcac

SEQ ID NO: 38790 - DNA, 96 bp, Fusarium cuneirostrum
  misc_feature: 46
gtcctttccctttcactttcactttcactttcactttcactttcactttcactttcactttcactttcactttcactttcactttcactttcactt

SEQ ID NO: 38791 - DNA, 96 bp, Fusarium cuneirostrum
  misc_feature: 46
gtccagcaattaatgtaagtagatgatcgctcactcgttcactcctcctccggatagaatacaaactcactctgttcgtctcctcacgttgttgcg

SEQ ID NO: 38792 - DNA, 96 bp, Fusarium cuneirostrum
  misc_feature: 46
gtcaaccgagcggggcgaggggattgagtttaggcgtttgcctaacaaagtgcaggaagcacttgaatgtccgatggagtcggatgatatgctatt

SEQ ID NO: 38793 - DNA, 96 bp, Fusarium cuneirostrum
  misc_feature: 46
gaatccaagatcgactcgctctctgagctcagacagatgatgtaggagggaaactcttccctctgccctctcgggggaaaagacgctgtcttatac

SEQ ID NO: 38794 - DNA, 96 bp, Fusarium cuneirostrum
  misc_feature: 46
ataacgctcccgcaaccctgactcgatcacctctcgcaggataccaagtcgatcgtacatctccttcactacttcttccttccgaagatagcttac

SEQ ID NO: 38795 - DNA, 96 bp, Fusarium cuneirostrum
  misc_feature: 46
agagttcgtttccggaaggtattggaagagattgagtcggcgtagtagtagacttttcccaatgtagatatcgtgataacctcattttgtgtaacc

SEQ ID NO: 38796 - DNA, 96 bp, Fusarium cuneirostrum
  misc_feature: 46
ggtcggttttgttggacggacaaatgagagaggtacgaacgttccgtccacaatctcataccccgcagacagagtcgaggagtataagacagcgtc

SEQ ID NO: 38797 - DNA, 96 bp, Fusarium cuneirostrum
  misc_feature: 46
atctcgaaaaatttcacattcgggctcgacacaatctcgcccctctgtcttacggtcgccccacaggctccctcctactttactcacgtcatgacc

SEQ ID NO: 38798 - DNA, 96 bp, Fusarium cuneirostrum
  misc_feature: 46
gggactacgggacacgggacagtgaagaatgaacgtgtgtacccaggagtaatcgtcttgagtcagcttgctgaccttgacgaccccagtcaatag

SEQ ID NO: 38799 - DNA, 96 bp, Fusarium cuneirostrum
  misc_feature: 46
caaaatgaggttatcacgatatctacattgggaaaagtctactactacgccgactcaatctcttccaataccttccggaaacgaactctcctatcc

SEQ ID NO: 38800 - DNA, 96 bp, Fusarium cuneirostrum
  misc_feature: 46
gctccgctcggggtagaattatacagtcatggactcggccctgcgggcagctgcactactcttgccaatccggctccgtcgtccctcctcctccgc

SEQ ID NO: 38801 - DNA, 96 bp, Fusarium cuneirostrum
  misc_feature: 46
cggtatcatctttcgatgtgcgcattgactgttggtcaattgatgatgttatcgtgagcagtgaccttgcgaccttgctcattattataacctcgc

SEQ ID NO: 38802 - DNA, 96 bp, Fusarium cuneirostrum
  misc_feature: 46
gcagttccaagagtgctgcattgagtccacatccacacatcaaggcgtcagcgtcttgaatgaaatccatccacttcatctaatggcatcgatttc

SEQ ID NO: 38803 - DNA, 96 bp, Fusarium cuneirostrum
  misc_feature: 46
gcacgtcggcttacgcctccgtaattctttacacagttcttgcttgggcaatgaactcttcacttgagttcagtctattgtcaatccctcagcctg

SEQ ID NO: 38804 - DNA, 96 bp, Fusarium cuneirostrum
  misc_feature: 46
ctcgcggcccaaatgatccacaggcttccgcctgattgggtctccgaccccaccaagtgcgtgtcattggatgacacttgttctcacaggagttgc

SEQ ID NO: 38805 - DNA, 96 bp, Fusarium cuneirostrum
  misc_feature: 46
aacaaacactccaagatcagctatcatcgccatctcatccatcttagaggcgttcacttacaaactacatcagtaaacacactaaggtcagcaatc

SEQ ID NO: 38806 - DNA, 96 bp, Fusarium cuneirostrum
  misc_feature: 46
gattccctcgtgccccgcactcggtgtcatcttcgaccaccgtctcagttcatctctgatgaagttatcgccaaccactgtcgggcgcaatcaact

SEQ ID NO: 38807 - DNA, 96 bp, Fusarium cuneirostrum
  misc_feature: 46
gatgatgactacttgtgagcccttgacataacataagcagggcgaggcaaataataatttaaataaactcgtttgacgagccctggttattctttt

SEQ ID NO: 38808 - DNA, 96 bp, Fusarium cuneirostrum
  misc_feature: 46
agcacaaccgagagagtagtggagcgaacactaaataaaaggctccaacagaagtgagcgacacgtaattgtgatgttgtgcgtataaatggtatc

SEQ ID NO: 38809 - DNA, 96 bp, Fusarium cuneirostrum
  misc_feature: 46
gagcgagtcgatcttggattcctatgcaagtcgtctttcaattgcgctggcgcgcgactaggaacagagtgacggtatttcaatcggagatttagt

SEQ ID NO: 38810 - DNA, 96 bp, Fusarium cuneirostrum
  misc_feature: 46
ccgcacttgtgttacgcgagcatatataaagtagatggtgataacctcaaaagagtccacgagccgagcgcgtagcgtgcaggcgaggggattgtc

SEQ ID NO: 38811 - DNA, 96 bp, Fusarium cuneirostrum
  misc_feature: 46
cgagatggttcgagtgcgaggaaggacgacggaggaggacaggagagcatcggagatgcacatgggcgcagagcgccagagacaatctttgttgtc

SEQ ID NO: 38812 - DNA, 96 bp, Fusarium cuneirostrum
  misc_feature: 46
gaaacttaattaatatcattagaaaataggtcaatatatttataagctatattaattaatattaaaatacgcgattagcctatacctaacttatat

SEQ ID NO: 38813 - DNA, 96 bp, Fusarium cuneirostrum
  misc_feature: 46
cactaagtcacagtcgctcgcctttaggcttactttttggattcattacggcgagctgttggttccagataagtgctcgcataaagataaatgaag

SEQ ID NO: 38814 - DNA, 96 bp, Fusarium cuneirostrum
  misc_feature: 46
ccctgcatctcggctcattccatttcattcatgtgcgacgaagccatcgtcgagtagaaaaaagatgatcaacaccacatactctggtgttttaag

SEQ ID NO: 38815 - DNA, 96 bp, Fusarium cuneirostrum
  misc_feature: 46
ctgcacgctacgcgctcggctcgtggactcttttgaggttatcaccatctactttatatatgctcgcgtaacacaagtgcgggagctcaccctact

SEQ ID NO: 38816 - DNA, 96 bp, Fusarium cuneirostrum
  misc_feature: 46
agccgagcgcgtagcgtgcaggcgaggggattgtcaatgtaatttattcagggaataattacccttccaagcaggaactgtgaaatagagaccgag

SEQ ID NO: 38817 - DNA, 96 bp, Fusarium cuneirostrum
  misc_feature: 46
aatatgcgagcccataaccttacgtggggcgagacaaataattattaaaaccacttttaatgtgtcgagaaccactactttttttcacttggcgag

SEQ ID NO: 38818 - DNA, 96 bp, Fusarium cuneirostrum
  misc_feature: 46
acagtcaatgcgcacatcgaaagatgataccgaagtgggtgtacgaggtgagtagatgagggagtgcggatgcgcgaccgacagaagtgtgtcgag

SEQ ID NO: 38819 - DNA, 96 bp, Fusarium cuneirostrum
  misc_feature: 46
ctcaaggggcaattggggtaagcgtttgtgtagatttgaattgaattgtgattgcgagccatcattcataacgaaatggggcgagacctaaaatat

SEQ ID NO: 38820 - DNA, 96 bp, Fusarium cuneirostrum
  misc_feature: 46
cattcatgtttgactgctgtcaattgaagtcatcaccatctctgtgtgatgtctgtaacgtcgctacgtgttccttcgtcacactcactccgcacg

SEQ ID NO: 38821 - DNA, 96 bp, Fusarium cuneirostrum
  misc_feature: 46
cacctggaaggtcatctgaacttggttcagtttgttgattgaggcagcgccgagacttgacgattaggcaagaatgatagagcgaaagcgatcacg

SEQ ID NO: 38822 - DNA, 96 bp, Fusarium cuneirostrum
  misc_feature: 46
caagtggtgtaactctcaccactcctgttccattcacattctacgtcacaattccatctaacactacaattacaattacaattacaatcagtcacg

SEQ ID NO: 38823 - DNA, 96 bp, Fusarium cuneirostrum
  misc_feature: 46
cgtaattgaagtcatcatcacttccacatcaggcaactctacaaatctcaccaagttcacattgcatctatctacactaaaaatctccaagatcgt

SEQ ID NO: 38824 - DNA, 96 bp, Fusarium cuneirostrum
  misc_feature: 46
cgcaggctgagggattgacaatagactgaactcaagtgaagagttcattgcccaagcaagaactgtgtaaagaattacggaggcgtaagccgacgt

SEQ ID NO: 38825 - DNA, 96 bp, Fusarium cuneirostrum
  misc_feature: 46
atttctggaaatccgacaatttttttccttctttacattcgggttgaactgtgttcatcgctttgcaagagcaaacgaacccgtatatccatatcg

SEQ ID NO: 38826 - DNA, 96 bp, Fusarium cuneirostrum
  misc_feature: 46
actcgctccgcgatctgcccaacaaggcagggaaaccagtgctctctccggtcgcatcttcatgtcttccgacaagactaaaacaaaaccaaaagg

SEQ ID NO: 38827 - DNA, 96 bp, Fusarium cuneirostrum
  misc_feature: 46
cctggttattctttttattagattagtgagcatgatgttactgtagatggagttgtgaatggcctcattttcatccacactggaatagtcccgaat

SEQ ID NO: 38828 - DNA, 96 bp, Fusarium cuneirostrum
  misc_feature: 46
cctctcgggggaaaagacgctgtcttatactcctcgactctgtctgcggggtatgagattgtggacggaacgttcgtacctctctcatttgtccgt

SEQ ID NO: 38829 - DNA, 96 bp, Fusarium cuneirostrum
  misc_feature: 46
catctttcgatgtgcgcattgactgttggtcaattgatgatgttatcgtgagcagtgaccttgcgaccttgctcattattataacctcgcgacggg

SEQ ID NO: 38830 - DNA, 96 bp, Fusarium cuneirostrum
  misc_feature: 46
cccgcacttgtgttacgcgagcatatataaagtagatggtgataacctcaaaagagtccacgagccgagcgcgtagcgtgcaggcgaggggattgt

SEQ ID NO: 38831 - DNA, 96 bp, Fusarium cuneirostrum
  misc_feature: 46
caagatagtcctgagcccgagcgcgtagcgtgcagggtgaaggattgacagtagtctcctcatctgcatatgaagaatgataagctcccgcagggg

SEQ ID NO: 38832 - DNA, 96 bp, Fusarium cuneirostrum
  misc_feature: 46
ataaacagaactgattccagtcgaaatcagactcgactccgtctcacacaaaaaaataaatacagtctcaagtcttcgactgcgtcctcgcagggg

SEQ ID NO: 38833 - DNA, 96 bp, Fusarium cuneirostrum
  misc_feature: 46
cataacttgattgattgagcgagccaccactttactggggcgagtcattccttttttaaataacattttaatgtgacgagcaccactacgcctttt

SEQ ID NO: 38834 - DNA, 96 bp, Fusarium cuneirostrum
  misc_feature: 46
cactgtctatactaactacaataccacttgaggtcatcaccattacctattccggtaagtctcacaaagcatcgttggagttactcctccacactt

SEQ ID NO: 38835 - DNA, 96 bp, Fusarium cuneirostrum
  misc_feature: 46
cacctccacttgaggtcatcatgcactctcatgaagataactgaaccacatcttgtggtgttttagtaacgtcgctacgtgttccttcgtcacact

SEQ ID NO: 38836 - DNA, 96 bp, Fusarium cuneirostrum
  misc_feature: 46
caaataaatacgttttaaatagactcgtttgacgagccccaattactattttatgcgagcagacatgactttgatgtatgacttgtgatttgaatt

SEQ ID NO: 38837 - DNA, 96 bp, Fusarium cuneirostrum
  misc_feature: 46
caaacttgacgctacggcacactgagcaagtagtcaatgctatcgtttccagattcttttcgccaaaccactcatcgaatgaggcgaagagtattt

SEQ ID NO: 38838 - DNA, 96 bp, Fusarium cuneirostrum
  misc_feature: 46
atatccttagtacggacgaccggagggaggacgtgcggagtgagtgtgacgaaggaacacgtagcgacgttacagacatcacacagagatggtgat

SEQ ID NO: 38839 - DNA, 96 bp, Fusarium cuneirostrum
  misc_feature: 46
atactttattatcttcttttttatttttatttttttccttttttttcttatctcttattttttttctttttatttatttttatatttattttattt

SEQ ID NO: 38840 - DNA, 96 bp, Fusarium cuneirostrum
  misc_feature: 46
aaccttataattactaattcttaggttttataatttcttttacgagaattattaattattaatcttaattacctttccgatataattaataagggt

SEQ ID NO: 38841 - DNA, 96 bp, Fusarium cuneirostrum
  misc_feature: 45
ccaagaaaaagtgacttcgttaacagaagtgaccgatttctcggcccattctcaggatttggctcaccaaatgccagaatcgagtccatacaaaaa

SEQ ID NO: 38842 - DNA, 96 bp, Fusarium cuneirostrum
  misc_feature: 45
ttttggttttgttttagtcttgtcggaagacatgaagatgcgaccggagagagcactggtttccctgccttgttgggcagatcgcggagcgagtat

SEQ ID NO: 38843 - DNA, 96 bp, Fusarium cuneirostrum
  misc_feature: 45
attaagaaatgtagcggaataatattattatataccttaataatagtattataccggatattagtattatactatatatatagactaatagcgaaa

SEQ ID NO: 38844 - DNA, 96 bp, Fusarium cuneirostrum
  misc_feature: 45
ttgaaagtgaaagtgaaagtgaaagtgaaagtgaaagtgaaagtgaaagtgaaagtgaaagtgaaagtgaaagtgaaagtgaaagtgaaagtgaaa

SEQ ID NO: 38845 - DNA, 96 bp, Fusarium cuneirostrum
  misc_feature: 45
ttgtattctatccggaggaggagtgaacgagtgagcgatcatctacttacattaattgctggacagcatcttctcgggaagagaagaaaagagtat

SEQ ID NO: 38846 - DNA, 96 bp, Fusarium cuneirostrum
  misc_feature: 45
acgagggacgagtatgaagtggagtaagtaagaccgggaacgaagggactgagtggaggtcggttttgttggacggacaaatgagagaggtacgaa

SEQ ID NO: 38847 - DNA, 96 bp, Fusarium cuneirostrum
  misc_feature: 45
ccattacctattccggtaagtctcacaaagcatcgttggagttactcctccacacttgacccaactcaaacacagcatcatcaaatctacttcgaa

SEQ ID NO: 38848 - DNA, 96 bp, Fusarium cuneirostrum
  misc_feature: 45
ttcatgtttgactgctgtcaattgaagtcatcaccatctctgtgtgatgtctgtaacgtcgctacgtgttccttcgtcacactcactccgcacgtc

SEQ ID NO: 38849 - DNA, 96 bp, Fusarium cuneirostrum
  misc_feature: 45
ttcagacgagctttggtgaaagatcgaaaagaatggcaagggaaccaatacagcccaatatgcaatccaaatatcgacttccactatttcccttct

SEQ ID NO: 38850 - DNA, 96 bp, Fusarium cuneirostrum
  misc_feature: 45
ccaagatctgtccctcttgatcaaccttcgcatggctcaggtttctattacttcttcgatctcgtttcactccatctcttttcatgatctagtgaa

SEQ ID NO: 38851 - DNA, 96 bp, Fusarium cuneirostrum
  misc_feature: 45
ttattcgtcgttcctcctcataacgttccgtccacccgcacttcagtcggtcccctccttctcgtgcttacttactccactcttcttcgtccctca

SEQ ID NO: 38852 - DNA, 96 bp, Fusarium cuneirostrum
  misc_feature: 45
ttagatggaattgtgacgtagaatgtgaatggaacaggagtggtgagagttacaccacttgagtcccgaacggatgagcaagccccgtaggggcgc

SEQ ID NO: 38853 - DNA, 96 bp, Fusarium cuneirostrum
  misc_feature: 45
ttacgcacgttcaggtaacccagctgcgtatacagcagcagtctcagtgtacaaagacagaagactcacatccacactgttcgtcttccacgttcg

SEQ ID NO: 38854 - DNA, 96 bp, Fusarium cuneirostrum
  misc_feature: 45
cactccgcacgtcctccctccggtcgtccgtactaaggatatagtcatagactcggccctccgcgggcgctcgtaactcttcatgggttgccaaca

SEQ ID NO: 38855 - DNA, 96 bp, Fusarium cuneirostrum
  misc_feature: 45
ccctcaccactcgccgtctagctcgtggttctcttttaccactacaataacagttcactcttctcgttcacaaatgcacaatcaattcaaatcaca

SEQ ID NO: 38856 - DNA, 96 bp, Fusarium cuneirostrum
  misc_feature: 45
tgtcaaccgagcggggcgaggggattgagtttaggcgtttgcctaacaaagtgcaggaagcacttgaatgtccgatggagtcggatgatatgctat

SEQ ID NO: 38857 - DNA, 96 bp, Fusarium cuneirostrum
  misc_feature: 45
tggtgactcgcttgttcaagctcgagcaggcacaaaagtaaaaaaacagaagcaagttcatgttttgcgcgacagcgctgaagaagtgggcgtccg

SEQ ID NO: 38858 - DNA, 96 bp, Fusarium cuneirostrum
  misc_feature: 45
ctcgggggaaaagacgctgtcttatactcctcgactctgtctgcggggtatgagattgtggacggaacgttcgtacctctctcatttgtccgtcca

SEQ ID NO: 38859 - DNA, 96 bp, Fusarium cuneirostrum
  misc_feature: 45
ctacgggacacgggacagtgagggacgaacgtagtgtcactaaggcgaccgagctcaagcgaggtaaagccggtactcgtcttcctagcgtcagca

SEQ ID NO: 38860 - DNA, 96 bp, Fusarium cuneirostrum
  misc_feature: 45
tgctcatccgttcgggactcaagtggtgtaactctcaccactcctgttccattcacattctacgtcacaattccatctaacactacaattacaatt

SEQ ID NO: 38861 - DNA, 96 bp, Fusarium cuneirostrum
  misc_feature: 45
taaaacaccagagtatgtggtgttgatcatcttttttctactcgacgatggcttcgtcgcacatgaatgaaatggaatgagccgagatgcagggca

SEQ ID NO: 38862 - DNA, 96 bp, Fusarium cuneirostrum
  misc_feature: 45
aggctgagggattgacaatagactgaactcaagtgaagagttcattgcccaagcaagaactgtgtaaagaattacggaggcgtaagccgacgtgca

SEQ ID NO: 38863 - DNA, 96 bp, Fusarium cuneirostrum
  misc_feature: 45
tgagcacaaccgagagagtagtggagcgaacactaaataaaaggctccaacagaagtgagcgacacgtaattgtgatgttgtgcgtataaatggta

SEQ ID NO: 38864 - DNA, 96 bp, Fusarium cuneirostrum
  misc_feature: 45
gatttgacggagtctcaaaactggaacagtttttgtatggactcgattctggcatttggtgagccaaatcctgagaatgggccgagaaatcggtca

SEQ ID NO: 38865 - DNA, 96 bp, Fusarium cuneirostrum
  misc_feature: 45
aaggattgtcaaagtcttctcatctgccagggaagagttacttccccaagcaggaactgtgaaatagagaccgagccataaggcgaggtgttgtca

SEQ ID NO: 38866 - DNA, 96 bp, Fusarium cuneirostrum
  misc_feature: 45
tcgatgacgatcttggagatttttagtgtagatagatgcaatgtgaacttggtgagatttgtagagttgcctgatgtggaagtgatgatgacttca

SEQ ID NO: 38867 - DNA, 96 bp, Fusarium cuneirostrum
  misc_feature: 45
tcttcccgagaagatgctgtccagcaattaatgtaagtagatgatcgctcactcgttcactcctcctccggatagaatacaaactcactctgttcg

SEQ ID NO: 38868 - DNA, 96 bp, Fusarium cuneirostrum
  misc_feature: 45
agttagatagagcttaaatataacgcggaattactaaactttagctatatataataactctgaacataatgcacactccctcaagttcaaggcaga

SEQ ID NO: 38869 - DNA, 96 bp, Fusarium cuneirostrum
  misc_feature: 45
tctgatttcgactggaatcagttctgtttattccacggccgtggaaacacgaacaggtgagtgtctatacatatctggaagatgaagtgaaggatg

SEQ ID NO: 38870 - DNA, 96 bp, Fusarium cuneirostrum
  misc_feature: 45
aacagagtgagtttgtattctatccggaggaggagtgaacgagtgagcgatcatctacttacattaattgctggacagcatcttctcgggaagaga

SEQ ID NO: 38871 - DNA, 96 bp, Fusarium cuneirostrum
  misc_feature: 45
tctctgcttggagatgaactcttcacatgcagatgagactctactagtcaatccttcaggctgcgtcgttcctcctcgccctcaggactcatttat

SEQ ID NO: 38872 - DNA, 96 bp, Fusarium cuneirostrum
  misc_feature: 45
tctattgtcaatccctcagcctgcgtcctacgtcctcggcctcgggaaaatacttttgaagttattcacattcacatctacgattacaatttaatc

SEQ ID NO: 38873 - DNA, 96 bp, Fusarium cuneirostrum
  misc_feature: 45
tcggtatcatctttcgatgtgcgcattgactgttggtcaattgatgatgttatcgtgagcagtgaccttgcgaccttgctcattattataacctcg

SEQ ID NO: 38874 - DNA, 96 bp, Fusarium cuneirostrum
  misc_feature: 45
aaactaaaaagggcacacatattagtgagctcccgcatttatatatagcgagcatgttttaatctgatgtgaataacttcaaaagtattttcccga

SEQ ID NO: 38875 - DNA, 96 bp, Fusarium cuneirostrum
  misc_feature: 45
tcgccgtctagctcgtggttctcttttaccactacaataacagttcactcttctcgttcacaaatgcacaatcaattcaaatcacaagtcatacat

SEQ ID NO: 38876 - DNA, 96 bp, Fusarium cuneirostrum
  misc_feature: 45
cttacacacagtgacatttcatgtttacgtgaggggattcacagagcgcatctctgttgaattaaagtaacatcacatcgtctccctgtcggtcga

SEQ ID NO: 38877 - DNA, 96 bp, Fusarium cuneirostrum
  misc_feature: 45
tcctcggtctcgtactgcacgtcggcttacgcctccgtaattctttacacagttcttgcttgggcaatgaactcttcacttgagttcagtctattg

SEQ ID NO: 38878 - DNA, 96 bp, Fusarium cuneirostrum
  misc_feature: 45
aagataactgaaccacatcttgtggtgttttagtaacgtcgctacgtgttccttcgtcacactcactccgcacgtcgccctccgggctccgtagga

SEQ ID NO: 38879 - DNA, 96 bp, Fusarium cuneirostrum
  misc_feature: 45
agtaatcgtcttgagtcagcttgctgaccttgacgaccccagtcaatagacatccgaggtcacgaggaatgtggatgtagccactcgaatgaggga

SEQ ID NO: 38880 - DNA, 96 bp, Fusarium cuneirostrum
  misc_feature: 45
ggcgaggtgcagaacgagtcgaccgacagggagacgatgtgatgttactttaattcaacagagatgcgctctgtgaatcccctcacgtaaacatga

SEQ ID NO: 38881 - DNA, 96 bp, Fusarium cuneirostrum
  misc_feature: 45
tcagttcatctctgatgaagttatcgccaaccactgtcgggcgcaatcaactcatgtctcatgaggattatagtaacctcattccgtggtcgctct

SEQ ID NO: 38882 - DNA, 96 bp, Fusarium cuneirostrum
  misc_feature: 45
gtgctagataatgtgaagaggtgaagtgcgaataacttcactagatcatgaaaagagatggagtgaaacgagatcgaagaagtaatagaaacctga

SEQ ID NO: 38883 - DNA, 96 bp, Fusarium cuneirostrum
  misc_feature: 45
tcacttctgttggagccttttatttagtgttcgctccactactctctcggttgtgctcacatatcactgtctatactaactacaataccacttgag

SEQ ID NO: 38884 - DNA, 96 bp, Fusarium cuneirostrum
  misc_feature: 45
gcatttatatatagcgagcatgttttaatctgatgtgaataacttcaaaagtattttcccgaggccgaggacgtaggacgcaggctgagggattga

SEQ ID NO: 38885 - DNA, 96 bp, Fusarium cuneirostrum
  misc_feature: 45
tcaatagagatggtacccccattaatcgccttcccgcctccgtgattaccatccagagcaatctggaaagcacggcaataatgtggatgatcctta

SEQ ID NO: 38886 - DNA, 96 bp, Fusarium cuneirostrum
  misc_feature: 45
tattcttgagagcatattactgcgtcgcttatctgacgcatatcttttctacggtaagctatcttcggaaggaagaagtagtgaaggagatgtacg

SEQ ID NO: 38887 - DNA, 96 bp, Fusarium cuneirostrum
  misc_feature: 45
taggggcgcagggaagactgagggattggcaatagtcattacaccgccggaggcccgagtcggaactgtataatcctacggagcccggagggcgac

SEQ ID NO: 38888 - DNA, 96 bp, Fusarium cuneirostrum
  misc_feature: 45
cccacattctcctagtctattagaatttaaattgtcaagatcgtcttattcactgctcagctaccgaactagaagcgtctatatcatctctcgcta

SEQ ID NO: 38889 - DNA, 96 bp, Fusarium cuneirostrum
  misc_feature: 45
tacagtaacatcatgctcactaatctaataaaaagaataaccagggctcgtcaaacgagtttatttaaattattatttgcctcgccctgcttatgt

SEQ ID NO: 38890 - DNA, 96 bp, Fusarium cuneirostrum
  misc_feature: 45
catgcgcgacgcgccatcacaactcgactcttcgtctcggtccatatcgtcgccggtccccgtctcccactttcagtctccctcttcggtcgatta

SEQ ID NO: 38891 - DNA, 96 bp, Fusarium cuneirostrum
  misc_feature: 45
taagacggaacgtctgcccctgcgaggacgcagtcgaagacttgagactgtatttatttttttgtgtgagacggagtcgagtctgatttcgactgg

SEQ ID NO: 38892 - DNA, 96 bp, Fusarium cuneirostrum
  misc_feature: 45
taaactacaacggtttctcgaaagccgcagttaactctgctcctaaaagccgctctaacagatcggaagagcgtcgtgtagggaaagagtgtagat

SEQ ID NO: 38893 - DNA, 96 bp, Fusarium cuneirostrum
  misc_feature: 45
gacgagccggtgggtgagtagtaacggagtaactgtacatcgcaagactcaaaatctaccggattttgggacttttcagaaactggcacagtttta

SEQ ID NO: 38894 - DNA, 96 bp, Fusarium cuneirostrum
  misc_feature: 45
caaagaaaaagaagccatcgtcatctccgaattaggcaacctcgcggtatgctggtggattaccgctccgtccacacgcctccgcaatcttaaaac

SEQ ID NO: 38895 - DNA, 96 bp, Fusarium cuneirostrum
  misc_feature: 45
gatttcgactggaatcagttctgtttattccacggccgtggaaacacgaacaggtgagtgtctatacatatctggaagatgaagtgaaggatgaac

SEQ ID NO: 38896 - DNA, 96 bp, Fusarium cuneirostrum
  misc_feature: 45
gcattcatgtttgactgctgtcaattgaagtcatcaccatctctgtgtgatgtctgtaacgtcgctacgtgttccttcgtcacactcactccgcac

SEQ ID NO: 38897 - DNA, 96 bp, Fusarium cuneirostrum
  misc_feature: 45
ctaaaaatctccaagatcgtcatcgacccattcatcaccaaactcgtccacaccctcgacgagtgtcttcacctcttctacagccctcggcttcac

SEQ ID NO: 38898 - DNA, 96 bp, Fusarium cuneirostrum
  misc_feature: 45
gtctatactaactacaataccacttgaggtcatcaccattacctattccggtaagtctcacaaagcatcgttggagttactcctccacacttgacc

SEQ ID NO: 38899 - DNA, 96 bp, Fusarium cuneirostrum
  misc_feature: 45
catattagtgagctcccgcatttatatatagcgagcatgttttaatctgatgtgaataacttcaaaagtattttcccgaggccgaggacgtaggac

SEQ ID NO: 38900 - DNA, 96 bp, Fusarium cuneirostrum
  misc_feature: 45
gtcaatagacatccgaggtcacgaggaatgtggatgtagccactcgaatgagggacgaagaagagtggagtaagtaagcacgagaaggaggggacc

SEQ ID NO: 38901 - DNA, 96 bp, Fusarium cuneirostrum
  misc_feature: 45
gaggacgagtttaccgcaacaacgtgaggagacgaacagagtgagtttgtattctatccggaggaggagtgaacgagtgagcgatcatctacttac

SEQ ID NO: 38902 - DNA, 96 bp, Fusarium cuneirostrum
  misc_feature: 45
catatgatgtgaatgtaattgtttttataattaaacctaaacgtgagtcccggggaggaggagggacgacgacccgggattgtcaacttgagttac

SEQ ID NO: 38903 - DNA, 96 bp, Fusarium cuneirostrum
  misc_feature: 45
ggtgcggagcagagggtgagggacgaacccgtcgcgaggttataataatgagcaaggtcgcaaggtcactgctcacgataacatcatcaattgacc

SEQ ID NO: 38904 - DNA, 96 bp, Fusarium cuneirostrum
  misc_feature: 45
ggtgacgaaggagcccgatgcgaggttacgagaacaccatggatatgtgtgttaccatttcatgtaggagtgcacgacggcttcacgactcagtag

SEQ ID NO: 38905 - DNA, 96 bp, Fusarium cuneirostrum
  misc_feature: 45
ggaaaagtgcgtcgcatacttggatgcgtcgcatgcttatcatgtacgttacatcacaagtgagtgaaacacacaagcgagtgaaacaaaaatccc

SEQ ID NO: 38906 - DNA, 96 bp, Fusarium cuneirostrum
  misc_feature: 45
ggccgaggacgtaggacgcaggctgagggattgacaatagactgaactcaagtgaagagttcatcctccaagcaagaactatgttctaaacttacg

SEQ ID NO: 38907 - DNA, 96 bp, Fusarium cuneirostrum
  misc_feature: 45
cagattctcactctgattccaggtcgttgcccatacaatctcagaaatcttcccatacaaaatttgtacaaattttgaaatggattcttgtcggcc

SEQ ID NO: 38908 - DNA, 96 bp, Fusarium cuneirostrum
  misc_feature: 45
ggcccagagggccgacaagaatccatttcaaaatttgtacaaattttgtatgggaagatttctgagattgtatgggcaacgacctggaatcagagt

SEQ ID NO: 38909 - DNA, 96 bp, Fusarium cuneirostrum
  misc_feature: 45
ggcataaaagttgaaaagtgttattttgcatagcgaaaggtgatggtggaaattgtgttgtagcaaaatttgatatgattatggtgatgttacatc

SEQ ID NO: 38910 - DNA, 96 bp, Fusarium cuneirostrum
  misc_feature: 45
ggatttgacggagtctcaaaactggaacagtttttgtatggactcgattctggcatttggtgagccaaatcctgagaatgggccgagaaatcggtc

SEQ ID NO: 38911 - DNA, 96 bp, Fusarium cuneirostrum
  misc_feature: 45
catggcacccacatcgtgccatcctaccttctgccacactctactgagtcgtgaagccgtcgtgcactcctacatgaaatggtaacacacatatcc

SEQ ID NO: 38912 - DNA, 96 bp, Fusarium cuneirostrum
  misc_feature: 45
ggaaattgtgttgtagcaaaatttgatatgattatggtgatgttacatcatgtgttttgttctatgattacctgatgttgtagtgacgatagcttc

SEQ ID NO: 38913 - DNA, 96 bp, Fusarium cuneirostrum
  misc_feature: 45
cataatgggcggacgcccacttcttcagcgctgtcgcgcaaaacatgaacttgcttctgtttttttacttttgtgcctgctcgagcttgaacaagc

SEQ ID NO: 38914 - DNA, 96 bp, Fusarium cuneirostrum
  misc_feature: 45
catactttgctcgccactgtttaatatggggcgaggcaaataaatacgttttaaatagactcgtttgacgagccccaattactattttatgcgagc

SEQ ID NO: 38915 - DNA, 96 bp, Fusarium cuneirostrum
  misc_feature: 45
catattaaaactgtgccagtttctgaaaagtcccaaaatccggtagattttgagtcttgcgatgtacagttactccgttactactcacccaccggc

SEQ ID NO: 38916 - DNA, 96 bp, Fusarium cuneirostrum
  misc_feature: 45
ctggacttgcatattgaacttgactacctactcgcgcttatcctgagagagatggagcggagagagatggtaacgcgctgtttgatgaggctctgc

SEQ ID NO: 38917 - DNA, 96 bp, Fusarium cuneirostrum
  misc_feature: 45
aacgtgaggagacgaacagagtgagtttgtattctatccggaggaggagtgaacgagtgagcgatcatctacttacattaattgctggacagcatc

SEQ ID NO: 38918 - DNA, 96 bp, Fusarium cuneirostrum
  misc_feature: 45
atcttgtttatccacgccatgggtactgagaagggagtttcgaagtagatttgatgatgctgtgtttgagttgggtcaagtgtggaggagtaactc

SEQ ID NO: 38919 - DNA, 96 bp, Fusarium cuneirostrum
  misc_feature: 45
acctccacttgaggtcatcatgcactctcatgaagataactgaaccacatcttgtggtgttttagtaacgtcgctacgtgttccttcgtcacactc

SEQ ID NO: 38920 - DNA, 96 bp, Fusarium cuneirostrum
  misc_feature: 45
gagtaatcgtcttgagtcagcttgctgaccttgacgaccccagtcaatagacatccgaggtcacgaggaatgtggatgtagccactcgaatgaggg

SEQ ID NO: 38921 - DNA, 96 bp, Fusarium cuneirostrum
  misc_feature: 45
gagcatcggagatgcacatgggcgcagagcgccagagacaatctttgttgtcggatgtaagtaagagcgaaggagtgagcgatggactctttggat

SEQ ID NO: 38922 - DNA, 96 bp, Fusarium cuneirostrum
  misc_feature: 45
acctgttcgtgtttccacggccgtggaataaacagaactgattccagtcgaaatcagactcgactccgtctcacacaaaaaaataaatacagtctc

SEQ ID NO: 38923 - DNA, 96 bp, Fusarium cuneirostrum
  misc_feature: 45
cgttgcaatcgccacagctttaagggcatcgacatttgaaaggaggcgcaagtcgaggccgagttgagcggagttgttcatatggagaaggacgtc

SEQ ID NO: 38924 - DNA, 96 bp, Fusarium cuneirostrum
  misc_feature: 45
ccaaacagtggccggtgactccaatcatcatcgttgagagattgatctggaacgtcttgatttttgaagcttaacgggagagttcgtcttcgcttc

SEQ ID NO: 38925 - DNA, 96 bp, Fusarium cuneirostrum
  misc_feature: 45
ctcttcccgagaagatgctgtccagcaattaatgtaagtagatgatcgctcactcgttcactcctcctccggatagaatacaaactcactctgttc

SEQ ID NO: 38926 - DNA, 96 bp, Fusarium cuneirostrum
  misc_feature: 45
gaaaccagtgctctctccggtcgcatcttcatgtcttccgacaagactaaaacaaaaccaaaaggagacaactcacctccgttcgtgtcaacacgt

SEQ ID NO: 38927 - DNA, 96 bp, Fusarium cuneirostrum
  misc_feature: 45
ctttctattaatttttatccttaagattatttcttgcggctattttccctagtatataacctatatctataattactttgccgtctaatataatat

SEQ ID NO: 38928 - DNA, 96 bp, Fusarium cuneirostrum
  misc_feature: 45
ctcaccctcaccactcgccgtctagctcgtggttctcttttaccactacaataacagttcactcttctcgttcacaaatgcacaatcaattcaaat

SEQ ID NO: 38929 - DNA, 96 bp, Fusarium cuneirostrum
  misc_feature: 45
ctacgctccgcacgtcgccctacgggctccgtatttaaaaaaggaatggaagacctctctccgcgaggctcgtaactctttactcgagtttattag

SEQ ID NO: 38930 - DNA, 96 bp, Fusarium cuneirostrum
  misc_feature: 45
cgtgtgatatcctacaacattatacttggtcgtctctactcctcctccctcttaccataacgctcccgcaaccctgactcgatcacctctcgcagg

SEQ ID NO: 38931 - DNA, 96 bp, Fusarium cuneirostrum
  misc_feature: 45
cggtcgggtgtgtctgggtcgacgtccgtctccccctcttttatttctcctcgtgcactcacttcagtcgcatcctgcattcatgtttgactgctg

SEQ ID NO: 38932 - DNA, 96 bp, Fusarium cuneirostrum
  misc_feature: 45
cgcagcccgagggatggactatctaataaactcgagtaaagagttacgagcctcgcggagagaggtcttccattccttttttaaatacggagcccg

SEQ ID NO: 38933 - DNA, 96 bp, Fusarium cuneirostrum
  misc_feature: 45
cgggatttatcttgtagcaccgaaggaggttacgacggaggatcttgtgagggaactgcacctctgtatacagagtcatctgaaacagacgaagcg

SEQ ID NO: 38934 - DNA, 96 bp, Fusarium cuneirostrum
  misc_feature: 45
cgctcctccttcgctacgctcgctcgtcggctcgggcctcaagtggtgattaagtcgttcattcacaaagtgctcgccaatttaaaaggcgtagtg

SEQ ID NO: 38935 - DNA, 96 bp, Fusarium cuneirostrum
  misc_feature: 45
acaaacactccaagatcagctatcatcgccatctcatccatcttagaggcgttcacttacaaactacatcagtaaacacactaaggtcagcaatcg

SEQ ID NO: 38936 - DNA, 96 bp, Fusarium cuneirostrum
  misc_feature: 45
cgaatgtgaaatttttcgagattttggtgaggaacaagcaaaatcggattcaaattggactcaaatcgacatactttttgtatgtgaacgaaactg

SEQ ID NO: 38937 - DNA, 96 bp, Fusarium cuneirostrum
  misc_feature: 45
agtcaatgcgcacatcgaaagatgataccgaagtgggtgtacgaggtgagtagatgagggagtgcggatgcgcgaccgacagaagtgtgtcgaggg

SEQ ID NO: 38938 - DNA, 96 bp, Fusarium cuneirostrum
  misc_feature: 45
aacgggaccgttttcccgactatgctgaaacgggagttggtgatgacttcacttctgccgactccacatactttgctcgccactgtttaatatggg

SEQ ID NO: 38939 - DNA, 96 bp, Fusarium cuneirostrum
  misc_feature: 45
ccataacgctcccgcaaccctgactcgatcacctctcgcaggataccaagtcgatcgtacatctccttcactacttcttccttccgaagatagctt

SEQ ID NO: 38940 - DNA, 96 bp, Fusarium cuneirostrum
  misc_feature: 45
agtatagacagtgatatgtgagcacaaccgagagagtagtggagcgaacactaaataaaaggctccaacagaagtgagcgacacgtaattgtgatg

SEQ ID NO: 38941 - DNA, 96 bp, Fusarium cuneirostrum
  misc_feature: 45
cagagagcgagtcgatcttggattcctatgcaagtcgtctttcaattgcgctggcgcgcgactaggaacagagtgacggtatttcaatcggagatt

SEQ ID NO: 38942 - DNA, 96 bp, Fusarium cuneirostrum
  misc_feature: 45
caccggcctccactcattccattcgttcccgtccttagtcaaccgatcattgcgtcgtccctcctccatgatcctacactcttcgccttcgtgcct

SEQ ID NO: 38943 - DNA, 96 bp, Fusarium cuneirostrum
  misc_feature: 45
caaaggacaactaattaggaacggcgactcacggtatataccgcgagcccgacctaaacttacggtaagactcatgactcactataagccgtgact

SEQ ID NO: 38944 - DNA, 96 bp, Fusarium cuneirostrum
  misc_feature: 45
aacactacaattacaattacaattacaatcagtcacgatggctcgccattagggagggaaatggtgctcgacaagtttaaagaagtgtatttaaat

SEQ ID NO: 38945 - DNA, 96 bp, Fusarium cuneirostrum
  misc_feature: 45
agtagatgatcgctcactcgttcactcctcctccggatagaatacaaactcactctgttcgtctcctcacgttgttgcggtaaactcgtcctccgt

SEQ ID NO: 38946 - DNA, 96 bp, Fusarium cuneirostrum
  misc_feature: 45
agatgagggagtgcggatgcgcgaccgacagaagtgtgtcgagggtcgagcagacccgagccagaaacgagctcaaaactggaacagttttttggt

SEQ ID NO: 38947 - DNA, 96 bp, Fusarium cuneirostrum
  misc_feature: 45
aaatatctccgatatccttaattaaactgacgtaaaaggcgtcgaaatcgcgctgcgatccaatcaaatagcgattcaaatttagtctcgggaagt

SEQ ID NO: 38948 - DNA, 96 bp, Fusarium cuneirostrum
  misc_feature: 45
aatcaacccatcactcatgggttatagtaacctcgcatcgtctcgccctgctcgactacgctccgcacctccctccggtcggtagaggactacagt

SEQ ID NO: 38949 - DNA, 96 bp, Fusarium cuneirostrum
  misc_feature: 45
aaccgagcggggcgaggggattgagtttaggcgtttgcctaacaaagtgcaggaagcacttgaatgtccgatggagtcggatgatatgctattctt

SEQ ID NO: 38950 - DNA, 96 bp, Fusarium cuneirostrum
  misc_feature: 44
tcactcatccgctcgggactcatggatgaggaatacatttacagtcaccaacataaacattcacaatctgaaatcatgctcgccaagtgaaaaaaa

SEQ ID NO: 38951 - DNA, 96 bp, Fusarium cuneirostrum
  misc_feature: 44
atggtcgaacagaatgtacgaccgtaatcatggacggagctagtgagcgagtacataatgggcggacgcccacttcttcagcgctgtcgcgcaaaa

SEQ ID NO: 38952 - DNA, 96 bp, Fusarium cuneirostrum
  misc_feature: 44
tatggtcgaacagaatgtacgaccgtaatcatggacggagctagtgagcgagtacataatgggcggacgcccacttcttcagcgctgtcgcgcaaa

SEQ ID NO: 38953 - DNA, 96 bp, Fusarium cuneirostrum
  misc_feature: 44
tttcccccgagaggttgagtgagcaggcgaactctgacttgttttatttttttcgaggacggaggacgagtttaccgcaacaacgtgaggagacga

SEQ ID NO: 38954 - DNA, 96 bp, Fusarium cuneirostrum
  misc_feature: 44
cttcgtcctcgggattcgggactattccagtgtggatgaaaatgaggccattcacaactccatctacagtaacatcatgctcactaatctaataaa

SEQ ID NO: 38955 - DNA, 96 bp, Fusarium cuneirostrum
  misc_feature: 44
tttaaagttccccagactctcagttgcagcacgccgcttattatctcatatccgagataatctagaatgacggtaaatgataatcgatgacgacgc

SEQ ID NO: 38956 - DNA, 96 bp, Fusarium cuneirostrum
  misc_feature: 44
ttcactcctcctccggatagaatacaaactcactctgttcgtctcctcacgttgttgcggtaaactcgtcctccgtcctcgaaaaaaataaaacaa

SEQ ID NO: 38957 - DNA, 96 bp, Fusarium cuneirostrum
  misc_feature: 44
ttgtttcctgttttggatgttgcgataccttcgttttttagcgagcctttttgctagtcaatggggcgaggcaaacactaaatatacttttgacga

SEQ ID NO: 38958 - DNA, 96 bp, Fusarium cuneirostrum
  misc_feature: 44
ttgggattatgatgtattgtgttaggaaattcctctttgagttagatcggccgtgccgaaatataacatattacgttcgaacctttaagaatggaa

SEQ ID NO: 38959 - DNA, 96 bp, Fusarium cuneirostrum
  misc_feature: 44
attgtaattgtagtgttagatggaattgtgacgtagaatgtgaatggaacaggagtggtgagagttacaccacttgagtcccgaacggatgagcaa

SEQ ID NO: 38960 - DNA, 96 bp, Fusarium cuneirostrum
  misc_feature: 44
ttatggtcgaacagaatgtacgaccgtaatcatggacggagctagtgagcgagtacataatgggcggacgcccacttcttcagcgctgtcgcgcaa

SEQ ID NO: 38961 - DNA, 96 bp, Fusarium cuneirostrum
  misc_feature: 44
taatcgagtcgctcacaatccgttcgagcgagcgcgtaatgaaacgcgtcagaaaaaaggttgacgccccgggcgccaaaagcactccaagtgcaa

SEQ ID NO: 38962 - DNA, 96 bp, Fusarium cuneirostrum
  misc_feature: 44
ctacaagaagggtgtcgcaagacagaggatttctggaaatccgacaatttttttccttctttacattcgggttgaactgtgttcatcgctttgcaa

SEQ ID NO: 38963 - DNA, 96 bp, Fusarium cuneirostrum
  misc_feature: 44
ttcacgataccatttatacgcacaacatcacaattacgtgtcgctcacttctgttggagccttttatttagtgttcgctccactactctctcggtt

SEQ ID NO: 38964 - DNA, 96 bp, Fusarium cuneirostrum
  misc_feature: 44
gtgtctgggtcgacgtccgtctccccctcttttatttctcctcgtgcactcacttcagtcgcatcctgcattcatgtttgactgctgtcaattgaa

SEQ ID NO: 38965 - DNA, 96 bp, Fusarium cuneirostrum
  misc_feature: 44
ggcgaggcaaacactaaatatacttttgacgagcaccacttcatactttatttaatcgagcgagctgtgcatatgtgacattattattattttgaa

SEQ ID NO: 38966 - DNA, 96 bp, Fusarium cuneirostrum
  misc_feature: 44
gaatgcagtctttgattcggtcaagctcacgcctcttggttccagctggtgttagagtagctgtagatactcaagtagtgactgatgaacgactaa

SEQ ID NO: 38967 - DNA, 96 bp, Fusarium cuneirostrum
  misc_feature: 44
ttacacacagtgacatttcatgtttacgtgaggggattcacagagcgcatctctgttgaattaaagtaacatcacatcgtctccctgtcggtcgac

SEQ ID NO: 38968 - DNA, 96 bp, Fusarium cuneirostrum
  misc_feature: 44
ttaaggcaataaggctttattttatatatatattcctttgcattattgtaagagactgagctcttatctaagccgccgagaaaggctgcttaatca

SEQ ID NO: 38969 - DNA, 96 bp, Fusarium cuneirostrum
  misc_feature: 44
attttaatatctggtttttatttatatttatcttaatctctttttactaatatattatatccgcttcgcgatattataataagtttaattatttaa

SEQ ID NO: 38970 - DNA, 96 bp, Fusarium cuneirostrum
  misc_feature: 44
aaataaataatcgatcgtcgctccactcctattgctcgtcacttctcgttccgatatggatatacgggttcgtttgctcttgcaaagcgatgaaca

SEQ ID NO: 38971 - DNA, 96 bp, Fusarium cuneirostrum
  misc_feature: 44
tgttactgtagatggagttgtgaatggcctcattttcatccacactggaatagtcccgaatcccgaggacgaaggacgcagggtgagggattgaca

SEQ ID NO: 38972 - DNA, 96 bp, Fusarium cuneirostrum
  misc_feature: 44
tgtctatactaactacaataccacttgaggtcatcaccattacctattccggtaagtctcacaaagcatcgttggagttactcctccacacttgac

SEQ ID NO: 38973 - DNA, 96 bp, Fusarium cuneirostrum
  misc_feature: 44
tgtcgtgccgtccaccacaaagaaacagccctcctgtttccaagaataatactcgtcccagcctcgtccttactcgaaataaataatcgatcgtcg

SEQ ID NO: 38974 - DNA, 96 bp, Fusarium cuneirostrum
  misc_feature: 44
tgtatacgacggacgtcgctgtctttttctattttctctgtttgcggaagcacggttgagagggattcgagaccctttcttactcagctggagagc

SEQ ID NO: 38975 - DNA, 96 bp, Fusarium cuneirostrum
  misc_feature: 44
tactcttgtcaatccctcaccctgcgtccttcgtcctcgggattcgggactattccagtgtggatgaaaatgaggccattcacaactccatctaca

SEQ ID NO: 38976 - DNA, 96 bp, Fusarium cuneirostrum
  misc_feature: 44
gtgcggagcagagggtgagggacgaacccgtcgcgaggttataataatgagcaaggtcgcaaggtcactgctcacgataacatcatcaattgacca

SEQ ID NO: 38977 - DNA, 96 bp, Fusarium cuneirostrum
  misc_feature: 44
tggacttgcatattgaacttgactacctactcgcgcttatcctgagagagatggagcggagagagatggtaacgcgctgtttgatgaggctctgcg

SEQ ID NO: 38978 - DNA, 96 bp, Fusarium cuneirostrum
  misc_feature: 44
tgctccgcaccccatcgctccgctcggggtagaattatacagtcatggactcggccctgcgggcagctgcactactcttgccaatccggctccgtc

SEQ ID NO: 38979 - DNA, 96 bp, Fusarium cuneirostrum
  misc_feature: 44
agctacggctttcatacttactaagttgatcttggcagttgtctttaaactggctgagcttaacgtgttattgcgtaggtgcttaggcgttccgca

SEQ ID NO: 38980 - DNA, 96 bp, Fusarium cuneirostrum
  misc_feature: 44
tgatgactacttgtgagcccttgacataacataagcagggcgaggcaaataataatttaaataaactcgtttgacgagccctggttattcttttta

SEQ ID NO: 38981 - DNA, 96 bp, Fusarium cuneirostrum
  misc_feature: 44
gtcacagtcgctcgcctttaggcttactttttggattcattacggcgagctgttggttccagataagtgctcgcataaagataaatgaagctatca

SEQ ID NO: 38982 - DNA, 96 bp, Fusarium cuneirostrum
  misc_feature: 44
aaagtgcgtcgcatacttggatgcgtcgcatgcttatcatgtacgttacatcacaagtgagtgaaacacacaagcgagtgaaacaaaaatccctca

SEQ ID NO: 38983 - DNA, 96 bp, Fusarium cuneirostrum
  misc_feature: 44
acacttctgtcggtcgcgcatccgcactccctcatctactcacctcgtacacccacttcggtatcatctttcgatgtgcgcattgactgttggtca

SEQ ID NO: 38984 - DNA, 96 bp, Fusarium cuneirostrum
  misc_feature: 44
tctttaaacttgtcgagcaccatttccctccctaatggcgagccatcgtgactgattgtaattgtaattgtaattgtagtgttagatggaattgtg

SEQ ID NO: 38985 - DNA, 96 bp, Fusarium cuneirostrum
  misc_feature: 44
aagtggtgtaactctcaccactcctgttccattcacattctacgtcacaattccatctaacactacaattacaattacaattacaatcagtcacga

SEQ ID NO: 38986 - DNA, 96 bp, Fusarium cuneirostrum
  misc_feature: 44
agagtcgaggagtataagacagcgtcttttcccccgagaggttgagtgagcaggcgaactctgacttgttttatttttttcgaggacggaggacga

SEQ ID NO: 38987 - DNA, 96 bp, Fusarium cuneirostrum
  misc_feature: 44
attgcccgttgcacttggagtgcttttggcgcccggggcgtcaaccttttttctgacgcgtttcattacgcgctcgctcgaacggattgtgagcga

SEQ ID NO: 38988 - DNA, 96 bp, Fusarium cuneirostrum
  misc_feature: 44
tcgcggcccaaatgatccacaggcttccgcctgattgggtctccgaccccaccaagtgcgtgtcattggatgacacttgttctcacaggagttgcg

SEQ ID NO: 38989 - DNA, 96 bp, Fusarium cuneirostrum
  misc_feature: 44
aatgtgaagaggtgaagtgcgaataacttcactagatcatgaaaagagatggagtgaaacgagatcgaagaagtaatagaaacctgagccatgcga

SEQ ID NO: 38990 - DNA, 96 bp, Fusarium cuneirostrum
  misc_feature: 44
gacgaacccgtcgcgaggttataataatgagcaaggtcgcaaggtcactgctcacgataacatcatcaattgaccaacagtcaatgcgcacatcga

SEQ ID NO: 38991 - DNA, 96 bp, Fusarium cuneirostrum
  misc_feature: 44
ctcagtcccttcgttcccgtgcttagccactctccttcgttcgtccctcactctcgtcgtctatgacccacatctgattccactccgttccatcga

SEQ ID NO: 38992 - DNA, 96 bp, Fusarium cuneirostrum
  misc_feature: 44
tccttcgtcctcgggattcgggactattccagtgtggatgaaaatgaggccattcacaactccatctacagtaacatcatgctcactaatctaata

SEQ ID NO: 38993 - DNA, 96 bp, Fusarium cuneirostrum
  misc_feature: 44
gaacgagaagtgacgagcaataggagtggagcgacgatcgattatttatttcgagtaaggacgaggctgggacgagtattattcttggaaacagga

SEQ ID NO: 38994 - DNA, 96 bp, Fusarium cuneirostrum
  misc_feature: 44
tcctgtcatgtcaaccgagcggggcgaggggattgagtttaggcgtttgcctaacaaagtgcaggaagcacttgaatgtccgatggagtcggatga

SEQ ID NO: 38995 - DNA, 96 bp, Fusarium cuneirostrum
  misc_feature: 44
tcctgagccgagacagattcctcaccctctctcatcctctctcatcctctctcatcctctctcatcctctctcatcctctctcatcctctctcatc

SEQ ID NO: 38996 - DNA, 96 bp, Fusarium cuneirostrum
  misc_feature: 44
ggacgaacgtgtggactgagtcaggctttaggtgcgcagcaccattgccttcccagtaaatagggagcctgaggcacgaaggcgaagagtgtagga

SEQ ID NO: 38997 - DNA, 96 bp, Fusarium cuneirostrum
  misc_feature: 44
tcaatcggagatttagtgagacgggcgaacgtggtttattcttttgtatcacggagtgatgaacgagatggttcgagtgcgaggaaggacgacgga

SEQ ID NO: 38998 - DNA, 96 bp, Fusarium cuneirostrum
  misc_feature: 44
ggacaggaggcccagagggccgacaagaatccatttcaaaatttgtacaaattttgtatgggaagatttctgagattgtatgggcaacgacctgga

SEQ ID NO: 38999 - DNA, 96 bp, Fusarium cuneirostrum
  misc_feature: 44
ctgatttcgactggaatcagttctgtttattccacggccgtggaaacacgaacaggtgagtgtctatacatatctggaagatgaagtgaaggatga

SEQ ID NO: 39000 - DNA, 96 bp, Fusarium cuneirostrum
  misc_feature: 44
tcatactttatttaatcgagcgagctgtgcatatgtgacattattattattttgaatcgtagtcgtgatcatgtacccaagatagtcctgagcccg

SEQ ID NO: 39001 - DNA, 96 bp, Fusarium cuneirostrum
  misc_feature: 44
tcactaaatctccgattgaaataccgtcactctgttcctagtcgcgcgccagcgcaattgaaagacgacttgcataggaatccaagatcgactcgc

SEQ ID NO: 39002 - DNA, 96 bp, Fusarium cuneirostrum
  misc_feature: 44
tcaccctcaccactcgccgtctagctcgtggttctcttttaccactacaataacagttcactcttctcgttcacaaatgcacaatcaattcaaatc

SEQ ID NO: 39003 - DNA, 96 bp, Fusarium cuneirostrum
  misc_feature: 44
tatatccttagtacggacgaccggagggaggacgtgcggagtgagtgtgacgaaggaacacgtagcgacgttacagacatcacacagagatggtga

SEQ ID NO: 39004 - DNA, 96 bp, Fusarium cuneirostrum
  misc_feature: 44
tattatctataaaaactcctccgcccctctctcctcttctctttttctttttcttccctctattattctcttatatataactaccgggcctaacta

SEQ ID NO: 39005 - DNA, 96 bp, Fusarium cuneirostrum
  misc_feature: 44
tattaatctcttatagactaacgcgagtgacccggaacggggcaaacgagcgtccataactttggtctataagaggtttttttccaaaacgcaccg

SEQ ID NO: 39006 - DNA, 96 bp, Fusarium cuneirostrum
  misc_feature: 44
gtgatatcctacaacattatacttggtcgtctctactcctcctccctcttaccataacgctcccgcaaccctgactcgatcacctctcgcaggata

SEQ ID NO: 39007 - DNA, 96 bp, Fusarium cuneirostrum
  misc_feature: 44
ctttgtaatcagctaaagcttgaaaacaaaacctcttatagaccaaagttatggacgctcgtttgccccgttccgggtcactcgcgttagtctata

SEQ ID NO: 39008 - DNA, 96 bp, Fusarium cuneirostrum
  misc_feature: 44
tatagacagtgatatgtgagcacaaccgagagagtagtggagcgaacactaaataaaaggctccaacagaagtgagcgacacgtaattgtgatgtt

SEQ ID NO: 39009 - DNA, 96 bp, Fusarium cuneirostrum
  misc_feature: 44
caattacgtgtcgctcacttctgttggagccttttatttagtgttcgctccactactctctcggttgtgctcacatatcactgtctatactaacta

SEQ ID NO: 39010 - DNA, 96 bp, Fusarium cuneirostrum
  misc_feature: 44
cctgcgtcctacgtcctcggcctcgggaaaatacttttgaagttattcacatcagattaaaacatgctcgctatatataaatgcgggagctcacta

SEQ ID NO: 39011 - DNA, 96 bp, Fusarium cuneirostrum
  misc_feature: 44
ggaaagaacctgcttagtaagctgcttagtaagctgcttagtaagctgcttagtaagctgcttagtaagctgcttagtaagctgcttagtaagcta

SEQ ID NO: 39012 - DNA, 96 bp, Fusarium cuneirostrum
  misc_feature: 44
tagctcgttatatatagtcttaagcttcataatctatatctagtaataataatatctatctattatatcgcttcgctccttctctagcttcgcaat

SEQ ID NO: 39013 - DNA, 96 bp, Fusarium cuneirostrum
  misc_feature: 44
tactcaacaaccctttcgggtctctacaaaatcaaaacatttacatctgctgggctccctctcggcacacgcccaagatactgtccacaacctcat

SEQ ID NO: 39014 - DNA, 96 bp, Fusarium cuneirostrum
  misc_feature: 44
aaaccagtgctctctccggtcgcatcttcatgtcttccgacaagactaaaacaaaaccaaaaggagacaactcacctccgttcgtgtcaacacgta

SEQ ID NO: 39015 - DNA, 96 bp, Fusarium cuneirostrum
  misc_feature: 44
aaaaggctcgctaaaaaacgaaggtatcgcaacatccaaaacaggaaacaatgtagactaatctaagatacaaaacctccgaaaacgcccagcgta

SEQ ID NO: 39016 - DNA, 96 bp, Fusarium cuneirostrum
  misc_feature: 44
tacgattgccaatccctcagtcttccttcgctacgctcactcatccgctcgggactcatggatgaggaatacatttacagtcaccaacataaacat

SEQ ID NO: 39017 - DNA, 96 bp, Fusarium cuneirostrum
  misc_feature: 44
tacgaacgttccgtccacaatctcataccccgcagacagagtcgaggagtataagacagcgtcttttcccccgagaggttgagtgagcaggcgaac

SEQ ID NO: 39018 - DNA, 96 bp, Fusarium cuneirostrum
  misc_feature: 44
cgacaagaatccatttcaaaatttgtacaaattttgtatgggaagatttctgagattgtatgggcaacgacctggaatcagagtgagaatctggta

SEQ ID NO: 39019 - DNA, 96 bp, Fusarium cuneirostrum
  misc_feature: 44
taatatagagtagtctagcgtaattaaccgatataaaccaagagtagttctcgttagtattagtctcgccttattaccgtactagctcagtcccat

SEQ ID NO: 39020 - DNA, 96 bp, Fusarium cuneirostrum
  misc_feature: 44
taagtaacctcacttcgtgctcgctacgctctcactccgttccgcaccttcgcttcgctcggtattgagaccacagtctctgcttggagatgaact

SEQ ID NO: 39021 - DNA, 96 bp, Fusarium cuneirostrum
  misc_feature: 44
taactcgatggagccaagggggcggaactattttcggactgaaatacgctgggcgttttcggaggttttgtatcttagattagtctacattgtttc

SEQ ID NO: 39022 - DNA, 96 bp, Fusarium cuneirostrum
  misc_feature: 44
gacgatagcttcacatgtattatgggcgagcattaaataaagacggagcgcacataaactaaaaagggcacacatattagtgagctcccgcattta

SEQ ID NO: 39023 - DNA, 96 bp, Fusarium cuneirostrum
  misc_feature: 44
taaatatctccgatatccttaattaaactgacgtaaaaggcgtcgaaatcgcgctgcgatccaatcaaatagcgattcaaatttagtctcgggaag

SEQ ID NO: 39024 - DNA, 96 bp, Fusarium cuneirostrum
  misc_feature: 44
gtttgtattctatccggaggaggagtgaacgagtgagcgatcatctacttacattaattgctggacagcatcttctcgggaagagaagaaaagagt

SEQ ID NO: 39025 - DNA, 96 bp, Fusarium cuneirostrum
  misc_feature: 44
gttagatggaattgtgacgtagaatgtgaatggaacaggagtggtgagagttacaccacttgagtcccgaacggatgagcaagccccgtaggggcg

SEQ ID NO: 39026 - DNA, 96 bp, Fusarium cuneirostrum
  misc_feature: 44
cgggaaaacggtcccgttacatagtcactactcaacaaccctttcgggtctctacaaaatcaaaacatttacatctgctgggctccctctcggcac

SEQ ID NO: 39027 - DNA, 96 bp, Fusarium cuneirostrum
  misc_feature: 44
ggcgagtcattccttttttaaataacattttaatgtgacgagcaccactacgccttttaaattggcgagcactttgtgaatgaacgacttaatcac

SEQ ID NO: 39028 - DNA, 96 bp, Fusarium cuneirostrum
  misc_feature: 44
gtgaagctatcgtcactacaacatcaggtaatcatagaacaaaacacatgatgtaacatcaccataatcatatcaaattttgctacaacacaattt

SEQ ID NO: 39029 - DNA, 96 bp, Fusarium cuneirostrum
  misc_feature: 44
ggtatttcaatcggagatttagtgagacgggcgaacgtggtttattcttttgtatcacggagtgatgaacgagatggttcgagtgcgaggaaggac

SEQ ID NO: 39030 - DNA, 96 bp, Fusarium cuneirostrum
  misc_feature: 44
gtatagacagtgatatgtgagcacaaccgagagagtagtggagcgaacactaaataaaaggctccaacagaagtgagcgacacgtaattgtgatgt

SEQ ID NO: 39031 - DNA, 96 bp, Fusarium cuneirostrum
  misc_feature: 44
aaagtagatggtgataacctcaaaagagtccacgagccgagcgcgtagcgtgcaggcgaggggattgtcaatgtaatttattcagggaataattac

SEQ ID NO: 39032 - DNA, 96 bp, Fusarium cuneirostrum
  misc_feature: 44
cttttctataatttaatcctttttaccttttagcgttaatttaatatcttatttatttatttaagttttttaattttagccttaaataagataacc

SEQ ID NO: 39033 - DNA, 96 bp, Fusarium cuneirostrum
  misc_feature: 44
ggcgaggaggaacgacgcagcctgaaggattgactagtagagtctcatctgcatgtgaagagttcatctccaagcagagactgtggtctcaatacc

SEQ ID NO: 39034 - DNA, 96 bp, Fusarium cuneirostrum
  misc_feature: 44
ggcgacgtgcggagtgagtgtgacgaaggaacacgtagcgacgttactaaaacaccacaagatgtggttcagttatcttcatgagagtgcatgatg

SEQ ID NO: 39035 - DNA, 96 bp, Fusarium cuneirostrum
  misc_feature: 44
ggagtgtatccatgcagatattgctggacctttcccggaagtgggagtagacgggggccagtactgggcctgcttcattgaagacttcactcaaat

SEQ ID NO: 39036 - DNA, 96 bp, Fusarium cuneirostrum
  misc_feature: 44
ggagccttttatttagtgttcgctccactactctctcggttgtgctcacatatcactgtctatactaactacaataccacttgaggtcatcaccat

SEQ ID NO: 39037 - DNA, 96 bp, Fusarium cuneirostrum
  misc_feature: 44
ggactatctaataaactcgagtaaagagttacgagcctcgcggagagaggtcttccattccttttttaaatacggagcccgtagggcgacgtgcgg

SEQ ID NO: 39038 - DNA, 96 bp, Fusarium cuneirostrum
  misc_feature: 44
ggacgaacccgtcgcgaggttataataatgagcaaggtcgcaaggtcactgctcacgataacatcatcaattgaccaacagtcaatgcgcacatcg

SEQ ID NO: 39039 - DNA, 96 bp, Fusarium cuneirostrum
  misc_feature: 44
ggaaaccagtgctctctccggtcgcatcttcatgtcttccgacaagactaaaacaaaaccaaaaggagacaactcacctccgttcgtgtcaacacg

SEQ ID NO: 39040 - DNA, 96 bp, Fusarium cuneirostrum
  misc_feature: 44
aacaacgtgaggagacgaacagagtgagtttgtattctatccggaggaggagtgaacgagtgagcgatcatctacttacattaattgctggacagc

SEQ ID NO: 39041 - DNA, 96 bp, Fusarium cuneirostrum
  misc_feature: 44
gctggtgactcgcttgttcaagctcgagcaggcacaaaagtaaaaaaacagaagcaagttcatgttttgcgcgacagcgctgaagaagtgggcgtc

SEQ ID NO: 39042 - DNA, 96 bp, Fusarium cuneirostrum
  misc_feature: 44
cgacacgtcgcctgaaggctccgtaagtttagaacatagttcttgcttggaggatgaactcttcacttgagttcagtctattgtcaatccctcagc

SEQ ID NO: 39043 - DNA, 96 bp, Fusarium cuneirostrum
  misc_feature: 44
atatgcgagcccataaccttacgtggggcgagacaaataattattaaaaccacttttaatgtgtcgagaaccactactttttttcacttggcgagc

SEQ ID NO: 39044 - DNA, 96 bp, Fusarium cuneirostrum
  misc_feature: 44
gagatcatcgcatttgtgcgtgacgcattctgagaagatgcgaagttgcgagggaggaaagcggagaatgctggctgaatgtccgcgggctgcggc

SEQ ID NO: 39045 - DNA, 96 bp, Fusarium cuneirostrum
  misc_feature: 44
caatccttcaccctgcacgctacgcgctcgggctcaggactatcttgggtacatgatcacgactacgattcaaaataataataatgtcacatatgc

SEQ ID NO: 39046 - DNA, 96 bp, Fusarium cuneirostrum
  misc_feature: 44
gcactcacttcagtcgcatcctgcattcatgtttgactgctgtcaattgaagtcatcaccatctctgtgtgatgtctgtaacgtcgctacgtgttc

SEQ ID NO: 39047 - DNA, 96 bp, Fusarium cuneirostrum
  misc_feature: 44
gcaaggtcactgctcacgataacatcatcaattgaccaacagtcaatgcgcacatcgaaagatgataccgaagtgggtgtacgaggtgagtagatg

SEQ ID NO: 39048 - DNA, 96 bp, Fusarium cuneirostrum
  misc_feature: 44
gatgtggaagtgatgatgacttcaattacgtagattttagagcgagtactaagtaggtagggagcgaggctgaaaaacctagagcttacagtaggg

SEQ ID NO: 39049 - DNA, 96 bp, Fusarium cuneirostrum
  misc_feature: 44
cacatatcactgtctatactaactacaataccacttgaggtcatcaccattacctattccggtaagtctcacaaagcatcgttggagttactcctc

SEQ ID NO: 39050 - DNA, 96 bp, Fusarium cuneirostrum
  misc_feature: 44
actccgggtcatcttacacacagtgacatttcatgtttacgtgaggggattcacagagcgcatctctgttgaattaaagtaacatcacatcgtctc

SEQ ID NO: 39051 - DNA, 96 bp, Fusarium cuneirostrum
  misc_feature: 44
gacttagtgtgcgagtgattgattaaattgtaatcgtagatgtgaatgtgaataacttcaaaagtattttcccgaggccgaggacgtaggacgcag

SEQ ID NO: 39052 - DNA, 96 bp, Fusarium cuneirostrum
  misc_feature: 44
gactcgatcacctctcgcaggataccaagtcgatcgtacatctccttcactacttcttccttccgaagatagcttaccgtagaaaagatatgcgtc

SEQ ID NO: 39053 - DNA, 96 bp, Fusarium cuneirostrum
  misc_feature: 44
ctctcgggggaaaagacgctgtcttatactcctcgactctgtctgcggggtatgagattgtggacggaacgttcgtacctctctcatttgtccgtc

SEQ ID NO: 39054 - DNA, 96 bp, Fusarium cuneirostrum
  misc_feature: 44
gacagatgtcgaggggaaagggtacatggcgagagcagcgctcgaggtggatttgacggagtctcaaaactggaacagtttttgtatggactcgat

SEQ ID NO: 39055 - DNA, 96 bp, Fusarium cuneirostrum
  misc_feature: 44
gaaggattgtcaaagtcttctcatctgccagggaagagttacttccccaagcaggaactgtgaaatagagaccgagccataaggcgaggtgttgtc

SEQ ID NO: 39056 - DNA, 96 bp, Fusarium cuneirostrum
  misc_feature: 44
atattctttttttattattttctcttttttttcttttttataattatatctttttttttttcttttaattatttatttatttttaattcttgattc

SEQ ID NO: 39057 - DNA, 96 bp, Fusarium cuneirostrum
  misc_feature: 44
gaactcaagtgaagagttcattgcccaagcaagaactgtgtaaagaattacggaggcgtaagccgacgtgcagtacgagaccgaggaacgaggtcg

SEQ ID NO: 39058 - DNA, 96 bp, Fusarium cuneirostrum
  misc_feature: 44
gaacgttccgtccacaatctcataccccgcagacagagtcgaggagtataagacagcgtcttttcccccgagaggttgagtgagcaggcgaactct

SEQ ID NO: 39059 - DNA, 96 bp, Fusarium cuneirostrum
  misc_feature: 44
caatcatcatcgttgagagattgatctggaacgtcttgatttttgaagcttaacgggagagttcgtcttcgcttcggaggtggcgctgcatctttc

SEQ ID NO: 39060 - DNA, 96 bp, Fusarium cuneirostrum
  misc_feature: 44
gaaacgagggctgataactttggtctataagcggtttcctttcaaacgcgtgcgttgattggaagctgggggaacaccgaggaacgaggggatggg

SEQ ID NO: 39061 - DNA, 96 bp, Fusarium cuneirostrum
  misc_feature: 44
gaaaagtgcgtcgcatacttggatgcgtcgcatgcttatcatgtacgttacatcacaagtgagtgaaacacacaagcgagtgaaacaaaaatccct

SEQ ID NO: 39062 - DNA, 96 bp, Fusarium cuneirostrum
  misc_feature: 44
cgtcctcgggattcgggactattccagtgtggatgaaaatgaggccattcacaactccatctacagtaacatcatgctcactaatctaataaaaag

SEQ ID NO: 39063 - DNA, 96 bp, Fusarium cuneirostrum
  misc_feature: 44
ctttgggattttctgcgtctggagtgacgatggaagaggtgtcgaaggtttatctcgatgcggagaagaaacggagatcgagggctgtaagagcgg

SEQ ID NO: 39064 - DNA, 96 bp, Fusarium cuneirostrum
  misc_feature: 44
cttcccgagaagatgctgtccagcaattaatgtaagtagatgatcgctcactcgttcactcctcctccggatagaatacaaactcactctgttcgt

SEQ ID NO: 39065 - DNA, 96 bp, Fusarium cuneirostrum
  misc_feature: 44
acgacacgtcgcctgaaggctccgtaagtttagaacatagttcttgcttggaggatgaactcttcacttgagttcagtctattgtcaatccctcag

SEQ ID NO: 39066 - DNA, 96 bp, Fusarium cuneirostrum
  misc_feature: 44
ctctgcttggagatgaactcttcacatgcagatgagactctactagtcaatccttcaggctgcgtcgttcctcctcgccctcaggactcatttatg

SEQ ID NO: 39067 - DNA, 96 bp, Fusarium cuneirostrum
  misc_feature: 44
caacaaccctttcgggtctctacaaaatcaaaacatttacatctgctgggctccctctcggcacacgcccaagatactgtccacaacctcatctag

SEQ ID NO: 39068 - DNA, 96 bp, Fusarium cuneirostrum
  misc_feature: 44
cgggaacagggaggttcacggcataaaagttgaaaagtgttattttgcatagcgaaaggtgatggtggaaattgtgttgtagcaaaatttgatatg

SEQ ID NO: 39069 - DNA, 96 bp, Fusarium cuneirostrum
  misc_feature: 44
caaaaaggctcgctaaaaaacgaaggtatcgcaacatccaaaacaggaaacaatgtagactaatctaagatacaaaacctccgaaaacgcccagcg

SEQ ID NO: 39070 - DNA, 96 bp, Fusarium cuneirostrum
  misc_feature: 44
aatcatcatcgttgagagattgatctggaacgtcttgatttttgaagcttaacgggagagttcgtcttcgcttcggaggtggcgctgcatctttcg

SEQ ID NO: 39071 - DNA, 96 bp, Fusarium cuneirostrum
  misc_feature: 44
ccttttgaggactttatagtcgatattcttcagtcctttacatagccactagctataggttataagtgagaataatctatcgattatatattccgg

SEQ ID NO: 39072 - DNA, 96 bp, Fusarium cuneirostrum
  misc_feature: 44
aaactggggcagcaaccggctacgcctggaagctgtactcagtccacgagctgtcccagcttgtcccgtgtcccgtagtccccccctataccaagg

SEQ ID NO: 39073 - DNA, 96 bp, Fusarium cuneirostrum
  misc_feature: 44
ccgggtcatcttacacacagtgacatttcatgtttacgtgaggggattcacagagcgcatctctgttgaattaaagtaacatcacatcgtctccct

SEQ ID NO: 39074 - DNA, 96 bp, Fusarium cuneirostrum
  misc_feature: 44
ccgatgctctcctgtcctcctccgtcgtccttcctcgcactcgaaccatctcgttcatcactccgtgatacaaaagaataaaccacgttcgcccgt

SEQ ID NO: 39075 - DNA, 96 bp, Fusarium cuneirostrum
  misc_feature: 44
acatcacacagagatggtgatgacttcaattgacagcagtcaaacatgaatgcaggatgcgactgaagtgagtgcacgaggagaaataaaagaggg

SEQ ID NO: 39076 - DNA, 96 bp, Fusarium cuneirostrum
  misc_feature: 44
ccaatcatcatcgttgagagattgatctggaacgtcttgatttttgaagcttaacgggagagttcgtcttcgcttcggaggtggcgctgcatcttt

SEQ ID NO: 39077 - DNA, 96 bp, Fusarium cuneirostrum
  misc_feature: 44
aggtgcagaacgagtcgaccgacagggagacgatgtgatgttactttaattcaacagagatgcgctctgtgaatcccctcacgtaaacatgaaatg

SEQ ID NO: 39078 - DNA, 96 bp, Fusarium cuneirostrum
  misc_feature: 44
acactacaattacaattacaattacaatcagtcacgatggctcgccattagggagggaaatggtgctcgacaagtttaaagaagtgtatttaaatg

SEQ ID NO: 39079 - DNA, 96 bp, Fusarium cuneirostrum
  misc_feature: 44
ataagacggaacgtctgcccctgcgaggacgcagtcgaagacttgagactgtatttatttttttgtgtgagacggagtcgagtctgatttcgactg

SEQ ID NO: 39080 - DNA, 96 bp, Fusarium cuneirostrum
  misc_feature: 44
aatatctccgatatccttaattaaactgacgtaaaaggcgtcgaaatcgcgctgcgatccaatcaaatagcgattcaaatttagtctcgggaagtg

SEQ ID NO: 39081 - DNA, 96 bp, Fusarium cuneirostrum
  misc_feature: 44
atattcccatataaatattacaagatcttactaagtatatttaaaacatagtaaatagtttttattaatttcgtgcctctaggcataacgtatgtg

SEQ ID NO: 39082 - DNA, 96 bp, Fusarium cuneirostrum
  misc_feature: 44
caattcaaatcacaagtcatacatcaaagtcatgtctgctcgcataaaatagtaattggggctcgtcaaacgagtctatttaaaacgtatttattt

SEQ ID NO: 39083 - DNA, 96 bp, Fusarium cuneirostrum
  misc_feature: 44
atctcttatagactaacgcgagtgacccggaacggggcaaacgagcgtccataactttggtctataagaggtttttttccaaaacgcaccgcgttg

SEQ ID NO: 39084 - DNA, 96 bp, Fusarium cuneirostrum
  misc_feature: 44
atggagttgtgaatggcctcattttcatccacactggaatagtcccgaatcccgaggacgaaggacgcagggtgagggattgacaagagtatgttg

SEQ ID NO: 39085 - DNA, 96 bp, Fusarium cuneirostrum
  misc_feature: 44
aaacttgacgctacggcacactgagcaagtagtcaatgctatcgtttccagattcttttcgccaaaccactcatcgaatgaggcgaagagtatttg

SEQ ID NO: 39086 - DNA, 96 bp, Fusarium cuneirostrum
  misc_feature: 44
attgctgattgctgaccttggggtgtttgctgatgtagattgtaagtaaacgcctgagatggatgagatagcgatgattgctaaccttgggtgttt

SEQ ID NO: 39087 - DNA, 96 bp, Fusarium cuneirostrum
  misc_feature: 44
atgggaagatttctgagattgtatgggcaacgacctggaatcagagtgagaatctggtacagattgttagcgaccgaagggagctttccagcttat

SEQ ID NO: 39088 - DNA, 96 bp, Fusarium cuneirostrum
  misc_feature: 44
atcttgtggtgttttagtaacgtcgctacgtgttccttcgtcacactcactccgcacgtcgccctccgggctccgtaggattatacagttccgact

SEQ ID NO: 39089 - DNA, 96 bp, Fusarium cuneirostrum
  misc_feature: 44
atcaacccatcactcatgggttatagtaacctcgcatcgtctcgccctgctcgactacgctccgcacctccctccggtcggtagaggactacagtt

SEQ ID NO: 39090 - DNA, 96 bp, Fusarium cuneirostrum
  misc_feature: 44
acgatagcttcacatgtattatgggcgagcattaaataaagacggagcgcacataaactaaaaagggcacacatattagtgagctcccgcatttat

SEQ ID NO: 39091 - DNA, 96 bp, Fusarium cuneirostrum
  misc_feature: 44
actcgtcctccgtcctcgaaaaaaataaaacaagtcagagttcgcctgctcactcaacctctcgggggaaaagacgctgtcttatactcctcgact

SEQ ID NO: 39092 - DNA, 96 bp, Fusarium cuneirostrum
  misc_feature: 44
aaatgaaatgtgatatgaacgtagtcgtagtaagaagacatgggaatggcttcatccataaatgagtcctgagggcgaggaggaacgacgcagcct

SEQ ID NO: 39093 - DNA, 96 bp, Fusarium cuneirostrum
  misc_feature: 44
actcacttcagtcgcatcctgcattcatgtttgactgctgtcaattgaagtcatcaccatctctgtgtgatgtctgtaacgtcgctacgtgttcct

SEQ ID NO: 39094 - DNA, 96 bp, Fusarium cuneirostrum
  misc_feature: 44
actctggtgttttaagtaacctcacttcgtgctcgctacgctctcactccgttccgcaccttcgcttcgctcggtattgagaccacagtctctgct

SEQ ID NO: 39095 - DNA, 96 bp, Fusarium cuneirostrum
  misc_feature: 44
acttcagtcgcatcctgcattcatgtttgactgctgtcaattgaagtcatcaccatctctgtgtgatgtctgtaacgtcgctacgtgttccttcgt

SEQ ID NO: 39096 - DNA, 96 bp, Fusarium cuneirostrum
  misc_feature: 44
aatctcataccccgcagacagagtcgaggagtataagacagcgtcttttcccccgagaggttgagtgagcaggcgaactctgacttgttttatttt

SEQ ID NO: 39097 - DNA, 96 bp, Fusarium cuneirostrum
  misc_feature: 43
aaattaaaaaaaaaaagaaatattaaaaagaaaagaaaaaagaaaaaagaatcaagaattaaaaataaataaataattaaaagaaaaaaaaaaaaa

SEQ ID NO: 39098 - DNA, 96 bp, Fusarium cuneirostrum
  misc_feature: 43
gagatttgtagagttgcctgatgtggaagtgatgatgacttcaattacgtagattttagagcgagtactaagtaggtagggagcgaggctgaaaaa

SEQ ID NO: 39099 - DNA, 96 bp, Fusarium cuneirostrum
  misc_feature: 43
ttttctataatttaatcctttttaccttttagcgttaatttaatatcttatttatttatttaagttttttaattttagccttaaataagataacct

SEQ ID NO: 39100 - DNA, 96 bp, Fusarium cuneirostrum
  misc_feature: 43
ttttcccccgagaggttgagtgagcaggcgaactctgacttgttttatttttttcgaggacggaggacgagtttaccgcaacaacgtgaggagacg

SEQ ID NO: 39101 - DNA, 96 bp, Fusarium cuneirostrum
  misc_feature: 43
tttgggattttctgcgtctggagtgacgatggaagaggtgtcgaaggtttatctcgatgcggagaagaaacggagatcgagggctgtaagagcgga

SEQ ID NO: 39102 - DNA, 96 bp, Fusarium cuneirostrum
  misc_feature: 43
ggatgaggaatacatttacagtcaccaacataaacattcacaatctgaaatcatgctcgccaagtgaaaaaaagtagtggttctcgacacattaaa

SEQ ID NO: 39103 - DNA, 96 bp, Fusarium cuneirostrum
  misc_feature: 43
tttaatatggggcgaggcaaataaatacgttttaaatagactcgtttgacgagccccaattactattttatgcgagcagacatgactttgatgtat

SEQ ID NO: 39104 - DNA, 96 bp, Fusarium cuneirostrum
  misc_feature: 43
aaacgagtctatttaaaacgtatttatttgcctcgccccatattaaacagtggcgagcaaagtatgtggagtcggcagaagtgaagtcatcaccaa

SEQ ID NO: 39105 - DNA, 96 bp, Fusarium cuneirostrum
  misc_feature: 43
tcgggggaaaagacgctgtcttatactcctcgactctgtctgcggggtatgagattgtggacggaacgttcgtacctctctcatttgtccgtccaa

SEQ ID NO: 39106 - DNA, 96 bp, Fusarium cuneirostrum
  misc_feature: 43
catcctgattccctcgtgccccgcactcggtgtcatcttcgaccaccgtctcagttcatctctgatgaagttatcgccaaccactgtcgggcgcaa

SEQ ID NO: 39107 - DNA, 96 bp, Fusarium cuneirostrum
  misc_feature: 43
ttgaccaacagtcaatgcgcacatcgaaagatgataccgaagtgggtgtacgaggtgagtagatgagggagtgcggatgcgcgaccgacagaagtg

SEQ ID NO: 39108 - DNA, 96 bp, Fusarium cuneirostrum
  misc_feature: 43
ttctattaatttttatccttaagattatttcttgcggctattttccctagtatataacctatatctataattactttgccgtctaatataatatta

SEQ ID NO: 39109 - DNA, 96 bp, Fusarium cuneirostrum
  misc_feature: 43
ttcgtctcctcacgttgttgcggtaaactcgtcctccgtcctcgaaaaaaataaaacaagtcagagttcgcctgctcactcaacctctcgggggaa

SEQ ID NO: 39110 - DNA, 96 bp, Fusarium cuneirostrum
  misc_feature: 43
tattaagaaatgtagcggaataatattattatataccttaataatagtattataccggatattagtattatactatatatatagactaatagcgaa

SEQ ID NO: 39111 - DNA, 96 bp, Fusarium cuneirostrum
  misc_feature: 43
agtcgaagacttgagactgtatttatttttttgtgtgagacggagtcgagtctgatttcgactggaatcagttctgtttattccacggccgtggaa

SEQ ID NO: 39112 - DNA, 96 bp, Fusarium cuneirostrum
  misc_feature: 43
ttccaagaataatactcgtcccagcctcgtccttactcgaaataaataatcgatcgtcgctccactcctattgctcgtcacttctcgttccgatat

SEQ ID NO: 39113 - DNA, 96 bp, Fusarium cuneirostrum
  misc_feature: 43
ttcaattgacgcagagtcaaacacgacagtgaagaatgacccggagtgtgggtcatgacgtgagtaaagtaggagggagcctgtggggcgaccgta

SEQ ID NO: 39114 - DNA, 96 bp, Fusarium cuneirostrum
  misc_feature: 43
ttattcagacgagctttggtgaaagatcgaaaagaatggcaagggaaccaatacagcccaatatgcaatccaaatatcgacttccactatttccct

SEQ ID NO: 39115 - DNA, 96 bp, Fusarium cuneirostrum
  misc_feature: 43
acgctacgcgctcggctcgtggactcttttgaggttatcaccatctactttatatatgctcgcgtaacacaagtgcgggagctcaccctactgtaa

SEQ ID NO: 39116 - DNA, 96 bp, Fusarium cuneirostrum
  misc_feature: 43
aaagaaaaagaagccatcgtcatctccgaattaggcaacctcgcggtatgctggtggattaccgctccgtccacacgcctccgcaatcttaaaaca

SEQ ID NO: 39117 - DNA, 96 bp, Fusarium cuneirostrum
  misc_feature: 43
tgttgatcatcttttttctactcgacgatggcttcgtcgcacatgaatgaaatggaatgagccgagatgcagggcacgaggacgtatgtggacccg

SEQ ID NO: 39118 - DNA, 96 bp, Fusarium cuneirostrum
  misc_feature: 43
actataggccccctcaagtacttaagggcctggagaccggcccatctcccgagcctggtcttcccaaccacattgcgctcggaagacaaagccaca

SEQ ID NO: 39119 - DNA, 96 bp, Fusarium cuneirostrum
  misc_feature: 43
tgtgatatcctacaacattatacttggtcgtctctactcctcctccctcttaccataacgctcccgcaaccctgactcgatcacctctcgcaggat

SEQ ID NO: 39120 - DNA, 96 bp, Fusarium cuneirostrum
  misc_feature: 43
tgtgaataacttcaaaagtattttcccgaggccgaggacgtaggacgcaggctgagggattgacaatagactgaactcaagtgaagagttcatcct

SEQ ID NO: 39121 - DNA, 96 bp, Fusarium cuneirostrum
  misc_feature: 43
cgacttttttctacttggcgagcacttaatgatacttgtgatttgtatgtgaccttaaatgaaatgtgatatgaacgtagtcgtagtaagaagaca

SEQ ID NO: 39122 - DNA, 96 bp, Fusarium cuneirostrum
  misc_feature: 43
gaataacttcaaaagtattttcccgaggccgaggacgtaggacgcaggctgagggattgacaatagactgaactcaagtgaagagttcattgccca

SEQ ID NO: 39123 - DNA, 96 bp, Fusarium cuneirostrum
  misc_feature: 43
tggagttgtgaatggcctcattttcatccacactggaatagtcccgaatcccgaggacgaaggacgcagggtgagggattgacaagagtatgttgg

SEQ ID NO: 39124 - DNA, 96 bp, Fusarium cuneirostrum
  misc_feature: 43
tggaatcagttctgtttattccacggccgtggaaacacgaacaggtgagtgtctatacatatctggaagatgaagtgaaggatgaacgcaatgcta

SEQ ID NO: 39125 - DNA, 96 bp, Fusarium cuneirostrum
  misc_feature: 43
tgctgtgtttgagttgggtcaagtgtggaggagtaactccaacgatgctttgtgagacttaccggaataggtaatggtgatgacctcaagtggtat

SEQ ID NO: 39126 - DNA, 96 bp, Fusarium cuneirostrum
  misc_feature: 43
cagttctgtttattccacggccgtggaaacacgaacaggtgagtgtctatacatatctggaagatgaagtgaaggatgaacgcaatgctaatagca

SEQ ID NO: 39127 - DNA, 96 bp, Fusarium cuneirostrum
  misc_feature: 43
cctcaaggtatctacgattgacaatccctctcgcacaccgtcgcatgcgctcctcctgctacgggactattatggtgtgggttgaagctattcgca

SEQ ID NO: 39128 - DNA, 96 bp, Fusarium cuneirostrum
  misc_feature: 43
gagttgtgaatggcctcattttcatccacactggaatagtcccgaatcccgaggacgaaggacgcagggtgagggattgacaagagtatgttggca

SEQ ID NO: 39129 - DNA, 96 bp, Fusarium cuneirostrum
  misc_feature: 43
tgcactctcatgaagataactgaaccacatcttgtggtgttttagtaacgtcgctacgtgttccttcgtcacactcactccgcacgtcgccctccg

SEQ ID NO: 39130 - DNA, 96 bp, Fusarium cuneirostrum
  misc_feature: 43
gaatgtaaatgtaaatgtaaatgtcttcttttattgttttcactgagtccggcggaggaggagggacgacggagccggattggcaagagtagtgca

SEQ ID NO: 39131 - DNA, 96 bp, Fusarium cuneirostrum
  misc_feature: 43
tgatcctgccttcgcagtccatgcacctccacttgaggtcatcatgcactctcatgaagataactgaaccacatcttgtggtgttttagtaacgtc

SEQ ID NO: 39132 - DNA, 96 bp, Fusarium cuneirostrum
  misc_feature: 43
tcggtcgattagtatatatgtgtgcccgtctcgtgcacatgtgtccagacacaaatcattatcactcacccgttcgtgatcgctttcgctctatca

SEQ ID NO: 39133 - DNA, 96 bp, Fusarium cuneirostrum
  misc_feature: 43
gtgcggagtgagtgtgacgaaggaacacgtagcgacgttactaaaacaccacaagatgtggttcagttatcttcatgagagtgcatgatgacctca

SEQ ID NO: 39134 - DNA, 96 bp, Fusarium cuneirostrum
  misc_feature: 43
gagggtgacccgaccccgatgtgtgaccgagacagatgtcgaggggaaagggtacatggcgagagcagcgctcgaggtggatttgacggagtctca

SEQ ID NO: 39135 - DNA, 96 bp, Fusarium cuneirostrum
  misc_feature: 43
tgacacaagtgtccctccccagctttgtaatcagctaaagcttgaaaacaaaacctcttatagaccaaagttatggacgctcgtttgccccgttcc

SEQ ID NO: 39136 - DNA, 96 bp, Fusarium cuneirostrum
  misc_feature: 43
tcctcgccccctcgtcagtatccacttatgcccggatcgctacgctgcaccttattcgtcgttcctcctcataacgttccgtccacccgcacttca

SEQ ID NO: 39137 - DNA, 96 bp, Fusarium cuneirostrum
  misc_feature: 43
tgaacgagatggttcgagtgcgaggaaggacgacggaggaggacaggagagcatcggagatgcacatgggcgcagagcgccagagacaatctttgt

SEQ ID NO: 39138 - DNA, 96 bp, Fusarium cuneirostrum
  misc_feature: 43
gatgacttcacttctgccgactccacatactttgctcgccactgtttaatatggggcgaggcaaataaatacgttttaaatagactcgtttgacga

SEQ ID NO: 39139 - DNA, 96 bp, Fusarium cuneirostrum
  misc_feature: 43
taatgggcggacgcccacttcttcagcgctgtcgcgcaaaacatgaacttgcttctgtttttttacttttgtgcctgctcgagcttgaacaagcga

SEQ ID NO: 39140 - DNA, 96 bp, Fusarium cuneirostrum
  misc_feature: 43
agacagagtcgaggagtataagacagcgtcttttcccccgagagggcagagggaagagtttccctcctacatcatctgtctgagctcagagagcga

SEQ ID NO: 39141 - DNA, 96 bp, Fusarium cuneirostrum
  misc_feature: 43
tccagcaattaatgtaagtagatgatcgctcactcgttcactcctcctccggatagaatacaaactcactctgttcgtctcctcacgttgttgcgg

SEQ ID NO: 39142 - DNA, 96 bp, Fusarium cuneirostrum
  misc_feature: 43
tccaagatctgtccctcttgatcaaccttcgcatggctcaggtttctattacttcttcgatctcgtttcactccatctcttttcatgatctagtga

SEQ ID NO: 39143 - DNA, 96 bp, Fusarium cuneirostrum
  misc_feature: 43
tcactgtctatactaactacaataccacttgaggtcatcaccattacctattccggtaagtctcacaaagcatcgttggagttactcctccacact

SEQ ID NO: 39144 - DNA, 96 bp, Fusarium cuneirostrum
  misc_feature: 43
tcaacccatcactcatgggttatagtaacctcgcatcgtctcgccctgctcgactacgctccgcacctccctccggtcggtagaggactacagttc

SEQ ID NO: 39145 - DNA, 96 bp, Fusarium cuneirostrum
  misc_feature: 43
tcaaacttgacgctacggcacactgagcaagtagtcaatgctatcgtttccagattcttttcgccaaaccactcatcgaatgaggcgaagagtatt

SEQ ID NO: 39146 - DNA, 96 bp, Fusarium cuneirostrum
  misc_feature: 43
tatctacactaaaaatctccaagatcgtcatcgacccattcatcaccaaactcgtccacaccctcgacgagtgtcttcacctcttctacagccctc

SEQ ID NO: 39147 - DNA, 96 bp, Fusarium cuneirostrum
  misc_feature: 43
tatatattgagctgtcgtaggacgctttctggagttggggatccaacgacctttacttttttatttgaccggaggtcattgtatacgacggacgtc

SEQ ID NO: 39148 - DNA, 96 bp, Fusarium cuneirostrum
  misc_feature: 43
attatttcaggggctaagcaactcaattgcgataactaccatctaacgtatagtagtggtaccccagggaatattagagaaggcactgcgactata

SEQ ID NO: 39149 - DNA, 96 bp, Fusarium cuneirostrum
  misc_feature: 43
cccaagcagaactatgttctgaataccgaccgaacggagtgagggaaggtgcggaatggagtgggagcagagcgaccacggaatgaggttactata

SEQ ID NO: 39150 - DNA, 96 bp, Fusarium cuneirostrum
  misc_feature: 43
aaagatctctttagctataaaattaataaattaagattatttaatagaagtttaattaactttagataactttaatcttagttagaaagtcttata

SEQ ID NO: 39151 - DNA, 96 bp, Fusarium cuneirostrum
  misc_feature: 43
tataagacggaacgtctgcccctgcgaggacgcagtcgaagacttgagactgtatttatttttttgtgtgagacggagtcgagtctgatttcgact

SEQ ID NO: 39152 - DNA, 96 bp, Fusarium cuneirostrum
  misc_feature: 43
cgatagcttcacatgtattatgggcgagcattaaataaagacggagcgcacataaactaaaaagggcacacatattagtgagctcccgcatttata

SEQ ID NO: 39153 - DNA, 96 bp, Fusarium cuneirostrum
  misc_feature: 43
tagttagatagagcttaaatataacgcggaattactaaactttagctatatataataactctgaacataatgcacactccctcaagttcaaggcag

SEQ ID NO: 39154 - DNA, 96 bp, Fusarium cuneirostrum
  misc_feature: 43
tagacaccatcgtagcttgagtcctgagccgggaggagcgcatgcgacggtgcggtgaaggattgactagtagagttaatcttgacggagtcattt

SEQ ID NO: 39155 - DNA, 96 bp, Fusarium cuneirostrum
  misc_feature: 43
aatctaataaaaagaataaccagggctcgtcaaacgagtttatttaaattattatttgcctcgccctgcttatgttatgtcaagggctcacaagta

SEQ ID NO: 39156 - DNA, 96 bp, Fusarium cuneirostrum
  misc_feature: 43
ggtcgcaaggtcactgctcacgataacatcatcaattgaccaacagtcaatgcgcacatcgaaagatgataccgaagtgggtgtacgaggtgagta

SEQ ID NO: 39157 - DNA, 96 bp, Fusarium cuneirostrum
  misc_feature: 43
ccatgtgatcctgccttcgcagtccatgcacctccacttgaggtcatcatgcactctcatgaagataactgaaccacatcttgtggtgttttagta

SEQ ID NO: 39158 - DNA, 96 bp, Fusarium cuneirostrum
  misc_feature: 43
taccttataatatagctagcatatttcctaacttatattccactacttaagttaccgtatttagctacttcttctatttagcgctatagctaatct

SEQ ID NO: 39159 - DNA, 96 bp, Fusarium cuneirostrum
  misc_feature: 43
taccacttgaggtcatcaccattacctattccggtaagtctcacaaagcatcgttggagttactcctccacacttgacccaactcaaacacagcat

SEQ ID NO: 39160 - DNA, 96 bp, Fusarium cuneirostrum
  misc_feature: 43
taatcttaagtctttctaagataataaaacctatataggtaatacttattagattacctacttccttattgtaagagactgagctcttatctaagc

SEQ ID NO: 39161 - DNA, 96 bp, Fusarium cuneirostrum
  misc_feature: 43
gagccgagacagattcctcaccctctctcatcctctctcatcctctctcatcctctctcatcctctctcatcctctctcatcctctctcatcctta

SEQ ID NO: 39162 - DNA, 96 bp, Fusarium cuneirostrum
  misc_feature: 43
aaacgagagggctagtatatattaagactactatagggccaaacccgatatagcgataaagtaagactaatacttatagggattactttaagctta

SEQ ID NO: 39163 - DNA, 96 bp, Fusarium cuneirostrum
  misc_feature: 43
cataacgctcccgcaaccctgactcgatcacctctcgcaggataccaagtcgatcgtacatctccttcactacttcttccttccgaagatagctta

SEQ ID NO: 39164 - DNA, 96 bp, Fusarium cuneirostrum
  misc_feature: 43
taaccttataattactaattcttaggttttataatttcttttacgagaattattaattattaatcttaattacctttccgatataattaataaggg

SEQ ID NO: 39165 - DNA, 96 bp, Fusarium cuneirostrum
  misc_feature: 43
cttcttcagcgctgtcgcgcaaaacatgaacttgcttctgtttttttacttttgtgcctgctcgagcttgaacaagcgagtcaccagcaggtgtta

SEQ ID NO: 39166 - DNA, 96 bp, Fusarium cuneirostrum
  misc_feature: 43
taaacagaactgattccagtcgaaatcagactcgactccgtctcacacaaaaaaataaatacagtctcaagtcttcgactgcgtcctcgcaggggc

SEQ ID NO: 39167 - DNA, 96 bp, Fusarium cuneirostrum
  misc_feature: 43
aatgtcagcaagctgactaaaggcagactcagtccacacgttcgtccctcactgtcccgtgtcccgtagtccccccctataccaaggttaagaaac

SEQ ID NO: 39168 - DNA, 96 bp, Fusarium cuneirostrum
  misc_feature: 43
gttacgcgagcatatataaagtagatggtgataacctcaaaagagtccacgagccgagcgcgtagcgtgcaggcgaggggattgtcaatgtaattt

SEQ ID NO: 39169 - DNA, 96 bp, Fusarium cuneirostrum
  misc_feature: 43
gacacactttccccggtcggccttcggcctccccactcggactctccgtcctcgtcgcccacattccatgtgatcctgccttcgcagtccatgcac

SEQ ID NO: 39170 - DNA, 96 bp, Fusarium cuneirostrum
  misc_feature: 43
gtgaataacttcaaaagtattttcccgaggccgaggacgtaggacgcaggctgagggattgacaatagactgaactcaagtgaagagttcattgcc

SEQ ID NO: 39171 - DNA, 96 bp, Fusarium cuneirostrum
  misc_feature: 43
gtgaagagttcatctccaagcagagactgtggtctcaataccgagcgaagcgaaggtgcggaacggagtgagagcgtagcgagcacgaagtgaggt

SEQ ID NO: 39172 - DNA, 96 bp, Fusarium cuneirostrum
  misc_feature: 43
ctcctcacgttgttgcggtaaactcgtcctccgtcctcgaaaaaaataaaacaagtcagagttcgcctgctcactcaacctctcgggggaaaagac

SEQ ID NO: 39173 - DNA, 96 bp, Fusarium cuneirostrum
  misc_feature: 43
agtcaatagacatccgaggtcacgaggaatgtggatgtagccactcgaatgagggacgaagaagagtggagtaagtaagcacgagaaggaggggac

SEQ ID NO: 39174 - DNA, 96 bp, Fusarium cuneirostrum
  misc_feature: 43
cagctactctaacaccagctggaaccaagaggcgtgagcttgaccgaatcaaagactgcattcccatcacgtccagcaatcgtgatgtccttggac

SEQ ID NO: 39175 - DNA, 96 bp, Fusarium cuneirostrum
  misc_feature: 43
cattgtttcctgttttggatgttgcgataccttcgttttttagcgagcctttttgctagtcaatggggcgaggcaaacactaaatatacttttgac

SEQ ID NO: 39176 - DNA, 96 bp, Fusarium cuneirostrum
  misc_feature: 43
gtaactcgatggagccaagggggcggaactattttcggactgaaatacgctgggcgttttcggaggttttgtatcttagattagtctacattgttt

SEQ ID NO: 39177 - DNA, 96 bp, Fusarium cuneirostrum
  misc_feature: 43
atctcgcgatttcgcccgccattctcagtttcgttcacatacaaaaagtatgtcgatttgagtccaatttgaatccgattttgcttgttcctcacc

SEQ ID NO: 39178 - DNA, 96 bp, Fusarium cuneirostrum
  misc_feature: 43
gggactgagtggaggtcggttttgttggacggacaaatgagagaggtacgaacgttccgtccacaatctcataccccgcagacagagtcgaggagt

SEQ ID NO: 39179 - DNA, 96 bp, Fusarium cuneirostrum
  misc_feature: 43
aactctcaccactcctgttccattcacattctacgtcacaattccatctaacactacaattacaattacaattacaatcagtcacgatggctcgcc

SEQ ID NO: 39180 - DNA, 96 bp, Fusarium cuneirostrum
  misc_feature: 43
ggagtcgagtctgatttcgactggaatcagttctgtttattccacggccgtggaaacacgaacaggtgagtgtctatacatatctggaagatgaag

SEQ ID NO: 39181 - DNA, 96 bp, Fusarium cuneirostrum
  misc_feature: 43
acatatcactgtctatactaactacaataccacttgaggtcatcaccattacctattccggtaagtctcacaaagcatcgttggagttactcctcc

SEQ ID NO: 39182 - DNA, 96 bp, Fusarium cuneirostrum
  misc_feature: 43
cctcctccatgatcctacactcttcgccttcgtgcctcaggctccctatttactgggaaggcaatggtgctgcgcacctaaagcctgactcagtcc

SEQ ID NO: 39183 - DNA, 96 bp, Fusarium cuneirostrum
  misc_feature: 43
gaggctgaaaaacctagagcttacagtagggtgagctcccgcacttgtgttacgcgagcatatataaagtagatggtgataacctcaaaagagtcc

SEQ ID NO: 39184 - DNA, 96 bp, Fusarium cuneirostrum
  misc_feature: 43
gaaggctcggtgcctctcccattctcccaaccgggtaactctagtccagttatggtcatagagatgttcaagcccagccggagtgtttgcaatagc

SEQ ID NO: 39185 - DNA, 96 bp, Fusarium cuneirostrum
  misc_feature: 43
gctacgcttatatcactaccgaatgagacccggaacgggtcgaaatgaggtggcataactttggtgatataagcggattccgggattgaacttgtt

SEQ ID NO: 39186 - DNA, 96 bp, Fusarium cuneirostrum
  misc_feature: 43
caaatgatccacaggcttccgcctgattgggtctccgaccccaccaagtgcgtgtcattggatgacacttgttctcacaggagttgcggtccccgc

SEQ ID NO: 39187 - DNA, 96 bp, Fusarium cuneirostrum
  misc_feature: 43
cctatctattatgcattagcctaaacggggcatactagccttagtagccttattagagagtatcccgattgcctacgtcctctagcttatatcggc

SEQ ID NO: 39188 - DNA, 96 bp, Fusarium cuneirostrum
  misc_feature: 43
aacagttcactcttctcgttcacaaatgcacaatcaattcaaatcacaagtcatacatcaaagtcatgtctgctcgcataaaatagtaattggggc

SEQ ID NO: 39189 - DNA, 96 bp, Fusarium cuneirostrum
  misc_feature: 43
gcaggctgagggattgacaatagactgaactcaagtgaagagttcattgcccaagcaagaactgtgtaaagaattacggaggcgtaagccgacgtg

SEQ ID NO: 39190 - DNA, 96 bp, Fusarium cuneirostrum
  misc_feature: 43
gcacgtcgccctacgggctccgtatttaaaaaaggaatggaagacctctctccgcgaggctcgtaactctttactcgagtttattagatagtccat

SEQ ID NO: 39191 - DNA, 96 bp, Fusarium cuneirostrum
  misc_feature: 43
gcaaataaatacgttttaaatagactcgtttgacgagccccaattactattttatgcgagcagacatgactttgatgtatgacttgtgatttgaat

SEQ ID NO: 39192 - DNA, 96 bp, Fusarium cuneirostrum
  misc_feature: 43
agggaaaagtgcgtcgcatacttggatgcgtcgcatgcttatcatgtacgttacatcacaagtgagtgaaacacacaagcgagtgaaacaaaaatc

SEQ ID NO: 39193 - DNA, 96 bp, Fusarium cuneirostrum
  misc_feature: 43
ctcgtcctccgtcctcgaaaaaaataaaacaagtcagagttcgcctgctcactcaacctctcgggggaaaagacgctgtcttatactcctcgactc

SEQ ID NO: 39194 - DNA, 96 bp, Fusarium cuneirostrum
  misc_feature: 43
gagtcacggcttatagtgagtcatgagtcttaccgtaagtttaggtcgggctcgcggtatataccgtgagtcgccgttcctaattagttgtccttt

SEQ ID NO: 39195 - DNA, 96 bp, Fusarium cuneirostrum
  misc_feature: 43
gagggacgaagaagagtggagtaagtaagcacgagaaggaggggaccgactgaagtgcgggtggacggaacgttatgaggaggaacgacgaataag

SEQ ID NO: 39196 - DNA, 96 bp, Fusarium cuneirostrum
  misc_feature: 43
acactcactccgcacgtcgccctccgggctccgtaggattatacagttccgactcgggcctccggcggtgtaatgactattgccaatccctcagtc

SEQ ID NO: 39197 - DNA, 96 bp, Fusarium cuneirostrum
  misc_feature: 43
gacgaacgtgtggactgagtcaggctttaggtgcgcagcaccattgccttcccagtaaatagggagcctgaggcacgaaggcgaagagtgtaggat

SEQ ID NO: 39198 - DNA, 96 bp, Fusarium cuneirostrum
  misc_feature: 43
accaagtgcgtgtcattggatgacacttgttctcacaggagttgcggtccccgcagcatggacggaacgttctacgtcccgccataggccaaggtc

SEQ ID NO: 39199 - DNA, 96 bp, Fusarium cuneirostrum
  misc_feature: 43
cttctgttggagccttttatttagtgttcgctccactactctctcggttgtgctcacatatcactgtctatactaactacaataccacttgaggtc

SEQ ID NO: 39200 - DNA, 96 bp, Fusarium cuneirostrum
  misc_feature: 43
gaaggcaggatcacatggaatgtgggcgacgaggacggagagtccgagtggggaggccgaaggccgaccggggaaagtgtgtcgagagcgaggggg

SEQ ID NO: 39201 - DNA, 96 bp, Fusarium cuneirostrum
  misc_feature: 43
gaaagaacctgcttagtaagctgcttagtaagctgcttagtaagctgcttagtaagctgcttagtaagctgcttagtaagctgcttagtaagctag

SEQ ID NO: 39202 - DNA, 96 bp, Fusarium cuneirostrum
  misc_feature: 43
cgcaaccctgactcgatcacctctcgcaggataccaagtcgatcgtacatctccttcactacttcttccttccgaagatagcttaccgtagaaaag

SEQ ID NO: 39203 - DNA, 96 bp, Fusarium cuneirostrum
  misc_feature: 43
ctttaaagttccccagactctcagttgcagcacgccgcttattatctcatatccgagataatctagaatgacggtaaatgataatcgatgacgacg

SEQ ID NO: 39204 - DNA, 96 bp, Fusarium cuneirostrum
  misc_feature: 43
ctaatctaataaaaagaataaccagggctcgtcaaacgagtttatttaaattattatttgcctcgccctgcttatgttatgtcaagggctcacaag

SEQ ID NO: 39205 - DNA, 96 bp, Fusarium cuneirostrum
  misc_feature: 43
cttaaatgaaatgtgatatgaacgtagtcgtagtaagaagacatgggaatggcttcatccataaatgagtcctgagggcgaggaggaacgacgcag

SEQ ID NO: 39206 - DNA, 96 bp, Fusarium cuneirostrum
  misc_feature: 43
ctgctccgcaccccatcgctccgctcggggtagaattatacagtcatggactcggccctgcgggcagctgcactactcttgccaatccggctccgt

SEQ ID NO: 39207 - DNA, 96 bp, Fusarium cuneirostrum
  misc_feature: 43
agactgcccatttggtccgtttgacttggctagactaaactagcagtccgtctgacattggtcagactggactagcagtctgactgagatctgcag

SEQ ID NO: 39208 - DNA, 96 bp, Fusarium cuneirostrum
  misc_feature: 43
ctctcgcggcccaaatgatccacaggcttccgcctgattgggtctccgaccccaccaagtgcgtgtcattggatgacacttgttctcacaggagtt

SEQ ID NO: 39209 - DNA, 96 bp, Fusarium cuneirostrum
  misc_feature: 43
atgacttcacttctgccgactccacatactttgctcgccactgtttaatatggggcgaggcaaataaatacgttttaaatagactcgtttgacgag

SEQ ID NO: 39210 - DNA, 96 bp, Fusarium cuneirostrum
  misc_feature: 43
caatcggagatttagtgagacgggcgaacgtggtttattcttttgtatcacggagtgatgaacgagatggttcgagtgcgaggaaggacgacggag

SEQ ID NO: 39211 - DNA, 96 bp, Fusarium cuneirostrum
  misc_feature: 43
ctcatgactccacattcgtcgcatcccactctcgtgtttgactactgtcaattgaggccatcacaaactgtgattacaacgcatcttgcgtgagtt

SEQ ID NO: 39212 - DNA, 96 bp, Fusarium cuneirostrum
  misc_feature: 43
ctcacttcgtgctcgctacgctctcactccgttccgcaccttcgcttcgctcggtattgagaccacagtctctgcttggagatgaactcttcacat

SEQ ID NO: 39213 - DNA, 96 bp, Fusarium cuneirostrum
  misc_feature: 43
ctatatccttagtacggacgaccggagggaggacgtgcggagtgagtgtgacgaaggaacacgtagcgacgttacagacatcacacagagatggtg

SEQ ID NO: 39214 - DNA, 96 bp, Fusarium cuneirostrum
  misc_feature: 43
ctacgacagctcaatatataaccctacgggtaatcgagtcgctcacaatccgttcgagcgagcgcgtaatgaaacgcgtcagaaaaaaggttgacg

SEQ ID NO: 39215 - DNA, 96 bp, Fusarium cuneirostrum
  misc_feature: 43
caatagtcattacaccgccggaggcccgagtcggaactgtataatcctacggagcccggagggcgacgtgcggagtgagtgtgacgaaggaacacg

SEQ ID NO: 39216 - DNA, 96 bp, Fusarium cuneirostrum
  misc_feature: 43
cgggacacgggacagtgaagaatgaacgtgtgtacccaggagtaatcgtcttgagtcagcttgctgaccttgacgaccccagtcaatagacatccg

SEQ ID NO: 39217 - DNA, 96 bp, Fusarium cuneirostrum
  misc_feature: 43
cgcgaggttgcctaattcggagatgacgatggcttctttttctttgtggtagatagtaatgtgacctgattgatttatgcgagcctctgtttaatt

SEQ ID NO: 39218 - DNA, 96 bp, Fusarium cuneirostrum
  misc_feature: 43
cgagaggaacggatgcgccgtgcgggacgtttcacgggaaaacgagttcaagcatcattcgcagctgacgacaagagcatggattctatggctggg

SEQ ID NO: 39219 - DNA, 96 bp, Fusarium cuneirostrum
  misc_feature: 43
aagtataagacggaacgtctgcccctgcgaggacgcagtcgaagacttgagactgtatttatttttttgtgtgagacggagtcgagtctgatttcg

SEQ ID NO: 39220 - DNA, 96 bp, Fusarium cuneirostrum
  misc_feature: 43
cctgcatctcggctcattccatttcattcatgtgcgacgaagccatcgtcgagtagaaaaaagatgatcaacaccacatactctggtgttttaagt

SEQ ID NO: 39221 - DNA, 96 bp, Fusarium cuneirostrum
  misc_feature: 43
cctcaagtggtattgtagttagtatagacagtgatatgtgagcacaaccgagagagtagtggagcgaacactaaataaaaggctccaacagaagtg

SEQ ID NO: 39222 - DNA, 96 bp, Fusarium cuneirostrum
  misc_feature: 43
attaaacagaggctcgcataaatcaatcaggtcacattactatctaccacaaagaaaaagaagccatcgtcatctccgaattaggcaacctcgcgg

SEQ ID NO: 39223 - DNA, 96 bp, Fusarium cuneirostrum
  misc_feature: 43
ccataacctacaggagatagggcgagacaataacatttaaatacacttctttaaacttgtcgagcaccatttccctccctaatggcgagccatcgt

SEQ ID NO: 39224 - DNA, 96 bp, Fusarium cuneirostrum
  misc_feature: 43
ccagcaattaatgtaagtagatgatcgctcactcgttcactcctcctccggatagaatacaaactcactctgttcgtctcctcacgttgttgcggt

SEQ ID NO: 39225 - DNA, 96 bp, Fusarium cuneirostrum
  misc_feature: 43
ccaaacggcgaagccgtttcttaaccttggtatagggggggactacgggacacgggacagtgaagaatgaacgtgtgtacccaggagtaatcgtct

SEQ ID NO: 39226 - DNA, 96 bp, Fusarium cuneirostrum
  misc_feature: 43
cattgctgattgctgaccttggggtgtttgctgatgtagattgtaagtaaacgcctgagatggatgagatagcgatgattgctaaccttgggtgtt

SEQ ID NO: 39227 - DNA, 96 bp, Fusarium cuneirostrum
  misc_feature: 43
cagtgatatgtgagcacaaccgagagagtagtggagcgaacactaaataaaaggctccaacagaagtgagcgacacgtaattgtgatgttgtgcgt

SEQ ID NO: 39228 - DNA, 96 bp, Fusarium cuneirostrum
  misc_feature: 43
aagttcatgttttgcgcgacagcgctgaagaagtgggcgtccgcccattatgtactcgctcactagctccgtccatgattacggtcgtacattctg

SEQ ID NO: 39229 - DNA, 96 bp, Fusarium cuneirostrum
  misc_feature: 43
cactacaattacaattacaattacaatcagtcacgatggctcgccattagggagggaaatggtgctcgacaagtttaaagaagtgtatttaaatgt

SEQ ID NO: 39230 - DNA, 96 bp, Fusarium cuneirostrum
  misc_feature: 43
acaaccgagagagtagtggagcgaacactaaataaaaggctccaacagaagtgagcgacacgtaattgtgatgttgtgcgtataaatggtatcgtg

SEQ ID NO: 39231 - DNA, 96 bp, Fusarium cuneirostrum
  misc_feature: 43
caaccctgactcgatcacctctcgcaggataccaagtcgatcgtacatctccttcactacttcttccttccgaagatagcttaccgtagaaaagat

SEQ ID NO: 39232 - DNA, 96 bp, Fusarium cuneirostrum
  misc_feature: 43
aagctcccttcggtcgctaacaatctgtaccagattctcactctgattccaggtcgttgcccatacaatctcagaaatcttcccatacaaaatttg

SEQ ID NO: 39233 - DNA, 96 bp, Fusarium cuneirostrum
  misc_feature: 43
attcacgataccatttatacgcacaacatcacaattacgtgtcgctcacttctgttggagccttttatttagtgttcgctccactactctctcggt

SEQ ID NO: 39234 - DNA, 96 bp, Fusarium cuneirostrum
  misc_feature: 43
attacgatttaaataattaaacttattataatatcgcgaagcggatataatatattagtaaaaagagattaagataaatataaataaaaaccagat

SEQ ID NO: 39235 - DNA, 96 bp, Fusarium cuneirostrum
  misc_feature: 43
atccatttcaaaatttgtacaaattttgtatgggaagatttctgagattgtatgggcaacgacctggaatcagagtgagaatctggtacagattgt

SEQ ID NO: 39236 - DNA, 96 bp, Fusarium cuneirostrum
  misc_feature: 43
atatataataagaaaagaagaataaatagtttatggaaataagaaaaataaataagaataggaattatagtaaaagattaaggataatagtgaatt

SEQ ID NO: 39237 - DNA, 96 bp, Fusarium cuneirostrum
  misc_feature: 43
agaattacggaggcgtaagccgacgtgcagtacgagaccgaggaacgaggtcgaagtggtgctagataatgtgaagaggtgaagtgcgaataactt

SEQ ID NO: 39238 - DNA, 96 bp, Fusarium cuneirostrum
  misc_feature: 43
acgagatggttcgagtgcgaggaaggacgacggaggaggacaggagagcatcggagatgcacatgggcgcagagcgccagagacaatctttgttgt

SEQ ID NO: 39239 - DNA, 96 bp, Fusarium cuneirostrum
  misc_feature: 43
aacataagcagggcgaggcaaataataatttaaataaactcgtttgacgagccctggttattctttttattagattagtgagcatgatgttactgt

SEQ ID NO: 39240 - DNA, 96 bp, Fusarium cuneirostrum
  misc_feature: 43
aacaatcgctacacgattcccacctcaatctcgcgatttcgcccgccattctcagtttcgttcacatacaaaaagtatgtcgatttgagtccaatt

SEQ ID NO: 39241 - DNA, 96 bp, Fusarium cuneirostrum
  misc_feature: 42
gctcactcatccgctcgggactcatggatgaggaatacatttacagtcaccaacataaacattcacaatctgaaatcatgctcgccaagtgaaaaa

SEQ ID NO: 39242 - DNA, 96 bp, Fusarium cuneirostrum
  misc_feature: 42
gatgaggaatacatttacagtcaccaacataaacattcacaatctgaaatcatgctcgccaagtgaaaaaaagtagtggttctcgacacattaaaa

SEQ ID NO: 39243 - DNA, 96 bp, Fusarium cuneirostrum
  misc_feature: 42
ttttaatatctggtttttatttatatttatcttaatctctttttactaatatattatatccgcttcgcgatattataataagtttaattatttaaa

SEQ ID NO: 39244 - DNA, 96 bp, Fusarium cuneirostrum
  misc_feature: 42
tttgtattctatccggaggaggagtgaacgagtgagcgatcatctacttacattaattgctggacagcatcttctcgggaagagaagaaaagagta

SEQ ID NO: 39245 - DNA, 96 bp, Fusarium cuneirostrum
  misc_feature: 42
tttggttttgttttagtcttgtcggaagacatgaagatgcgaccggagagagcactggtttccctgccttgttgggcagatcgcggagcgagtatg

SEQ ID NO: 39246 - DNA, 96 bp, Fusarium cuneirostrum
  misc_feature: 42
tttcacagttcctgcttggggaagtaactcttccctggcagatgagaagactttgacaatccttccggctgcgtcgttcctcctcgcctccaggac

SEQ ID NO: 39247 - DNA, 96 bp, Fusarium cuneirostrum
  misc_feature: 42
ttgtggtgttttagtaacgtcgctacgtgttccttcgtcacactcactccgcacgtcgccctccgggctccgtaggattatacagttccgactcgg

SEQ ID NO: 39248 - DNA, 96 bp, Fusarium cuneirostrum
  misc_feature: 42
ttgccaatccggctccgtcgtccctcctcctccgccggactcagtgaaaacaataaaagaagacatttacatttacatttacattcacagtgcaca

SEQ ID NO: 39249 - DNA, 96 bp, Fusarium cuneirostrum
  misc_feature: 42
agggtgacccgaccccgatgtgtgaccgagacagatgtcgaggggaaagggtacatggcgagagcagcgctcgaggtggatttgacggagtctcaa

SEQ ID NO: 39250 - DNA, 96 bp, Fusarium cuneirostrum
  misc_feature: 42
taggaaacatctctttctgaaaagaagaaagaagaaagaagaaagaagaaagaagaaagaagaaagaagaaagaagaaagaagaaagaagaaagaa

SEQ ID NO: 39251 - DNA, 96 bp, Fusarium cuneirostrum
  misc_feature: 42
ttcttaaccttggtatagggggggactacgggacacgggacagtgagggacgaacgtgtggactgagtctgcctttagtcagcttgctgacattgg

SEQ ID NO: 39252 - DNA, 96 bp, Fusarium cuneirostrum
  misc_feature: 42
ttctcgttagtgatataagctaggttgctcccttcggtcgcgggaagtctctatacttccttaacatttgtgaccaaattcccactccgttctcac

SEQ ID NO: 39253 - DNA, 96 bp, Fusarium cuneirostrum
  misc_feature: 42
ttcacagagcgcatctctgttgaattaaagtaacatcacatcgtctccctgtcggtcgactcgttctgcacctcgccctgacgggcttcggtagaa

SEQ ID NO: 39254 - DNA, 96 bp, Fusarium cuneirostrum
  misc_feature: 42
ttcgtcgttcctcctcataacgttccgtccacccgcacttcagtcggtcccctccttctcgtgcttacttactccactcttcttcgtccctcattc

SEQ ID NO: 39255 - DNA, 96 bp, Fusarium cuneirostrum
  misc_feature: 42
ttcgcagtccatgcacctccacttgaggtcatcatgcactctcatgaagataactgaaccacatcttgtggtgttttagtaacgtcgctacgtgtt

SEQ ID NO: 39256 - DNA, 96 bp, Fusarium cuneirostrum
  misc_feature: 42
ttacatccgacaacaaagattgtctctggcgctctgcgcccatgtgcatctccgatgctctcctgtcctcctccgtcgtccttcctcgcactcgaa

SEQ ID NO: 39257 - DNA, 96 bp, Fusarium cuneirostrum
  misc_feature: 42
agtaaagtaggagggagcctgtggggcgaccgtaagacagaggggcgagattgtgtcgagcccgaatgtgaaatttttcgagattttggtgaggaa

SEQ ID NO: 39258 - DNA, 96 bp, Fusarium cuneirostrum
  misc_feature: 42
gcggaagcgtagatgggaaccgggtgtgaagccagtgttccagcgtcagcgcagtaaaagtgtgcgtgtcagtaggatacggagcccggctcggaa

SEQ ID NO: 39259 - DNA, 96 bp, Fusarium cuneirostrum
  misc_feature: 42
agacggaacgtctgcccctgcgaggacgcagtcgaagacttgagactgtatttatttttttgtgtgagacggagtcgagtctgatttcgactggaa

SEQ ID NO: 39260 - DNA, 96 bp, Fusarium cuneirostrum
  misc_feature: 42
ttcacttcatcttccagatatgtatagacactcacctgttcgtgtttccacggccgtggaataaacagaactgattccagtcgaaatcagactcga

SEQ ID NO: 39261 - DNA, 96 bp, Fusarium cuneirostrum
  misc_feature: 42
ttcaaacttgacgctacggcacactgagcaagtagtcaatgctatcgtttccagattcttttcgccaaaccactcatcgaatgaggcgaagagtat

SEQ ID NO: 39262 - DNA, 96 bp, Fusarium cuneirostrum
  misc_feature: 42
ctcgctctaaaatctacgtaattgaagtcatcatcacttccacatcaggcaactctacaaatctcaccaagttcacattgcatctatctacactaa

SEQ ID NO: 39263 - DNA, 96 bp, Fusarium cuneirostrum
  misc_feature: 42
ggaatctatatctattaactaaattattatgggcttaatattatctaatatatttaattaatatctatttagccggaatattaaagtaaaatctaa

SEQ ID NO: 39264 - DNA, 96 bp, Fusarium cuneirostrum
  misc_feature: 42
cgaatccctctcaaccgtgcttccgcaaacagagaaaatagaaaaagacagcgacgtccgtcgtatacaatgacctccggtcaaataaaaaagtaa

SEQ ID NO: 39265 - DNA, 96 bp, Fusarium cuneirostrum
  misc_feature: 42
ttacacaaaatgaggttatcacgatatctacattgggaaaagtctactactacgccgactcaatctcttccaataccttccggaaacgaactctcc

SEQ ID NO: 39266 - DNA, 96 bp, Fusarium cuneirostrum
  misc_feature: 42
ttaatatggggcgaggcaaataaatacgttttaaatagactcgtttgacgagccccaattactattttatgcgagcagacatgactttgatgtatg

SEQ ID NO: 39267 - DNA, 96 bp, Fusarium cuneirostrum
  misc_feature: 42
ggcaatagtcattacaccgccggaggcccgagtcggaactgtataatcctacggagcccggagggcgacgtgcggagtgagtgtgacgaaggaaca

SEQ ID NO: 39268 - DNA, 96 bp, Fusarium cuneirostrum
  misc_feature: 42
tgtgtttgagttgggtcaagtgtggaggagtaactccaacgatgctttgtgagacttaccggaataggtaatggtgatgacctcaagtggtattgt

SEQ ID NO: 39269 - DNA, 96 bp, Fusarium cuneirostrum
  misc_feature: 42
tgtcttatactcctcgactctgtctgcggggtatgagattgtggacggaacgttcgtacctctctcatttgtccgtccaacaaaaccgacctccac

SEQ ID NO: 39270 - DNA, 96 bp, Fusarium cuneirostrum
  misc_feature: 42
tgtctgggtcgacgtccgtctccccctcttttatttctcctcgtgcactcacttcagtcgcatcctgcattcatgtttgactgctgtcaattgaag

SEQ ID NO: 39271 - DNA, 96 bp, Fusarium cuneirostrum
  misc_feature: 42
tgtaattgtagtgttagatggaattgtgacgtagaatgtgaatggaacaggagtggtgagagttacaccacttgagtcccgaacggatgagcaagc

SEQ ID NO: 39272 - DNA, 96 bp, Fusarium cuneirostrum
  misc_feature: 42
tgtaacatcaccataatcatatcaaattttgctacaacacaatttccaccatcacctttcgctatgcaaaataacacttttcaacttttatgccgt

SEQ ID NO: 39273 - DNA, 96 bp, Fusarium cuneirostrum
  misc_feature: 42
ataatatagagtagtctagcgtaattaaccgatataaaccaagagtagttctcgttagtattagtctcgccttattaccgtactagctcagtccca

SEQ ID NO: 39274 - DNA, 96 bp, Fusarium cuneirostrum
  misc_feature: 42
tggaatagtcccgaatcccgaggacgaaggacgcagggtgagggattgacaagagtatgttggcaacccatgaagagttacgagcgcccgcggagg

SEQ ID NO: 39275 - DNA, 96 bp, Fusarium cuneirostrum
  misc_feature: 42
actaatcgaccgaagagggagactgaaagtgggagacggggaccggcgacgatatggaccgagacgaagagtcgagttgtgatggcgcgtcgcgca

SEQ ID NO: 39276 - DNA, 96 bp, Fusarium cuneirostrum
  misc_feature: 42
tgatatcctacaacattatacttggtcgtctctactcctcctccctcttaccataacgctcccgcaaccctgactcgatcacctctcgcaggatac

SEQ ID NO: 39277 - DNA, 96 bp, Fusarium cuneirostrum
  misc_feature: 42
ccggcctccactcattccattcgttcccgtccttagtcaaccgatcattgcgtcgtccctcctccatgatcctacactcttcgccttcgtgcctca

SEQ ID NO: 39278 - DNA, 96 bp, Fusarium cuneirostrum
  misc_feature: 42
agaactatgttctgaataccgaccgaacggagtgagggaaggtgcggaatggagtgggagcagagcgaccacggaatgaggttactataatcctca

SEQ ID NO: 39279 - DNA, 96 bp, Fusarium cuneirostrum
  misc_feature: 42
aacggcgaagccgtttcttaaccttggtatagggggggactacgggacacgggacagtgagggacgaacgtagtgtcactaaggcgaccgagctca

SEQ ID NO: 39280 - DNA, 96 bp, Fusarium cuneirostrum
  misc_feature: 42
tgaataacttcaaaagtattttcccgaggccgaggacgtaggacgcaggctgagggattgacaatagactgaactcaagtgaagagttcattgccc

SEQ ID NO: 39281 - DNA, 96 bp, Fusarium cuneirostrum
  misc_feature: 42
tgaaatttttcgagattttggtgaggaacaagcaaaatcggattcaaattggactcaaatcgacatactttttgtatgtgaacgaaactgagaatg

SEQ ID NO: 39282 - DNA, 96 bp, Fusarium cuneirostrum
  misc_feature: 42
tcttccagatatgtatagacactcacctgttcgtgtttccacggccgtggaataaacagaactgattccagtcgaaatcagactcgactccgtctc

SEQ ID NO: 39283 - DNA, 96 bp, Fusarium cuneirostrum
  misc_feature: 42
tctattgatggtggcaaggtacgcagccaggcattttactctgaatattcctttactaacaaggtgtcataggaaaggggagatcgccaatttaat

SEQ ID NO: 39284 - DNA, 96 bp, Fusarium cuneirostrum
  misc_feature: 42
tcgcaaggtcactgctcacgataacatcatcaattgaccaacagtcaatgcgcacatcgaaagatgataccgaagtgggtgtacgaggtgagtaga

SEQ ID NO: 39285 - DNA, 96 bp, Fusarium cuneirostrum
  misc_feature: 42
tcgtgccgtccaccacaaagaaacagccctcctgtttccaagaataatactcgtcccagcctcgtccttactcgaaataaataatcgatcgtcgct

SEQ ID NO: 39286 - DNA, 96 bp, Fusarium cuneirostrum
  misc_feature: 42
attcttgagagcatattactgcgtcgcttatctgacgcatatcttttctacggtaagctatcttcggaaggaagaagtagtgaaggagatgtacga

SEQ ID NO: 39287 - DNA, 96 bp, Fusarium cuneirostrum
  misc_feature: 42
cgaggaggaacgacgcagccggaaggattgtcaaagtcttctcatctgccagggaagagttacttccccaagcaggaactgtgaaatagagaccga

SEQ ID NO: 39288 - DNA, 96 bp, Fusarium cuneirostrum
  misc_feature: 42
agcggatgagtgagcgtagcgaaggaagactgagggattggcaatcgtagataacccccggaggggaagcagacactgcgtaataaaaccgaccga

SEQ ID NO: 39289 - DNA, 96 bp, Fusarium cuneirostrum
  misc_feature: 42
tcgctcttacttacatccgacaacaaagattgtctctggcgctctgcgcccatgtgcatctccgatgctctcctgtcctcctccgtcgtccttcct

SEQ ID NO: 39290 - DNA, 96 bp, Fusarium cuneirostrum
  misc_feature: 42
cttacatccgacaacaaagattgtctctggcgctctgcgcccatgtgcatctccgatgctctcctgtcctcctccgtcgtccttcctcgcactcga

SEQ ID NO: 39291 - DNA, 96 bp, Fusarium cuneirostrum
  misc_feature: 42
cacaagtcgacaagaacaccaagcacctgtctccagaccatgtgccgcatcccaggaccacaatacctggtgcactcccatctcaccccagttcga

SEQ ID NO: 39292 - DNA, 96 bp, Fusarium cuneirostrum
  misc_feature: 42
tccttcacttcatcttccagatatgtatagacactcacctgttcgtgtttccacggccgtggaataaacagaactgattccagtcgaaatcagact

SEQ ID NO: 39293 - DNA, 96 bp, Fusarium cuneirostrum
  misc_feature: 42
gtgtgatatcctacaacattatacttggtcgtctctactcctcctccctcttaccataacgctcccgcaaccctgactcgatcacctctcgcagga

SEQ ID NO: 39294 - DNA, 96 bp, Fusarium cuneirostrum
  misc_feature: 42
actggaatagtcccgaatcccgaggacgaaggacgcagggtgagggattgacaagagtatgttggcaacccatgaagagttacgagcgcccgcgga

SEQ ID NO: 39295 - DNA, 96 bp, Fusarium cuneirostrum
  misc_feature: 42
atgggtcgatgacgatcttggagatttttagtgtagatagatgcaatgtgaacttggtgagatttgtagagttgcctgatgtggaagtgatgatga

SEQ ID NO: 39296 - DNA, 96 bp, Fusarium cuneirostrum
  misc_feature: 42
tcagtcccttcgttcccgtgcttagccactctccttcgttcgtccctcactctcgtcgtctatgacccacatctgattccactccgttccatcgat

SEQ ID NO: 39297 - DNA, 96 bp, Fusarium cuneirostrum
  misc_feature: 42
cccagagggccgacaagaatccatttcaaaatttgtacaaattttgtatgggaagatttctgagattgtatgggcaacgacctggaatcagagtga

SEQ ID NO: 39298 - DNA, 96 bp, Fusarium cuneirostrum
  misc_feature: 42
cctcaaggggcaattggggtaagcgtttgtgtagatttgaattgaattgtgattgcgagccatcattcataacgaaatggggcgagacctaaaata

SEQ ID NO: 39299 - DNA, 96 bp, Fusarium cuneirostrum
  misc_feature: 42
tatttctcctcgtgcactcacttcagtcgcatcctgcattcatgtttgactgctgtcaattgaagtcatcaccatctctgtgtgatgtctgtaacg

SEQ ID NO: 39300 - DNA, 96 bp, Fusarium cuneirostrum
  misc_feature: 42
agggcgaggaggaacgacgcagcctgaaggattgactagtagagtctcatctgcatgtgaagagttcatctccaagcagagactgtggtctcaata

SEQ ID NO: 39301 - DNA, 96 bp, Fusarium cuneirostrum
  misc_feature: 42
aaatatagaaggggagggttaaaagggttaagagaggagagaaataaagaaaattaaagaagaaagaataattatagaagaaatagaagaaatata

SEQ ID NO: 39302 - DNA, 96 bp, Fusarium cuneirostrum
  misc_feature: 42
gcagagactgtggtctcaataccgagcgaagcgaaggtgcggaacggagtgagagcgtagcgagcacgaagtgaggttacttaaaacaccagagta

SEQ ID NO: 39303 - DNA, 96 bp, Fusarium cuneirostrum
  misc_feature: 42
tactaatcgaccgaagagggagactgaaagtgggagacggggaccggcgacgatatggaccgagacgaagagtcgagttgtgatggcgcgtcgcgc

SEQ ID NO: 39304 - DNA, 96 bp, Fusarium cuneirostrum
  misc_feature: 42
tacgggacacgggacagtgagggacgaacgtagtgtcactaaggcgaccgagctcaagcgaggtaaagccggtactcgtcttcctagcgtcagcag

SEQ ID NO: 39305 - DNA, 96 bp, Fusarium cuneirostrum
  misc_feature: 42
ccagcaagcagcattgccactagcgacggcacagagatctccggtctcacgtacgagcaagaatttagtcctcaaactcaatccaattgctaatta

SEQ ID NO: 39306 - DNA, 96 bp, Fusarium cuneirostrum
  misc_feature: 42
taaccctaaccctaaccctaaccctaaccctaaccctaaccctaaccctatatttttcttttcttttatttcctttattctattttatattcttct

SEQ ID NO: 39307 - DNA, 96 bp, Fusarium cuneirostrum
  misc_feature: 42
taacaaagtgcaggaagcacttgaatgtccgatggagtcggatgatatgctattcttgagagcatattactgcgtcgcttatctgacgcatatctt

SEQ ID NO: 39308 - DNA, 96 bp, Fusarium cuneirostrum
  misc_feature: 42
taaagatctctttagctataaaattaataaattaagattatttaatagaagtttaattaactttagataactttaatcttagttagaaagtcttat

SEQ ID NO: 39309 - DNA, 96 bp, Fusarium cuneirostrum
  misc_feature: 42
aatacatgtgaagctatcgtcactacaacatcaggtaatcatagaacaaaacacatgatgtaacatcaccataatcatatcaaattttgctacaac

SEQ ID NO: 39310 - DNA, 96 bp, Fusarium cuneirostrum
  misc_feature: 42
gttgatctccaacagctctccagctgagtaagaaagggtctcgaatccctctcaaccgtgcttccgcaaacagagaaaatagaaaaagacagcgac

SEQ ID NO: 39311 - DNA, 96 bp, Fusarium cuneirostrum
  misc_feature: 42
gttcatgttttgcgcgacagcgctgaagaagtgggcgtccgcccattatgtactcgctcactagctccgtccatgattacggtcgtacattctgtt

SEQ ID NO: 39312 - DNA, 96 bp, Fusarium cuneirostrum
  misc_feature: 42
gcagacgttccgtcttatacttcctcgccccctcgtcagtatccacttatgcccggatcgctacgctgcaccttattcgtcgttcctcctcataac

SEQ ID NO: 39313 - DNA, 96 bp, Fusarium cuneirostrum
  misc_feature: 42
cacaattacgtgtcgctcacttctgttggagccttttatttagtgttcgctccactactctctcggttgtgctcacatatcactgtctatactaac

SEQ ID NO: 39314 - DNA, 96 bp, Fusarium cuneirostrum
  misc_feature: 42
gtggaggagtaactccaacgatgctttgtgagacttaccggaataggtaatggtgatgacctcaagtggtattgtagttagtatagacagtgatat

SEQ ID NO: 39315 - DNA, 96 bp, Fusarium cuneirostrum
  misc_feature: 42
gtgatcctgccttcgcagtccatgcacctccacttgaggtcatcatgcactctcatgaagataactgaaccacatcttgtggtgttttagtaacgt

SEQ ID NO: 39316 - DNA, 96 bp, Fusarium cuneirostrum
  misc_feature: 42
atttgacggagtctcaaaactggaacagtttttgtatggactcgattctggcatttggtgagccaaatcctgagaatgggccgagaaatcggtcac

SEQ ID NO: 39317 - DNA, 96 bp, Fusarium cuneirostrum
  misc_feature: 42
gtgaataacttcaaaagtattttcccgaggccgaggacgtaggacgcaggctgagggattgacaatagactgaactcaagtgaagagttcatcctc

SEQ ID NO: 39318 - DNA, 96 bp, Fusarium cuneirostrum
  misc_feature: 42
atccttcacttcatcttccagatatgtatagacactcacctgttcgtgtttccacggccgtggaataaacagaactgattccagtcgaaatcagac

SEQ ID NO: 39319 - DNA, 96 bp, Fusarium cuneirostrum
  misc_feature: 42
catcttgtggtgttttagtaacgtcgctacgtgttccttcgtcacactcactccgcacgtcgccctccgggctccgtaggattatacagttccgac

SEQ ID NO: 39320 - DNA, 96 bp, Fusarium cuneirostrum
  misc_feature: 42
ctctcgcaggataccaagtcgatcgtacatctccttcactacttcttccttccgaagatagcttaccgtagaaaagatatgcgtcagataagcgac

SEQ ID NO: 39321 - DNA, 96 bp, Fusarium cuneirostrum
  misc_feature: 42
gtcgcaaggtcactgctcacgataacatcatcaattgaccaacagtcaatgcgcacatcgaaagatgataccgaagtgggtgtacgaggtgagtag

SEQ ID NO: 39322 - DNA, 96 bp, Fusarium cuneirostrum
  misc_feature: 42
gtcgatgacgatcttggagatttttagtgtagatagatgcaatgtgaacttggtgagatttgtagagttgcctgatgtggaagtgatgatgacttc

SEQ ID NO: 39323 - DNA, 96 bp, Fusarium cuneirostrum
  misc_feature: 42
gtcgagttctgttccatgattgcgagcgcgcgccccgacgtctccgtcgtttgccgtttgccgttcttcggtctcttcttgcttcttttgtccccg

SEQ ID NO: 39324 - DNA, 96 bp, Fusarium cuneirostrum
  misc_feature: 42
gtcaatccctcaccctgcgtccttcgtcctcgggattcgggactattccagtgtggatgaaaatgaggccattcacaactccatctacagtaacat

SEQ ID NO: 39325 - DNA, 96 bp, Fusarium cuneirostrum
  misc_feature: 42
gtcaaccttttttctgacgcgtttcattacgcgctcgctcgaacggattgtgagcgactcgattacccgtagggttatatattgagctgtcgtagg

SEQ ID NO: 39326 - DNA, 96 bp, Fusarium cuneirostrum
  misc_feature: 42
gtagaaaagatatgcgtcagataagcgacgcagtaatatgctctcaagaatagcatatcatccgactccatcggacattcaagtgcttcctgcact

SEQ ID NO: 39327 - DNA, 96 bp, Fusarium cuneirostrum
  misc_feature: 42
ctcatccgttcgggactcaagtggtgtaactctcaccactcctgttccattcacattctacgtcacaattccatctaacactacaattacaattac

SEQ ID NO: 39328 - DNA, 96 bp, Fusarium cuneirostrum
  misc_feature: 42
cgagccatcgtgactgattgtaattgtaattgtaattgtagtgttagatggaattgtgacgtagaatgtgaatggaacaggagtggtgagagttac

SEQ ID NO: 39329 - DNA, 96 bp, Fusarium cuneirostrum
  misc_feature: 42
ggttcagtttgttgattgaggcagcgccgagacttgacgattaggcaagaatgatagagcgaaagcgatcacgaacgggtgagtgataatgatttg

SEQ ID NO: 39330 - DNA, 96 bp, Fusarium cuneirostrum
  misc_feature: 42
gggtcgatgacgatcttggagatttttagtgtagatagatgcaatgtgaacttggtgagatttgtagagttgcctgatgtggaagtgatgatgact

SEQ ID NO: 39331 - DNA, 96 bp, Fusarium cuneirostrum
  misc_feature: 42
agtctcacaaagcatcgttggagttactcctccacacttgacccaactcaaacacagcatcatcaaatctacttcgaaactcccttctcagtaccc

SEQ ID NO: 39332 - DNA, 96 bp, Fusarium cuneirostrum
  misc_feature: 42
gggcgaggcaaataataatttaaataaactcgtttgacgagccctggttattctttttattagattagtgagcatgatgttactgtagatggagtt

SEQ ID NO: 39333 - DNA, 96 bp, Fusarium cuneirostrum
  misc_feature: 42
ctctgtctgcggggtatgagattgtggacggaacgttcgtacctctctcatttgtccgtccaacaaaaccgacctccactcagtcccttcgttccc

SEQ ID NO: 39334 - DNA, 96 bp, Fusarium cuneirostrum
  misc_feature: 42
ggaacgttatgaggaggaacgacgaataaggtgcagcgtagcgatccgggcataagtggatactgacgagggggcgaggaagtataagacggaacg

SEQ ID NO: 39335 - DNA, 96 bp, Fusarium cuneirostrum
  misc_feature: 42
gcaaaaaggctcgctaaaaaacgaaggtatcgcaacatccaaaacaggaaacaatgtagactaatctaagatacaaaacctccgaaaacgcccagc

SEQ ID NO: 39336 - DNA, 96 bp, Fusarium cuneirostrum
  misc_feature: 42
gctcgccattagggagggaaatggtgctcgacaagtttaaagaagtgtatttaaatgttattgtctcgccctatctcctgtaggttatggatgagg

SEQ ID NO: 39337 - DNA, 96 bp, Fusarium cuneirostrum
  misc_feature: 42
gctccgcaccccatcgctccgctcggggtagaattatacagtcatggactcggccctgcgggcagctgcactactcttgccaatccggctccgtcg

SEQ ID NO: 39338 - DNA, 96 bp, Fusarium cuneirostrum
  misc_feature: 42
gcctgcgtcctacgtcctcggcctcgggaaaatacttttgaagttattcacattcacatctacgattacaatttaatcaatcactcgcacactaag

SEQ ID NO: 39339 - DNA, 96 bp, Fusarium cuneirostrum
  misc_feature: 42
gcctgcgtcctacgtcctcggcctcgggaaaatacttttgaagttattcacatcagattaaaacatgctcgctatatataaatgcgggagctcact

SEQ ID NO: 39340 - DNA, 96 bp, Fusarium cuneirostrum
  misc_feature: 42
cggaagtgaggggacaggaggcccagagggccgacaagaatccatttcaaaatttgtacaaattttgtatgggaagatttctgagattgtatgggc

SEQ ID NO: 39341 - DNA, 96 bp, Fusarium cuneirostrum
  misc_feature: 42
aatgtgaataacttcaaaagtattttcccgaggccgaggacgtaggacgcaggctgagggattgacaatagactgaactcaagtgaagagttcatc

SEQ ID NO: 39342 - DNA, 96 bp, Fusarium cuneirostrum
  misc_feature: 42
attccctcgtgccccgcactcggtgtcatcttcgaccaccgtctcagttcatctctgatgaagttatcgccaaccactgtcgggcgcaatcaactc

SEQ ID NO: 39343 - DNA, 96 bp, Fusarium cuneirostrum
  misc_feature: 42
gaggtcatcaccattacctattccggtaagtctcacaaagcatcgttggagttactcctccacacttgacccaactcaaacacagcatcatcaaat

SEQ ID NO: 39344 - DNA, 96 bp, Fusarium cuneirostrum
  misc_feature: 42
gaggcaaataaatacgttttaaatagactcgtttgacgagccccaattactattttatgcgagcagacatgactttgatgtatgacttgtgatttg

SEQ ID NO: 39345 - DNA, 96 bp, Fusarium cuneirostrum
  misc_feature: 42
cctgcacgctacgcgctcgggctcaggactatcttgggtacatgatcacgactacgattcaaaataataataatgtcacatatgcacagctcgctc

SEQ ID NO: 39346 - DNA, 96 bp, Fusarium cuneirostrum
  misc_feature: 42
cgtgccgtccaccacaaagaaacagccctcctgtttccaagaataatactcgtcccagcctcgtccttactcgaaataaataatcgatcgtcgctc

SEQ ID NO: 39347 - DNA, 96 bp, Fusarium cuneirostrum
  misc_feature: 42
gagccttttatttagtgttcgctccactactctctcggttgtgctcacatatcactgtctatactaactacaataccacttgaggtcatcaccatt

SEQ ID NO: 39348 - DNA, 96 bp, Fusarium cuneirostrum
  misc_feature: 42
cttcggtagaactatacagttcctgcttcctctccgagggtcaggttcagttgtcaagccctccgctcctccttcgctacgctcgctcgtcggctc

SEQ ID NO: 39349 - DNA, 96 bp, Fusarium cuneirostrum
  misc_feature: 42
aacacattcacgataccatttatacgcacaacatcacaattacgtgtcgctcacttctgttggagccttttatttagtgttcgctccactactctc

SEQ ID NO: 39350 - DNA, 96 bp, Fusarium cuneirostrum
  misc_feature: 42
gaatttagtcctcaaactcaatccaattgctaattacttgtgccttggcaacaaagagacgccccagttctgcgtaaccaacacttgccctcgcag

SEQ ID NO: 39351 - DNA, 96 bp, Fusarium cuneirostrum
  misc_feature: 42
aatctatatctattaactaaattattatgggcttaatattatctaatatatttaattaatatctatttagccggaatattaaagtaaaatctaaag

SEQ ID NO: 39352 - DNA, 96 bp, Fusarium cuneirostrum
  misc_feature: 42
atcatgctcactaatctaataaaaagaataaccagggctcgtcaaacgagtttatttaaattattatttgcctcgccctgcttatgttatgtcaag

SEQ ID NO: 39353 - DNA, 96 bp, Fusarium cuneirostrum
  misc_feature: 42
cttccattccttttttaaatacggagcccgtagggcgacgtgcggagcgtagggtgacgaaggagcccgatgcgaggttacgagaacaccatggat

SEQ ID NO: 39354 - DNA, 96 bp, Fusarium cuneirostrum
  misc_feature: 42
caagatctgtccctcttgatcaaccttcgcatggctcaggtttctattacttcttcgatctcgtttcactccatctcttttcatgatctagtgaag

SEQ ID NO: 39355 - DNA, 96 bp, Fusarium cuneirostrum
  misc_feature: 42
actaaacaagcccggggcctcttcaacgagacggcaagtccgcaagtcttggggatcgctcaatatggacgtagctatctccaacaacggtgtaag

SEQ ID NO: 39356 - DNA, 96 bp, Fusarium cuneirostrum
  misc_feature: 42
ataataagaaaagaagaataaatagtttatggaaataagaaaaataaataagaataggaattatagtaaaagattaaggataatagtgaatttaag

SEQ ID NO: 39357 - DNA, 96 bp, Fusarium cuneirostrum
  misc_feature: 42
ctggaatagtcccgaatcccgaggacgaaggacgcagggtgagggattgacaagagtatgttggcaacccatgaagagttacgagcgcccgcggag

SEQ ID NO: 39358 - DNA, 96 bp, Fusarium cuneirostrum
  misc_feature: 42
ctctcatgaagataactgaaccacatcttgtggtgttttagtaacgtcgctacgtgttccttcgtcacactcactccgcacgtcgccctccgggct

SEQ ID NO: 39359 - DNA, 96 bp, Fusarium cuneirostrum
  misc_feature: 42
ctcgtccttctcggcaagtctctgatcagaagagaaagcacgctccgtatactccgcttctttggtactccaactaaaagcaacacaacagttgat

SEQ ID NO: 39360 - DNA, 96 bp, Fusarium cuneirostrum
  misc_feature: 42
acggcgaagccgtttcttaaccttggtatagggggggactacgggacacgggacagtgaagaatgaacgtgtgtacccaggagtaatcgtcttgag

SEQ ID NO: 39361 - DNA, 96 bp, Fusarium cuneirostrum
  misc_feature: 42
aagacgctctatacgctcctgtgatccagatcttgccctttcttctgttagaaacgtgctatgattgccaggctggttattttctaatgccttacg

SEQ ID NO: 39362 - DNA, 96 bp, Fusarium cuneirostrum
  misc_feature: 42
cggtcgctaacaatctgtaccagattctcactctgattccaggtcgttgcccatacaatctcagaaatcttcccatacaaaatttgtacaaatttt

SEQ ID NO: 39363 - DNA, 96 bp, Fusarium cuneirostrum
  misc_feature: 42
cggtcgcgggaagtctctatacttccttaacatttgtgaccaaattcccactccgttctcacgtttgctcacaccaaacgccagatcgcaacccat

SEQ ID NO: 39364 - DNA, 96 bp, Fusarium cuneirostrum
  misc_feature: 42
aaggctcggtgcctctcccattctcccaaccgggtaactctagtccagttatggtcatagagatgttcaagcccagccggagtgtttgcaatagcg

SEQ ID NO: 39365 - DNA, 96 bp, Fusarium cuneirostrum
  misc_feature: 42
catcccacattctcctagtctattagaatttaaattgtcaagatcgtcttattcactgctcagctaccgaactagaagcgtctatatcatctctcg

SEQ ID NO: 39366 - DNA, 96 bp, Fusarium cuneirostrum
  misc_feature: 42
actattttcggactgaaatacgctgggcgttttcggaggttttgtatcttagattagtctacattgtttcctgttttggatgttgcgataccttcg

SEQ ID NO: 39367 - DNA, 96 bp, Fusarium cuneirostrum
  misc_feature: 42
cctccccacggtcgggtgtgtctgggtcgacgtccgtctccccctcttttatttctcctcgtgcactcacttcagtcgcatcctgcattcatgttt

SEQ ID NO: 39368 - DNA, 96 bp, Fusarium cuneirostrum
  misc_feature: 42
cactggaatagtcccgaatcccgaggacgaaggacgcagggtgagggattgacaagagtatgttggcaacccatgaagagttacgagcgcccgcgg

SEQ ID NO: 39369 - DNA, 96 bp, Fusarium cuneirostrum
  misc_feature: 42
atcatcatcgttgagagattgatctggaacgtcttgatttttgaagcttaacgggagagttcgtcttcgcttcggaggtggcgctgcatctttcgg

SEQ ID NO: 39370 - DNA, 96 bp, Fusarium cuneirostrum
  misc_feature: 42
caagtcgacaagaacaccaagcacctgtctccagaccatgtgccgcatcccaggaccacaatacctggtgcactcccatctcaccccagttcgatg

SEQ ID NO: 39371 - DNA, 96 bp, Fusarium cuneirostrum
  misc_feature: 42
aacgttccgtccacaatctcataccccgcagacagagtcgaggagtataagacagcgtcttttcccccgagaggttgagtgagcaggcgaactctg

SEQ ID NO: 39372 - DNA, 96 bp, Fusarium cuneirostrum
  misc_feature: 42
agacactcgtcgagggtgtggacgagtttggtgatgaatgggtcgatgacgatcttggagatttttagtgtagatagatgcaatgtgaacttggtg

SEQ ID NO: 39373 - DNA, 96 bp, Fusarium cuneirostrum
  misc_feature: 42
caatcgctacacgattcccacctcaatctcgcgatttcgcccgccattctcagtttcgttcacatacaaaaagtatgtcgatttgagtccaatttg

SEQ ID NO: 39374 - DNA, 96 bp, Fusarium cuneirostrum
  misc_feature: 42
acgtgaggagacgaacagagtgagtttgtattctatccggaggaggagtgaacgagtgagcgatcatctacttacattaattgctggacagcatct

SEQ ID NO: 39375 - DNA, 96 bp, Fusarium cuneirostrum
  misc_feature: 41
tttttacctttatatacctcttttattattatataccttttttggctttttattatcttgtacatattaattatattttaggaaaatatactcttt

SEQ ID NO: 39376 - DNA, 96 bp, Fusarium cuneirostrum
  misc_feature: 41
ttcgtcctcgggattcgggactattccagtgtggatgaaaatgaggccattcacaactccatctacagtaacatcatgctcactaatctaataaaa

SEQ ID NO: 39377 - DNA, 96 bp, Fusarium cuneirostrum
  misc_feature: 41
ttgggtacatgatcacgactacgattcaaaataataataatgtcacatatgcacagctcgctcgattaaataaagtatgaagtggtgctcgtcaaa

SEQ ID NO: 39378 - DNA, 96 bp, Fusarium cuneirostrum
  misc_feature: 41
tttcagattgtgaatgtttatgttggtgactgtaaatgtattcctcatccatgagtcccgagcggatgagtgagcgtagcgaaggaagactgaggg

SEQ ID NO: 39379 - DNA, 96 bp, Fusarium cuneirostrum
  misc_feature: 41
gaaaatgaggccattcacaactccatctacagtaacatcatgctcactaatctaataaaaagaataaccagggctcgtcaaacgagtttatttaaa

SEQ ID NO: 39380 - DNA, 96 bp, Fusarium cuneirostrum
  misc_feature: 41
aataacttcaaaagtattttcccgaggccgaggacgtaggacgcaggctgagggattgacaatagactgaactcaagtgaagagttcattgcccaa

SEQ ID NO: 39381 - DNA, 96 bp, Fusarium cuneirostrum
  misc_feature: 41
ttgagtttaggcgtttgcctaacaaagtgcaggaagcacttgaatgtccgatggagtcggatgatatgctattcttgagagcatattactgcgtcg

SEQ ID NO: 39382 - DNA, 96 bp, Fusarium cuneirostrum
  misc_feature: 41
ttgactagcaaaaaggctcgctaaaaaacgaaggtatcgcaacatccaaaacaggaaacaatgtagactaatctaagatacaaaacctccgaaaac

SEQ ID NO: 39383 - DNA, 96 bp, Fusarium cuneirostrum
  misc_feature: 41
cttgggtacatgatcacgactacgattcaaaataataataatgtcacatatgcacagctcgctcgattaaataaagtatgaagtggtgctcgtcaa

SEQ ID NO: 39384 - DNA, 96 bp, Fusarium cuneirostrum
  misc_feature: 41
ttcggtatcatctttcgatgtgcgcattgactgttggtcaattgatgatgttatcgtgagcagtgaccttgcgaccttgctcattattataacctc

SEQ ID NO: 39385 - DNA, 96 bp, Fusarium cuneirostrum
  misc_feature: 41
cgacgcagcctgaaggattgactagtagagtctcatctgcatgtgaagagttcatctccaagcagagactgtggtctcaataccgagcgaagcgaa

SEQ ID NO: 39386 - DNA, 96 bp, Fusarium cuneirostrum
  misc_feature: 41
gaacagaatgtacgaccgtaatcatggacggagctagtgagcgagtacataatgggcggacgcccacttcttcagcgctgtcgcgcaaaacatgaa

SEQ ID NO: 39387 - DNA, 96 bp, Fusarium cuneirostrum
  misc_feature: 41
acagtaacacctgctggtgactcgcttgttcaagctcgagcaggcacaaaagtaaaaaaacagaagcaagttcatgttttgcgcgacagcgctgaa

SEQ ID NO: 39388 - DNA, 96 bp, Fusarium cuneirostrum
  misc_feature: 41
ccacattctcctagtctattagaatttaaattgtcaagatcgtcttattcactgctcagctaccgaactagaagcgtctatatcatctctcgctaa

SEQ ID NO: 39389 - DNA, 96 bp, Fusarium cuneirostrum
  misc_feature: 41
ttacgcgagcatatataaagtagatggtgataacctcaaaagagtccacgagccgagcgcgtagcgtgcaggcgaggggattgtcaatgtaattta

SEQ ID NO: 39390 - DNA, 96 bp, Fusarium cuneirostrum
  misc_feature: 41
agcgaacactaaataaaaggctccaacagaagtgagcgacacgtaattgtgatgttgtgcgtataaatggtatcgtgaatgtgtttgtgattgtaa

SEQ ID NO: 39391 - DNA, 96 bp, Fusarium cuneirostrum
  misc_feature: 41
ctctattgatggtggcaaggtacgcagccaggcattttactctgaatattcctttactaacaaggtgtcataggaaaggggagatcgccaatttaa

SEQ ID NO: 39392 - DNA, 96 bp, Fusarium cuneirostrum
  misc_feature: 41
taacttgattgattgagcgagccaccactttactggggcgagtcattccttttttaaataacattttaatgtgacgagcaccactacgccttttaa

SEQ ID NO: 39393 - DNA, 96 bp, Fusarium cuneirostrum
  misc_feature: 41
tgtgaagctatcgtcactacaacatcaggtaatcatagaacaaaacacatgatgtaacatcaccataatcatatcaaattttgctacaacacaatt

SEQ ID NO: 39394 - DNA, 96 bp, Fusarium cuneirostrum
  misc_feature: 41
tgtcaaggttgtgctcttccccgggaagtttgcaaggcatgggtacagagcgcatctggggaatggcaacgagatgtaaggatccgctgccagtat

SEQ ID NO: 39395 - DNA, 96 bp, Fusarium cuneirostrum
  misc_feature: 41
ataatacatgtgaagctatcgtcactacaacatcaggtaatcatagaacaaaacacatgatgtaacatcaccataatcatatcaaattttgctaca

SEQ ID NO: 39396 - DNA, 96 bp, Fusarium cuneirostrum
  misc_feature: 41
tagcaaaaaggctcgctaaaaaacgaaggtatcgcaacatccaaaacaggaaacaatgtagactaatctaagatacaaaacctccgaaaacgccca

SEQ ID NO: 39397 - DNA, 96 bp, Fusarium cuneirostrum
  misc_feature: 41
gaggaacgacgcagccggaaggattgtcaaagtcttctcatctgccagggaagagttacttccccaagcaggaactgtgaaatagagaccgagcca

SEQ ID NO: 39398 - DNA, 96 bp, Fusarium cuneirostrum
  misc_feature: 41
atggcacccacatcgtgccatcctaccttctgccacactctactgagtcgtgaagccgtcgtgcactcctacatgaaatggtaacacacatatcca

SEQ ID NO: 39399 - DNA, 96 bp, Fusarium cuneirostrum
  misc_feature: 41
acaacgtgaggagacgaacagagtgagtttgtattctatccggaggaggagtgaacgagtgagcgatcatctacttacattaattgctggacagca

SEQ ID NO: 39400 - DNA, 96 bp, Fusarium cuneirostrum
  misc_feature: 41
tgagcaagccccgtaggggcgcagggaagactgagggattggcaatagtcattacaccgccggaggcccgagtcggaactgtataatcctacggag

SEQ ID NO: 39401 - DNA, 96 bp, Fusarium cuneirostrum
  misc_feature: 41
aatgtgtaggctctgaggccaaatctgttatattctgaggatggctgaggatattgcaaaaccctctggtgaacaagcagctgtaatcacatgtca

SEQ ID NO: 39402 - DNA, 96 bp, Fusarium cuneirostrum
  misc_feature: 41
ggaggatgaactcttcacttgagttcagtctattgtcaatccctcagcctgcgtcctacgtcctcggcctcgggaaaatacttttgaagttattca

SEQ ID NO: 39403 - DNA, 96 bp, Fusarium cuneirostrum
  misc_feature: 41
tgaagaagtgggcgtccgcccattatgtactcgctcactagctccgtccatgattacggtcgtacattctgttcgaccataagcgggtcccttcct

SEQ ID NO: 39404 - DNA, 96 bp, Fusarium cuneirostrum
  misc_feature: 41
tctcgcaggataccaagtcgatcgtacatctccttcactacttcttccttccgaagatagcttaccgtagaaaagatatgcgtcagataagcgacg

SEQ ID NO: 39405 - DNA, 96 bp, Fusarium cuneirostrum
  misc_feature: 41
aaggcgcggagcgcccacctggaaggtcatctgaacttggttcagtttgttgattgaggcagcgccgagacttgacgattaggcaagaatgataga

SEQ ID NO: 39406 - DNA, 96 bp, Fusarium cuneirostrum
  misc_feature: 41
tcggactctccgtcctcgtcgcccacattccatgtgatcctgccttcgcagtccatgcacctccacttgaggtcatcatgcactctcatgaagata

SEQ ID NO: 39407 - DNA, 96 bp, Fusarium cuneirostrum
  misc_feature: 41
cctctcgcaggataccaagtcgatcgtacatctccttcactacttcttccttccgaagatagcttaccgtagaaaagatatgcgtcagataagcga

SEQ ID NO: 39408 - DNA, 96 bp, Fusarium cuneirostrum
  misc_feature: 41
cgctgcagttccaagagtgctgcattgagtccacatccacacatcaaggcgtcagcgtcttgaatgaaatccatccacttcatctaatggcatcga

SEQ ID NO: 39409 - DNA, 96 bp, Fusarium cuneirostrum
  misc_feature: 41
accattacctattccggtaagtctcacaaagcatcgttggagttactcctccacacttgacccaactcaaacacagcatcatcaaatctacttcga

SEQ ID NO: 39410 - DNA, 96 bp, Fusarium cuneirostrum
  misc_feature: 41
tcctcacgttgttgcggtaaactcgtcctccgtcctcgaaaaaaataaaacaagtcagagttcgcctgctcactcaacctctcgggggaaaagacg

SEQ ID NO: 39411 - DNA, 96 bp, Fusarium cuneirostrum
  misc_feature: 41
gttcgtctcctcacgttgttgcggtaaactcgtcctccgtcctcgaaaaaaataaaacaagtcagagttcgcctgctcactcaacctctcggggga

SEQ ID NO: 39412 - DNA, 96 bp, Fusarium cuneirostrum
  misc_feature: 41
aatagggagcctgaggcacgaaggcgaagagtgtaggatcatggaggagggacgacgcaatgatcggttgactaaggacgggaacgaatggaatga

SEQ ID NO: 39413 - DNA, 96 bp, Fusarium cuneirostrum
  misc_feature: 41
cttgttttatttttttcgaggacggaggacgagtttaccgcaacaacgtgaggagacgaacagagtgagtttgtattctatccggaggaggagtga

SEQ ID NO: 39414 - DNA, 96 bp, Fusarium cuneirostrum
  misc_feature: 41
atagcttcacatgtattatgggcgagcattaaataaagacggagcgcacataaactaaaaagggcacacatattagtgagctcccgcatttatata

SEQ ID NO: 39415 - DNA, 96 bp, Fusarium cuneirostrum
  misc_feature: 41
attataaaccgctataaaccgctgcgaaccactacgaaccgctataaaccgctgcgaaccactataaaccgctataaaccgctacgaaccgctata

SEQ ID NO: 39416 - DNA, 96 bp, Fusarium cuneirostrum
  misc_feature: 41
ggaatgcagtctttgattcggtcaagctcacgcctcttggttccagctggtgttagagtagctgtagatactcaagtagtgactgatgaacgacta

SEQ ID NO: 39417 - DNA, 96 bp, Fusarium cuneirostrum
  misc_feature: 41
atgtcaaccgagcggggcgaggggattgagtttaggcgtttgcctaacaaagtgcaggaagcacttgaatgtccgatggagtcggatgatatgcta

SEQ ID NO: 39418 - DNA, 96 bp, Fusarium cuneirostrum
  misc_feature: 41
tagatgagggagtgcggatgcgcgaccgacagaagtgtgtcgagggtcgagcagacccgagccagaaacgagctcaaaactggaacagttttttgg

SEQ ID NO: 39419 - DNA, 96 bp, Fusarium cuneirostrum
  misc_feature: 41
cgttcctcggtctcgtactgcacgtcggcttacgcctccgtaattctttacacagttcttgcttgggcaatgaactcttcacttgagttcagtcta

SEQ ID NO: 39420 - DNA, 96 bp, Fusarium cuneirostrum
  misc_feature: 41
tactttctctggatctgtgaccttttaataacaatccgacttgagaaggacttcgttagaatgcgcctcatactactataaggtagaagactggtt

SEQ ID NO: 39421 - DNA, 96 bp, Fusarium cuneirostrum
  misc_feature: 41
tacgacggacgtcgctgtctttttctattttctctgtttgcggaagcacggttgagagggattcgagaccctttcttactcagctggagagctgtt

SEQ ID NO: 39422 - DNA, 96 bp, Fusarium cuneirostrum
  misc_feature: 41
cacgctacgcgctcggctcgtggactcttttgaggttatcaccatctactttatatatgctcgcgtaacacaagtgcgggagctcaccctactgta

SEQ ID NO: 39423 - DNA, 96 bp, Fusarium cuneirostrum
  misc_feature: 41
taatcccaaaaatccgcttatagaccaaagttatggacgctcgtttgccccgttccgggtcactcgcgttagtctataagctggaaagctcccttc

SEQ ID NO: 39424 - DNA, 96 bp, Fusarium cuneirostrum
  misc_feature: 41
agcttaagctcttaaagggcttaagcctttatagagtataagcttttacaattaataagaggcttattattagcgagcttattagggagctactta

SEQ ID NO: 39425 - DNA, 96 bp, Fusarium cuneirostrum
  misc_feature: 41
taaagtgacatccccagttttaaccaacgcggtgcgttttggaaaaaaacctcttatagaccaaagttatggacgctcgtttgccccgttccgggt

SEQ ID NO: 39426 - DNA, 96 bp, Fusarium cuneirostrum
  misc_feature: 41
taaacgagagggctagtatatattaagactactatagggccaaacccgatatagcgataaagtaagactaatacttatagggattactttaagctt

SEQ ID NO: 39427 - DNA, 96 bp, Fusarium cuneirostrum
  misc_feature: 41
agactcaaaatctaccggattttgggacttttcagaaactggcacagttttaatatgggttgcgatctggcgtttggtgtgagcaaacgtgagaac

SEQ ID NO: 39428 - DNA, 96 bp, Fusarium cuneirostrum
  misc_feature: 41
gcaatagtcattacaccgccggaggcccgagtcggaactgtataatcctacggagcccggagggcgacgtgcggagtgagtgtgacgaaggaacac

SEQ ID NO: 39429 - DNA, 96 bp, Fusarium cuneirostrum
  misc_feature: 41
catcgtgactgattgtaattgtaattgtaattgtagtgttagatggaattgtgacgtagaatgtgaatggaacaggagtggtgagagttacaccac

SEQ ID NO: 39430 - DNA, 96 bp, Fusarium cuneirostrum
  misc_feature: 41
aaaacaccagagtatgtggtgttgatcatcttttttctactcgacgatggcttcgtcgcacatgaatgaaatggaatgagccgagatgcagggcac

SEQ ID NO: 39431 - DNA, 96 bp, Fusarium cuneirostrum
  misc_feature: 41
ggacgaccggagggaggacgtgcggagtgagtgtgacgaaggaacacgtagcgacgttacagacatcacacagagatggtgatgacttcaattgac

SEQ ID NO: 39432 - DNA, 96 bp, Fusarium cuneirostrum
  misc_feature: 41
aagctggaaagctcccttcggtcgctaacaatctgtaccagattctcactctgattccaggtcgttgcccatacaatctcagaaatcttcccatac

SEQ ID NO: 39433 - DNA, 96 bp, Fusarium cuneirostrum
  misc_feature: 41
aagatctctttagctataaaattaataaattaagattatttaatagaagtttaattaactttagataactttaatcttagttagaaagtcttatac

SEQ ID NO: 39434 - DNA, 96 bp, Fusarium cuneirostrum
  misc_feature: 41
gtagacaccatcgtagcttgagtcctgagccgggaggagcgcatgcgacggtgcggtgaaggattgactagtagagttaatcttgacggagtcatt

SEQ ID NO: 39435 - DNA, 96 bp, Fusarium cuneirostrum
  misc_feature: 41
gtaattgtagtgttagatggaattgtgacgtagaatgtgaatggaacaggagtggtgagagttacaccacttgagtcccgaacggatgagcaagcc

SEQ ID NO: 39436 - DNA, 96 bp, Fusarium cuneirostrum
  misc_feature: 41
gtaaatcggagatttcattctgtttgtttcctaacaacaacgcgacgcgtcacatccacgagacgtggggtgcatttttaaggcaacagaggtgcc

SEQ ID NO: 39437 - DNA, 96 bp, Fusarium cuneirostrum
  misc_feature: 41
acttcggtatcatctttcgatgtgcgcattgactgttggtcaattgatgatgttatcgtgagcagtgaccttgcgaccttgctcattattataacc

SEQ ID NO: 39438 - DNA, 96 bp, Fusarium cuneirostrum
  misc_feature: 41
ggtcgggtgtgtctgggtcgacgtccgtctccccctcttttatttctcctcgtgcactcacttcagtcgcatcctgcattcatgtttgactgctgt

SEQ ID NO: 39439 - DNA, 96 bp, Fusarium cuneirostrum
  misc_feature: 41
agagttaataatagctaaagaatttatttatctcttttatttctatatcgcgaaaatatatagtatattacttaatattattatagatcgaggacc

SEQ ID NO: 39440 - DNA, 96 bp, Fusarium cuneirostrum
  misc_feature: 41
gggaatgcagtctttgattcggtcaagctcacgcctcttggttccagctggtgttagagtagctgtagatactcaagtagtgactgatgaacgact

SEQ ID NO: 39441 - DNA, 96 bp, Fusarium cuneirostrum
  misc_feature: 41
cttattcagacgagctttggtgaaagatcgaaaagaatggcaagggaaccaatacagcccaatatgcaatccaaatatcgacttccactatttccc

SEQ ID NO: 39442 - DNA, 96 bp, Fusarium cuneirostrum
  misc_feature: 41
ggcctccactcattccattcgttcccgtccttagtcaaccgatcattgcgtcgtccctcctccatgatcctacactcttcgccttcgtgcctcagg

SEQ ID NO: 39443 - DNA, 96 bp, Fusarium cuneirostrum
  misc_feature: 41
ggcaaacgagcgtgctctaactttggtctataagaggtttttttccaagcggattatccgcggttaaaactggggagaggagcttgtctccgaggg

SEQ ID NO: 39444 - DNA, 96 bp, Fusarium cuneirostrum
  misc_feature: 41
ggaaaaagtgaacactgactgaagacggatgtcgagattgaaccacgaacgtggaagacgaacagtgtggatgtgagtcttctgtctttgtacact

SEQ ID NO: 39445 - DNA, 96 bp, Fusarium cuneirostrum
  misc_feature: 41
gctgagggattgacaatagactgaactcaagtgaagagttcattgcccaagcaagaactgtgtaaagaattacggaggcgtaagccgacgtgcagt

SEQ ID NO: 39446 - DNA, 96 bp, Fusarium cuneirostrum
  misc_feature: 41
gagcaagccccgtaggggcgcagggaagactgagggattggcaatagtcattacaccgccggaggcccgagtcggaactgtataatcctacggagc

SEQ ID NO: 39447 - DNA, 96 bp, Fusarium cuneirostrum
  misc_feature: 41
acttcatactttatttaatcgagcgagctgtgcatatgtgacattattattattttgaatcgtagtcgtgatcatgtacccaagatagtcctgagc

SEQ ID NO: 39448 - DNA, 96 bp, Fusarium cuneirostrum
  misc_feature: 41
gatgttgtagtgacgatagcttcacatgtattatgggcgagcattaaataaagacggagcgcacataaactaaaaagggcacacatattagtgagc

SEQ ID NO: 39449 - DNA, 96 bp, Fusarium cuneirostrum
  misc_feature: 41
gcgaggttgcctaattcggagatgacgatggcttctttttctttgtggtagatagtaatgtgacctgattgatttatgcgagcctctgtttaattg

SEQ ID NO: 39450 - DNA, 96 bp, Fusarium cuneirostrum
  misc_feature: 41
gcagtcgaagacttgagactgtatttatttttttgtgtgagacggagtcgagtctgatttcgactggaatcagttctgtttattccacggccgtgg

SEQ ID NO: 39451 - DNA, 96 bp, Fusarium cuneirostrum
  misc_feature: 41
gcagcgctcgaggtggatttgacggagtctcaaaactggaacagtttttgtatggactcgattctggcatttggtgagccaaatcctgagaatggg

SEQ ID NO: 39452 - DNA, 96 bp, Fusarium cuneirostrum
  misc_feature: 41
catgacccacactccgggtcatcttacacacagtgacatttcatgtttacgtgaggggattcacagagcgcatctctgttgaattaaagtaacatc

SEQ ID NO: 39453 - DNA, 96 bp, Fusarium cuneirostrum
  misc_feature: 41
gatgtggttcagttatcttcatgagagtgcatgatgacctcaagtggaggtgcatggactgcgaaggcaggatcacatggaatgtgggcgacgagg

SEQ ID NO: 39454 - DNA, 96 bp, Fusarium cuneirostrum
  misc_feature: 41
gatgtgaatgtgaataacttcaaaagtattttcccgaggccgaggacgtaggacgcaggctgagggattgacaatagactgaactcaagtgaagag

SEQ ID NO: 39455 - DNA, 96 bp, Fusarium cuneirostrum
  misc_feature: 41
gatgaacgagatggttcgagtgcgaggaaggacgacggaggaggacaggagagcatcggagatgcacatgggcgcagagcgccagagacaatcttt

SEQ ID NO: 39456 - DNA, 96 bp, Fusarium cuneirostrum
  misc_feature: 41
gatcctgagaagctgtacgttggtcttgtgagagacaaagacaataagctccttctcaagcagacgggcgccgaagatgaagctctgattcgcgtt

SEQ ID NO: 39457 - DNA, 96 bp, Fusarium cuneirostrum
  misc_feature: 41
gatagcttcacatgtattatgggcgagcattaaataaagacggagcgcacataaactaaaaagggcacacatattagtgagctcccgcatttatat

SEQ ID NO: 39458 - DNA, 96 bp, Fusarium cuneirostrum
  misc_feature: 41
ccacttgaggtcatcatgcactctcatgaagataactgaaccacatcttgtggtgttttagtaacgtcgctacgtgttccttcgtcacactcactc

SEQ ID NO: 39459 - DNA, 96 bp, Fusarium cuneirostrum
  misc_feature: 41
gagtagagacgaccaagtataatgttgtaggatatcacacgtgtggggtgtgatttagttgcctttcttagtagttgtgatagcttcatttatctt

SEQ ID NO: 39460 - DNA, 96 bp, Fusarium cuneirostrum
  misc_feature: 41
atctactttatatatgctcgcgtaacacaagtgcgggagctcaccctactgtaagctctaggtttttcagcctcgctccctacctacttagtactc

SEQ ID NO: 39461 - DNA, 96 bp, Fusarium cuneirostrum
  misc_feature: 41
gaggtgaagtgcgaataacttcactagatcatgaaaagagatggagtgaaacgagatcgaagaagtaatagaaacctgagccatgcgaaggttgat

SEQ ID NO: 39462 - DNA, 96 bp, Fusarium cuneirostrum
  misc_feature: 41
gagggcgaggaggaacgacgcagcctgaaggattgactagtagagtctcatctgcatgtgaagagttcatctccaagcagagactgtggtctcaat

SEQ ID NO: 39463 - DNA, 96 bp, Fusarium cuneirostrum
  misc_feature: 41
gagcgaaatgggagctcctaactttggtcaataagaggtttttttttccgagtagcttgctacggttaaaaaactgggggcgaacaacttgttgtg

SEQ ID NO: 39464 - DNA, 96 bp, Fusarium cuneirostrum
  misc_feature: 41
cgccattagggagggaaatggtgctcgacaagtttaaagaagtgtatttaaatgttattgtctcgccctatctcctgtaggttatggatgaggctc

SEQ ID NO: 39465 - DNA, 96 bp, Fusarium cuneirostrum
  misc_feature: 41
caaagaaacagccctcctgtttccaagaataatactcgtcccagcctcgtccttactcgaaataaataatcgatcgtcgctccactcctattgctc

SEQ ID NO: 39466 - DNA, 96 bp, Fusarium cuneirostrum
  misc_feature: 41
gagagagtagtggagcgaacactaaataaaaggctccaacagaagtgagcgacacgtaattgtgatgttgtgcgtataaatggtatcgtgaatgtg

SEQ ID NO: 39467 - DNA, 96 bp, Fusarium cuneirostrum
  misc_feature: 41
gaatacatttacagtcaccaacataaacattcacaatctgaaatcatgctcgccaagtgaaaaaaagtagtggttctcgacacattaaaagtggtt

SEQ ID NO: 39468 - DNA, 96 bp, Fusarium cuneirostrum
  misc_feature: 41
atatgacaccagcagagcgacacaaagtagcaagagatatcgcgagaattcccggaatcatcaaagaccagcttgcactagaagggtttcagtttc

SEQ ID NO: 39469 - DNA, 96 bp, Fusarium cuneirostrum
  misc_feature: 41
agcaaggtcgagaccgaggacaagagcaaggtcgagaccgaggacaagagcaaggtcgagaccgaggacaagagcaaggtcgagaccgaggacaag

SEQ ID NO: 39470 - DNA, 96 bp, Fusarium cuneirostrum
  misc_feature: 41
atttgtacaaattttgtatgggaagatttctgagattgtatgggcaacgacctggaatcagagtgagaatctggtacagattgttagcgaccgaag

SEQ ID NO: 39471 - DNA, 96 bp, Fusarium cuneirostrum
  misc_feature: 41
ctataggccccctcaagtacttaagggcctggagaccggcccatctcccgagcctggtcttcccaaccacattgcgctcggaagacaaagccacag

SEQ ID NO: 39472 - DNA, 96 bp, Fusarium cuneirostrum
  misc_feature: 41
agcaaaaaggctcgctaaaaaacgaaggtatcgcaacatccaaaacaggaaacaatgtagactaatctaagatacaaaacctccgaaaacgcccag

SEQ ID NO: 39473 - DNA, 96 bp, Fusarium cuneirostrum
  misc_feature: 41
aatgtaaatgtaaatgtaaatgtcttcttttattgttttcactgagtccggcggaggaggagggacgacggagccggattggcaagagtagtgcag

SEQ ID NO: 39474 - DNA, 96 bp, Fusarium cuneirostrum
  misc_feature: 41
cggcctccactcattccattcgttcccgtccttagtcaaccgatcattgcgtcgtccctcctccatgatcctacactcttcgccttcgtgcctcag

SEQ ID NO: 39475 - DNA, 96 bp, Fusarium cuneirostrum
  misc_feature: 41
aactaaaaagggcacacatattagtgagctcccgcatttatatatagcgagcatgttttaatctgatgtgaataacttcaaaagtattttcccgag

SEQ ID NO: 39476 - DNA, 96 bp, Fusarium cuneirostrum
  misc_feature: 41
ctcgcttgttcaagctcgagcaggcacaaaagtaaaaaaacagaagcaagttcatgttttgcgcgacagcgctgaagaagtgggcgtccgcccatt

SEQ ID NO: 39477 - DNA, 96 bp, Fusarium cuneirostrum
  misc_feature: 41
cattgtatacgacggacgtcgctgtctttttctattttctctgtttgcggaagcacggttgagagggattcgagaccctttcttactcagctggag

SEQ ID NO: 39478 - DNA, 96 bp, Fusarium cuneirostrum
  misc_feature: 41
aggagtaatcgtcttgagtcagcttgctgaccttgacgaccccagtcaatagacatccgaggtcacgaggaatgtggatgtagccactcgaatgag

SEQ ID NO: 39479 - DNA, 96 bp, Fusarium cuneirostrum
  misc_feature: 41
ctatctacactaaaaatctccaagatcgtcatcgacccattcatcaccaaactcgtccacaccctcgacgagtgtcttcacctcttctacagccct

SEQ ID NO: 39480 - DNA, 96 bp, Fusarium cuneirostrum
  misc_feature: 41
ctaacgacacgtcgcctgaaggctccgtaagtttagaacatagttcttgcttggaggatgaactcttcacttgagttcagtctattgtcaatccct

SEQ ID NO: 39481 - DNA, 96 bp, Fusarium cuneirostrum
  misc_feature: 41
ctaaacgagagggctagtatatattaagactactatagggccaaacccgatatagcgataaagtaagactaatacttatagggattactttaagct

SEQ ID NO: 39482 - DNA, 96 bp, Fusarium cuneirostrum
  misc_feature: 41
acattccccacgcctccgttcattcgctatccagcgatcactccgttattgctcctcattcccagtccatacgtccttcccattcgttattacacg

SEQ ID NO: 39483 - DNA, 96 bp, Fusarium cuneirostrum
  misc_feature: 41
atgatagagcgaaagcgatcacgaacgggtgagtgataatgatttgtgtctggacacatgtgcacgagacgggcacacatatatactaatcgaccg

SEQ ID NO: 39484 - DNA, 96 bp, Fusarium cuneirostrum
  misc_feature: 41
acttggagtgcttttggcgcccggggcgtcaaccttttttctgacgcgtttcattacgcgctcgctcgaacggattgtgagcgactcgattacccg

SEQ ID NO: 39485 - DNA, 96 bp, Fusarium cuneirostrum
  misc_feature: 41
cctttgggattttctgcgtctggagtgacgatggaagaggtgtcgaaggtttatctcgatgcggagaagaaacggagatcgagggctgtaagagcg

SEQ ID NO: 39486 - DNA, 96 bp, Fusarium cuneirostrum
  misc_feature: 41
cgcaaggtcactgctcacgataacatcatcaattgaccaacagtcaatgcgcacatcgaaagatgataccgaagtgggtgtacgaggtgagtagat

SEQ ID NO: 39487 - DNA, 96 bp, Fusarium cuneirostrum
  misc_feature: 41
cgagaggtgatcgagtcagggttgcgggagcgttatggtaagagggaggaggagtagagacgaccaagtataatgttgtaggatatcacacgtgtg

SEQ ID NO: 39488 - DNA, 96 bp, Fusarium cuneirostrum
  misc_feature: 41
cgagagaaataagctatatagtttaataatagaatttctaactcgtaaaccaaataatctagatttaattcctagtaacgtacatgataagcatat

SEQ ID NO: 39489 - DNA, 96 bp, Fusarium cuneirostrum
  misc_feature: 41
ccggaacggggcaaacgagcgtccataactttggtctataagaggtttttttccaaaacgcaccgcgttggttaaaactggggatgtcactttagg

SEQ ID NO: 39490 - DNA, 96 bp, Fusarium cuneirostrum
  misc_feature: 41
aagcggaagcgtagatgggaaccgggtgtgaagccagtgttccagcgtcagcgcagtaaaagtgtgcgtgtcagtaggatacggagcccggctcgg

SEQ ID NO: 39491 - DNA, 96 bp, Fusarium cuneirostrum
  misc_feature: 41
ccagcgaaacgagggctgataactttggtctataagcggtttcctttcaaacgcgtgcgttgattggaagctgggggaacaccgaggaacgagggg

SEQ ID NO: 39492 - DNA, 96 bp, Fusarium cuneirostrum
  misc_feature: 41
ccccactcggactctccgtcctcgtcgcccacattccatgtgatcctgccttcgcagtccatgcacctccacttgaggtcatcatgcactctcatg

SEQ ID NO: 39493 - DNA, 96 bp, Fusarium cuneirostrum
  misc_feature: 41
cccagcaagcagcattgccactagcgacggcacagagatctccggtctcacgtacgagcaagaatttagtcctcaaactcaatccaattgctaatt

SEQ ID NO: 39494 - DNA, 96 bp, Fusarium cuneirostrum
  misc_feature: 41
catgtcaaccgagcggggcgaggggattgagtttaggcgtttgcctaacaaagtgcaggaagcacttgaatgtccgatggagtcggatgatatgct

SEQ ID NO: 39495 - DNA, 96 bp, Fusarium cuneirostrum
  misc_feature: 41
catctacgaacacggcatcaagatatgacaccagcagagcgacacaaagtagcaagagatatcgcgagaattcccggaatcatcaaagaccagctt

SEQ ID NO: 39496 - DNA, 96 bp, Fusarium cuneirostrum
  misc_feature: 41
cacattgcatctatctacactaaaaatctccaagatcgtcatcgacccattcatcaccaaactcgtccacaccctcgacgagtgtcttcacctctt

SEQ ID NO: 39497 - DNA, 96 bp, Fusarium cuneirostrum
  misc_feature: 41
attttggtaagaacaggggatttcgaccgtatggagattctcaactcacctatcgttcaggcacaaaggagcatttcgatccattacgagaatgct

SEQ ID NO: 39498 - DNA, 96 bp, Fusarium cuneirostrum
  misc_feature: 41
acgtgcggagtgagtgtgacgaaggaacacgtagcgacgttacagacatcacacagagatggtgatgacttcaattgacagcagtcaaacatgaat

SEQ ID NO: 39499 - DNA, 96 bp, Fusarium cuneirostrum
  misc_feature: 41
atgactacttgtgagcccttgacataacataagcagggcgaggcaaataataatttaaataaactcgtttgacgagccctggttattctttttatt

SEQ ID NO: 39500 - DNA, 96 bp, Fusarium cuneirostrum
  misc_feature: 41
acaagtcgacaagaacaccaagcacctgtctccagaccatgtgccgcatcccaggaccacaatacctggtgcactcccatctcaccccagttcgat

SEQ ID NO: 39501 - DNA, 96 bp, Fusarium cuneirostrum
  misc_feature: 41
atcaatagagatggtacccccattaatcgccttcccgcctccgtgattaccatccagagcaatctggaaagcacggcaataatgtggatgatcctt

SEQ ID NO: 39502 - DNA, 96 bp, Fusarium cuneirostrum
  misc_feature: 41
ataaaaacgccgtcggcgcggttcgtgatcaattccggaatcgtcgatgatgttcgtccacggaacaaagagagcttatcttgcacgaaagttgat

SEQ ID NO: 39503 - DNA, 96 bp, Fusarium cuneirostrum
  misc_feature: 41
agttcatgttttgcgcgacagcgctgaagaagtgggcgtccgcccattatgtactcgctcactagctccgtccatgattacggtcgtacattctgt

SEQ ID NO: 39504 - DNA, 96 bp, Fusarium cuneirostrum
  misc_feature: 41
aagaattacggaggcgtaagccgacgtgcagtacgagaccgaggaacgaggtcgaagtggtgctagataatgtgaagaggtgaagtgcgaataact

SEQ ID NO: 39505 - DNA, 96 bp, Fusarium cuneirostrum
  misc_feature: 41
acagatgtcgaggggaaagggtacatggcgagagcagcgctcgaggtggatttgacggagtctcaaaactggaacagtttttgtatggactcgatt

SEQ ID NO: 39506 - DNA, 96 bp, Fusarium cuneirostrum
  misc_feature: 40
ccgcaaccctgactcgatcacctctcgcaggataccaagtcgatcgtacatctccttcactacttcttccttccgaagatagcttaccgtagaaaa

SEQ ID NO: 39507 - DNA, 96 bp, Fusarium cuneirostrum
  misc_feature: 40
tggagtgtatccatgcagatattgctggacctttcccggaagtgggagtagacgggggccagtactgggcctgcttcattgaagacttcactcaaa

SEQ ID NO: 39508 - DNA, 96 bp, Fusarium cuneirostrum
  misc_feature: 40
tttaggatataattaaatagtatatcgataataaaattaaagttaaggataatatagcgatttatatatagagagagataatattagattttaata

SEQ ID NO: 39509 - DNA, 96 bp, Fusarium cuneirostrum
  misc_feature: 40
catccgttcgggactcaagtggtgtaactctcaccactcctgttccattcacattctacgtcacaattccatctaacactacaattacaattacaa

SEQ ID NO: 39510 - DNA, 96 bp, Fusarium cuneirostrum
  misc_feature: 40
tatactaactacaataccacttgaggtcatcaccattacctattccggtaagtctcacaaagcatcgttggagttactcctccacacttgacccaa

SEQ ID NO: 39511 - DNA, 96 bp, Fusarium cuneirostrum
  misc_feature: 40
ttggaagagattgagtcggcgtagtagtagacttttcccaatgtagatatcgtgataacctcattttgtgtaacctgtgacataacttgattgatt

SEQ ID NO: 39512 - DNA, 96 bp, Fusarium cuneirostrum
  misc_feature: 40
ttgctcttgtcctcggtctcgaccttgctcttgtcctcggtctcgaccttgctcttgtcctcggtctcgaccttgctcttgtcctcggtctcgacc

SEQ ID NO: 39513 - DNA, 96 bp, Fusarium cuneirostrum
  misc_feature: 40
agttctgtttattccacggccgtggaaacacgaacaggtgagtgtctatacatatctggaagatgaagtgaaggatgaacgcaatgctaatagcaa

SEQ ID NO: 39514 - DNA, 96 bp, Fusarium cuneirostrum
  misc_feature: 40
ttgatctccaacagctctccagctgagtaagaaagggtctcgaatccctctcaaccgtgcttccgcaaacagagaaaatagaaaaagacagcgacg

SEQ ID NO: 39515 - DNA, 96 bp, Fusarium cuneirostrum
  misc_feature: 40
gaagaacaacagcgtcattccaaacgaggggaaccgagtttgggaagagaaagtggacggaacgttagttctgtccctgtttttttaaattgtcaa

SEQ ID NO: 39516 - DNA, 96 bp, Fusarium cuneirostrum
  misc_feature: 40
aatttgtacaaattttgtatgggaagatttctgagattgtatgggcaacgacctggaatcagagtgagaatctggtacagattgttagcgaccgaa

SEQ ID NO: 39517 - DNA, 96 bp, Fusarium cuneirostrum
  misc_feature: 40
ttcggtagtgatataagcgtagcttggtgtctccgccaccaagaaaaagtgacttcgttaacagaagtgaccgatttctcggcccattctcaggat

SEQ ID NO: 39518 - DNA, 96 bp, Fusarium cuneirostrum
  misc_feature: 40
acgaacccgtcgcgaggttataataatgagcaaggtcgcaaggtcactgctcacgataacatcatcaattgaccaacagtcaatgcgcacatcgaa

SEQ ID NO: 39519 - DNA, 96 bp, Fusarium cuneirostrum
  misc_feature: 40
tatccatggtgttctcgtaacctcgcatcgggctccttcgtcaccctacgctccgcacgtcgccctacgggctccgtatttaaaaaaggaatggaa

SEQ ID NO: 39520 - DNA, 96 bp, Fusarium cuneirostrum
  misc_feature: 40
agtgaaagtgaaagtgaaagtgaaagtgaaagtgaaagtgaaagtgaaagtgaaagtgaaagtgaaagtgaaagtgaaagtgaaagggaaagtgaa

SEQ ID NO: 39521 - DNA, 96 bp, Fusarium cuneirostrum
  misc_feature: 40
cctcacctttttttgactttgtgactttgagactttgactgtgatgatgactacttgtgagcccttgacataacataagcagggcgaggcaaataa

SEQ ID NO: 39522 - DNA, 96 bp, Fusarium cuneirostrum
  misc_feature: 40
ggactagattcttttagttttctatcctagattactagaaaagtatattcctatcgtatattaatacttaaaacttatagatagataaaagaataa

SEQ ID NO: 39523 - DNA, 96 bp, Fusarium cuneirostrum
  misc_feature: 40
ttaggatataattaaatagtatatcgataataaaattaaagttaaggataatatagcgatttatatatagagagagataatattagattttaataa

SEQ ID NO: 39524 - DNA, 96 bp, Fusarium cuneirostrum
  misc_feature: 40
tgaaagctccaggctcattggctagcagtgcgtgccgccgactgctaagcagatcaagattttatccaacgctgcaattagcttgctgtttggtaa

SEQ ID NO: 39525 - DNA, 96 bp, Fusarium cuneirostrum
  misc_feature: 40
tgtttaatatggggcgaggcaaataaatacgttttaaatagactcgtttgacgagccccaattactattttatgcgagcagacatgactttgatgt

SEQ ID NO: 39526 - DNA, 96 bp, Fusarium cuneirostrum
  misc_feature: 40
tgttggacggacaaatgagagaggtacgaacgttccgtccacaatctcataccccgcagacagagtcgaggagtataagacagcgtcttttccccc

SEQ ID NO: 39527 - DNA, 96 bp, Fusarium cuneirostrum
  misc_feature: 40
gtttagatcgttcgccctctgggctctattcgactgctgtctcaccctcaccactcgccgtctagctcgtggttctcttttaccactacaataaca

SEQ ID NO: 39528 - DNA, 96 bp, Fusarium cuneirostrum
  misc_feature: 40
tgtgtctgggtcgacgtccgtctccccctcttttatttctcctcgtgcactcacttcagtcgcatcctgcattcatgtttgactgctgtcaattga

SEQ ID NO: 39529 - DNA, 96 bp, Fusarium cuneirostrum
  misc_feature: 40
aaaaggcggtcactccttcgagtaaaaaggtcggtagttcagacaacctccgcttcagcagatccgcgtccaagaagcagatcgtcacagcgcaca

SEQ ID NO: 39530 - DNA, 96 bp, Fusarium cuneirostrum
  misc_feature: 40
cacagtcgctcgcctttaggcttactttttggattcattacggcgagctgttggttccagataagtgctcgcataaagataaatgaagctatcaca

SEQ ID NO: 39531 - DNA, 96 bp, Fusarium cuneirostrum
  misc_feature: 40
tgtacgaggtgagtagatgagggagtgcggatgcgcgaccgacagaagtgtgtcgagggtcgagcagacccgagccagaaacgagctcaaaactgg

SEQ ID NO: 39532 - DNA, 96 bp, Fusarium cuneirostrum
  misc_feature: 40
tcatccgttcgggactcaagtggtgtaactctcaccactcctgttccattcacattctacgtcacaattccatctaacactacaattacaattaca

SEQ ID NO: 39533 - DNA, 96 bp, Fusarium cuneirostrum
  misc_feature: 40
gggctttctcaattgtcaggatgtagccttaaatgtctctgctctacgacgaacttgtctcaccgcataaagctgtctggaacaagaatgcctcca

SEQ ID NO: 39534 - DNA, 96 bp, Fusarium cuneirostrum
  misc_feature: 40
gaataacttcaaaagtattttcccgaggccgaggacgtaggacgcaggctgagggattgacaatagactgaactcaagtgaagagttcatcctcca

SEQ ID NO: 39535 - DNA, 96 bp, Fusarium cuneirostrum
  misc_feature: 40
caatcacaaacacattcacgataccatttatacgcacaacatcacaattacgtgtcgctcacttctgttggagccttttatttagtgttcgctcca

SEQ ID NO: 39536 - DNA, 96 bp, Fusarium cuneirostrum
  misc_feature: 40
ccttaaatgaaatgtgatatgaacgtagtcgtagtaagaagacatgggaatggcttcatccataaatgagtcctgagggcgaggaggaacgacgca

SEQ ID NO: 39537 - DNA, 96 bp, Fusarium cuneirostrum
  misc_feature: 40
tgccgcgacctggcgggaggtttccacagctcaagggatataccaaggaggaaggaataacctgatccatcaccttagtcgttcatcagtcactac

SEQ ID NO: 39538 - DNA, 96 bp, Fusarium cuneirostrum
  misc_feature: 40
ctgtgcactgtgaatgtaaatgtaaatgtaaatgtcttcttttattgttttcactgagtccggcggaggaggagggacgacggagccggattggca

SEQ ID NO: 39539 - DNA, 96 bp, Fusarium cuneirostrum
  misc_feature: 40
aatccttcaccctgcacgctacgcgctcgggctcaggactatcttgggtacatgatcacgactacgattcaaaataataataatgtcacatatgca

SEQ ID NO: 39540 - DNA, 96 bp, Fusarium cuneirostrum
  misc_feature: 40
caccctcaccactcgccgtctagctcgtggttctcttttaccactacaataacagttcactcttctcgttcacaaatgcacaatcaattcaaatca

SEQ ID NO: 39541 - DNA, 96 bp, Fusarium cuneirostrum
  misc_feature: 40
tgatcaaccttcgcatggctcaggtttctattacttcttcgatctcgtttcactccatctcttttcatgatctagtgaagttattcgcacttcacc

SEQ ID NO: 39542 - DNA, 96 bp, Fusarium cuneirostrum
  misc_feature: 40
ctcactaatctaataaaaagaataaccagggctcgtcaaacgagtttatttaaattattatttgcctcgccctgcttatgttatgtcaagggctca

SEQ ID NO: 39543 - DNA, 96 bp, Fusarium cuneirostrum
  misc_feature: 40
actaaaaatctccaagatcgtcatcgacccattcatcaccaaactcgtccacaccctcgacgagtgtcttcacctcttctacagccctcggcttca

SEQ ID NO: 39544 - DNA, 96 bp, Fusarium cuneirostrum
  misc_feature: 40
gagtttgtattctatccggaggaggagtgaacgagtgagcgatcatctacttacattaattgctggacagcatcttctcgggaagagaagaaaaga

SEQ ID NO: 39545 - DNA, 96 bp, Fusarium cuneirostrum
  misc_feature: 40
gatacaaaagaataaaccacgttcgcccgtctcactaaatctccgattgaaataccgtcactctgttcctagtcgcgcgccagcgcaattgaaaga

SEQ ID NO: 39546 - DNA, 96 bp, Fusarium cuneirostrum
  misc_feature: 40
tcttaaccttggtatagggggggactacgggacacgggacagtgagggacgaacgtgtggactgagtctgcctttagtcagcttgctgacattggc

SEQ ID NO: 39547 - DNA, 96 bp, Fusarium cuneirostrum
  misc_feature: 40
tctgtgtgatgtctgtaacgtcgctacgtgttccttcgtcacactcactccgcacgtcctccctccggtcgtccgtactaaggatatagtcataga

SEQ ID NO: 39548 - DNA, 96 bp, Fusarium cuneirostrum
  misc_feature: 40
tctatactttattatcttcttttttatttttatttttttccttttttttcttatctcttattttttttctttttatttatttttatatttatttta

SEQ ID NO: 39549 - DNA, 96 bp, Fusarium cuneirostrum
  misc_feature: 40
attcacagagcgcatctctgttgaattaaagtaacatcacatcgtctccctgtcggtcgactcgttctgcacctcgccctgacgggcttcggtaga

SEQ ID NO: 39550 - DNA, 96 bp, Fusarium cuneirostrum
  misc_feature: 40
tacgctccgcacgtcgccctacgggctccgtatttaaaaaaggaatggaagacctctctccgcgaggctcgtaactctttactcgagtttattaga

SEQ ID NO: 39551 - DNA, 96 bp, Fusarium cuneirostrum
  misc_feature: 40
tctaaaatctacgtaattgaagtcatcatcacttccacatcaggcaactctacaaatctcaccaagttcacattgcatctatctacactaaaaatc

SEQ ID NO: 39552 - DNA, 96 bp, Fusarium cuneirostrum
  misc_feature: 40
tcgggctcgacacaatctcgcccctctgtcttacggtcgccccacaggctccctcctactttactcacgtcatgacccacactccgggtcattctt

SEQ ID NO: 39553 - DNA, 96 bp, Fusarium cuneirostrum
  misc_feature: 40
tcgagaggaacggatgcgccgtgcgggacgtttcacgggaaaacgagttcaagcatcattcgcagctgacgacaagagcatggattctatggctgg

SEQ ID NO: 39554 - DNA, 96 bp, Fusarium cuneirostrum
  misc_feature: 40
tcctgagaagctgtacgttggtcttgtgagagacaaagacaataagctccttctcaagcagacgggcgccgaagatgaagctctgattcgcgttac

SEQ ID NO: 39555 - DNA, 96 bp, Fusarium cuneirostrum
  misc_feature: 40
gagtaaagtaggagggagcctgtggggcgaccgtaagacagaggggcgagattgtgtcgagcccgaatgtgaaatttttcgagattttggtgagga

SEQ ID NO: 39556 - DNA, 96 bp, Fusarium cuneirostrum
  misc_feature: 40
tccagtcgctccgctcctgtttgctattagcattgcgttcatccttcacttcatcttccagatatgtatagacactcacctgttcgtgtttccacg

SEQ ID NO: 39557 - DNA, 96 bp, Fusarium cuneirostrum
  misc_feature: 40
tcattccgtggtcgctctgctcccactccattccgcaccttccctcactccgttcggtcggtattcagaacatagttctgcttggggtatgggttc

SEQ ID NO: 39558 - DNA, 96 bp, Fusarium cuneirostrum
  misc_feature: 40
ggatactgacgagggggcgaggaagtataagacggaacgtctgcccctgcgaggacgcagtcgaagacttgagactgtatttatttttttgtgtga

SEQ ID NO: 39559 - DNA, 96 bp, Fusarium cuneirostrum
  misc_feature: 40
ctgtctatactaactacaataccacttgaggtcatcaccattacctattccggtaagtctcacaaagcatcgttggagttactcctccacacttga

SEQ ID NO: 39560 - DNA, 96 bp, Fusarium cuneirostrum
  misc_feature: 40
tcaaggtatctacgattgacaatccctctcgcacaccgtcgcatgcgctcctcctgctacgggactattatggtgtgggttgaagctattcgcaag

SEQ ID NO: 39561 - DNA, 96 bp, Fusarium cuneirostrum
  misc_feature: 40
aatcgctacacgattcccacctcaatctcgcgatttcgcccgccattctcagtttcgttcacatacaaaaagtatgtcgatttgagtccaatttga

SEQ ID NO: 39562 - DNA, 96 bp, Fusarium cuneirostrum
  misc_feature: 40
tattggcacccaataacatttttcctagtccgtgcacgcttctcggatctcgtaacaagactgtcgcataacattcgtgtgaccggatgtaactat

SEQ ID NO: 39563 - DNA, 96 bp, Fusarium cuneirostrum
  misc_feature: 40
aaagctccaggctcattggctagcagtgcgtgccgccgactgctaagcagatcaagattttatccaacgctgcaattagcttgctgtttggtaata

SEQ ID NO: 39564 - DNA, 96 bp, Fusarium cuneirostrum
  misc_feature: 40
tatattctttttttattattttctcttttttttcttttttataattatatctttttttttttcttttaattatttatttatttttaattcttgatt

SEQ ID NO: 39565 - DNA, 96 bp, Fusarium cuneirostrum
  misc_feature: 40
tatatattctatagcttcttagagtttattatttatttaaatataattaaaataaggtcccctttatttatattattataaataattaagtcttct

SEQ ID NO: 39566 - DNA, 96 bp, Fusarium cuneirostrum
  misc_feature: 40
ctcgaaaaaaataaaacaagtcagagttcgcctgctcactcaacctctcgggggaaaagacgctgtcttatactcctcgactctgtctgcggggta

SEQ ID NO: 39567 - DNA, 96 bp, Fusarium cuneirostrum
  misc_feature: 40
tacaaaagaataaaccacgttcgcccgtctcactaaatctccgattgaaataccgtcactctgttcctagtcgcgcgccagcgcaattgaaagacg

SEQ ID NO: 39568 - DNA, 96 bp, Fusarium cuneirostrum
  misc_feature: 40
gagactttacttaaacttaaataaaatggacgaggcccacgacttttttctacttggcgagcacttaatgatacttgtgatttgtatgtgacctta

SEQ ID NO: 39569 - DNA, 96 bp, Fusarium cuneirostrum
  misc_feature: 40
atcctgagaagctgtacgttggtcttgtgagagacaaagacaataagctccttctcaagcagacgggcgccgaagatgaagctctgattcgcgtta

SEQ ID NO: 39570 - DNA, 96 bp, Fusarium cuneirostrum
  misc_feature: 40
cagtctattgtcaatccctcagcctgcgtcctacgtcctcggcctcgggaaaatacttttgaagttattcacattcacatctacgattacaattta

SEQ ID NO: 39571 - DNA, 96 bp, Fusarium cuneirostrum
  misc_feature: 40
ggcacatttaaatctgctaccaaggcacatttatgagaaaactacattccctaccaattattgtaaacgtgccttgaccaaggcacatttaattta

SEQ ID NO: 39572 - DNA, 96 bp, Fusarium cuneirostrum
  misc_feature: 40
taaataattaatagaatagagcctacttatacctattataattacttaagttaacttaattaatataaaagaccttataatatataagggacttta

SEQ ID NO: 39573 - DNA, 96 bp, Fusarium cuneirostrum
  misc_feature: 40
taaaaggcggtcactccttcgagtaaaaaggtcggtagttcagacaacctccgcttcagcagatccgcgtccaagaagcagatcgtcacagcgcac

SEQ ID NO: 39574 - DNA, 96 bp, Fusarium cuneirostrum
  misc_feature: 40
cgaacactaaataaaaggctccaacagaagtgagcgacacgtaattgtgatgttgtgcgtataaatggtatcgtgaatgtgtttgtgattgtaaac

SEQ ID NO: 39575 - DNA, 96 bp, Fusarium cuneirostrum
  misc_feature: 40
gttgtgatagcttcatttatctttatgcgagcacttatctggaaccaacagctcgccgtaatgaatccaaaaagtaagcctaaaggcgagcgactg

SEQ ID NO: 39576 - DNA, 96 bp, Fusarium cuneirostrum
  misc_feature: 40
gtgatgacttcaattgacagcagtcaaacatgaatgcaggatgcgactgaagtgagtgcacgaggagaaataaaagagggggagacggacgtcgac

SEQ ID NO: 39577 - DNA, 96 bp, Fusarium cuneirostrum
  misc_feature: 40
gtcttggtgtcgcctccgctccccctccactttcactccgttcaagcaccacattccatgtgatctttgcgtccgcaatcaacgtgcctcaacttg

SEQ ID NO: 39578 - DNA, 96 bp, Fusarium cuneirostrum
  misc_feature: 40
aatagacatccgaggtcacgaggaatgtggatgtagccactcgaatgagggacgaagaagagtggagtaagtaagcacgagaaggaggggaccgac

SEQ ID NO: 39579 - DNA, 96 bp, Fusarium cuneirostrum
  misc_feature: 40
gtaatcgtcttgagtcagcttgctgaccttgacgaccccagtcaatagacatccgaggtcacgaggaatgtggatgtagccactcgaatgagggac

SEQ ID NO: 39580 - DNA, 96 bp, Fusarium cuneirostrum
  misc_feature: 40
gggcgaggaggaacgacgcagcctgaaggattgactagtagagtctcatctgcatgtgaagagttcatctccaagcagagactgtggtctcaatac

SEQ ID NO: 39581 - DNA, 96 bp, Fusarium cuneirostrum
  misc_feature: 40
ctattcttgagagcatattactgcgtcgcttatctgacgcatatcttttctacggtaagctatcttcggaaggaagaagtagtgaaggagatgtac

SEQ ID NO: 39582 - DNA, 96 bp, Fusarium cuneirostrum
  misc_feature: 40
ggtatcctgcgagaggtgatcgagtcagggttgcgggagcgttatggtaagagggaggaggagtagagacgaccaagtataatgttgtaggatatc

SEQ ID NO: 39583 - DNA, 96 bp, Fusarium cuneirostrum
  misc_feature: 40
ggtatcatctttcgatgtgcgcattgactgttggtcaattgatgatgttatcgtgagcagtgaccttgcgaccttgctcattattataacctcgcg

SEQ ID NO: 39584 - DNA, 96 bp, Fusarium cuneirostrum
  misc_feature: 40
aagtagatggtgataacctcaaaagagtccacgagccgagcgcgtagcgtgcaggcgaggggattgtcaatgtaatttattcagggaataattacc

SEQ ID NO: 39585 - DNA, 96 bp, Fusarium cuneirostrum
  misc_feature: 40
acttcacttctgccgactccacatactttgctcgccactgtttaatatggggcgaggcaaataaatacgttttaaatagactcgtttgacgagccc

SEQ ID NO: 39586 - DNA, 96 bp, Fusarium cuneirostrum
  misc_feature: 40
gggattgacaatagactgaactcaagtgaagagttcatcctccaagcaagaactatgttctaaacttacggagccttcaggcgacgtgtcgttagt

SEQ ID NO: 39587 - DNA, 96 bp, Fusarium cuneirostrum
  misc_feature: 40
gacttcacttctgccgactccacatactttgctcgccactgtttaatatggggcgaggcaaataaatacgttttaaatagactcgtttgacgagcc

SEQ ID NO: 39588 - DNA, 96 bp, Fusarium cuneirostrum
  misc_feature: 40
ggcgagcattaaataaagacggagcgcacataaactaaaaagggcacacatattagtgagctcccgcatttatatatagcgagcatgttttaatct

SEQ ID NO: 39589 - DNA, 96 bp, Fusarium cuneirostrum
  misc_feature: 40
ggagcgaaatgggagctcctaactttggtcaataagaggtttttttttccgagtagcttgctacggttaaaaaactgggggcgaacaacttgttgt

SEQ ID NO: 39590 - DNA, 96 bp, Fusarium cuneirostrum
  misc_feature: 40
ggaacgacgaataaggtgcagcgtagcgatccgggcataagtggatactgacgagggggcgaggaagtataagacggaacgtctgcccctgcgagg

SEQ ID NO: 39591 - DNA, 96 bp, Fusarium cuneirostrum
  misc_feature: 40
ggaacagagtgacggtatttcaatcggagatttagtgagacgggcgaacgtggtttattcttttgtatcacggagtgatgaacgagatggttcgag

SEQ ID NO: 39592 - DNA, 96 bp, Fusarium cuneirostrum
  misc_feature: 40
ggaaaggggagatcgccaatttaattttcattgaaatatgggaggagtagagacgacgacagacattgtgtatggtatccgggaacagggaggttc

SEQ ID NO: 39593 - DNA, 96 bp, Fusarium cuneirostrum
  misc_feature: 40
gcttcggtagaactatacagttcctgcttcctctccgagggtcaggttcagttgtcaagccctccgctcctccttcgctacgctcgctcgtcggct

SEQ ID NO: 39594 - DNA, 96 bp, Fusarium cuneirostrum
  misc_feature: 40
gcgcgacagcgctgaagaagtgggcgtccgcccattatgtactcgctcactagctccgtccatgattacggtcgtacattctgttcgaccataagc

SEQ ID NO: 39595 - DNA, 96 bp, Fusarium cuneirostrum
  misc_feature: 40
gccgagcgcgtagcgtgcaggcgaggggattgtcaatgtaatttattcagggaataattacccttccaagcaggaactgtgaaatagagaccgagc

SEQ ID NO: 39596 - DNA, 96 bp, Fusarium cuneirostrum
  misc_feature: 40
gcgagaggtgatcgagtcagggttgcgggagcgttatggtaagagggaggaggagtagagacgaccaagtataatgttgtaggatatcacacgtgt

SEQ ID NO: 39597 - DNA, 96 bp, Fusarium cuneirostrum
  misc_feature: 40
atcccacattctcctagtctattagaatttaaattgtcaagatcgtcttattcactgctcagctaccgaactagaagcgtctatatcatctctcgc

SEQ ID NO: 39598 - DNA, 96 bp, Fusarium cuneirostrum
  misc_feature: 40
gcgagacaataacatttaaatacacttctttaaacttgtcgagcaccatttccctccctaatggcgagccatcgtgactgattgtaattgtaattg

SEQ ID NO: 39599 - DNA, 96 bp, Fusarium cuneirostrum
  misc_feature: 40
acgacctggaatcagagtgagaatctggtacagattgttagcgaccgaagggagctttccagcttatagactaacgcgagtgacccggaacggggc

SEQ ID NO: 39600 - DNA, 96 bp, Fusarium cuneirostrum
  misc_feature: 40
gcccagagggccgacaagaatccatttcaaaatttgtacaaattttgtatgggaagatttctgagattgtatgggcaacgacctggaatcagagtg

SEQ ID NO: 39601 - DNA, 96 bp, Fusarium cuneirostrum
  misc_feature: 40
cattcacattctacgtcacaattccatctaacactacaattacaattacaattacaatcagtcacgatggctcgccattagggagggaaatggtgc

SEQ ID NO: 39602 - DNA, 96 bp, Fusarium cuneirostrum
  misc_feature: 40
gcacaaccgagagagtagtggagcgaacactaaataaaaggctccaacagaagtgagcgacacgtaattgtgatgttgtgcgtataaatggtatcg

SEQ ID NO: 39603 - DNA, 96 bp, Fusarium cuneirostrum
  misc_feature: 40
gcaagtcgtctttcaattgcgctggcgcgcgactaggaacagagtgacggtatttcaatcggagatttagtgagacgggcgaacgtggtttattct

SEQ ID NO: 39604 - DNA, 96 bp, Fusarium cuneirostrum
  misc_feature: 40
acatggcgagagcagcgctcgaggtggatttgacggagtctcaaaactggaacagtttttgtatggactcgattctggcatttggtgagccaaatc

SEQ ID NO: 39605 - DNA, 96 bp, Fusarium cuneirostrum
  misc_feature: 40
gattcacagagcgcatctctgttgaattaaagtaacatcacatcgtctccctgtcggtcgactcgttctgcacctcgccctgacgggcttcggtag

SEQ ID NO: 39606 - DNA, 96 bp, Fusarium cuneirostrum
  misc_feature: 40
cgaacggatgagcaagccccgtaggggcgcagggaagactgagggattggcaatagtcattacaccgccggaggcccgagtcggaactgtataatc

SEQ ID NO: 39607 - DNA, 96 bp, Fusarium cuneirostrum
  misc_feature: 40
caactcccgtttcagcatagtcgggaaaacggtcccgttacatagtcactactcaacaaccctttcgggtctctacaaaatcaaaacatttacatc

SEQ ID NO: 39608 - DNA, 96 bp, Fusarium cuneirostrum
  misc_feature: 40
accacttgaggtcatcaccattacctattccggtaagtctcacaaagcatcgttggagttactcctccacacttgacccaactcaaacacagcatc

SEQ ID NO: 39609 - DNA, 96 bp, Fusarium cuneirostrum
  misc_feature: 40
gatgactacttgtgagcccttgacataacataagcagggcgaggcaaataataatttaaataaactcgtttgacgagccctggttattctttttat

SEQ ID NO: 39610 - DNA, 96 bp, Fusarium cuneirostrum
  misc_feature: 40
cgacagctgccaagtcaagccctgtcgacaacggagataatatctctccacaagttcgtagcgaccacaatcgctacaaatagaaaggacaagatc

SEQ ID NO: 39611 - DNA, 96 bp, Fusarium cuneirostrum
  misc_feature: 40
gatagagaatatattataaatctatatccttaataataactctagcttaacatacttaataagcgagtaaaataaaaatcctaaccttcctattag

SEQ ID NO: 39612 - DNA, 96 bp, Fusarium cuneirostrum
  misc_feature: 40
aggactcatttatggatgaagccattcccatgtcttcttactacgactacgttcatatcacatttcatttaaggtcacatacaaatcacaagtatc

SEQ ID NO: 39613 - DNA, 96 bp, Fusarium cuneirostrum
  misc_feature: 40
cgttcgtacctctctcatttgtccgtccaacaaaaccgacctccactcagtcccttcgttcccggtcttacttactccacttcatactcgtccctc

SEQ ID NO: 39614 - DNA, 96 bp, Fusarium cuneirostrum
  misc_feature: 40
gaggcttgcattcaagtcggagcgaatgccaatcttggcttcatgggcacacgcgagtcatcccgaatcatgcgctgctgtcgatgacatcagtcg

SEQ ID NO: 39615 - DNA, 96 bp, Fusarium cuneirostrum
  misc_feature: 40
gacttttttctacttggcgagcacttaatgatacttgtgatttgtatgtgaccttaaatgaaatgtgatatgaacgtagtcgtagtaagaagacat

SEQ ID NO: 39616 - DNA, 96 bp, Fusarium cuneirostrum
  misc_feature: 40
cttcgccttcgtgcctcaggctccctatttactgggaaggcaatggtgctgcgcacctaaagcctgactcagtccacacgttcgtccctcactgtc

SEQ ID NO: 39617 - DNA, 96 bp, Fusarium cuneirostrum
  misc_feature: 40
gaaagtcttcagtcgtctcgttgttcactcggtcattgttcacattcctctggaatgatgatgaaaggaagagaaatctcactctgttcggtcagt

SEQ ID NO: 39618 - DNA, 96 bp, Fusarium cuneirostrum
  misc_feature: 40
acgggtaatcgagtcgctcacaatccgttcgagcgagcgcgtaatgaaacgcgtcagaaaaaaggttgacgccccgggcgccaaaagcactccaag

SEQ ID NO: 39619 - DNA, 96 bp, Fusarium cuneirostrum
  misc_feature: 40
ccacgacttttttctacttggcgagcacttaatgatacttgtgatttgtatgtgaccttaaatgaaatgtgatatgaacgtagtcgtagtaagaag

SEQ ID NO: 39620 - DNA, 96 bp, Fusarium cuneirostrum
  misc_feature: 40
cttcccctcgactctccagtctcgggttgatgtcggtcgggccacgccctcccttctactcttaccttcaccatgacccacactccgggtcatctt

SEQ ID NO: 39621 - DNA, 96 bp, Fusarium cuneirostrum
  misc_feature: 40
atcagttctgtttattccacggccgtggaaacacgaacaggtgagtgtctatacatatctggaagatgaagtgaaggatgaacgcaatgctaatag

SEQ ID NO: 39622 - DNA, 96 bp, Fusarium cuneirostrum
  misc_feature: 40
cagacgttccgtcttatacttcctcgccccctcgtcagtatccacttatgcccggatcgctacgctgcaccttattcgtcgttcctcctcataacg

SEQ ID NO: 39623 - DNA, 96 bp, Fusarium cuneirostrum
  misc_feature: 40
cgctcgggactcatggatgaggaatacatttacagtcaccaacataaacattcacaatctgaaatcatgctcgccaagtgaaaaaaagtagtggtt

SEQ ID NO: 39624 - DNA, 96 bp, Fusarium cuneirostrum
  misc_feature: 40
cgagactttacttaaacttaaataaaatggacgaggcccacgacttttttctacttggcgagcacttaatgatacttgtgatttgtatgtgacctt

SEQ ID NO: 39625 - DNA, 96 bp, Fusarium cuneirostrum
  misc_feature: 40
ccttcttccccattcgctcgctccgctcgtcttacatgggtccccaccggcctccactcattccattcgttcccgtccttagtcaaccgatcattg

SEQ ID NO: 39626 - DNA, 96 bp, Fusarium cuneirostrum
  misc_feature: 40
cagaggatcaagtgcacgagtgcacgactaactttaactgtagcccggaacgaggagtgaggacgaatatcattcaagtgaatgaaatccgacagg

SEQ ID NO: 39627 - DNA, 96 bp, Fusarium cuneirostrum
  misc_feature: 40
aggcaaacgagcgtgctctaactttggtctataagaggtttttttccaagcggattatccgcggttaaaactggggagaggagcttgtctccgagg

SEQ ID NO: 39628 - DNA, 96 bp, Fusarium cuneirostrum
  misc_feature: 40
cctagacagtggaattagcctcaagatgatccaatctcacgagctcaattcatacgaaaataatgctcaatgagcacgccaattgctggggttttt

SEQ ID NO: 39629 - DNA, 96 bp, Fusarium cuneirostrum
  misc_feature: 40
ccgatgtgtgaccgagacagatgtcgaggggaaagggtacatggcgagagcagcgctcgaggtggatttgacggagtctcaaaactggaacagttt

SEQ ID NO: 39630 - DNA, 96 bp, Fusarium cuneirostrum
  misc_feature: 40
cattcacgataccatttatacgcacaacatcacaattacgtgtcgctcacttctgttggagccttttatttagtgttcgctccactactctctcgg

SEQ ID NO: 39631 - DNA, 96 bp, Fusarium cuneirostrum
  misc_feature: 40
caatgtgaacttggtgagatttgtagagttgcctgatgtggaagtgatgatgacttcaattacgtagattttagagcgagtactaagtaggtaggg

SEQ ID NO: 39632 - DNA, 96 bp, Fusarium cuneirostrum
  misc_feature: 40
accactcctgttccattcacattctacgtcacaattccatctaacactacaattacaattacaattacaatcagtcacgatggctcgccattaggg

SEQ ID NO: 39633 - DNA, 96 bp, Fusarium cuneirostrum
  misc_feature: 40
cagtcccttcgttcccgtgcttagccactctccttcgttcgtccctcactctcgtcgtctatgacccacatctgattccactccgttccatcgatg

SEQ ID NO: 39634 - DNA, 96 bp, Fusarium cuneirostrum
  misc_feature: 40
cagtctctgcttggagatgaactcttcacatgcagatgagactctactagtcaatccttcaggctgcgtcgttcctcctcgccctcaggactcatt

SEQ ID NO: 39635 - DNA, 96 bp, Fusarium cuneirostrum
  misc_feature: 40
agtcccccccaaacggcgaagccgtttcttaaccttggtatagggggggactacgggacacgggacagtgagggacgaacgtgtggactgagtctg

SEQ ID NO: 39636 - DNA, 96 bp, Fusarium cuneirostrum
  misc_feature: 40
cactccgggtcatcttacacacagtgacatttcatgtttacgtgaggggattcacagagcgcatctctgttgaattaaagtaacatcacatcgtct

SEQ ID NO: 39637 - DNA, 96 bp, Fusarium cuneirostrum
  misc_feature: 40
atccaagatctgtccctcttgatcaaccttcgcatggctcaggtttctattacttcttcgatctcgtttcactccatctcttttcatgatctagtg

SEQ ID NO: 39638 - DNA, 96 bp, Fusarium cuneirostrum
  misc_feature: 40
cactaaatatacttttgacgagcaccacttcatactttatttaatcgagcgagctgtgcatatgtgacattattattattttgaatcgtagtcgtg

SEQ ID NO: 39639 - DNA, 96 bp, Fusarium cuneirostrum
  misc_feature: 40
caaccttcgcatggctcaggtttctattacttcttcgatctcgtttcactccatctcttttcatgatctagtgaagttattcgcacttcacctctt

SEQ ID NO: 39640 - DNA, 96 bp, Fusarium cuneirostrum
  misc_feature: 40
caacaaacactccaagatcagctatcatcgccatctcatccatcttagaggcgttcacttacaaactacatcagtaaacacactaaggtcagcaat

SEQ ID NO: 39641 - DNA, 96 bp, Fusarium cuneirostrum
  misc_feature: 40
caaataaaaaagtaaaggtcgttggatccccaactccagaaagcgtcctacgacagctcaatatataaccctacgggtaatcgagtcgctcacaat

SEQ ID NO: 39642 - DNA, 96 bp, Fusarium cuneirostrum
  misc_feature: 40
acccaagtctataaaaatttcagacttgatctactcttttgtgctgctttgccggtcacagtttttgtctgaattctactgatttcagaaagaaat

SEQ ID NO: 39643 - DNA, 96 bp, Fusarium cuneirostrum
  misc_feature: 40
agggacgaacccgtcgcgaggttataataatgagcaaggtcgcaaggtcactgctcacgataacatcatcaattgaccaacagtcaatgcgcacat

SEQ ID NO: 39644 - DNA, 96 bp, Fusarium cuneirostrum
  misc_feature: 40
aataattaaaaagtaaagagagcttaaagtattattaaaataaaagaaaataaaaaataggtaataaaaagaaaaaaagcgctattattaaaatat

SEQ ID NO: 39645 - DNA, 96 bp, Fusarium cuneirostrum
  misc_feature: 40
ataattaaaaagtaaagagagcttaaagtattattaaaataaaagaaaataaaaaataggtaataaaaagaaaaaaagcgctattattaaaatatt

SEQ ID NO: 39646 - DNA, 96 bp, Fusarium cuneirostrum
  misc_feature: 40
ataaataattaatagaatagagcctacttatacctattataattacttaagttaacttaattaatataaaagaccttataatatataagggacttt

SEQ ID NO: 39647 - DNA, 96 bp, Fusarium cuneirostrum
  misc_feature: 40
acaattacgtgtcgctcacttctgttggagccttttatttagtgttcgctccactactctctcggttgtgctcacatatcactgtctatactaact

SEQ ID NO: 39648 - DNA, 96 bp, Fusarium cuneirostrum
  misc_feature: 40
agtgtatccatgcagatattgctggacctttcccggaagtgggagtagacgggggccagtactgggcctgcttcattgaagacttcactcaaatgt

SEQ ID NO: 39649 - DNA, 96 bp, Fusarium cuneirostrum
  misc_feature: 40
agtcccttcgttcccgtgcttagccactctccttcgttcgtccctcactctcgtcgtctatgacccacatctgattccactccgttccatcgatgt

SEQ ID NO: 39650 - DNA, 96 bp, Fusarium cuneirostrum
  misc_feature: 40
aggcacatttaaatctgctaccaaggcacatttatgagaaaactacattccctaccaattattgtaaacgtgccttgaccaaggcacatttaattt

SEQ ID NO: 39651 - DNA, 96 bp, Fusarium cuneirostrum
  misc_feature: 40
aaacacattcacgataccatttatacgcacaacatcacaattacgtgtcgctcacttctgttggagccttttatttagtgttcgctccactactct

SEQ ID NO: 39652 - DNA, 96 bp, Fusarium cuneirostrum
  misc_feature: 40
acttctgttggagccttttatttagtgttcgctccactactctctcggttgtgctcacatatcactgtctatactaactacaataccacttgaggt

SEQ ID NO: 39653 - DNA, 96 bp, Fusarium cuneirostrum
  misc_feature: 40
actatatccttagtacggacgaccggagggaggacgtgcggagtgagtgtgacgaaggaacacgtagcgacgttacagacatcacacagagatggt

SEQ ID NO: 39654 - DNA, 96 bp, Fusarium cuneirostrum
  misc_feature: 39
ttttttcttctttcatgacccgtttggcgttagaagcactcttgattgaggtgtactttagtagcaataatagttacaagatgtttactctgattt

SEQ ID NO: 39655 - DNA, 96 bp, Fusarium cuneirostrum
  misc_feature: 39
tcgtcctcgggattcgggactattccagtgtggatgaaaatgaggccattcacaactccatctacagtaacatcatgctcactaatctaataaaaa

SEQ ID NO: 39656 - DNA, 96 bp, Fusarium cuneirostrum
  misc_feature: 39
tgtaatgcagacatcgatatctagcgaggtgcgccatgtttcccggagcaagcgacatcgtcataatctgaacaaagcctgcagctaaaaagcaaa

SEQ ID NO: 39657 - DNA, 96 bp, Fusarium cuneirostrum
  misc_feature: 39
tgaggtcatcaccattacctattccggtaagtctcacaaagcatcgttggagttactcctccacacttgacccaactcaaacacagcatcatcaaa

SEQ ID NO: 39658 - DNA, 96 bp, Fusarium cuneirostrum
  misc_feature: 39
tttctgagattgtatgggcaacgacctggaatcagagtgagaatctggtacagattgttagcgaccgaagggagctttccagcttatagactaacg

SEQ ID NO: 39659 - DNA, 96 bp, Fusarium cuneirostrum
  misc_feature: 39
tttccccggtcggccttcggcctccccactcggactctccgtcctcgtcgcccacattccatgtgatcctgccttcgcagtccatgcacctccact

SEQ ID NO: 39660 - DNA, 96 bp, Fusarium cuneirostrum
  misc_feature: 39
ttggtgatgaatgggtcgatgacgatcttggagatttttagtgtagatagatgcaatgtgaacttggtgagatttgtagagttgcctgatgtggaa

SEQ ID NO: 39661 - DNA, 96 bp, Fusarium cuneirostrum
  misc_feature: 39
tgcggagcagagggtgagggacgaacccgtcgcgaggttataataatgagcaaggtcgcaaggtcactgctcacgataacatcatcaattgaccaa

SEQ ID NO: 39662 - DNA, 96 bp, Fusarium cuneirostrum
  misc_feature: 39
gaagtgaggggacaggaggcccagagggccgacaagaatccatttcaaaatttgtacaaattttgtatgggaagatttctgagattgtatgggcaa

SEQ ID NO: 39663 - DNA, 96 bp, Fusarium cuneirostrum
  misc_feature: 39
gcacttgtgttacgcgagcatatataaagtagatggtgataacctcaaaagagtccacgagccgagcgcgtagcgtgcaggcgaggggattgtcaa

SEQ ID NO: 39664 - DNA, 96 bp, Fusarium cuneirostrum
  misc_feature: 39
acagagtgagtttgtattctatccggaggaggagtgaacgagtgagcgatcatctacttacattaattgctggacagcatcttctcgggaagagaa

SEQ ID NO: 39665 - DNA, 96 bp, Fusarium cuneirostrum
  misc_feature: 39
cctcgggatttatcttgtagcaccgaaggaggttacgacggaggatcttgtgagggaactgcacctctgtatacagagtcatctgaaacagacgaa

SEQ ID NO: 39666 - DNA, 96 bp, Fusarium cuneirostrum
  misc_feature: 39
gaggctgtgaaagcaagcgaggaaaagaaggaaaagaagcggtcgaagaagaagaagcacaaggagcctgagccaaccgaaggagaagcggtcgaa

SEQ ID NO: 39667 - DNA, 96 bp, Fusarium cuneirostrum
  misc_feature: 39
ttcccgagaagatgctgtccagcaattaatgtaagtagatgatcgctcactcgttcactcctcctccggatagaatacaaactcactctgttcgtc

SEQ ID NO: 39668 - DNA, 96 bp, Fusarium cuneirostrum
  misc_feature: 39
cctagtcgagagaaataagctatatagtttaataatagaatttctaactcgtaaaccaaataatctagatttaattcctagtaacgtacatgataa

SEQ ID NO: 39669 - DNA, 96 bp, Fusarium cuneirostrum
  misc_feature: 39
agtaggtagggagcgaggctgaaaaacctagagcttacagtagggtgagctcccgcacttgtgttacgcgagcatatataaagtagatggtgataa

SEQ ID NO: 39670 - DNA, 96 bp, Fusarium cuneirostrum
  misc_feature: 39
aatatagaaggggagggttaaaagggttaagagaggagagaaataaagaaaattaaagaagaaagaataattatagaagaaatagaagaaatataa

SEQ ID NO: 39671 - DNA, 96 bp, Fusarium cuneirostrum
  misc_feature: 39
ttatattagattctaagtcataaattatattacgcttaaaactatctattatatattttactttactttaatagcttagcttattattttttattt

SEQ ID NO: 39672 - DNA, 96 bp, Fusarium cuneirostrum
  misc_feature: 39
ttagttagatagagcttaaatataacgcggaattactaaactttagctatatataataactctgaacataatgcacactccctcaagttcaaggca

SEQ ID NO: 39673 - DNA, 96 bp, Fusarium cuneirostrum
  misc_feature: 39
agcctgcgtcctacgtcctcggcctcgggaaaatacttttgaagttattcacattcacatctacgattacaatttaatcaatcactcgcacactaa

SEQ ID NO: 39674 - DNA, 96 bp, Fusarium cuneirostrum
  misc_feature: 39
ctttacctcctagctatattaaagattaataagatttataatatagtagtatatttagctttatatataagggtattttcttactaaagatactaa

SEQ ID NO: 39675 - DNA, 96 bp, Fusarium cuneirostrum
  misc_feature: 39
ctatttaaaatatcttatagagttcttatttaaaaaagatttttagtattattttagtgatatttatagtattttcgaaaagcctataatagctaa

SEQ ID NO: 39676 - DNA, 96 bp, Fusarium cuneirostrum
  misc_feature: 39
ttacgatttaaataattaaacttattataatatcgcgaagcggatataatatattagtaaaaagagattaagataaatataaataaaaaccagata

SEQ ID NO: 39677 - DNA, 96 bp, Fusarium cuneirostrum
  misc_feature: 39
ttaatcccaaaaatccgcttatagaccaaagttatggacgctcgtttgccccgttccgggtcactcgcgttagtctataagctggaaagctccctt

SEQ ID NO: 39678 - DNA, 96 bp, Fusarium cuneirostrum
  misc_feature: 39
ctatgcctgatgactcactcgttcctcgttctccgtcatctttaccaactgggatgccaatgtcagcaagctgactaaaggcagactcagtccaca

SEQ ID NO: 39679 - DNA, 96 bp, Fusarium cuneirostrum
  misc_feature: 39
taagtggacgcctccaaaatggatgagattgggatgattgctgaccttggtgtgtttgctggtgtagctggtaagtaaacgcctctaaaatggaca

SEQ ID NO: 39680 - DNA, 96 bp, Fusarium cuneirostrum
  misc_feature: 39
atttatatatagcgagcatgttttaatctgatgtgaataacttcaaaagtattttcccgaggccgaggacgtaggacgcaggctgagggattgaca

SEQ ID NO: 39681 - DNA, 96 bp, Fusarium cuneirostrum
  misc_feature: 39
tgtaaatcggagatttcattctgtttgtttcctaacaacaacgcgacgcgtcacatccacgagacgtggggtgcatttttaaggcaacagaggtgc

SEQ ID NO: 39682 - DNA, 96 bp, Fusarium cuneirostrum
  misc_feature: 39
atacttgtctcgcaccctcgcaagtaagattatgtccgtacataacgtactaccatgagtgggccccatcatcccacacgtccactccttgcacca

SEQ ID NO: 39683 - DNA, 96 bp, Fusarium cuneirostrum
  misc_feature: 39
caaacgagtctatttaaaacgtatttatttgcctcgccccatattaaacagtggcgagcaaagtatgtggagtcggcagaagtgaagtcatcacca

SEQ ID NO: 39684 - DNA, 96 bp, Fusarium cuneirostrum
  misc_feature: 39
tgggacagcttatctatgctaacctaattaggaaatcgtcacgctcttcaaaaactgtactaatccaaaggaggaaatcgtcacggtcaagcgatg

SEQ ID NO: 39685 - DNA, 96 bp, Fusarium cuneirostrum
  misc_feature: 39
tggaatgtgggcgacgaggacggagagtccgagtggggaggccgaaggccgaccggggaaagtgtgtcgagagcgagggggagcccgagcgaaatc

SEQ ID NO: 39686 - DNA, 96 bp, Fusarium cuneirostrum
  misc_feature: 39
atactttgctcgccactgtttaatatggggcgaggcaaataaatacgttttaaatagactcgtttgacgagccccaattactattttatgcgagca

SEQ ID NO: 39687 - DNA, 96 bp, Fusarium cuneirostrum
  misc_feature: 39
tgcgcattgactgttggtcaattgatgatgttatcgtgagcagtgaccttgcgaccttgctcattattataacctcgcgacgggttcgtccctcac

SEQ ID NO: 39688 - DNA, 96 bp, Fusarium cuneirostrum
  misc_feature: 39
ggtcgacgtccgtctccccctcttttatttctcctcgtgcactcacttcagtcgcatcctgcattcatgtttgactgctgtcaattgaagtcatca

SEQ ID NO: 39689 - DNA, 96 bp, Fusarium cuneirostrum
  misc_feature: 39
gtgcgcattgactgttggtcaattgatgatgttatcgtgagcagtgaccttgcgaccttgctcattattataacctcgcgacgggttcgtccctca

SEQ ID NO: 39690 - DNA, 96 bp, Fusarium cuneirostrum
  misc_feature: 39
tgacatccccacgcgtccagtcatcaacgctgacgctattcctttccctattgcgcctcactctctgtcgatacctccttcccgttcgttatttat

SEQ ID NO: 39691 - DNA, 96 bp, Fusarium cuneirostrum
  misc_feature: 39
tccatggtgttctcgtaacctcgcatcgggctccttcgtcaccctacgctccgcacgtcgccctacgggctccgtatttaaaaaaggaatggaaga

SEQ ID NO: 39692 - DNA, 96 bp, Fusarium cuneirostrum
  misc_feature: 39
caagcagagactgtggtctcaataccgagcgaagcgaaggtgcggaacggagtgagagcgtagcgagcacgaagtgaggttacttaaaacaccaga

SEQ ID NO: 39693 - DNA, 96 bp, Fusarium cuneirostrum
  misc_feature: 39
tctggacttgcatattgaacttgactacctactcgcgcttatcctgagagagatggagcggagagagatggtaacgcgctgtttgatgaggctctg

SEQ ID NO: 39694 - DNA, 96 bp, Fusarium cuneirostrum
  misc_feature: 39
gtgagtgtctatacatatctggaagatgaagtgaaggatgaacgcaatgctaatagcaaacaggagcggagcgactggaatgatcgaacggagaga

SEQ ID NO: 39695 - DNA, 96 bp, Fusarium cuneirostrum
  misc_feature: 39
gtgacgaaggagcccgatgcgaggttacgagaacaccatggatatgtgtgttaccatttcatgtaggagtgcacgacggcttcacgactcagtaga

SEQ ID NO: 39696 - DNA, 96 bp, Fusarium cuneirostrum
  misc_feature: 39
tctacgattgacaatccctctcgcacaccgtcgcatgcgctcctcctgctacgggactattatggtgtgggttgaagctattcgcaagtcacctgc

SEQ ID NO: 39697 - DNA, 96 bp, Fusarium cuneirostrum
  misc_feature: 39
ggttgatctccaacagctctccagctgagtaagaaagggtctcgaatccctctcaaccgtgcttccgcaaacagagaaaatagaaaaagacagcga

SEQ ID NO: 39698 - DNA, 96 bp, Fusarium cuneirostrum
  misc_feature: 39
aggcttgcattcaagtcggagcgaatgccaatcttggcttcatgggcacacgcgagtcatcccgaatcatgcgctgctgtcgatgacatcagtcga

SEQ ID NO: 39699 - DNA, 96 bp, Fusarium cuneirostrum
  misc_feature: 39
tcgaatccctctcaaccgtgcttccgcaaacagagaaaatagaaaaagacagcgacgtccgtcgtatacaatgacctccggtcaaataaaaaagta

SEQ ID NO: 39700 - DNA, 96 bp, Fusarium cuneirostrum
  misc_feature: 39
tccgcacgtcgccctacgggctccgtatttaaaaaaggaatggaagacctctctccgcgaggctcgtaactctttactcgagtttattagatagtc

SEQ ID NO: 39701 - DNA, 96 bp, Fusarium cuneirostrum
  misc_feature: 39
agcggaagcgtagatgggaaccgggtgtgaagccagtgttccagcgtcagcgcagtaaaagtgtgcgtgtcagtaggatacggagcccggctcgga

SEQ ID NO: 39702 - DNA, 96 bp, Fusarium cuneirostrum
  misc_feature: 39
tccaagaataatactcgtcccagcctcgtccttactcgaaataaataatcgatcgtcgctccactcctattgctcgtcacttctcgttccgatatg

SEQ ID NO: 39703 - DNA, 96 bp, Fusarium cuneirostrum
  misc_feature: 39
tcatgtttgactgctgtcaattgaagtcatcaccatctctgtgtgatgtctgtaacgtcgctacgtgttccttcgtcacactcactccgcacgtcc

SEQ ID NO: 39704 - DNA, 96 bp, Fusarium cuneirostrum
  misc_feature: 39
tcatggtagtacgttatgtacggacataatcttacttgcgagggtgcgagacaagtataagggcaggggattgcccgttgcacttggagtgctttt

SEQ ID NO: 39705 - DNA, 96 bp, Fusarium cuneirostrum
  misc_feature: 39
acggagtcgagtctgatttcgactggaatcagttctgtttattccacggccgtggaaacacgaacaggtgagtgtctatacatatctggaagatga

SEQ ID NO: 39706 - DNA, 96 bp, Fusarium cuneirostrum
  misc_feature: 39
tcagacgagctttggtgaaagatcgaaaagaatggcaagggaaccaatacagcccaatatgcaatccaaatatcgacttccactatttcccttctc

SEQ ID NO: 39707 - DNA, 96 bp, Fusarium cuneirostrum
  misc_feature: 39
aagtgaaagtgaaagtgaaagtgaaagtgaaagtgaaagtgaaagtgaaagtgaaagtgaaagtgaaagtgaaagtgaaagtgaaagggaaagtga

SEQ ID NO: 39708 - DNA, 96 bp, Fusarium cuneirostrum
  misc_feature: 39
ggaagactgagggattggcaatagtcattacaccgccggaggcccgagtcggaactgtataatcctacggagcccggagggcgacgtgcggagtga

SEQ ID NO: 39709 - DNA, 96 bp, Fusarium cuneirostrum
  misc_feature: 39
caaataattattaaaaccacttttaatgtgtcgagaaccactactttttttcacttggcgagcatgatttcagattgtgaatgtttatgttggtga

SEQ ID NO: 39710 - DNA, 96 bp, Fusarium cuneirostrum
  misc_feature: 39
gtgactgattgtaattgtaattgtaattgtagtgttagatggaattgtgacgtagaatgtgaatggaacaggagtggtgagagttacaccacttga

SEQ ID NO: 39711 - DNA, 96 bp, Fusarium cuneirostrum
  misc_feature: 39
ccaacgacctttacttttttatttgaccggaggtcattgtatacgacggacgtcgctgtctttttctattttctctgtttgcggaagcacggttga

SEQ ID NO: 39712 - DNA, 96 bp, Fusarium cuneirostrum
  misc_feature: 39
tatttagcgccgcggttagtctcggtaccttccgtctcggcgcgccctattagcccggtcaattaagttaattaacctaacctattaggcccgctg

SEQ ID NO: 39713 - DNA, 96 bp, Fusarium cuneirostrum
  misc_feature: 39
tattaatctcttatagactaacgcgagtgacccggaacggggcaaacgagcgtccataactttggtctataagaggtttttttgacaaacgctgcg

SEQ ID NO: 39714 - DNA, 96 bp, Fusarium cuneirostrum
  misc_feature: 39
tattaagtatagctagttctcgcttactaataattactaccttatttaatctctgtcgttatattgatcgcatatatattacttgctcgtcctaat

SEQ ID NO: 39715 - DNA, 96 bp, Fusarium cuneirostrum
  misc_feature: 39
ggtcgcgggaagtctctatacttccttaacatttgtgaccaaattcccactccgttctcacgtttgctcacaccaaacgccagatcgcaacccata

SEQ ID NO: 39716 - DNA, 96 bp, Fusarium cuneirostrum
  misc_feature: 39
aaataaatataaaaataaataaaaagaaaaaaaataagagataagaaaaaaaaggaaaaaaataaaaataaaaaagaagataataaagtatagata

SEQ ID NO: 39717 - DNA, 96 bp, Fusarium cuneirostrum
  misc_feature: 39
gtattggcacccaataacatttttcctagtccgtgcacgcttctcggatctcgtaacaagactgtcgcataacattcgtgtgaccggatgtaacta

SEQ ID NO: 39718 - DNA, 96 bp, Fusarium cuneirostrum
  misc_feature: 39
acacaaaatgaggttatcacgatatctacattgggaaaagtctactactacgccgactcaatctcttccaataccttccggaaacgaactctccta

SEQ ID NO: 39719 - DNA, 96 bp, Fusarium cuneirostrum
  misc_feature: 39
aggaatctatatctattaactaaattattatgggcttaatattatctaatatatttaattaatatctatttagccggaatattaaagtaaaatcta

SEQ ID NO: 39720 - DNA, 96 bp, Fusarium cuneirostrum
  misc_feature: 39
aagttattcccacttcacgtctacgatggcatctacagtctacgacaagacatacatatcacaattataactacattcatcaaatgctcgccagta

SEQ ID NO: 39721 - DNA, 96 bp, Fusarium cuneirostrum
  misc_feature: 39
tacaaaaagtgttcaaattttgggatcagaactgagctcaaaatttgaacactttttgtatgggttcgattctggcattgtatgggtaaaatgctg

SEQ ID NO: 39722 - DNA, 96 bp, Fusarium cuneirostrum
  misc_feature: 39
ctagaaacttaattaatatcattagaaaataggtcaatatatttataagctatattaattaatattaaaatacgcgattagcctatacctaactta

SEQ ID NO: 39723 - DNA, 96 bp, Fusarium cuneirostrum
  misc_feature: 39
aacgagtctatttaaaacgtatttatttgcctcgccccatattaaacagtggcgagcaaagtatgtggagtcggcagaagtgaagtcatcaccaac

SEQ ID NO: 39724 - DNA, 96 bp, Fusarium cuneirostrum
  misc_feature: 39
gttgcctgatgcagcagcctgatcgaactcgtcgtaaagacttcatttcttgggttgaataaagacagcttggggagaattctgtgtctagagaag

SEQ ID NO: 39725 - DNA, 96 bp, Fusarium cuneirostrum
  misc_feature: 39
gttagttagatagagcttaaatataacgcggaattactaaactttagctatatataataactctgaacataatgcacactccctcaagttcaaggc

SEQ ID NO: 39726 - DNA, 96 bp, Fusarium cuneirostrum
  misc_feature: 39
atcactgtctatactaactacaataccacttgaggtcatcaccattacctattccggtaagtctcacaaagcatcgttggagttactcctccacac

SEQ ID NO: 39727 - DNA, 96 bp, Fusarium cuneirostrum
  misc_feature: 39
gtggttctcttttaccactacaataacagttcactcttctcgttcacaaatgcacaatcaattcaaatcacaagtcatacatcaaagtcatgtctg

SEQ ID NO: 39728 - DNA, 96 bp, Fusarium cuneirostrum
  misc_feature: 39
gtggctttgtcttccgagcgcaatgtggttgggaagaccaggctcgggagatgggccggtctccaggcccttaagtacttgagggggcctatagtc

SEQ ID NO: 39729 - DNA, 96 bp, Fusarium cuneirostrum
  misc_feature: 39
aatcacaaacacattcacgataccatttatacgcacaacatcacaattacgtgtcgctcacttctgttggagccttttatttagtgttcgctccac

SEQ ID NO: 39730 - DNA, 96 bp, Fusarium cuneirostrum
  misc_feature: 39
gtgcggatgcgcgaccgacagaagtgtgtcgagggtcgagcagacccgagccagaaacgagctcaaaactggaacagttttttggtgagttcaatc

SEQ ID NO: 39731 - DNA, 96 bp, Fusarium cuneirostrum
  misc_feature: 39
gtgcgagtgattgattaaattgtaatcgtagatgtgaatgtgaataacttcaaaagtattttcccgaggccgaggacgtaggacgcaggctgaggg

SEQ ID NO: 39732 - DNA, 96 bp, Fusarium cuneirostrum
  misc_feature: 39
gtgactcgcttgttcaagctcgagcaggcacaaaagtaaaaaaacagaagcaagttcatgttttgcgcgacagcgctgaagaagtgggcgtccgcc

SEQ ID NO: 39733 - DNA, 96 bp, Fusarium cuneirostrum
  misc_feature: 39
gtgaagtcatcaccatgtcttcttactactacgtttacaatttatatttacagtcacaactgttattaaatcatcgctcgccattaagtacaatct

SEQ ID NO: 39734 - DNA, 96 bp, Fusarium cuneirostrum
  misc_feature: 39
gtatccacttatgcccggatcgctacgctgcaccttattcgtcgttcctcctcataacgttccgtccacccgcacttcagtcggtcccctccttct

SEQ ID NO: 39735 - DNA, 96 bp, Fusarium cuneirostrum
  misc_feature: 39
gtagatgatcgctcactcgttcactcctcctccggatagaatacaaactcactctgttcgtctcctcacgttgttgcggtaaactcgtcctccgtc

SEQ ID NO: 39736 - DNA, 96 bp, Fusarium cuneirostrum
  misc_feature: 39
agccgagacagattcctcaccctctctcatcctctctcatcctctctcatcctctctcatcctctctcatcctctctcatcctctctcatccttac

SEQ ID NO: 39737 - DNA, 96 bp, Fusarium cuneirostrum
  misc_feature: 39
acacactttccccggtcggccttcggcctccccactcggactctccgtcctcgtcgcccacattccatgtgatcctgccttcgcagtccatgcacc

SEQ ID NO: 39738 - DNA, 96 bp, Fusarium cuneirostrum
  misc_feature: 39
ggggcgagattgtgtcgagcccgaatgtgaaatttttcgagattttggtgaggaacaagcaaaatcggattcaaattggactcaaatcgacatact

SEQ ID NO: 39739 - DNA, 96 bp, Fusarium cuneirostrum
  misc_feature: 39
gggctccgtaggattatacagttccgactcgggcctccggcggtgtaatgactattgccaatccctcagtcttccctgcgcccctacggggcttgc

SEQ ID NO: 39740 - DNA, 96 bp, Fusarium cuneirostrum
  misc_feature: 39
gggcgaggaagtataagacggaacgtctgcccctgcgaggacgcagtcgaagacttgagactgtatttatttttttgtgtgagacggagtcgagtc

SEQ ID NO: 39741 - DNA, 96 bp, Fusarium cuneirostrum
  misc_feature: 39
gggacgaacccgtcgcgaggttataataatgagcaaggtcgcaaggtcactgctcacgataacatcatcaattgaccaacagtcaatgcgcacatc

SEQ ID NO: 39742 - DNA, 96 bp, Fusarium cuneirostrum
  misc_feature: 39
ggattgactagtagagtctcatctgcatgtgaagagttcatctccaagcagagactgtggtctcaataccgagcgaagcgaaggtgcggaacggag

SEQ ID NO: 39743 - DNA, 96 bp, Fusarium cuneirostrum
  misc_feature: 39
agggctttctcaattgtcaggatgtagccttaaatgtctctgctctacgacgaacttgtctcaccgcataaagctgtctggaacaagaatgcctcc

SEQ ID NO: 39744 - DNA, 96 bp, Fusarium cuneirostrum
  misc_feature: 39
ggagatcatcgcatttgtgcgtgacgcattctgagaagatgcgaagttgcgagggaggaaagcggagaatgctggctgaatgtccgcgggctgcgg

SEQ ID NO: 39745 - DNA, 96 bp, Fusarium cuneirostrum
  misc_feature: 39
atgtaaatgtaaatgtaaatgtcttcttttattgttttcactgagtccggcggaggaggagggacgacggagccggattggcaagagtagtgcagc

SEQ ID NO: 39746 - DNA, 96 bp, Fusarium cuneirostrum
  misc_feature: 39
gctgcaccttattcgtcgttcctcctcataacgttccgtccacccgcacttcagtcggtcccctccttctcgtgcttacttactccactcttcttc

SEQ ID NO: 39747 - DNA, 96 bp, Fusarium cuneirostrum
  misc_feature: 39
aatctcaggattgaactcaccaaaaaactgttccagttttgagctcgtttctggctcgggtctgctcgaccctcgacacacttctgtcggtcgcgc

SEQ ID NO: 39748 - DNA, 96 bp, Fusarium cuneirostrum
  misc_feature: 39
gcgaacgacagtgagcattaatctcttacactaccgcgaggaaccagggtacctggtttttcgagcgggttataactttggtgatataagaggatt

SEQ ID NO: 39749 - DNA, 96 bp, Fusarium cuneirostrum
  misc_feature: 39
ctgtagaagaggtgaagacactcgtcgagggtgtggacgagtttggtgatgaatgggtcgatgacgatcttggagatttttagtgtagatagatgc

SEQ ID NO: 39750 - DNA, 96 bp, Fusarium cuneirostrum
  misc_feature: 39
aggtcatcaccattacctattccggtaagtctcacaaagcatcgttggagttactcctccacacttgacccaactcaaacacagcatcatcaaatc

SEQ ID NO: 39751 - DNA, 96 bp, Fusarium cuneirostrum
  misc_feature: 39
gattgtcaaagtcttctcatctgccagggaagagttacttccccaagcaggaactgtgaaatagagaccgagccataaggcgaggtgttgtcagag

SEQ ID NO: 39752 - DNA, 96 bp, Fusarium cuneirostrum
  misc_feature: 39
ctgagctcagagagcgagtcgatcttggattcctatgcaagtcgtctttcaattgcgctggcgcgcgactaggaacagagtgacggtatttcaatc

SEQ ID NO: 39753 - DNA, 96 bp, Fusarium cuneirostrum
  misc_feature: 39
gatgcgcgaccgacagaagtgtgtcgagggtcgagcagacccgagccagaaacgagctcaaaactggaacagttttttggtgagttcaatcctgag

SEQ ID NO: 39754 - DNA, 96 bp, Fusarium cuneirostrum
  misc_feature: 39
attggcacccaataacatttttcctagtccgtgcacgcttctcggatctcgtaacaagactgtcgcataacattcgtgtgaccggatgtaactatc

SEQ ID NO: 39755 - DNA, 96 bp, Fusarium cuneirostrum
  misc_feature: 39
aaatgccagaatcgagtccatacaaaaactgttccagttttgagactccgtcaaatccacctcgagcgctgctctcgccatgtaccctttcccctc

SEQ ID NO: 39756 - DNA, 96 bp, Fusarium cuneirostrum
  misc_feature: 39
gagggaagagtttccctcctacatcatctgtctgagctcagagagcgagtcgatcttggattcctatgcaagtcgtctttcaattgcgctggcgcg

SEQ ID NO: 39757 - DNA, 96 bp, Fusarium cuneirostrum
  misc_feature: 39
gaacgttccgtccacaatctcataccccgcagacagagtcgaggagtataagacagcgtcttttcccccgagagggcagagggaagagtttccctc

SEQ ID NO: 39758 - DNA, 96 bp, Fusarium cuneirostrum
  misc_feature: 39
cctcttcggtcgattagtatatatgtgtgcccgtctcgtgcacatgtgtccagacacaaatcattatcactcacccgttcgtgatcgctttcgctc

SEQ ID NO: 39759 - DNA, 96 bp, Fusarium cuneirostrum
  misc_feature: 39
gagatggttcgagtgcgaggaaggacgacggaggaggacaggagagcatcggagatgcacatgggcgcagagcgccagagacaatctttgttgtcg

SEQ ID NO: 39760 - DNA, 96 bp, Fusarium cuneirostrum
  misc_feature: 39
gactacgggacacgggacagtgagggacgaacgtagtgtcactaaggcgaccgagctcaagcgaggtaaagccggtcaaggcttcctgacgaagtc

SEQ ID NO: 39761 - DNA, 96 bp, Fusarium cuneirostrum
  misc_feature: 39
ccctcctccatgatcctacactcttcgccttcgtgcctcaggctccctatttactgggaaggcaatggtgctgcgcacctaaagcctgactcagtc

SEQ ID NO: 39762 - DNA, 96 bp, Fusarium cuneirostrum
  misc_feature: 39
gacgttccgtcttatacttcctcgccccctcgtcagtatccacttatgcccggatcgctacgctgcaccttattcgtcgttcctcctcataacgtt

SEQ ID NO: 39763 - DNA, 96 bp, Fusarium cuneirostrum
  misc_feature: 39
gacgcaatgatcggttgactaaggacgggaacgaatggaatgagtggaggccggtggggacccatgtaagacgagcggagcgagcgaatggggaag

SEQ ID NO: 39764 - DNA, 96 bp, Fusarium cuneirostrum
  misc_feature: 39
gacgacgcaatgatcggttgactaaggacgggaacgaatggaatgagtggaggccggtggggacccatgtaagacgagcggagcgagcgaatgggg

SEQ ID NO: 39765 - DNA, 96 bp, Fusarium cuneirostrum
  misc_feature: 39
gacacgggacagtgaagaatgaacgtgtgtacccaggagtaatcgtcttgagtcagcttgctgaccttgacgaccccagtcaatagacatccgagg

SEQ ID NO: 39766 - DNA, 96 bp, Fusarium cuneirostrum
  misc_feature: 39
gacacaagtgtccctccccagctttgtaatcagctaaagcttgaaaacaaaacctcttatagaccaaagttatggacgctcgtttgccccgttccg

SEQ ID NO: 39767 - DNA, 96 bp, Fusarium cuneirostrum
  misc_feature: 39
gacaaataattattaaaaccacttttaatgtgtcgagaaccactactttttttcacttggcgagcatgatttcagattgtgaatgtttatgttggt

SEQ ID NO: 39768 - DNA, 96 bp, Fusarium cuneirostrum
  misc_feature: 39
atgaactcttcacttgagttcagtctattgtcaatccctcagcctgcgtcctacgtcctcggcctcgggaaaatacttttgaagttattcacattc

SEQ ID NO: 39769 - DNA, 96 bp, Fusarium cuneirostrum
  misc_feature: 39
gaatcaacccatcactcatgggttatagtaacctcgcatcgtctcgccctgctcgactacgctccgcacctccctccggtcggtagaggactacag

SEQ ID NO: 39770 - DNA, 96 bp, Fusarium cuneirostrum
  misc_feature: 39
gaataatactcgtcccagcctcgtccttactcgaaataaataatcgatcgtcgctccactcctattgctcgtcacttctcgttccgatatggatat

SEQ ID NO: 39771 - DNA, 96 bp, Fusarium cuneirostrum
  misc_feature: 39
gaagctcactgcgttcgctaacaatcagtacctgattcccgactccgtctcaggatttgactcaccaaatctcagaaacgaacacatacaaatttt

SEQ ID NO: 39772 - DNA, 96 bp, Fusarium cuneirostrum
  misc_feature: 39
cgggctcgacacaatctcgcccctctgtcttacggtcgccccacaggctccctcctactttactcacgtcatgacccacactccgggtcattcttc

SEQ ID NO: 39773 - DNA, 96 bp, Fusarium cuneirostrum
  misc_feature: 39
aacatctctttctgaaaagaagaaagaagaaagaagaaagaagaaagaagaaagaagaaagaagaaagaagaaagaagaaagaagaaagaagaaag

SEQ ID NO: 39774 - DNA, 96 bp, Fusarium cuneirostrum
  misc_feature: 39
ctatagtaaagatctctttagctataaaattaataaattaagattatttaatagaagtttaattaactttagataactttaatcttagttagaaag

SEQ ID NO: 39775 - DNA, 96 bp, Fusarium cuneirostrum
  misc_feature: 39
attaaataataccttctataattaggtaataatatagaattaaataataaggaaagtattaagggattaatattatcgattattaatatactaaag

SEQ ID NO: 39776 - DNA, 96 bp, Fusarium cuneirostrum
  misc_feature: 39
ctttaggatataattaaatagtatatcgataataaaattaaagttaaggataatatagcgatttatatatagagagagataatattagattttaat

SEQ ID NO: 39777 - DNA, 96 bp, Fusarium cuneirostrum
  misc_feature: 39
aatccctctcaaccgtgcttccgcaaacagagaaaatagaaaaagacagcgacgtccgtcgtatacaatgacctccggtcaaataaaaaagtaaag

SEQ ID NO: 39778 - DNA, 96 bp, Fusarium cuneirostrum
  misc_feature: 39
ctttaaggatcatccacattattgccgtgctttccagattgctctggatggtaatcacggaggcgggaaggcgattaatgggggtaccatctctat

SEQ ID NO: 39779 - DNA, 96 bp, Fusarium cuneirostrum
  misc_feature: 39
cttggtgtcgcctccgctccccctccactttcactccgttcaagcaccacattccatgtgatctttgcgtccgcaatcaacgtgcctcaacttgag

SEQ ID NO: 39780 - DNA, 96 bp, Fusarium cuneirostrum
  misc_feature: 39
aagaacaacagcgtcattccaaacgaggggaaccgagtttgggaagagaaagtggacggaacgttagttctgtccctgtttttttaaattgtcaag

SEQ ID NO: 39781 - DNA, 96 bp, Fusarium cuneirostrum
  misc_feature: 39
ctcgggatttatcttgtagcaccgaaggaggttacgacggaggatcttgtgagggaactgcacctctgtatacagagtcatctgaaacagacgaag

SEQ ID NO: 39782 - DNA, 96 bp, Fusarium cuneirostrum
  misc_feature: 39
cttcgcagtccatgcacctccacttgaggtcatcatgcactctcatgaagataactgaaccacatcttgtggtgttttagtaacgtcgctacgtgt

SEQ ID NO: 39783 - DNA, 96 bp, Fusarium cuneirostrum
  misc_feature: 39
acgtgtgatatcctacaacattatacttggtcgtctctactcctcctccctcttaccataacgctcccgcaaccctgactcgatcacctctcgcag

SEQ ID NO: 39784 - DNA, 96 bp, Fusarium cuneirostrum
  misc_feature: 39
agtttgtattctatccggaggaggagtgaacgagtgagcgatcatctacttacattaattgctggacagcatcttctcgggaagagaagaaaagag

SEQ ID NO: 39785 - DNA, 96 bp, Fusarium cuneirostrum
  misc_feature: 39
ctctgttcgtctcctcacgttgttgcggtaaactcgtcctccgtcctcgaaaaaaataaaacaagtcagagttcgcctgctcactcaacctctcgg

SEQ ID NO: 39786 - DNA, 96 bp, Fusarium cuneirostrum
  misc_feature: 39
ctctgtgtgatgtctgtaacgtcgctacgtgttccttcgtcacactcactccgcacgtcctccctccggtcgtccgtactaaggatatagtcatag

SEQ ID NO: 39787 - DNA, 96 bp, Fusarium cuneirostrum
  misc_feature: 39
ctcgccggagctcctcgacaattgaagggatacttagacaattctcgtcagctaatgtcagacaattagttccacagggatcagtgatggcaccgg

SEQ ID NO: 39788 - DNA, 96 bp, Fusarium cuneirostrum
  misc_feature: 39
aatgtgggcgacgaggacggagagtccgagtggggaggccgaaggccgaccggggaaagtgtgtcgagagcgagggggagcccgagcgaaatcgag

SEQ ID NO: 39789 - DNA, 96 bp, Fusarium cuneirostrum
  misc_feature: 39
ctagacagtggaattagcctcaagatgatccaatctcacgagctcaattcatacgaaaataatgctcaatgagcacgccaattgctggggtttttg

SEQ ID NO: 39790 - DNA, 96 bp, Fusarium cuneirostrum
  misc_feature: 39
ctaaacaagcccggggcctcttcaacgagacggcaagtccgcaagtcttggggatcgctcaatatggacgtagctatctccaacaacggtgtaagt

SEQ ID NO: 39791 - DNA, 96 bp, Fusarium cuneirostrum
  misc_feature: 39
cgtgaggagacgaacagagtgagtttgtattctatccggaggaggagtgaacgagtgagcgatcatctacttacattaattgctggacagcatctt

SEQ ID NO: 39792 - DNA, 96 bp, Fusarium cuneirostrum
  misc_feature: 39
caagatgtggttcagttatcttcatgagagtgcatgatgacctcaagtggaggtgcatggactgcgaaggcaggatcacatggaatgtgggcgacg

SEQ ID NO: 39793 - DNA, 96 bp, Fusarium cuneirostrum
  misc_feature: 39
cggagacccaatcaggcggaagcctgtggatcatttgggccgcgagaggtggcctacaagaagggtgtcgcaagacagaggatttctggaaatccg

SEQ ID NO: 39794 - DNA, 96 bp, Fusarium cuneirostrum
  misc_feature: 39
cgagagagtagtggagcgaacactaaataaaaggctccaacagaagtgagcgacacgtaattgtgatgttgtgcgtataaatggtatcgtgaatgt

SEQ ID NO: 39795 - DNA, 96 bp, Fusarium cuneirostrum
  misc_feature: 39
ccacaagtcgacaagaacaccaagcacctgtctccagaccatgtgccgcatcccaggaccacaatacctggtgcactcccatctcaccccagttcg

SEQ ID NO: 39796 - DNA, 96 bp, Fusarium cuneirostrum
  misc_feature: 39
acttagtgtgcgagtgattgattaaattgtaatcgtagatgtgaatgtgaataacttcaaaagtattttcccgaggccgaggacgtaggacgcagg

SEQ ID NO: 39797 - DNA, 96 bp, Fusarium cuneirostrum
  misc_feature: 39
cattcggtagtgatataagcgtagcttggtgtctccgccaccaagaaaaagtgacttcgttaacagaagtgaccgatttctcggcccattctcagg

SEQ ID NO: 39798 - DNA, 96 bp, Fusarium cuneirostrum
  misc_feature: 39
cctacatcatctgtctgagctcagagagcgagtcgatcttggattcctatgcaagtcgtctttcaattgcgctggcgcgcgactaggaacagagtg

SEQ ID NO: 39799 - DNA, 96 bp, Fusarium cuneirostrum
  misc_feature: 39
acgtccttctccatatgaacaactccgctcaactcggcctcgacttgcgcctcctttcaaatgtcgatgcccttaaagctgtggcgattgcaacgg

SEQ ID NO: 39800 - DNA, 96 bp, Fusarium cuneirostrum
  misc_feature: 39
ccgggaacagggaggttcacggcataaaagttgaaaagtgttattttgcatagcgaaaggtgatggtggaaattgtgttgtagcaaaatttgatat

SEQ ID NO: 39801 - DNA, 96 bp, Fusarium cuneirostrum
  misc_feature: 39
ccaagatagtcctgagcccgagcgcgtagcgtgcagggtgaaggattgacagtagtctcctcatctgcatatgaagaatgataagctcccgcaggg

SEQ ID NO: 39802 - DNA, 96 bp, Fusarium cuneirostrum
  misc_feature: 39
ccctacgctccgcacgtcgccctacgggctccgtatttaaaaaaggaatggaagacctctctccgcgaggctcgtaactctttactcgagtttatt

SEQ ID NO: 39803 - DNA, 96 bp, Fusarium cuneirostrum
  misc_feature: 39
cccggtttttggagtgccataactttggtctataagaggttttttgacaaaagctgtgctttgggctcaagaacggggtgagtcacaagtggcgat

SEQ ID NO: 39804 - DNA, 96 bp, Fusarium cuneirostrum
  misc_feature: 39
catctgtctgagctcagagagcgagtcgatcttggattcctatgcaagtcgtctttcaattgcgctggcgcgcgactaggaacagagtgacggtat

SEQ ID NO: 39805 - DNA, 96 bp, Fusarium cuneirostrum
  misc_feature: 39
catctactttatatatgctcgcgtaacacaagtgcgggagctcaccctactgtaagctctaggtttttcagcctcgctccctacctacttagtact

SEQ ID NO: 39806 - DNA, 96 bp, Fusarium cuneirostrum
  misc_feature: 39
catccgctcgggactcatggatgaggaatacatttacagtcaccaacataaacattcacaatctgaaatcatgctcgccaagtgaaaaaaagtagt

SEQ ID NO: 39807 - DNA, 96 bp, Fusarium cuneirostrum
  misc_feature: 39
catccaagatctgtccctcttgatcaaccttcgcatggctcaggtttctattacttcttcgatctcgtttcactccatctcttttcatgatctagt

SEQ ID NO: 39808 - DNA, 96 bp, Fusarium cuneirostrum
  misc_feature: 39
agacagcgtcttttcccccgagagggcagagggaagagtttccctcctacatcatctgtctgagctcagagagcgagtcgatcttggattcctatg

SEQ ID NO: 39809 - DNA, 96 bp, Fusarium cuneirostrum
  misc_feature: 39
atttatcttgtagcaccgaaggaggttacgacggaggatcttgtgagggaactgcacctctgtatacagagtcatctgaaacagacgaagcggctg

SEQ ID NO: 39810 - DNA, 96 bp, Fusarium cuneirostrum
  misc_feature: 39
acttgttttatttttttcgaggacggaggacgagtttaccgcaacaacgtgaggagacgaacagagtgagtttgtattctatccggaggaggagtg

SEQ ID NO: 39811 - DNA, 96 bp, Fusarium cuneirostrum
  misc_feature: 39
caaaatttgtacaaattttgaaatggattcttgtcggccctctgggcctcctgtcccctcacttccgttcggtcccccctccccacggtcgggtgt

SEQ ID NO: 39812 - DNA, 96 bp, Fusarium cuneirostrum
  misc_feature: 39
atacaaaaagtatgtcgatttgagtccaatttgaatccgattttgcttgttcctcaccaaaatctcgaaaaatttcacattcgggctcgacacaat

SEQ ID NO: 39813 - DNA, 96 bp, Fusarium cuneirostrum
  misc_feature: 39
atccgttcgggactcaagtggtgtaactctcaccactcctgttccattcacattctacgtcacaattccatctaacactacaattacaattacaat

SEQ ID NO: 39814 - DNA, 96 bp, Fusarium cuneirostrum
  misc_feature: 39
attggaagagattgagtcggcgtagtagtagacttttcccaatgtagatatcgtgataacctcattttgtgtaacctgtgacataacttgattgat

SEQ ID NO: 39815 - DNA, 96 bp, Fusarium cuneirostrum
  misc_feature: 39
attgatggtggcaaggtacgcagccaggcattttactctgaatattcctttactaacaaggtgtcataggaaaggggagatcgccaatttaatttt

SEQ ID NO: 39816 - DNA, 96 bp, Fusarium cuneirostrum
  misc_feature: 39
attcttatttatcccctctctttcactcccttccccccctctcccccttcttattctttatctatattttattattttctttctttttaccttttt

SEQ ID NO: 39817 - DNA, 96 bp, Fusarium cuneirostrum
  misc_feature: 39
attccgcttttctaatttttctctcttatgctcagatgtgagaggcatctcgtgtagggtatctttgtgtgatgtgcattctcggattttattatt

SEQ ID NO: 39818 - DNA, 96 bp, Fusarium cuneirostrum
  misc_feature: 39
aatatgtgtgccctttttagtttatgtgcgctccgtctttatttaatgctcgcccataatacatgtgaagctatcgtcactacaacatcaggtaat

SEQ ID NO: 39819 - DNA, 96 bp, Fusarium cuneirostrum
  misc_feature: 39
atgccccgtttaggctaatgcataatagatagggggtcttatacgaaaagaaagcatgacgattactttcaagatagccattcagctcctcgggat

SEQ ID NO: 39820 - DNA, 96 bp, Fusarium cuneirostrum
  misc_feature: 39
atcaagtcctttccctttcactttcactttcactttcactttcactttcactttcactttcactttcactttcactttcactttcactttcacttt

SEQ ID NO: 39821 - DNA, 96 bp, Fusarium cuneirostrum
  misc_feature: 39
aaataattaatagaatagagcctacttatacctattataattacttaagttaacttaattaatataaaagaccttataatatataagggactttat

SEQ ID NO: 39822 - DNA, 96 bp, Fusarium cuneirostrum
  misc_feature: 39
aagagtttccctcctacatcatctgtctgagctcagagagcgagtcgatcttggattcctatgcaagtcgtctttcaattgcgctggcgcgcgact

SEQ ID NO: 39823 - DNA, 96 bp, Fusarium cuneirostrum
  misc_feature: 39
agggtgacgaaggagcccgatgcgaggttacgagaacaccatggatatgtgtgttaccatttcatgtaggagtgcacgacggcttcacgactcagt

SEQ ID NO: 39824 - DNA, 96 bp, Fusarium cuneirostrum
  misc_feature: 39
aactcaagttgacaatcccgggtcgtcgtccctcctcctccccgggactcacgtttaggtttaattataaaaacaattacattcacatcatatgct

SEQ ID NO: 39825 - DNA, 96 bp, Fusarium cuneirostrum
  misc_feature: 39
aaacaccacaagatgtggttcagttatcttcatgagagtgcatgatgacctcaagtggaggtgcatggactgcgaaggcaggatcacatggaatgt

SEQ ID NO: 39826 - DNA, 96 bp, Fusarium cuneirostrum
  misc_feature: 39
aaatattaagatctatctattatttatagctaatttaggctaatataaagtataatcgcgaaatataatatttaattaaataatatctagaacttt

SEQ ID NO: 39827 - DNA, 96 bp, Fusarium cuneirostrum
  misc_feature: 38
tttttcttctttcatgacccgtttggcgttagaagcactcttgattgaggtgtactttagtagcaataatagttacaagatgtttactctgatttt

SEQ ID NO: 39828 - DNA, 96 bp, Fusarium cuneirostrum
  misc_feature: 38
ttttggtaagaacaggggatttcgaccgtatggagattctcaactcacctatcgttcaggcacaaaggagcatttcgatccattacgagaatgctt

SEQ ID NO: 39829 - DNA, 96 bp, Fusarium cuneirostrum
  misc_feature: 38
attgactagcaaaaaggctcgctaaaaaacgaaggtatcgcaacatccaaaacaggaaacaatgtagactaatctaagatacaaaacctccgaaaa

SEQ ID NO: 39830 - DNA, 96 bp, Fusarium cuneirostrum
  misc_feature: 38
ttttatttttttcgaggacggaggacgagtttaccgcaacaacgtgaggagacgaacagagtgagtttgtattctatccggaggaggagtgaacga

SEQ ID NO: 39831 - DNA, 96 bp, Fusarium cuneirostrum
  misc_feature: 38
cgctctaaaatctacgtaattgaagtcatcatcacttccacatcaggcaactctacaaatctcaccaagttcacattgcatctatctacactaaaa

SEQ ID NO: 39832 - DNA, 96 bp, Fusarium cuneirostrum
  misc_feature: 38
ttttacctttatatacctcttttattattatataccttttttggctttttattatcttgtacatattaattatattttaggaaaatatactctttt

SEQ ID NO: 39833 - DNA, 96 bp, Fusarium cuneirostrum
  misc_feature: 38
acaaagaaaaagaagccatcgtcatctccgaattaggcaacctcgcggtatgctggtggattaccgctccgtccacacgcctccgcaatcttaaaa

SEQ ID NO: 39834 - DNA, 96 bp, Fusarium cuneirostrum
  misc_feature: 38
tttgacggagtctcaaaactggaacagtttttgtatggactcgattctggcatttggtgagccaaatcctgagaatgggccgagaaatcggtcact

SEQ ID NO: 39835 - DNA, 96 bp, Fusarium cuneirostrum
  misc_feature: 38
cctatagtaaagatctctttagctataaaattaataaattaagattatttaatagaagtttaattaactttagataactttaatcttagttagaaa

SEQ ID NO: 39836 - DNA, 96 bp, Fusarium cuneirostrum
  misc_feature: 38
tcgctctaaaatctacgtaattgaagtcatcatcacttccacatcaggcaactctacaaatctcaccaagttcacattgcatctatctacactaaa

SEQ ID NO: 39837 - DNA, 96 bp, Fusarium cuneirostrum
  misc_feature: 38
tattaaataataccttctataattaggtaataatatagaattaaataataaggaaagtattaagggattaatattatcgattattaatatactaaa

SEQ ID NO: 39838 - DNA, 96 bp, Fusarium cuneirostrum
  misc_feature: 38
gaatccctctcaaccgtgcttccgcaaacagagaaaatagaaaaagacagcgacgtccgtcgtatacaatgacctccggtcaaataaaaaagtaaa

SEQ ID NO: 39839 - DNA, 96 bp, Fusarium cuneirostrum
  misc_feature: 38
gagcaaggtcgagaccgaggacaagagcaaggtcgagaccgaggacaagagcaaggtcgagaccgaggacaagagcaaggtcgagaccgaggacaa

SEQ ID NO: 39840 - DNA, 96 bp, Fusarium cuneirostrum
  misc_feature: 38
ttgtaattgtagtgttagatggaattgtgacgtagaatgtgaatggaacaggagtggtgagagttacaccacttgagtcccgaacggatgagcaag

SEQ ID NO: 39841 - DNA, 96 bp, Fusarium cuneirostrum
  misc_feature: 38
ttgggattttctgcgtctggagtgacgatggaagaggtgtcgaaggtttatctcgatgcggagaagaaacggagatcgagggctgtaagagcggag

SEQ ID NO: 39842 - DNA, 96 bp, Fusarium cuneirostrum
  misc_feature: 38
ttgcggtaaactcgtcctccgtcctcgaaaaaaataaaacaagtcagagttcgcctgctcactcaacctctcgggggaaaagacgctgtcttatac

SEQ ID NO: 39843 - DNA, 96 bp, Fusarium cuneirostrum
  misc_feature: 38
ttgaggtcatcaccattacctattccggtaagtctcacaaagcatcgttggagttactcctccacacttgacccaactcaaacacagcatcatcaa

SEQ ID NO: 39844 - DNA, 96 bp, Fusarium cuneirostrum
  misc_feature: 38
gtctgagctcagagagcgagtcgatcttggattcctatgcaagtcgtctttcaattgcgctggcgcgcgactaggaacagagtgacggtatttcaa

SEQ ID NO: 39845 - DNA, 96 bp, Fusarium cuneirostrum
  misc_feature: 38
gacgaacagtgtggatgtgagtcttctgtctttgtacactgagactgctgctgtatacgcagctgggttacctgaacgtgcgtaagtcagtgagaa

SEQ ID NO: 39846 - DNA, 96 bp, Fusarium cuneirostrum
  misc_feature: 38
ttccccggtcggccttcggcctccccactcggactctccgtcctcgtcgcccacattccatgtgatcctgccttcgcagtccatgcacctccactt

SEQ ID NO: 39847 - DNA, 96 bp, Fusarium cuneirostrum
  misc_feature: 38
ttcacattctacgtcacaattccatctaacactacaattacaattacaattacaatcagtcacgatggctcgccattagggagggaaatggtgctc

SEQ ID NO: 39848 - DNA, 96 bp, Fusarium cuneirostrum
  misc_feature: 38
ggcaaataaatacgttttaaatagactcgtttgacgagccccaattactattttatgcgagcagacatgactttgatgtatgacttgtgatttgaa

SEQ ID NO: 39849 - DNA, 96 bp, Fusarium cuneirostrum
  misc_feature: 38
ggcagacgttccgtcttatacttcctcgccccctcgtcagtatccacttatgcccggatcgctacgctgcaccttattcgtcgttcctcctcataa

SEQ ID NO: 39850 - DNA, 96 bp, Fusarium cuneirostrum
  misc_feature: 38
ttatatattgagctgtcgtaggacgctttctggagttggggatccaacgacctttacttttttatttgaccggaggtcattgtatacgacggacgt

SEQ ID NO: 39851 - DNA, 96 bp, Fusarium cuneirostrum
  misc_feature: 38
ttaaacagaggctcgcataaatcaatcaggtcacattactatctaccacaaagaaaaagaagccatcgtcatctccgaattaggcaacctcgcggt

SEQ ID NO: 39852 - DNA, 96 bp, Fusarium cuneirostrum
  misc_feature: 38
tgtgttttaagattgcggaggcgtgtggacggagcggtaatccaccagcataccgcgaggttgcctaattcggagatgacgatggcttctttttct

SEQ ID NO: 39853 - DNA, 96 bp, Fusarium cuneirostrum
  misc_feature: 38
gcaacaacgtgaggagacgaacagagtgagtttgtattctatccggaggaggagtgaacgagtgagcgatcatctacttacattaattgctggaca

SEQ ID NO: 39854 - DNA, 96 bp, Fusarium cuneirostrum
  misc_feature: 38
tgtcaatgtaatttattcagggaataattacccttccaagcaggaactgtgaaatagagaccgagccataaggcgaggtgttgtcagagcacgagg

SEQ ID NO: 39855 - DNA, 96 bp, Fusarium cuneirostrum
  misc_feature: 38
tgagacagcagtcgaatagagcccagagggcgaacgatctaaacaccaggtagtggtggattgtggtgtggaacacgtttggtgagagagtcacca

SEQ ID NO: 39856 - DNA, 96 bp, Fusarium cuneirostrum
  misc_feature: 38
catatcactgtctatactaactacaataccacttgaggtcatcaccattacctattccggtaagtctcacaaagcatcgttggagttactcctcca

SEQ ID NO: 39857 - DNA, 96 bp, Fusarium cuneirostrum
  misc_feature: 38
aagaaaagaaaagaaagaaaaaaaagataatcgcctctggcaatatgaaagacaacaattactcacctccgttcgtaagtaagtgcgtgtctctca

SEQ ID NO: 39858 - DNA, 96 bp, Fusarium cuneirostrum
  misc_feature: 38
tgacttcacttctgccgactccacatactttgctcgccactgtttaatatggggcgaggcaaataaatacgttttaaatagactcgtttgacgagc

SEQ ID NO: 39859 - DNA, 96 bp, Fusarium cuneirostrum
  misc_feature: 38
aacagtggcgagcaaagtatgtggagtcggcagaagtgaagtcatcaccaactcccgtttcagcatagtcgggaaaacggtcccgttacatagtca

SEQ ID NO: 39860 - DNA, 96 bp, Fusarium cuneirostrum
  misc_feature: 38
gccgacgtgcagtacgagaccgaggaacgaggtcgaagtggtgctagataatgtgaagaggtgaagtgcgaataacttcactagatcatgaaaaga

SEQ ID NO: 39861 - DNA, 96 bp, Fusarium cuneirostrum
  misc_feature: 38
agacgaacagtgtggatgtgagtcttctgtctttgtacactgagactgctgctgtatacgcagctgggttacctgaacgtgcgtaagtcagtgaga

SEQ ID NO: 39862 - DNA, 96 bp, Fusarium cuneirostrum
  misc_feature: 38
tcgtttccccaaaaaaccgcttatagaccaaagttatggacgctcgtttgccccgttccgggtcactcgcgttagtctataagctggaaagctccc

SEQ ID NO: 39863 - DNA, 96 bp, Fusarium cuneirostrum
  misc_feature: 38
gcatacgttacttgacgatggaggagattgatcggtcaacaaactacgggcgtgataagctaacaatcgactttcctttcctgcattacgccacga

SEQ ID NO: 39864 - DNA, 96 bp, Fusarium cuneirostrum
  misc_feature: 38
tcgtccttctcggcaagtctctgatcagaagagaaagcacgctccgtatactccgcttctttggtactccaactaaaagcaacacaacagttgatg

SEQ ID NO: 39865 - DNA, 96 bp, Fusarium cuneirostrum
  misc_feature: 38
cacatactttgctcgccactgtttaatatggggcgaggcaaataaatacgttttaaatagactcgtttgacgagccccaattactattttatgcga

SEQ ID NO: 39866 - DNA, 96 bp, Fusarium cuneirostrum
  misc_feature: 38
ggtgtctccgccaccaagaaaaagtgacttcgttaacagaagtgaccgatttctcggcccattctcaggatttggctcaccaaatgccagaatcga

SEQ ID NO: 39867 - DNA, 96 bp, Fusarium cuneirostrum
  misc_feature: 38
tcgagagaaataagctatatagtttaataatagaatttctaactcgtaaaccaaataatctagatttaattcctagtaacgtacatgataagcata

SEQ ID NO: 39868 - DNA, 96 bp, Fusarium cuneirostrum
  misc_feature: 38
tcgaaaaaaataaaacaagtcagagttcgcctgctcactcaacctctcgggggaaaagacgctgtcttatactcctcgactctgtctgcggggtat

SEQ ID NO: 39869 - DNA, 96 bp, Fusarium cuneirostrum
  misc_feature: 38
tcctttccctttcactttcactttcactttcactttcactttcactttcactttcactttcactttcactttcactttcactttcactttcacttt

SEQ ID NO: 39870 - DNA, 96 bp, Fusarium cuneirostrum
  misc_feature: 38
agaggatcaagtgcacgagtgcacgactaactttaactgtagcccggaacgaggagtgaggacgaatatcattcaagtgaatgaaatccgacagga

SEQ ID NO: 39871 - DNA, 96 bp, Fusarium cuneirostrum
  misc_feature: 38
ctgcgaacgacagtgagcattaatctcttacactaccgcgaggaaccagggtacctggtttttcgagcgggttataactttggtgatataagagga

SEQ ID NO: 39872 - DNA, 96 bp, Fusarium cuneirostrum
  misc_feature: 38
tcctcggcctcgggaaaatacttttgaagttattcacattcacatctacgattacaatttaatcaatcactcgcacactaagtcacagtcgctcgc

SEQ ID NO: 39873 - DNA, 96 bp, Fusarium cuneirostrum
  misc_feature: 38
tccgtcgtatacaatgacctccggtcaaataaaaaagtaaaggtcgttggatccccaactccagaaagcgtcctacgacagctcaatatataaccc

SEQ ID NO: 39874 - DNA, 96 bp, Fusarium cuneirostrum
  misc_feature: 38
cagtcgaagacttgagactgtatttatttttttgtgtgagacggagtcgagtctgatttcgactggaatcagttctgtttattccacggccgtgga

SEQ ID NO: 39875 - DNA, 96 bp, Fusarium cuneirostrum
  misc_feature: 38
tcaattcaaatcacaagtcatacatcaaagtcatgtctgctcgcataaaatagtaattggggctcgtcaaacgagtctatttaaaacgtatttatt

SEQ ID NO: 39876 - DNA, 96 bp, Fusarium cuneirostrum
  misc_feature: 38
acttcgacctcgttcctcggtctcgtactgcacgtcggcttacgcctccgtaattctttacacagttcttgcttgggcaatgaactcttcacttga

SEQ ID NO: 39877 - DNA, 96 bp, Fusarium cuneirostrum
  misc_feature: 38
aggcaaataaatacgttttaaatagactcgtttgacgagccccaattactattttatgcgagcagacatgactttgatgtatgacttgtgatttga

SEQ ID NO: 39878 - DNA, 96 bp, Fusarium cuneirostrum
  misc_feature: 38
tcaaaatatgggtagaaaaagaaaacagcaaggatatatcgactttcgtgcaagctgagctctcttcgttctgtgaacggacatcgtcgacgattc

SEQ ID NO: 39879 - DNA, 96 bp, Fusarium cuneirostrum
  misc_feature: 38
tattatttcaggggctaagcaactcaattgcgataactaccatctaacgtatagtagtggtaccccagggaatattagagaaggcactgcgactat

SEQ ID NO: 39880 - DNA, 96 bp, Fusarium cuneirostrum
  misc_feature: 38
aaagggttgttgagtagtgactatgtaacgggaccgttttcccgactatgctgaaacgggagttggtgatgacttcacttctgccgactccacata

SEQ ID NO: 39881 - DNA, 96 bp, Fusarium cuneirostrum
  misc_feature: 38
aggatttctggaaatccgacaatttttttccttctttacattcgggttgaactgtgttcatcgctttgcaagagcaaacgaacccgtatatccata

SEQ ID NO: 39882 - DNA, 96 bp, Fusarium cuneirostrum
  misc_feature: 38
tataaagtagatggtgataacctcaaaagagtccacgagccgagcgcgtagcgtgcaggcgaggggattgtcaatgtaatttattcagggaataat

SEQ ID NO: 39883 - DNA, 96 bp, Fusarium cuneirostrum
  misc_feature: 38
tactttaaataatatttaatgggacgagcaccattttttatatttggcgagctgtgatttttaattatatttgtgatcgtgatgttatttgatgtg

SEQ ID NO: 39884 - DNA, 96 bp, Fusarium cuneirostrum
  misc_feature: 38
tacttcctcgccccctcgtcagtatccacttatgcccggatcgctacgctgcaccttattcgtcgttcctcctcataacgttccgtccacccgcac

SEQ ID NO: 39885 - DNA, 96 bp, Fusarium cuneirostrum
  misc_feature: 38
ccttttaaggcaataaggctttattttatatatatattcctttgcattattgtaagagactgagctcttatctaagccgccgagaaaggctgctta

SEQ ID NO: 39886 - DNA, 96 bp, Fusarium cuneirostrum
  misc_feature: 38
attaagttaagggttaaggttaagtaattataataaaaattaagaggaataattaagttaagggttaattaaggggagtaattaagttaagagtta

SEQ ID NO: 39887 - DNA, 96 bp, Fusarium cuneirostrum
  misc_feature: 38
taactcaagttgacaatcccgggtcgtcgtccctcctcctccccgggactcacgtttaggtttaattataaaaacaattacattcacatcatatgc

SEQ ID NO: 39888 - DNA, 96 bp, Fusarium cuneirostrum
  misc_feature: 38
taacgctcccgcaaccctgactcgatcacctctcgcaggataccaagtcgatcgtacatctccttcactacttcttccttccgaagatagcttacc

SEQ ID NO: 39889 - DNA, 96 bp, Fusarium cuneirostrum
  misc_feature: 38
aattaacttatagaagtagtaatatataaatatatttattcggtatattaaatagatatagctactttagtaattaatataacttaattatattta

SEQ ID NO: 39890 - DNA, 96 bp, Fusarium cuneirostrum
  misc_feature: 38
taaacaagcccggggcctcttcaacgagacggcaagtccgcaagtcttggggatcgctcaatatggacgtagctatctccaacaacggtgtaagtg

SEQ ID NO: 39891 - DNA, 96 bp, Fusarium cuneirostrum
  misc_feature: 38
aggattaggcgggaacaaagaggaattggaaatggggaccattcgttcatttgtagaggatctcgacctgtatctagccactctttcatgatttta

SEQ ID NO: 39892 - DNA, 96 bp, Fusarium cuneirostrum
  misc_feature: 38
gtaaagtaggagggagcctgtggggcgaccgtaagacagaggggcgagattgtgtcgagcccgaatgtgaaatttttcgagattttggtgaggaac

SEQ ID NO: 39893 - DNA, 96 bp, Fusarium cuneirostrum
  misc_feature: 38
cggaacgttatgaggaggaacgacgaataaggtgcagcgtagcgatccgggcataagtggatactgacgagggggcgaggaagtataagacggaac

SEQ ID NO: 39894 - DNA, 96 bp, Fusarium cuneirostrum
  misc_feature: 38
aaaggcggtcactccttcgagtaaaaaggtcggtagttcagacaacctccgcttcagcagatccgcgtccaagaagcagatcgtcacagcgcacac

SEQ ID NO: 39895 - DNA, 96 bp, Fusarium cuneirostrum
  misc_feature: 38
acgtggtttattcttttgtatcacggagtgatgaacgagatggttcgagtgcgaggaaggacgacggaggaggacaggagagcatcggagatgcac

SEQ ID NO: 39896 - DNA, 96 bp, Fusarium cuneirostrum
  misc_feature: 38
gtgcagaacgagtcgaccgacagggagacgatgtgatgttactttaattcaacagagatgcgctctgtgaatcccctcacgtaaacatgaaatgtc

SEQ ID NO: 39897 - DNA, 96 bp, Fusarium cuneirostrum
  misc_feature: 38
aacaattgacatgctgaaccagtcttccaccttatagtggtatgaggcgcattctaacgaagtccttctcaagtcggattgttattaaaaggtcac

SEQ ID NO: 39898 - DNA, 96 bp, Fusarium cuneirostrum
  misc_feature: 38
atacaaaagaataaaccacgttcgcccgtctcactaaatctccgattgaaataccgtcactctgttcctagtcgcgcgccagcgcaattgaaagac

SEQ ID NO: 39899 - DNA, 96 bp, Fusarium cuneirostrum
  misc_feature: 38
gtcacgcattgaagctattcccaactcccgttcgggaaatctcacttccacagaaaagtctcctagacatacaacaatccgcattcatcattcggg

SEQ ID NO: 39900 - DNA, 96 bp, Fusarium cuneirostrum
  misc_feature: 38
agtgagaaggatgtcggacgacatgacagcgctgtcatgtcgtccgacatccttctcactgacttacgcacgttcaggtaacccagctgcgtatac

SEQ ID NO: 39901 - DNA, 96 bp, Fusarium cuneirostrum
  misc_feature: 38
gtagtcttgcttcctgggcctcacaaacgccatggcttgatatctactgtggagagagggttgggtgggtgtcagtttacttatgtgaggttggat

SEQ ID NO: 39902 - DNA, 96 bp, Fusarium cuneirostrum
  misc_feature: 38
gtagagttgggttcgagtgaagaacccataccccaagcagaactatgttctgaataccgaccgaacggagtgagggaaggtgcggaatggagtggg

SEQ ID NO: 39903 - DNA, 96 bp, Fusarium cuneirostrum
  misc_feature: 38
gtaattgtaattgtaattgtagtgttagatggaattgtgacgtagaatgtgaatggaacaggagtggtgagagttacaccacttgagtcccgaacg

SEQ ID NO: 39904 - DNA, 96 bp, Fusarium cuneirostrum
  misc_feature: 38
gccttttatttagtgttcgctccactactctctcggttgtgctcacatatcactgtctatactaactacaataccacttgaggtcatcaccattac

SEQ ID NO: 39905 - DNA, 96 bp, Fusarium cuneirostrum
  misc_feature: 38
gtaagtttagaacatagttcttgcttggaggatgaactcttcacttgagttcagtctattgtcaatccctcagcctgcgtcctacgtcctcggcct

SEQ ID NO: 39906 - DNA, 96 bp, Fusarium cuneirostrum
  misc_feature: 38
ggtccgaccgttggtcgttggttgtcaatcgacaagggtgtcgtgccgtccaccacaaagaaacagccctcctgtttccaagaataatactcgtcc

SEQ ID NO: 39907 - DNA, 96 bp, Fusarium cuneirostrum
  misc_feature: 38
ggtattggcacccaataacatttttcctagtccgtgcacgcttctcggatctcgtaacaagactgtcgcataacattcgtgtgaccggatgtaact

SEQ ID NO: 39908 - DNA, 96 bp, Fusarium cuneirostrum
  misc_feature: 38
ggtaatgtgtaggctctgaggccaaatctgttatattctgaggatggctgaggatattgcaaaaccctctggtgaacaagcagctgtaatcacatg

SEQ ID NO: 39909 - DNA, 96 bp, Fusarium cuneirostrum
  misc_feature: 38
ccttttatttagtgttcgctccactactctctcggttgtgctcacatatcactgtctatactaactacaataccacttgaggtcatcaccattacc

SEQ ID NO: 39910 - DNA, 96 bp, Fusarium cuneirostrum
  misc_feature: 38
aatctcaggatcgaactcatacaaaatttgtacaaattttgaaatggattctggctcgagtctgacccgactctcgacatcccccctcttcccccc

SEQ ID NO: 39911 - DNA, 96 bp, Fusarium cuneirostrum
  misc_feature: 38
ggctttctcaattgtcaggatgtagccttaaatgtctctgctctacgacgaacttgtctcaccgcataaagctgtctggaacaagaatgcctccat

SEQ ID NO: 39912 - DNA, 96 bp, Fusarium cuneirostrum
  misc_feature: 38
aaaaacctagagcttacagtagggtgagctcccgcacttgtgttacgcgagcatatataaagtagatggtgataacctcaaaagagtccacgagcc

SEQ ID NO: 39913 - DNA, 96 bp, Fusarium cuneirostrum
  misc_feature: 38
agcaagccccgtaggggcgcagggaagactgagggattggcaatagtcattacaccgccggaggcccgagtcggaactgtataatcctacggagcc

SEQ ID NO: 39914 - DNA, 96 bp, Fusarium cuneirostrum
  misc_feature: 38
actagcaaaaaggctcgctaaaaaacgaaggtatcgcaacatccaaaacaggaaacaatgtagactaatctaagatacaaaacctccgaaaacgcc

SEQ ID NO: 39915 - DNA, 96 bp, Fusarium cuneirostrum
  misc_feature: 38
aaacactccaagatcagctatcatcgccatctcatccatcttagaggcgttcacttacaaactacatcagtaaacacactaaggtcagcaatcgcc

SEQ ID NO: 39916 - DNA, 96 bp, Fusarium cuneirostrum
  misc_feature: 38
ggaggaacgacgaataaggtgcagcgtagcgatccgggcataagtggatactgacgagggggcgaggaagtataagacggaacgtctgcccctgcg

SEQ ID NO: 39917 - DNA, 96 bp, Fusarium cuneirostrum
  misc_feature: 38
caccttttgaggactttatagtcgatattcttcagtcctttacatagccactagctataggttataagtgagaataatctatcgattatatattcc

SEQ ID NO: 39918 - DNA, 96 bp, Fusarium cuneirostrum
  misc_feature: 38
gctgtagaagaggtgaagacactcgtcgagggtgtggacgagtttggtgatgaatgggtcgatgacgatcttggagatttttagtgtagatagatg

SEQ ID NO: 39919 - DNA, 96 bp, Fusarium cuneirostrum
  misc_feature: 38
aaggtcgagaccgaggacaagagcaaggtcgagaccgaggacaagagcaaggtcgagaccgaggacaagagcaaggtcgagaccgaggacaagagc

SEQ ID NO: 39920 - DNA, 96 bp, Fusarium cuneirostrum
  misc_feature: 38
gaaaaacctagagcttacagtagggtgagctcccgcacttgtgttacgcgagcatatataaagtagatggtgataacctcaaaagagtccacgagc

SEQ ID NO: 39921 - DNA, 96 bp, Fusarium cuneirostrum
  misc_feature: 38
gctcactaatctaataaaaagaataaccagggctcgtcaaacgagtttatttaaattattatttgcctcgccctgcttatgttatgtcaagggctc

SEQ ID NO: 39922 - DNA, 96 bp, Fusarium cuneirostrum
  misc_feature: 38
gctcacatatcactgtctatactaactacaataccacttgaggtcatcaccattacctattccggtaagtctcacaaagcatcgttggagttactc

SEQ ID NO: 39923 - DNA, 96 bp, Fusarium cuneirostrum
  misc_feature: 38
ctactttatatatgctcgcgtaacacaagtgcgggagctcaccctactgtaagctctaggtttttcagcctcgctccctacctacttagtactcgc

SEQ ID NO: 39924 - DNA, 96 bp, Fusarium cuneirostrum
  misc_feature: 38
gccacaagtcgacaagaacaccaagcacctgtctccagaccatgtgccgcatcccaggaccacaatacctggtgcactcccatctcaccccagttc

SEQ ID NO: 39925 - DNA, 96 bp, Fusarium cuneirostrum
  misc_feature: 38
aaacaagcccggggcctcttcaacgagacggcaagtccgcaagtcttggggatcgctcaatatggacgtagctatctccaacaacggtgtaagtgc

SEQ ID NO: 39926 - DNA, 96 bp, Fusarium cuneirostrum
  misc_feature: 38
gatttatcttgtagcaccgaaggaggttacgacggaggatcttgtgagggaactgcacctctgtatacagagtcatctgaaacagacgaagcggct

SEQ ID NO: 39927 - DNA, 96 bp, Fusarium cuneirostrum
  misc_feature: 38
agtgaagtcatcaccatgtcttcttactactacgtttacaatttatatttacagtcacaactgttattaaatcatcgctcgccattaagtacaatc

SEQ ID NO: 39928 - DNA, 96 bp, Fusarium cuneirostrum
  misc_feature: 38
gagtcgagtctgatttcgactggaatcagttctgtttattccacggccgtggaaacacgaacaggtgagtgtctatacatatctggaagatgaagt

SEQ ID NO: 39929 - DNA, 96 bp, Fusarium cuneirostrum
  misc_feature: 38
cgctcttacttacatccgacaacaaagattgtctctggcgctctgcgcccatgtgcatctccgatgctctcctgtcctcctccgtcgtccttcctc

SEQ ID NO: 39930 - DNA, 96 bp, Fusarium cuneirostrum
  misc_feature: 38
cgtcctcggcctcgggaaaatacttttgaagttattcacattcacatctacgattacaatttaatcaatcactcgcacactaagtcacagtcgctc

SEQ ID NO: 39931 - DNA, 96 bp, Fusarium cuneirostrum
  misc_feature: 38
aaacactaaatatacttttgacgagcaccacttcatactttatttaatcgagcgagctgtgcatatgtgacattattattattttgaatcgtagtc

SEQ ID NO: 39932 - DNA, 96 bp, Fusarium cuneirostrum
  misc_feature: 38
accttataattactaattcttaggttttataatttcttttacgagaattattaattattaatcttaattacctttccgatataattaataagggtc

SEQ ID NO: 39933 - DNA, 96 bp, Fusarium cuneirostrum
  misc_feature: 38
gacacacttctgtcggtcgcgcatccgcactccctcatctactcacctcgtacacccacttcggtatcatctttcgatgtgcgcattgactgttgg

SEQ ID NO: 39934 - DNA, 96 bp, Fusarium cuneirostrum
  misc_feature: 38
gaagttattcccacttcacgtctacgatggcatctacagtctacgacaagacatacatatcacaattataactacattcatcaaatgctcgccagt

SEQ ID NO: 39935 - DNA, 96 bp, Fusarium cuneirostrum
  misc_feature: 38
gaagagtcgagttgtgatggcgcgtcgcgcatgagaggacgggtcctcgggatttatcttgtagcaccgaaggaggttacgacggaggatcttgtg

SEQ ID NO: 39936 - DNA, 96 bp, Fusarium cuneirostrum
  misc_feature: 38
agccgacgtgcagtacgagaccgaggaacgaggtcgaagtggtgctagataatgtgaagaggtgaagtgcgaataacttcactagatcatgaaaag

SEQ ID NO: 39937 - DNA, 96 bp, Fusarium cuneirostrum
  misc_feature: 38
attaggaaacatctctttctgaaaagaagaaagaagaaagaagaaagaagaaagaagaaagaagaaagaagaaagaagaaagaagaaagaagaaag

SEQ ID NO: 39938 - DNA, 96 bp, Fusarium cuneirostrum
  misc_feature: 38
aggctgtgaaagcaagcgaggaaaagaaggaaaagaagcggtcgaagaagaagaagcacaaggagcctgagccaaccgaaggagaagcggtcgaag

SEQ ID NO: 39939 - DNA, 96 bp, Fusarium cuneirostrum
  misc_feature: 38
cttcccctcgtcctctcgactcgggtatgacggtcgggccacaccctccctctcacttatcctcctcgtgatccccactcggctacatctttcgtg

SEQ ID NO: 39940 - DNA, 96 bp, Fusarium cuneirostrum
  misc_feature: 38
ccgaccgttggtcgttggttgtcaatcgacaagggtgtcgtgccgtccaccacaaagaaacagccctcctgtttccaagaataatactcgtcccag

SEQ ID NO: 39941 - DNA, 96 bp, Fusarium cuneirostrum
  misc_feature: 38
acatactttgctcgccactgtttaatatggggcgaggcaaataaatacgttttaaatagactcgtttgacgagccccaattactattttatgcgag

SEQ ID NO: 39942 - DNA, 96 bp, Fusarium cuneirostrum
  misc_feature: 38
ctccccctcttttatttctcctcgtgcactcacttcagtcgcatcctgcattcatgtttgactgctgtcaattgaagtcatcaccatctctgtgtg

SEQ ID NO: 39943 - DNA, 96 bp, Fusarium cuneirostrum
  misc_feature: 38
ctcattccgtggtcgctctgctcccactccattccgcaccttccctcactccgttcggtcggtattcagaacatagttctgcttggggtatgggtt

SEQ ID NO: 39944 - DNA, 96 bp, Fusarium cuneirostrum
  misc_feature: 38
ctcatggtagtacgttatgtacggacataatcttacttgcgagggtgcgagacaagtataagggcaggggattgcccgttgcacttggagtgcttt

SEQ ID NO: 39945 - DNA, 96 bp, Fusarium cuneirostrum
  misc_feature: 38
ctcatgcgcgacgcgccatcacaactcgactcttcgtctcggtccatatcgtcgccggtccccgtctcccactttcagtctccctcttcggtcgat

SEQ ID NO: 39946 - DNA, 96 bp, Fusarium cuneirostrum
  misc_feature: 38
caacgacctttacttttttatttgaccggaggtcattgtatacgacggacgtcgctgtctttttctattttctctgtttgcggaagcacggttgag

SEQ ID NO: 39947 - DNA, 96 bp, Fusarium cuneirostrum
  misc_feature: 38
aacgggagttggtgatgacttcacttctgccgactccacatactttgctcgccactgtttaatatggggcgaggcaaataaatacgttttaaatag

SEQ ID NO: 39948 - DNA, 96 bp, Fusarium cuneirostrum
  misc_feature: 38
ctacagtaacatcatgctcactaatctaataaaaagaataaccagggctcgtcaaacgagtttatttaaattattatttgcctcgccctgcttatg

SEQ ID NO: 39949 - DNA, 96 bp, Fusarium cuneirostrum
  misc_feature: 38
cgtggggcgagacaaataattattaaaaccacttttaatgtgtcgagaaccactactttttttcacttggcgagcatgatttcagattgtgaatgt

SEQ ID NO: 39950 - DNA, 96 bp, Fusarium cuneirostrum
  misc_feature: 38
actcgccggagctcctcgacaattgaagggatacttagacaattctcgtcagctaatgtcagacaattagttccacagggatcagtgatggcaccg

SEQ ID NO: 39951 - DNA, 96 bp, Fusarium cuneirostrum
  misc_feature: 38
cggatgcgcgaccgacagaagtgtgtcgagggtcgagcagacccgagccagaaacgagctcaaaactggaacagttttttggtgagttcaatcctg

SEQ ID NO: 39952 - DNA, 96 bp, Fusarium cuneirostrum
  misc_feature: 38
cgcacgttcaggtaacccagctgcgtatacagcagcagtctcagtgtacaaagacagaagactcacatccacactgttcgtcttccacgttcgtgg

SEQ ID NO: 39953 - DNA, 96 bp, Fusarium cuneirostrum
  misc_feature: 38
actcagtcccttcgttcccgtgcttagccactctccttcgttcgtccctcactctcgtcgtctatgacccacatctgattccactccgttccatcg

SEQ ID NO: 39954 - DNA, 96 bp, Fusarium cuneirostrum
  misc_feature: 38
cgataataagaatatactctatcttattatatttctcttgctttaatacttctagcttataaagtctctaattaagtataaactttataaaaaatt

SEQ ID NO: 39955 - DNA, 96 bp, Fusarium cuneirostrum
  misc_feature: 38
actacgggacacgggacagtgagggacgaacgtagtgtcactaaggcgaccgagctcaagcgaggtaaagccggtcaaggcttcctgacgaagtcg

SEQ ID NO: 39956 - DNA, 96 bp, Fusarium cuneirostrum
  misc_feature: 38
cgaagagtcgagttgtgatggcgcgtcgcgcatgagaggacgggtcctcgggatttatcttgtagcaccgaaggaggttacgacggaggatcttgt

SEQ ID NO: 39957 - DNA, 96 bp, Fusarium cuneirostrum
  misc_feature: 38
cccaagatagtcctgagcccgagcgcgtagcgtgcagggtgaaggattgacagtagtctcctcatctgcatatgaagaatgataagctcccgcagg

SEQ ID NO: 39958 - DNA, 96 bp, Fusarium cuneirostrum
  misc_feature: 38
cctgattcccgactccgtctcaggatttgactcaccaaatctcagaaacgaacacatacaaattttgtacaaattttgaaatggattcttgctcgg

SEQ ID NO: 39959 - DNA, 96 bp, Fusarium cuneirostrum
  misc_feature: 38
acttttttctacttggcgagcacttaatgatacttgtgatttgtatgtgaccttaaatgaaatgtgatatgaacgtagtcgtagtaagaagacatg

SEQ ID NO: 39960 - DNA, 96 bp, Fusarium cuneirostrum
  misc_feature: 38
cataacctacaggagatagggcgagacaataacatttaaatacacttctttaaacttgtcgagcaccatttccctccctaatggcgagccatcgtg

SEQ ID NO: 39961 - DNA, 96 bp, Fusarium cuneirostrum
  misc_feature: 38
cagagactgtggtctcaataccgagcgaagcgaaggtgcggaacggagtgagagcgtagcgagcacgaagtgaggttacttaaaacaccagagtat

SEQ ID NO: 39962 - DNA, 96 bp, Fusarium cuneirostrum
  misc_feature: 38
actcttgccaatccggctccgtcgtccctcctcctccgccggactcagtgaaaacaataaaagaagacatttacatttacatttacattcacagtg

SEQ ID NO: 39963 - DNA, 96 bp, Fusarium cuneirostrum
  misc_feature: 38
acaaaatttgtacaaattttgaaatggattcttgtcggccctctgggcctcctgtcccctcacttccgttcggtcccccctccccacggtcgggtg

SEQ ID NO: 39964 - DNA, 96 bp, Fusarium cuneirostrum
  misc_feature: 38
acaaataattattaaaaccacttttaatgtgtcgagaaccactactttttttcacttggcgagcatgatttcagattgtgaatgtttatgttggtg

SEQ ID NO: 39965 - DNA, 96 bp, Fusarium cuneirostrum
  misc_feature: 38
caaatgccagaatcgagtccatacaaaaactgttccagttttgagactccgtcaaatccacctcgagcgctgctctcgccatgtaccctttcccct

SEQ ID NO: 39966 - DNA, 96 bp, Fusarium cuneirostrum
  misc_feature: 38
atgaacgagatggttcgagtgcgaggaaggacgacggaggaggacaggagagcatcggagatgcacatgggcgcagagcgccagagacaatctttg

SEQ ID NO: 39967 - DNA, 96 bp, Fusarium cuneirostrum
  misc_feature: 38
atttgtagagttgcctgatgtggaagtgatgatgacttcaattacgtagattttagagcgagtactaagtaggtagggagcgaggctgaaaaacct

SEQ ID NO: 39968 - DNA, 96 bp, Fusarium cuneirostrum
  misc_feature: 38
attgaccaacagtcaatgcgcacatcgaaagatgataccgaagtgggtgtacgaggtgagtagatgagggagtgcggatgcgcgaccgacagaagt

SEQ ID NO: 39969 - DNA, 96 bp, Fusarium cuneirostrum
  misc_feature: 38
atgtcctccgacatgagaaccaactgtctcacgtccgttcgcagtataaaaaaaggataaatgtatttctctcgaaataacagctcgccgtaggct

SEQ ID NO: 39970 - DNA, 96 bp, Fusarium cuneirostrum
  misc_feature: 38
aaaataaatataaaaataaataaaaagaaaaaaaataagagataagaaaaaaaaggaaaaaaataaaaataaaaaagaagataataaagtatagat

SEQ ID NO: 39971 - DNA, 96 bp, Fusarium cuneirostrum
  misc_feature: 38
atattatctataaaaactcctccgcccctctctcctcttctctttttctttttcttccctctattattctcttatatataactaccgggcctaact

SEQ ID NO: 39972 - DNA, 96 bp, Fusarium cuneirostrum
  misc_feature: 38
atacgctgggcgttttcggaggttttgtatcttagattagtctacattgtttcctgttttggatgttgcgataccttcgttttttagcgagccttt

SEQ ID NO: 39973 - DNA, 96 bp, Fusarium cuneirostrum
  misc_feature: 38
agtagagacgaccaagtataatgttgtaggatatcacacgtgtggggtgtgatttagttgcctttcttagtagttgtgatagcttcatttatcttt

SEQ ID NO: 39974 - DNA, 96 bp, Fusarium cuneirostrum
  misc_feature: 38
aacggatgagcaagccccgtaggggcgcagggaagactgagggattggcaatagtcattacaccgccggaggcccgagtcggaactgtataatcct

SEQ ID NO: 39975 - DNA, 96 bp, Fusarium cuneirostrum
  misc_feature: 38
aacatttttcctagtccgtgcacgcttctcggatctcgtaacaagactgtcgcataacattcgtgtgaccggatgtaactatccggtttcacatct

SEQ ID NO: 39976 - DNA, 96 bp, Fusarium cuneirostrum
  misc_feature: 38
aactcccgtttcagcatagtcgggaaaacggtcccgttacatagtcactactcaacaaccctttcgggtctctacaaaatcaaaacatttacatct

SEQ ID NO: 39977 - DNA, 96 bp, Fusarium cuneirostrum
  misc_feature: 38
aatacatttacagtcaccaacataaacattcacaatctgaaatcatgctcgccaagtgaaaaaaagtagtggttctcgacacattaaaagtggttt

SEQ ID NO: 39978 - DNA, 96 bp, Fusarium cuneirostrum
  misc_feature: 38
aaatacttttgaagttattcacattcacatctacgattacaatttaatcaatcactcgcacactaagtcacagtcgctcgcctttaggcttacttt

SEQ ID NO: 39979 - DNA, 96 bp, Fusarium cuneirostrum
  misc_feature: 37
tgccgcatcccaggaccacaatacctggtgcactcccatctcaccccagttcgatgtgtcctccggtaaagccacctctggtactttctccaaaaa

SEQ ID NO: 39980 - DNA, 96 bp, Fusarium cuneirostrum
  misc_feature: 37
ttttaaattggcgagcactttgtgaatgaacgacttaatcaccacttgaggcccgagccgacgagcgagcgtagcgaaggaggagcggagggcttg

SEQ ID NO: 39981 - DNA, 96 bp, Fusarium cuneirostrum
  misc_feature: 37
caatgtcagcaagctgactaaaggcagactcagtccacacgttcgtccctcactgtcccgtgtcccgtagtccccccctataccaaggttaagaaa

SEQ ID NO: 39982 - DNA, 96 bp, Fusarium cuneirostrum
  misc_feature: 37
tttctataatttaatcctttttaccttttagcgttaatttaatatcttatttatttatttaagttttttaattttagccttaaataagataacctt

SEQ ID NO: 39983 - DNA, 96 bp, Fusarium cuneirostrum
  misc_feature: 37
tttatatatagcgagcatgttttaatctgatgtgaataacttcaaaagtattttcccgaggccgaggacgtaggacgcaggctgagggattgacaa

SEQ ID NO: 39984 - DNA, 96 bp, Fusarium cuneirostrum
  misc_feature: 37
tttagatcgttcgccctctgggctctattcgactgctgtctcaccctcaccactcgccgtctagctcgtggttctcttttaccactacaataacag

SEQ ID NO: 39985 - DNA, 96 bp, Fusarium cuneirostrum
  misc_feature: 37
tttaaaactcgagctgatcaaggagctcatgccagctgttacaatgaaattgttgaaatgagaagatgctaattgcttaattcatcctaaaagtgc

SEQ ID NO: 39986 - DNA, 96 bp, Fusarium cuneirostrum
  misc_feature: 37
ttgcctcgccccatattaaacagtggcgagcaaagtatgtggagtcggcagaagtgaagtcatcaccaactcccgtttcagcatagtcgggaaaac

SEQ ID NO: 39987 - DNA, 96 bp, Fusarium cuneirostrum
  misc_feature: 37
ttgccacgatttgaaagtgaaagtgaaagtgaaagtgaaagtgaaagtgaaagtgaaagtgaaagtgaaagtgaaagtgaaagtgaaagtgaaagt

SEQ ID NO: 39988 - DNA, 96 bp, Fusarium cuneirostrum
  misc_feature: 37
cccacgacttttttctacttggcgagcacttaatgatacttgtgatttgtatgtgaccttaaatgaaatgtgatatgaacgtagtcgtagtaagaa

SEQ ID NO: 39989 - DNA, 96 bp, Fusarium cuneirostrum
  misc_feature: 37
aagactcaaaatctaccggattttgggacttttcagaaactggcacagttttaatatgggttgcgatctggcgtttggtgtgagcaaacgtgagaa

SEQ ID NO: 39990 - DNA, 96 bp, Fusarium cuneirostrum
  misc_feature: 37
gaggatcaagtgcacgagtgcacgactaactttaactgtagcccggaacgaggagtgaggacgaatatcattcaagtgaatgaaatccgacaggaa

SEQ ID NO: 39991 - DNA, 96 bp, Fusarium cuneirostrum
  misc_feature: 37
tgacggtatttcaatcggagatttagtgagacgggcgaacgtggtttattcttttgtatcacggagtgatgaacgagatggttcgagtgcgaggaa

SEQ ID NO: 39992 - DNA, 96 bp, Fusarium cuneirostrum
  misc_feature: 37
ataaatatctccgatatccttaattaaactgacgtaaaaggcgtcgaaatcgcgctgcgatccaatcaaatagcgattcaaatttagtctcgggaa

SEQ ID NO: 39993 - DNA, 96 bp, Fusarium cuneirostrum
  misc_feature: 37
cgacgcaatgatcggttgactaaggacgggaacgaatggaatgagtggaggccggtggggacccatgtaagacgagcggagcgagcgaatggggaa

SEQ ID NO: 39994 - DNA, 96 bp, Fusarium cuneirostrum
  misc_feature: 37
tgatttcgactggaatcagttctgtttattccacggccgtggaaacacgaacaggtgagtgtctatacatatctggaagatgaagtgaaggatgaa

SEQ ID NO: 39995 - DNA, 96 bp, Fusarium cuneirostrum
  misc_feature: 37
ttaagataaacccgggttaataataactaatatatatagtaataagcttctctatactcttaattaactaataattatagttaataaatagcggga

SEQ ID NO: 39996 - DNA, 96 bp, Fusarium cuneirostrum
  misc_feature: 37
ttaactccccgagcagagactgctttaatctaccgaacgtagtgaggtgcggagtgaagatggagacggagtcgacatcgtaacgaggttactata

SEQ ID NO: 39997 - DNA, 96 bp, Fusarium cuneirostrum
  misc_feature: 37
cagggcgaggtgcagaacgagtcgaccgacagggagacgatgtgatgttactttaattcaacagagatgcgctctgtgaatcccctcacgtaaaca

SEQ ID NO: 39998 - DNA, 96 bp, Fusarium cuneirostrum
  misc_feature: 37
cggagcagagggtgagggacgaacccgtcgcgaggttataataatgagcaaggtcgcaaggtcactgctcacgataacatcatcaattgaccaaca

SEQ ID NO: 39999 - DNA, 96 bp, Fusarium cuneirostrum
  misc_feature: 37
aggagcactacttaaggcgcagggcgcccacttcgtgtagacgatcaagtttctcagaaacttccctctttcatctacatttccttgtagtgaaca

SEQ ID NO: 40000 - DNA, 96 bp, Fusarium cuneirostrum
  misc_feature: 37
tgtgaccgagacagatgtcgaggggaaagggtacatggcgagagcagcgctcgaggtggatttgacggagtctcaaaactggaacagtttttgtat

SEQ ID NO: 40001 - DNA, 96 bp, Fusarium cuneirostrum
  misc_feature: 37
catcgtgaccacagtggaggtccgcacgcattggggagataaaccattcttaattagataatgatttcccaatcgataccttcatcactacctaca

SEQ ID NO: 40002 - DNA, 96 bp, Fusarium cuneirostrum
  misc_feature: 37
aaatcattatcactcacccgttcgtgatcgctttcgctctatcattcttgcctaatcgtcaagtctcggcgctgcctcaatcaacaaactgaacca

SEQ ID NO: 40003 - DNA, 96 bp, Fusarium cuneirostrum
  misc_feature: 37
tctcgcgatttcgcccgccattctcagtttcgttcacatacaaaaagtatgtcgatttgagtccaatttgaatccgattttgcttgttcctcacca

SEQ ID NO: 40004 - DNA, 96 bp, Fusarium cuneirostrum
  misc_feature: 37
gagttaataatagctaaagaatttatttatctcttttatttctatatcgcgaaaatatatagtatattacttaatattattatagatcgaggacca

SEQ ID NO: 40005 - DNA, 96 bp, Fusarium cuneirostrum
  misc_feature: 37
tgcttatgttatgtcaagggctcacaagtagtcatcatcacagtcaaagtctcaaagtcacaaagtcaaaaaaaggtgaggctatcaccatatcca

SEQ ID NO: 40006 - DNA, 96 bp, Fusarium cuneirostrum
  misc_feature: 37
tggaattgtgacgtagaatgtgaatggaacaggagtggtgagagttacaccacttgagtcccgaacggatgagcaagccccgtaggggcgcaggga

SEQ ID NO: 40007 - DNA, 96 bp, Fusarium cuneirostrum
  misc_feature: 37
tctcagaatcgaactcatacaaaatttgtacaaatttcagatcaaactgaaatgcgaccggcgcagagacagcagcggccgtgtgtgttagtagca

SEQ ID NO: 40008 - DNA, 96 bp, Fusarium cuneirostrum
  misc_feature: 37
cacgtgtgatatcctacaacattatacttggtcgtctctactcctcctccctcttaccataacgctcccgcaaccctgactcgatcacctctcgca

SEQ ID NO: 40009 - DNA, 96 bp, Fusarium cuneirostrum
  misc_feature: 37
agagaaggcattaactaagatattaattaaataattaattaagatataggctaagataatattaaggaaggtattaataataaagcagctaaggca

SEQ ID NO: 40010 - DNA, 96 bp, Fusarium cuneirostrum
  misc_feature: 37
ggaagtgaggggacaggaggcccagagggccgacaagaatccatttcaaaatttgtacaaattttgtatgggaagatttctgagattgtatgggca

SEQ ID NO: 40011 - DNA, 96 bp, Fusarium cuneirostrum
  misc_feature: 37
acagacgtccttctccatatgaacaactccgctcaactcggcctcgacttgcgcctcctttcaaatgtcgatgcccttaaagctgtggcgattgca

SEQ ID NO: 40012 - DNA, 96 bp, Fusarium cuneirostrum
  misc_feature: 37
gggcgagtcattccttttttaaataacattttaatgtgacgagcaccactacgccttttaaattggcgagcactttgtgaatgaacgacttaatca

SEQ ID NO: 40013 - DNA, 96 bp, Fusarium cuneirostrum
  misc_feature: 37
tgatgaatgcggattgttgtatgtctaggagacttttctgtggaagtgagatttcccgaacgggagttgggaatagcttcaatgcgtgactggcta

SEQ ID NO: 40014 - DNA, 96 bp, Fusarium cuneirostrum
  misc_feature: 37
tcttgggtacatgatcacgactacgattcaaaataataataatgtcacatatgcacagctcgctcgattaaataaagtatgaagtggtgctcgtca

SEQ ID NO: 40015 - DNA, 96 bp, Fusarium cuneirostrum
  misc_feature: 37
tgaatgtaaatgtaaatgtaaatgtcttcttttattgttttcactgagtccggcggaggaggagggacgacggagccggattggcaagagtagtgc

SEQ ID NO: 40016 - DNA, 96 bp, Fusarium cuneirostrum
  misc_feature: 37
tgaaagtcttcagtcgtctcgttgttcactcggtcattgttcacattcctctggaatgatgatgaaaggaagagaaatctcactctgttcggtcag

SEQ ID NO: 40017 - DNA, 96 bp, Fusarium cuneirostrum
  misc_feature: 37
tctgtctgcggggtatgagattgtggacggaacgttcgtacctctctcatttgtccgtccaacaaaaccgacctccactcagtcccttcgttcccg

SEQ ID NO: 40018 - DNA, 96 bp, Fusarium cuneirostrum
  misc_feature: 37
ggggaccgaacggaagtgaggggacaggaggcccagagggccgacaagaatccatttcaaaatttgtacaaattttgtatgggaagatttctgaga

SEQ ID NO: 40019 - DNA, 96 bp, Fusarium cuneirostrum
  misc_feature: 37
acaaaagaataaaccacgttcgcccgtctcactaaatctccgattgaaataccgtcactctgttcctagtcgcgcgccagcgcaattgaaagacga

SEQ ID NO: 40020 - DNA, 96 bp, Fusarium cuneirostrum
  misc_feature: 37
tcgtcgttcctcctcataacgttccgtccacccgcacttcagtcggtcccctccttctcgtgcttacttactccactcttcttcgtccctcattcg

SEQ ID NO: 40021 - DNA, 96 bp, Fusarium cuneirostrum
  misc_feature: 37
tcgggatttatcttgtagcaccgaaggaggttacgacggaggatcttgtgagggaactgcacctctgtatacagagtcatctgaaacagacgaagc

SEQ ID NO: 40022 - DNA, 96 bp, Fusarium cuneirostrum
  misc_feature: 37
tcgatcgcatgcatctcaacaaaggcaacgataggaacactagagtcatccatctgagattaaagaactaaagtatcgtacatgtaaaaaagcagc

SEQ ID NO: 40023 - DNA, 96 bp, Fusarium cuneirostrum
  misc_feature: 37
tatgccccgtttaggctaatgcataatagatagggggtcttatacgaaaagaaagcatgacgattactttcaagatagccattcagctcctcggga

SEQ ID NO: 40024 - DNA, 96 bp, Fusarium cuneirostrum
  misc_feature: 37
tccatttcaaaatttgtacaaattttgtatgggaagatttctgagattgtatgggcaacgacctggaatcagagtgagaatctggtacagattgtt

SEQ ID NO: 40025 - DNA, 96 bp, Fusarium cuneirostrum
  misc_feature: 37
cctcgtccttctcggcaagtctctgatcagaagagaaagcacgctccgtatactccgcttctttggtactccaactaaaagcaacacaacagttga

SEQ ID NO: 40026 - DNA, 96 bp, Fusarium cuneirostrum
  misc_feature: 37
tattgatggtggcaaggtacgcagccaggcattttactctgaatattcctttactaacaaggtgtcataggaaaggggagatcgccaatttaattt

SEQ ID NO: 40027 - DNA, 96 bp, Fusarium cuneirostrum
  misc_feature: 37
tatgtacggacataatcttacttgcgagggtgcgagacaagtataagggcaggggattgcccgttgcacttggagtgcttttggcgcccggggcgt

SEQ ID NO: 40028 - DNA, 96 bp, Fusarium cuneirostrum
  misc_feature: 37
cgctccgcacgtcgccctacgggctccgtatttaaaaaaggaatggaagacctctctccgcgaggctcgtaactctttactcgagtttattagata

SEQ ID NO: 40029 - DNA, 96 bp, Fusarium cuneirostrum
  misc_feature: 37
tatataatttaaaatcccatataaattaaaatagcgctaaaaattataggagggtaatataatttaaaataaggggggcaatattataaagaacta

SEQ ID NO: 40030 - DNA, 96 bp, Fusarium cuneirostrum
  misc_feature: 37
aactgaaccacatcttgtggtgttttagtaacgtcgctacgtgttccttcgtcacactcactccgcacgtcgccctccgggctccgtaggattata

SEQ ID NO: 40031 - DNA, 96 bp, Fusarium cuneirostrum
  misc_feature: 37
ggcttacgcctccgtaattctttacacagttcttgcttgggcaatgaactcttcacttgagttcagtctattgtcaatccctcagcctgcgtccta

SEQ ID NO: 40032 - DNA, 96 bp, Fusarium cuneirostrum
  misc_feature: 37
tagactcggccctccgcgggcgctcgtaactcttcatgggttgccaacatactcttgtcaatccctcaccctgcgtccttcgtcctcgggattcgg

SEQ ID NO: 40033 - DNA, 96 bp, Fusarium cuneirostrum
  misc_feature: 37
agttttaaccgcggataatccgcttggaaaaaaacctcttatagaccaaagttaggacgctcgttccccgattttcgggtcactctcgttagtcta

SEQ ID NO: 40034 - DNA, 96 bp, Fusarium cuneirostrum
  misc_feature: 37
ctgagggattgacaatagactgaactcaagtgaagagttcattgcccaagcaagaactgtgtaaagaattacggaggcgtaagccgacgtgcagta

SEQ ID NO: 40035 - DNA, 96 bp, Fusarium cuneirostrum
  misc_feature: 37
tacgcacgttcaggtaacccagctgcgtatacagcagcagtctcagtgtacaaagacagaagactcacatccacactgttcgtcttccacgttcgt

SEQ ID NO: 40036 - DNA, 96 bp, Fusarium cuneirostrum
  misc_feature: 37
tacgaacgttccgtccacaatctcataccccgcagacagagtcgaggagtataagacagcgtcttttcccccgagagggcagagggaagagtttcc

SEQ ID NO: 40037 - DNA, 96 bp, Fusarium cuneirostrum
  misc_feature: 37
gttaaactcaagaatccatgccatcatcgcttgaccgtgacgatttcctcctttggattagtacagtttttgaagagcgtgacgatttcctaatta

SEQ ID NO: 40038 - DNA, 96 bp, Fusarium cuneirostrum
  misc_feature: 37
taattaagaaataaagtatttaattaaatactttataatctatatttttgtaagagactgagctcttatataagctgcctaaaaaggctgcttagt

SEQ ID NO: 40039 - DNA, 96 bp, Fusarium cuneirostrum
  misc_feature: 37
taattaacttatagaagtagtaatatataaatatatttattcggtatattaaatagatatagctactttagtaattaatataacttaattatattt

SEQ ID NO: 40040 - DNA, 96 bp, Fusarium cuneirostrum
  misc_feature: 37
aatctgaaatcatgctcgccaagtgaaaaaaagtagtggttctcgacacattaaaagtggttttaataattatttgtctcgccccacgtaaggtta

SEQ ID NO: 40041 - DNA, 96 bp, Fusarium cuneirostrum
  misc_feature: 37
ctgacatccccacgcgtccagtcatcaacgctgacgctattcctttccctattgcgcctcactctctgtcgatacctccttcccgttcgttattta

SEQ ID NO: 40042 - DNA, 96 bp, Fusarium cuneirostrum
  misc_feature: 37
gtagagacgaccaagtataatgttgtaggatatcacacgtgtggggtgtgatttagttgcctttcttagtagttgtgatagcttcatttatcttta

SEQ ID NO: 40043 - DNA, 96 bp, Fusarium cuneirostrum
  misc_feature: 37
taaaagggttaagagaggagagaaataaagaaaattaaagaagaaagaataattatagaagaaatagaagaaatataataaggagaaagaaaagat

SEQ ID NO: 40044 - DNA, 96 bp, Fusarium cuneirostrum
  misc_feature: 37
ataacttgattgattgagcgagccaccactttactggggcgagtcattccttttttaaataacattttaatgtgacgagcaccactacgcctttta

SEQ ID NO: 40045 - DNA, 96 bp, Fusarium cuneirostrum
  misc_feature: 37
aaactcaatccaattgctaattacttgtgccttggcaacaaagagacgccccagttctgcgtaaccaacacttgccctcgcagagcctcatcaaac

SEQ ID NO: 40046 - DNA, 96 bp, Fusarium cuneirostrum
  misc_feature: 37
gttgtagttgctcgcctctttctttaacggaaatggggcgagttaaaatattcttaaataacgatttaatactacgagcaccatttttatttcgat

SEQ ID NO: 40047 - DNA, 96 bp, Fusarium cuneirostrum
  misc_feature: 37
gcggagcagagggtgagggacgaacccgtcgcgaggttataataatgagcaaggtcgcaaggtcactgctcacgataacatcatcaattgaccaac

SEQ ID NO: 40048 - DNA, 96 bp, Fusarium cuneirostrum
  misc_feature: 37
gttggaggatccaacggatccaacgattggaagtagttggttgattacgcactctgactccacggccaattccttgagccctaactcggctcgggg

SEQ ID NO: 40049 - DNA, 96 bp, Fusarium cuneirostrum
  misc_feature: 37
aggatcaagtgcacgagtgcacgactaactttaactgtagcccggaacgaggagtgaggacgaatatcattcaagtgaatgaaatccgacaggaac

SEQ ID NO: 40050 - DNA, 96 bp, Fusarium cuneirostrum
  misc_feature: 37
gttatatattgagctgtcgtaggacgctttctggagttggggatccaacgacctttacttttttatttgaccggaggtcattgtatacgacggacg

SEQ ID NO: 40051 - DNA, 96 bp, Fusarium cuneirostrum
  misc_feature: 37
gtgttgatcatcttttttctactcgacgatggcttcgtcgcacatgaatgaaatggaatgagccgagatgcagggcacgaggacgtatgtggaccc

SEQ ID NO: 40052 - DNA, 96 bp, Fusarium cuneirostrum
  misc_feature: 37
gtgtgatgtctgtaacgtcgctacgtgttccttcgtcacactcactccgcacgtcctccctccggtcgtccgtactaaggatatagtcatagactc

SEQ ID NO: 40053 - DNA, 96 bp, Fusarium cuneirostrum
  misc_feature: 37
cgtagaaaagatatgcgtcagataagcgacgcagtaatatgctctcaagaatagcatatcatccgactccatcggacattcaagtgcttcctgcac

SEQ ID NO: 40054 - DNA, 96 bp, Fusarium cuneirostrum
  misc_feature: 37
cctttaaagttccccagactctcagttgcagcacgccgcttattatctcatatccgagataatctagaatgacggtaaatgataatcgatgacgac

SEQ ID NO: 40055 - DNA, 96 bp, Fusarium cuneirostrum
  misc_feature: 37
gacagcagtcaaacatgaatgcaggatgcgactgaagtgagtgcacgaggagaaataaaagagggggagacggacgtcgacccagacacacccgac

SEQ ID NO: 40056 - DNA, 96 bp, Fusarium cuneirostrum
  misc_feature: 37
gtcgccctacgggctccgtatttaaaaaaggaatggaagacctctctccgcgaggctcgtaactctttactcgagtttattagatagtccatccct

SEQ ID NO: 40057 - DNA, 96 bp, Fusarium cuneirostrum
  misc_feature: 37
ggcttgcattcaagtcggagcgaatgccaatcttggcttcatgggcacacgcgagtcatcccgaatcatgcgctgctgtcgatgacatcagtcgac

SEQ ID NO: 40058 - DNA, 96 bp, Fusarium cuneirostrum
  misc_feature: 37
gtccgtcgtatacaatgacctccggtcaaataaaaaagtaaaggtcgttggatccccaactccagaaagcgtcctacgacagctcaatatataacc

SEQ ID NO: 40059 - DNA, 96 bp, Fusarium cuneirostrum
  misc_feature: 37
gtcacattaaaatgttatttaaaaaaggaatgactcgccccagtaaagtggtggctcgctcaatcaatcaagttatgtcacaggttacacaaaatg

SEQ ID NO: 40060 - DNA, 96 bp, Fusarium cuneirostrum
  misc_feature: 37
gtagtggagcgaacactaaataaaaggctccaacagaagtgagcgacacgtaattgtgatgttgtgcgtataaatggtatcgtgaatgtgtttgtg

SEQ ID NO: 40061 - DNA, 96 bp, Fusarium cuneirostrum
  misc_feature: 37
gtaggttatggatgaggctcgctcagtagccagtcacgcattgaagctattcccaactcccgttcgggaaatctcacttccacagaaaagtctcct

SEQ ID NO: 40062 - DNA, 96 bp, Fusarium cuneirostrum
  misc_feature: 37
cataatacatgtgaagctatcgtcactacaacatcaggtaatcatagaacaaaacacatgatgtaacatcaccataatcatatcaaattttgctac

SEQ ID NO: 40063 - DNA, 96 bp, Fusarium cuneirostrum
  misc_feature: 37
aaagacgctctatacgctcctgtgatccagatcttgccctttcttctgttagaaacgtgctatgattgccaggctggttattttctaatgccttac

SEQ ID NO: 40064 - DNA, 96 bp, Fusarium cuneirostrum
  misc_feature: 37
gtaagaagacatgggaatggcttcatccataaatgagtcctgagggcgaggaggaacgacgcagcctgaaggattgactagtagagtctcatctgc

SEQ ID NO: 40065 - DNA, 96 bp, Fusarium cuneirostrum
  misc_feature: 37
ggttctcttttaccactacaataacagttcactcttctcgttcacaaatgcacaatcaattcaaatcacaagtcatacatcaaagtcatgtctgct

SEQ ID NO: 40066 - DNA, 96 bp, Fusarium cuneirostrum
  misc_feature: 37
ctattaatctcttatagactaacgcgagtgacccggaacggggcaaacgagcgtccataactttggtctataagaggtttttttccaaaacgcacc

SEQ ID NO: 40067 - DNA, 96 bp, Fusarium cuneirostrum
  misc_feature: 37
acttccacatcaggcaactctacaaatctcaccaagttcacattgcatctatctacactaaaaatctccaagatcgtcatcgacccattcatcacc

SEQ ID NO: 40068 - DNA, 96 bp, Fusarium cuneirostrum
  misc_feature: 37
gcgcattgactgttggtcaattgatgatgttatcgtgagcagtgaccttgcgaccttgctcattattataacctcgcgacgggttcgtccctcacc

SEQ ID NO: 40069 - DNA, 96 bp, Fusarium cuneirostrum
  misc_feature: 37
aatgatagagcgaaagcgatcacgaacgggtgagtgataatgatttgtgtctggacacatgtgcacgagacgggcacacatatatactaatcgacc

SEQ ID NO: 40070 - DNA, 96 bp, Fusarium cuneirostrum
  misc_feature: 37
cagctgagtaagaaagggtctcgaatccctctcaaccgtgcttccgcaaacagagaaaatagaaaaagacagcgacgtccgtcgtatacaatgacc

SEQ ID NO: 40071 - DNA, 96 bp, Fusarium cuneirostrum
  misc_feature: 37
ctgaaacttctctacattcgcagtgagcaactatgaaagggccaaatattaattagatttgagatatgacctggcttactcccatttcctcctacc

SEQ ID NO: 40072 - DNA, 96 bp, Fusarium cuneirostrum
  misc_feature: 37
ctagcaaaaaggctcgctaaaaaacgaaggtatcgcaacatccaaaacaggaaacaatgtagactaatctaagatacaaaacctccgaaaacgccc

SEQ ID NO: 40073 - DNA, 96 bp, Fusarium cuneirostrum
  misc_feature: 37
caagataaatcccgaggacccgtcctctcatgcgcgacgcgccatcacaactcgactcttcgtctcggtccatatcgtcgccggtccccgtctccc

SEQ ID NO: 40074 - DNA, 96 bp, Fusarium cuneirostrum
  misc_feature: 37
gggaagactgagggattggcaatagtcattacaccgccggaggcccgagtcggaactgtataatcctacggagcccggagggcgacgtgcggagtg

SEQ ID NO: 40075 - DNA, 96 bp, Fusarium cuneirostrum
  misc_feature: 37
ggcgagacaataacatttaaatacacttctttaaacttgtcgagcaccatttccctccctaatggcgagccatcgtgactgattgtaattgtaatt

SEQ ID NO: 40076 - DNA, 96 bp, Fusarium cuneirostrum
  misc_feature: 37
ggaggaaatgggagtaagccaggtcatatctcaaatctaattaatatttggccctttcatagttgctcactgcgaatgtagagaagtttcagggcc

SEQ ID NO: 40077 - DNA, 96 bp, Fusarium cuneirostrum
  misc_feature: 37
aacgttccgtccacaatctcataccccgcagacagagtcgaggagtataagacagcgtcttttcccccgagagggcagagggaagagtttccctcc

SEQ ID NO: 40078 - DNA, 96 bp, Fusarium cuneirostrum
  misc_feature: 37
ccatcgctccgctcggggtagaattatacagtcatggactcggccctgcgggcagctgcactactcttgccaatccggctccgtcgtccctcctcc

SEQ ID NO: 40079 - DNA, 96 bp, Fusarium cuneirostrum
  misc_feature: 37
ggacacgggacagtgaagaatgaacgtgtgtacccaggagtaatcgtcttgagtcagcttgctgaccttgacgaccccagtcaatagacatccgag

SEQ ID NO: 40080 - DNA, 96 bp, Fusarium cuneirostrum
  misc_feature: 37
ggaatagtcccgaatcccgaggacgaaggacgcagggtgagggattgacaagagtatgttggcaacccatgaagagttacgagcgcccgcggaggg

SEQ ID NO: 40081 - DNA, 96 bp, Fusarium cuneirostrum
  misc_feature: 37
ggaatacatttacagtcaccaacataaacattcacaatctgaaatcatgctcgccaagtgaaaaaaagtagtggttctcgacacattaaaagtggt

SEQ ID NO: 40082 - DNA, 96 bp, Fusarium cuneirostrum
  misc_feature: 37
ggaagctcactgcgttcgctaacaatcagtacctgattcccgactccgtctcaggatttgactcaccaaatctcagaaacgaacacatacaaattt

SEQ ID NO: 40083 - DNA, 96 bp, Fusarium cuneirostrum
  misc_feature: 37
gaagaaagaagaaagaagaaagaagaaagaagaaagaagaaagaagaaagaagaaagaagaaagaagaaacctactgctcaagcggttgagtttcc

SEQ ID NO: 40084 - DNA, 96 bp, Fusarium cuneirostrum
  misc_feature: 37
gcggatgcgcgaccgacagaagtgtgtcgagggtcgagcagacccgagccagaaacgagctcaaaactggaacagttttttggtgagttcaatcct

SEQ ID NO: 40085 - DNA, 96 bp, Fusarium cuneirostrum
  misc_feature: 37
cagattaaaacatgctcgctatatataaatgcgggagctcactaatatgtgtgccctttttagtttatgtgcgctccgtctttatttaatgctcgc

SEQ ID NO: 40086 - DNA, 96 bp, Fusarium cuneirostrum
  misc_feature: 37
gcctgaggcacgaaggcgaagagtgtaggatcatggaggagggacgacgcaatgatcggttgactaaggacgggaacgaatggaatgagtggaggc

SEQ ID NO: 40087 - DNA, 96 bp, Fusarium cuneirostrum
  misc_feature: 37
actgtgcactgtgaatgtaaatgtaaatgtaaatgtcttcttttattgttttcactgagtccggcggaggaggagggacgacggagccggattggc

SEQ ID NO: 40088 - DNA, 96 bp, Fusarium cuneirostrum
  misc_feature: 37
acgataacatcatcaattgaccaacagtcaatgcgcacatcgaaagatgataccgaagtgggtgtacgaggtgagtagatgagggagtgcggatgc

SEQ ID NO: 40089 - DNA, 96 bp, Fusarium cuneirostrum
  misc_feature: 37
gcatacttctctcctaatagctataatattattatagatatcctattaagtcactaaagaattgtaattctattatatatatatttagatatctct

SEQ ID NO: 40090 - DNA, 96 bp, Fusarium cuneirostrum
  misc_feature: 37
ccttatacttgtctcgcaccctcgcaagtaagattatgtccgtacataacgtactaccatgagtgggccccatcatcccacacgtccactccttgc

SEQ ID NO: 40091 - DNA, 96 bp, Fusarium cuneirostrum
  misc_feature: 37
gatttcagattgtgaatgtttatgttggtgactgtaaatgtattcctcatccatgagtcccgagcggatgagtgagcgtagcgaaggaagactgag

SEQ ID NO: 40092 - DNA, 96 bp, Fusarium cuneirostrum
  misc_feature: 37
ccctcctactttactcacgtcatgacccacactccgggtcattcttcactgtcgtgtttgactctgcgtcaattgaaggcatcacaacaaagcatc

SEQ ID NO: 40093 - DNA, 96 bp, Fusarium cuneirostrum
  misc_feature: 37
gatatatattctatagcttcttagagtttattatttatttaaatataattaaaataaggtcccctttatttatattattataaataattaagtctt

SEQ ID NO: 40094 - DNA, 96 bp, Fusarium cuneirostrum
  misc_feature: 37
acaaaatgaggttatcacgatatctacattgggaaaagtctactactacgccgactcaatctcttccaataccttccggaaacgaactctcctatc

SEQ ID NO: 40095 - DNA, 96 bp, Fusarium cuneirostrum
  misc_feature: 37
gataataatacttaaataaacttgacgagcaccactcgactttaaatatggcgagcacttacttaatgtgacttttgtaattatttgtgactgtag

SEQ ID NO: 40096 - DNA, 96 bp, Fusarium cuneirostrum
  misc_feature: 37
gagttcgtttccggaaggtattggaagagattgagtcggcgtagtagtagacttttcccaatgtagatatcgtgataacctcattttgtgtaacct

SEQ ID NO: 40097 - DNA, 96 bp, Fusarium cuneirostrum
  misc_feature: 37
gagtaactgtacatcgcaagactcaaaatctaccggattttgggacttttcagaaactggcacagttttaatatgggttgcgatctggcgtttggt

SEQ ID NO: 40098 - DNA, 96 bp, Fusarium cuneirostrum
  misc_feature: 37
catcttacactctctcgtcgatgcatacgcattgaagatattcccaacatgccgtcgggtcagattaactcaactgtcgtgagttcttgtaacctc

SEQ ID NO: 40099 - DNA, 96 bp, Fusarium cuneirostrum
  misc_feature: 37
ccgttggtcgttggttgtcaatcgacaagggtgtcgtgccgtccaccacaaagaaacagccctcctgtttccaagaataatactcgtcccagcctc

SEQ ID NO: 40100 - DNA, 96 bp, Fusarium cuneirostrum
  misc_feature: 37
gaggatttctggaaatccgacaatttttttccttctttacattcgggttgaactgtgttcatcgctttgcaagagcaaacgaacccgtatatccat

SEQ ID NO: 40101 - DNA, 96 bp, Fusarium cuneirostrum
  misc_feature: 37
actacaacggtttctcgaaagccgcagttaactctgctcctaaaagccgctctaacagatcggaagagcgtcgtgtagggaaagagtgtagatctc

SEQ ID NO: 40102 - DNA, 96 bp, Fusarium cuneirostrum
  misc_feature: 37
gagaaggcattaactaagatattaattaaataattaattaagatataggctaagataatattaaggaaggtattaataataaagcagctaaggcag

SEQ ID NO: 40103 - DNA, 96 bp, Fusarium cuneirostrum
  misc_feature: 37
gactgtgacttagtgtgcgagtgattgattaaattgtaatcgtagatgtgaatgtgaataacttcaaaagtattttcccgaggccgaggacgtagg

SEQ ID NO: 40104 - DNA, 96 bp, Fusarium cuneirostrum
  misc_feature: 37
gactcaaaatctaccggattttgggacttttcagaaactggcacagttttaatatgggttgcgatctggcgtttggtgtgagcaaacgtgagaacg

SEQ ID NO: 40105 - DNA, 96 bp, Fusarium cuneirostrum
  misc_feature: 37
gaattacggaggcgtaagccgacgtgcagtacgagaccgaggaacgaggtcgaagtggtgctagataatgtgaagaggtgaagtgcgaataacttc

SEQ ID NO: 40106 - DNA, 96 bp, Fusarium cuneirostrum
  misc_feature: 37
gaagaatataaaatagaataaaggaaataaaagaaaagaaaaatatagggttagggttagggttagggttagggttagggttagggttagggttag

SEQ ID NO: 40107 - DNA, 96 bp, Fusarium cuneirostrum
  misc_feature: 37
aaagaagccatcgtcatctccgaattaggcaacctcgcggtatgctggtggattaccgctccgtccacacgcctccgcaatcttaaaacacagttc

SEQ ID NO: 40108 - DNA, 96 bp, Fusarium cuneirostrum
  misc_feature: 37
gaaactcaaccgcttgagcagtaggtttcttctttcttctttcttctttcttctttcttctttcttctttcttctttcttctttcttctttcttct

SEQ ID NO: 40109 - DNA, 96 bp, Fusarium cuneirostrum
  misc_feature: 37
cttttgaggactttatagtcgatattcttcagtcctttacatagccactagctataggttataagtgagaataatctatcgattatatattccggg

SEQ ID NO: 40110 - DNA, 96 bp, Fusarium cuneirostrum
  misc_feature: 37
cttaatcccaaaaatccgcttatagaccaaagttatggacgctcgtttgccccgttccgggtcactcgcgttagtctataagctggaaagctccct

SEQ ID NO: 40111 - DNA, 96 bp, Fusarium cuneirostrum
  misc_feature: 37
ctgtttaatatggggcgaggcaaataaatacgttttaaatagactcgtttgacgagccccaattactattttatgcgagcagacatgactttgatg

SEQ ID NO: 40112 - DNA, 96 bp, Fusarium cuneirostrum
  misc_feature: 37
ctgcgtttcccgcagatggctcatttgccacggtaccgcgttcttgacacgttccgatcaacaattaaccatccaaaatccaagtctatttgtgag

SEQ ID NO: 40113 - DNA, 96 bp, Fusarium cuneirostrum
  misc_feature: 37
ctgcaccttattcgtcgttcctcctcataacgttccgtccacccgcacttcagtcggtcccctccttctcgtgcttacttactccactcttcttcg

SEQ ID NO: 40114 - DNA, 96 bp, Fusarium cuneirostrum
  misc_feature: 37
agcgccgagacttgacgattaggcaagaatgatagagcgaaagcgatcacgaacgggtgagtgataatgatttgtgtctggacacatgtgcacgag

SEQ ID NO: 40115 - DNA, 96 bp, Fusarium cuneirostrum
  misc_feature: 37
aggaacgacgaataaggtgcagcgtagcgatccgggcataagtggatactgacgagggggcgaggaagtataagacggaacgtctgcccctgcgag

SEQ ID NO: 40116 - DNA, 96 bp, Fusarium cuneirostrum
  misc_feature: 37
cacttcatactttatttaatcgagcgagctgtgcatatgtgacattattattattttgaatcgtagtcgtgatcatgtacccaagatagtcctgag

SEQ ID NO: 40117 - DNA, 96 bp, Fusarium cuneirostrum
  misc_feature: 37
ctcaagtcttcgactgcgtcctcgcaggggcagacgttccgtcttatacttcctcgccccctcgtcagtatccacttatgcccggatcgctacgct

SEQ ID NO: 40118 - DNA, 96 bp, Fusarium cuneirostrum
  misc_feature: 37
catcgcaagactcaaaatctaccggattttgggacttttcagaaactggcacagttttaatatgggttgcgatctggcgtttggtgtgagcaaacg

SEQ ID NO: 40119 - DNA, 96 bp, Fusarium cuneirostrum
  misc_feature: 37
aaatcctgagaatgggccgagaaatcggtcacttctgttaacgaagtcactttttcttggtggcggagacaccaagctacgcttatatcactaccg

SEQ ID NO: 40120 - DNA, 96 bp, Fusarium cuneirostrum
  misc_feature: 37
acttacatccgacaacaaagattgtctctggcgctctgcgcccatgtgcatctccgatgctctcctgtcctcctccgtcgtccttcctcgcactcg

SEQ ID NO: 40121 - DNA, 96 bp, Fusarium cuneirostrum
  misc_feature: 37
aaagaaacagccctcctgtttccaagaataatactcgtcccagcctcgtccttactcgaaataaataatcgatcgtcgctccactcctattgctcg

SEQ ID NO: 40122 - DNA, 96 bp, Fusarium cuneirostrum
  misc_feature: 37
acaattacaattacaatcagtcacgatggctcgccattagggagggaaatggtgctcgacaagtttaaagaagtgtatttaaatgttattgtctcg

SEQ ID NO: 40123 - DNA, 96 bp, Fusarium cuneirostrum
  misc_feature: 37
cctgtcccctcccctaccggtccgggtccacatacgtcctcgtgccctgcatctcggctcattccatttcattcatgtgcgacgaagccatcgtcg

SEQ ID NO: 40124 - DNA, 96 bp, Fusarium cuneirostrum
  misc_feature: 37
aagagagataggaggtaaataggcagtggaattagtccttataaaaagctaattaataaaataaggaattatatagctagaaaagtaggttaaagg

SEQ ID NO: 40125 - DNA, 96 bp, Fusarium cuneirostrum
  misc_feature: 37
cctgtcatgtcaaccgagcggggcgaggggattgagtttaggcgtttgcctaacaaagtgcaggaagcacttgaatgtccgatggagtcggatgat

SEQ ID NO: 40126 - DNA, 96 bp, Fusarium cuneirostrum
  misc_feature: 37
attaaagaaataagacctcattcttttatatcgtcttaaaattttattttatttttacaattctttttatatatcatacattaataacgcaagagg

SEQ ID NO: 40127 - DNA, 96 bp, Fusarium cuneirostrum
  misc_feature: 37
atttcagattgtgaatgtttatgttggtgactgtaaatgtattcctcatccatgagtcccgagcggatgagtgagcgtagcgaaggaagactgagg

SEQ ID NO: 40128 - DNA, 96 bp, Fusarium cuneirostrum
  misc_feature: 37
ccgtgacacaagtgtccctccccagctttgtaatcagctaaagcttgaaaacaaaacctcttatagaccaaagttatggacgctcgtttgccccgt

SEQ ID NO: 40129 - DNA, 96 bp, Fusarium cuneirostrum
  misc_feature: 37
ccctaaccctaaccctaaccctaaccctaaccctaaccctaaccctaaccctatatttttcttttcttttatttcctttattctattttatattct

SEQ ID NO: 40130 - DNA, 96 bp, Fusarium cuneirostrum
  misc_feature: 37
attaagataaacccgggttaataataactaatatatatagtaataagcttctctatactcttaattaactaataattatagttaataaatagcggg

SEQ ID NO: 40131 - DNA, 96 bp, Fusarium cuneirostrum
  misc_feature: 37
cccatcatcccacacgtccactccttgcaccactgtgcatcgttcccttattacgcctccacttcggtcctacgttccctccgtgtcgttattgat

SEQ ID NO: 40132 - DNA, 96 bp, Fusarium cuneirostrum
  misc_feature: 37
aaatagggagcctgaggcacgaaggcgaagagtgtaggatcatggaggagggacgacgcaatgatcggttgactaaggacgggaacgaatggaatg

SEQ ID NO: 40133 - DNA, 96 bp, Fusarium cuneirostrum
  misc_feature: 37
cacgataacatcatcaattgaccaacagtcaatgcgcacatcgaaagatgataccgaagtgggtgtacgaggtgagtagatgagggagtgcggatg

SEQ ID NO: 40134 - DNA, 96 bp, Fusarium cuneirostrum
  misc_feature: 37
caggactcatttatggatgaagccattcccatgtcttcttactacgactacgttcatatcacatttcatttaaggtcacatacaaatcacaagtat

SEQ ID NO: 40135 - DNA, 96 bp, Fusarium cuneirostrum
  misc_feature: 37
agtaagaagacatgggaatggcttcatccataaatgagtcctgagggcgaggaggaacgacgcagcctgaaggattgactagtagagtctcatctg

SEQ ID NO: 40136 - DNA, 96 bp, Fusarium cuneirostrum
  misc_feature: 37
cacaaaatgaggttatcacgatatctacattgggaaaagtctactactacgccgactcaatctcttccaataccttccggaaacgaactctcctat

SEQ ID NO: 40137 - DNA, 96 bp, Fusarium cuneirostrum
  misc_feature: 37
caaggtatctacgattgacaatccctctcgcacaccgtcgcatgcgctcctcctgctacgggactattatggtgtgggttgaagctattcgcaagt

SEQ ID NO: 40138 - DNA, 96 bp, Fusarium cuneirostrum
  misc_feature: 37
accgagcggggcgaggggattgagtttaggcgtttgcctaacaaagtgcaggaagcacttgaatgtccgatggagtcggatgatatgctattcttg

SEQ ID NO: 40139 - DNA, 96 bp, Fusarium cuneirostrum
  misc_feature: 37
caaccgagcggggcgaggggattgagtttaggcgtttgcctaacaaagtgcaggaagcacttgaatgtccgatggagtcggatgatatgctattct

SEQ ID NO: 40140 - DNA, 96 bp, Fusarium cuneirostrum
  misc_feature: 37
acttatggttgtaccaaacgtacggacgtaatacccatgcacgcagacagtggtcgagtacataaacccagagggttttcttttcatctaatgttg

SEQ ID NO: 40141 - DNA, 96 bp, Fusarium cuneirostrum
  misc_feature: 37
caacagctctccagctgagtaagaaagggtctcgaatccctctcaaccgtgcttccgcaaacagagaaaatagaaaaagacagcgacgtccgtcgt

SEQ ID NO: 40142 - DNA, 96 bp, Fusarium cuneirostrum
  misc_feature: 37
actacgattcaaaataataataatgtcacatatgcacagctcgctcgattaaataaagtatgaagtggtgctcgtcaaaagtatatttagtgtttg

SEQ ID NO: 40143 - DNA, 96 bp, Fusarium cuneirostrum
  misc_feature: 37
attgctgctgaattgttggtaggatacggagctattcccttcttgaatatttctgagccaagacatccttaggtcagcaatcattttgtcgagctt

SEQ ID NO: 40144 - DNA, 96 bp, Fusarium cuneirostrum
  misc_feature: 37
atgttgtagtgacgatagcttcacatgtattatgggcgagcattaaataaagacggagcgcacataaactaaaaagggcacacatattagtgagct

SEQ ID NO: 40145 - DNA, 96 bp, Fusarium cuneirostrum
  misc_feature: 37
actcgcttgttcaagctcgagcaggcacaaaagtaaaaaaacagaagcaagttcatgttttgcgcgacagcgctgaagaagtgggcgtccgcccat

SEQ ID NO: 40146 - DNA, 96 bp, Fusarium cuneirostrum
  misc_feature: 37
atcgcttgaccgtgacgatttcctcctttggattagtacagtttttgaagagcgtgacgatttcctaattaggttagcatagataagctgtcccat

SEQ ID NO: 40147 - DNA, 96 bp, Fusarium cuneirostrum
  misc_feature: 37
atcacaaacacattcacgataccatttatacgcacaacatcacaattacgtgtcgctcacttctgttggagccttttatttagtgttcgctccact

SEQ ID NO: 40148 - DNA, 96 bp, Fusarium cuneirostrum
  misc_feature: 37
aagacagcgtcttttcccccgagagggcagagggaagagtttccctcctacatcatctgtctgagctcagagagcgagtcgatcttggattcctat

SEQ ID NO: 40149 - DNA, 96 bp, Fusarium cuneirostrum
  misc_feature: 37
aaattaatatatttttaatatattacctttagcttatattaccttttataaaagatatcctcgctaatttattattaaattagctttagactttct

SEQ ID NO: 40150 - DNA, 96 bp, Fusarium cuneirostrum
  misc_feature: 37
aatagtcattacaccgccggaggcccgagtcggaactgtataatcctacggagcccggagggcgacgtgcggagtgagtgtgacgaaggaacacgt

SEQ ID NO: 40151 - DNA, 96 bp, Fusarium cuneirostrum
  misc_feature: 37
aattaagttaagggttaaggttaagtaattataataaaaattaagaggaataattaagttaagggttaattaaggggagtaattaagttaagagtt

SEQ ID NO: 40152 - DNA, 96 bp, Fusarium cuneirostrum
  misc_feature: 37
aatacgctgggcgttttcggaggttttgtatcttagattagtctacattgtttcctgttttggatgttgcgataccttcgttttttagcgagcctt

SEQ ID NO: 40153 - DNA, 96 bp, Fusarium cuneirostrum
  misc_feature: 36
ctcgataataagaatatactctatcttattatatttctcttgctttaatacttctagcttataaagtctctaattaagtataaactttataaaaaa

SEQ ID NO: 40154 - DNA, 96 bp, Fusarium cuneirostrum
  misc_feature: 36
tttgtagagttgcctgatgtggaagtgatgatgacttcaattacgtagattttagagcgagtactaagtaggtagggagcgaggctgaaaaaccta

SEQ ID NO: 40155 - DNA, 96 bp, Fusarium cuneirostrum
  misc_feature: 36
tttgctcttgcaaagcgatgaacacagttcaacccgaatgtaaagaaggaaaaaaattgtcggatttccagaaatcctctgtcttgcgacaccctt

SEQ ID NO: 40156 - DNA, 96 bp, Fusarium cuneirostrum
  misc_feature: 36
tagcctcacctttttttgactttgtgactttgagactttgactgtgatgatgactacttgtgagcccttgacataacataagcagggcgaggcaaa

SEQ ID NO: 40157 - DNA, 96 bp, Fusarium cuneirostrum
  misc_feature: 36
caaactcaatccaattgctaattacttgtgccttggcaacaaagagacgccccagttctgcgtaaccaacacttgccctcgcagagcctcatcaaa

SEQ ID NO: 40158 - DNA, 96 bp, Fusarium cuneirostrum
  misc_feature: 36
tttcttctttcttctttcttctttcttctttcttctttcttctttcttctttcttctttcttctttcttctttcttctttcttctttcttctttct

SEQ ID NO: 40159 - DNA, 96 bp, Fusarium cuneirostrum
  misc_feature: 36
tttctggaaatccgacaatttttttccttctttacattcgggttgaactgtgttcatcgctttgcaagagcaaacgaacccgtatatccatatcgg

SEQ ID NO: 40160 - DNA, 96 bp, Fusarium cuneirostrum
  misc_feature: 36
tataaaccgctataaaccgctgcgaactactataaaccgctataaaccgctatgaaccgctataaaccactataaaccactataaaccactataaa

SEQ ID NO: 40161 - DNA, 96 bp, Fusarium cuneirostrum
  misc_feature: 36
tttacctcctagctatattaaagattaataagatttataatatagtagtatatttagctttatatataagggtattttcttactaaagatactaaa

SEQ ID NO: 40162 - DNA, 96 bp, Fusarium cuneirostrum
  misc_feature: 36
tttaaattggcgagcactttgtgaatgaacgacttaatcaccacttgaggcccgagccgacgagcgagcgtagcgaaggaggagcggagggcttga

SEQ ID NO: 40163 - DNA, 96 bp, Fusarium cuneirostrum
  misc_feature: 36
ttggtgtctccgccaccaagaaaaagtgacttcgttaacagaagtgaccgatttctcggcccattctcaggatttggctcaccaaatgccagaatc

SEQ ID NO: 40164 - DNA, 96 bp, Fusarium cuneirostrum
  misc_feature: 36
atgtaatgcagacatcgatatctagcgaggtgcgccatgtttcccggagcaagcgacatcgtcataatctgaacaaagcctgcagctaaaaagcaa

SEQ ID NO: 40165 - DNA, 96 bp, Fusarium cuneirostrum
  misc_feature: 36
tagggagcgaggctgaaaaacctagagcttacagtagggtgagctcccgcacttgtgttacgcgagcatatataaagtagatggtgataacctcaa

SEQ ID NO: 40166 - DNA, 96 bp, Fusarium cuneirostrum
  misc_feature: 36
ttgacgcagagtcaaacacgacagtgaagaatgacccggagtgtgggtcatgacgtgagtaaagtaggagggagcctgtggggcgaccgtaagaca

SEQ ID NO: 40167 - DNA, 96 bp, Fusarium cuneirostrum
  misc_feature: 36
cgggtgtgtctgggtcgacgtccgtctccccctcttttatttctcctcgtgcactcacttcagtcgcatcctgcattcatgtttgactgctgtcaa

SEQ ID NO: 40168 - DNA, 96 bp, Fusarium cuneirostrum
  misc_feature: 36
ttgaaagctccaggctcattggctagcagtgcgtgccgccgactgctaagcagatcaagattttatccaacgctgcaattagcttgctgtttggta

SEQ ID NO: 40169 - DNA, 96 bp, Fusarium cuneirostrum
  misc_feature: 36
agtacaaaaggcgcggagcgcccacctggaaggtcatctgaacttggttcagtttgttgattgaggcagcgccgagacttgacgattaggcaagaa

SEQ ID NO: 40170 - DNA, 96 bp, Fusarium cuneirostrum
  misc_feature: 36
ttctcactctgattccaggtcgttgcccatacaatctcagaaatcttcccatacaaaatttgtacaaattttgtatgggaagatttctgagattgt

SEQ ID NO: 40171 - DNA, 96 bp, Fusarium cuneirostrum
  misc_feature: 36
ttcgggtctctacaaaatcaaaacatttacatctgctgggctccctctcggcacacgcccaagatactgtccacaacctcatctagtacaattggc

SEQ ID NO: 40172 - DNA, 96 bp, Fusarium cuneirostrum
  misc_feature: 36
ttcatttatctttatgcgagcacttatctggaaccaacagctcgccgtaatgaatccaaaaagtaagcctaaaggcgagcgactgtgacttagtgt

SEQ ID NO: 40173 - DNA, 96 bp, Fusarium cuneirostrum
  misc_feature: 36
ttattttttattttactttctctttattttttatttactctctttattattacttcttcttattattaaccctctcttaccccccttttaactcta

SEQ ID NO: 40174 - DNA, 96 bp, Fusarium cuneirostrum
  misc_feature: 36
ttattaattatatcggaaaggtaattaagattaataattaataattctcgtaaaagaaattataaaacctaagaattagtaattataaggttaata

SEQ ID NO: 40175 - DNA, 96 bp, Fusarium cuneirostrum
  misc_feature: 36
taactccccgagcagagactgctttaatctaccgaacgtagtgaggtgcggagtgaagatggagacggagtcgacatcgtaacgaggttactataa

SEQ ID NO: 40176 - DNA, 96 bp, Fusarium cuneirostrum
  misc_feature: 36
tattttttattttactttctctttattttttatttactctctttattattacttcttcttattattaaccctctcttaccccccttttaactctaa

SEQ ID NO: 40177 - DNA, 96 bp, Fusarium cuneirostrum
  misc_feature: 36
tgaaggcacatttaaatctgctaccaaggcacatttatgagaaaactacattccctaccaattattgtaaacgtgccttgaccaaggcacatttaa

SEQ ID NO: 40178 - DNA, 96 bp, Fusarium cuneirostrum
  misc_feature: 36
ttaaacaagcctatagactagcacgagtgagctgggtaccagcgaaacgagggctgataactttggtctataagcggtttcctttcaaacgcgtgc

SEQ ID NO: 40179 - DNA, 96 bp, Fusarium cuneirostrum
  misc_feature: 36
cctttaggatataattaaatagtatatcgataataaaattaaagttaaggataatatagcgatttatatatagagagagataatattagattttaa

SEQ ID NO: 40180 - DNA, 96 bp, Fusarium cuneirostrum
  misc_feature: 36
ttaaaactcgagctgatcaaggagctcatgccagctgttacaatgaaattgttgaaatgagaagatgctaattgcttaattcatcctaaaagtgca

SEQ ID NO: 40181 - DNA, 96 bp, Fusarium cuneirostrum
  misc_feature: 36
gagttacgagcgcccgcggagggccgagtctatgactatatccttagtacggacgaccggagggaggacgtgcggagtgagtgtgacgaaggaaca

SEQ ID NO: 40182 - DNA, 96 bp, Fusarium cuneirostrum
  misc_feature: 36
tgttacgcgagcatatataaagtagatggtgataacctcaaaagagtccacgagccgagcgcgtagcgtgcaggcgaggggattgtcaatgtaatt

SEQ ID NO: 40183 - DNA, 96 bp, Fusarium cuneirostrum
  misc_feature: 36
cgtggtttattcttttgtatcacggagtgatgaacgagatggttcgagtgcgaggaaggacgacggaggaggacaggagagcatcggagatgcaca

SEQ ID NO: 40184 - DNA, 96 bp, Fusarium cuneirostrum
  misc_feature: 36
cctcacttcgtgctcgctacgctctcactccgttccgcaccttcgcttcgctcggtattgagaccacagtctctgcttggagatgaactcttcaca

SEQ ID NO: 40185 - DNA, 96 bp, Fusarium cuneirostrum
  misc_feature: 36
tgtctgcggggtatgagattgtggacggaacgttcgtacctctctcatttgtccgtccaacaaaaccgacctccactcagtcccttcgttcccggt

SEQ ID NO: 40186 - DNA, 96 bp, Fusarium cuneirostrum
  misc_feature: 36
tgtctcaccctcaccactcgccgtctagctcgtggttctcttttaccactacaataacagttcactcttctcgttcacaaatgcacaatcaattca

SEQ ID NO: 40187 - DNA, 96 bp, Fusarium cuneirostrum
  misc_feature: 36
tgtcccctcccctaccggtccgggtccacatacgtcctcgtgccctgcatctcggctcattccatttcattcatgtgcgacgaagccatcgtcgag

SEQ ID NO: 40188 - DNA, 96 bp, Fusarium cuneirostrum
  misc_feature: 36
gagccatcgtgactgattgtaattgtaattgtaattgtagtgttagatggaattgtgacgtagaatgtgaatggaacaggagtggtgagagttaca

SEQ ID NO: 40189 - DNA, 96 bp, Fusarium cuneirostrum
  misc_feature: 36
tggtgtctccgccaccaagaaaaagtgacttcgttaacagaagtgaccgatttctcggcccattctcaggatttggctcaccaaatgccagaatcg

SEQ ID NO: 40190 - DNA, 96 bp, Fusarium cuneirostrum
  misc_feature: 36
cagaggtgcagttccctcacaagatcctccgtcgtaacctccttcggtgctacaagataaatcccgaggacccgtcctctcatgcgcgacgcgcca

SEQ ID NO: 40191 - DNA, 96 bp, Fusarium cuneirostrum
  misc_feature: 36
tggataggagagttcgtttccggaaggtattggaagagattgagtcggcgtagtagtagacttttcccaatgtagatatcgtgataacctcatttt

SEQ ID NO: 40192 - DNA, 96 bp, Fusarium cuneirostrum
  misc_feature: 36
tgcgtttcccgcagatggctcatttgccacggtaccgcgttcttgacacgttccgatcaacaattaaccatccaaaatccaagtctatttgtgagt

SEQ ID NO: 40193 - DNA, 96 bp, Fusarium cuneirostrum
  misc_feature: 36
ataaaaggcggtcactccttcgagtaaaaaggtcggtagttcagacaacctccgcttcagcagatccgcgtccaagaagcagatcgtcacagcgca

SEQ ID NO: 40194 - DNA, 96 bp, Fusarium cuneirostrum
  misc_feature: 36
agaatttagtcctcaaactcaatccaattgctaattacttgtgccttggcaacaaagagacgccccagttctgcgtaaccaacacttgccctcgca

SEQ ID NO: 40195 - DNA, 96 bp, Fusarium cuneirostrum
  misc_feature: 36
tgcgaacgacagtgagcattaatctcttacactaccgcgaggaaccagggtacctggtttttcgagcgggttataactttggtgatataagaggat

SEQ ID NO: 40196 - DNA, 96 bp, Fusarium cuneirostrum
  misc_feature: 36
gtatagcactcctctcgtcgtgtgtacgcggtcgcgtacataaagaacaagatcgatcactcgatcaaactcgtccctcgctctttcttacttgca

SEQ ID NO: 40197 - DNA, 96 bp, Fusarium cuneirostrum
  misc_feature: 36
atgttgccttctccaagcgctagagacgaacaaactaatagaaaatcagagtaaacatcttgtaactattattgctactaaagtacacctcaatca

SEQ ID NO: 40198 - DNA, 96 bp, Fusarium cuneirostrum
  misc_feature: 36
atgacccacactccgggtcatcttacacacagtgacatttcatgtttacgtgaggggattcacagagcgcatctctgttgaattaaagtaacatca

SEQ ID NO: 40199 - DNA, 96 bp, Fusarium cuneirostrum
  misc_feature: 36
tgatcttgtcctttctatttgtagcgattgtggtcgctacgaacttgtggagagatattatctccgttgtcgacagggcttgacttggcagctgtc

SEQ ID NO: 40200 - DNA, 96 bp, Fusarium cuneirostrum
  misc_feature: 36
ctactcaacaaccctttcgggtctctacaaaatcaaaacatttacatctgctgggctccctctcggcacacgcccaagatactgtccacaacctca

SEQ ID NO: 40201 - DNA, 96 bp, Fusarium cuneirostrum
  misc_feature: 36
cacatgtgtccagacacaaatcattatcactcacccgttcgtgatcgctttcgctctatcattcttgcctaatcgtcaagtctcggcgctgcctca

SEQ ID NO: 40202 - DNA, 96 bp, Fusarium cuneirostrum
  misc_feature: 36
cttcgcgacactgtttcggtgtcagacaacattattgtttgttttcttctcgcgttgttcgaagtcggatgagtgagcttgccgtgtaggctgtca

SEQ ID NO: 40203 - DNA, 96 bp, Fusarium cuneirostrum
  misc_feature: 36
cgcacttgtgttacgcgagcatatataaagtagatggtgataacctcaaaagagtccacgagccgagcgcgtagcgtgcaggcgaggggattgtca

SEQ ID NO: 40204 - DNA, 96 bp, Fusarium cuneirostrum
  misc_feature: 36
aattacggaggcgtaagccgacgtgcagtacgagaccgaggaacgaggtcgaagtggtgctagataatgtgaagaggtgaagtgcgaataacttca

SEQ ID NO: 40205 - DNA, 96 bp, Fusarium cuneirostrum
  misc_feature: 36
tcttttcccccgagaggttgagtgagcaggcgaactctgacttgttttatttttttcgaggacggaggacgagtttaccgcaacaacgtgaggaga

SEQ ID NO: 40206 - DNA, 96 bp, Fusarium cuneirostrum
  misc_feature: 36
tcttggtgtcgcctccgctccccctccactttcactccgttcaagcaccacattccatgtgatctttgcgtccgcaatcaacgtgcctcaacttga

SEQ ID NO: 40207 - DNA, 96 bp, Fusarium cuneirostrum
  misc_feature: 36
tctcgtactgcacgtcggcttacgcctccgtaattctttacacagttcttgcttgggcaatgaactcttcacttgagttcagtctattgtcaatcc

SEQ ID NO: 40208 - DNA, 96 bp, Fusarium cuneirostrum
  misc_feature: 36
attgtatacgacggacgtcgctgtctttttctattttctctgtttgcggaagcacggttgagagggattcgagaccctttcttactcagctggaga

SEQ ID NO: 40209 - DNA, 96 bp, Fusarium cuneirostrum
  misc_feature: 36
tctcatgcgcgacgcgccatcacaactcgactcttcgtctcggtccatatcgtcgccggtccccgtctcccactttcagtctccctcttcggtcga

SEQ ID NO: 40210 - DNA, 96 bp, Fusarium cuneirostrum
  misc_feature: 36
tctatctacactaaaaatctccaagatcgtcatcgacccattcatcaccaaactcgtccacaccctcgacgagtgtcttcacctcttctacagccc

SEQ ID NO: 40211 - DNA, 96 bp, Fusarium cuneirostrum
  misc_feature: 36
tctactttatatatgctcgcgtaacacaagtgcgggagctcaccctactgtaagctctaggtttttcagcctcgctccctacctacttagtactcg

SEQ ID NO: 40212 - DNA, 96 bp, Fusarium cuneirostrum
  misc_feature: 36
atagagaatatattataaatctatatccttaataataactctagcttaacatacttaataagcgagtaaaataaaaatcctaaccttcctattaga

SEQ ID NO: 40213 - DNA, 96 bp, Fusarium cuneirostrum
  misc_feature: 36
tcgttctctctctgcctcctcagcgcgtttctgttccctttcggcgcgttgctgctctctcgcagcgcgttgttccgactcctttaaaagccgttc

SEQ ID NO: 40214 - DNA, 96 bp, Fusarium cuneirostrum
  misc_feature: 36
gggacacgggacagtgaagaatgaacgtgtgtacccaggagtaatcgtcttgagtcagcttgctgaccttgacgaccccagtcaatagacatccga

SEQ ID NO: 40215 - DNA, 96 bp, Fusarium cuneirostrum
  misc_feature: 36
aatagactgaactcaagtgaagagttcatcctccaagcaagaactatgttctaaacttacggagccttcaggcgacgtgtcgttagtgatgagcga

SEQ ID NO: 40216 - DNA, 96 bp, Fusarium cuneirostrum
  misc_feature: 36
agtggtattgtagttagtatagacagtgatatgtgagcacaaccgagagagtagtggagcgaacactaaataaaaggctccaacagaagtgagcga

SEQ ID NO: 40217 - DNA, 96 bp, Fusarium cuneirostrum
  misc_feature: 36
ctgtcccctcccctaccggtccgggtccacatacgtcctcgtgccctgcatctcggctcattccatttcattcatgtgcgacgaagccatcgtcga

SEQ ID NO: 40218 - DNA, 96 bp, Fusarium cuneirostrum
  misc_feature: 36
tccttcgctcttacttacatccgacaacaaagattgtctctggcgctctgcgcccatgtgcatctccgatgctctcctgtcctcctccgtcgtcct

SEQ ID NO: 40219 - DNA, 96 bp, Fusarium cuneirostrum
  misc_feature: 36
tccgcaccccatcgctccgctcggggtagaattatacagtcatggactcggccctgcgggcagctgcactactcttgccaatccggctccgtcgtc

SEQ ID NO: 40220 - DNA, 96 bp, Fusarium cuneirostrum
  misc_feature: 36
gactagtagagttgggttcgagtgaagaacccataccccaagcagaactatgttctgaataccgaccgaacggagtgagggaaggtgcggaatgga

SEQ ID NO: 40221 - DNA, 96 bp, Fusarium cuneirostrum
  misc_feature: 36
tcatttatctttatgcgagcacttatctggaaccaacagctcgccgtaatgaatccaaaaagtaagcctaaaggcgagcgactgtgacttagtgtg

SEQ ID NO: 40222 - DNA, 96 bp, Fusarium cuneirostrum
  misc_feature: 36
tcatgctcactaatctaataaaaagaataaccagggctcgtcaaacgagtttatttaaattattatttgcctcgccctgcttatgttatgtcaagg

SEQ ID NO: 40223 - DNA, 96 bp, Fusarium cuneirostrum
  misc_feature: 36
gttttaatctgatgtgaataacttcaaaagtattttcccgaggccgaggacgtaggacgcaggctgagggattgacaatagactgaactcaagtga

SEQ ID NO: 40224 - DNA, 96 bp, Fusarium cuneirostrum
  misc_feature: 36
gtgagcccttgacataacataagcagggcgaggcaaataataatttaaataaactcgtttgacgagccctggttattctttttattagattagtga

SEQ ID NO: 40225 - DNA, 96 bp, Fusarium cuneirostrum
  misc_feature: 36
tcacgataccatttatacgcacaacatcacaattacgtgtcgctcacttctgttggagccttttatttagtgttcgctccactactctctcggttg

SEQ ID NO: 40226 - DNA, 96 bp, Fusarium cuneirostrum
  misc_feature: 36
tcacattctacgtcacaattccatctaacactacaattacaattacaattacaatcagtcacgatggctcgccattagggagggaaatggtgctcg

SEQ ID NO: 40227 - DNA, 96 bp, Fusarium cuneirostrum
  misc_feature: 36
tcaatccttcaccctgcacgctacgcgctcgggctcaggactatcttgggtacatgatcacgactacgattcaaaataataataatgtcacatatg

SEQ ID NO: 40228 - DNA, 96 bp, Fusarium cuneirostrum
  misc_feature: 36
tattggaagagattgagtcggcgtagtagtagacttttcccaatgtagatatcgtgataacctcattttgtgtaacctgtgacataacttgattga

SEQ ID NO: 40229 - DNA, 96 bp, Fusarium cuneirostrum
  misc_feature: 36
cataaaaacgccgtcggcgcggttcgtgatcaattccggaatcgtcgatgatgttcgtccacggaacaaagagagcttatcttgcacgaaagttga

SEQ ID NO: 40230 - DNA, 96 bp, Fusarium cuneirostrum
  misc_feature: 36
ggggccgacccatttgcctgagttgctcacccaacgctcaccacctacttaggttaaagcagcgagcgctcaggacactgggcgagaagggaaata

SEQ ID NO: 40231 - DNA, 96 bp, Fusarium cuneirostrum
  misc_feature: 36
tattgagctgtcgtaggacgctttctggagttggggatccaacgacctttacttttttatttgaccggaggtcattgtatacgacggacgtcgctg

SEQ ID NO: 40232 - DNA, 96 bp, Fusarium cuneirostrum
  misc_feature: 36
ggggactacgggacacgggacagtgaagaatgaacgtgtgtacccaggagtaatcgtcttgagtcagcttgctgaccttgacgaccccagtcaata

SEQ ID NO: 40233 - DNA, 96 bp, Fusarium cuneirostrum
  misc_feature: 36
tattcttaacttagatttataaggatttcctccttatttatatattaacgtacatgataagcatgtgcaccaagcaagtatgtgcaccactttcct

SEQ ID NO: 40234 - DNA, 96 bp, Fusarium cuneirostrum
  misc_feature: 36
agaataatactcgtcccagcctcgtccttactcgaaataaataatcgatcgtcgctccactcctattgctcgtcacttctcgttccgatatggata

SEQ ID NO: 40235 - DNA, 96 bp, Fusarium cuneirostrum
  misc_feature: 36
tatccacttatgcccggatcgctacgctgcaccttattcgtcgttcctcctcataacgttccgtccacccgcacttcagtcggtcccctccttctc

SEQ ID NO: 40236 - DNA, 96 bp, Fusarium cuneirostrum
  misc_feature: 36
tatattgagctgtcgtaggacgctttctggagttggggatccaacgacctttacttttttatttgaccggaggtcattgtatacgacggacgtcgc

SEQ ID NO: 40237 - DNA, 96 bp, Fusarium cuneirostrum
  misc_feature: 36
tatacttgtctcgcaccctcgcaagtaagattatgtccgtacataacgtactaccatgagtgggccccatcatcccacacgtccactccttgcacc

SEQ ID NO: 40238 - DNA, 96 bp, Fusarium cuneirostrum
  misc_feature: 36
agagtttccctcctacatcatctgtctgagctcagagagcgagtcgatcttggattcctatgcaagtcgtctttcaattgcgctggcgcgcgacta

SEQ ID NO: 40239 - DNA, 96 bp, Fusarium cuneirostrum
  misc_feature: 36
tagtatagacagtgatatgtgagcacaaccgagagagtagtggagcgaacactaaataaaaggctccaacagaagtgagcgacacgtaattgtgat

SEQ ID NO: 40240 - DNA, 96 bp, Fusarium cuneirostrum
  misc_feature: 36
tagaatatatagcaatagcagcaataatatataattatataaaaatagctataatactaaacgctctactctctataatattagctatcgactatt

SEQ ID NO: 40241 - DNA, 96 bp, Fusarium cuneirostrum
  misc_feature: 36
cggattgacaatagtcttctcatctgcagatgaagaatcccatgcccaagcatgattccggaataaaattacggaggcgtaagccgacgtgcagta

SEQ ID NO: 40242 - DNA, 96 bp, Fusarium cuneirostrum
  misc_feature: 36
tactcgctctaaaatctacgtaattgaagtcatcatcacttccacatcaggcaactctacaaatctcaccaagttcacattgcatctatctacact

SEQ ID NO: 40243 - DNA, 96 bp, Fusarium cuneirostrum
  misc_feature: 36
tacgtcctcggcctcgggaaaatacttttgaagttattcacattcacatctacgattacaatttaatcaatcactcgcacactaagtcacagtcgc

SEQ ID NO: 40244 - DNA, 96 bp, Fusarium cuneirostrum
  misc_feature: 36
taattaagactaaataaaattctaaaaagtctttactttctttattaacttaatctttataatttaataagttattaataaaaaggagaaagatat

SEQ ID NO: 40245 - DNA, 96 bp, Fusarium cuneirostrum
  misc_feature: 36
agaatatatagcaatagcagcaataatatataattatataaaaatagctataatactaaacgctctactctctataatattagctatcgactatta

SEQ ID NO: 40246 - DNA, 96 bp, Fusarium cuneirostrum
  misc_feature: 36
taagtttagaacatagttcttgcttggaggatgaactcttcacttgagttcagtctattgtcaatccctcagcctgcgtcctacgtcctcggcctc

SEQ ID NO: 40247 - DNA, 96 bp, Fusarium cuneirostrum
  misc_feature: 36
agacaccatcgtagcttgagtcctgagccgggaggagcgcatgcgacggtgcggtgaaggattgactagtagagttaatcttgacggagtcattta

SEQ ID NO: 40248 - DNA, 96 bp, Fusarium cuneirostrum
  misc_feature: 36
taaatatagaaggggagggttaaaagggttaagagaggagagaaataaagaaaattaaagaagaaagaataattatagaagaaatagaagaaatat

SEQ ID NO: 40249 - DNA, 96 bp, Fusarium cuneirostrum
  misc_feature: 36
cgaggagtataagacagcgtcttttcccccgagaggttgagtgagcaggcgaactctgacttgttttatttttttcgaggacggaggacgagttta

SEQ ID NO: 40250 - DNA, 96 bp, Fusarium cuneirostrum
  misc_feature: 36
taaacaagcctatagactagcacgagtgagctgggtaccagcgaaacgagggctgataactttggtctataagcggtttcctttcaaacgcgtgcg

SEQ ID NO: 40251 - DNA, 96 bp, Fusarium cuneirostrum
  misc_feature: 36
taaaactcgagctgatcaaggagctcatgccagctgttacaatgaaattgttgaaatgagaagatgctaattgcttaattcatcctaaaagtgcag

SEQ ID NO: 40252 - DNA, 96 bp, Fusarium cuneirostrum
  misc_feature: 36
catgacaccgtacgcactcctgtgctcagtaaaagggcttcattcaatgtcagccatcatactcgctccgcgatctgcccaacaaggcagggaaac

SEQ ID NO: 40253 - DNA, 96 bp, Fusarium cuneirostrum
  misc_feature: 36
ataaaccgctataaaccgctgcgaactactataaaccgctataaaccgctatgaaccgctataaaccactataaaccactataaaccactataaac

SEQ ID NO: 40254 - DNA, 96 bp, Fusarium cuneirostrum
  misc_feature: 36
atactaactacaataccacttgaggtcatcaccattacctattccggtaagtctcacaaagcatcgttggagttactcctccacacttgacccaac

SEQ ID NO: 40255 - DNA, 96 bp, Fusarium cuneirostrum
  misc_feature: 36
aagtgaggggacaggaggcccagagggccgacaagaatccatttcaaaatttgtacaaattttgtatgggaagatttctgagattgtatgggcaac

SEQ ID NO: 40256 - DNA, 96 bp, Fusarium cuneirostrum
  misc_feature: 36
gttgaaagctccaggctcattggctagcagtgcgtgccgccgactgctaagcagatcaagattttatccaacgctgcaattagcttgctgtttggt

SEQ ID NO: 40257 - DNA, 96 bp, Fusarium cuneirostrum
  misc_feature: 36
gttccgggtctcattcggtagtgatataagcgtagcttggtgtctccgccaccaagaaaaagtgacttcgttaacagaagtgaccgatttctcggc

SEQ ID NO: 40258 - DNA, 96 bp, Fusarium cuneirostrum
  misc_feature: 36
aaagaattacggaggcgtaagccgacgtgcagtacgagaccgaggaacgaggtcgaagtggtgctagataatgtgaagaggtgaagtgcgaataac

SEQ ID NO: 40259 - DNA, 96 bp, Fusarium cuneirostrum
  misc_feature: 36
aataaataatcgatcgtcgctccactcctattgctcgtcacttctcgttccgatatggatatacgggttcgtttgctcttgcaaagcgatgaacac

SEQ ID NO: 40260 - DNA, 96 bp, Fusarium cuneirostrum
  misc_feature: 36
gtggataggagagttcgtttccggaaggtattggaagagattgagtcggcgtagtagtagacttttcccaatgtagatatcgtgataacctcattt

SEQ ID NO: 40261 - DNA, 96 bp, Fusarium cuneirostrum
  misc_feature: 36
ctttccccggtcggccttcggcctccccactcggactctccgtcctcgtcgcccacattccatgtgatcctgccttcgcagtccatgcacctccac

SEQ ID NO: 40262 - DNA, 96 bp, Fusarium cuneirostrum
  misc_feature: 36
gtgcgtgtcattggatgacacttgttctcacaggagttgcggtccccgcagcatggacggaacgttctacgtcccgccataggccaaggtcgttcc

SEQ ID NO: 40263 - DNA, 96 bp, Fusarium cuneirostrum
  misc_feature: 36
cacttccacatcaggcaactctacaaatctcaccaagttcacattgcatctatctacactaaaaatctccaagatcgtcatcgacccattcatcac

SEQ ID NO: 40264 - DNA, 96 bp, Fusarium cuneirostrum
  misc_feature: 36
agcctgcgtcctacgtcctcggcctcgggaaaatacttttgaagttattcacatcagattaaaacatgctcgctatatataaatgcgggagctcac

SEQ ID NO: 40265 - DNA, 96 bp, Fusarium cuneirostrum
  misc_feature: 36
gtcttccattccttttttaaatacggagcccgtagggcgacgtgcggagcgtagggtgacgaaggagcccgatgcgaggttacgagaacaccatgg

SEQ ID NO: 40266 - DNA, 96 bp, Fusarium cuneirostrum
  misc_feature: 36
cgccgagacttgacgattaggcaagaatgatagagcgaaagcgatcacgaacgggtgagtgataatgatttgtgtctggacacatgtgcacgagac

SEQ ID NO: 40267 - DNA, 96 bp, Fusarium cuneirostrum
  misc_feature: 36
gtctataaaaatttcagacttgatctactcttttgtgctgctttgccggtcacagtttttgtctgaattctactgatttcagaaagaaataactat

SEQ ID NO: 40268 - DNA, 96 bp, Fusarium cuneirostrum
  misc_feature: 36
gtccgaccgttggtcgttggttgtcaatcgacaagggtgtcgtgccgtccaccacaaagaaacagccctcctgtttccaagaataatactcgtccc

SEQ ID NO: 40269 - DNA, 96 bp, Fusarium cuneirostrum
  misc_feature: 36
gggtgcggagcagagggtgagggacgaacccgtcgcgaggttataataatgagcaaggtcgcaaggtcactgctcacgataacatcatcaattgac

SEQ ID NO: 40270 - DNA, 96 bp, Fusarium cuneirostrum
  misc_feature: 36
actgaaccacatcttgtggtgttttagtaacgtcgctacgtgttccttcgtcacactcactccgcacgtcgccctccgggctccgtaggattatac

SEQ ID NO: 40271 - DNA, 96 bp, Fusarium cuneirostrum
  misc_feature: 36
ccgaccttctctcactccgttcgttctcggtcttacatactggattccgctcgtccctcactctcatccaataataacgtcgctgacgctctctac

SEQ ID NO: 40272 - DNA, 96 bp, Fusarium cuneirostrum
  misc_feature: 36
gtacgaacgttccgtccacaatctcataccccgcagacagagtcgaggagtataagacagcgtcttttcccccgagagggcagagggaagagtttc

SEQ ID NO: 40273 - DNA, 96 bp, Fusarium cuneirostrum
  misc_feature: 36
gacttacctctcgctacgctcgagtgcggagtgacaagtcactccttagcgagacaaaataaatctcgctctcccttacgggacaagcataattac

SEQ ID NO: 40274 - DNA, 96 bp, Fusarium cuneirostrum
  misc_feature: 36
gtaatgtgtaggctctgaggccaaatctgttatattctgaggatggctgaggatattgcaaaaccctctggtgaacaagcagctgtaatcacatgt

SEQ ID NO: 40275 - DNA, 96 bp, Fusarium cuneirostrum
  misc_feature: 36
ggtttttcgagcgggttataactttggtgatataagaggatttggggattgaggggaccccaaccggcttggagacagcttgctggcccttgacgg

SEQ ID NO: 40276 - DNA, 96 bp, Fusarium cuneirostrum
  misc_feature: 36
ggttcgagtgcgaggaaggacgacggaggaggacaggagagcatcggagatgcacatgggcgcagagcgccagagacaatctttgttgtcggatgt

SEQ ID NO: 40277 - DNA, 96 bp, Fusarium cuneirostrum
  misc_feature: 36
catctcggctcattccatttcattcatgtgcgacgaagccatcgtcgagtagaaaaaagatgatcaacaccacatactctggtgttttaagtaacc

SEQ ID NO: 40278 - DNA, 96 bp, Fusarium cuneirostrum
  misc_feature: 36
ggtgtgtctgggtcgacgtccgtctccccctcttttatttctcctcgtgcactcacttcagtcgcatcctgcattcatgtttgactgctgtcaatt

SEQ ID NO: 40279 - DNA, 96 bp, Fusarium cuneirostrum
  misc_feature: 36
catggtgttctcgtaacctcgcatcgggctccttcgtcaccctacgctccgcacgtcgccctacgggctccgtatttaaaaaaggaatggaagacc

SEQ ID NO: 40280 - DNA, 96 bp, Fusarium cuneirostrum
  misc_feature: 36
ggtcatcaccattacctattccggtaagtctcacaaagcatcgttggagttactcctccacacttgacccaactcaaacacagcatcatcaaatct

SEQ ID NO: 40281 - DNA, 96 bp, Fusarium cuneirostrum
  misc_feature: 36
cccatatttcaatgaaaattaaattggcgatctcccctttcctatgacaccttgttagtaaaggaatattcagagtaaaatgcctggctgcgtacc

SEQ ID NO: 40282 - DNA, 96 bp, Fusarium cuneirostrum
  misc_feature: 36
cttgcatggcttgccagtaacaaatgcttaccagcaacccatcgtttgtttgtttgtttgtttgtttgttttattcatagactgtcccagccgccc

SEQ ID NO: 40283 - DNA, 96 bp, Fusarium cuneirostrum
  misc_feature: 36
gggcgaggtgcagaacgagtcgaccgacagggagacgatgtgatgttactttaattcaacagagatgcgctctgtgaatcccctcacgtaaacatg

SEQ ID NO: 40284 - DNA, 96 bp, Fusarium cuneirostrum
  misc_feature: 36
gggcgaagcgaggtgcaataactttggtctataagaggttttttgacaaaagctgtgctttgggctcaagaacggggtgagtcacaagtggcgatg

SEQ ID NO: 40285 - DNA, 96 bp, Fusarium cuneirostrum
  misc_feature: 36
ggctttaccggaggacacatcgaactggggtgagatgggagtgcaccaggtattgtggtcctgggatgcggcacatggtctggagacaggtgcttg

SEQ ID NO: 40286 - DNA, 96 bp, Fusarium cuneirostrum
  misc_feature: 36
ggctgagggattgacaatagactgaactcaagtgaagagttcatcctccaagcaagaactatgttctaaacttacggagccttcaggcgacgtgtc

SEQ ID NO: 40287 - DNA, 96 bp, Fusarium cuneirostrum
  misc_feature: 36
gctgtcttatactcctcgactctgtctgcggggtatgagattgtggacggaacgttcgtacctctctcatttgtccgtccaacaaaaccgacctcc

SEQ ID NO: 40288 - DNA, 96 bp, Fusarium cuneirostrum
  misc_feature: 36
ggagggtgacccgaccccgatgtgtgaccgagacagatgtcgaggggaaagggtacatggcgagagcagcgctcgaggtggatttgacggagtctc

SEQ ID NO: 40289 - DNA, 96 bp, Fusarium cuneirostrum
  misc_feature: 36
gctttaccggaggacacatcgaactggggtgagatgggagtgcaccaggtattgtggtcctgggatgcggcacatggtctggagacaggtgcttgg

SEQ ID NO: 40290 - DNA, 96 bp, Fusarium cuneirostrum
  misc_feature: 36
ccttgaacaagttcaatcccggaatccgcttatatcaccaaagttatgccacctcatttcgacccgttccgggtctcattcggtagtgatataagc

SEQ ID NO: 40291 - DNA, 96 bp, Fusarium cuneirostrum
  misc_feature: 36
gctgtctttttctattttctctgtttgcggaagcacggttgagagggattcgagaccctttcttactcagctggagagctgttggagatcaaccgg

SEQ ID NO: 40292 - DNA, 96 bp, Fusarium cuneirostrum
  misc_feature: 36
cgaccgttggtcgttggttgtcaatcgacaagggtgtcgtgccgtccaccacaaagaaacagccctcctgtttccaagaataatactcgtcccagc

SEQ ID NO: 40293 - DNA, 96 bp, Fusarium cuneirostrum
  misc_feature: 36
gctaagcagatcaagattttatccaacgctgcaattagcttgctgtttggtaatacatttcgtcggtgacgtttggtttacggcaaattgaaattg

SEQ ID NO: 40294 - DNA, 96 bp, Fusarium cuneirostrum
  misc_feature: 36
aaatgataatcgatgacgacgctaaaatgtacagggtgaactctatcgaagtcgactgatgtcatcgacagcagcgcatgattcgggatgactcgc

SEQ ID NO: 40295 - DNA, 96 bp, Fusarium cuneirostrum
  misc_feature: 36
gcgaataaccaatagtagggcccgcccgcgcccactctagtcaacctaactaacgcggaaataaaagacgcttctagcactagcagcgacaataag

SEQ ID NO: 40296 - DNA, 96 bp, Fusarium cuneirostrum
  misc_feature: 36
gcctcgggaaaatacttttgaagttattcacattcacatctacgattacaatttaatcaatcactcgcacactaagtcacagtcgctcgcctttag

SEQ ID NO: 40297 - DNA, 96 bp, Fusarium cuneirostrum
  misc_feature: 36
gcagtacttaaagggccgcatggcccgatttgcgacactgtttggtgtcagacaacattcttgtttgtcttattttttggctgaacagcgtgagct

SEQ ID NO: 40298 - DNA, 96 bp, Fusarium cuneirostrum
  misc_feature: 36
gcactctcatgaagataactgaaccacatcttgtggtgttttagtaacgtcgctacgtgttccttcgtcacactcactccgcacgtcgccctccgg

SEQ ID NO: 40299 - DNA, 96 bp, Fusarium cuneirostrum
  misc_feature: 36
gcacatgtgtccagacacaaatcattatcactcacccgttcgtgatcgctttcgctctatcattcttgcctaatcgtcaagtctcggcgctgcctc

SEQ ID NO: 40300 - DNA, 96 bp, Fusarium cuneirostrum
  misc_feature: 36
gagttcatctccaagcagagactgtggtctcaataccgagcgaagcgaaggtgcggaacggagtgagagcgtagcgagcacgaagtgaggttactt

SEQ ID NO: 40301 - DNA, 96 bp, Fusarium cuneirostrum
  misc_feature: 36
atccaagatcgactcgctctctgagctcagacagatgatgtaggagggaaactcttccctctgccctctcgggggaaaagacgctgtcttatactc

SEQ ID NO: 40302 - DNA, 96 bp, Fusarium cuneirostrum
  misc_feature: 36
cacctttcgctatgcaaaataacacttttcaacttttatgccgtgaacctccctgttcccggataccatacacaatgtctgtcgtcgtctctactc

SEQ ID NO: 40303 - DNA, 96 bp, Fusarium cuneirostrum
  misc_feature: 36
actcaagttgacaatcccgggtcgtcgtccctcctcctccccgggactcacgtttaggtttaattataaaaacaattacattcacatcatatgctc

SEQ ID NO: 40304 - DNA, 96 bp, Fusarium cuneirostrum
  misc_feature: 36
gagagcagtacttaaagggccgcatggcccgatttgcgacactgtttggtgtcagacaacattcttgtttgtcttattttttggctgaacagcgtg

SEQ ID NO: 40305 - DNA, 96 bp, Fusarium cuneirostrum
  misc_feature: 36
gactcatttatgcgggaaggcattcacattccataatcattcatcatagctcgccatcgaaataaaaatggtgctcgtagtattaaatcgttattt

SEQ ID NO: 40306 - DNA, 96 bp, Fusarium cuneirostrum
  misc_feature: 36
gactatatccttagtacggacgaccggagggaggacgtgcggagtgagtgtgacgaaggaacacgtagcgacgttacagacatcacacagagatgg

SEQ ID NO: 40307 - DNA, 96 bp, Fusarium cuneirostrum
  misc_feature: 36
aattaagaaataaagtatttaattaaatactttataatctatatttttgtaagagactgagctcttatataagctgcctaaaaaggctgcttagtc

SEQ ID NO: 40308 - DNA, 96 bp, Fusarium cuneirostrum
  misc_feature: 36
atcttgggtacatgatcacgactacgattcaaaataataataatgtcacatatgcacagctcgctcgattaaataaagtatgaagtggtgctcgtc

SEQ ID NO: 40309 - DNA, 96 bp, Fusarium cuneirostrum
  misc_feature: 36
aagatcctccgtcgtaacctccttcggtgctacaagataaatcccgaggacccgtcctctcatgcgcgacgcgccatcacaactcgactcttcgtc

SEQ ID NO: 40310 - DNA, 96 bp, Fusarium cuneirostrum
  misc_feature: 36
atcttacacacagtgacatttcatgtttacgtgaggggattcacagagcgcatctctgttgaattaaagtaacatcacatcgtctccctgtcggtc

SEQ ID NO: 40311 - DNA, 96 bp, Fusarium cuneirostrum
  misc_feature: 36
ctcggtctcgtactgcacgtcggcttacgcctccgtaattctttacacagttcttgcttgggcaatgaactcttcacttgagttcagtctattgtc

SEQ ID NO: 40312 - DNA, 96 bp, Fusarium cuneirostrum
  misc_feature: 36
ctccggaggtgtaactcaagttgacaatcccgggtcgtcgtccctcctcctccccgggactcacgtttaggtttaattataaaaacaattacattc

SEQ ID NO: 40313 - DNA, 96 bp, Fusarium cuneirostrum
  misc_feature: 36
gaaggcacatttaaatctgctaccaaggcacatttatgagaaaactacattccctaccaattattgtaaacgtgccttgaccaaggcacatttaat

SEQ ID NO: 40314 - DNA, 96 bp, Fusarium cuneirostrum
  misc_feature: 36
gaaaaagtgaacactgactgaagacggatgtcgagattgaaccacgaacgtggaagacgaacagtgtggatgtgagtcttctgtctttgtacactg

SEQ ID NO: 40315 - DNA, 96 bp, Fusarium cuneirostrum
  misc_feature: 36
cttctcttataatctacctttatcttaattactttatcttaattaccttatcttaactactttatcttaaccactttatcttaattaccttatctt

SEQ ID NO: 40316 - DNA, 96 bp, Fusarium cuneirostrum
  misc_feature: 36
cttatcatgtacgttactaggaattaaatctagattatttggtttacgagttagaaattctattattaaactatatagcttatttctctcgactag

SEQ ID NO: 40317 - DNA, 96 bp, Fusarium cuneirostrum
  misc_feature: 36
atacaaatgaaatgtcagtttcgattttgcgggcgaaatcgaaactgacatttcatttgtatgggttcgtttctggcagagccggttttttgtaag

SEQ ID NO: 40318 - DNA, 96 bp, Fusarium cuneirostrum
  misc_feature: 36
aaaagccttcttctattatcttaataattctatttaaggtagctctttttcctttattattctattttattcctaactttatttttcttacttaag

SEQ ID NO: 40319 - DNA, 96 bp, Fusarium cuneirostrum
  misc_feature: 36
cttaaacaagcctatagactagcacgagtgagctgggtaccagcgaaacgagggctgataactttggtctataagcggtttcctttcaaacgcgtg

SEQ ID NO: 40320 - DNA, 96 bp, Fusarium cuneirostrum
  misc_feature: 36
ccgggaacgaagggactgagtggaggtcggttttgttggacggacaaatgagagaggtacgaacgttccgtccacaatctcataccccgcagacag

SEQ ID NO: 40321 - DNA, 96 bp, Fusarium cuneirostrum
  misc_feature: 36
ctggaatcagttctgtttattccacggccgtggaaacacgaacaggtgagtgtctatacatatctggaagatgaagtgaaggatgaacgcaatgct

SEQ ID NO: 40322 - DNA, 96 bp, Fusarium cuneirostrum
  misc_feature: 36
ctcgatctataataatattaagtaatatactatatattttcgcgatatagaaataaaagagataaataaattctttagctattattaactctctat

SEQ ID NO: 40323 - DNA, 96 bp, Fusarium cuneirostrum
  misc_feature: 36
agatagtcctgagcccgagcgcgtagcgtgcagggtgaaggattgacagtagtctcctcatctgcatatgaagaatgataagctcccgcaggggag

SEQ ID NO: 40324 - DNA, 96 bp, Fusarium cuneirostrum
  misc_feature: 36
ctcagactgcccatttggtccgtttgacttggctagactaaactagcagtccgtctgacattggtcagactggactagcagtctgactgagatctg

SEQ ID NO: 40325 - DNA, 96 bp, Fusarium cuneirostrum
  misc_feature: 36
ctattgatggtggcaaggtacgcagccaggcattttactctgaatattcctttactaacaaggtgtcataggaaaggggagatcgccaatttaatt

SEQ ID NO: 40326 - DNA, 96 bp, Fusarium cuneirostrum
  misc_feature: 36
atttcgactggaatcagttctgtttattccacggccgtggaaacacgaacaggtgagtgtctatacatatctggaagatgaagtgaaggatgaacg

SEQ ID NO: 40327 - DNA, 96 bp, Fusarium cuneirostrum
  misc_feature: 36
ccttggtatagggggggactacgggacacgggacagtgaagaatgaacgtgtgtacccaggagtaatcgtcttgagtcagcttgctgaccttgacg

SEQ ID NO: 40328 - DNA, 96 bp, Fusarium cuneirostrum
  misc_feature: 36
aagtatagctagttctcgcttactaataattactaccttatttaatctctgtcgttatattgatcgcatatatattacttgctcgtcctaattacg

SEQ ID NO: 40329 - DNA, 96 bp, Fusarium cuneirostrum
  misc_feature: 36
atcgccacttgtgactcaccccgttcttgagcccaaagcacagcttttgtcaaaaaacctcttatagaccaaagttattgcacctcgcttcgcccg

SEQ ID NO: 40330 - DNA, 96 bp, Fusarium cuneirostrum
  misc_feature: 36
atgtaacatcaccataatcatatcaaattttgctacaacacaatttccaccatcacctttcgctatgcaaaataacacttttcaacttttatgccg

SEQ ID NO: 40331 - DNA, 96 bp, Fusarium cuneirostrum
  misc_feature: 36
aacactaaatatacttttgacgagcaccacttcatactttatttaatcgagcgagctgtgcatatgtgacattattattattttgaatcgtagtcg

SEQ ID NO: 40332 - DNA, 96 bp, Fusarium cuneirostrum
  misc_feature: 36
cgaagcgaggtgcaataactttggtgatataagcggtttttttacaaacgctctgcgttgggctgaaaaagacggggacaagcagcttgtctgcgt

SEQ ID NO: 40333 - DNA, 96 bp, Fusarium cuneirostrum
  misc_feature: 36
cctctcgcggcccaaatgatccacaggcttccgcctgattgggtctccgaccccaccaagtgcgtgtcattggatgacacttgttctcacaggagt

SEQ ID NO: 40334 - DNA, 96 bp, Fusarium cuneirostrum
  misc_feature: 36
cctacgtcctcggcctcgggaaaatacttttgaagttattcacatcagattaaaacatgctcgctatatataaatgcgggagctcactaatatgtg

SEQ ID NO: 40335 - DNA, 96 bp, Fusarium cuneirostrum
  misc_feature: 36
aataatattttgaatgcgagcaatgatatgatactgtgatttatttgtgaataacttcaattgagtccggcggaggaggagggacgacggagccgg

SEQ ID NO: 40336 - DNA, 96 bp, Fusarium cuneirostrum
  misc_feature: 36
accgactgaagtgcgggtggacggaacgttatgaggaggaacgacgaataaggtgcagcgtagcgatccgggcataagtggatactgacgaggggg

SEQ ID NO: 40337 - DNA, 96 bp, Fusarium cuneirostrum
  misc_feature: 36
agacagtggaattagcctcaagatgatccaatctcacgagctcaattcatacgaaaataatgctcaatgagcacgccaattgctggggtttttggg

SEQ ID NO: 40338 - DNA, 96 bp, Fusarium cuneirostrum
  misc_feature: 36
ccattcacattctacgtcacaattccatctaacactacaattacaattacaattacaatcagtcacgatggctcgccattagggagggaaatggtg

SEQ ID NO: 40339 - DNA, 96 bp, Fusarium cuneirostrum
  misc_feature: 36
ccatgacccacactccgggtcatcttacacacagtgacatttcatgtttacgtgaggggattcacagagcgcatctctgttgaattaaagtaacat

SEQ ID NO: 40340 - DNA, 96 bp, Fusarium cuneirostrum
  misc_feature: 36
agtagagttgggttcgagtgaagaacccataccccaagcagaactatgttctgaataccgaccgaacggagtgagggaaggtgcggaatggagtgg

SEQ ID NO: 40341 - DNA, 96 bp, Fusarium cuneirostrum
  misc_feature: 36
cattctcctagtctattagaatttaaattgtcaagatcgtcttattcactgctcagctaccgaactagaagcgtctatatcatctctcgctaaatt

SEQ ID NO: 40342 - DNA, 96 bp, Fusarium cuneirostrum
  misc_feature: 36
cattccgtggtcgctctgctcccactccattccgcaccttccctcactccgttcggtcggtattcagaacatagttctgcttggggtatgggttct

SEQ ID NO: 40343 - DNA, 96 bp, Fusarium cuneirostrum
  misc_feature: 36
acgtggggcgagacaaataattattaaaaccacttttaatgtgtcgagaaccactactttttttcacttggcgagcatgatttcagattgtgaatg

SEQ ID NO: 40344 - DNA, 96 bp, Fusarium cuneirostrum
  misc_feature: 36
catgcagatgagactctactagtcaatccttcaggctgcgtcgttcctcctcgccctcaggactcatttatggatgaagccattcccatgtcttct

SEQ ID NO: 40345 - DNA, 96 bp, Fusarium cuneirostrum
  misc_feature: 36
catattcccatataaatattacaagatcttactaagtatatttaaaacatagtaaatagtttttattaatttcgtgcctctaggcataacgtatgt

SEQ ID NO: 40346 - DNA, 96 bp, Fusarium cuneirostrum
  misc_feature: 36
acaatccgttcgagcgagcgcgtaatgaaacgcgtcagaaaaaaggttgacgccccgggcgccaaaagcactccaagtgcaacgggcaatcccctg

SEQ ID NO: 40347 - DNA, 96 bp, Fusarium cuneirostrum
  misc_feature: 36
cacgacagtgaagaatgacccggagtgtgggtcatgacgtgagtaaagtaggagggagcctgtggggcgaccgtaagacagaggggcgagattgtg

SEQ ID NO: 40348 - DNA, 96 bp, Fusarium cuneirostrum
  misc_feature: 36
acgcacgttcaggtaacccagctgcgtatacagcagcagtctcagtgtacaaagacagaagactcacatccacactgttcgtcttccacgttcgtg

SEQ ID NO: 40349 - DNA, 96 bp, Fusarium cuneirostrum
  misc_feature: 36
caatctgaaatcatgctcgccaagtgaaaaaaagtagtggttctcgacacattaaaagtggttttaataattatttgtctcgccccacgtaaggtt

SEQ ID NO: 40350 - DNA, 96 bp, Fusarium cuneirostrum
  misc_feature: 36
caatctcataccccgcagacagagtcgaggagtataagacagcgtcttttcccccgagaggttgagtgagcaggcgaactctgacttgttttattt

SEQ ID NO: 40351 - DNA, 96 bp, Fusarium cuneirostrum
  misc_feature: 36
aaatatatatacttttaaaatgcgtcgagcaccattttaacttgatactggcgagcatttgatgaatgtagttataattgtgatatgtatgtcttg

SEQ ID NO: 40352 - DNA, 96 bp, Fusarium cuneirostrum
  misc_feature: 36
aaaaaaagaaaaaagggataaaaaaggaaggagagagaaaagaaaaagaaagaggggagaagaaaagaggaagggaaaaaagaaagagggagaaat

SEQ ID NO: 40353 - DNA, 96 bp, Fusarium cuneirostrum
  misc_feature: 36
attgtaaatcggagatttcattctgtttgtttcctaacaacaacgcgacgcgtcacatccacgagacgtggggtgcatttttaaggcaacagaggt

SEQ ID NO: 40354 - DNA, 96 bp, Fusarium cuneirostrum
  misc_feature: 36
attccgtggtcgctctgctcccactccattccgcaccttccctcactccgttcggtcggtattcagaacatagttctgcttggggtatgggttctt

SEQ ID NO: 40355 - DNA, 96 bp, Fusarium cuneirostrum
  misc_feature: 36
agggcgaggtgcagaacgagtcgaccgacagggagacgatgtgatgttactttaattcaacagagatgcgctctgtgaatcccctcacgtaaacat

SEQ ID NO: 40356 - DNA, 96 bp, Fusarium cuneirostrum
  misc_feature: 36
atgtgaatgtgaataacttcaaaagtattttcccgaggccgaggacgtaggacgcaggctgagggattgacaatagactgaactcaagtgaagagt

SEQ ID NO: 40357 - DNA, 96 bp, Fusarium cuneirostrum
  misc_feature: 36
aagaagacatgggaatggcttcatccataaatgagtcctgagggcgaggaggaacgacgcagcctgaaggattgactagtagagtctcatctgcat

SEQ ID NO: 40358 - DNA, 96 bp, Fusarium cuneirostrum
  misc_feature: 36
atctgtctgagctcagagagcgagtcgatcttggattcctatgcaagtcgtctttcaattgcgctggcgcgcgactaggaacagagtgacggtatt

SEQ ID NO: 40359 - DNA, 96 bp, Fusarium cuneirostrum
  misc_feature: 36
agttgtgatagcttcatttatctttatgcgagcacttatctggaaccaacagctcgccgtaatgaatccaaaaagtaagcctaaaggcgagcgact

SEQ ID NO: 40360 - DNA, 96 bp, Fusarium cuneirostrum
  misc_feature: 36
acttacctctcgctacgctcgagtgcggagtgacaagtcactccttagcgagacaaaataaatctcgctctcccttacgggacaagcataattact

SEQ ID NO: 40361 - DNA, 96 bp, Fusarium cuneirostrum
  misc_feature: 36
aggtgagtagatgagggagtgcggatgcgcgaccgacagaagtgtgtcgagggtcgagcagacccgagccagaaacgagctcaaaactggaacagt

SEQ ID NO: 40362 - DNA, 96 bp, Fusarium cuneirostrum
  misc_feature: 36
acgtcctcggcctcgggaaaatacttttgaagttattcacattcacatctacgattacaatttaatcaatcactcgcacactaagtcacagtcgct

SEQ ID NO: 40363 - DNA, 96 bp, Fusarium cuneirostrum
  misc_feature: 36
acgctgcaccttattcgtcgttcctcctcataacgttccgtccacccgcacttcagtcggtcccctccttctcgtgcttacttactccactcttct

SEQ ID NO: 40364 - DNA, 96 bp, Fusarium cuneirostrum
  misc_feature: 36
actttaaataatatttaatgggacgagcaccattttttatatttggcgagctgtgatttttaattatatttgtgatcgtgatgttatttgatgtgt

SEQ ID NO: 40365 - DNA, 96 bp, Fusarium cuneirostrum
  misc_feature: 36
aacaaccctttcgggtctctacaaaatcaaaacatttacatctgctgggctccctctcggcacacgcccaagatactgtccacaacctcatctagt

SEQ ID NO: 40366 - DNA, 96 bp, Fusarium cuneirostrum
  misc_feature: 36
aaggcacatttaaatctgctaccaaggcacatttatgagaaaactacattccctaccaattattgtaaacgtgccttgaccaaggcacatttaatt

SEQ ID NO: 40367 - DNA, 96 bp, Fusarium cuneirostrum
  misc_feature: 36
aaatggggcgagtcataattattttaattttctttaacgtgacgagccccaaataatattttgaatgcgagcaatgatatgatactgtgatttatt

SEQ ID NO: 40368 - DNA, 96 bp, Fusarium cuneirostrum
  misc_feature: 36
aaggattaggcgggaacaaagaggaattggaaatggggaccattcgttcatttgtagaggatctcgacctgtatctagccactctttcatgatttt

SEQ ID NO: 40369 - DNA, 96 bp, Fusarium cuneirostrum
  misc_feature: 35
gctctaaaatctacgtaattgaagtcatcatcacttccacatcaggcaactctacaaatctcaccaagttcacattgcatctatctacactaaaaa

SEQ ID NO: 40370 - DNA, 96 bp, Fusarium cuneirostrum
  misc_feature: 35
ttttcttgcgttcccttttctcgattgtcttggcgagagctctcttgtcgagggctctcttgtcgagggctctcttgtcgagggctctcttgttgt

SEQ ID NO: 40371 - DNA, 96 bp, Fusarium cuneirostrum
  misc_feature: 35
aagccgacgtgcagtacgagaccgaggaacgaggtcgaagtggtgctagataatgtgaagaggtgaagtgcgaataacttcactagatcatgaaaa

SEQ ID NO: 40372 - DNA, 96 bp, Fusarium cuneirostrum
  misc_feature: 35
ccagacacaaatcattatcactcacccgttcgtgatcgctttcgctctatcattcttgcctaatcgtcaagtctcggcgctgcctcaatcaacaaa

SEQ ID NO: 40373 - DNA, 96 bp, Fusarium cuneirostrum
  misc_feature: 35
tttcttgcgttcccttttctcgattgtcttggcgagagctctcttgtcgagggctctcttgtcgagggctctcttgtcgagggctctcttgttgtg

SEQ ID NO: 40374 - DNA, 96 bp, Fusarium cuneirostrum
  misc_feature: 35
tttcaattgcgctggcgcgcgactaggaacagagtgacggtatttcaatcggagatttagtgagacgggcgaacgtggtttattcttttgtatcac

SEQ ID NO: 40375 - DNA, 96 bp, Fusarium cuneirostrum
  misc_feature: 35
tggcaaggtacgcagccaggcattttactctgaatattcctttactaacaaggtgtcataggaaaggggagatcgccaatttaattttcattgaaa

SEQ ID NO: 40376 - DNA, 96 bp, Fusarium cuneirostrum
  misc_feature: 35
tttacctttatatacctcttttattattatataccttttttggctttttattatcttgtacatattaattatattttaggaaaatatactctttta

SEQ ID NO: 40377 - DNA, 96 bp, Fusarium cuneirostrum
  misc_feature: 35
taacactacaattacaattacaattacaatcagtcacgatggctcgccattagggagggaaatggtgctcgacaagtttaaagaagtgtatttaaa

SEQ ID NO: 40378 - DNA, 96 bp, Fusarium cuneirostrum
  misc_feature: 35
ccctttttagtttatgtgcgctccgtctttatttaatgctcgcccataatacatgtgaagctatcgtcactacaacatcaggtaatcatagaacaa

SEQ ID NO: 40379 - DNA, 96 bp, Fusarium cuneirostrum
  misc_feature: 35
gtaactctttactcgagtttattagatagtccatccctcgggctgcgtcctacgtcctcgccctccggactcgtttaaagatgaggttattcacaa

SEQ ID NO: 40380 - DNA, 96 bp, Fusarium cuneirostrum
  misc_feature: 35
taatacatgtgaagctatcgtcactacaacatcaggtaatcatagaacaaaacacatgatgtaacatcaccataatcatatcaaattttgctacaa

SEQ ID NO: 40381 - DNA, 96 bp, Fusarium cuneirostrum
  misc_feature: 35
ttggggagcgggacgcgacccaggaccatgttcgagcgagggggagcaagagcgagcccgacttgaaatcccatttcaaaatttgtacaaaatttg

SEQ ID NO: 40382 - DNA, 96 bp, Fusarium cuneirostrum
  misc_feature: 35
tatagcactcctctcgtcgtgtgtacgcggtcgcgtacataaagaacaagatcgatcactcgatcaaactcgtccctcgctctttcttacttgcaa

SEQ ID NO: 40383 - DNA, 96 bp, Fusarium cuneirostrum
  misc_feature: 35
ggttgaagctattcgcaagtcacctgcacacacaacatcacaaaatcatggagtattcaatgctcgcccaagtaataaaaagaaaatgggtctcaa

SEQ ID NO: 40384 - DNA, 96 bp, Fusarium cuneirostrum
  misc_feature: 35
atcgtacatctccttcactacttcttccttccgaagatagcttaccgtagaaaagatatgcgtcagataagcgacgcagtaatatgctctcaagaa

SEQ ID NO: 40385 - DNA, 96 bp, Fusarium cuneirostrum
  misc_feature: 35
atgtgaagaggtgaagtgcgaataacttcactagatcatgaaaagagatggagtgaaacgagatcgaagaagtaatagaaacctgagccatgcgaa

SEQ ID NO: 40386 - DNA, 96 bp, Fusarium cuneirostrum
  misc_feature: 35
ttccgggtctcattcggtagtgatataagcgtagcttggtgtctccgccaccaagaaaaagtgacttcgttaacagaagtgaccgatttctcggcc

SEQ ID NO: 40387 - DNA, 96 bp, Fusarium cuneirostrum
  misc_feature: 35
ttcacacatcaaataacatcacgatcacaaatataattaaaaatcacagctcgccaaatataaaaaatggtgctcgtcccattaaatattatttaa

SEQ ID NO: 40388 - DNA, 96 bp, Fusarium cuneirostrum
  misc_feature: 35
aatcatagaacaaaacacatgatgtaacatcaccataatcatatcaaattttgctacaacacaatttccaccatcacctttcgctatgcaaaataa

SEQ ID NO: 40389 - DNA, 96 bp, Fusarium cuneirostrum
  misc_feature: 35
ttatcttcatgagagtgcatgatgacctcaagtggaggtgcatggactgcgaaggcaggatcacatggaatgtgggcgacgaggacggagagtccg

SEQ ID NO: 40390 - DNA, 96 bp, Fusarium cuneirostrum
  misc_feature: 35
tatttattattagctacttaatattaaattatttaattataagcttagcgagtattaaatagtaattaaatacgcgaggagggagctaaggtataa

SEQ ID NO: 40391 - DNA, 96 bp, Fusarium cuneirostrum
  misc_feature: 35
tactaaacaagcccggggcctcttcaacgagacggcaagtccgcaagtcttggggatcgctcaatatggacgtagctatctccaacaacggtgtaa

SEQ ID NO: 40392 - DNA, 96 bp, Fusarium cuneirostrum
  misc_feature: 35
taaaagccttcttctattatcttaataattctatttaaggtagctctttttcctttattattctattttattcctaactttatttttcttacttaa

SEQ ID NO: 40393 - DNA, 96 bp, Fusarium cuneirostrum
  misc_feature: 35
ttaaggaataatactaataagaagaagaataacgctaatataaaaaagctaaagaatatatagatatatcgcgactattaatactctaataatatc

SEQ ID NO: 40394 - DNA, 96 bp, Fusarium cuneirostrum
  misc_feature: 35
ttaaattggcgagcactttgtgaatgaacgacttaatcaccacttgaggcccgagccgacgagcgagcgtagcgaaggaggagcggagggcttgac

SEQ ID NO: 40395 - DNA, 96 bp, Fusarium cuneirostrum
  misc_feature: 35
attaacttatagaagtagtaatatataaatatatttattcggtatattaaatagatatagctactttagtaattaatataacttaattatatttaa

SEQ ID NO: 40396 - DNA, 96 bp, Fusarium cuneirostrum
  misc_feature: 35
atacatgtgaagctatcgtcactacaacatcaggtaatcatagaacaaaacacatgatgtaacatcaccataatcatatcaaattttgctacaaca

SEQ ID NO: 40397 - DNA, 96 bp, Fusarium cuneirostrum
  misc_feature: 35
tgttcacattcctctggaatgatgatgaaaggaagagaaatctcactctgttcggtcagtgggcgatgccctacttatgtcctcagctctgcttcc

SEQ ID NO: 40398 - DNA, 96 bp, Fusarium cuneirostrum
  misc_feature: 35
gggaaaacggtcccgttacatagtcactactcaacaaccctttcgggtctctacaaaatcaaaacatttacatctgctgggctccctctcggcaca

SEQ ID NO: 40399 - DNA, 96 bp, Fusarium cuneirostrum
  misc_feature: 35
tgtctgagctcagagagcgagtcgatcttggattcctatgcaagtcgtctttcaattgcgctggcgcgcgactaggaacagagtgacggtatttca

SEQ ID NO: 40400 - DNA, 96 bp, Fusarium cuneirostrum
  misc_feature: 35
tgtctccgccaccaagaaaaagtgacttcgttaacagaagtgaccgatttctcggcccattctcaggatttggctcaccaaatgccagaatcgagt

SEQ ID NO: 40401 - DNA, 96 bp, Fusarium cuneirostrum
  misc_feature: 35
ggggacaaaagaagcaagaagagaccgaagaacggcaaacggcaaacgacggagacgtcggggcgcgcgctcgcaatcatggaacagaactcgaca

SEQ ID NO: 40402 - DNA, 96 bp, Fusarium cuneirostrum
  misc_feature: 35
tgtaggttatggatgaggctcgctcagtagccagtcacgcattgaagctattcccaactcccgttcgggaaatctcacttccacagaaaagtctcc

SEQ ID NO: 40403 - DNA, 96 bp, Fusarium cuneirostrum
  misc_feature: 35
tgtacgttgccgtgatgttctgcagggagctcagacggcggcatcggcgtcgtctgttgtggcgtcaccatctgcggactcgttggactggattgc

SEQ ID NO: 40404 - DNA, 96 bp, Fusarium cuneirostrum
  misc_feature: 35
tgtaagacgagcggagcgagcgaatggggaagaagggagtggaacgaccttggcctatggcgggacgtagaacgttccgtccatgctgcggggacc

SEQ ID NO: 40405 - DNA, 96 bp, Fusarium cuneirostrum
  misc_feature: 35
ctatactaactacaataccacttgaggtcatcaccattacctattccggtaagtctcacaaagcatcgttggagttactcctccacacttgaccca

SEQ ID NO: 40406 - DNA, 96 bp, Fusarium cuneirostrum
  misc_feature: 35
aacgagcgtccataactttggtctataagaggttttgttttcaagctttagctgattacaaagctggggagggacacttgtgtcacggggacccca

SEQ ID NO: 40407 - DNA, 96 bp, Fusarium cuneirostrum
  misc_feature: 35
cttcgttcctcagtggagccgtccatccgaccttctctcactccgttcgttctcggtcttacatactggattccgctcgtccctcactctcatcca

SEQ ID NO: 40408 - DNA, 96 bp, Fusarium cuneirostrum
  misc_feature: 35
ctcctccatgatcctacactcttcgccttcgtgcctcaggctccctatttactgggaaggcaatggtgctgcgcacctaaagcctgactcagtcca

SEQ ID NO: 40409 - DNA, 96 bp, Fusarium cuneirostrum
  misc_feature: 35
tggaaaaagtgaacactgactgaagacggatgtcgagattgaaccacgaacgtggaagacgaacagtgtggatgtgagtcttctgtctttgtacac

SEQ ID NO: 40410 - DNA, 96 bp, Fusarium cuneirostrum
  misc_feature: 35
tgctgcggggaccgcaactcctgtgagaacaagtgtcatccaatgacacgcacttggtggggtcggagacccaatcaggcggaagcctgtggatca

SEQ ID NO: 40411 - DNA, 96 bp, Fusarium cuneirostrum
  misc_feature: 35
aatatagagtaatctaatataattaaccgatataaactaagagtaattcttattaatattaatctcgccttattactatattagcttaatcccgca

SEQ ID NO: 40412 - DNA, 96 bp, Fusarium cuneirostrum
  misc_feature: 35
atctcaggattgaactcaccaaaaaactgttccagttttgagctcgtttctggctcgggtctgctcgaccctcgacacacttctgtcggtcgcgca

SEQ ID NO: 40413 - DNA, 96 bp, Fusarium cuneirostrum
  misc_feature: 35
tgcctcgccccatattaaacagtggcgagcaaagtatgtggagtcggcagaagtgaagtcatcaccaactcccgtttcagcatagtcgggaaaacg

SEQ ID NO: 40414 - DNA, 96 bp, Fusarium cuneirostrum
  misc_feature: 35
tgccgagagggagcccagcagatgtaaatgttttgattttgtagagacccgaaagggttgttgagtagtgactatgtaacgggaccgttttcccga

SEQ ID NO: 40415 - DNA, 96 bp, Fusarium cuneirostrum
  misc_feature: 35
tgccaatgtcagcaagctgactaaaggcagactcagtccacacgttcgtccctcactgtcccgtgtcccgtagtccccccctataccaaggttaag

SEQ ID NO: 40416 - DNA, 96 bp, Fusarium cuneirostrum
  misc_feature: 35
tgcatggcttgccagtaacaaatgcttaccagcaacccatcgtttgtttgtttgtttgtttgtttgttttattcatagactgtcccagccgccctt

SEQ ID NO: 40417 - DNA, 96 bp, Fusarium cuneirostrum
  misc_feature: 35
cgacacactttccccggtcggccttcggcctccccactcggactctccgtcctcgtcgcccacattccatgtgatcctgccttcgcagtccatgca

SEQ ID NO: 40418 - DNA, 96 bp, Fusarium cuneirostrum
  misc_feature: 35
tgatataagcgtagcttggtgtctccgccaccaagaaaaagtgacttcgttaacagaagtgaccgatttctcggcccattctcaggatttggctca

SEQ ID NO: 40419 - DNA, 96 bp, Fusarium cuneirostrum
  misc_feature: 35
tgagtgtgacgaaggaacacgtagcgacgttactaaaacaccacaagatgtggttcagttatcttcatgagagtgcatgatgacctcaagtggagg

SEQ ID NO: 40420 - DNA, 96 bp, Fusarium cuneirostrum
  misc_feature: 35
tgacgtgagtaaagtaggagggagcctgtggggcgaccgtaagacagaggggcgagattgtgtcgagcccgaatgtgaaatttttcgagattttgg

SEQ ID NO: 40421 - DNA, 96 bp, Fusarium cuneirostrum
  misc_feature: 35
cgaagaacaacagcgtcattccaaacgaggggaaccgagtttgggaagagaaagtggacggaacgttagttctgtccctgtttttttaaattgtca

SEQ ID NO: 40422 - DNA, 96 bp, Fusarium cuneirostrum
  misc_feature: 35
tctttcaactgtatcagacaactgactagccacaagtcgacaagaacaccaagcacctgtctccagaccatgtgccgcatcccaggaccacaatac

SEQ ID NO: 40423 - DNA, 96 bp, Fusarium cuneirostrum
  misc_feature: 35
tcttaagtctttctaagataataaaacctatataggtaatacttattagattacctacttccttattgtaagagactgagctcttatctaagccgc

SEQ ID NO: 40424 - DNA, 96 bp, Fusarium cuneirostrum
  misc_feature: 35
cgatgctttgtgagacttaccggaataggtaatggtgatgacctcaagtggtattgtagttagtatagacagtgatatgtgagcacaaccgagaga

SEQ ID NO: 40425 - DNA, 96 bp, Fusarium cuneirostrum
  misc_feature: 35
gcgccgagacttgacgattaggcaagaatgatagagcgaaagcgatcacgaacgggtgagtgataatgatttgtgtctggacacatgtgcacgaga

SEQ ID NO: 40426 - DNA, 96 bp, Fusarium cuneirostrum
  misc_feature: 35
tctacggtccagcgtgtgcgctgtgacgatctgcttcttggacgcggatctgctgaagcggaggttgtctgaactaccgacctttttactcgaagg

SEQ ID NO: 40427 - DNA, 96 bp, Fusarium cuneirostrum
  misc_feature: 35
ataataatacttaaataaacttgacgagcaccactcgactttaaatatggcgagcacttacttaatgtgacttttgtaattatttgtgactgtaga

SEQ ID NO: 40428 - DNA, 96 bp, Fusarium cuneirostrum
  misc_feature: 35
tctacaaatctcaccaagttcacattgcatctatctacactaaaaatctccaagatcgtcatcgacccattcatcaccaaactcgtccacaccctc

SEQ ID NO: 40429 - DNA, 96 bp, Fusarium cuneirostrum
  misc_feature: 35
attgaaatatatagctaattatttattacttttaggcttatttcttatattaatatcggtatttatatttaggctattacttattagatattacga

SEQ ID NO: 40430 - DNA, 96 bp, Fusarium cuneirostrum
  misc_feature: 35
aatcctgagaatgggccgagaaatcggtcacttctgttaacgaagtcactttttcttggtggcggagacaccaagctacgcttatatcactaccga

SEQ ID NO: 40431 - DNA, 96 bp, Fusarium cuneirostrum
  misc_feature: 35
ggagacccaatcaggcggaagcctgtggatcatttgggccgcgagaggtggcctacaagaagggtgtcgcaagacagaggatttctggaaatccga

SEQ ID NO: 40432 - DNA, 96 bp, Fusarium cuneirostrum
  misc_feature: 35
gagggatggactatctaataaactcgagtaaagagttacgagcctcgcggagagaggtcttccattccttttttaaatacggagcccgtagggcga

SEQ ID NO: 40433 - DNA, 96 bp, Fusarium cuneirostrum
  misc_feature: 35
gtctcctcatctgcatatgaagaatgataagctcccgcaggggaggcaggaactgtagtcctctaccgaccggagggaggtgcggagcgtagtcga

SEQ ID NO: 40434 - DNA, 96 bp, Fusarium cuneirostrum
  misc_feature: 35
tcctcgcactcgaaccatctcgttcatcactccgtgatacaaaagaataaaccacgttcgcccgtctcactaaatctccgattgaaataccgtcac

SEQ ID NO: 40435 - DNA, 96 bp, Fusarium cuneirostrum
  misc_feature: 35
aagaacctgcttagtaagctgcttagtaagctgcttagtaagctgcttagtaagctgcttagtaagctgcttagtaagctgcttagtaagctagga

SEQ ID NO: 40436 - DNA, 96 bp, Fusarium cuneirostrum
  misc_feature: 35
gtttttcgagcgggttataactttggtgatataagaggatttggggattgaggggaccccaaccggcttggagacagcttgctggcccttgacgga

SEQ ID NO: 40437 - DNA, 96 bp, Fusarium cuneirostrum
  misc_feature: 35
tcagtttgttgattgaggcagcgccgagacttgacgattaggcaagaatgatagagcgaaagcgatcacgaacgggtgagtgataatgatttgtgt

SEQ ID NO: 40438 - DNA, 96 bp, Fusarium cuneirostrum
  misc_feature: 35
tcagggcgaggtgcagaacgagtcgaccgacagggagacgatgtgatgttactttaattcaacagagatgcgctctgtgaatcccctcacgtaaac

SEQ ID NO: 40439 - DNA, 96 bp, Fusarium cuneirostrum
  misc_feature: 35
tatagacactcacctgttcgtgtttccacggccgtggaataaacagaactgattccagtcgaaatcagactcgactccgtctcacacaaaaaaata

SEQ ID NO: 40440 - DNA, 96 bp, Fusarium cuneirostrum
  misc_feature: 35
taatcatagaacaaaacacatgatgtaacatcaccataatcatatcaaattttgctacaacacaatttccaccatcacctttcgctatgcaaaata

SEQ ID NO: 40441 - DNA, 96 bp, Fusarium cuneirostrum
  misc_feature: 35
tatttctcgttagtgatataagctaggttgctcccttcggtcgcgggaagtctctatacttccttaacatttgtgaccaaattgtcactccgttcc

SEQ ID NO: 40442 - DNA, 96 bp, Fusarium cuneirostrum
  misc_feature: 35
gacgtaggacgcagcccgagggatggactatctaataaactcgagtaaagagttacgagcctcgcggagagaggtcttccattccttttttaaata

SEQ ID NO: 40443 - DNA, 96 bp, Fusarium cuneirostrum
  misc_feature: 35
agcgagataattaattaaaggggcgatataattatatataattaggttagattatagataaccgagatatccgatatattagataatttagtaata

SEQ ID NO: 40444 - DNA, 96 bp, Fusarium cuneirostrum
  misc_feature: 35
tatattagattctaagtcataaattatattacgcttaaaactatctattatatattttactttactttaatagcttagcttattattttttattta

SEQ ID NO: 40445 - DNA, 96 bp, Fusarium cuneirostrum
  misc_feature: 35
tatagttaagataatacatataactataatatatgcgataataataagtataaggataactatattacctatactatatcgggaaactaggaagcc

SEQ ID NO: 40446 - DNA, 96 bp, Fusarium cuneirostrum
  misc_feature: 35
tatactttattatcttcttttttatttttatttttttccttttttttcttatctcttattttttttctttttatttatttttatatttattttatt

SEQ ID NO: 40447 - DNA, 96 bp, Fusarium cuneirostrum
  misc_feature: 35
tatacgaaaagaaagcatgacgattactttcaagatagccattcagctcctcgggatgacctctacgcaccggactcctagaagcaaatataaaat

SEQ ID NO: 40448 - DNA, 96 bp, Fusarium cuneirostrum
  misc_feature: 35
aataattaatagaatagagcctacttatacctattataattacttaagttaacttaattaatataaaagaccttataatatataagggactttata

SEQ ID NO: 40449 - DNA, 96 bp, Fusarium cuneirostrum
  misc_feature: 35
tagtagtagacttttcccaatgtagatatcgtgataacctcattttgtgtaacctgtgacataacttgattgattgagcgagccaccactttactg

SEQ ID NO: 40450 - DNA, 96 bp, Fusarium cuneirostrum
  misc_feature: 35
cttacctctcgctacgctcgagtgcggagtgacaagtcactccttagcgagacaaaataaatctcgctctcccttacgggacaagcataattacta

SEQ ID NO: 40451 - DNA, 96 bp, Fusarium cuneirostrum
  misc_feature: 35
tagacagtggaattagcctcaagatgatccaatctcacgagctcaattcatacgaaaataatgctcaatgagcacgccaattgctggggtttttgg

SEQ ID NO: 40452 - DNA, 96 bp, Fusarium cuneirostrum
  misc_feature: 35
tactttatatatgctcgcgtaacacaagtgcgggagctcaccctactgtaagctctaggtttttcagcctcgctccctacctacttagtactcgct

SEQ ID NO: 40453 - DNA, 96 bp, Fusarium cuneirostrum
  misc_feature: 35
tactaactacaataccacttgaggtcatcaccattacctattccggtaagtctcacaaagcatcgttggagttactcctccacacttgacccaact

SEQ ID NO: 40454 - DNA, 96 bp, Fusarium cuneirostrum
  misc_feature: 35
tacggctccggtcgggtttgtgtgtgcccacgcacccactttctctccgttccatttcattccacatttcatttcatgcctacacattcaaaggat

SEQ ID NO: 40455 - DNA, 96 bp, Fusarium cuneirostrum
  misc_feature: 35
tacgattcaaaataataataatgtcacatatgcacagctcgctcgattaaataaagtatgaagtggtgctcgtcaaaagtatatttagtgtttgcc

SEQ ID NO: 40456 - DNA, 96 bp, Fusarium cuneirostrum
  misc_feature: 35
taccataacgctcccgcaaccctgactcgatcacctctcgcaggataccaagtcgatcgtacatctccttcactacttcttccttccgaagatagc

SEQ ID NO: 40457 - DNA, 96 bp, Fusarium cuneirostrum
  misc_feature: 35
gctattcttgagagcatattactgcgtcgcttatctgacgcatatcttttctacggtaagctatcttcggaaggaagaagtagtgaaggagatgta

SEQ ID NO: 40458 - DNA, 96 bp, Fusarium cuneirostrum
  misc_feature: 35
tacagaggtgcagttccctcacaagatcctccgtcgtaacctccttcggtgctacaagataaatcccgaggacccgtcctctcatgcgcgacgcgc

SEQ ID NO: 40459 - DNA, 96 bp, Fusarium cuneirostrum
  misc_feature: 35
ataatgagcaaggtcgcaaggtcactgctcacgataacatcatcaattgaccaacagtcaatgcgcacatcgaaagatgataccgaagtgggtgta

SEQ ID NO: 40460 - DNA, 96 bp, Fusarium cuneirostrum
  misc_feature: 35
taattgtagtgttagatggaattgtgacgtagaatgtgaatggaacaggagtggtgagagttacaccacttgagtcccgaacggatgagcaagccc

SEQ ID NO: 40461 - DNA, 96 bp, Fusarium cuneirostrum
  misc_feature: 35
taatgtgtaggctctgaggccaaatctgttatattctgaggatggctgaggatattgcaaaaccctctggtgaacaagcagctgtaatcacatgtc

SEQ ID NO: 40462 - DNA, 96 bp, Fusarium cuneirostrum
  misc_feature: 35
ataactgaaccacatcttgtggtgttttagtaacgtcgctacgtgttccttcgtcacactcactccgcacgtcgccctccgggctccgtaggatta

SEQ ID NO: 40463 - DNA, 96 bp, Fusarium cuneirostrum
  misc_feature: 35
atctacagtaacatcatgctcactaatctaataaaaagaataaccagggctcgtcaaacgagtttatttaaattattatttgcctcgccctgctta

SEQ ID NO: 40464 - DNA, 96 bp, Fusarium cuneirostrum
  misc_feature: 35
taaaccgatcctcattggcgatgctgaccggaagtgagtccatccgagcgcccccgcggtgtgatggccagaaatcgggccgtgttgccctcacgg

SEQ ID NO: 40465 - DNA, 96 bp, Fusarium cuneirostrum
  misc_feature: 35
taaaatatcttatagagttcttatttaaaaaagatttttagtattattttagtgatatttatagtattttcgaaaagcctataatagctaataagc

SEQ ID NO: 40466 - DNA, 96 bp, Fusarium cuneirostrum
  misc_feature: 35
gttgtagtgacgatagcttcacatgtattatgggcgagcattaaataaagacggagcgcacataaactaaaaagggcacacatattagtgagctcc

SEQ ID NO: 40467 - DNA, 96 bp, Fusarium cuneirostrum
  misc_feature: 35
gttgaagctattcgcaagtcacctgcacacacaacatcacaaaatcatggagtattcaatgctcgcccaagtaataaaaagaaaatgggtctcaac

SEQ ID NO: 40468 - DNA, 96 bp, Fusarium cuneirostrum
  misc_feature: 35
gttcttgagcccaaagcacagcttttgtcaaaaaacctcttatagaccaaagttattgcacctcgcttcgcccggtacccggtctcgctcgttagc

SEQ ID NO: 40469 - DNA, 96 bp, Fusarium cuneirostrum
  misc_feature: 35
gaggagcactacttaaggcgcagggcgcccacttcgtgtagacgatcaagtttctcagaaacttccctctttcatctacatttccttgtagtgaac

SEQ ID NO: 40470 - DNA, 96 bp, Fusarium cuneirostrum
  misc_feature: 35
cggaagcagagctgaggacataagtagggcatcgcccactgaccgaacagagtgagatttctcttcctttcatcatcattccagaggaatgtgaac

SEQ ID NO: 40471 - DNA, 96 bp, Fusarium cuneirostrum
  misc_feature: 35
atcatagaacaaaacacatgatgtaacatcaccataatcatatcaaattttgctacaacacaatttccaccatcacctttcgctatgcaaaataac

SEQ ID NO: 40472 - DNA, 96 bp, Fusarium cuneirostrum
  misc_feature: 35
atccttcaccctgcacgctacgcgctcgggctcaggactatcttgggtacatgatcacgactacgattcaaaataataataatgtcacatatgcac

SEQ ID NO: 40473 - DNA, 96 bp, Fusarium cuneirostrum
  misc_feature: 35
gtgacttagtgtgcgagtgattgattaaattgtaatcgtagatgtgaatgtgaataacttcaaaagtattttcccgaggccgaggacgtaggacgc

SEQ ID NO: 40474 - DNA, 96 bp, Fusarium cuneirostrum
  misc_feature: 35
gtgaatgtaaatgtaaatgtaaatgtcttcttttattgttttcactgagtccggcggaggaggagggacgacggagccggattggcaagagtagtg

SEQ ID NO: 40475 - DNA, 96 bp, Fusarium cuneirostrum
  misc_feature: 35
gtctattgtcaatccctcagcctgcgtcctacgtcctcggcctcgggaaaatacttttgaagttattcacattcacatctacgattacaatttaat

SEQ ID NO: 40476 - DNA, 96 bp, Fusarium cuneirostrum
  misc_feature: 35
gccgagagggagcccagcagatgtaaatgttttgattttgtagagacccgaaagggttgttgagtagtgactatgtaacgggaccgttttcccgac

SEQ ID NO: 40477 - DNA, 96 bp, Fusarium cuneirostrum
  misc_feature: 35
acaagatgtggttcagttatcttcatgagagtgcatgatgacctcaagtggaggtgcatggactgcgaaggcaggatcacatggaatgtgggcgac

SEQ ID NO: 40478 - DNA, 96 bp, Fusarium cuneirostrum
  misc_feature: 35
acagagtcgaggagtataagacagcgtcttttcccccgagaggttgagtgagcaggcgaactctgacttgttttatttttttcgaggacggaggac

SEQ ID NO: 40479 - DNA, 96 bp, Fusarium cuneirostrum
  misc_feature: 35
cctgaaacttctctacattcgcagtgagcaactatgaaagggccaaatattaattagatttgagatatgacctggcttactcccatttcctcctac

SEQ ID NO: 40480 - DNA, 96 bp, Fusarium cuneirostrum
  misc_feature: 35
gtactttagtagcaataatagttacaagatgtttactctgattttctattagtttgttcgtctctagcgcttggagaaggcaacatgatagctgtc

SEQ ID NO: 40481 - DNA, 96 bp, Fusarium cuneirostrum
  misc_feature: 35
gtaacggagtaactgtacatcgcaagactcaaaatctaccggattttgggacttttcagaaactggcacagttttaatatgggttgcgatctggcg

SEQ ID NO: 40482 - DNA, 96 bp, Fusarium cuneirostrum
  misc_feature: 35
ggttagttagatagagcttaaatataacgcggaattactaaactttagctatatataataactctgaacataatgcacactccctcaagttcaagg

SEQ ID NO: 40483 - DNA, 96 bp, Fusarium cuneirostrum
  misc_feature: 35
ggtcgctaacaatctgtaccagattctcactctgattccaggtcgttgcccatacaatctcagaaatcttcccatacaaaatttgtacaaattttg

SEQ ID NO: 40484 - DNA, 96 bp, Fusarium cuneirostrum
  misc_feature: 35
ctttcaactgtatcagacaactgactagccacaagtcgacaagaacaccaagcacctgtctccagaccatgtgccgcatcccaggaccacaatacc

SEQ ID NO: 40485 - DNA, 96 bp, Fusarium cuneirostrum
  misc_feature: 35
gggtgtgtctgggtcgacgtccgtctccccctcttttatttctcctcgtgcactcacttcagtcgcatcctgcattcatgtttgactgctgtcaat

SEQ ID NO: 40486 - DNA, 96 bp, Fusarium cuneirostrum
  misc_feature: 35
gggctacagtaacacctgctggtgactcgcttgttcaagctcgagcaggcacaaaagtaaaaaaacagaagcaagttcatgttttgcgcgacagcg

SEQ ID NO: 40487 - DNA, 96 bp, Fusarium cuneirostrum
  misc_feature: 35
gggcgagacaataacatttaaatacacttctttaaacttgtcgagcaccatttccctccctaatggcgagccatcgtgactgattgtaattgtaat

SEQ ID NO: 40488 - DNA, 96 bp, Fusarium cuneirostrum
  misc_feature: 35
acaaaatgattgctgacctaaggatgtcttggctcagaaatattcaagaagggaatagctccgtatcctaccaacaattcagcagcaatgttgccc

SEQ ID NO: 40489 - DNA, 96 bp, Fusarium cuneirostrum
  misc_feature: 35
atttctcgttagtgatataagctaggttgctcccttcggtcgcgggaagtctctatacttccttaacatttgtgaccaaattgtcactccgttccc

SEQ ID NO: 40490 - DNA, 96 bp, Fusarium cuneirostrum
  misc_feature: 35
ggcactaacaatcgctacacgattcccacctcaatctcgcgatttcgcccgccattctcagtttcgttcacatacaaaaagtatgtcgatttgagt

SEQ ID NO: 40491 - DNA, 96 bp, Fusarium cuneirostrum
  misc_feature: 35
ggcaacccatgaagagttacgagcgcccgcggagggccgagtctatgactatatccttagtacggacgaccggagggaggacgtgcggagtgagtg

SEQ ID NO: 40492 - DNA, 96 bp, Fusarium cuneirostrum
  misc_feature: 35
gaacggatgagcaagccccgtaggggcgcagggaagactgagggattggcaatagtcattacaccgccggaggcccgagtcggaactgtataatcc

SEQ ID NO: 40493 - DNA, 96 bp, Fusarium cuneirostrum
  misc_feature: 35
ggagtagagacgaccaagtataatgttgtaggatatcacacgtgtggggtgtgatttagttgcctttcttagtagttgtgatagcttcatttatct

SEQ ID NO: 40494 - DNA, 96 bp, Fusarium cuneirostrum
  misc_feature: 35
ggacgacgcaatgatcggttgactaaggacgggaacgaatggaatgagtggaggccggtggggacccatgtaagacgagcggagcgagcgaatggg

SEQ ID NO: 40495 - DNA, 96 bp, Fusarium cuneirostrum
  misc_feature: 35
attccaggttctagcccatacattctcagaatcgaactcatacaaaatttgtacaaatttcagatcaaactgaaatgcgaccggcgcagagacagc

SEQ ID NO: 40496 - DNA, 96 bp, Fusarium cuneirostrum
  misc_feature: 35
ccaaacggcgaagccgtttcttaaccttggtatagggggggactacgggacacgggacagtgagggacgaacgtagtgtcactaaggcgaccgagc

SEQ ID NO: 40497 - DNA, 96 bp, Fusarium cuneirostrum
  misc_feature: 35
aatcgtgcctttaaggcctaatatacttatattaaccttctaaggggcccttaagccctctaaggctgcaataaaggccttagccttaaggatagc

SEQ ID NO: 40498 - DNA, 96 bp, Fusarium cuneirostrum
  misc_feature: 35
gctacaagataaatcccgaggacccgtcctctcatgcgcgacgcgccatcacaactcgactcttcgtctcggtccatatcgtcgccggtccccgtc

SEQ ID NO: 40499 - DNA, 96 bp, Fusarium cuneirostrum
  misc_feature: 35
ctcgcaggataccaagtcgatcgtacatctccttcactacttcttccttccgaagatagcttaccgtagaaaagatatgcgtcagataagcgacgc

SEQ ID NO: 40500 - DNA, 96 bp, Fusarium cuneirostrum
  misc_feature: 35
agacgctctatacgctcctgtgatccagatcttgccctttcttctgttagaaacgtgctatgattgccaggctggttattttctaatgccttacgc

SEQ ID NO: 40501 - DNA, 96 bp, Fusarium cuneirostrum
  misc_feature: 35
gcgctgtgacgatctgcttcttggacgcggatctgctgaagcggaggttgtctgaactaccgacctttttactcgaaggagtgaccgccttttatt

SEQ ID NO: 40502 - DNA, 96 bp, Fusarium cuneirostrum
  misc_feature: 35
atcgtcatcgacccattcatcaccaaactcgtccacaccctcgacgagtgtcttcacctcttctacagccctcggcttcacctccgatatgggcgc

SEQ ID NO: 40503 - DNA, 96 bp, Fusarium cuneirostrum
  misc_feature: 35
gcgagataattaattaaaggggcgatataattatatataattaggttagattatagataaccgagatatccgatatattagataatttagtaatat

SEQ ID NO: 40504 - DNA, 96 bp, Fusarium cuneirostrum
  misc_feature: 35
ccgttttcccgactatgctgaaacgggagttggtgatgacttcacttctgccgactccacatactttgctcgccactgtttaatatggggcgaggc

SEQ ID NO: 40505 - DNA, 96 bp, Fusarium cuneirostrum
  misc_feature: 35
catgtcctccgacatgagaaccaactgtctcacgtccgttcgcagtataaaaaaaggataaatgtatttctctcgaaataacagctcgccgtaggc

SEQ ID NO: 40506 - DNA, 96 bp, Fusarium cuneirostrum
  misc_feature: 35
atgatataactaatatattttctaacccgtattccgctacttaaggttactatatttagctacttcctttagtctggtattataattagtctcggc

SEQ ID NO: 40507 - DNA, 96 bp, Fusarium cuneirostrum
  misc_feature: 35
gccaggaaccaggaacaaagaagaggatccaggaacgggaacaggaacaggaacaggaacaggaaacagattccagagattccgtgcggctttcgt

SEQ ID NO: 40508 - DNA, 96 bp, Fusarium cuneirostrum
  misc_feature: 35
gcagcccgagggatggactatctaataaactcgagtaaagagttacgagcctcgcggagagaggtcttccattccttttttaaatacggagcccgt

SEQ ID NO: 40509 - DNA, 96 bp, Fusarium cuneirostrum
  misc_feature: 35
gcaaacgagcgtgctctaactttggtctataagaggtttttttccaagcggattatccgcggttaaaactggggagaggagcttgtctccgagggg

SEQ ID NO: 40510 - DNA, 96 bp, Fusarium cuneirostrum
  misc_feature: 35
catgttgccttctccaagcgctagagacgaacaaactaatagaaaatcagagtaaacatcttgtaactattattgctactaaagtacacctcaatc

SEQ ID NO: 40511 - DNA, 96 bp, Fusarium cuneirostrum
  misc_feature: 35
atatgtgtgccctttttagtttatgtgcgctccgtctttatttaatgctcgcccataatacatgtgaagctatcgtcactacaacatcaggtaatc

SEQ ID NO: 40512 - DNA, 96 bp, Fusarium cuneirostrum
  misc_feature: 35
gatatgacaccagcagagcgacacaaagtagcaagagatatcgcgagaattcccggaatcatcaaagaccagcttgcactagaagggtttcagttt

SEQ ID NO: 40513 - DNA, 96 bp, Fusarium cuneirostrum
  misc_feature: 35
gagcatgttttaatctgatgtgaataacttcaaaagtattttcccgaggccgaggacgtaggacgcaggctgagggattgacaatagactgaactc

SEQ ID NO: 40514 - DNA, 96 bp, Fusarium cuneirostrum
  misc_feature: 35
aagggctttctcaattgtcaggatgtagccttaaatgtctctgctctacgacgaacttgtctcaccgcataaagctgtctggaacaagaatgcctc

SEQ ID NO: 40515 - DNA, 96 bp, Fusarium cuneirostrum
  misc_feature: 35
gaggcaggaactgtagtcctctaccgaccggagggaggtgcggagcgtagtcgagcagggcgagacgatgcgaggttactataacccatgagtgat

SEQ ID NO: 40516 - DNA, 96 bp, Fusarium cuneirostrum
  misc_feature: 35
gagctcagagagcgagtcgatcttggattcctatgcaagtcgtctttcaattgcgctggcgcgcgactaggaacagagtgacggtatttcaatcgg

SEQ ID NO: 40517 - DNA, 96 bp, Fusarium cuneirostrum
  misc_feature: 35
cgcatacttctctcctaatagctataatattattatagatatcctattaagtcactaaagaattgtaattctattatatatatatttagatatctc

SEQ ID NO: 40518 - DNA, 96 bp, Fusarium cuneirostrum
  misc_feature: 35
aggcaaccgtcgcatctgcctggaggttggttgtcactgaccaatcatcccgctcggacaaagcggagtgaggtccgtcagcggttaaaccgtctc

SEQ ID NO: 40519 - DNA, 96 bp, Fusarium cuneirostrum
  misc_feature: 35
gagacagatgtcgaggggaaagggtacatggcgagagcagcgctcgaggtggatttgacggagtctcaaaactggaacagtttttgtatggactcg

SEQ ID NO: 40520 - DNA, 96 bp, Fusarium cuneirostrum
  misc_feature: 35
gagaaaatagaaaaagacagcgacgtccgtcgtatacaatgacctccggtcaaataaaaaagtaaaggtcgttggatccccaactccagaaagcgt

SEQ ID NO: 40521 - DNA, 96 bp, Fusarium cuneirostrum
  misc_feature: 35
ctaataagttattaatattatatatatattaaccttaattatcttataattataggattataaggcatttataataatatcttaagctcttaagtc

SEQ ID NO: 40522 - DNA, 96 bp, Fusarium cuneirostrum
  misc_feature: 35
aaagtgacatccccagttttaaccaacgcggtgcgttttggaaaaaaacctcttatagaccaaagttaggagcaccagaatcgacgctgtcgcgtc

SEQ ID NO: 40523 - DNA, 96 bp, Fusarium cuneirostrum
  misc_feature: 35
cttcgcttcgctcggtattgagaccacagtctctgcttggagatgaactcttcacatgcagatgagactctactagtcaatccttcaggctgcgtc

SEQ ID NO: 40524 - DNA, 96 bp, Fusarium cuneirostrum
  misc_feature: 35
cccaaacggcgaagccgtttcttaaccttggtatagggggggactacgggacacgggacagtgaagaatgaacgtgtgtacccaggagtaatcgtc

SEQ ID NO: 40525 - DNA, 96 bp, Fusarium cuneirostrum
  misc_feature: 35
cttccctgcgcccctacggggcttgctcatccgttcgggactcaagtggtgtaactctcaccactcctgttccattcacattctacgtcacaattc

SEQ ID NO: 40526 - DNA, 96 bp, Fusarium cuneirostrum
  misc_feature: 35
atatatattctatagcttcttagagtttattatttatttaaatataattaaaataaggtcccctttatttatattattataaataattaagtcttc

SEQ ID NO: 40527 - DNA, 96 bp, Fusarium cuneirostrum
  misc_feature: 35
gaacgttatgaggaggaacgacgaataaggtgcagcgtagcgatccgggcataagtggatactgacgagggggcgaggaagtataagacggaacgt

SEQ ID NO: 40528 - DNA, 96 bp, Fusarium cuneirostrum
  misc_feature: 35
atgatcctacactcttcgccttcgtgcctcaggctccctatttactgggaaggcaatggtgctgcgcacctaaagcctgactcagtccacacgttc

SEQ ID NO: 40529 - DNA, 96 bp, Fusarium cuneirostrum
  misc_feature: 35
actcgaaccatctcgttcatcactccgtgatacaaaagaataaaccacgttcgcccgtctcactaaatctccgattgaaataccgtcactctgttc

SEQ ID NO: 40530 - DNA, 96 bp, Fusarium cuneirostrum
  misc_feature: 35
gaaagggttgttgagtagtgactatgtaacgggaccgttttcccgactatgctgaaacgggagttggtgatgacttcacttctgccgactccacat

SEQ ID NO: 40531 - DNA, 96 bp, Fusarium cuneirostrum
  misc_feature: 35
cttttttcttctttcatgacccgtttggcgttagaagcactcttgattgaggtgtactttagtagcaataatagttacaagatgtttactctgatt

SEQ ID NO: 40532 - DNA, 96 bp, Fusarium cuneirostrum
  misc_feature: 35
ctttaaataatatttaatgggacgagcaccattttttatatttggcgagctgtgatttttaattatatttgtgatcgtgatgttatttgatgtgtg

SEQ ID NO: 40533 - DNA, 96 bp, Fusarium cuneirostrum
  misc_feature: 35
cttggtgtctccgccaccaagaaaaagtgacttcgttaacagaagtgaccgatttctcggcccattctcaggatttggctcaccaaatgccagaat

SEQ ID NO: 40534 - DNA, 96 bp, Fusarium cuneirostrum
  misc_feature: 35
cttctcgcatcgctttgcctcatgtgagccacccacgaggtcgtggcgtaatgcaggaaaggaaagtcgattgttagcttatcacgcccgtagttt

SEQ ID NO: 40535 - DNA, 96 bp, Fusarium cuneirostrum
  misc_feature: 35
cttaatgatacttgtgatttgtatgtgaccttaaatgaaatgtgatatgaacgtagtcgtagtaagaagacatgggaatggcttcatccataaatg

SEQ ID NO: 40536 - DNA, 96 bp, Fusarium cuneirostrum
  misc_feature: 35
cattccaggttctagcccatacattctcagaatcgaactcatacaaaatttgtacaaatttcagatcaaactgaaatgcgaccggcgcagagacag

SEQ ID NO: 40537 - DNA, 96 bp, Fusarium cuneirostrum
  misc_feature: 35
caacaacgtgaggagacgaacagagtgagtttgtattctatccggaggaggagtgaacgagtgagcgatcatctacttacattaattgctggacag

SEQ ID NO: 40538 - DNA, 96 bp, Fusarium cuneirostrum
  misc_feature: 35
cagcaaccgatcagtggccctagccaccgggctctaacccggcagctctgtttgtttgtttgtttgtttgtttgttttattcatagactgtcccag

SEQ ID NO: 40539 - DNA, 96 bp, Fusarium cuneirostrum
  misc_feature: 35
ctcttttcatgatctagtgaagttattcgcacttcacctcttcacattatctagcaccacttcgacctcgttcctcggtctcgtactgcacgtcgg

SEQ ID NO: 40540 - DNA, 96 bp, Fusarium cuneirostrum
  misc_feature: 35
ctcttcgccttcgtgcctcaggctccctatttactgggaaggcaatggtgctgcgcacctaaagcctgactcagtccacacgttcgtccctcactg

SEQ ID NO: 40541 - DNA, 96 bp, Fusarium cuneirostrum
  misc_feature: 35
ctctcggttgtgctcacatatcactgtctatactaactacaataccacttgaggtcatcaccattacctattccggtaagtctcacaaagcatcgt

SEQ ID NO: 40542 - DNA, 96 bp, Fusarium cuneirostrum
  misc_feature: 35
acgagggcgacggattcctccgtgacggggctctttgtgggcattttgatcgccgtgccgactcatggaaagggcctgctggagcctaggaacgag

SEQ ID NO: 40543 - DNA, 96 bp, Fusarium cuneirostrum
  misc_feature: 35
atgcagttgccttgctattcgcgcgttcgttcatcaatctggcgacacacctcctggtctaacaaacctcctttctgagttttaggtaacagcgag

SEQ ID NO: 40544 - DNA, 96 bp, Fusarium cuneirostrum
  misc_feature: 35
ctcctgttccattcacattctacgtcacaattccatctaacactacaattacaattacaattacaatcagtcacgatggctcgccattagggaggg

SEQ ID NO: 40545 - DNA, 96 bp, Fusarium cuneirostrum
  misc_feature: 35
ctcctgagccgagacagattcctcaccctctctcatcctctctcatcctctctcatcctctctcatcctctctcatcctctctcatcctctctcat

SEQ ID NO: 40546 - DNA, 96 bp, Fusarium cuneirostrum
  misc_feature: 35
ctccgcaccccatcgctccgctcggggtagaattatacagtcatggactcggccctgcgggcagctgcactactcttgccaatccggctccgtcgt

SEQ ID NO: 40547 - DNA, 96 bp, Fusarium cuneirostrum
  misc_feature: 35
caaaaagtgttcaaattttgggatcagaactgagctcaaaatttgaacactttttgtatgggttcgattctggcattgtatgggtaaaatgctgag

SEQ ID NO: 40548 - DNA, 96 bp, Fusarium cuneirostrum
  misc_feature: 35
aagacgaacagtgtggatgtgagtcttctgtctttgtacactgagactgctgctgtatacgcagctgggttacctgaacgtgcgtaagtcagtgag

SEQ ID NO: 40549 - DNA, 96 bp, Fusarium cuneirostrum
  misc_feature: 35
ataattaagaaataaagtatttaattaaatactttataatctatatttttgtaagagactgagctcttatataagctgcctaaaaaggctgcttag

SEQ ID NO: 40550 - DNA, 96 bp, Fusarium cuneirostrum
  misc_feature: 35
cggttgatctccaacagctctccagctgagtaagaaagggtctcgaatccctctcaaccgtgcttccgcaaacagagaaaatagaaaaagacagcg

SEQ ID NO: 40551 - DNA, 96 bp, Fusarium cuneirostrum
  misc_feature: 35
cggaggcgtcttgagtagaactcagacttgtattcttacttttgcaagtaagaaagagcgagggacgagtttgatcgagtgatcgatcttgttctt

SEQ ID NO: 40552 - DNA, 96 bp, Fusarium cuneirostrum
  misc_feature: 35
cgcatttatatatagcgagcatgttttaatctgatgtgaataacttcaaaagtattttcccgaggccgaggacgtaggacgcaggctgagggattg

SEQ ID NO: 40553 - DNA, 96 bp, Fusarium cuneirostrum
  misc_feature: 35
cctcgcactcgaaccatctcgttcatcactccgtgatacaaaagaataaaccacgttcgcccgtctcactaaatctccgattgaaataccgtcact

SEQ ID NO: 40554 - DNA, 96 bp, Fusarium cuneirostrum
  misc_feature: 35
cctcatgactccacattcgtcgcatcccactctcgtgtttgactactgtcaattgaggccatcacaaactgtgattacaacgcatcttgcgtgagt

SEQ ID NO: 40555 - DNA, 96 bp, Fusarium cuneirostrum
  misc_feature: 35
aaagaacctgcttagtaagctgcttagtaagctgcttagtaagctgcttagtaagctgcttagtaagctgcttagtaagctgcttagtaagctagg

SEQ ID NO: 40556 - DNA, 96 bp, Fusarium cuneirostrum
  misc_feature: 35
ccgaacggatgagcaagccccgtaggggcgcagggaagactgagggattggcaatagtcattacaccgccggaggcccgagtcggaactgtataat

SEQ ID NO: 40557 - DNA, 96 bp, Fusarium cuneirostrum
  misc_feature: 35
cccttcttccccattcgctcgctccgctcgtcttacatgggtccccaccggcctccactcattccattcgttcccgtccttagtcaaccgatcatt

SEQ ID NO: 40558 - DNA, 96 bp, Fusarium cuneirostrum
  misc_feature: 35
cattcttaacgaaatggggcgagataataatacttaaataaacttgacgagcaccactcgactttaaatatggcgagcacttacttaatgtgactt

SEQ ID NO: 40559 - DNA, 96 bp, Fusarium cuneirostrum
  misc_feature: 35
catggtagtacgttatgtacggacataatcttacttgcgagggtgcgagacaagtataagggcaggggattgcccgttgcacttggagtgcttttg

SEQ ID NO: 40560 - DNA, 96 bp, Fusarium cuneirostrum
  misc_feature: 35
catccgggttcacattcaacttgttgcatcaaggactcagatcctaacgacataagtttaaatagctatgcccgaacacatgactgctcaatttct

SEQ ID NO: 40561 - DNA, 96 bp, Fusarium cuneirostrum
  misc_feature: 35
agagactgtggtctcaataccgagcgaagcgaaggtgcggaacggagtgagagcgtagcgagcacgaagtgaggttacttaaaacaccagagtatg

SEQ ID NO: 40562 - DNA, 96 bp, Fusarium cuneirostrum
  misc_feature: 35
cagttgtctgatacagttgaaagagtgggtgaactgtgttttaagattgcggaggcgtgtggacggagcggtaatccaccagcataccgcgaggtt

SEQ ID NO: 40563 - DNA, 96 bp, Fusarium cuneirostrum
  misc_feature: 35
actcccgtttcagcatagtcgggaaaacggtcccgttacatagtcactactcaacaaccctttcgggtctctacaaaatcaaaacatttacatctg

SEQ ID NO: 40564 - DNA, 96 bp, Fusarium cuneirostrum
  misc_feature: 35
aaagtgaaagtgaaagtgaaagtgaaagtgaaagtgaaagtgaaagtgaaagtgaaagtgaaagtgaaagtgaaagtgaaagtgaaagggaaagtg

SEQ ID NO: 40565 - DNA, 96 bp, Fusarium cuneirostrum
  misc_feature: 35
cacttgtgttacgcgagcatatataaagtagatggtgataacctcaaaagagtccacgagccgagcgcgtagcgtgcaggcgaggggattgtcaat

SEQ ID NO: 40566 - DNA, 96 bp, Fusarium cuneirostrum
  misc_feature: 35
cacttatggttgtaccaaacgtacggacgtaatacccatgcacgcagacagtggtcgagtacataaacccagagggttttcttttcatctaatgtt

SEQ ID NO: 40567 - DNA, 96 bp, Fusarium cuneirostrum
  misc_feature: 35
aaaggtggagggagtgcggatgcgcgaccggtagacacacatcgagggaggggaccgaccgagcaagaatccatttcaaaatttgtacaaaatttg

SEQ ID NO: 40568 - DNA, 96 bp, Fusarium cuneirostrum
  misc_feature: 35
attcacattctacgtcacaattccatctaacactacaattacaattacaattacaatcagtcacgatggctcgccattagggagggaaatggtgct

SEQ ID NO: 40569 - DNA, 96 bp, Fusarium cuneirostrum
  misc_feature: 35
aggaacgacgcagccggaaggattgtcaaagtcttctcatctgccagggaagagttacttccccaagcaggaactgtgaaatagagaccgagccat

SEQ ID NO: 40570 - DNA, 96 bp, Fusarium cuneirostrum
  misc_feature: 35
aggacatcacgattgctggacgtgatgggaatgcagtctttgattcggtcaagctcacgcctcttggttccagctggtgttagagtagctgtagat

SEQ ID NO: 40571 - DNA, 96 bp, Fusarium cuneirostrum
  misc_feature: 35
atattactgcgtcgcttatctgacgcatatcttttctacggtaagctatcttcggaaggaagaagtagtgaaggagatgtacgatcgacttggtat

SEQ ID NO: 40572 - DNA, 96 bp, Fusarium cuneirostrum
  misc_feature: 35
agtagtggagcgaacactaaataaaaggctccaacagaagtgagcgacacgtaattgtgatgttgtgcgtataaatggtatcgtgaatgtgtttgt

SEQ ID NO: 40573 - DNA, 96 bp, Fusarium cuneirostrum
  misc_feature: 35
agggaagactgagggattggcaatagtcattacaccgccggaggcccgagtcggaactgtataatcctacggagcccggagggcgacgtgcggagt

SEQ ID NO: 40574 - DNA, 96 bp, Fusarium cuneirostrum
  misc_feature: 35
aggaaaggggagatcgccaatttaattttcattgaaatatgggaggagtagagacgacgacagacattgtgtatggtatccgggaacagggaggtt

SEQ ID NO: 40575 - DNA, 96 bp, Fusarium cuneirostrum
  misc_feature: 35
accataacgctcccgcaaccctgactcgatcacctctcgcaggataccaagtcgatcgtacatctccttcactacttcttccttccgaagatagct

SEQ ID NO: 40576 - DNA, 96 bp, Fusarium cuneirostrum
  misc_feature: 35
aaagtacgggcggcgtttcattatccagtcgcacgaacctagttggtgatatgggacagcttatctatgctaacctaattaggaaatcgtcacgct

SEQ ID NO: 40577 - DNA, 96 bp, Fusarium cuneirostrum
  misc_feature: 35
agacgttccgtcttatacttcctcgccccctcgtcagtatccacttatgcccggatcgctacgctgcaccttattcgtcgttcctcctcataacgt

SEQ ID NO: 40578 - DNA, 96 bp, Fusarium cuneirostrum
  misc_feature: 35
actggagagtcgaggggaagagggaggcccagagggccgaccagaatccagctcaaaactggaacagttttttggtgagttcgtttctgagattgt

SEQ ID NO: 40579 - DNA, 96 bp, Fusarium cuneirostrum
  misc_feature: 35
aaacaagcctatagactagcacgagtgagctgggtaccagcgaaacgagggctgataactttggtctataagcggtttcctttcaaacgcgtgcgt

SEQ ID NO: 40580 - DNA, 96 bp, Fusarium cuneirostrum
  misc_feature: 35
acaatctgaaatcatgctcgccaagtgaaaaaaagtagtggttctcgacacattaaaagtggttttaataattatttgtctcgccccacgtaaggt

SEQ ID NO: 40581 - DNA, 96 bp, Fusarium cuneirostrum
  misc_feature: 35
aataatgagcaaggtcgcaaggtcactgctcacgataacatcatcaattgaccaacagtcaatgcgcacatcgaaagatgataccgaagtgggtgt

SEQ ID NO: 40582 - DNA, 96 bp, Fusarium cuneirostrum
  misc_feature: 35
aaacaagcctatagactagcacgagtgagctgggtaccagcgaaacgagggctgataactttggtctataagcggtttttttgacaaaactcgttt

SEQ ID NO: 40583 - DNA, 96 bp, Fusarium cuneirostrum
  misc_feature: 34
atagcactcctctcgtcgtgtgtacgcggtcgcgtacataaagaacaagatcgatcactcgatcaaactcgtccctcgctctttcttacttgcaaa

SEQ ID NO: 40584 - DNA, 96 bp, Fusarium cuneirostrum
  misc_feature: 34
cattaggaaacatctctttctgaaaagaagaaagaagaaagaagaaagaagaaagaagaaagaagaaagaagaaagaagaaagaagaaagaagaaa

SEQ ID NO: 40585 - DNA, 96 bp, Fusarium cuneirostrum
  misc_feature: 34
tttcgggtctctacaaaatcaaaacatttacatctgctgggctccctctcggcacacgcccaagatactgtccacaacctcatctagtacaattgg

SEQ ID NO: 40586 - DNA, 96 bp, Fusarium cuneirostrum
  misc_feature: 34
tttcccctcgacatctgtctcggtcacacatcggggtcgggtcaccctccccctcttcatggcacccacatcgtgccatcctaccttctgccacac

SEQ ID NO: 40587 - DNA, 96 bp, Fusarium cuneirostrum
  misc_feature: 34
tttatttttttcgaggacggaggacgagtttaccgcaacaacgtgaggagacgaacagagtgagtttgtattctatccggaggaggagtgaacgag

SEQ ID NO: 40588 - DNA, 96 bp, Fusarium cuneirostrum
  misc_feature: 34
cttatacgaaaagaaagcatgacgattactttcaagatagccattcagctcctcgggatgacctctacgcaccggactcctagaagcaaatataaa

SEQ ID NO: 40589 - DNA, 96 bp, Fusarium cuneirostrum
  misc_feature: 34
attttttattttactttctctttattttttatttactctctttattattacttcttcttattattaaccctctcttaccccccttttaactctaaa

SEQ ID NO: 40590 - DNA, 96 bp, Fusarium cuneirostrum
  misc_feature: 34
tttacagtcacaattacatttacaattacaatcacgtagaatcacaaaatccaagtcatcatatgctcgcatccaaagtcaagaaaatgggtctcg

SEQ ID NO: 40591 - DNA, 96 bp, Fusarium cuneirostrum
  misc_feature: 34
acagtcgctcgcctttaggcttactttttggattcattacggcgagctgttggttccagataagtgctcgcataaagataaatgaagctatcacaa

SEQ ID NO: 40592 - DNA, 96 bp, Fusarium cuneirostrum
  misc_feature: 34
agttgtgaatggcctcattttcatccacactggaatagtcccgaatcccgaggacgaaggacgcagggtgagggattgacaagagtatgttggcaa

SEQ ID NO: 40593 - DNA, 96 bp, Fusarium cuneirostrum
  misc_feature: 34
ttgatggtggcaaggtacgcagccaggcattttactctgaatattcctttactaacaaggtgtcataggaaaggggagatcgccaatttaattttc

SEQ ID NO: 40594 - DNA, 96 bp, Fusarium cuneirostrum
  misc_feature: 34
gagtgcggatgcgcgaccgacagaagtgtgtcgagggtcgagcagacccgagccagaaacgagctcaaaactggaacagttttttggtgagttcaa

SEQ ID NO: 40595 - DNA, 96 bp, Fusarium cuneirostrum
  misc_feature: 34
agaagcctatctcacacgcattaggaaacatctctttctgaaaagaagaaagaagaaagaagaaagaagaaagaagaaagaagaaagaagaaagaa

SEQ ID NO: 40596 - DNA, 96 bp, Fusarium cuneirostrum
  misc_feature: 34
tgttgcctgatgcagcagcctgatcgaactcgtcgtaaagacttcatttcttgggttgaataaagacagcttggggagaattctgtgtctagagaa

SEQ ID NO: 40597 - DNA, 96 bp, Fusarium cuneirostrum
  misc_feature: 34
aaagagatggagtgaaacgagatcgaagaagtaatagaaacctgagccatgcgaaggttgatcaagagggacagatcttggatgtgtcccgtagaa

SEQ ID NO: 40598 - DNA, 96 bp, Fusarium cuneirostrum
  misc_feature: 34
gcggatgagtgagcgtagcgaaggaagactgagggattggcaatcgtagataacccccggaggggaagcagacactgcgtaataaaaccgaccgaa

SEQ ID NO: 40599 - DNA, 96 bp, Fusarium cuneirostrum
  misc_feature: 34
ttcggactgaaatacgctgggcgttttcggaggttttgtatcttagattagtctacattgtttcctgttttggatgttgcgataccttcgtttttt

SEQ ID NO: 40600 - DNA, 96 bp, Fusarium cuneirostrum
  misc_feature: 34
gtacgaacgttccgtccacaatctcataccccgcagacagagtcgaggagtataagacagcgtcttttcccccgagaggttgagtgagcaggcgaa

SEQ ID NO: 40601 - DNA, 96 bp, Fusarium cuneirostrum
  misc_feature: 34
acggaacgttatgaggaggaacgacgaataaggtgcagcgtagcgatccgggcataagtggatactgacgagggggcgaggaagtataagacggaa

SEQ ID NO: 40602 - DNA, 96 bp, Fusarium cuneirostrum
  misc_feature: 34
ggaattgtgacgtagaatgtgaatggaacaggagtggtgagagttacaccacttgagtcccgaacggatgagcaagccccgtaggggcgcagggaa

SEQ ID NO: 40603 - DNA, 96 bp, Fusarium cuneirostrum
  misc_feature: 34
ttcccctcgacatctgtctcggtcacacatcggggtcgggtcaccctccccctcttcatggcacccacatcgtgccatcctaccttctgccacact

SEQ ID NO: 40604 - DNA, 96 bp, Fusarium cuneirostrum
  misc_feature: 34
ttcatccacactggaatagtcccgaatcccgaggacgaaggacgcagggtgagggattgacaagagtatgttggcaacccatgaagagttacgagc

SEQ ID NO: 40605 - DNA, 96 bp, Fusarium cuneirostrum
  misc_feature: 34
ttcagattgtgaatgtttatgttggtgactgtaaatgtattcctcatccatgagtcccgagcggatgagtgagcgtagcgaaggaagactgaggga

SEQ ID NO: 40606 - DNA, 96 bp, Fusarium cuneirostrum
  misc_feature: 34
gcccaagcaagaactgtgtaaagaattacggaggcgtaagccgacgtgcagtacgagaccgaggaacgaggtcgaagtggtgctagataatgtgaa

SEQ ID NO: 40607 - DNA, 96 bp, Fusarium cuneirostrum
  misc_feature: 34
ttcacagttcctgcttggggaagtaactcttccctggcagatgagaagactttgacaatccttccggctgcgtcgttcctcctcgcctccaggact

SEQ ID NO: 40608 - DNA, 96 bp, Fusarium cuneirostrum
  misc_feature: 34
tattcctatataacccttaaacttacctttaaccttaaccttttaacctagctttaaccctaattcttaaatttactattaacccttaactcctaa

SEQ ID NO: 40609 - DNA, 96 bp, Fusarium cuneirostrum
  misc_feature: 34
ttaggaaacatctctttctgaaaagaagaaagaagaaagaagaaagaagaaagaagaaagaagaaagaagaaagaagaaagaagaaagaagaaaga

SEQ ID NO: 40610 - DNA, 96 bp, Fusarium cuneirostrum
  misc_feature: 34
tggatgaggaatacatttacagtcaccaacataaacattcacaatctgaaatcatgctcgccaagtgaaaaaaagtagtggttctcgacacattaa

SEQ ID NO: 40611 - DNA, 96 bp, Fusarium cuneirostrum
  misc_feature: 34
tgtttagatcgttcgccctctgggctctattcgactgctgtctcaccctcaccactcgccgtctagctcgtggttctcttttaccactacaataac

SEQ ID NO: 40612 - DNA, 96 bp, Fusarium cuneirostrum
  misc_feature: 34
ctttcccctcgacatctgtctcggtcacacatcggggtcgggtcaccctccccctcttcatggcacccacatcgtgccatcctaccttctgccaca

SEQ ID NO: 40613 - DNA, 96 bp, Fusarium cuneirostrum
  misc_feature: 34
cctccatgatcctacactcttcgccttcgtgcctcaggctccctatttactgggaaggcaatggtgctgcgcacctaaagcctgactcagtccaca

SEQ ID NO: 40614 - DNA, 96 bp, Fusarium cuneirostrum
  misc_feature: 34
gcaatgaactcttcacttgagttcagtctattgtcaatccctcagcctgcgtcctacgtcctcggcctcgggaaaatacttttgaagttattcaca

SEQ ID NO: 40615 - DNA, 96 bp, Fusarium cuneirostrum
  misc_feature: 34
tgtattatgggcgagcattaaataaagacggagcgcacataaactaaaaagggcacacatattagtgagctcccgcatttatatatagcgagcatg

SEQ ID NO: 40616 - DNA, 96 bp, Fusarium cuneirostrum
  misc_feature: 34
aggacgagtttaccgcaacaacgtgaggagacgaacagagtgagtttgtattctatccggaggaggagtgaacgagtgagcgatcatctacttaca

SEQ ID NO: 40617 - DNA, 96 bp, Fusarium cuneirostrum
  misc_feature: 34
tggtgtttagatcgttcgccctctgggctctattcgactgctgtctcaccctcaccactcgccgtctagctcgtggttctcttttaccactacaat

SEQ ID NO: 40618 - DNA, 96 bp, Fusarium cuneirostrum
  misc_feature: 34
tggggccgacccatttgcctgagttgctcacccaacgctcaccacctacttaggttaaagcagcgagcgctcaggacactgggcgagaagggaaat

SEQ ID NO: 40619 - DNA, 96 bp, Fusarium cuneirostrum
  misc_feature: 34
gactcgcttgttcaagctcgagcaggcacaaaagtaaaaaaacagaagcaagttcatgttttgcgcgacagcgctgaagaagtgggcgtccgccca

SEQ ID NO: 40620 - DNA, 96 bp, Fusarium cuneirostrum
  misc_feature: 34
aaaaagtgttccagtttcgagctcaaagtgaactcgaatctctcgtcgcccttcgggctcctgttcccctcccatcggtcccctcggtcgggccca

SEQ ID NO: 40621 - DNA, 96 bp, Fusarium cuneirostrum
  misc_feature: 34
tggcacccgacgctattcttggttttattcggaatgtccgggagacggacaggcgttattcgtacgagcgtgtgcgaggttttttggagaaagtac

SEQ ID NO: 40622 - DNA, 96 bp, Fusarium cuneirostrum
  misc_feature: 34
tggcaatagtcattacaccgccggaggcccgagtcggaactgtataatcctacggagcccggagggcgacgtgcggagtgagtgtgacgaaggaac

SEQ ID NO: 40623 - DNA, 96 bp, Fusarium cuneirostrum
  misc_feature: 34
tggagttactcctccacacttgacccaactcaaacacagcatcatcaaatctacttcgaaactcccttctcagtacccatggcgtggataaacaag

SEQ ID NO: 40624 - DNA, 96 bp, Fusarium cuneirostrum
  misc_feature: 34
catgtaatgcagacatcgatatctagcgaggtgcgccatgtttcccggagcaagcgacatcgtcataatctgaacaaagcctgcagctaaaaagca

SEQ ID NO: 40625 - DNA, 96 bp, Fusarium cuneirostrum
  misc_feature: 34
tactctctcggttgtgctcacatatcactgtctatactaactacaataccacttgaggtcatcaccattacctattccggtaagtctcacaaagca

SEQ ID NO: 40626 - DNA, 96 bp, Fusarium cuneirostrum
  misc_feature: 34
aggagtggacgtgtgggatgatggggcccactcatggtagtacgttatgtacggacataatcttacttgcgagggtgcgagacaagtataagggca

SEQ ID NO: 40627 - DNA, 96 bp, Fusarium cuneirostrum
  misc_feature: 34
tgccacgatttgaaagtgaaagtgaaagtgaaagtgaaagtgaaagtgaaagtgaaagtgaaagtgaaagtgaaagtgaaagtgaaagtgaaagtg

SEQ ID NO: 40628 - DNA, 96 bp, Fusarium cuneirostrum
  misc_feature: 34
aacgtggtttattcttttgtatcacggagtgatgaacgagatggttcgagtgcgaggaaggacgacggaggaggacaggagagcatcggagatgca

SEQ ID NO: 40629 - DNA, 96 bp, Fusarium cuneirostrum
  misc_feature: 34
cctaatactaaatcgaggtattataggaatataataagatctataaatactaataagcggatcgatataataggctactatataataattaaatca

SEQ ID NO: 40630 - DNA, 96 bp, Fusarium cuneirostrum
  misc_feature: 34
cttgaggtcatcaccattacctattccggtaagtctcacaaagcatcgttggagttactcctccacacttgacccaactcaaacacagcatcatca

SEQ ID NO: 40631 - DNA, 96 bp, Fusarium cuneirostrum
  misc_feature: 34
tgataatccaacctcacataagtaaactgacacccacccaaccctctctccacagtagatatcaagccatggcgtttgtgaggcccaggaagcaag

SEQ ID NO: 40632 - DNA, 96 bp, Fusarium cuneirostrum
  misc_feature: 34
tgaggcttgcattcaagtcggagcgaatgccaatcttggcttcatgggcacacgcgagtcatcccgaatcatgcgctgctgtcgatgacatcagtc

SEQ ID NO: 40633 - DNA, 96 bp, Fusarium cuneirostrum
  misc_feature: 34
ggagtgcggatgcgcgaccgacagaagtgtgtcgagggtcgagcagacccgagccagaaacgagctcaaaactggaacagttttttggtgagttca

SEQ ID NO: 40634 - DNA, 96 bp, Fusarium cuneirostrum
  misc_feature: 34
tcttcccctcgactctccagtctcgggttgatgtcggtcgggccacgccctcccttctactcttaccttcaccatgacccacactccgggtcatct

SEQ ID NO: 40635 - DNA, 96 bp, Fusarium cuneirostrum
  misc_feature: 34
gcccacgacttttttctacttggcgagcacttaatgatacttgtgatttgtatgtgaccttaaatgaaatgtgatatgaacgtagtcgtagtaaga

SEQ ID NO: 40636 - DNA, 96 bp, Fusarium cuneirostrum
  misc_feature: 34
tcttacacacagtgacatttcatgtttacgtgaggggattcacagagcgcatctctgttgaattaaagtaacatcacatcgtctccctgtcggtcg

SEQ ID NO: 40637 - DNA, 96 bp, Fusarium cuneirostrum
  misc_feature: 34
tcaattgaccaacagtcaatgcgcacatcgaaagatgataccgaagtgggtgtacgaggtgagtagatgagggagtgcggatgcgcgaccgacaga

SEQ ID NO: 40638 - DNA, 96 bp, Fusarium cuneirostrum
  misc_feature: 34
tctgagctcagagagcgagtcgatcttggattcctatgcaagtcgtctttcaattgcgctggcgcgcgactaggaacagagtgacggtatttcaat

SEQ ID NO: 40639 - DNA, 96 bp, Fusarium cuneirostrum
  misc_feature: 34
ctgttgcctgatgcagcagcctgatcgaactcgtcgtaaagacttcatttcttgggttgaataaagacagcttggggagaattctgtgtctagaga

SEQ ID NO: 40640 - DNA, 96 bp, Fusarium cuneirostrum
  misc_feature: 34
tctcgttagtgatataagctaggttgctcccttcggtcgcgggaagtctctatacttccttaacatttgtgaccaaattcccactccgttctcacg

SEQ ID NO: 40641 - DNA, 96 bp, Fusarium cuneirostrum
  misc_feature: 34
tctacagtaacatcatgctcactaatctaataaaaagaataaccagggctcgtcaaacgagtttatttaaattattatttgcctcgccctgcttat

SEQ ID NO: 40642 - DNA, 96 bp, Fusarium cuneirostrum
  misc_feature: 34
tagagctctaggagcgagagggtctgagttttcgaaggcgatggacgagagggagcgagacatggaattctgtgcggatgggcacaagtttgtaga

SEQ ID NO: 40643 - DNA, 96 bp, Fusarium cuneirostrum
  misc_feature: 34
tactcgaaataaataatcgatcgtcgctccactcctattgctcgtcacttctcgttccgatatggatatacgggttcgtttgctcttgcaaagcga

SEQ ID NO: 40644 - DNA, 96 bp, Fusarium cuneirostrum
  misc_feature: 34
tcgcttgaccgtgacgatttcctcctttggattagtacagtttttgaagagcgtgacgatttcctaattaggttagcatagataagctgtcccata

SEQ ID NO: 40645 - DNA, 96 bp, Fusarium cuneirostrum
  misc_feature: 34
gaggaacgacgaataaggtgcagcgtagcgatccgggcataagtggatactgacgagggggcgaggaagtataagacggaacgtctgcccctgcga

SEQ ID NO: 40646 - DNA, 96 bp, Fusarium cuneirostrum
  misc_feature: 34
tcctgtaggttatggatgaggctcgctcagtagccagtcacgcattgaagctattcccaactcccgttcgggaaatctcacttccacagaaaagtc

SEQ ID NO: 40647 - DNA, 96 bp, Fusarium cuneirostrum
  misc_feature: 34
tccccggtcggccttcggcctccccactcggactctccgtcctcgtcgcccacattccatgtgatcctgccttcgcagtccatgcacctccacttg

SEQ ID NO: 40648 - DNA, 96 bp, Fusarium cuneirostrum
  misc_feature: 34
attagcaattggattgagtttgaggactaaattcttgctcgtacgtgagaccggagatctctgtgccgtcgctagtggcaatgctgcttgctggga

SEQ ID NO: 40649 - DNA, 96 bp, Fusarium cuneirostrum
  misc_feature: 34
acaaaaagtgttcaaattttgggatcagaactgagctcaaaatttgaacactttttgtatgggttcgattctggcattgtatgggtaaaatgctga

SEQ ID NO: 40650 - DNA, 96 bp, Fusarium cuneirostrum
  misc_feature: 34
aggatgcggttaaaatctgcttatttggtggagttggttattgaggagttggttattgaggagttggttattgaggagttggtgaggagttggtga

SEQ ID NO: 40651 - DNA, 96 bp, Fusarium cuneirostrum
  misc_feature: 34
cattccttttttaaataacattttaatgtgacgagcaccactacgccttttaaattggcgagcactttgtgaatgaacgacttaatcaccacttga

SEQ ID NO: 40652 - DNA, 96 bp, Fusarium cuneirostrum
  misc_feature: 34
tcaaccttcgcatggctcaggtttctattacttcttcgatctcgtttcactccatctcttttcatgatctagtgaagttattcgcacttcacctct

SEQ ID NO: 40653 - DNA, 96 bp, Fusarium cuneirostrum
  misc_feature: 34
aaagtatataagtaaagataaataaattaagttaaagaaataaggaaaataaagtatttaaaattaataaaaaagggtaaaaaaaagtaaaaaata

SEQ ID NO: 40654 - DNA, 96 bp, Fusarium cuneirostrum
  misc_feature: 34
ctccgcacgtcctccctccggtcgtccgtactaaggatatagtcatagactcggccctccgcgggcgctcgtaactcttcatgggttgccaacata

SEQ ID NO: 40655 - DNA, 96 bp, Fusarium cuneirostrum
  misc_feature: 34
tatgacaccagcagagcgacacaaagtagcaagagatatcgcgagaattcccggaatcatcaaagaccagcttgcactagaagggtttcagtttcc

SEQ ID NO: 40656 - DNA, 96 bp, Fusarium cuneirostrum
  misc_feature: 34
aataatactcgtcccagcctcgtccttactcgaaataaataatcgatcgtcgctccactcctattgctcgtcacttctcgttccgatatggatata

SEQ ID NO: 40657 - DNA, 96 bp, Fusarium cuneirostrum
  misc_feature: 34
cccacttcggtatcatctttcgatgtgcgcattgactgttggtcaattgatgatgttatcgtgagcagtgaccttgcgaccttgctcattattata

SEQ ID NO: 40658 - DNA, 96 bp, Fusarium cuneirostrum
  misc_feature: 34
tataaagaaaaaagctacttttaagctcttctttattaagtcttaaaaaaggcttaaaataaatactttttataacctatttaaatctataaaaat

SEQ ID NO: 40659 - DNA, 96 bp, Fusarium cuneirostrum
  misc_feature: 34
cgaacacggcatcaagatatgacaccagcagagcgacacaaagtagcaagagatatcgcgagaattcccggaatcatcaaagaccagcttgcacta

SEQ ID NO: 40660 - DNA, 96 bp, Fusarium cuneirostrum
  misc_feature: 34
cctgccttcgcagtccatgcacctccacttgaggtcatcatgcactctcatgaagataactgaaccacatcttgtggtgttttagtaacgtcgcta

SEQ ID NO: 40661 - DNA, 96 bp, Fusarium cuneirostrum
  misc_feature: 34
gttaagcgctcgagttcaatgggccagccatagcgtcagcaaattgcgtagataagacgagaactttgtaaacatgtttgtcacgagctcgatcta

SEQ ID NO: 40662 - DNA, 96 bp, Fusarium cuneirostrum
  misc_feature: 34
tagaaggtaagccgacacctccaagatagacgatatggtggcgattgctgaccttagtgtgtttactgatgtagtttgtaagtgaacgcctctaag

SEQ ID NO: 40663 - DNA, 96 bp, Fusarium cuneirostrum
  misc_feature: 34
tactcgccggagctcctcgacaattgaagggatacttagacaattctcgtcagctaatgtcagacaattagttccacagggatcagtgatggcacc

SEQ ID NO: 40664 - DNA, 96 bp, Fusarium cuneirostrum
  misc_feature: 34
taccatgtcctccgacatgagaaccaactgtctcacgtccgttcgcagtataaaaaaaggataaatgtatttctctcgaaataacagctcgccgta

SEQ ID NO: 40665 - DNA, 96 bp, Fusarium cuneirostrum
  misc_feature: 34
taattttatatttgcttctaggagtccggtgcgtagaggtcatcccgaggagctgaatggctatcttgaaagtaatcgtcatgctttcttttcgta

SEQ ID NO: 40666 - DNA, 96 bp, Fusarium cuneirostrum
  misc_feature: 34
taaacagaggctcgcataaatcaatcaggtcacattactatctaccacaaagaaaaagaagccatcgtcatctccgaattaggcaacctcgcggta

SEQ ID NO: 40667 - DNA, 96 bp, Fusarium cuneirostrum
  misc_feature: 34
tacaagataaatcccgaggacccgtcctctcatgcgcgacgcgccatcacaactcgactcttcgtctcggtccatatcgtcgccggtccccgtctc

SEQ ID NO: 40668 - DNA, 96 bp, Fusarium cuneirostrum
  misc_feature: 34
taattaaaaagtaaagagagcttaaagtattattaaaataaaagaaaataaaaaataggtaataaaaagaaaaaaagcgctattattaaaatatta

SEQ ID NO: 40669 - DNA, 96 bp, Fusarium cuneirostrum
  misc_feature: 34
taatggattaagcttaaagatagaaatatttaatctactctagtaaggcgccctaggattataatccaggccacggcatagccttgacatctatat

SEQ ID NO: 40670 - DNA, 96 bp, Fusarium cuneirostrum
  misc_feature: 34
taatcgtgcctttaaggcctaatatacttatattaaccttctaaggggcccttaagccctctaaggctgcaataaaggccttagccttaaggatag

SEQ ID NO: 40671 - DNA, 96 bp, Fusarium cuneirostrum
  misc_feature: 34
taatatagagtaatctaatataattaaccgatataaactaagagtaattcttattaatattaatctcgccttattactatattagcttaatcccgc

SEQ ID NO: 40672 - DNA, 96 bp, Fusarium cuneirostrum
  misc_feature: 34
gtctacagtcacaaataattacaaaagtcacattaagtaagtgctcgccatatttaaagtcgagtggtgctcgtcaagtttatttaagtattatta

SEQ ID NO: 40673 - DNA, 96 bp, Fusarium cuneirostrum
  misc_feature: 34
cgagccgggctccgtatcctactgacacgcacacttttactgcgctgacgctggaacactggcttcacacccggttcccatctacgcttccgctta

SEQ ID NO: 40674 - DNA, 96 bp, Fusarium cuneirostrum
  misc_feature: 34
aatattaagatctatctattatttatagctaatttaggctaatataaagtataatcgcgaaatataatatttaattaaataatatctagaacttta

SEQ ID NO: 40675 - DNA, 96 bp, Fusarium cuneirostrum
  misc_feature: 34
taaagggccgcatggcccgatttgcgacactgtttggtgtcagacaacattcttgtttgtcttattttttggctgaacagcgtgagcttgccgtgt

SEQ ID NO: 40676 - DNA, 96 bp, Fusarium cuneirostrum
  misc_feature: 34
gttttaatatgggttgcgatctggcgtttggtgtgagcaaacgtgagaacggagtgggaatttggtcacaaatgttaaggaagtatagagacttcc

SEQ ID NO: 40677 - DNA, 96 bp, Fusarium cuneirostrum
  misc_feature: 34
gtttacagtcacaattacatttacaattacaatcacgtagaatcacaaaatccaagtcatcatatgctcgcatccaaagtcaagaaaatgggtctc

SEQ ID NO: 40678 - DNA, 96 bp, Fusarium cuneirostrum
  misc_feature: 34
gttgccaacatactcttgtcaatccctcaccctgcgtccttcgtcctcgggattcgggactattccagtgtggatgaaaatgaggccattcacaac

SEQ ID NO: 40679 - DNA, 96 bp, Fusarium cuneirostrum
  misc_feature: 34
gacgagcggagcgagcgaatggggaagaagggagtggaacgaccttggcctatggcgggacgtagaacgttccgtccatgctgcggggaccgcaac

SEQ ID NO: 40680 - DNA, 96 bp, Fusarium cuneirostrum
  misc_feature: 34
gttctgttggagaagcagtaaattagagttgggaatggcttcacttttttccactcttggatatgtagatagtgacacttgtaattgacgctcgcc

SEQ ID NO: 40681 - DNA, 96 bp, Fusarium cuneirostrum
  misc_feature: 34
gactagattcttttagttttctatcctagattactagaaaagtatattcctatcgtatattaatacttaaaacttatagatagataaaagaataac

SEQ ID NO: 40682 - DNA, 96 bp, Fusarium cuneirostrum
  misc_feature: 34
gttatgtacggacataatcttacttgcgagggtgcgagacaagtataagggcaggggattgcccgttgcacttggagtgcttttggcgcccggggc

SEQ ID NO: 40683 - DNA, 96 bp, Fusarium cuneirostrum
  misc_feature: 34
gttaactccccgagcagagactgctttaatctaccgaacgtagtgaggtgcggagtgaagatggagacggagtcgacatcgtaacgaggttactat

SEQ ID NO: 40684 - DNA, 96 bp, Fusarium cuneirostrum
  misc_feature: 34
gttaaaagggttaagagaggagagaaataaagaaaattaaagaagaaagaataattatagaagaaatagaagaaatataataaggagaaagaaaag

SEQ ID NO: 40685 - DNA, 96 bp, Fusarium cuneirostrum
  misc_feature: 34
cctttcccctcgacatctgtctcggtcacacatcggggtcgggtcaccctccccctcttcatggcacccacatcgtgccatcctaccttctgccac

SEQ ID NO: 40686 - DNA, 96 bp, Fusarium cuneirostrum
  misc_feature: 34
gtggatttgacggagtctcaaaactggaacagtttttgtatggactcgattctggcatttggtgagccaaatcctgagaatgggccgagaaatcgg

SEQ ID NO: 40687 - DNA, 96 bp, Fusarium cuneirostrum
  misc_feature: 34
gtgctcacatatcactgtctatactaactacaataccacttgaggtcatcaccattacctattccggtaagtctcacaaagcatcgttggagttac

SEQ ID NO: 40688 - DNA, 96 bp, Fusarium cuneirostrum
  misc_feature: 34
gtgccactcaaagacgtttctgagggacccctcgccacaagtggctctcccccagtttccccaagcacctaaaggtgtcaagggttaaaaccgctt

SEQ ID NO: 40689 - DNA, 96 bp, Fusarium cuneirostrum
  misc_feature: 34
gtgatataagcgtagcttggtgtctccgccaccaagaaaaagtgacttcgttaacagaagtgaccgatttctcggcccattctcaggatttggctc

SEQ ID NO: 40690 - DNA, 96 bp, Fusarium cuneirostrum
  misc_feature: 34
gtgaatgtaattgtttttataattaaacctaaacgtgagtcccggggaggaggagggacgacgacccgggattgtcaacttgagttacacctccgg

SEQ ID NO: 40691 - DNA, 96 bp, Fusarium cuneirostrum
  misc_feature: 34
gtctcgtactgcacgtcggcttacgcctccgtaattctttacacagttcttgcttgggcaatgaactcttcacttgagttcagtctattgtcaatc

SEQ ID NO: 40692 - DNA, 96 bp, Fusarium cuneirostrum
  misc_feature: 34
gtcggtcgactcgttctgcacctcgccctgacgggcttcggtagaactatacagttcctgcttcctctccgagggtcaggttcagttgtcaagccc

SEQ ID NO: 40693 - DNA, 96 bp, Fusarium cuneirostrum
  misc_feature: 34
aaataattattaaaaccacttttaatgtgtcgagaaccactactttttttcacttggcgagcatgatttcagattgtgaatgtttatgttggtgac

SEQ ID NO: 40694 - DNA, 96 bp, Fusarium cuneirostrum
  misc_feature: 34
gtcaatccttcaccctgcacgctacgcgctcgggctcaggactatcttgggtacatgatcacgactacgattcaaaataataataatgtcacatat

SEQ ID NO: 40695 - DNA, 96 bp, Fusarium cuneirostrum
  misc_feature: 34
accttggtatagggggggactacgggacacgggacagtgaagaatgaacgtgtgtacccaggagtaatcgtcttgagtcagcttgctgaccttgac

SEQ ID NO: 40696 - DNA, 96 bp, Fusarium cuneirostrum
  misc_feature: 34
gtattggaagagattgagtcggcgtagtagtagacttttcccaatgtagatatcgtgataacctcattttgtgtaacctgtgacataacttgattg

SEQ ID NO: 40697 - DNA, 96 bp, Fusarium cuneirostrum
  misc_feature: 34
aagggttgttgagtagtgactatgtaacgggaccgttttcccgactatgctgaaacgggagttggtgatgacttcacttctgccgactccacatac

SEQ ID NO: 40698 - DNA, 96 bp, Fusarium cuneirostrum
  misc_feature: 34
gtaatcatagaacaaaacacatgatgtaacatcaccataatcatatcaaattttgctacaacacaatttccaccatcacctttcgctatgcaaaat

SEQ ID NO: 40699 - DNA, 96 bp, Fusarium cuneirostrum
  misc_feature: 34
ggtttttcgagcgggttataactttggtctataagcggttttaacccttgacacctttaggtgcttggggaaactgggggagagccacttgtggcg

SEQ ID NO: 40700 - DNA, 96 bp, Fusarium cuneirostrum
  misc_feature: 34
ggtttcttctttcttctttcttctttcttctttcttctttcttctttcttctttcttctttcttctttcttctttcttctttcttctttcttcttt

SEQ ID NO: 40701 - DNA, 96 bp, Fusarium cuneirostrum
  misc_feature: 34
gccatcgtgactgattgtaattgtaattgtaattgtagtgttagatggaattgtgacgtagaatgtgaatggaacaggagtggtgagagttacacc

SEQ ID NO: 40702 - DNA, 96 bp, Fusarium cuneirostrum
  misc_feature: 34
ggtgagtgtctatacatatctggaagatgaagtgaaggatgaacgcaatgctaatagcaaacaggagcggagcgactggaatgatcgaacggagag

SEQ ID NO: 40703 - DNA, 96 bp, Fusarium cuneirostrum
  misc_feature: 34
ggtctcgtactgcacgtcggcttacgcctccgtaattctttacacagttcttgcttgggcaatgaactcttcacttgagttcagtctattgtcaat

SEQ ID NO: 40704 - DNA, 96 bp, Fusarium cuneirostrum
  misc_feature: 34
cctactgttggtcactccgttccccgcactcgtccgcatctttcgtgtcccactcaatccgtgcacaacatgaggctgtcaagacagaccacgacc

SEQ ID NO: 40705 - DNA, 96 bp, Fusarium cuneirostrum
  misc_feature: 34
catttcgacccgttccgggtctcattcggtagtgatataagcgtagcttggtgtctccgccaccaagaaaaagtgacttcgttaacagaagtgacc

SEQ ID NO: 40706 - DNA, 96 bp, Fusarium cuneirostrum
  misc_feature: 34
ggactcagatcctaacgacataagtttaaatagctatgcccgaacacatgactgctcaatttcttttgtgctttagataattctcatcaattgacc

SEQ ID NO: 40707 - DNA, 96 bp, Fusarium cuneirostrum
  misc_feature: 34
ggtactttctccaaaaaacctcgcacacgctcgtacgaataacgcctgtccgtctcccggacattccgaataaaaccaagaatagcgtcgggtgcc

SEQ ID NO: 40708 - DNA, 96 bp, Fusarium cuneirostrum
  misc_feature: 34
cacttggagtgcttttggcgcccggggcgtcaaccttttttctgacgcgtttcattacgcgctcgctcgaacggattgtgagcgactcgattaccc

SEQ ID NO: 40709 - DNA, 96 bp, Fusarium cuneirostrum
  misc_feature: 34
ggggattgagtttaggcgtttgcctaacaaagtgcaggaagcacttgaatgtccgatggagtcggatgatatgctattcttgagagcatattactg

SEQ ID NO: 40710 - DNA, 96 bp, Fusarium cuneirostrum
  misc_feature: 34
aggcagctcatcttcatcttaagccagtctcgtccatataagatcacgatgcgaaccctcggttctcacacttactcactagcctatcttcatccc

SEQ ID NO: 40711 - DNA, 96 bp, Fusarium cuneirostrum
  misc_feature: 34
cgatcgcatgcatctcaacaaaggcaacgataggaacactagagtcatccatctgagattaaagaactaaagtatcgtacatgtaaaaaagcagcc

SEQ ID NO: 40712 - DNA, 96 bp, Fusarium cuneirostrum
  misc_feature: 34
acagaggtgcagttccctcacaagatcctccgtcgtaacctccttcggtgctacaagataaatcccgaggacccgtcctctcatgcgcgacgcgcc

SEQ ID NO: 40713 - DNA, 96 bp, Fusarium cuneirostrum
  misc_feature: 34
ggcagaaggtaggatggcacgatgtgggtgccatgaagagggggagggtgacccgaccccgatgtgtgaccgagacagatgtcgaggggaaagggt

SEQ ID NO: 40714 - DNA, 96 bp, Fusarium cuneirostrum
  misc_feature: 34
ggatgagtgagcgtagcgaaggaagactgagggattggcaatcgtagataacccccggaggggaagcagacactgcgtaataaaaccgaccgaagg

SEQ ID NO: 40715 - DNA, 96 bp, Fusarium cuneirostrum
  misc_feature: 34
ggatcgctacgctgcaccttattcgtcgttcctcctcataacgttccgtccacccgcacttcagtcggtcccctccttctcgtgcttacttactcc

SEQ ID NO: 40716 - DNA, 96 bp, Fusarium cuneirostrum
  misc_feature: 34
ctcacatatcactgtctatactaactacaataccacttgaggtcatcaccattacctattccggtaagtctcacaaagcatcgttggagttactcc

SEQ ID NO: 40717 - DNA, 96 bp, Fusarium cuneirostrum
  misc_feature: 34
ggaggcgtcttgagtagaactcagacttgtattcttacttttgcaagtaagaaagagcgagggacgagtttgatcgagtgatcgatcttgttcttt

SEQ ID NO: 40718 - DNA, 96 bp, Fusarium cuneirostrum
  misc_feature: 34
agaacaacagcgtcattccaaacgaggggaaccgagtttgggaagagaaagtggacggaacgttagttctgtccctgtttttttaaattgtcaagc

SEQ ID NO: 40719 - DNA, 96 bp, Fusarium cuneirostrum
  misc_feature: 34
gcttacagtagggtgagctcccgcacttgtgttacgcgagcatatataaagtagatggtgataacctcaaaagagtccacgagccgagcgcgtagc

SEQ ID NO: 40720 - DNA, 96 bp, Fusarium cuneirostrum
  misc_feature: 34
agcaaccgatcagtggccctagccaccgggctctaacccggcagctctgtttgtttgtttgtttgtttgtttgttttattcatagactgtcccagc

SEQ ID NO: 40721 - DNA, 96 bp, Fusarium cuneirostrum
  misc_feature: 34
gctcgggtctgctcgaccctcgacacacttctgtcggtcgcgcatccgcactccctcatctactcacctcgtacacccacttcggtatcatctttc

SEQ ID NO: 40722 - DNA, 96 bp, Fusarium cuneirostrum
  misc_feature: 34
gctattttaatatctggtttttatttatatttatcttaatctctttttactaatatattatatccgcttcgcgatattataataagtttaattatt

SEQ ID NO: 40723 - DNA, 96 bp, Fusarium cuneirostrum
  misc_feature: 34
gcgtttcccgcagatggctcatttgccacggtaccgcgttcttgacacgttccgatcaacaattaaccatccaaaatccaagtctatttgtgagtt

SEQ ID NO: 40724 - DNA, 96 bp, Fusarium cuneirostrum
  misc_feature: 34
gataacatcatcaattgaccaacagtcaatgcgcacatcgaaagatgataccgaagtgggtgtacgaggtgagtagatgagggagtgcggatgcgc

SEQ ID NO: 40725 - DNA, 96 bp, Fusarium cuneirostrum
  misc_feature: 34
gcgagactttacttaaacttaaataaaatggacgaggcccacgacttttttctacttggcgagcacttaatgatacttgtgatttgtatgtgacct

SEQ ID NO: 40726 - DNA, 96 bp, Fusarium cuneirostrum
  misc_feature: 34
gccttcgcagtccatgcacctccacttgaggtcatcatgcactctcatgaagataactgaaccacatcttgtggtgttttagtaacgtcgctacgt

SEQ ID NO: 40727 - DNA, 96 bp, Fusarium cuneirostrum
  misc_feature: 34
gccgtgagggcaacacggcccgatttctggccatcacaccgcgggggcgctcggatggactcacttccggtcagcatcgccaatgaggatcggttt

SEQ ID NO: 40728 - DNA, 96 bp, Fusarium cuneirostrum
  misc_feature: 34
gccgacaagaatccatttcaaaatttgtacaaattttgtatgggaagatttctgagattgtatgggcaacgacctggaatcagagtgagaatctgg

SEQ ID NO: 40729 - DNA, 96 bp, Fusarium cuneirostrum
  misc_feature: 34
atgctcactaatctaataaaaagaataaccagggctcgtcaaacgagtttatttaaattattatttgcctcgccctgcttatgttatgtcaagggc

SEQ ID NO: 40730 - DNA, 96 bp, Fusarium cuneirostrum
  misc_feature: 34
gaatagtcccgaatcccgaggacgaaggacgcagggtgagggattgacaagagtatgttggcaacccatgaagagttacgagcgcccgcggagggc

SEQ ID NO: 40731 - DNA, 96 bp, Fusarium cuneirostrum
  misc_feature: 34
caaacgagcgtgctctaactttggtctataagaggtttttttccaagcggattatccgcggttaaaactggggagaggagcttgtctccgaggggc

SEQ ID NO: 40732 - DNA, 96 bp, Fusarium cuneirostrum
  misc_feature: 34
gcatccgggttcacattcaacttgttgcatcaaggactcagatcctaacgacataagtttaaatagctatgcccgaacacatgactgctcaatttc

SEQ ID NO: 40733 - DNA, 96 bp, Fusarium cuneirostrum
  misc_feature: 34
accaagtcgatcgtacatctccttcactacttcttccttccgaagatagcttaccgtagaaaagatatgcgtcagataagcgacgcagtaatatgc

SEQ ID NO: 40734 - DNA, 96 bp, Fusarium cuneirostrum
  misc_feature: 34
catttatctttatgcgagcacttatctggaaccaacagctcgccgtaatgaatccaaaaagtaagcctaaaggcgagcgactgtgacttagtgtgc

SEQ ID NO: 40735 - DNA, 96 bp, Fusarium cuneirostrum
  misc_feature: 34
ctacgattcaaaataataataatgtcacatatgcacagctcgctcgattaaataaagtatgaagtggtgctcgtcaaaagtatatttagtgtttgc

SEQ ID NO: 40736 - DNA, 96 bp, Fusarium cuneirostrum
  misc_feature: 34
gattttattaggggtttaaggcttcttaataataataaaaatctaatttaaagttaaaataaaagtaattaaatataatagggaaattttacagat

SEQ ID NO: 40737 - DNA, 96 bp, Fusarium cuneirostrum
  misc_feature: 34
cgccgtctagctcgtggttctcttttaccactacaataacagttcactcttctcgttcacaaatgcacaatcaattcaaatcacaagtcatacatc

SEQ ID NO: 40738 - DNA, 96 bp, Fusarium cuneirostrum
  misc_feature: 34
gagtagtaacggagtaactgtacatcgcaagactcaaaatctaccggattttgggacttttcagaaactggcacagttttaatatgggttgcgatc

SEQ ID NO: 40739 - DNA, 96 bp, Fusarium cuneirostrum
  misc_feature: 34
acgaacgtgtggactgagtcaggctttaggtgcgcagcaccattgccttcccagtaaatagggagcctgaggcacgaaggcgaagagtgtaggatc

SEQ ID NO: 40740 - DNA, 96 bp, Fusarium cuneirostrum
  misc_feature: 34
gagtttccctcctacatcatctgtctgagctcagagagcgagtcgatcttggattcctatgcaagtcgtctttcaattgcgctggcgcgcgactag

SEQ ID NO: 40741 - DNA, 96 bp, Fusarium cuneirostrum
  misc_feature: 34
caaacacattcacgataccatttatacgcacaacatcacaattacgtgtcgctcacttctgttggagccttttatttagtgttcgctccactactc

SEQ ID NO: 40742 - DNA, 96 bp, Fusarium cuneirostrum
  misc_feature: 34
actactcaacaaccctttcgggtctctacaaaatcaaaacatttacatctgctgggctccctctcggcacacgcccaagatactgtccacaacctc

SEQ ID NO: 40743 - DNA, 96 bp, Fusarium cuneirostrum
  misc_feature: 34
gaggtggatttgacggagtctcaaaactggaacagtttttgtatggactcgattctggcatttggtgagccaaatcctgagaatgggccgagaaat

SEQ ID NO: 40744 - DNA, 96 bp, Fusarium cuneirostrum
  misc_feature: 34
cccatcgctccgctcggggtagaattatacagtcatggactcggccctgcgggcagctgcactactcttgccaatccggctccgtcgtccctcctc

SEQ ID NO: 40745 - DNA, 96 bp, Fusarium cuneirostrum
  misc_feature: 34
attagggagggaaatggtgctcgacaagtttaaagaagtgtatttaaatgttattgtctcgccctatctcctgtaggttatggatgaggctcgctc

SEQ ID NO: 40746 - DNA, 96 bp, Fusarium cuneirostrum
  misc_feature: 34
cattagtttaggcctgagccagggaacaccatcaactcgttagagcggcttttaggagatcggaagagcgtcgtgtagggaaagagtgtagatctc

SEQ ID NO: 40747 - DNA, 96 bp, Fusarium cuneirostrum
  misc_feature: 34
gagatagagaatatattataaatctatatccttaataataactctagcttaacatacttaataagcgagtaaaataaaaatcctaaccttcctatt

SEQ ID NO: 40748 - DNA, 96 bp, Fusarium cuneirostrum
  misc_feature: 34
cccattaatcgccttcccgcctccgtgattaccatccagagcaatctggaaagcacggcaataatgtggatgatccttaaagatcacagggcagtc

SEQ ID NO: 40749 - DNA, 96 bp, Fusarium cuneirostrum
  misc_feature: 34
atgatacttgtgatttgtatgtgaccttaaatgaaatgtgatatgaacgtagtcgtagtaagaagacatgggaatggcttcatccataaatgagtc

SEQ ID NO: 40750 - DNA, 96 bp, Fusarium cuneirostrum
  misc_feature: 34
gacggtatttcaatcggagatttagtgagacgggcgaacgtggtttattcttttgtatcacggagtgatgaacgagatggttcgagtgcgaggaag

SEQ ID NO: 40751 - DNA, 96 bp, Fusarium cuneirostrum
  misc_feature: 34
gacgcagtcgaagacttgagactgtatttatttttttgtgtgagacggagtcgagtctgatttcgactggaatcagttctgtttattccacggccg

SEQ ID NO: 40752 - DNA, 96 bp, Fusarium cuneirostrum
  misc_feature: 34
gacatgaagatgcgaccggagagagcactggtttccctgccttgttgggcagatcgcggagcgagtatgatggctgacattgaatgaagccctttt

SEQ ID NO: 40753 - DNA, 96 bp, Fusarium cuneirostrum
  misc_feature: 34
aaaacaacttcaaattcaatctactcctgcgcctcctccttcatactatctaaaggcctgtaaagtttctgtcctcgacgtagctttacaactgtc

SEQ ID NO: 40754 - DNA, 96 bp, Fusarium cuneirostrum
  misc_feature: 34
acaccttttgaggactttatagtcgatattcttcagtcctttacatagccactagctataggttataagtgagaataatctatcgattatatattc

SEQ ID NO: 40755 - DNA, 96 bp, Fusarium cuneirostrum
  misc_feature: 34
aaccttcgcatggctcaggtttctattacttcttcgatctcgtttcactccatctcttttcatgatctagtgaagttattcgcacttcacctcttc

SEQ ID NO: 40756 - DNA, 96 bp, Fusarium cuneirostrum
  misc_feature: 34
gaaataccgtcactctgttcctagtcgcgcgccagcgcaattgaaagacgacttgcataggaatccaagatcgactcgctctctgagctcagacag

SEQ ID NO: 40757 - DNA, 96 bp, Fusarium cuneirostrum
  misc_feature: 34
gaaagtgaaagtgaaagtgaaagtgaaagtgaaagtgaaagtgaaagtgaaagtgaaagtgaaagtgaaagtgaaagtgaaagtgaaagggaaagt

SEQ ID NO: 40758 - DNA, 96 bp, Fusarium cuneirostrum
  misc_feature: 34
aaacgagcgtccataactttggtctataagaggtttttttccaaaacgcaccgcgttggttaaaactggggatgtcactttagggacaggggtttc

SEQ ID NO: 40759 - DNA, 96 bp, Fusarium cuneirostrum
  misc_feature: 34
gaaaatcggggaacgagcgtcctaactttggtctataagaggtttttttccaagcggattatccgcggttaaaactggggtgagtcacaagtgacg

SEQ ID NO: 40760 - DNA, 96 bp, Fusarium cuneirostrum
  misc_feature: 34
ctttaggtaagaagattaatattaagatagataaagatagtgaggtaattaaggaattaattaattaattcctaaaaagctaaaaaggtttttatt

SEQ ID NO: 40761 - DNA, 96 bp, Fusarium cuneirostrum
  misc_feature: 34
acataatgggcggacgcccacttcttcagcgctgtcgcgcaaaacatgaacttgcttctgtttttttacttttgtgcctgctcgagcttgaacaag

SEQ ID NO: 40762 - DNA, 96 bp, Fusarium cuneirostrum
  misc_feature: 34
ataacttcaaaagtattttcccgaggccgaggacgtaggacgcaggctgagggattgacaatagactgaactcaagtgaagagttcattgcccaag

SEQ ID NO: 40763 - DNA, 96 bp, Fusarium cuneirostrum
  misc_feature: 34
cagagtgagtttgtattctatccggaggaggagtgaacgagtgagcgatcatctacttacattaattgctggacagcatcttctcgggaagagaag

SEQ ID NO: 40764 - DNA, 96 bp, Fusarium cuneirostrum
  misc_feature: 34
cttcctcgccccctcgtcagtatccacttatgcccggatcgctacgctgcaccttattcgtcgttcctcctcataacgttccgtccacccgcactt

SEQ ID NO: 40765 - DNA, 96 bp, Fusarium cuneirostrum
  misc_feature: 34
cttattttttattttactttctctttattttttatttactctctttattattacttcttcttattattaaccctctcttaccccccttttaactct

SEQ ID NO: 40766 - DNA, 96 bp, Fusarium cuneirostrum
  misc_feature: 34
ccaagcagagactgtggtctcaataccgagcgaagcgaaggtgcggaacggagtgagagcgtagcgagcacgaagtgaggttacttaaaacaccag

SEQ ID NO: 40767 - DNA, 96 bp, Fusarium cuneirostrum
  misc_feature: 34
acgagcgtccataactttggtctataagaggttttgttttcaagctttagctgattacaaagctggggagggacacttgtgtcacggggaccccag

SEQ ID NO: 40768 - DNA, 96 bp, Fusarium cuneirostrum
  misc_feature: 34
caagcaagaactgtgtaaagaattacggaggcgtaagccgacgtgcagtacgagaccgaggaacgaggtcgaagtggtgctagataatgtgaagag

SEQ ID NO: 40769 - DNA, 96 bp, Fusarium cuneirostrum
  misc_feature: 34
ctctacaaatctcaccaagttcacattgcatctatctacactaaaaatctccaagatcgtcatcgacccattcatcaccaaactcgtccacaccct

SEQ ID NO: 40770 - DNA, 96 bp, Fusarium cuneirostrum
  misc_feature: 34
ataatcctcatgagacatgagttgattgcgcccgacagtggttggcgataacttcatcagagatgaactgagacggtggtcgaagatgacaccgag

SEQ ID NO: 40771 - DNA, 96 bp, Fusarium cuneirostrum
  misc_feature: 34
atgtgaacttggtgagatttgtagagttgcctgatgtggaagtgatgatgacttcaattacgtagattttagagcgagtactaagtaggtagggag

SEQ ID NO: 40772 - DNA, 96 bp, Fusarium cuneirostrum
  misc_feature: 34
ctcaagttgacaatcccgggtcgtcgtccctcctcctccccgggactcacgtttaggtttaattataaaaacaattacattcacatcatatgctcg

SEQ ID NO: 40773 - DNA, 96 bp, Fusarium cuneirostrum
  misc_feature: 34
ctattttcggactgaaatacgctgggcgttttcggaggttttgtatcttagattagtctacattgtttcctgttttggatgttgcgataccttcgt

SEQ ID NO: 40774 - DNA, 96 bp, Fusarium cuneirostrum
  misc_feature: 34
ctacgggacacgggacagtgagggacgaacgtagtgtcactaaggcgaccgagctcaagcgaggtaaagccggtcaaggcttcctgacgaagtcgg

SEQ ID NO: 40775 - DNA, 96 bp, Fusarium cuneirostrum
  misc_feature: 34
ctacaagataaatcccgaggacccgtcctctcatgcgcgacgcgccatcacaactcgactcttcgtctcggtccatatcgtcgccggtccccgtct

SEQ ID NO: 40776 - DNA, 96 bp, Fusarium cuneirostrum
  misc_feature: 34
ctaactttggtgatataagaggatttttgggaaacgcatgcgttgggacccaaactgacttccaggctttagccggttggcagagtccgcggcttt

SEQ ID NO: 40777 - DNA, 96 bp, Fusarium cuneirostrum
  misc_feature: 34
catcagctaattgaggtattgactgtgacttggagagcaatttgctgacaatgatacctcgacgtgtgctttcaaacactggtagcctggctttag

SEQ ID NO: 40778 - DNA, 96 bp, Fusarium cuneirostrum
  misc_feature: 34
atgtcagcaagctgactaaaggcagactcagtccacacgttcgtccctcactgtcccgtgtcccgtagtccccccctataccaaggttaagaaacg

SEQ ID NO: 40779 - DNA, 96 bp, Fusarium cuneirostrum
  misc_feature: 34
cgttctctctctgcctcctcagcgcgtttctgttccctttcggcgcgttgctgctctctcgcagcgcgttgttccgactcctttaaaagccgttcg

SEQ ID NO: 40780 - DNA, 96 bp, Fusarium cuneirostrum
  misc_feature: 34
cgtcacattaaaatgttatttaaaaaaggaatgactcgccccagtaaagtggtggctcgctcaatcaatcaagttatgtcacaggttacacaaaat

SEQ ID NO: 40781 - DNA, 96 bp, Fusarium cuneirostrum
  misc_feature: 34
cgacgaaccaatccgctacgcagtaaggttccgtccatatgcagaggtgcccggaagcagagctgaggacataagtagggcatcgcccactgaccg

SEQ ID NO: 40782 - DNA, 96 bp, Fusarium cuneirostrum
  misc_feature: 34
atttcgacccgttccgggtctcattcggtagtgatataagcgtagcttggtgtctccgccaccaagaaaaagtgacttcgttaacagaagtgaccg

SEQ ID NO: 40783 - DNA, 96 bp, Fusarium cuneirostrum
  misc_feature: 34
cggaacggggcaaacgagcgtccataactttggtctataagaggtttttttccaaaacgcaccgcgttggttaaaactggggatgtcactttaggg

SEQ ID NO: 40784 - DNA, 96 bp, Fusarium cuneirostrum
  misc_feature: 34
cgctttctggagttggggatccaacgacctttacttttttatttgaccggaggtcattgtatacgacggacgtcgctgtctttttctattttctct

SEQ ID NO: 40785 - DNA, 96 bp, Fusarium cuneirostrum
  misc_feature: 34
acactggaatagtcccgaatcccgaggacgaaggacgcagggtgagggattgacaagagtatgttggcaacccatgaagagttacgagcgcccgcg

SEQ ID NO: 40786 - DNA, 96 bp, Fusarium cuneirostrum
  misc_feature: 34
cgatcacctctcgcaggataccaagtcgatcgtacatctccttcactacttcttccttccgaagatagcttaccgtagaaaagatatgcgtcagat

SEQ ID NO: 40787 - DNA, 96 bp, Fusarium cuneirostrum
  misc_feature: 34
catcatcccacacgtccactccttgcaccactgtgcatcgttcccttattacgcctccacttcggtcctacgttccctccgtgtcgttattgatcg

SEQ ID NO: 40788 - DNA, 96 bp, Fusarium cuneirostrum
  misc_feature: 34
attagtttaggcctgagccagggaacaccatcaactcgttagagcggcttttaggagatcggaagagcgtcgtgtagggaaagagtgtagatctcg

SEQ ID NO: 40789 - DNA, 96 bp, Fusarium cuneirostrum
  misc_feature: 34
cgagaaggaggggaccgactgaagtgcgggtggacggaacgttatgaggaggaacgacgaataaggtgcagcgtagcgatccgggcataagtggat

SEQ ID NO: 40790 - DNA, 96 bp, Fusarium cuneirostrum
  misc_feature: 34
cattcttgctctcgcaatgcatttcatgtttacgtgaggggattcacagagcgcatctctgttgaattaaagtaacatcacatcgtctccctgtcg

SEQ ID NO: 40791 - DNA, 96 bp, Fusarium cuneirostrum
  misc_feature: 34
atagactcggccctccgcgggcgctcgtaactcttcatgggttgccaacatactcttgtcaatccctcaccctgcgtccttcgtcctcgggattcg

SEQ ID NO: 40792 - DNA, 96 bp, Fusarium cuneirostrum
  misc_feature: 34
acggtatttcaatcggagatttagtgagacgggcgaacgtggtttattcttttgtatcacggagtgatgaacgagatggttcgagtgcgaggaagg

SEQ ID NO: 40793 - DNA, 96 bp, Fusarium cuneirostrum
  misc_feature: 34
cctgacatccccacgcgtccagtcatcaacgctgacgctattcctttccctattgcgcctcactctctgtcgatacctccttcccgttcgttattt

SEQ ID NO: 40794 - DNA, 96 bp, Fusarium cuneirostrum
  misc_feature: 34
cctcgggaaaatacttttgaagttattcacattcacatctacgattacaatttaatcaatcactcgcacactaagtcacagtcgctcgcctttagg

SEQ ID NO: 40795 - DNA, 96 bp, Fusarium cuneirostrum
  misc_feature: 34
cctccggaggtgtaactcaagttgacaatcccgggtcgtcgtccctcctcctccccgggactcacgtttaggtttaattataaaaacaattacatt

SEQ ID NO: 40796 - DNA, 96 bp, Fusarium cuneirostrum
  misc_feature: 34
ccgttctcacgtttgctcacaccaaacgccagatcgcaacccatattaaaactgtgccagtttctgaaaagtcccaaaatccggtagattttgagt

SEQ ID NO: 40797 - DNA, 96 bp, Fusarium cuneirostrum
  misc_feature: 34
aaggattgactagtagagtctcatctgcatgtgaagagttcatctccaagcagagactgtggtctcaataccgagcgaagcgaaggtgcggaacgg

SEQ ID NO: 40798 - DNA, 96 bp, Fusarium cuneirostrum
  misc_feature: 34
ccgcatttatatatagcgagcatgttttaatctgatgtgaataacttcaaaagtattttcccgaggccgaggacgtaggacgcaggctgagggatt

SEQ ID NO: 40799 - DNA, 96 bp, Fusarium cuneirostrum
  misc_feature: 34
attcttgctctcgcaatgcatttcatgtttacgtgaggggattcacagagcgcatctctgttgaattaaagtaacatcacatcgtctccctgtcgg

SEQ ID NO: 40800 - DNA, 96 bp, Fusarium cuneirostrum
  misc_feature: 34
atggaattgtgacgtagaatgtgaatggaacaggagtggtgagagttacaccacttgagtcccgaacggatgagcaagccccgtaggggcgcaggg

SEQ ID NO: 40801 - DNA, 96 bp, Fusarium cuneirostrum
  misc_feature: 34
acgggaccgttttcccgactatgctgaaacgggagttggtgatgacttcacttctgccgactccacatactttgctcgccactgtttaatatgggg

SEQ ID NO: 40802 - DNA, 96 bp, Fusarium cuneirostrum
  misc_feature: 34
ccatgatcctacactcttcgccttcgtgcctcaggctccctatttactgggaaggcaatggtgctgcgcacctaaagcctgactcagtccacacgt

SEQ ID NO: 40803 - DNA, 96 bp, Fusarium cuneirostrum
  misc_feature: 34
atttagcgccgcggttagtctcggtaccttccgtctcggcgcgccctattagcccggtcaattaagttaattaacctaacctattaggcccgctgg

SEQ ID NO: 40804 - DNA, 96 bp, Fusarium cuneirostrum
  misc_feature: 34
aaaagagaaccacgagctagacggcgagtggtgagggtgagacagcagtcgaatagagcccagagggcgaacgatctaaacaccaggtagtggtgg

SEQ ID NO: 40805 - DNA, 96 bp, Fusarium cuneirostrum
  misc_feature: 34
cattgaactcgagcgcttaactggggctcatccttgacgctcaagcgaacagcattggcgcgaggcccgctagccagagatgcatggcacactgat

SEQ ID NO: 40806 - DNA, 96 bp, Fusarium cuneirostrum
  misc_feature: 34
catctgaacttggttcagtttgttgattgaggcagcgccgagacttgacgattaggcaagaatgatagagcgaaagcgatcacgaacgggtgagtg

SEQ ID NO: 40807 - DNA, 96 bp, Fusarium cuneirostrum
  misc_feature: 34
agcgagtcgatcttggattcctatgcaagtcgtctttcaattgcgctggcgcgcgactaggaacagagtgacggtatttcaatcggagatttagtg

SEQ ID NO: 40808 - DNA, 96 bp, Fusarium cuneirostrum
  misc_feature: 34
aaaatttgtacaaattttgaaatggattcttgtcggccctctgggcctcctgtcccctcacttccgttcggtcccccctccccacggtcgggtgtg

SEQ ID NO: 40809 - DNA, 96 bp, Fusarium cuneirostrum
  misc_feature: 34
attctcactctgattccaggtcgttgcccatacaatctcagaaatcttcccatacaaaatttgtacaaattttgtatgggaagatttctgagattg

SEQ ID NO: 40810 - DNA, 96 bp, Fusarium cuneirostrum
  misc_feature: 34
atgaagagggggagggtgacccgaccccgatgtgtgaccgagacagatgtcgaggggaaagggtacatggcgagagcagcgctcgaggtggatttg

SEQ ID NO: 40811 - DNA, 96 bp, Fusarium cuneirostrum
  misc_feature: 34
atcgctgtctggtttccgatgcaaagggtctactcgacacggcactgaacgttgatcaagctcaaatactcttcgcctcattcgatgagtggtttg

SEQ ID NO: 40812 - DNA, 96 bp, Fusarium cuneirostrum
  misc_feature: 34
atttaaataaactcgtttgacgagccctggttattctttttattagattagtgagcatgatgttactgtagatggagttgtgaatggcctcatttt

SEQ ID NO: 40813 - DNA, 96 bp, Fusarium cuneirostrum
  misc_feature: 34
acttgattgattgagcgagccaccactttactggggcgagtcattccttttttaaataacattttaatgtgacgagcaccactacgccttttaaat

SEQ ID NO: 40814 - DNA, 96 bp, Fusarium cuneirostrum
  misc_feature: 34
aataaatataggcttattaagaaggagaaaaagaaagggataaagatattatagataaaggtataataataaataaaaggaaaactattttataat

SEQ ID NO: 40815 - DNA, 96 bp, Fusarium cuneirostrum
  misc_feature: 34
acgctccgcacgtcgccctacgggctccgtatttaaaaaaggaatggaagacctctctccgcgaggctcgtaactctttactcgagtttattagat

SEQ ID NO: 40816 - DNA, 96 bp, Fusarium cuneirostrum
  misc_feature: 34
atcggagatgcacatgggcgcagagcgccagagacaatctttgttgtcggatgtaagtaagagcgaaggagtgagcgatggactctttggatcctt

SEQ ID NO: 40817 - DNA, 96 bp, Fusarium cuneirostrum
  misc_feature: 34
atccaacgacctttacttttttatttgaccggaggtcattgtatacgacggacgtcgctgtctttttctattttctctgtttgcggaagcacggtt

SEQ ID NO: 40818 - DNA, 96 bp, Fusarium cuneirostrum
  misc_feature: 34
atcaccattacctattccggtaagtctcacaaagcatcgttggagttactcctccacacttgacccaactcaaacacagcatcatcaaatctactt

SEQ ID NO: 40819 - DNA, 96 bp, Fusarium cuneirostrum
  misc_feature: 34
atattgagctgtcgtaggacgctttctggagttggggatccaacgacctttacttttttatttgaccggaggtcattgtatacgacggacgtcgct

SEQ ID NO: 40820 - DNA, 96 bp, Fusarium cuneirostrum
  misc_feature: 34
acaatgtctgtcgtcgtctctactcctcccatatttcaatgaaaattaaattggcgatctcccctttcctatgacaccttgttagtaaaggaatat

SEQ ID NO: 40821 - DNA, 96 bp, Fusarium cuneirostrum
  misc_feature: 34
atacgacggacgtcgctgtctttttctattttctctgtttgcggaagcacggttgagagggattcgagaccctttcttactcagctggagagctgt

SEQ ID NO: 40822 - DNA, 96 bp, Fusarium cuneirostrum
  misc_feature: 34
aggggattgagtttaggcgtttgcctaacaaagtgcaggaagcacttgaatgtccgatggagtcggatgatatgctattcttgagagcatattact

SEQ ID NO: 40823 - DNA, 96 bp, Fusarium cuneirostrum
  misc_feature: 34
aaatacgctgggcgttttcggaggttttgtatcttagattagtctacattgtttcctgttttggatgttgcgataccttcgttttttagcgagcct

SEQ ID NO: 40824 - DNA, 96 bp, Fusarium cuneirostrum
  misc_feature: 34
agctcactgcgttcgctaacaatcagtacctgattcccgactccgtctcaggatttgactcaccaaatctcagaaacgaacacatacaaattttgt

SEQ ID NO: 40825 - DNA, 96 bp, Fusarium cuneirostrum
  misc_feature: 34
agatctgtccctcttgatcaaccttcgcatggctcaggtttctattacttcttcgatctcgtttcactccatctcttttcatgatctagtgaagtt

SEQ ID NO: 40826 - DNA, 96 bp, Fusarium cuneirostrum
  misc_feature: 34
aagagcgagcccgacttgaaatcccatttcaaaatttgtacaaaatttgtatgtgttcgtttctgagatttggtgagtcaaatcctgagacggagt

SEQ ID NO: 40827 - DNA, 96 bp, Fusarium cuneirostrum
  misc_feature: 34
aagaaacagccctcctgtttccaagaataatactcgtcccagcctcgtccttactcgaaataaataatcgatcgtcgctccactcctattgctcgt

SEQ ID NO: 40828 - DNA, 96 bp, Fusarium cuneirostrum
  misc_feature: 34
acactaaatatacttttgacgagcaccacttcatactttatttaatcgagcgagctgtgcatatgtgacattattattattttgaatcgtagtcgt

SEQ ID NO: 40829 - DNA, 96 bp, Fusarium cuneirostrum
  misc_feature: 34
aagactaaatacggcctataagttaatatatatataggtattaataaagctttttcaataagctaaataaaaagaaataaaataagcgagaatatt

SEQ ID NO: 40830 - DNA, 96 bp, Fusarium cuneirostrum
  misc_feature: 33
ttttcaggcaaaaaaaacgttcaaatctgacacgcttctcccaccaagcacatgattcagatttggacgaatctaggacaaacccatcacgtccat

SEQ ID NO: 40831 - DNA, 96 bp, Fusarium cuneirostrum
  misc_feature: 33
ttatacgaaaagaaagcatgacgattactttcaagatagccattcagctcctcgggatgacctctacgcaccggactcctagaagcaaatataaaa

SEQ ID NO: 40832 - DNA, 96 bp, Fusarium cuneirostrum
  misc_feature: 33
ttttaaaactcgagctgatcaaggagctcatgccagctgttacaatgaaattgttgaaatgagaagatgctaattgcttaattcatcctaaaagtg

SEQ ID NO: 40833 - DNA, 96 bp, Fusarium cuneirostrum
  misc_feature: 33
gggtgacccgaccccgatgtgtgaccgagacagatgtcgaggggaaagggtacatggcgagagcagcgctcgaggtggatttgacggagtctcaaa

SEQ ID NO: 40834 - DNA, 96 bp, Fusarium cuneirostrum
  misc_feature: 33
gcgttcatccttcacttcatcttccagatatgtatagacactcacctgttcgtgtttccacggccgtggaataaacagaactgattccagtcgaaa

SEQ ID NO: 40835 - DNA, 96 bp, Fusarium cuneirostrum
  misc_feature: 33
ccatgacaccgtacgcactcctgtgctcagtaaaagggcttcattcaatgtcagccatcatactcgctccgcgatctgcccaacaaggcagggaaa

SEQ ID NO: 40836 - DNA, 96 bp, Fusarium cuneirostrum
  misc_feature: 33
tttcaaaatggcaactacttctcaatcatatccgatcattagactgccgataaagcccaccgacgggcacgaagaccactagtatcaggcaacatc

SEQ ID NO: 40837 - DNA, 96 bp, Fusarium cuneirostrum
  misc_feature: 33
tttattcaagccgtaggatgacgctataactactaaacaatattaaaacagacctgccgatatatcatcttgtttttagcacgctcagtgcgacat

SEQ ID NO: 40838 - DNA, 96 bp, Fusarium cuneirostrum
  misc_feature: 33
cacaaagaaaaagaagccatcgtcatctccgaattaggcaacctcgcggtatgctggtggattaccgctccgtccacacgcctccgcaatcttaaa

SEQ ID NO: 40839 - DNA, 96 bp, Fusarium cuneirostrum
  misc_feature: 33
aacttgattgattgagcgagccaccactttactggggcgagtcattccttttttaaataacattttaatgtgacgagcaccactacgccttttaaa

SEQ ID NO: 40840 - DNA, 96 bp, Fusarium cuneirostrum
  misc_feature: 33
catacaaaaagtatgtcgatttgagtccaatttgaatccgattttgcttgttcctcaccaaaatctcgaaaaatttcacattcgggctcgacacaa

SEQ ID NO: 40841 - DNA, 96 bp, Fusarium cuneirostrum
  misc_feature: 33
ttgtagtgacgatagcttcacatgtattatgggcgagcattaaataaagacggagcgcacataaactaaaaagggcacacatattagtgagctccc

SEQ ID NO: 40842 - DNA, 96 bp, Fusarium cuneirostrum
  misc_feature: 33
ttgtaaatcggagatttcattctgtttgtttcctaacaacaacgcgacgcgtcacatccacgagacgtggggtgcatttttaaggcaacagaggtg

SEQ ID NO: 40843 - DNA, 96 bp, Fusarium cuneirostrum
  misc_feature: 33
tatttctataaaagaagaagaactcccttagaattagaacctcccttagaattagaacctctcttagatctatatcctctcatataatacaaccaa

SEQ ID NO: 40844 - DNA, 96 bp, Fusarium cuneirostrum
  misc_feature: 33
ttggtgtcgcctccgctccccctccactttcactccgttcaagcaccacattccatgtgatctttgcgtccgcaatcaacgtgcctcaacttgagg

SEQ ID NO: 40845 - DNA, 96 bp, Fusarium cuneirostrum
  misc_feature: 33
ttggcacccaataacatttttcctagtccgtgcacgcttctcggatctcgtaacaagactgtcgcataacattcgtgtgaccggatgtaactatcc

SEQ ID NO: 40846 - DNA, 96 bp, Fusarium cuneirostrum
  misc_feature: 33
tacgggtaatcgagtcgctcacaatccgttcgagcgagcgcgtaatgaaacgcgtcagaaaaaaggttgacgccccgggcgccaaaagcactccaa

SEQ ID NO: 40847 - DNA, 96 bp, Fusarium cuneirostrum
  misc_feature: 33
tgagggcgaggaggaacgacgcagcctgaaggattgactagtagagtctcatctgcatgtgaagagttcatctccaagcagagactgtggtctcaa

SEQ ID NO: 40848 - DNA, 96 bp, Fusarium cuneirostrum
  misc_feature: 33
ttgacggagtctcaaaactggaacagtttttgtatggactcgattctggcatttggtgagccaaatcctgagaatgggccgagaaatcggtcactt

SEQ ID NO: 40849 - DNA, 96 bp, Fusarium cuneirostrum
  misc_feature: 33
ttgaaatatatagctaattatttattacttttaggcttatttcttatattaatatcggtatttatatttaggctattacttattagatattacgag

SEQ ID NO: 40850 - DNA, 96 bp, Fusarium cuneirostrum
  misc_feature: 33
tatattaagagaaattaaaaaaaaaaagaaatattaaaaagaaaagaaaaaagaaaaaagaatcaagaattaaaaataaataaataattaaaagaa

SEQ ID NO: 40851 - DNA, 96 bp, Fusarium cuneirostrum
  misc_feature: 33
gcttggtgtctccgccaccaagaaaaagtgacttcgttaacagaagtgaccgatttctcggcccattctcaggatttggctcaccaaatgccagaa

SEQ ID NO: 40852 - DNA, 96 bp, Fusarium cuneirostrum
  misc_feature: 33
ttctgcacctcgccctgacgggcttcggtagaactatacagttcctgcttcctctccgagggtcaggttcagttgtcaagccctccgctcctcctt

SEQ ID NO: 40853 - DNA, 96 bp, Fusarium cuneirostrum
  misc_feature: 33
ttcgtttccccaaaaaaccgcttatagaccaaagttatggacgctcgtttgccccgttccgggtcactcgcgttagtctataagctggaaagctcc

SEQ ID NO: 40854 - DNA, 96 bp, Fusarium cuneirostrum
  misc_feature: 33
ttcgggctcgacacaatctcgcccctctgtcttacggtcgccccacaggctccctcctactttactcacgtcatgacccacactccgggtcattct

SEQ ID NO: 40855 - DNA, 96 bp, Fusarium cuneirostrum
  misc_feature: 33
ttcctcgccccctcgtcagtatccacttatgcccggatcgctacgctgcaccttattcgtcgttcctcctcataacgttccgtccacccgcacttc

SEQ ID NO: 40856 - DNA, 96 bp, Fusarium cuneirostrum
  misc_feature: 33
ttccgggtcactcgcgttagtctataagctggaaagctcccttcggtcgctaacaatctgtaccagattctcactctgattccaggtcgttgccca

SEQ ID NO: 40857 - DNA, 96 bp, Fusarium cuneirostrum
  misc_feature: 33
ttccgcttttctaatttttctctcttatgctcagatgtgagaggcatctcgtgtagggtatctttgtgtgatgtgcattctcggattttattattt

SEQ ID NO: 40858 - DNA, 96 bp, Fusarium cuneirostrum
  misc_feature: 33
gaataaagagaatataagatttaggcttaataaattaaaggttaggtaaattatatttaataataaatataaaagcgaggataaaggtaataataa

SEQ ID NO: 40859 - DNA, 96 bp, Fusarium cuneirostrum
  misc_feature: 33
ttatacttgtctcgcaccctcgcaagtaagattatgtccgtacataacgtactaccatgagtgggccccatcatcccacacgtccactccttgcac

SEQ ID NO: 40860 - DNA, 96 bp, Fusarium cuneirostrum
  misc_feature: 33
aaataaatataggcttattaagaaggagaaaaagaaagggataaagatattatagataaaggtataataataaataaaaggaaaactattttataa

SEQ ID NO: 40861 - DNA, 96 bp, Fusarium cuneirostrum
  misc_feature: 33
ttacctcctagctatattaaagattaataagatttataatatagtagtatatttagctttatatataagggtattttcttactaaagatactaaag

SEQ ID NO: 40862 - DNA, 96 bp, Fusarium cuneirostrum
  misc_feature: 33
aaattaaagtttttttctttttaattttatatattttaaatgcgatttatttaatttataaaattaggcataaataataaaaaataaagaaattaa

SEQ ID NO: 40863 - DNA, 96 bp, Fusarium cuneirostrum
  misc_feature: 33
ttaagtaacctcacttcgtgctcgctacgctctcactccgttccgcaccttcgcttcgctcggtattgagaccacagtctctgcttggagatgaac

SEQ ID NO: 40864 - DNA, 96 bp, Fusarium cuneirostrum
  misc_feature: 33
agactttacttaaacttaaataaaatggacgaggcccacgacttttttctacttggcgagcacttaatgatacttgtgatttgtatgtgaccttaa

SEQ ID NO: 40865 - DNA, 96 bp, Fusarium cuneirostrum
  misc_feature: 33
agtctattgtcaatccctcagcctgcgtcctacgtcctcggcctcgggaaaatacttttgaagttattcacattcacatctacgattacaatttaa

SEQ ID NO: 40866 - DNA, 96 bp, Fusarium cuneirostrum
  misc_feature: 33
ttaaagggacagaggtcccgcttcgcgacactgtttcggtgtcagacaacattattgtttgttttcttctcgcgttgttcgaagtcggatgagtga

SEQ ID NO: 40867 - DNA, 96 bp, Fusarium cuneirostrum
  misc_feature: 33
tctgtttattccacggccgtggaaacacgaacaggtgagtgtctatacatatctggaagatgaagtgaaggatgaacgcaatgctaatagcaaaca

SEQ ID NO: 40868 - DNA, 96 bp, Fusarium cuneirostrum
  misc_feature: 33
gccctttttagtttatgtgcgctccgtctttatttaatgctcgcccataatacatgtgaagctatcgtcactacaacatcaggtaatcatagaaca

SEQ ID NO: 40869 - DNA, 96 bp, Fusarium cuneirostrum
  misc_feature: 33
tgtgctcacatatcactgtctatactaactacaataccacttgaggtcatcaccattacctattccggtaagtctcacaaagcatcgttggagtta

SEQ ID NO: 40870 - DNA, 96 bp, Fusarium cuneirostrum
  misc_feature: 33
cgtaactctttactcgagtttattagatagtccatccctcgggctgcgtcctacgtcctcgccctccggactcgtttaaagatgaggttattcaca

SEQ ID NO: 40871 - DNA, 96 bp, Fusarium cuneirostrum
  misc_feature: 33
ggtaaagggaaagaggtgttttggtggtgatgtctggatgcttgaattgtctttccttctttgcctccattttttgatcactcattacgtgggaca

SEQ ID NO: 40872 - DNA, 96 bp, Fusarium cuneirostrum
  misc_feature: 33
agctggaaagctcccttcggtcgctaacaatctgtaccagattctcactctgattccaggtcgttgcccatacaatctcagaaatcttcccataca

SEQ ID NO: 40873 - DNA, 96 bp, Fusarium cuneirostrum
  misc_feature: 33
tggggtgcggagcagagggtgagggacgaacccgtcgcgaggttataataatgagcaaggtcgcaaggtcactgctcacgataacatcatcaattg

SEQ ID NO: 40874 - DNA, 96 bp, Fusarium cuneirostrum
  misc_feature: 33
ctgtcttatactcctcgactctgtctgcggggtatgagattgtggacggaacgttcgtacctctctcatttgtccgtccaacaaaaccgacctcca

SEQ ID NO: 40875 - DNA, 96 bp, Fusarium cuneirostrum
  misc_feature: 33
tggagatcatcgcatttgtgcgtgacgcattctgagaagatgcgaagttgcgagggaggaaagcggagaatgctggctgaatgtccgcgggctgcg

SEQ ID NO: 40876 - DNA, 96 bp, Fusarium cuneirostrum
  misc_feature: 33
aggctgaaaaacctagagcttacagtagggtgagctcccgcacttgtgttacgcgagcatatataaagtagatggtgataacctcaaaagagtcca

SEQ ID NO: 40877 - DNA, 96 bp, Fusarium cuneirostrum
  misc_feature: 33
tgctattcttgagagcatattactgcgtcgcttatctgacgcatatcttttctacggtaagctatcttcggaaggaagaagtagtgaaggagatgt

SEQ ID NO: 40878 - DNA, 96 bp, Fusarium cuneirostrum
  misc_feature: 33
tgcgagtgattgattaaattgtaatcgtagatgtgaatgtgaataacttcaaaagtattttcccgaggccgaggacgtaggacgcaggctgaggga

SEQ ID NO: 40879 - DNA, 96 bp, Fusarium cuneirostrum
  misc_feature: 33
cttatacttgtctcgcaccctcgcaagtaagattatgtccgtacataacgtactaccatgagtgggccccatcatcccacacgtccactccttgca

SEQ ID NO: 40880 - DNA, 96 bp, Fusarium cuneirostrum
  misc_feature: 33
tgatctccaacagctctccagctgagtaagaaagggtctcgaatccctctcaaccgtgcttccgcaaacagagaaaatagaaaaagacagcgacgt

SEQ ID NO: 40881 - DNA, 96 bp, Fusarium cuneirostrum
  misc_feature: 33
tgatacaaaagaataaaccacgttcgcccgtctcactaaatctccgattgaaataccgtcactctgttcctagtcgcgcgccagcgcaattgaaag

SEQ ID NO: 40882 - DNA, 96 bp, Fusarium cuneirostrum
  misc_feature: 33
tgagggattgacaatagactgaactcaagtgaagagttcattgcccaagcaagaactgtgtaaagaattacggaggcgtaagccgacgtgcagtac

SEQ ID NO: 40883 - DNA, 96 bp, Fusarium cuneirostrum
  misc_feature: 33
acactcttcgccttcgtgcctcaggctccctatttactgggaaggcaatggtgctgcgcacctaaagcctgactcagtccacacgttcgtccctca

SEQ ID NO: 40884 - DNA, 96 bp, Fusarium cuneirostrum
  misc_feature: 33
tgagctcagagagcgagtcgatcttggattcctatgcaagtcgtctttcaattgcgctggcgcgcgactaggaacagagtgacggtatttcaatcg

SEQ ID NO: 40885 - DNA, 96 bp, Fusarium cuneirostrum
  misc_feature: 33
gggggggactacgggacacgggacagtgaagaatgaacgtgtgtacccaggagtaatcgtcttgagtcagcttgctgaccttgacgaccccagtca

SEQ ID NO: 40886 - DNA, 96 bp, Fusarium cuneirostrum
  misc_feature: 33
aagtgacatccccagttttaaccaacgcggtgcgttttggaaaaaaacctcttatagaccaaagttatggacgctcgtttgccccgttccgggtca

SEQ ID NO: 40887 - DNA, 96 bp, Fusarium cuneirostrum
  misc_feature: 33
tgaagatctaagaattccagctgctgacaatccacgtcagacagagcatcaagtgcatcgtcctctgggcccatgatgtccaacggcgacacgcct

SEQ ID NO: 40888 - DNA, 96 bp, Fusarium cuneirostrum
  misc_feature: 33
tgaactcaagtgaagagttcattgcccaagcaagaactgtgtaaagaattacggaggcgtaagccgacgtgcagtacgagaccgaggaacgaggtc

SEQ ID NO: 40889 - DNA, 96 bp, Fusarium cuneirostrum
  misc_feature: 33
aagaagcctatctcacacgcattaggaaacatctctttctgaaaagaagaaagaagaaagaagaaagaagaaagaagaaagaagaaagaagaaaga

SEQ ID NO: 40890 - DNA, 96 bp, Fusarium cuneirostrum
  misc_feature: 33
ccaagcaagaactgtgtaaagaattacggaggcgtaagccgacgtgcagtacgagaccgaggaacgaggtcgaagtggtgctagataatgtgaaga

SEQ ID NO: 40891 - DNA, 96 bp, Fusarium cuneirostrum
  misc_feature: 33
tctgcttggagatgaactcttcacatgcagatgagactctactagtcaatccttcaggctgcgtcgttcctcctcgccctcaggactcatttatgg

SEQ ID NO: 40892 - DNA, 96 bp, Fusarium cuneirostrum
  misc_feature: 33
gactaactttaactgtagcccggaacgaggagtgaggacgaatatcattcaagtgaatgaaatccgacaggaaccgggaaccggtgaaccacgaga

SEQ ID NO: 40893 - DNA, 96 bp, Fusarium cuneirostrum
  misc_feature: 33
caagactcaaaatctaccggattttgggacttttcagaaactggcacagttttaatatgggttgcgatctggcgtttggtgtgagcaaacgtgaga

SEQ ID NO: 40894 - DNA, 96 bp, Fusarium cuneirostrum
  misc_feature: 33
acgggagttggtgatgacttcacttctgccgactccacatactttgctcgccactgtttaatatggggcgaggcaaataaatacgttttaaataga

SEQ ID NO: 40895 - DNA, 96 bp, Fusarium cuneirostrum
  misc_feature: 33
tcgttcctcggtgttcccccagcttccaatcaacgcacgcgtttgaaaggaaaccgcttatagaccaaagttatcagccctcgtttcgctggtacc

SEQ ID NO: 40896 - DNA, 96 bp, Fusarium cuneirostrum
  misc_feature: 33
gacgagggcgacggattcctccgtgacggggctctttgtgggcattttgatcgccgtgccgactcatggaaagggcctgctggagcctaggaacga

SEQ ID NO: 40897 - DNA, 96 bp, Fusarium cuneirostrum
  misc_feature: 33
caagtacttaagggcctggagaccggcccatctcccgagcctggtcttcccaaccacattgcgctcggaagacaaagccacagggggtcagctcga

SEQ ID NO: 40898 - DNA, 96 bp, Fusarium cuneirostrum
  misc_feature: 33
agtataagacggaacgtctgcccctgcgaggacgcagtcgaagacttgagactgtatttatttttttgtgtgagacggagtcgagtctgatttcga

SEQ ID NO: 40899 - DNA, 96 bp, Fusarium cuneirostrum
  misc_feature: 33
aggattgactagtagagtctcatctgcatgtgaagagttcatctccaagcagagactgtggtctcaataccgagcgaagcgaaggtgcggaacgga

SEQ ID NO: 40900 - DNA, 96 bp, Fusarium cuneirostrum
  misc_feature: 33
tagagttgggttcgagtgaagaacccataccccaagcagaactatgttctgaataccgaccgaacggagtgagggaaggtgcggaatggagtggga

SEQ ID NO: 40901 - DNA, 96 bp, Fusarium cuneirostrum
  misc_feature: 33
aaagagaaccacgagctagacggcgagtggtgagggtgagacagcagtcgaatagagcccagagggcgaacgatctaaacaccaggtagtggtgga

SEQ ID NO: 40902 - DNA, 96 bp, Fusarium cuneirostrum
  misc_feature: 33
aagatgcagcgccacctccgaagcgaagacgaactctcccgttaagcttcaaaaatcaagacgttccagatcaatctctcaacgatgatgattgga

SEQ ID NO: 40903 - DNA, 96 bp, Fusarium cuneirostrum
  misc_feature: 33
tccaacgacctttacttttttatttgaccggaggtcattgtatacgacggacgtcgctgtctttttctattttctctgtttgcggaagcacggttg

SEQ ID NO: 40904 - DNA, 96 bp, Fusarium cuneirostrum
  misc_feature: 33
tcatgttttgcgcgacagcgctgaagaagtgggcgtccgcccattatgtactcgctcactagctccgtccatgattacggtcgtacattctgttcg

SEQ ID NO: 40905 - DNA, 96 bp, Fusarium cuneirostrum
  misc_feature: 33
tcatcccacacgtccactccttgcaccactgtgcatcgttcccttattacgcctccacttcggtcctacgttccctccgtgtcgttattgatcggg

SEQ ID NO: 40906 - DNA, 96 bp, Fusarium cuneirostrum
  misc_feature: 33
tcatcaactcaaacctgtcacttcaacgacacatcaccatggagactgccggcctcgttattggggtcgccgggctcgccgggctcgccgggctct

SEQ ID NO: 40907 - DNA, 96 bp, Fusarium cuneirostrum
  misc_feature: 33
acgttccgtccacaatctcataccccgcagacagagtcgaggagtataagacagcgtcttttcccccgagaggttgagtgagcaggcgaactctga

SEQ ID NO: 40908 - DNA, 96 bp, Fusarium cuneirostrum
  misc_feature: 33
tcacttcccgagactaaatttgaatcgctatttgattggatcgcagcgcgatttcgacgccttttacgtcagtttaattaaggatatcggagatat

SEQ ID NO: 40909 - DNA, 96 bp, Fusarium cuneirostrum
  misc_feature: 33
ctacatcatctgtctgagctcagagagcgagtcgatcttggattcctatgcaagtcgtctttcaattgcgctggcgcgcgactaggaacagagtga

SEQ ID NO: 40910 - DNA, 96 bp, Fusarium cuneirostrum
  misc_feature: 33
aggagtaactccaacgatgctttgtgagacttaccggaataggtaatggtgatgacctcaagtggtattgtagttagtatagacagtgatatgtga

SEQ ID NO: 40911 - DNA, 96 bp, Fusarium cuneirostrum
  misc_feature: 33
ctctttcaactgtatcagacaactgactagccacaagtcgacaagaacaccaagcacctgtctccagaccatgtgccgcatcccaggaccacaata

SEQ ID NO: 40912 - DNA, 96 bp, Fusarium cuneirostrum
  misc_feature: 33
ggtgtttagatcgttcgccctctgggctctattcgactgctgtctcaccctcaccactcgccgtctagctcgtggttctcttttaccactacaata

SEQ ID NO: 40913 - DNA, 96 bp, Fusarium cuneirostrum
  misc_feature: 33
cacaatgtctgtcgtcgtctctactcctcccatatttcaatgaaaattaaattggcgatctcccctttcctatgacaccttgttagtaaaggaata

SEQ ID NO: 40914 - DNA, 96 bp, Fusarium cuneirostrum
  misc_feature: 33
ctcttaaccctcctttaggatataattaaatagtatatcgataataaaattaaagttaaggataatatagcgatttatatatagagagagataata

SEQ ID NO: 40915 - DNA, 96 bp, Fusarium cuneirostrum
  misc_feature: 33
tattactgcgtcgcttatctgacgcatatcttttctacggtaagctatcttcggaaggaagaagtagtgaaggagatgtacgatcgacttggtatc

SEQ ID NO: 40916 - DNA, 96 bp, Fusarium cuneirostrum
  misc_feature: 33
taagctggaaagctcccttcggtcgctaacaatctgtaccagattctcactctgattccaggtcgttgcccatacaatctcagaaatcttcccata

SEQ ID NO: 40917 - DNA, 96 bp, Fusarium cuneirostrum
  misc_feature: 33
ggaacgacgcagccggaaggattgtcaaagtcttctcatctgccagggaagagttacttccccaagcaggaactgtgaaatagagaccgagccata

SEQ ID NO: 40918 - DNA, 96 bp, Fusarium cuneirostrum
  misc_feature: 33
ataattaagactaaataaaattctaaaaagtctttactttctttattaacttaatctttataatttaataagttattaataaaaaggagaaagata

SEQ ID NO: 40919 - DNA, 96 bp, Fusarium cuneirostrum
  misc_feature: 33
actctcttaaccctcctttaggatataattaaatagtatatcgataataaaattaaagttaaggataatatagcgatttatatatagagagagata

SEQ ID NO: 40920 - DNA, 96 bp, Fusarium cuneirostrum
  misc_feature: 33
attataagttgctaattttagctattactagctaatttaaactaataataagttaggctattatattattattataaaaagaccttataatatata

SEQ ID NO: 40921 - DNA, 96 bp, Fusarium cuneirostrum
  misc_feature: 33
aaatttatttctcttaatttagaaaatataatcttaaagcttaatataacgtatatgataagcgagtgggacactcaagtgagtgggacacctata

SEQ ID NO: 40922 - DNA, 96 bp, Fusarium cuneirostrum
  misc_feature: 33
tataggccccctcaagtacttaagggcctggagaccggcccatctcccgagcctggtcttcccaaccacattgcgctcggaagacaaagccacagg

SEQ ID NO: 40923 - DNA, 96 bp, Fusarium cuneirostrum
  misc_feature: 33
atatttattattagctacttaatattaaattatttaattataagcttagcgagtattaaatagtaattaaatacgcgaggagggagctaaggtata

SEQ ID NO: 40924 - DNA, 96 bp, Fusarium cuneirostrum
  misc_feature: 33
cctattatataacgattaaatcgctaaaataaatagtaataatattaatcggactaaatttaaatataacgctaggaaactatagaaggaattata

SEQ ID NO: 40925 - DNA, 96 bp, Fusarium cuneirostrum
  misc_feature: 33
tagttctaccgaagcccgtcagggcgaggtgcagaacgagtcgaccgacagggagacgatgtgatgttactttaattcaacagagatgcgctctgt

SEQ ID NO: 40926 - DNA, 96 bp, Fusarium cuneirostrum
  misc_feature: 33
aagacgagccttgggcgctgtctacggtccagcgtgtgcgctgtgacgatctgcttcttggacgcggatctgctgaagcggaggttgtctgaacta

SEQ ID NO: 40927 - DNA, 96 bp, Fusarium cuneirostrum
  misc_feature: 33
ctattatttcaggggctaagcaactcaattgcgataactaccatctaacgtatagtagtggtaccccagggaatattagagaaggcactgcgacta

SEQ ID NO: 40928 - DNA, 96 bp, Fusarium cuneirostrum
  misc_feature: 33
cctttacctcctagctatattaaagattaataagatttataatatagtagtatatttagctttatatataagggtattttcttactaaagatacta

SEQ ID NO: 40929 - DNA, 96 bp, Fusarium cuneirostrum
  misc_feature: 33
taggcaaccgtcgcatctgcctggaggttggttgtcactgaccaatcatcccgctcggacaaagcggagtgaggtccgtcagcggttaaaccgtct

SEQ ID NO: 40930 - DNA, 96 bp, Fusarium cuneirostrum
  misc_feature: 33
accctgtctgctcggattgctgtctgaaatctctttcatcctctctggaagcattacgggagaactggtggtcgatttccggaccgatgatgtcta

SEQ ID NO: 40931 - DNA, 96 bp, Fusarium cuneirostrum
  misc_feature: 33
tactgtgcactgtgaatgtaaatgtaaatgtaaatgtcttcttttattgttttcactgagtccggcggaggaggagggacgacggagccggattgg

SEQ ID NO: 40932 - DNA, 96 bp, Fusarium cuneirostrum
  misc_feature: 33
tactattttatgcgagcagacatgactttgatgtatgacttgtgatttgaattgattgtgcatttgtgaacgagaagagtgaactgttattgtagt

SEQ ID NO: 40933 - DNA, 96 bp, Fusarium cuneirostrum
  misc_feature: 33
taaacttaggaatcgagatagagaataagctaatattataatagaggagaataaatagctatataagagataaataaggaagcgcttaatatagta

SEQ ID NO: 40934 - DNA, 96 bp, Fusarium cuneirostrum
  misc_feature: 33
gggcgatgagaggatttatatgtatgaatccacaatcttgagatttactgttgcaatttcaatttgccgtaaaccaaacgtcaccgacgaaatgta

SEQ ID NO: 40935 - DNA, 96 bp, Fusarium cuneirostrum
  misc_feature: 33
taataagttattaatattatatatatattaaccttaattatcttataattataggattataaggcatttataataatatcttaagctcttaagtcc

SEQ ID NO: 40936 - DNA, 96 bp, Fusarium cuneirostrum
  misc_feature: 33
taactctttactcgagtttattagatagtccatccctcgggctgcgtcctacgtcctcgccctccggactcgtttaaagatgaggttattcacaat

SEQ ID NO: 40937 - DNA, 96 bp, Fusarium cuneirostrum
  misc_feature: 33
taaatggggcgagtcataattattttaattttctttaacgtgacgagccccaaataatattttgaatgcgagcaatgatatgatactgtgatttat

SEQ ID NO: 40938 - DNA, 96 bp, Fusarium cuneirostrum
  misc_feature: 33
aggactaaattcttttagttttctaacttagatttctaattagccgaaaataaccctactaattattataaatataccttaactaaggcatattta

SEQ ID NO: 40939 - DNA, 96 bp, Fusarium cuneirostrum
  misc_feature: 33
gcatcagctaattgaggtattgactgtgacttggagagcaatttgctgacaatgatacctcgacgtgtgctttcaaacactggtagcctggcttta

SEQ ID NO: 40940 - DNA, 96 bp, Fusarium cuneirostrum
  misc_feature: 33
taaacaagcctatagactagcacgagtgagctgggtaccagcgaaacgagggctgataactttggtctataagcggtttttttgacaaaactcgtt

SEQ ID NO: 40941 - DNA, 96 bp, Fusarium cuneirostrum
  misc_feature: 33
taaaatatatatacttttaaaatgcgtcgagcaccattttaacttgatactggcgagcatttgatgaatgtagttataattgtgatatgtatgtct

SEQ ID NO: 40942 - DNA, 96 bp, Fusarium cuneirostrum
  misc_feature: 33
ctaaccctaattctaatctcttttttaattttattttccttatttattatatatatatattctttttttattattttctcttttttttctttttta

SEQ ID NO: 40943 - DNA, 96 bp, Fusarium cuneirostrum
  misc_feature: 33
gactaacgggagtgaccccagaatgggggaacggacgttgataactttggtgatataagcggttttaccctttcaacgcttgcgtgattgggaaac

SEQ ID NO: 40944 - DNA, 96 bp, Fusarium cuneirostrum
  misc_feature: 33
gtagtgaacaggaacgggacgctggtgcctcaggctgggatctctcctcaacaccaactggccaaaagagcacaatgctcgatcggaaggctaaac

SEQ ID NO: 40945 - DNA, 96 bp, Fusarium cuneirostrum
  misc_feature: 33
gtttagaaggtaagccgacacctccaagatagacgatatggtggcgattgctgaccttagtgtgtttactgatgtagtttgtaagtgaacgcctct

SEQ ID NO: 40946 - DNA, 96 bp, Fusarium cuneirostrum
  misc_feature: 33
gttggacggacaaatgagagaggtacgaacgttccgtccacaatctcataccccgcagacagagtcgaggagtataagacagcgtcttttcccccg

SEQ ID NO: 40947 - DNA, 96 bp, Fusarium cuneirostrum
  misc_feature: 33
gttgcgggagcgttatggtaagagggaggaggagtagagacgaccaagtataatgttgtaggatatcacacgtgtggggtgtgatttagttgcctt

SEQ ID NO: 40948 - DNA, 96 bp, Fusarium cuneirostrum
  misc_feature: 33
gttattaagaaatgtagcggaataatattattatataccttaataatagtattataccggatattagtattatactatatatatagactaatagcg

SEQ ID NO: 40949 - DNA, 96 bp, Fusarium cuneirostrum
  misc_feature: 33
gagcggagcgatggggtgcggagcagagggtgagggacgaacccgtcgcgaggttataataatgagcaaggtcgcaaggtcactgctcacgataac

SEQ ID NO: 40950 - DNA, 96 bp, Fusarium cuneirostrum
  misc_feature: 33
gtaggtagggagcgaggctgaaaaacctagagcttacagtagggtgagctcccgcacttgtgttacgcgagcatatataaagtagatggtgataac

SEQ ID NO: 40951 - DNA, 96 bp, Fusarium cuneirostrum
  misc_feature: 33
gtgttacgcgagcatatataaagtagatggtgataacctcaaaagagtccacgagccgagcgcgtagcgtgcaggcgaggggattgtcaatgtaat

SEQ ID NO: 40952 - DNA, 96 bp, Fusarium cuneirostrum
  misc_feature: 33
gtgtgtctgggtcgacgtccgtctccccctcttttatttctcctcgtgcactcacttcagtcgcatcctgcattcatgtttgactgctgtcaattg

SEQ ID NO: 40953 - DNA, 96 bp, Fusarium cuneirostrum
  misc_feature: 33
gtgtctccgccaccaagaaaaagtgacttcgttaacagaagtgaccgatttctcggcccattctcaggatttggctcaccaaatgccagaatcgag

SEQ ID NO: 40954 - DNA, 96 bp, Fusarium cuneirostrum
  misc_feature: 33
gtgtcgtgccgtccaccacaaagaaacagccctcctgtttccaagaataatactcgtcccagcctcgtccttactcgaaataaataatcgatcgtc

SEQ ID NO: 40955 - DNA, 96 bp, Fusarium cuneirostrum
  misc_feature: 33
gtggtattgtagttagtatagacagtgatatgtgagcacaaccgagagagtagtggagcgaacactaaataaaaggctccaacagaagtgagcgac

SEQ ID NO: 40956 - DNA, 96 bp, Fusarium cuneirostrum
  misc_feature: 33
aaaagtgttccagtttcgagctcaaagtgaactcgaatctctcgtcgcccttcgggctcctgttcccctcccatcggtcccctcggtcgggcccac

SEQ ID NO: 40957 - DNA, 96 bp, Fusarium cuneirostrum
  misc_feature: 33
gtgccgtccaccacaaagaaacagccctcctgtttccaagaataatactcgtcccagcctcgtccttactcgaaataaataatcgatcgtcgctcc

SEQ ID NO: 40958 - DNA, 96 bp, Fusarium cuneirostrum
  misc_feature: 33
cactcttcgccttcgtgcctcaggctccctatttactgggaaggcaatggtgctgcgcacctaaagcctgactcagtccacacgttcgtccctcac

SEQ ID NO: 40959 - DNA, 96 bp, Fusarium cuneirostrum
  misc_feature: 33
gtgagacagcagtcgaatagagcccagagggcgaacgatctaaacaccaggtagtggtggattgtggtgtggaacacgtttggtgagagagtcacc

SEQ ID NO: 40960 - DNA, 96 bp, Fusarium cuneirostrum
  misc_feature: 33
gtgacatttcatgtttacgtgaggggattcacagagcgcatctctgttgaattaaagtaacatcacatcgtctccctgtcggtcgactcgttctgc

SEQ ID NO: 40961 - DNA, 96 bp, Fusarium cuneirostrum
  misc_feature: 33
gtcagttgtctgatacagttgaaagagtgggtgaactgtgttttaagattgcggaggcgtgtggacggagcggtaatccaccagcataccgcgagg

SEQ ID NO: 40962 - DNA, 96 bp, Fusarium cuneirostrum
  misc_feature: 33
acgtaggacgcagcccgagggatggactatctaataaactcgagtaaagagttacgagcctcgcggagagaggtcttccattccttttttaaatac

SEQ ID NO: 40963 - DNA, 96 bp, Fusarium cuneirostrum
  misc_feature: 33
gtattatgggcgagcattaaataaagacggagcgcacataaactaaaaagggcacacatattagtgagctcccgcatttatatatagcgagcatgt

SEQ ID NO: 40964 - DNA, 96 bp, Fusarium cuneirostrum
  misc_feature: 33
aatttatttctcttaatttagaaaatataatcttaaagcttaatataacgtatatgataagcgagtgggacactcaagtgagtgggacacctatac

SEQ ID NO: 40965 - DNA, 96 bp, Fusarium cuneirostrum
  misc_feature: 33
gataagtgctcgcataaagataaatgaagctatcacaactactaagaaaggcaactaaatcacaccccacacgtgtgatatcctacaacattatac

SEQ ID NO: 40966 - DNA, 96 bp, Fusarium cuneirostrum
  misc_feature: 33
gaggggattgagtttaggcgtttgcctaacaaagtgcaggaagcacttgaatgtccgatggagtcggatgatatgctattcttgagagcatattac

SEQ ID NO: 40967 - DNA, 96 bp, Fusarium cuneirostrum
  misc_feature: 33
gtaaatgtaaatgtaaatgtcttcttttattgttttcactgagtccggcggaggaggagggacgacggagccggattggcaagagtagtgcagctg

SEQ ID NO: 40968 - DNA, 96 bp, Fusarium cuneirostrum
  misc_feature: 33
ggtgttgatcatcttttttctactcgacgatggcttcgtcgcacatgaatgaaatggaatgagccgagatgcagggcacgaggacgtatgtggacc

SEQ ID NO: 40969 - DNA, 96 bp, Fusarium cuneirostrum
  misc_feature: 33
ggtcttggtgtcgcctccgctccccctccactttcactccgttcaagcaccacattccatgtgatctttgcgtccgcaatcaacgtgcctcaactt

SEQ ID NO: 40970 - DNA, 96 bp, Fusarium cuneirostrum
  misc_feature: 33
acgacgaaccaatccgctacgcagtaaggttccgtccatatgcagaggtgcccggaagcagagctgaggacataagtagggcatcgcccactgacc

SEQ ID NO: 40971 - DNA, 96 bp, Fusarium cuneirostrum
  misc_feature: 33
ggtattggaagagattgagtcggcgtagtagtagacttttcccaatgtagatatcgtgataacctcattttgtgtaacctgtgacataacttgatt

SEQ ID NO: 40972 - DNA, 96 bp, Fusarium cuneirostrum
  misc_feature: 33
attaattatagcggaagggtaattaagattaataattaataattctcgtggaagaaattataaagcctaagaattaataattagaaggttaatacc

SEQ ID NO: 40973 - DNA, 96 bp, Fusarium cuneirostrum
  misc_feature: 33
gggcgagcattaaataaagacggagcgcacataaactaaaaagggcacacatattagtgagctcccgcatttatatatagcgagcatgttttaatc

SEQ ID NO: 40974 - DNA, 96 bp, Fusarium cuneirostrum
  misc_feature: 33
gggagggtgacccgaccccgatgtgtgaccgagacagatgtcgaggggaaagggtacatggcgagagcagcgctcgaggtggatttgacggagtct

SEQ ID NO: 40975 - DNA, 96 bp, Fusarium cuneirostrum
  misc_feature: 33
gggagaccggatgggcgaccacagacggagggcgagactgtgtcgagaccgattgcaaaagttggacaacttttcaactttttctgacatttttgg

SEQ ID NO: 40976 - DNA, 96 bp, Fusarium cuneirostrum
  misc_feature: 33
gggacgacgcaatgatcggttgactaaggacgggaacgaatggaatgagtggaggccggtggggacccatgtaagacgagcggagcgagcgaatgg

SEQ ID NO: 40977 - DNA, 96 bp, Fusarium cuneirostrum
  misc_feature: 33
accaaatgccagaatcgagtccatacaaaaactgttccagttttgagactccgtcaaatccacctcgagcgctgctctcgccatgtaccctttccc

SEQ ID NO: 40978 - DNA, 96 bp, Fusarium cuneirostrum
  misc_feature: 33
caaataatattttgaatgcgagcaatgatatgatactgtgatttatttgtgaataacttcaattgagtccggcggaggaggagggacgacggagcc

SEQ ID NO: 40979 - DNA, 96 bp, Fusarium cuneirostrum
  misc_feature: 33
gacgcagcccgagggatggactatctaataaactcgagtaaagagttacgagcctcgcggagagaggtcttccattccttttttaaatacggagcc

SEQ ID NO: 40980 - DNA, 96 bp, Fusarium cuneirostrum
  misc_feature: 33
aaaagtcgaagaaaaaggtcgtgttacctcacgaaaccacaaatgcgattaccaacatcgccaaaagagaaacaacacaaagcaataagctttgcc

SEQ ID NO: 40981 - DNA, 96 bp, Fusarium cuneirostrum
  misc_feature: 33
ggatttatcttgtagcaccgaaggaggttacgacggaggatcttgtgagggaactgcacctctgtatacagagtcatctgaaacagacgaagcggc

SEQ ID NO: 40982 - DNA, 96 bp, Fusarium cuneirostrum
  misc_feature: 33
ggagtggacgtgtgggatgatggggcccactcatggtagtacgttatgtacggacataatcttacttgcgagggtgcgagacaagtataagggcag

SEQ ID NO: 40983 - DNA, 96 bp, Fusarium cuneirostrum
  misc_feature: 33
acaagataaatcccgaggacccgtcctctcatgcgcgacgcgccatcacaactcgactcttcgtctcggtccatatcgtcgccggtccccgtctcc

SEQ ID NO: 40984 - DNA, 96 bp, Fusarium cuneirostrum
  misc_feature: 33
ggacgtaggacgcagcccgagggatggactatctaataaactcgagtaaagagttacgagcctcgcggagagaggtcttccattccttttttaaat

SEQ ID NO: 40985 - DNA, 96 bp, Fusarium cuneirostrum
  misc_feature: 33
gaaaatagaaaaagacagcgacgtccgtcgtatacaatgacctccggtcaaataaaaaagtaaaggtcgttggatccccaactccagaaagcgtcc

SEQ ID NO: 40986 - DNA, 96 bp, Fusarium cuneirostrum
  misc_feature: 33
ggacgcagcccgagggatggactatctaataaactcgagtaaagagttacgagcctcgcggagagaggtcttccattccttttttaaatacggagc

SEQ ID NO: 40987 - DNA, 96 bp, Fusarium cuneirostrum
  misc_feature: 33
aaagtgacttcgttaacagaagtgaccgatttctcggcccattctcaggatttggctcaccaaatgccagaatcgagtccatacaaaaactgttcc

SEQ ID NO: 40988 - DNA, 96 bp, Fusarium cuneirostrum
  misc_feature: 33
gcttcgcgacactgtttcggtgtcagacaacattattgtttgttttcttctcgcgttgttcgaagtcggatgagtgagcttgccgtgtaggctgtc

SEQ ID NO: 40989 - DNA, 96 bp, Fusarium cuneirostrum
  misc_feature: 33
actaaacgagagggctagtatatattaagactactatagggccaaacccgatatagcgataaagtaagactaatacttatagggattactttaagc

SEQ ID NO: 40990 - DNA, 96 bp, Fusarium cuneirostrum
  misc_feature: 33
aaagggacagaggtcccgcttcgcgacactgtttcggtgtcagacaacattattgtttgttttcttctcgcgttgttcgaagtcggatgagtgagc

SEQ ID NO: 40991 - DNA, 96 bp, Fusarium cuneirostrum
  misc_feature: 33
gcgggagcgttatggtaagagggaggaggagtagagacgaccaagtataatgttgtaggatatcacacgtgtggggtgtgatttagttgcctttct

SEQ ID NO: 40992 - DNA, 96 bp, Fusarium cuneirostrum
  misc_feature: 33
agggaagagtttccctcctacatcatctgtctgagctcagagagcgagtcgatcttggattcctatgcaagtcgtctttcaattgcgctggcgcgc

SEQ ID NO: 40993 - DNA, 96 bp, Fusarium cuneirostrum
  misc_feature: 33
gcgatgagaggatttatatgtatgaatccacaatcttgagatttactgttgcaatttcaatttgccgtaaaccaaacgtcaccgacgaaatgtatt

SEQ ID NO: 40994 - DNA, 96 bp, Fusarium cuneirostrum
  misc_feature: 33
ccctcaaggtatctacgattgacaatccctctcgcacaccgtcgcatgcgctcctcctgctacgggactattatggtgtgggttgaagctattcgc

SEQ ID NO: 40995 - DNA, 96 bp, Fusarium cuneirostrum
  misc_feature: 33
accggcgctgatatctgaaccagagctagagctagaggtgactatctgctggccatcattaatattaactatctgattatctgaacctaggccggc

SEQ ID NO: 40996 - DNA, 96 bp, Fusarium cuneirostrum
  misc_feature: 33
ccgtaggggcgcagggaagactgagggattggcaatagtcattacaccgccggaggcccgagtcggaactgtataatcctacggagcccggagggc

SEQ ID NO: 40997 - DNA, 96 bp, Fusarium cuneirostrum
  misc_feature: 33
actctcatgaagataactgaaccacatcttgtggtgttttagtaacgtcgctacgtgttccttcgtcacactcactccgcacgtcgccctccgggc

SEQ ID NO: 40998 - DNA, 96 bp, Fusarium cuneirostrum
  misc_feature: 33
cgggaccgttttcccgactatgctgaaacgggagttggtgatgacttcacttctgccgactccacatactttgctcgccactgtttaatatggggc

SEQ ID NO: 40999 - DNA, 96 bp, Fusarium cuneirostrum
  misc_feature: 33
cgctattcttggttttattcggaatgtccgggagacggacaggcgttattcgtacgagcgtgtgcgaggttttttggagaaagtaccagaggtggc

SEQ ID NO: 41000 - DNA, 96 bp, Fusarium cuneirostrum
  misc_feature: 33
cgtgcacatgtgtccagacacaaatcattatcactcacccgttcgtgatcgctttcgctctatcattcttgcctaatcgtcaagtctcggcgctgc

SEQ ID NO: 41001 - DNA, 96 bp, Fusarium cuneirostrum
  misc_feature: 33
gcagagcgaccacggaatgaggttactataatcctcatgagacatgagttgattgcgcccgacagtggttggcgataacttcatcagagatgaact

SEQ ID NO: 41002 - DNA, 96 bp, Fusarium cuneirostrum
  misc_feature: 33
gcacgagaaggaggggaccgactgaagtgcgggtggacggaacgttatgaggaggaacgacgaataaggtgcagcgtagcgatccgggcataagtg

SEQ ID NO: 41003 - DNA, 96 bp, Fusarium cuneirostrum
  misc_feature: 33
acgctcattttttatattatgataggttctgtatagcgacggaattgcgttgcgtggttactgggatattccgtgatgccctggacaattatcatc

SEQ ID NO: 41004 - DNA, 96 bp, Fusarium cuneirostrum
  misc_feature: 33
ctcttcccctcgactctccagtctcgggttgatgtcggtcgggccacgccctcccttctactcttaccttcaccatgacccacactccgggtcatc

SEQ ID NO: 41005 - DNA, 96 bp, Fusarium cuneirostrum
  misc_feature: 33
gatccaaagagtccatcgctcactccttcgctcttacttacatccgacaacaaagattgtctctggcgctctgcgcccatgtgcatctccgatgct

SEQ ID NO: 41006 - DNA, 96 bp, Fusarium cuneirostrum
  misc_feature: 33
aggacgaaggacgcagggtgagggattgacaagagtatgttggcaacccatgaagagttacgagcgcccgcggagggccgagtctatgactatatc

SEQ ID NO: 41007 - DNA, 96 bp, Fusarium cuneirostrum
  misc_feature: 33
gataataagaatatactctatcttattatatttctcttgctttaatacttctagcttataaagtctctaattaagtataaactttataaaaaattt

SEQ ID NO: 41008 - DNA, 96 bp, Fusarium cuneirostrum
  misc_feature: 33
gagggacgacgcaatgatcggttgactaaggacgggaacgaatggaatgagtggaggccggtggggacccatgtaagacgagcggagcgagcgaat

SEQ ID NO: 41009 - DNA, 96 bp, Fusarium cuneirostrum
  misc_feature: 33
gagggaaaagtgcgtcgcatacttggatgcgtcgcatgcttatcatgtacgttacatcacaagtgagtgaaacacacaagcgagtgaaacaaaaat

SEQ ID NO: 41010 - DNA, 96 bp, Fusarium cuneirostrum
  misc_feature: 33
gagacactttttaaatttaaaatacttttgaacctgtcgagacccattttcttgactttggatgcgagcatatgatgacttggattttgtgattct

SEQ ID NO: 41011 - DNA, 96 bp, Fusarium cuneirostrum
  misc_feature: 33
gacgctcattttttatattatgataggttctgtatagcgacggaattgcgttgcgtggttactgggatattccgtgatgccctggacaattatcat

SEQ ID NO: 41012 - DNA, 96 bp, Fusarium cuneirostrum
  misc_feature: 33
gacgagggggcgaggaagtataagacggaacgtctgcccctgcgaggacgcagtcgaagacttgagactgtatttatttttttgtgtgagacggag

SEQ ID NO: 41013 - DNA, 96 bp, Fusarium cuneirostrum
  misc_feature: 33
gacccgaccccgatgtgtgaccgagacagatgtcgaggggaaagggtacatggcgagagcagcgctcgaggtggatttgacggagtctcaaaactg

SEQ ID NO: 41014 - DNA, 96 bp, Fusarium cuneirostrum
  misc_feature: 33
gaatatatagcaatagcagcaataatatataattatataaaaatagctataatactaaacgctctactctctataatattagctatcgactattag

SEQ ID NO: 41015 - DNA, 96 bp, Fusarium cuneirostrum
  misc_feature: 33
acctccctccggtcggtagaggactacagttcctgcctcccctgcgggagcttatcattcttcatatgcagatgaggagactactgtcaatccttc

SEQ ID NO: 41016 - DNA, 96 bp, Fusarium cuneirostrum
  misc_feature: 33
gaagcctatctcacacgcattaggaaacatctctttctgaaaagaagaaagaagaaagaagaaagaagaaagaagaaagaagaaagaagaaagaag

SEQ ID NO: 41017 - DNA, 96 bp, Fusarium cuneirostrum
  misc_feature: 33
gaaatgaaatgtggaatgaaatggaacggagagaaagtgggtgcgtgggcacacacaaacccgaccggagccgtaggggcgaagggaggacgggag

SEQ ID NO: 41018 - DNA, 96 bp, Fusarium cuneirostrum
  misc_feature: 33
cctcttcccctcgtcctctcgactcgggtatgacggtcgggccacaccctccctctcacttatcctcctcgtgatccccactcggctacatctttc

SEQ ID NO: 41019 - DNA, 96 bp, Fusarium cuneirostrum
  misc_feature: 33
gaaaagtgcgtcgcatacttggatgcgtcgcatgcttatcatgtacgttactcaaaagtcggtccattttacataatgtcccctggggcaaagcgg

SEQ ID NO: 41020 - DNA, 96 bp, Fusarium cuneirostrum
  misc_feature: 33
aataattatatttcttttttctctttaaccttctttacttaaactctttacttctttaacccttaaaacccttttaccttctttaaattatttttc

SEQ ID NO: 41021 - DNA, 96 bp, Fusarium cuneirostrum
  misc_feature: 33
ctttcgggtctctacaaaatcaaaacatttacatctgctgggctccctctcggcacacgcccaagatactgtccacaacctcatctagtacaattg

SEQ ID NO: 41022 - DNA, 96 bp, Fusarium cuneirostrum
  misc_feature: 33
ctttcaaaatggcaactacttctcaatcatatccgatcattagactgccgataaagcccaccgacgggcacgaagaccactagtatcaggcaacat

SEQ ID NO: 41023 - DNA, 96 bp, Fusarium cuneirostrum
  misc_feature: 33
cttcgacagctgccaagtcaagccctgtcgacaacggagataatatctctccacaagttcgtagcgaccacaatcgctacaaatagaaaggacaag

SEQ ID NO: 41024 - DNA, 96 bp, Fusarium cuneirostrum
  misc_feature: 33
aaagctgtggcgattgcaacgggctctctcgctgctgcgtcggagaaagtttgttcacccaaaagcgttcgtacggccggcctctatgtcacgaag

SEQ ID NO: 41025 - DNA, 96 bp, Fusarium cuneirostrum
  misc_feature: 33
cggatgagtgagcgtagcgaaggaagactgagggattggcaatcgtagataacccccggaggggaagcagacactgcgtaataaaaccgaccgaag

SEQ ID NO: 41026 - DNA, 96 bp, Fusarium cuneirostrum
  misc_feature: 33
cggaagcgtagatgggaaccgggtgtgaagccagtgttccagcgtcagcgcagtaaaagtgtgcgtgtcagtaggatacggagcccggctcggaag

SEQ ID NO: 41027 - DNA, 96 bp, Fusarium cuneirostrum
  misc_feature: 33
cccaagcaagaactgtgtaaagaattacggaggcgtaagccgacgtgcagtacgagaccgaggaacgaggtcgaagtggtgctagataatgtgaag

SEQ ID NO: 41028 - DNA, 96 bp, Fusarium cuneirostrum
  misc_feature: 33
atcgtgaccacagtggaggtccgcacgcattggggagataaaccattcttaattagataatgatttcccaatcgataccttcatcactacctacag

SEQ ID NO: 41029 - DNA, 96 bp, Fusarium cuneirostrum
  misc_feature: 33
aataagaaaagaagaataaatagtttatggaaataagaaaaataaataagaataggaattatagtaaaagattaaggataatagtgaatttaagag

SEQ ID NO: 41030 - DNA, 96 bp, Fusarium cuneirostrum
  misc_feature: 33
ctctcatgcgcgacgcgccatcacaactcgactcttcgtctcggtccatatcgtcgccggtccccgtctcccactttcagtctccctcttcggtcg

SEQ ID NO: 41031 - DNA, 96 bp, Fusarium cuneirostrum
  misc_feature: 33
ctccgcgaggctcgtaactctttactcgagtttattagatagtccatccctcgggctgcgtcctacgtcctcgccctccggactcgtttaaagatg

SEQ ID NO: 41032 - DNA, 96 bp, Fusarium cuneirostrum
  misc_feature: 33
ctccgcacgtcgccctacgggctccgtatttaaaaaaggaatggaagacctctctccgcgaggctcgtaactctttactcgagtttattagatagt

SEQ ID NO: 41033 - DNA, 96 bp, Fusarium cuneirostrum
  misc_feature: 33
atttaggattattattaatatagctaagttattattataattaatacttttagcctaatatatataataagcgaacaaaataaataagcaagtgag

SEQ ID NO: 41034 - DNA, 96 bp, Fusarium cuneirostrum
  misc_feature: 33
cggcactaacaatcgctacacgattcccacctcaatctcgcgatttcgcccgccattctcagtttcgttcacatacaaaaagtatgtcgatttgag

SEQ ID NO: 41035 - DNA, 96 bp, Fusarium cuneirostrum
  misc_feature: 33
ctcaaaagagtccacgagccgagcgcgtagcgtgcaggcgaggggattgtcaatgtaatttattcagggaataattacccttccaagcaggaactg

SEQ ID NO: 41036 - DNA, 96 bp, Fusarium cuneirostrum
  misc_feature: 33
accatgtcctccgacatgagaaccaactgtctcacgtccgttcgcagtataaaaaaaggataaatgtatttctctcgaaataacagctcgccgtag

SEQ ID NO: 41037 - DNA, 96 bp, Fusarium cuneirostrum
  misc_feature: 33
cgtggttctcttttaccactacaataacagttcactcttctcgttcacaaatgcacaatcaattcaaatcacaagtcatacatcaaagtcatgtct

SEQ ID NO: 41038 - DNA, 96 bp, Fusarium cuneirostrum
  misc_feature: 33
cgagccgagcgcgtagcgtgcaggcgaggggattgtcaatgtaatttattcagggaataattacccttccaagcaggaactgtgaaatagagaccg

SEQ ID NO: 41039 - DNA, 96 bp, Fusarium cuneirostrum
  misc_feature: 33
cgggggtccccttcccttccccctgtcttttgagcccaaaacgagttttgtcaaaaaaaccgcttatagaccaaagttatcagccctcgtttcgct

SEQ ID NO: 41040 - DNA, 96 bp, Fusarium cuneirostrum
  misc_feature: 33
cgggctccgtaggattatacagttccgactcgggcctccggcggtgtaatgactattgccaatccctcagtcttccctgcgcccctacggggcttg

SEQ ID NO: 41041 - DNA, 96 bp, Fusarium cuneirostrum
  misc_feature: 33
aaataatattttgaatgcgagcaatgatatgatactgtgatttatttgtgaataacttcaattgagtccggcggaggaggagggacgacggagccg

SEQ ID NO: 41042 - DNA, 96 bp, Fusarium cuneirostrum
  misc_feature: 33
aagtggtggctcgctcaatcaatcaagttatgtcacaggttacacaaaatgaggttatcacgatatctacattgggaaaagtctactactacgccg

SEQ ID NO: 41043 - DNA, 96 bp, Fusarium cuneirostrum
  misc_feature: 33
aatcgtcaagtctcggcgctgcctcaatcaacaaactgaaccaagttcagatgaccttccaggtgggcgctccgcgccttttgtactcctcctccg

SEQ ID NO: 41044 - DNA, 96 bp, Fusarium cuneirostrum
  misc_feature: 33
atatgggacagcttatctatgctaacctaattaggaaatcgtcacgctcttcaaaaactgtactaatccaaaggaggaaatcgtcacggtcaagcg

SEQ ID NO: 41045 - DNA, 96 bp, Fusarium cuneirostrum
  misc_feature: 33
cgctgcaccttattcgtcgttcctcctcataacgttccgtccacccgcacttcagtcggtcccctccttctcgtgcttacttactccactcttctt

SEQ ID NO: 41046 - DNA, 96 bp, Fusarium cuneirostrum
  misc_feature: 33
ataacatcatcaattgaccaacagtcaatgcgcacatcgaaagatgataccgaagtgggtgtacgaggtgagtagatgagggagtgcggatgcgcg

SEQ ID NO: 41047 - DNA, 96 bp, Fusarium cuneirostrum
  misc_feature: 33
aatgataatcgatgacgacgctaaaatgtacagggtgaactctatcgaagtcgactgatgtcatcgacagcagcgcatgattcgggatgactcgcg

SEQ ID NO: 41048 - DNA, 96 bp, Fusarium cuneirostrum
  misc_feature: 33
caatctcaggattgaactcaccaaaaaactgttccagttttgagctcgtttctggctcgggtctgctcgaccctcgacacacttctgtcggtcgcg

SEQ ID NO: 41049 - DNA, 96 bp, Fusarium cuneirostrum
  misc_feature: 33
ccacatactttgctcgccactgtttaatatggggcgaggcaaataaatacgttttaaatagactcgtttgacgagccccaattactattttatgcg

SEQ ID NO: 41050 - DNA, 96 bp, Fusarium cuneirostrum
  misc_feature: 33
cgattcccacctcaatctcgcgatttcgcccgccattctcagtttcgttcacatacaaaaagtatgtcgatttgagtccaatttgaatccgatttt

SEQ ID NO: 41051 - DNA, 96 bp, Fusarium cuneirostrum
  misc_feature: 33
cgaagtcactttttcttggtggcggagacaccaagctacgcttatatcactaccgaatgagacccggaacgggtcgaaatgaggtggcataacttt

SEQ ID NO: 41052 - DNA, 96 bp, Fusarium cuneirostrum
  misc_feature: 33
ccttcgcagtccatgcacctccacttgaggtcatcatgcactctcatgaagataactgaaccacatcttgtggtgttttagtaacgtcgctacgtg

SEQ ID NO: 41053 - DNA, 96 bp, Fusarium cuneirostrum
  misc_feature: 33
ccttcactacttcttccttccgaagatagcttaccgtagaaaagatatgcgtcagataagcgacgcagtaatatgctctcaagaatagcatatcat

SEQ ID NO: 41054 - DNA, 96 bp, Fusarium cuneirostrum
  misc_feature: 33
agggacgaagaagagtggagtaagtaagcacgagaaggaggggaccgactgaagtgcgggtggacggaacgttatgaggaggaacgacgaataagg

SEQ ID NO: 41055 - DNA, 96 bp, Fusarium cuneirostrum
  misc_feature: 33
cctgtaggttatggatgaggctcgctcagtagccagtcacgcattgaagctattcccaactcccgttcgggaaatctcacttccacagaaaagtct

SEQ ID NO: 41056 - DNA, 96 bp, Fusarium cuneirostrum
  misc_feature: 33
cctccgtcgtccttcctcgcactcgaaccatctcgttcatcactccgtgatacaaaagaataaaccacgttcgcccgtctcactaaatctccgatt

SEQ ID NO: 41057 - DNA, 96 bp, Fusarium cuneirostrum
  misc_feature: 33
agtttccctcctacatcatctgtctgagctcagagagcgagtcgatcttggattcctatgcaagtcgtctttcaattgcgctggcgcgcgactagg

SEQ ID NO: 41058 - DNA, 96 bp, Fusarium cuneirostrum
  misc_feature: 33
ccatgtcctccgacatgagaaccaactgtctcacgtccgttcgcagtataaaaaaaggataaatgtatttctctcgaaataacagctcgccgtagg

SEQ ID NO: 41059 - DNA, 96 bp, Fusarium cuneirostrum
  misc_feature: 33
cccttacattccccacgcctccgttcattcgctatccagcgatcactccgttattgctcctcattcccagtccatacgtccttcccattcgttatt

SEQ ID NO: 41060 - DNA, 96 bp, Fusarium cuneirostrum
  misc_feature: 33
ccctgtctgctcggattgctgtctgaaatctctttcatcctctctggaagcattacgggagaactggtggtcgatttccggaccgatgatgtctat

SEQ ID NO: 41061 - DNA, 96 bp, Fusarium cuneirostrum
  misc_feature: 33
ccaagaataatactcgtcccagcctcgtccttactcgaaataaataatcgatcgtcgctccactcctattgctcgtcacttctcgttccgatatgg

SEQ ID NO: 41062 - DNA, 96 bp, Fusarium cuneirostrum
  misc_feature: 33
ccaagtcgatcgtacatctccttcactacttcttccttccgaagatagcttaccgtagaaaagatatgcgtcagataagcgacgcagtaatatgct

SEQ ID NO: 41063 - DNA, 96 bp, Fusarium cuneirostrum
  misc_feature: 33
ccaaacgaggggaaccgagtttgggaagagaaagtggacggaacgttagttctgtccctgtttttttaaattgtcaagcatagtaattatgcttgt

SEQ ID NO: 41064 - DNA, 96 bp, Fusarium cuneirostrum
  misc_feature: 33
agggacgacgcaatgatcggttgactaaggacgggaacgaatggaatgagtggaggccggtggggacccatgtaagacgagcggagcgagcgaatg

SEQ ID NO: 41065 - DNA, 96 bp, Fusarium cuneirostrum
  misc_feature: 33
catgatcctacactcttcgccttcgtgcctcaggctccctatttactgggaaggcaatggtgctgcgcacctaaagcctgactcagtccacacgtt

SEQ ID NO: 41066 - DNA, 96 bp, Fusarium cuneirostrum
  misc_feature: 33
atgctattcttgagagcatattactgcgtcgcttatctgacgcatatcttttctacggtaagctatcttcggaaggaagaagtagtgaaggagatg

SEQ ID NO: 41067 - DNA, 96 bp, Fusarium cuneirostrum
  misc_feature: 33
catcggagatgcacatgggcgcagagcgccagagacaatctttgttgtcggatgtaagtaagagcgaaggagtgagcgatggactctttggatcct

SEQ ID NO: 41068 - DNA, 96 bp, Fusarium cuneirostrum
  misc_feature: 33
catccacattcctcgtgacctcggatgtctattgactggggtcgtcaaggtcagcaagctgactcaagacgattactcctgggtacacacgttcat

SEQ ID NO: 41069 - DNA, 96 bp, Fusarium cuneirostrum
  misc_feature: 33
catcaccattacctattccggtaagtctcacaaagcatcgttggagttactcctccacacttgacccaactcaaacacagcatcatcaaatctact

SEQ ID NO: 41070 - DNA, 96 bp, Fusarium cuneirostrum
  misc_feature: 33
aatgaaatgtgatatgaacgtagtcgtagtaagaagacatgggaatggcttcatccataaatgagtcctgagggcgaggaggaacgacgcagcctg

SEQ ID NO: 41071 - DNA, 96 bp, Fusarium cuneirostrum
  misc_feature: 33
aagagtccatcgctcactccttcgctcttacttacatccgacaacaaagattgtctctggcgctctgcgcccatgtgcatctccgatgctctcctg

SEQ ID NO: 41072 - DNA, 96 bp, Fusarium cuneirostrum
  misc_feature: 33
aatccctcagtcttccttcgctacgctcactcatccgctcgggactcatggatgaggaatacatttacagtcaccaacataaacattcacaatctg

SEQ ID NO: 41073 - DNA, 96 bp, Fusarium cuneirostrum
  misc_feature: 33
cacttcgacctcgttcctcggtctcgtactgcacgtcggcttacgcctccgtaattctttacacagttcttgcttgggcaatgaactcttcacttg

SEQ ID NO: 41074 - DNA, 96 bp, Fusarium cuneirostrum
  misc_feature: 33
cacaaccgagagagtagtggagcgaacactaaataaaaggctccaacagaagtgagcgacacgtaattgtgatgttgtgcgtataaatggtatcgt

SEQ ID NO: 41075 - DNA, 96 bp, Fusarium cuneirostrum
  misc_feature: 33
aatattcctttactaacaaggtgtcataggaaaggggagatcgccaatttaattttcattgaaatatgggaggagtagagacgacgacagacattg

SEQ ID NO: 41076 - DNA, 96 bp, Fusarium cuneirostrum
  misc_feature: 33
atactgtgcactgtgaatgtaaatgtaaatgtaaatgtcttcttttattgttttcactgagtccggcggaggaggagggacgacggagccggattg

SEQ ID NO: 41077 - DNA, 96 bp, Fusarium cuneirostrum
  misc_feature: 33
acgaagagtcgagttgtgatggcgcgtcgcgcatgagaggacgggtcctcgggatttatcttgtagcaccgaaggaggttacgacggaggatcttg

SEQ ID NO: 41078 - DNA, 96 bp, Fusarium cuneirostrum
  misc_feature: 33
atctcttatagactaacgcgagtgacccggaacggggcaaacgagcgtccataactttggtctataagaggtttttttgacaaacgctgcgcgttg

SEQ ID NO: 41079 - DNA, 96 bp, Fusarium cuneirostrum
  misc_feature: 33
aagctcactgcgttcgctaacaatcagtacctgattcccgactccgtctcaggatttgactcaccaaatctcagaaacgaacacatacaaattttg

SEQ ID NO: 41080 - DNA, 96 bp, Fusarium cuneirostrum
  misc_feature: 33
attttattaggggtttaaggcttcttaataataataaaaatctaatttaaagttaaaataaaagtaattaaatataatagggaaattttacagatt

SEQ ID NO: 41081 - DNA, 96 bp, Fusarium cuneirostrum
  misc_feature: 33
aagcgtagcttggtgtctccgccaccaagaaaaagtgacttcgttaacagaagtgaccgatttctcggcccattctcaggatttggctcaccaaat

SEQ ID NO: 41082 - DNA, 96 bp, Fusarium cuneirostrum
  misc_feature: 33
attatattagattctaagtcataaattatattacgcttaaaactatctattatatattttactttactttaatagcttagcttattattttttatt

SEQ ID NO: 41083 - DNA, 96 bp, Fusarium cuneirostrum
  misc_feature: 33
aactccccgagcagagactgctttaatctaccgaacgtagtgaggtgcggagtgaagatggagacggagtcgacatcgtaacgaggttactataat

SEQ ID NO: 41084 - DNA, 96 bp, Fusarium cuneirostrum
  misc_feature: 33
attagataattaatataaattaggaataatattaacttaggcttaaatactattatatcgattaaataatattaaatgcttaacttagtagagctt

SEQ ID NO: 41085 - DNA, 96 bp, Fusarium cuneirostrum
  misc_feature: 33
agaggtgcagttccctcacaagatcctccgtcgtaacctccttcggtgctacaagataaatcccgaggacccgtcctctcatgcgcgacgcgccat

SEQ ID NO: 41086 - DNA, 96 bp, Fusarium cuneirostrum
  misc_feature: 33
actctctcggttgtgctcacatatcactgtctatactaactacaataccacttgaggtcatcaccattacctattccggtaagtctcacaaagcat

SEQ ID NO: 41087 - DNA, 96 bp, Fusarium cuneirostrum
  misc_feature: 33
atctctgtgtgatgtctgtaacgtcgctacgtgttccttcgtcacactcactccgcacgtcctccctccggtcgtccgtactaaggatatagtcat

SEQ ID NO: 41088 - DNA, 96 bp, Fusarium cuneirostrum
  misc_feature: 33
atctgaaatcatgctcgccaagtgaaaaaaagtagtggttctcgacacattaaaagtggttttaataattatttgtctcgccccacgtaaggttat

SEQ ID NO: 41089 - DNA, 96 bp, Fusarium cuneirostrum
  misc_feature: 33
atctatatctattaactaaattattatgggcttaatattatctaatatatttaattaatatctatttagccggaatattaaagtaaaatctaaagt

SEQ ID NO: 41090 - DNA, 96 bp, Fusarium cuneirostrum
  misc_feature: 33
atcaattcaaatcacaagtcatacatcaaagtcatgtctgctcgcataaaatagtaattggggctcgtcaaacgagtctatttaaaacgtatttat

SEQ ID NO: 41091 - DNA, 96 bp, Fusarium cuneirostrum
  misc_feature: 33
atatattctatagcttcttagagtttattatttatttaaatataattaaaataaggtcccctttatttatattattataaataattaagtcttctt

SEQ ID NO: 41092 - DNA, 96 bp, Fusarium cuneirostrum
  misc_feature: 33
atacgaaaagaaagcatgacgattactttcaagatagccattcagctcctcgggatgacctctacgcaccggactcctagaagcaaatataaaatt

SEQ ID NO: 41093 - DNA, 96 bp, Fusarium cuneirostrum
  misc_feature: 33
ataagggcaagcttatcgtaatttaataaagctatagctaaatatagctaaaataaaaatagatagaagattttaatatatcttactatcttcctt

SEQ ID NO: 41094 - DNA, 96 bp, Fusarium cuneirostrum
  misc_feature: 33
agggttgttgagtagtgactatgtaacgggaccgttttcccgactatgctgaaacgggagttggtgatgacttcacttctgccgactccacatact

SEQ ID NO: 41095 - DNA, 96 bp, Fusarium cuneirostrum
  misc_feature: 33
acgttccgtccacaatctcataccccgcagacagagtcgaggagtataagacagcgtcttttcccccgagagggcagagggaagagtttccctcct

SEQ ID NO: 41096 - DNA, 96 bp, Fusarium cuneirostrum
  misc_feature: 33
agcacgagaaggaggggaccgactgaagtgcgggtggacggaacgttatgaggaggaacgacgaataaggtgcagcgtagcgatccgggcataagt

SEQ ID NO: 41097 - DNA, 96 bp, Fusarium cuneirostrum
  misc_feature: 33
agagagtagtggagcgaacactaaataaaaggctccaacagaagtgagcgacacgtaattgtgatgttgtgcgtataaatggtatcgtgaatgtgt

SEQ ID NO: 41098 - DNA, 96 bp, Fusarium cuneirostrum
  misc_feature: 33
aataacgatttaatactacgagcaccatttttatttcgatggcgagctatgatgaatgattatggaatgtgaatgccttcccgcataaatgagtct

SEQ ID NO: 41099 - DNA, 96 bp, Fusarium cuneirostrum
  misc_feature: 33
aacatttgtgaccaaattcccactccgttctcacgtttgctcacaccaaacgccagatcgcaacccatattaaaactgtgccagtttctgaaaagt

SEQ ID NO: 41100 - DNA, 96 bp, Fusarium cuneirostrum
  misc_feature: 33
aaagccttcttctattatcttaataattctatttaaggtagctctttttcctttattattctattttattcctaactttatttttcttacttaagt

SEQ ID NO: 41101 - DNA, 96 bp, Fusarium cuneirostrum
  misc_feature: 33
aaatgagagaggtacgaacgttccgtccacaatctcataccccgcagacagagtcgaggagtataagacagcgtcttttcccccgagaggttgagt

SEQ ID NO: 41102 - DNA, 96 bp, Fusarium cuneirostrum
  misc_feature: 33
actacaattacaattacaattacaatcagtcacgatggctcgccattagggagggaaatggtgctcgacaagtttaaagaagtgtatttaaatgtt

SEQ ID NO: 41103 - DNA, 96 bp, Fusarium cuneirostrum
  misc_feature: 33
aaggacgcagggtgagggattgacaagagtatgttggcaacccatgaagagttacgagcgcccgcggagggccgagtctatgactatatccttagt

SEQ ID NO: 41104 - DNA, 96 bp, Fusarium cuneirostrum
  misc_feature: 33
acacgggacagtgaagaatgaacgtgtgtacccaggagtaatcgtcttgagtcagcttgctgaccttgacgaccccagtcaatagacatccgaggt

SEQ ID NO: 41105 - DNA, 96 bp, Fusarium cuneirostrum
  misc_feature: 33
aaaaccccagcaattggcgtgctcattgagcattattttcgtatgaattgagctcgtgagattggatcatcttgaggctaattccactgtctaggt

SEQ ID NO: 41106 - DNA, 96 bp, Fusarium cuneirostrum
  misc_feature: 33
aaatttgtacaaattttgaaatggattcttgtcggccctctgggcctcctgtcccctcacttccgttcggtcccccctccccacggtcgggtgtgt

SEQ ID NO: 41107 - DNA, 96 bp, Fusarium cuneirostrum
  misc_feature: 33
aatggggcgagtcataattattttaattttctttaacgtgacgagccccaaataatattttgaatgcgagcaatgatatgatactgtgatttattt

SEQ ID NO: 41108 - DNA, 96 bp, Fusarium cuneirostrum
  misc_feature: 33
aaaatatatatacttttaaaatgcgtcgagcaccattttaacttgatactggcgagcatttgatgaatgtagttataattgtgatatgtatgtctt

SEQ ID NO: 41109 - DNA, 96 bp, Fusarium cuneirostrum
  misc_feature: 32
ttttgaggactttatagtcgatattcttcagtcctttacatagccactagctataggttataagtgagaataatctatcgattatatattccggga

SEQ ID NO: 41110 - DNA, 96 bp, Fusarium cuneirostrum
  misc_feature: 32
ggttaaaagggttaagagaggagagaaataaagaaaattaaagaagaaagaataattatagaagaaatagaagaaatataataaggagaaagaaaa

SEQ ID NO: 41111 - DNA, 96 bp, Fusarium cuneirostrum
  misc_feature: 32
tttgcctcgccccatattaaacagtggcgagcaaagtatgtggagtcggcagaagtgaagtcatcaccaactcccgtttcagcatagtcgggaaaa

SEQ ID NO: 41112 - DNA, 96 bp, Fusarium cuneirostrum
  misc_feature: 32
gcttcgggactttagtcatctgcgtttcccgcagatggctcatttgccacggtaccgcgttcttgacacgttccgatcaacaattaaccatccaaa

SEQ ID NO: 41113 - DNA, 96 bp, Fusarium cuneirostrum
  misc_feature: 32
tgctcgtcaaaagtatatttagtgtttgcctcgccccattgactagcaaaaaggctcgctaaaaaacgaaggtatcgcaacatccaaaacaggaaa

SEQ ID NO: 41114 - DNA, 96 bp, Fusarium cuneirostrum
  misc_feature: 32
tttcccgcgtcccgcggtcactcgtgctagtgatataagctggaagctcactgcgttcgctaacaatcagtacctgattcccgactccgtctcagg

SEQ ID NO: 41115 - DNA, 96 bp, Fusarium cuneirostrum
  misc_feature: 32
tttcatccacactggaatagtcccgaatcccgaggacgaaggacgcagggtgagggattgacaagagtatgttggcaacccatgaagagttacgag

SEQ ID NO: 41116 - DNA, 96 bp, Fusarium cuneirostrum
  misc_feature: 32
gtcagggcgaggtgcagaacgagtcgaccgacagggagacgatgtgatgttactttaattcaacagagatgcgctctgtgaatcccctcacgtaaa

SEQ ID NO: 41117 - DNA, 96 bp, Fusarium cuneirostrum
  misc_feature: 32
tttaccgaaagagatagatataaagataaaagatttaagaaaggttaaagagtaagtatatatacatataataatataatagcccttcttaaggac

SEQ ID NO: 41118 - DNA, 96 bp, Fusarium cuneirostrum
  misc_feature: 32
tttaatatctggtttttatttatatttatcttaatctctttttactaatatattatatccgcttcgcgatattataataagtttaattatttaaat

SEQ ID NO: 41119 - DNA, 96 bp, Fusarium cuneirostrum
  misc_feature: 32
gactttacttaaacttaaataaaatggacgaggcccacgacttttttctacttggcgagcacttaatgatacttgtgatttgtatgtgaccttaaa

SEQ ID NO: 41120 - DNA, 96 bp, Fusarium cuneirostrum
  misc_feature: 32
tttaaataatatttaatgggacgagcaccattttttatatttggcgagctgtgatttttaattatatttgtgatcgtgatgttatttgatgtgtga

SEQ ID NO: 41121 - DNA, 96 bp, Fusarium cuneirostrum
  misc_feature: 32
acagcgcccaaggctcgtcttgacaccaacaaacacggatccatcctgtctccttctgctccgcatctccatataaaaggatgtcttcccagacaa

SEQ ID NO: 41122 - DNA, 96 bp, Fusarium cuneirostrum
  misc_feature: 32
ttgtagttgctcgcctctttctttaacggaaatggggcgagttaaaatattcttaaataacgatttaatactacgagcaccatttttatttcgatg

SEQ ID NO: 41123 - DNA, 96 bp, Fusarium cuneirostrum
  misc_feature: 32
ttccttcgtcacactcactccgcacgtcgccctccgggctccgtaggattatacagttccgactcgggcctccggcggtgtaatgactattgccaa

SEQ ID NO: 41124 - DNA, 96 bp, Fusarium cuneirostrum
  misc_feature: 32
ctagctcgttatatatagtcttaagcttcataatctatatctagtaataataatatctatctattatatcgcttcgctccttctctagcttcgcaa

SEQ ID NO: 41125 - DNA, 96 bp, Fusarium cuneirostrum
  misc_feature: 32
ttgcctgatgcagcagcctgatcgaactcgtcgtaaagacttcatttcttgggttgaataaagacagcttggggagaattctgtgtctagagaaga

SEQ ID NO: 41126 - DNA, 96 bp, Fusarium cuneirostrum
  misc_feature: 32
ttgcatggcttgccagtaacaaatgcttaccagcaacccatcgtttgtttgtttgtttgtttgtttgttttattcatagactgtcccagccgccct

SEQ ID NO: 41127 - DNA, 96 bp, Fusarium cuneirostrum
  misc_feature: 32
ttcttgcgttcccttttctcgattgtcttggcgagagctctcttgtcgagggctctcttgtcgagggctctcttgtcgagggctctcttgttgtgg

SEQ ID NO: 41128 - DNA, 96 bp, Fusarium cuneirostrum
  misc_feature: 32
ttcttatttatcccctctctttcactcccttccccccctctcccccttcttattctttatctatattttattattttctttctttttacctttttt

SEQ ID NO: 41129 - DNA, 96 bp, Fusarium cuneirostrum
  misc_feature: 32
tggaattgggattatgatgtattgtgttaggaaattcctctttgagttagatcggccgtgccgaaatataacatattacgttcgaacctttaagaa

SEQ ID NO: 41130 - DNA, 96 bp, Fusarium cuneirostrum
  misc_feature: 32
ttctgttggagaagcagtaaattagagttgggaatggcttcacttttttccactcttggatatgtagatagtgacacttgtaattgacgctcgccc

SEQ ID NO: 41131 - DNA, 96 bp, Fusarium cuneirostrum
  misc_feature: 32
taagataaggtaattaagataaagtggttaagataaagtagttaagataaggtaattaagataaagtaattaagataaaggtagattataagagaa

SEQ ID NO: 41132 - DNA, 96 bp, Fusarium cuneirostrum
  misc_feature: 32
ttcgttcccgtgcttagccactctccttcgttcgtccctcactctcgtcgtctatgacccacatctgattccactccgttccatcgatgtctaaag

SEQ ID NO: 41133 - DNA, 96 bp, Fusarium cuneirostrum
  misc_feature: 32
taaagctgtggcgattgcaacgggctctctcgctgctgcgtcggagaaagtttgttcacccaaaagcgttcgtacggccggcctctatgtcacgaa

SEQ ID NO: 41134 - DNA, 96 bp, Fusarium cuneirostrum
  misc_feature: 32
ttcgtcacatgttcctcgccccagtttttaatgccgtgcaaagcccggttcaaaaaaaaaccgcttatagaccaaagttatggcactccaaaaacc

SEQ ID NO: 41135 - DNA, 96 bp, Fusarium cuneirostrum
  misc_feature: 32
ttcggtagaactatacagttcctgcttcctctccgagggtcaggttcagttgtcaagccctccgctcctccttcgctacgctcgctcgtcggctcg

SEQ ID NO: 41136 - DNA, 96 bp, Fusarium cuneirostrum
  misc_feature: 32
ttcgacagctgccaagtcaagccctgtcgacaacggagataatatctctccacaagttcgtagcgaccacaatcgctacaaatagaaaggacaaga

SEQ ID NO: 41137 - DNA, 96 bp, Fusarium cuneirostrum
  misc_feature: 32
agaacctgcttagtaagctgcttagtaagctgcttagtaagctgcttagtaagctgcttagtaagctgcttagtaagctgcttagtaagctaggaa

SEQ ID NO: 41138 - DNA, 96 bp, Fusarium cuneirostrum
  misc_feature: 32
agtgaaagtgaaagtgaaagtgaaagtgaaagtgaaagtgaaagtgaaagtgaaagtgaaagtgaaagtgaaagtgaaagtgaaagggaaagggaa

SEQ ID NO: 41139 - DNA, 96 bp, Fusarium cuneirostrum
  misc_feature: 32
ttccaggttctagcccatacattctcagaatcgaactcatacaaaatttgtacaaatttcagatcaaactgaaatgcgaccggcgcagagacagca

SEQ ID NO: 41140 - DNA, 96 bp, Fusarium cuneirostrum
  misc_feature: 32
attattaattaataatcttaataaagaattaaagttaattataaaggaagaataagaattaaataataaaataagaagattaggtctttaaaataa

SEQ ID NO: 41141 - DNA, 96 bp, Fusarium cuneirostrum
  misc_feature: 32
ttatttatattatttataaaagcctatttaatagctaaaaggggtctatttatgtaaaggactgaaggatatagactataaagtcctcgtaaggtg

SEQ ID NO: 41142 - DNA, 96 bp, Fusarium cuneirostrum
  misc_feature: 32
tatctaacttaataaataatatagagctaaataaataaatattaacgaagtaaataatattaaattaaataaaggaataaagccgaagctaaataa

SEQ ID NO: 41143 - DNA, 96 bp, Fusarium cuneirostrum
  misc_feature: 32
ttattcaagccgtaggatgacgctataactactaaacaatattaaaacagacctgccgatatatcatcttgtttttagcacgctcagtgcgacatg

SEQ ID NO: 41144 - DNA, 96 bp, Fusarium cuneirostrum
  misc_feature: 32
ttatgtacggacataatcttacttgcgagggtgcgagacaagtataagggcaggggattgcccgttgcacttggagtgcttttggcgcccggggcg

SEQ ID NO: 41145 - DNA, 96 bp, Fusarium cuneirostrum
  misc_feature: 32
cccgaacggatgagcaagccccgtaggggcgcagggaagactgagggattggcaatagtcattacaccgccggaggcccgagtcggaactgtataa

SEQ ID NO: 41146 - DNA, 96 bp, Fusarium cuneirostrum
  misc_feature: 32
ttaggcaaccgtcgcatctgcctggaggttggttgtcactgaccaatcatcccgctcggacaaagcggagtgaggtccgtcagcggttaaaccgtc

SEQ ID NO: 41147 - DNA, 96 bp, Fusarium cuneirostrum
  misc_feature: 32
tgcatctcggctcattccatttcattcatgtgcgacgaagccatcgtcgagtagaaaaaagatgatcaacaccacatactctggtgttttaagtaa

SEQ ID NO: 41148 - DNA, 96 bp, Fusarium cuneirostrum
  misc_feature: 32
cgctttgcaagagcaaacgaacccgtatatccatatcggaacgagaagtgacgagcaataggagtggagcgacgatcgattatttatttcgagtaa

SEQ ID NO: 41149 - DNA, 96 bp, Fusarium cuneirostrum
  misc_feature: 32
taatatgtgtgccctttttagtttatgtgcgctccgtctttatttaatgctcgcccataatacatgtgaagctatcgtcactacaacatcaggtaa

SEQ ID NO: 41150 - DNA, 96 bp, Fusarium cuneirostrum
  misc_feature: 32
ttacatcatgtgttttgttctatgattacctgatgttgtagtgacgatagcttcacatgtattatgggcgagcattaaataaagacggagcgcaca

SEQ ID NO: 41151 - DNA, 96 bp, Fusarium cuneirostrum
  misc_feature: 32
aggaaagtagtatttatacttacttagtgtatatacttattatatacgttataagaaaatataataaatatattctatatatttaggctttcttaa

SEQ ID NO: 41152 - DNA, 96 bp, Fusarium cuneirostrum
  misc_feature: 32
attaaatataattaagttatattaattactaaagtagctatatctatttaatataccgaataaatatatttatatattactacttctataagttaa

SEQ ID NO: 41153 - DNA, 96 bp, Fusarium cuneirostrum
  misc_feature: 32
ttaaataataccttctataattaggtaataatatagaattaaataataaggaaagtattaagggattaatattatcgattattaatatactaaagg

SEQ ID NO: 41154 - DNA, 96 bp, Fusarium cuneirostrum
  misc_feature: 32
ttaaagggccgcatggcccgatttgcgacactgtttggtgtcagacaacattcttgtttgtcttattttttggctgaacagcgtgagcttgccgtg

SEQ ID NO: 41155 - DNA, 96 bp, Fusarium cuneirostrum
  misc_feature: 32
ttaaaagggttaagagaggagagaaataaagaaaattaaagaagaaagaataattatagaagaaatagaagaaatataataaggagaaagaaaaga

SEQ ID NO: 41156 - DNA, 96 bp, Fusarium cuneirostrum
  misc_feature: 32
tgttgtagtgacgatagcttcacatgtattatgggcgagcattaaataaagacggagcgcacataaactaaaaagggcacacatattagtgagctc

SEQ ID NO: 41157 - DNA, 96 bp, Fusarium cuneirostrum
  misc_feature: 32
tgttactttaattcaacagagatgcgctctgtgaatcccctcacgtaaacatgaaatgtcactgtgtgtaagatgacccggagtgtgggtcatggt

SEQ ID NO: 41158 - DNA, 96 bp, Fusarium cuneirostrum
  misc_feature: 32
tgttaaactcaagaatccatgccatcatcgcttgaccgtgacgatttcctcctttggattagtacagtttttgaagagcgtgacgatttcctaatt

SEQ ID NO: 41159 - DNA, 96 bp, Fusarium cuneirostrum
  misc_feature: 32
acaattgacatgctgaaccagtcttccaccttatagtggtatgaggcgcattctaacgaagtccttctcaagtcggattgttattaaaaggtcaca

SEQ ID NO: 41160 - DNA, 96 bp, Fusarium cuneirostrum
  misc_feature: 32
tgtcccactcacttgagtgtcccactcgcttatcatatacgttatcttcatttatatatactaataagcttatatattcggatttctatattgcgt

SEQ ID NO: 41161 - DNA, 96 bp, Fusarium cuneirostrum
  misc_feature: 32
atatgatgtgaatgtaattgtttttataattaaacctaaacgtgagtcccggggaggaggagggacgacgacccgggattgtcaacttgagttaca

SEQ ID NO: 41162 - DNA, 96 bp, Fusarium cuneirostrum
  misc_feature: 32
tggggagcgggacgcgacccaggaccatgttcgagcgagggggagcaagagcgagcccgacttgaaatcccatttcaaaatttgtacaaaatttgt

SEQ ID NO: 41163 - DNA, 96 bp, Fusarium cuneirostrum
  misc_feature: 32
tcagcaaccgatcagtggccctagccaccgggctctaacccggcagctctgtttgtttgtttgtttgtttgtttgttttattcatagactgtccca

SEQ ID NO: 41164 - DNA, 96 bp, Fusarium cuneirostrum
  misc_feature: 32
tggcagaaggtaggatggcacgatgtgggtgccatgaagagggggagggtgacccgaccccgatgtgtgaccgagacagatgtcgaggggaaaggg

SEQ ID NO: 41165 - DNA, 96 bp, Fusarium cuneirostrum
  misc_feature: 32
tgattcccgactccgtctcaggatttgactcaccaaatctcagaaacgaacacatacaaattttgtacaaattttgaaatggattcttgctcggtc

SEQ ID NO: 41166 - DNA, 96 bp, Fusarium cuneirostrum
  misc_feature: 32
tgatgtggtccgggagtctagtgtagaggtcactacgagcgggggcgagtcggtcaaggttttgcccttgcaccctactttaatgcgactggcggg

SEQ ID NO: 41167 - DNA, 96 bp, Fusarium cuneirostrum
  misc_feature: 32
tgatcagcctgtggataggagagttcgtttccggaaggtattggaagagattgagtcggcgtagtagtagacttttcccaatgtagatatcgtgat

SEQ ID NO: 41168 - DNA, 96 bp, Fusarium cuneirostrum
  misc_feature: 32
tgagtcacggcttatagtgagtcatgagtcttaccgtaagtttaggtcgggctcgcggtatataccgtgagtcgccgttcctaattagttgtcctt

SEQ ID NO: 41169 - DNA, 96 bp, Fusarium cuneirostrum
  misc_feature: 32
aaatgcgggagctcactaatatgtgtgccctttttagtttatgtgcgctccgtctttatttaatgctcgcccataatacatgtgaagctatcgtca

SEQ ID NO: 41170 - DNA, 96 bp, Fusarium cuneirostrum
  misc_feature: 32
tctacgtaattgaagtcatcatcacttccacatcaggcaactctacaaatctcaccaagttcacattgcatctatctacactaaaaatctccaaga

SEQ ID NO: 41171 - DNA, 96 bp, Fusarium cuneirostrum
  misc_feature: 32
agagtgagtttgtattctatccggaggaggagtgaacgagtgagcgatcatctacttacattaattgctggacagcatcttctcgggaagagaaga

SEQ ID NO: 41172 - DNA, 96 bp, Fusarium cuneirostrum
  misc_feature: 32
agaaggtaagccgacacctccaagatagacgatatggtggcgattgctgaccttagtgtgtttactgatgtagtttgtaagtgaacgcctctaaga

SEQ ID NO: 41173 - DNA, 96 bp, Fusarium cuneirostrum
  misc_feature: 32
taataagaaaagaagaataaatagtttatggaaataagaaaaataaataagaataggaattatagtaaaagattaaggataatagtgaatttaaga

SEQ ID NO: 41174 - DNA, 96 bp, Fusarium cuneirostrum
  misc_feature: 32
tctgttggagccttttatttagtgttcgctccactactctctcggttgtgctcacatatcactgtctatactaactacaataccacttgaggtcat

SEQ ID NO: 41175 - DNA, 96 bp, Fusarium cuneirostrum
  misc_feature: 32
tctgtctgagctcagagagcgagtcgatcttggattcctatgcaagtcgtctttcaattgcgctggcgcgcgactaggaacagagtgacggtattt

SEQ ID NO: 41176 - DNA, 96 bp, Fusarium cuneirostrum
  misc_feature: 32
tctcctcatctgcatatgaagaatgataagctcccgcaggggaggcaggaactgtagtcctctaccgaccggagggaggtgcggagcgtagtcgag

SEQ ID NO: 41177 - DNA, 96 bp, Fusarium cuneirostrum
  misc_feature: 32
aaatgaaatgtggaatgaaatggaacggagagaaagtgggtgcgtgggcacacacaaacccgaccggagccgtaggggcgaagggaggacgggaga

SEQ ID NO: 41178 - DNA, 96 bp, Fusarium cuneirostrum
  misc_feature: 32
tctatactaactacaataccacttgaggtcatcaccattacctattccggtaagtctcacaaagcatcgttggagttactcctccacacttgaccc

SEQ ID NO: 41179 - DNA, 96 bp, Fusarium cuneirostrum
  misc_feature: 32
tctaataagttattaatattatatatatattaaccttaattatcttataattataggattataaggcatttataataatatcttaagctcttaagt

SEQ ID NO: 41180 - DNA, 96 bp, Fusarium cuneirostrum
  misc_feature: 32
actacttgtgagcccttgacataacataagcagggcgaggcaaataataatttaaataaactcgtttgacgagccctggttattctttttattaga

SEQ ID NO: 41181 - DNA, 96 bp, Fusarium cuneirostrum
  misc_feature: 32
aaaatcggggaacgagcgtcctaactttggtctataagaggtttttttccaagcggattatccgcggttaaaactggggtgagtcacaagtgacga

SEQ ID NO: 41182 - DNA, 96 bp, Fusarium cuneirostrum
  misc_feature: 32
tcgcctgcacgctacgcgctcggctcgtggactcttttgaggttatcaccatctactttatatatgctcgcgtaacacaagtgcgggagctcaccc

SEQ ID NO: 41183 - DNA, 96 bp, Fusarium cuneirostrum
  misc_feature: 32
tcgatcttggattcctatgcaagtcgtctttcaattgcgctggcgcgcgactaggaacagagtgacggtatttcaatcggagatttagtgagacgg

SEQ ID NO: 41184 - DNA, 96 bp, Fusarium cuneirostrum
  misc_feature: 32
tcgatcattccagtcgctccgctcctgtttgctattagcattgcgttcatccttcacttcatcttccagatatgtatagacactcacctgttcgtg

SEQ ID NO: 41185 - DNA, 96 bp, Fusarium cuneirostrum
  misc_feature: 32
tcctccatgatcctacactcttcgccttcgtgcctcaggctccctatttactgggaaggcaatggtgctgcgcacctaaagcctgactcagtccac

SEQ ID NO: 41186 - DNA, 96 bp, Fusarium cuneirostrum
  misc_feature: 32
gacggaacgttatgaggaggaacgacgaataaggtgcagcgtagcgatccgggcataagtggatactgacgagggggcgaggaagtataagacgga

SEQ ID NO: 41187 - DNA, 96 bp, Fusarium cuneirostrum
  misc_feature: 32
tccgggtctcattcggtagtgatataagcgtagcttggtgtctccgccaccaagaaaaagtgacttcgttaacagaagtgaccgatttctcggccc

SEQ ID NO: 41188 - DNA, 96 bp, Fusarium cuneirostrum
  misc_feature: 32
ataatattttgaatgcgagcaatgatatgatactgtgatttatttgtgaataacttcaattgagtccggcggaggaggagggacgacggagccgga

SEQ ID NO: 41189 - DNA, 96 bp, Fusarium cuneirostrum
  misc_feature: 32
tccgaccttctctcactccgttcgttctcggtcttacatactggattccgctcgtccctcactctcatccaataataacgtcgctgacgctctcta

SEQ ID NO: 41190 - DNA, 96 bp, Fusarium cuneirostrum
  misc_feature: 32
tccctcctccatgatcctacactcttcgccttcgtgcctcaggctccctatttactgggaaggcaatggtgctgcgcacctaaagcctgactcagt

SEQ ID NO: 41191 - DNA, 96 bp, Fusarium cuneirostrum
  misc_feature: 32
aatgtgaacttggtgagatttgtagagttgcctgatgtggaagtgatgatgacttcaattacgtagattttagagcgagtactaagtaggtaggga

SEQ ID NO: 41192 - DNA, 96 bp, Fusarium cuneirostrum
  misc_feature: 32
acgacgcaatgatcggttgactaaggacgggaacgaatggaatgagtggaggccggtggggacccatgtaagacgagcggagcgagcgaatgggga

SEQ ID NO: 41193 - DNA, 96 bp, Fusarium cuneirostrum
  misc_feature: 32
atatcggaggtgaagccgagggctgtagaagaggtgaagacactcgtcgagggtgtggacgagtttggtgatgaatgggtcgatgacgatcttgga

SEQ ID NO: 41194 - DNA, 96 bp, Fusarium cuneirostrum
  misc_feature: 32
tccaacaaaaccgacctccactcagtcccttcgttcccggtcttacttactccacttcatactcgtccctcgtctgagtggctatgcctgatgact

SEQ ID NO: 41195 - DNA, 96 bp, Fusarium cuneirostrum
  misc_feature: 32
tcaggactcatttatggatgaagccattcccatgtcttcttactacgactacgttcatatcacatttcatttaaggtcacatacaaatcacaagta

SEQ ID NO: 41196 - DNA, 96 bp, Fusarium cuneirostrum
  misc_feature: 32
tcactccatctcttttcatgatctagtgaagttattcgcacttcacctcttcacattatctagcaccacttcgacctcgttcctcggtctcgtact

SEQ ID NO: 41197 - DNA, 96 bp, Fusarium cuneirostrum
  misc_feature: 32
ggaggcaggaactgtagtcctctaccgaccggagggaggtgcggagcgtagtcgagcagggcgagacgatgcgaggttactataacccatgagtga

SEQ ID NO: 41198 - DNA, 96 bp, Fusarium cuneirostrum
  misc_feature: 32
tcacgacatccaaatcaagtaatcatcacacagcccgtgttgtcacacccatgaccaacaatagcctccgccttcttactgcaaggctaccttgcg

SEQ ID NO: 41199 - DNA, 96 bp, Fusarium cuneirostrum
  misc_feature: 32
agtagagacgacgacagacattgtgtatggtatccgggaacagggaggttcacggcataaaagttgaaaagtgttattttgcatagcgaaaggtga

SEQ ID NO: 41200 - DNA, 96 bp, Fusarium cuneirostrum
  misc_feature: 32
tcaattgcgctggcgcgcgactaggaacagagtgacggtatttcaatcggagatttagtgagacgggcgaacgtggtttattcttttgtatcacgg

SEQ ID NO: 41201 - DNA, 96 bp, Fusarium cuneirostrum
  misc_feature: 32
tcaatctcgcgatttcgcccgccattctcagtttcgttcacatacaaaaagtatgtcgatttgagtccaatttgaatccgattttgcttgttcctc

SEQ ID NO: 41202 - DNA, 96 bp, Fusarium cuneirostrum
  misc_feature: 32
tcaatccccaaatcctcttatatcaccaaagttataacccgctcgaaaaaccaggtaccctggttcctcgcggtagtgtaagagattaatgctcac

SEQ ID NO: 41203 - DNA, 96 bp, Fusarium cuneirostrum
  misc_feature: 32
gttcagacaacctccgcttcagcagatccgcgtccaagaagcagatcgtcacagcgcacacgctggaccgtagacagcgcccaaggctcgtcttga

SEQ ID NO: 41204 - DNA, 96 bp, Fusarium cuneirostrum
  misc_feature: 32
tcaaacgagtctatttaaaacgtatttatttgcctcgccccatattaaacagtggcgagcaaagtatgtggagtcggcagaagtgaagtcatcacc

SEQ ID NO: 41205 - DNA, 96 bp, Fusarium cuneirostrum
  misc_feature: 32
tcaaaagagtccacgagccgagcgcgtagcgtgcaggcgaggggattgtcaatgtaatttattcagggaataattacccttccaagcaggaactgt

SEQ ID NO: 41206 - DNA, 96 bp, Fusarium cuneirostrum
  misc_feature: 32
tattccgcttttctaatttttctctcttatgctcagatgtgagaggcatctcgtgtagggtatctttgtgtgatgtgcattctcggattttattat

SEQ ID NO: 41207 - DNA, 96 bp, Fusarium cuneirostrum
  misc_feature: 32
ggaataaagagaatataagatttaggcttaataaattaaaggttaggtaaattatatttaataataaatataaaagcgaggataaaggtaataata

SEQ ID NO: 41208 - DNA, 96 bp, Fusarium cuneirostrum
  misc_feature: 32
tatatttattattagctacttaatattaaattatttaattataagcttagcgagtattaaatagtaattaaatacgcgaggagggagctaaggtat

SEQ ID NO: 41209 - DNA, 96 bp, Fusarium cuneirostrum
  misc_feature: 32
tataattaagactaaataaaattctaaaaagtctttactttctttattaacttaatctttataatttaataagttattaataaaaaggagaaagat

SEQ ID NO: 41210 - DNA, 96 bp, Fusarium cuneirostrum
  misc_feature: 32
tagtgtatccgaataatcacgcctcggtcacccagtcatcgtcttaggacgagcgcagttttaaggcgcagcatctgccaataataaaacttagcg

SEQ ID NO: 41211 - DNA, 96 bp, Fusarium cuneirostrum
  misc_feature: 32
taggttatggatgaggctcgctcagtagccagtcacgcattgaagctattcccaactcccgttcgggaaatctcacttccacagaaaagtctccta

SEQ ID NO: 41212 - DNA, 96 bp, Fusarium cuneirostrum
  misc_feature: 32
gcttatcgtaatttaataaagctatagctaaatatagctaaaataaaaatagatagaagattttaatatatcttactatcttccttataaggccta

SEQ ID NO: 41213 - DNA, 96 bp, Fusarium cuneirostrum
  misc_feature: 32
aaatagaaaaagacagcgacgtccgtcgtatacaatgacctccggtcaaataaaaaagtaaaggtcgttggatccccaactccagaaagcgtccta

SEQ ID NO: 41214 - DNA, 96 bp, Fusarium cuneirostrum
  misc_feature: 32
tagaaactaatagcccttaattaaagctcttacttaagtaggtaatagcgagaagaaagctatctttaattattaagttaagatttaaacctaaat

SEQ ID NO: 41215 - DNA, 96 bp, Fusarium cuneirostrum
  misc_feature: 32
aagccttcttctattatcttaataattctatttaaggtagctctttttcctttattattctattttattcctaactttatttttcttacttaagta

SEQ ID NO: 41216 - DNA, 96 bp, Fusarium cuneirostrum
  misc_feature: 32
gtcccactcacttgagtgtcccactcgcttatcatatacgttatcttcatttatatatactaataagcttatatattcggatttctatattgcgta

SEQ ID NO: 41217 - DNA, 96 bp, Fusarium cuneirostrum
  misc_feature: 32
cgtgccatcctaccttctgccacactctactgagtcgtgaagccgtcgtgcactcctacatgaaatggtaacacacatatccatggtgttctcgta

SEQ ID NO: 41218 - DNA, 96 bp, Fusarium cuneirostrum
  misc_feature: 32
gcagaaggtaggatggcacgatgtgggtgccatgaagagggggagggtgacccgaccccgatgtgtgaccgagacagatgtcgaggggaaagggta

SEQ ID NO: 41219 - DNA, 96 bp, Fusarium cuneirostrum
  misc_feature: 32
catattactgcgtcgcttatctgacgcatatcttttctacggtaagctatcttcggaaggaagaagtagtgaaggagatgtacgatcgacttggta

SEQ ID NO: 41220 - DNA, 96 bp, Fusarium cuneirostrum
  misc_feature: 32
caaaagtatatttagtgtttgcctcgccccattgactagcaaaaaggctcgctaaaaaacgaaggtatcgcaacatccaaaacaggaaacaatgta

SEQ ID NO: 41221 - DNA, 96 bp, Fusarium cuneirostrum
  misc_feature: 32
agataataatacttaaataaacttgacgagcaccactcgactttaaatatggcgagcacttacttaatgtgacttttgtaattatttgtgactgta

SEQ ID NO: 41222 - DNA, 96 bp, Fusarium cuneirostrum
  misc_feature: 32
tacaggagatagggcgagacaataacatttaaatacacttctttaaacttgtcgagcaccatttccctccctaatggcgagccatcgtgactgatt

SEQ ID NO: 41223 - DNA, 96 bp, Fusarium cuneirostrum
  misc_feature: 32
taattattattaacctaactggaaccttaaattactagggatatactctaggtaattccgctattaaatagttttcgcttaataaaataatattcc

SEQ ID NO: 41224 - DNA, 96 bp, Fusarium cuneirostrum
  misc_feature: 32
agccttttatttagtgttcgctccactactctctcggttgtgctcacatatcactgtctatactaactacaataccacttgaggtcatcaccatta

SEQ ID NO: 41225 - DNA, 96 bp, Fusarium cuneirostrum
  misc_feature: 32
acgctacgcgctcgggctcaggactatcttgggtacatgatcacgactacgattcaaaataataataatgtcacatatgcacagctcgctcgatta

SEQ ID NO: 41226 - DNA, 96 bp, Fusarium cuneirostrum
  misc_feature: 32
taagggcaagcttatcgtaatttaataaagctatagctaaatatagctaaaataaaaatagatagaagattttaatatatcttactatcttcctta

SEQ ID NO: 41227 - DNA, 96 bp, Fusarium cuneirostrum
  misc_feature: 32
cgtttcccgcagatggctcatttgccacggtaccgcgttcttgacacgttccgatcaacaattaaccatccaaaatccaagtctatttgtgagtta

SEQ ID NO: 41228 - DNA, 96 bp, Fusarium cuneirostrum
  misc_feature: 32
taaattaaatatgccttagttaaggtatatttataataattagtagggttattttcggctaattagaaatctaagttagaaaactaaaagaattta

SEQ ID NO: 41229 - DNA, 96 bp, Fusarium cuneirostrum
  misc_feature: 32
taaatattacaagatcttactaagtatatttaaaacatagtaaatagtttttattaatttcgtgcctctaggcataacgtatgtgataagtgagtt

SEQ ID NO: 41230 - DNA, 96 bp, Fusarium cuneirostrum
  misc_feature: 32
taaagtgacatccccagttttaaccaacgcggtgcgttttggaaaaaaacctcttatagaccaaagttaggagcaccagaatcgacgctgtcgcgt

SEQ ID NO: 41231 - DNA, 96 bp, Fusarium cuneirostrum
  misc_feature: 32
taaagggacagaggtcccgcttcgcgacactgtttcggtgtcagacaacattattgtttgttttcttctcgcgttgttcgaagtcggatgagtgag

SEQ ID NO: 41232 - DNA, 96 bp, Fusarium cuneirostrum
  misc_feature: 32
taaaccgctataaaccgctgcgaactactataaaccgctataaaccgctatgaaccgctataaaccactataaaccactataaaccactataaacc

SEQ ID NO: 41233 - DNA, 96 bp, Fusarium cuneirostrum
  misc_feature: 32
gttttaaccgcggataatccgcttggaaaaaaacctcttatagaccaaagttaggacgctcgttccccgattttcgggtcactctcgttagtctat

SEQ ID NO: 41234 - DNA, 96 bp, Fusarium cuneirostrum
  misc_feature: 32
gttggggagcgggacgcgacccaggaccatgttcgagcgagggggagcaagagcgagcccgacttgaaatcccatttcaaaatttgtacaaaattt

SEQ ID NO: 41235 - DNA, 96 bp, Fusarium cuneirostrum
  misc_feature: 32
gttctcttttaccactacaataacagttcactcttctcgttcacaaatgcacaatcaattcaaatcacaagtcatacatcaaagtcatgtctgctc

SEQ ID NO: 41236 - DNA, 96 bp, Fusarium cuneirostrum
  misc_feature: 32
gttcccggataccatacacaatgtctgtcgtcgtctctactcctcccatatttcaatgaaaattaaattggcgatctcccctttcctatgacacct

SEQ ID NO: 41237 - DNA, 96 bp, Fusarium cuneirostrum
  misc_feature: 32
gttagtcgctgaccaatatttaaccccctgcttcgggactttagtcatctgcgtttcccgcagatggctcatttgccacggtaccgcgttcttgac

SEQ ID NO: 41238 - DNA, 96 bp, Fusarium cuneirostrum
  misc_feature: 32
gcatctcggctcattccatttcattcatgtgcgacgaagccatcgtcgagtagaaaaaagatgatcaacaccacatactctggtgttttaagtaac

SEQ ID NO: 41239 - DNA, 96 bp, Fusarium cuneirostrum
  misc_feature: 32
gtgttttaagattgcggaggcgtgtggacggagcggtaatccaccagcataccgcgaggttgcctaattcggagatgacgatggcttctttttctt

SEQ ID NO: 41240 - DNA, 96 bp, Fusarium cuneirostrum
  misc_feature: 32
gggaaaccagtgctctctccggtcgcatcttcatgtcttccgacaagactaaaacaaaaccaaaaggagacaactcacctccgttcgtgtcaacac

SEQ ID NO: 41241 - DNA, 96 bp, Fusarium cuneirostrum
  misc_feature: 32
gtgtggactgagtcaggctttaggtgcgcagcaccattgccttcccagtaaatagggagcctgaggcacgaaggcgaagagtgtaggatcatggag

SEQ ID NO: 41242 - DNA, 96 bp, Fusarium cuneirostrum
  misc_feature: 32
agccatcgtgactgattgtaattgtaattgtaattgtagtgttagatggaattgtgacgtagaatgtgaatggaacaggagtggtgagagttacac

SEQ ID NO: 41243 - DNA, 96 bp, Fusarium cuneirostrum
  misc_feature: 32
acaatgtagactaatctaagatacaaaacctccgaaaacgcccagcgtatttcagtccgaaaatagttccgcccccttggctccatcgagttacac

SEQ ID NO: 41244 - DNA, 96 bp, Fusarium cuneirostrum
  misc_feature: 32
catttcgtcggtgacgtttggtttacggcaaattgaaattgcaacagtaaatctcaagattgtggattcatacatataaatcctctcatcgcccac

SEQ ID NO: 41245 - DNA, 96 bp, Fusarium cuneirostrum
  misc_feature: 32
gtcaaacgagtctatttaaaacgtatttatttgcctcgccccatattaaacagtggcgagcaaagtatgtggagtcggcagaagtgaagtcatcac

SEQ ID NO: 41246 - DNA, 96 bp, Fusarium cuneirostrum
  misc_feature: 32
ccacctggaaggtcatctgaacttggttcagtttgttgattgaggcagcgccgagacttgacgattaggcaagaatgatagagcgaaagcgatcac

SEQ ID NO: 41247 - DNA, 96 bp, Fusarium cuneirostrum
  misc_feature: 32
gtgagtcttctgtctttgtacactgagactgctgctgtatacgcagctgggttacctgaacgtgcgtaagtcagtgagaaggatgtcggacgacat

SEQ ID NO: 41248 - DNA, 96 bp, Fusarium cuneirostrum
  misc_feature: 32
agacagcgcccaaggctcgtcttgacaccaacaaacacggatccatcctgtctccttctgctccgcatctccatataaaaggatgtcttcccagac

SEQ ID NO: 41249 - DNA, 96 bp, Fusarium cuneirostrum
  misc_feature: 32
ctttgctcgccactgtttaatatggggcgaggcaaataaatacgttttaaatagactcgtttgacgagccccaattactattttatgcgagcagac

SEQ ID NO: 41250 - DNA, 96 bp, Fusarium cuneirostrum
  misc_feature: 32
aatgaaatgtggaatgaaatggaacggagagaaagtgggtgcgtgggcacacacaaacccgaccggagccgtaggggcgaagggaggacgggagac

SEQ ID NO: 41251 - DNA, 96 bp, Fusarium cuneirostrum
  misc_feature: 32
ggctaaagccgctcccggcagggaaagcagacactgcgtaataaatgccgacgaacggagtgaggaggtgcggagagaagatggaagcgtagcgac

SEQ ID NO: 41252 - DNA, 96 bp, Fusarium cuneirostrum
  misc_feature: 32
gtataagacggaacgtctgcccctgcgaggacgcagtcgaagacttgagactgtatttatttttttgtgtgagacggagtcgagtctgatttcgac

SEQ ID NO: 41253 - DNA, 96 bp, Fusarium cuneirostrum
  misc_feature: 32
gtccaacaaaaccgacctccactcagtcccttcgttcccggtcttacttactccacttcatactcgtccctcgtctgagtggctatgcctgatgac

SEQ ID NO: 41254 - DNA, 96 bp, Fusarium cuneirostrum
  misc_feature: 32
cgaaaatcggggaacgagcgtcctaactttggtctataagaggtttttttccaagcggattatccgcggttaaaactggggtgagtcacaagtgac

SEQ ID NO: 41255 - DNA, 96 bp, Fusarium cuneirostrum
  misc_feature: 32
ctgccttcgcagtccatgcacctccacttgaggtcatcatgcactctcatgaagataactgaaccacatcttgtggtgttttagtaacgtcgctac

SEQ ID NO: 41256 - DNA, 96 bp, Fusarium cuneirostrum
  misc_feature: 32
cagaaggtaggatggcacgatgtgggtgccatgaagagggggagggtgacccgaccccgatgtgtgaccgagacagatgtcgaggggaaagggtac

SEQ ID NO: 41257 - DNA, 96 bp, Fusarium cuneirostrum
  misc_feature: 32
gacaccatcgtagcttgagtcctgagccgggaggagcgcatgcgacggtgcggtgaaggattgactagtagagttaatcttgacggagtcatttac

SEQ ID NO: 41258 - DNA, 96 bp, Fusarium cuneirostrum
  misc_feature: 32
ggttgcccaactctgttgtcaatccggtcccctgcgtcctacgtcctcgggtcccagactcatttatgcgggaaggcattcacattccataatcat

SEQ ID NO: 41259 - DNA, 96 bp, Fusarium cuneirostrum
  misc_feature: 32
ggtgtcccactcacttgagtgtcccactcgcttatcatatacgttatcttcatttatatatactaataagcttatatattcggatttctatattgc

SEQ ID NO: 41260 - DNA, 96 bp, Fusarium cuneirostrum
  misc_feature: 32
ggtcgatgacgatcttggagatttttagtgtagatagatgcaatgtgaacttggtgagatttgtagagttgcctgatgtggaagtgatgatgactt

SEQ ID NO: 41261 - DNA, 96 bp, Fusarium cuneirostrum
  misc_feature: 32
ggtattagctttttaattattaattcttaggctttatagtttcttccataagaattatcaatcgttaatcttaaccgcccttttaatatagtcgat

SEQ ID NO: 41262 - DNA, 96 bp, Fusarium cuneirostrum
  misc_feature: 32
attaattatatcggaaaggtaattaagattaataattaataattctcgtaaaagaaattataaaacctaagaattagtaattataaggttaatacc

SEQ ID NO: 41263 - DNA, 96 bp, Fusarium cuneirostrum
  misc_feature: 32
ggtacgaacgttccgtccacaatctcataccccgcagacagagtcgaggagtataagacagcgtcttttcccccgagagggcagagggaagagttt

SEQ ID NO: 41264 - DNA, 96 bp, Fusarium cuneirostrum
  misc_feature: 32
ggattcattacggcgagctgttggttccagataagtgctcgcataaagataaatgaagctatcacaactactaagaaaggcaactaaatcacaccc

SEQ ID NO: 41265 - DNA, 96 bp, Fusarium cuneirostrum
  misc_feature: 32
ggggcttgctcatccgttcgggactcaagtggtgtaactctcaccactcctgttccattcacattctacgtcacaattccatctaacactacaatt

SEQ ID NO: 41266 - DNA, 96 bp, Fusarium cuneirostrum
  misc_feature: 32
gggacaggaggcccagagggccgacaagaatccatttcaaaatttgtacaaattttgtatgggaagatttctgagattgtatgggcaacgacctgg

SEQ ID NO: 41267 - DNA, 96 bp, Fusarium cuneirostrum
  misc_feature: 32
ggctctctcaaccaatgctgacgaaaagcgcgctgcgagagcttgatcgttggaacaccgaaggcagagaatttctcgaagagatattcgaagatg

SEQ ID NO: 41268 - DNA, 96 bp, Fusarium cuneirostrum
  misc_feature: 32
cttaagtctttctaagataataaaacctatataggtaatacttattagattacctacttccttattgtaagagactgagctcttatctaagccgcc

SEQ ID NO: 41269 - DNA, 96 bp, Fusarium cuneirostrum
  misc_feature: 32
ggcgatgagaggatttatatgtatgaatccacaatcttgagatttactgttgcaatttcaatttgccgtaaaccaaacgtcaccgacgaaatgtat

SEQ ID NO: 41270 - DNA, 96 bp, Fusarium cuneirostrum
  misc_feature: 32
ccgctcgtcttacatgggtccccaccggcctccactcattccattcgttcccgtccttagtcaaccgatcattgcgtcgtccctcctccatgatcc

SEQ ID NO: 41271 - DNA, 96 bp, Fusarium cuneirostrum
  misc_feature: 32
ggacgaaggacgcagggtgagggattgacaagagtatgttggcaacccatgaagagttacgagcgcccgcggagggccgagtctatgactatatcc

SEQ ID NO: 41272 - DNA, 96 bp, Fusarium cuneirostrum
  misc_feature: 32
ctccttcgctcttacttacatccgacaacaaagattgtctctggcgctctgcgcccatgtgcatctccgatgctctcctgtcctcctccgtcgtcc

SEQ ID NO: 41273 - DNA, 96 bp, Fusarium cuneirostrum
  misc_feature: 32
ggaaagtagtatttatacttacttagtgtatatacttattatatacgttataagaaaatataataaatatattctatatatttaggctttcttaag

SEQ ID NO: 41274 - DNA, 96 bp, Fusarium cuneirostrum
  misc_feature: 32
ggaaagggtacatggcgagagcagcgctcgaggtggatttgacggagtctcaaaactggaacagtttttgtatggactcgattctggcatttggtg

SEQ ID NO: 41275 - DNA, 96 bp, Fusarium cuneirostrum
  misc_feature: 32
ggaaaagtgcgtcgcatacttggatgcgtcgcatgcttatcatgtacgttactcaaaagtcggtccattttacataatgtcccctggggcaaagcg

SEQ ID NO: 41276 - DNA, 96 bp, Fusarium cuneirostrum
  misc_feature: 32
gctttctcaattgtcaggatgtagccttaaatgtctctgctctacgacgaacttgtctcaccgcataaagctgtctggaacaagaatgcctccatt

SEQ ID NO: 41277 - DNA, 96 bp, Fusarium cuneirostrum
  misc_feature: 32
cgaacgagttttgatacttgtgaccgtctgctgccgtacacgacaagccaagcaagatgcagttagaacaagcgccaccgccttgtgggacgaagc

SEQ ID NO: 41278 - DNA, 96 bp, Fusarium cuneirostrum
  misc_feature: 32
gatcatgtacccaagatagtcctgagcccgagcgcgtagcgtgcagggtgaaggattgacagtagtctcctcatctgcatatgaagaatgataagc

SEQ ID NO: 41279 - DNA, 96 bp, Fusarium cuneirostrum
  misc_feature: 32
gctcctccttcgctacgctcgctcgtcggctcgggcctcaagtggtgattaagtcgttcattcacaaagtgctcgccaatttaaaaggcgtagtgg

SEQ ID NO: 41280 - DNA, 96 bp, Fusarium cuneirostrum
  misc_feature: 32
gagttgggttcgagtgaagaacccataccccaagcagaactatgttctgaataccgaccgaacggagtgagggaaggtgcggaatggagtgggagc

SEQ ID NO: 41281 - DNA, 96 bp, Fusarium cuneirostrum
  misc_feature: 32
gctagaaacttaattaatatcattagaaaataggtcaatatatttataagctatattaattaatattaaaatacgcgattagcctatacctaactt

SEQ ID NO: 41282 - DNA, 96 bp, Fusarium cuneirostrum
  misc_feature: 32
cattcaaaggatcacaaccacatcccgtggtgttgaggttatactaacctcgcaacgactcacgtccgttcgtctctgctccgcacgtcgctccgc

SEQ ID NO: 41283 - DNA, 96 bp, Fusarium cuneirostrum
  misc_feature: 32
gcgaagcgaggtgcaataactttggtgatataagcggtttttttacaaacgctctgcgttgggctgaaaaagacggggacaagcagcttgtctgcg

SEQ ID NO: 41284 - DNA, 96 bp, Fusarium cuneirostrum
  misc_feature: 32
gcgaaatgggagctcctaactttggtcaataagaggtttttttttccgagtagcttgctacggttaaaaaactgggggcgaacaacttgttgtgag

SEQ ID NO: 41285 - DNA, 96 bp, Fusarium cuneirostrum
  misc_feature: 32
acaacatcaggtaatcatagaacaaaacacatgatgtaacatcaccataatcatatcaaattttgctacaacacaatttccaccatcacctttcgc

SEQ ID NO: 41286 - DNA, 96 bp, Fusarium cuneirostrum
  misc_feature: 32
acgggggtccccttcccttccccctgtcttttgagcccaaaacgagttttgtcaaaaaaaccgcttatagaccaaagttatcagccctcgtttcgc

SEQ ID NO: 41287 - DNA, 96 bp, Fusarium cuneirostrum
  misc_feature: 32
gcctacaagaagggtgtcgcaagacagaggatttctggaaatccgacaatttttttccttctttacattcgggttgaactgtgttcatcgctttgc

SEQ ID NO: 41288 - DNA, 96 bp, Fusarium cuneirostrum
  misc_feature: 32
ctcgggaaaatacttttgaagttattcacattcacatctacgattacaatttaatcaatcactcgcacactaagtcacagtcgctcgcctttaggc

SEQ ID NO: 41289 - DNA, 96 bp, Fusarium cuneirostrum
  misc_feature: 32
aggtcaatcagagcactgaccatgattaatgagcgaagcgcatccacttcgccctctctgcgacacttctctacgagatacacaaaactcagcggc

SEQ ID NO: 41290 - DNA, 96 bp, Fusarium cuneirostrum
  misc_feature: 32
agtaacggagtaactgtacatcgcaagactcaaaatctaccggattttgggacttttcagaaactggcacagttttaatatgggttgcgatctggc

SEQ ID NO: 41291 - DNA, 96 bp, Fusarium cuneirostrum
  misc_feature: 32
gcattctggtcttattatacctttaaacccttatttattaccccttaattattattaacctaactggaaccttaaattactagggatatactctag

SEQ ID NO: 41292 - DNA, 96 bp, Fusarium cuneirostrum
  misc_feature: 32
gacagcgtcttttcccccgagagggcagagggaagagtttccctcctacatcatctgtctgagctcagagagcgagtcgatcttggattcctatgc

SEQ ID NO: 41293 - DNA, 96 bp, Fusarium cuneirostrum
  misc_feature: 32
aggaggaacgacgaataaggtgcagcgtagcgatccgggcataagtggatactgacgagggggcgaggaagtataagacggaacgtctgcccctgc

SEQ ID NO: 41294 - DNA, 96 bp, Fusarium cuneirostrum
  misc_feature: 32
caatccgttcgagcgagcgcgtaatgaaacgcgtcagaaaaaaggttgacgccccgggcgccaaaagcactccaagtgcaacgggcaatcccctgc

SEQ ID NO: 41295 - DNA, 96 bp, Fusarium cuneirostrum
  misc_feature: 32
caagtcttcgactgcgtcctcgcaggggcagacgttccgtcttatacttcctcgccccctcgtcagtatccacttatgcccggatcgctacgctgc

SEQ ID NO: 41296 - DNA, 96 bp, Fusarium cuneirostrum
  misc_feature: 32
aaatacttttgaagttattcacatcagattaaaacatgctcgctatatataaatgcgggagctcactaatatgtgtgccctttttagtttatgtgc

SEQ ID NO: 41297 - DNA, 96 bp, Fusarium cuneirostrum
  misc_feature: 32
gagagggcagagggaagagtttccctcctacatcatctgtctgagctcagagagcgagtcgatcttggattcctatgcaagtcgtctttcaattgc

SEQ ID NO: 41298 - DNA, 96 bp, Fusarium cuneirostrum
  misc_feature: 32
aaataaaaaagtaaaggtcgttggatccccaactccagaaagcgtcctacgacagctcaatatataaccctacgggtaatcgagtcgctcacaatc

SEQ ID NO: 41299 - DNA, 96 bp, Fusarium cuneirostrum
  misc_feature: 32
aactctttactcgagtttattagatagtccatccctcgggctgcgtcctacgtcctcgccctccggactcgtttaaagatgaggttattcacaatc

SEQ ID NO: 41300 - DNA, 96 bp, Fusarium cuneirostrum
  misc_feature: 32
gattgtctctggcgctctgcgcccatgtgcatctccgatgctctcctgtcctcctccgtcgtccttcctcgcactcgaaccatctcgttcatcact

SEQ ID NO: 41301 - DNA, 96 bp, Fusarium cuneirostrum
  misc_feature: 32
gattcccacctcaatctcgcgatttcgcccgccattctcagtttcgttcacatacaaaaagtatgtcgatttgagtccaatttgaatccgattttg

SEQ ID NO: 41302 - DNA, 96 bp, Fusarium cuneirostrum
  misc_feature: 32
ctaccttataatatagctagcatatttcctaacttatattccactacttaagttaccgtatttagctacttcttctatttagcgctatagctaatc

SEQ ID NO: 41303 - DNA, 96 bp, Fusarium cuneirostrum
  misc_feature: 32
cccttcggtcggttttattacgcagtgtctgcttcccctccgggggttatctacgattgccaatccctcagtcttccttcgctacgctcactcatc

SEQ ID NO: 41304 - DNA, 96 bp, Fusarium cuneirostrum
  misc_feature: 32
acggctccggtcgggtttgtgtgtgcccacgcacccactttctctccgttccatttcattccacatttcatttcatgcctacacattcaaaggatc

SEQ ID NO: 41305 - DNA, 96 bp, Fusarium cuneirostrum
  misc_feature: 32
ccatcatcccacacgtccactccttgcaccactgtgcatcgttcccttattacgcctccacttcggtcctacgttccctccgtgtcgttattgatc

SEQ ID NO: 41306 - DNA, 96 bp, Fusarium cuneirostrum
  misc_feature: 32
gatatgctattcttgagagcatattactgcgtcgcttatctgacgcatatcttttctacggtaagctatcttcggaaggaagaagtagtgaaggag

SEQ ID NO: 41307 - DNA, 96 bp, Fusarium cuneirostrum
  misc_feature: 32
atagacctagccggcctaggttcagataatcagatagttaatattaatgatggccagcagatagtcacctctagctctagctctggttcagatatc

SEQ ID NO: 41308 - DNA, 96 bp, Fusarium cuneirostrum
  misc_feature: 32
aatggattaagcttaaagatagaaatatttaatctactctagtaaggcgccctaggattataatccaggccacggcatagccttgacatctatatc

SEQ ID NO: 41309 - DNA, 96 bp, Fusarium cuneirostrum
  misc_feature: 32
gatactgtgcactgtgaatgtaaatgtaaatgtaaatgtcttcttttattgttttcactgagtccggcggaggaggagggacgacggagccggatt

SEQ ID NO: 41310 - DNA, 96 bp, Fusarium cuneirostrum
  misc_feature: 32
cgcttattctaactaatacttctcttaagtaagataattagctatcgactaataattaatataaataaacccctattatatctaaaaaataaactc

SEQ ID NO: 41311 - DNA, 96 bp, Fusarium cuneirostrum
  misc_feature: 32
cggatcgctacgctgcaccttattcgtcgttcctcctcataacgttccgtccacccgcacttcagtcggtcccctccttctcgtgcttacttactc

SEQ ID NO: 41312 - DNA, 96 bp, Fusarium cuneirostrum
  misc_feature: 32
gagacttttctgtggaagtgagatttcccgaacgggagttgggaatagcttcaatgcgtgactggctactgagcgagcctcatccataacctacag

SEQ ID NO: 41313 - DNA, 96 bp, Fusarium cuneirostrum
  misc_feature: 32
gacttttcccaatgtagatatcgtgataacctcattttgtgtaacctgtgacataacttgattgattgagcgagccaccactttactggggcgagt

SEQ ID NO: 41314 - DNA, 96 bp, Fusarium cuneirostrum
  misc_feature: 32
gacttgttttatttttttcgaggacggaggacgagtttaccgcaacaacgtgaggagacgaacagagtgagtttgtattctatccggaggaggagt

SEQ ID NO: 41315 - DNA, 96 bp, Fusarium cuneirostrum
  misc_feature: 32
gactcagatcctaacgacataagtttaaatagctatgcccgaacacatgactgctcaatttcttttgtgctttagataattctcatcaattgaccg

SEQ ID NO: 41316 - DNA, 96 bp, Fusarium cuneirostrum
  misc_feature: 32
aggatatagtcatagactcggccctccgcgggcgctcgtaactcttcatgggttgccaacatactcttgtcaatccctcaccctgcgtccttcgtc

SEQ ID NO: 41317 - DNA, 96 bp, Fusarium cuneirostrum
  misc_feature: 32
gacgaaggaacacgtagcgacgttactaaaacaccacaagatgtggttcagttatcttcatgagagtgcatgatgacctcaagtggaggtgcatgg

SEQ ID NO: 41318 - DNA, 96 bp, Fusarium cuneirostrum
  misc_feature: 32
gaccttaaatgaaatgtgatatgaacgtagtcgtagtaagaagacatgggaatggcttcatccataaatgagtcctgagggcgaggaggaacgacg

SEQ ID NO: 41319 - DNA, 96 bp, Fusarium cuneirostrum
  misc_feature: 32
cacacttctgtcggtcgcgcatccgcactccctcatctactcacctcgtacacccacttcggtatcatctttcgatgtgcgcattgactgttggtc

SEQ ID NO: 41320 - DNA, 96 bp, Fusarium cuneirostrum
  misc_feature: 32
catagactcggccctccgcgggcgctcgtaactcttcatgggttgccaacatactcttgtcaatccctcaccctgcgtccttcgtcctcgggattc

SEQ ID NO: 41321 - DNA, 96 bp, Fusarium cuneirostrum
  misc_feature: 32
cccacttttcctagcttactaagcagcttattaagccgcttactataaaagaccttttaatatataagggactttataaataattctagtatattc

SEQ ID NO: 41322 - DNA, 96 bp, Fusarium cuneirostrum
  misc_feature: 32
gaagtgatgatgacttcaattacgtagattttagagcgagtactaagtaggtagggagcgaggctgaaaaacctagagcttacagtagggtgagct

SEQ ID NO: 41323 - DNA, 96 bp, Fusarium cuneirostrum
  misc_feature: 32
gaaggattgactagtagagtctcatctgcatgtgaagagttcatctccaagcagagactgtggtctcaataccgagcgaagcgaaggtgcggaacg

SEQ ID NO: 41324 - DNA, 96 bp, Fusarium cuneirostrum
  misc_feature: 32
gaaggacgcagggtgagggattgacaagagtatgttggcaacccatgaagagttacgagcgcccgcggagggccgagtctatgactatatccttag

SEQ ID NO: 41325 - DNA, 96 bp, Fusarium cuneirostrum
  misc_feature: 32
aggagggaggcggacgccgaccgaaaagcatgtcgagggtcgagcagacccgagccagaaacgagctcaaaactggaacagttttttggtgagttc

SEQ ID NO: 41326 - DNA, 96 bp, Fusarium cuneirostrum
  misc_feature: 32
ccatgtcttcttactacgactacgttcatatcacatttcatttaaggtcacatacaaatcacaagtatcattaagtgctcgccaagtagaaaaaag

SEQ ID NO: 41327 - DNA, 96 bp, Fusarium cuneirostrum
  misc_feature: 32
ctttcttctttcttctttcttctttcttctttcttctttcttctttcttctttcttctttcttcttttcagaaagagatgtttcctaatgcgtgtg

SEQ ID NO: 41328 - DNA, 96 bp, Fusarium cuneirostrum
  misc_feature: 32
acgatttgaaagtgaaagtgaaagtgaaagtgaaagtgaaagtgaaagtgaaagtgaaagtgaaagtgaaagtgaaagtgaaagtgaaagtgaaag

SEQ ID NO: 41329 - DNA, 96 bp, Fusarium cuneirostrum
  misc_feature: 32
agaatggcattatttttaactatataggctatttaatatatattcactttagtatttattaagcgtctatattatactaactctctcttaagtaag

SEQ ID NO: 41330 - DNA, 96 bp, Fusarium cuneirostrum
  misc_feature: 32
cttaaggaataatactaataagaagaagaataacgctaatataaaaaagctaaagaatatatagatatatcgcgactattaatactctaataatat

SEQ ID NO: 41331 - DNA, 96 bp, Fusarium cuneirostrum
  misc_feature: 32
ctctaataagttattaatattatatatatattaaccttaattatcttataattataggattataaggcatttataataatatcttaagctcttaag

SEQ ID NO: 41332 - DNA, 96 bp, Fusarium cuneirostrum
  misc_feature: 32
ctgattgggtctccgaccccaccaagtgcgtgtcattggatgacacttgttctcacaggagttgcggtccccgcagcatggacggaacgttctacg

SEQ ID NO: 41333 - DNA, 96 bp, Fusarium cuneirostrum
  misc_feature: 32
ctgacgagggggcgaggaagtataagacggaacgtctgcccctgcgaggacgcagtcgaagacttgagactgtatttatttttttgtgtgagacgg

SEQ ID NO: 41334 - DNA, 96 bp, Fusarium cuneirostrum
  misc_feature: 32
cattaaagaaataagacctcattcttttatatcgtcttaaaattttattttatttttacaattctttttatatatcatacattaataacgcaagag

SEQ ID NO: 41335 - DNA, 96 bp, Fusarium cuneirostrum
  misc_feature: 32
ctctggacttgcatattgaacttgactacctactcgcgcttatcctgagagagatggagcggagagagatggtaacgcgctgtttgatgaggctct

SEQ ID NO: 41336 - DNA, 96 bp, Fusarium cuneirostrum
  misc_feature: 32
acagttagatatatcttgatgaaggtgctatagttgaagtgtatatttagcccaagagagattgatgattgggttgttatggtaataccgctcgag

SEQ ID NO: 41337 - DNA, 96 bp, Fusarium cuneirostrum
  misc_feature: 32
agagttgggttcgagtgaagaacccataccccaagcagaactatgttctgaataccgaccgaacggagtgagggaaggtgcggaatggagtgggag

SEQ ID NO: 41338 - DNA, 96 bp, Fusarium cuneirostrum
  misc_feature: 32
atagggagcctgaggcacgaaggcgaagagtgtaggatcatggaggagggacgacgcaatgatcggttgactaaggacgggaacgaatggaatgag

SEQ ID NO: 41339 - DNA, 96 bp, Fusarium cuneirostrum
  misc_feature: 32
actgtatttatttttttgtgtgagacggagtcgagtctgatttcgactggaatcagttctgtttattccacggccgtggaaacacgaacaggtgag

SEQ ID NO: 41340 - DNA, 96 bp, Fusarium cuneirostrum
  misc_feature: 32
ctattttaatatctggtttttatttatatttatcttaatctctttttactaatatattatatccgcttcgcgatattataataagtttaattattt

SEQ ID NO: 41341 - DNA, 96 bp, Fusarium cuneirostrum
  misc_feature: 32
ctacaacggtttctcgaaagccgcagttaactctgctcctaaaagccgctctaacagatcggaagagcgtcgtgtagggaaagagtgtagatctcg

SEQ ID NO: 41342 - DNA, 96 bp, Fusarium cuneirostrum
  misc_feature: 32
cctagtgtatccgaataatcacgcctcggtcacccagtcatcgtcttaggacgagcgcagttttaaggcgcagcatctgccaataataaaacttag

SEQ ID NO: 41343 - DNA, 96 bp, Fusarium cuneirostrum
  misc_feature: 32
agtgaggggacaggaggcccagagggccgacaagaatccatttcaaaatttgtacaaattttgtatgggaagatttctgagattgtatgggcaacg

SEQ ID NO: 41344 - DNA, 96 bp, Fusarium cuneirostrum
  misc_feature: 32
ataatcgtttccgctccgctcttacagccctcgatctccgtttcttctccgcatcgagataaaccttcgacacctcttccatcgtcactccagacg

SEQ ID NO: 41345 - DNA, 96 bp, Fusarium cuneirostrum
  misc_feature: 32
cagagtcgaggagtataagacagcgtcttttcccccgagaggttgagtgagcaggcgaactctgacttgttttatttttttcgaggacggaggacg

SEQ ID NO: 41346 - DNA, 96 bp, Fusarium cuneirostrum
  misc_feature: 32
aaaacctagagcttacagtagggtgagctcccgcacttgtgttacgcgagcatatataaagtagatggtgataacctcaaaagagtccacgagccg

SEQ ID NO: 41347 - DNA, 96 bp, Fusarium cuneirostrum
  misc_feature: 32
cgcgacctggcgggaggtttccacagctcaagggatataccaaggaggaaggaataacctgatccatcaccttagtcgttcatcagtcactacttg

SEQ ID NO: 41348 - DNA, 96 bp, Fusarium cuneirostrum
  misc_feature: 32
aatgccagaatcgagtccatacaaaaactgttccagttttgagactccgtcaaatccacctcgagcgctgctctcgccatgtaccctttcccctcg

SEQ ID NO: 41349 - DNA, 96 bp, Fusarium cuneirostrum
  misc_feature: 32
cgagcatgttttaatctgatgtgaataacttcaaaagtattttcccgaggccgaggacgtaggacgcaggctgagggattgacaatagactgaact

SEQ ID NO: 41350 - DNA, 96 bp, Fusarium cuneirostrum
  misc_feature: 32
ccttcgctacgctcgctcgtcggctcgggcctcaagtggtgattaagtcgttcattcacaaagtgctcgccaatttaaaaggcgtagtggtgctcg

SEQ ID NO: 41351 - DNA, 96 bp, Fusarium cuneirostrum
  misc_feature: 32
cagacgagctttggtgaaagatcgaaaagaatggcaagggaaccaatacagcccaatatgcaatccaaatatcgacttccactatttcccttctcg

SEQ ID NO: 41352 - DNA, 96 bp, Fusarium cuneirostrum
  misc_feature: 32
cgaataaccaatagtagggcccgcccgcgcccactctagtcaacctaactaacgcggaaataaaagacgcttctagcactagcagcgacaataagg

SEQ ID NO: 41353 - DNA, 96 bp, Fusarium cuneirostrum
  misc_feature: 32
caccattacctattccggtaagtctcacaaagcatcgttggagttactcctccacacttgacccaactcaaacacagcatcatcaaatctacttcg

SEQ ID NO: 41354 - DNA, 96 bp, Fusarium cuneirostrum
  misc_feature: 32
cctttcgggtctctacaaaatcaaaacatttacatctgctgggctccctctcggcacacgcccaagatactgtccacaacctcatctagtacaatt

SEQ ID NO: 41355 - DNA, 96 bp, Fusarium cuneirostrum
  misc_feature: 32
cctggtttttcgagcgggttataactttggtctataagcggttttaacccttgacacctttaggtgcttggggaaactgggggagagccacttgtg

SEQ ID NO: 41356 - DNA, 96 bp, Fusarium cuneirostrum
  misc_feature: 32
actcctgttccattcacattctacgtcacaattccatctaacactacaattacaattacaattacaatcagtcacgatggctcgccattagggagg

SEQ ID NO: 41357 - DNA, 96 bp, Fusarium cuneirostrum
  misc_feature: 32
agcctgaggcacgaaggcgaagagtgtaggatcatggaggagggacgacgcaatgatcggttgactaaggacgggaacgaatggaatgagtggagg

SEQ ID NO: 41358 - DNA, 96 bp, Fusarium cuneirostrum
  misc_feature: 32
cctaatcgtgcctttaaggcctaatatacttatattaaccttctaaggggcccttaagccctctaaggctgcaataaaggccttagccttaaggat

SEQ ID NO: 41359 - DNA, 96 bp, Fusarium cuneirostrum
  misc_feature: 32
ccgctcgggactcatggatgaggaatacatttacagtcaccaacataaacattcacaatctgaaatcatgctcgccaagtgaaaaaaagtagtggt

SEQ ID NO: 41360 - DNA, 96 bp, Fusarium cuneirostrum
  misc_feature: 32
atcatcccacacgtccactccttgcaccactgtgcatcgttcccttattacgcctccacttcggtcctacgttccctccgtgtcgttattgatcgg

SEQ ID NO: 41361 - DNA, 96 bp, Fusarium cuneirostrum
  misc_feature: 32
catgctcactaatctaataaaaagaataaccagggctcgtcaaacgagtttatttaaattattatttgcctcgccctgcttatgttatgtcaaggg

SEQ ID NO: 41362 - DNA, 96 bp, Fusarium cuneirostrum
  misc_feature: 32
ccattagtttaggcctgagccagggaacaccatcaactcgttagagcggcttttaggagatcggaagagcgtcgtgtagggaaagagtgtagatct

SEQ ID NO: 41363 - DNA, 96 bp, Fusarium cuneirostrum
  misc_feature: 32
ccacatcgtgccatcctaccttctgccacactctactgagtcgtgaagccgtcgtgcactcctacatgaaatggtaacacacatatccatggtgtt

SEQ ID NO: 41364 - DNA, 96 bp, Fusarium cuneirostrum
  misc_feature: 32
catgtgtccagacacaaatcattatcactcacccgttcgtgatcgctttcgctctatcattcttgcctaatcgtcaagtctcggcgctgcctcaat

SEQ ID NO: 41365 - DNA, 96 bp, Fusarium cuneirostrum
  misc_feature: 32
catgaagagggggagggtgacccgaccccgatgtgtgaccgagacagatgtcgaggggaaagggtacatggcgagagcagcgctcgaggtggattt

SEQ ID NO: 41366 - DNA, 96 bp, Fusarium cuneirostrum
  misc_feature: 32
aggcaggaactgtagtcctctaccgaccggagggaggtgcggagcgtagtcgagcagggcgagacgatgcgaggttactataacccatgagtgatg

SEQ ID NO: 41367 - DNA, 96 bp, Fusarium cuneirostrum
  misc_feature: 32
agaacgagtcgaccgacagggagacgatgtgatgttactttaattcaacagagatgcgctctgtgaatcccctcacgtaaacatgaaatgtcactg

SEQ ID NO: 41368 - DNA, 96 bp, Fusarium cuneirostrum
  misc_feature: 32
atctacgattgacaatccctctcgcacaccgtcgcatgcgctcctcctgctacgggactattatggtgtgggttgaagctattcgcaagtcacctg

SEQ ID NO: 41369 - DNA, 96 bp, Fusarium cuneirostrum
  misc_feature: 32
caggagatagggcgagacaataacatttaaatacacttctttaaacttgtcgagcaccatttccctccctaatggcgagccatcgtgactgattgt

SEQ ID NO: 41370 - DNA, 96 bp, Fusarium cuneirostrum
  misc_feature: 32
atagttctaccgaagcccgtcagggcgaggtgcagaacgagtcgaccgacagggagacgatgtgatgttactttaattcaacagagatgcgctctg

SEQ ID NO: 41371 - DNA, 96 bp, Fusarium cuneirostrum
  misc_feature: 32
agtgacatttcatgtttacgtgaggggattcacagagcgcatctctgttgaattaaagtaacatcacatcgtctccctgtcggtcgactcgttctg

SEQ ID NO: 41372 - DNA, 96 bp, Fusarium cuneirostrum
  misc_feature: 32
aatgagagaggtacgaacgttccgtccacaatctcataccccgcagacagagtcgaggagtataagacagcgtcttttcccccgagaggttgagtg

SEQ ID NO: 41373 - DNA, 96 bp, Fusarium cuneirostrum
  misc_feature: 32
acaggagatagggcgagacaataacatttaaatacacttctttaaacttgtcgagcaccatttccctccctaatggcgagccatcgtgactgattg

SEQ ID NO: 41374 - DNA, 96 bp, Fusarium cuneirostrum
  misc_feature: 32
agtttaacaccgggcgggcactactattgatctttgtaataccctgccttttttcttctttcatgacccgtttggcgttagaagcactcttgattg

SEQ ID NO: 41375 - DNA, 96 bp, Fusarium cuneirostrum
  misc_feature: 32
atgagcgaccgccagggagcgaaatgggagctcctaactttggtctataagagggatttgggaattaaagggacccaacgccttacgagggacttg

SEQ ID NO: 41376 - DNA, 96 bp, Fusarium cuneirostrum
  misc_feature: 32
agttcagacaacctccgcttcagcagatccgcgtccaagaagcagatcgtcacagcgcacacgctggaccgtagacagcgcccaaggctcgtcttg

SEQ ID NO: 41377 - DNA, 96 bp, Fusarium cuneirostrum
  misc_feature: 32
atttgaattgaattgtgattgcgagccatcattcataacgaaatggggcgagacctaaaatataatttctaaacgtgttgagacccattttctttt

SEQ ID NO: 41378 - DNA, 96 bp, Fusarium cuneirostrum
  misc_feature: 32
acattctcctagtctattagaatttaaattgtcaagatcgtcttattcactgctcagctaccgaactagaagcgtctatatcatctctcgctaaat

SEQ ID NO: 41379 - DNA, 96 bp, Fusarium cuneirostrum
  misc_feature: 32
attctggtcttattatacctttaaacccttatttattaccccttaattattattaacctaactggaaccttaaattactagggatatactctaggt

SEQ ID NO: 41380 - DNA, 96 bp, Fusarium cuneirostrum
  misc_feature: 32
ataactcacgcaagatgtggttcgttttacttttacgagagtgcacgatgacttcaggtaatgtgaactggacacggaatggaaatggagtggaat

SEQ ID NO: 41381 - DNA, 96 bp, Fusarium cuneirostrum
  misc_feature: 32
attcatcaccaaactcgtccacaccctcgacgagtgtcttcacctcttctacagccctcggcttcacctccgatatgggcgcagccgcccccgtct

SEQ ID NO: 41382 - DNA, 96 bp, Fusarium cuneirostrum
  misc_feature: 32
atctaacttaataaataatatagagctaaataaataaatattaacgaagtaaataatattaaattaaataaaggaataaagccgaagctaaataat

SEQ ID NO: 41383 - DNA, 96 bp, Fusarium cuneirostrum
  misc_feature: 32
attaggcaaccgtcgcatctgcctggaggttggttgtcactgaccaatcatcccgctcggacaaagcggagtgaggtccgtcagcggttaaaccgt

SEQ ID NO: 41384 - DNA, 96 bp, Fusarium cuneirostrum
  misc_feature: 32
atcgcaagactcaaaatctaccggattttgggacttttcagaaactggcacagttttaatatgggttgcgatctggcgtttggtgtgagcaaacgt

SEQ ID NO: 41385 - DNA, 96 bp, Fusarium cuneirostrum
  misc_feature: 32
atccgggaacagggaggttcacggcataaaagttgaaaagtgttattttgcatagcgaaaggtgatggtggaaattgtgttgtagcaaaatttgat

SEQ ID NO: 41386 - DNA, 96 bp, Fusarium cuneirostrum
  misc_feature: 32
atccgaccttctctcactccgttcgttctcggtcttacatactggattccgctcgtccctcactctcatccaataataacgtcgctgacgctctct

SEQ ID NO: 41387 - DNA, 96 bp, Fusarium cuneirostrum
  misc_feature: 32
atccatatcggaacgagaagtgacgagcaataggagtggagcgacgatcgattatttatttcgagtaaggacgaggctgggacgagtattattctt

SEQ ID NO: 41388 - DNA, 96 bp, Fusarium cuneirostrum
  misc_feature: 32
ataattaacttatagaagtagtaatatataaatatatttattcggtatattaaatagatatagctactttagtaattaatataacttaattatatt

SEQ ID NO: 41389 - DNA, 96 bp, Fusarium cuneirostrum
  misc_feature: 32
ataataatttaaataaactcgtttgacgagccctggttattctttttattagattagtgagcatgatgttactgtagatggagttgtgaatggcct

SEQ ID NO: 41390 - DNA, 96 bp, Fusarium cuneirostrum
  misc_feature: 32
ataataatgagcaaggtcgcaaggtcactgctcacgataacatcatcaattgaccaacagtcaatgcgcacatcgaaagatgataccgaagtgggt

SEQ ID NO: 41391 - DNA, 96 bp, Fusarium cuneirostrum
  misc_feature: 32
actcacttatcacatacgttatgcctagaggcacgaaattaataaaaactatttactatgttttaaatatacttagtaagatcttgtaatatttat

SEQ ID NO: 41392 - DNA, 96 bp, Fusarium cuneirostrum
  misc_feature: 32
ataaacttaggaatcgagatagagaataagctaatattataatagaggagaataaatagctatataagagataaataaggaagcgcttaatatagt

SEQ ID NO: 41393 - DNA, 96 bp, Fusarium cuneirostrum
  misc_feature: 32
ataaaaggatgtcttcccagacaatcccttgcgctcaccttccagggttcgcctctccaccacttgtcttacgacacgaagaacaacagcgtcatt

SEQ ID NO: 41394 - DNA, 96 bp, Fusarium cuneirostrum
  misc_feature: 32
aaatttaaagaaatattagaataataaacttaataaataacttaagaatatattagaataatatagaatttacgagaagctcttttaagaggaact

SEQ ID NO: 41395 - DNA, 96 bp, Fusarium cuneirostrum
  misc_feature: 32
acattcttaacgaaatggggcgagataataatacttaaataaacttgacgagcaccactcgactttaaatatggcgagcacttacttaatgtgact

SEQ ID NO: 41396 - DNA, 96 bp, Fusarium cuneirostrum
  misc_feature: 32
agctacgcttatatcactaccgaatgagacccggaacgggtcgaaatgaggtggcataactttggtgatataagcggattccgggattgaacttgt

SEQ ID NO: 41397 - DNA, 96 bp, Fusarium cuneirostrum
  misc_feature: 32
aatgatacttgtgatttgtatgtgaccttaaatgaaatgtgatatgaacgtagtcgtagtaagaagacatgggaatggcttcatccataaatgagt

SEQ ID NO: 41398 - DNA, 96 bp, Fusarium cuneirostrum
  misc_feature: 32
aatgtttggccgagataccaggagtccaaggacatcacgattgctggacgtgatgggaatgcagtctttgattcggtcaagctcacgcctcttggt

SEQ ID NO: 41399 - DNA, 96 bp, Fusarium cuneirostrum
  misc_feature: 32
aaacagtgtcgcaaatcgggccatgcggccctttaagtactgctctctcctcgcagtcctcgagttacgtccgtacgaagcgtactaccgtagtgt

SEQ ID NO: 41400 - DNA, 96 bp, Fusarium cuneirostrum
  misc_feature: 32
aaggtggagggagtgcggatgcgcgaccggtagacacacatcgagggaggggaccgaccgagcaagaatccatttcaaaatttgtacaaaatttgt

SEQ ID NO: 41401 - DNA, 96 bp, Fusarium cuneirostrum
  misc_feature: 32
aatttaaataaactcgtttgacgagccctggttattctttttattagattagtgagcatgatgttactgtagatggagttgtgaatggcctcattt

SEQ ID NO: 41402 - DNA, 96 bp, Fusarium cuneirostrum
  misc_feature: 32
aagaactttttctctattttttaaagaataaaatattattttttttttcttttaaaaaagagatattttttctctttaaaaagagatattcttttt

SEQ ID NO: 41403 - DNA, 96 bp, Fusarium cuneirostrum
  misc_feature: 31
gccgcatcccaggaccacaatacctggtgcactcccatctcaccccagttcgatgtgtcctccggtaaagccacctctggtactttctccaaaaaa

SEQ ID NO: 41404 - DNA, 96 bp, Fusarium cuneirostrum
  misc_feature: 31
gagaatggcctgttggtgagaaatgtgaaaaggggctcatgggtcggccgatatgaaaattaggttgtggattgatctgtccgttggcgtaaaaaa

SEQ ID NO: 41405 - DNA, 96 bp, Fusarium cuneirostrum
  misc_feature: 31
ggagggaaaagtgcgtcgcatacttggatgcgtcgcatgcttatcatgtacgttacatcacaagtgagtgaaacacacaagcgagtgaaacaaaaa

SEQ ID NO: 41406 - DNA, 96 bp, Fusarium cuneirostrum
  misc_feature: 31
gtgagtttgtattctatccggaggaggagtgaacgagtgagcgatcatctacttacattaattgctggacagcatcttctcgggaagagaagaaaa

SEQ ID NO: 41407 - DNA, 96 bp, Fusarium cuneirostrum
  misc_feature: 31
ttttcggactgaaatacgctgggcgttttcggaggttttgtatcttagattagtctacattgtttcctgttttggatgttgcgataccttcgtttt

SEQ ID NO: 41408 - DNA, 96 bp, Fusarium cuneirostrum
  misc_feature: 31
tttgtacaaattttgtatgggaagatttctgagattgtatgggcaacgacctggaatcagagtgagaatctggtacagattgttagcgaccgaagg

SEQ ID NO: 41409 - DNA, 96 bp, Fusarium cuneirostrum
  misc_feature: 31
attacgttagtagtaaagagaaaatttttataagttagagttacctaccgaaaatacttagtcattaaagctagccttaaggataagactaataaa

SEQ ID NO: 41410 - DNA, 96 bp, Fusarium cuneirostrum
  misc_feature: 31
tttagaaggtaagccgacacctccaagatagacgatatggtggcgattgctgaccttagtgtgtttactgatgtagtttgtaagtgaacgcctcta

SEQ ID NO: 41411 - DNA, 96 bp, Fusarium cuneirostrum
  misc_feature: 31
cgagacaaacagttaatatattttgacgagcaccacttaattattaagattgtacttaatggcgagcgatgatttaataacagttgtgactgtaaa

SEQ ID NO: 41412 - DNA, 96 bp, Fusarium cuneirostrum
  misc_feature: 31
tttacacttgaatgcgagcaggacttgtgattgtatttaattaaacctgagtccggcggaggaggagggacgacggagccggattgacaagagtag

SEQ ID NO: 41413 - DNA, 96 bp, Fusarium cuneirostrum
  misc_feature: 31
tcaaataaaaaagtaaaggtcgttggatccccaactccagaaagcgtcctacgacagctcaatatataaccctacgggtaatcgagtcgctcacaa

SEQ ID NO: 41414 - DNA, 96 bp, Fusarium cuneirostrum
  misc_feature: 31
gctggaaagctcccttcggtcgctaacaatctgtaccagattctcactctgattccaggtcgttgcccatacaatctcagaaatcttcccatacaa

SEQ ID NO: 41415 - DNA, 96 bp, Fusarium cuneirostrum
  misc_feature: 31
ttgtatacgacggacgtcgctgtctttttctattttctctgtttgcggaagcacggttgagagggattcgagaccctttcttactcagctggagag

SEQ ID NO: 41416 - DNA, 96 bp, Fusarium cuneirostrum
  misc_feature: 31
ctggtgtttagatcgttcgccctctgggctctattcgactgctgtctcaccctcaccactcgccgtctagctcgtggttctcttttaccactacaa

SEQ ID NO: 41417 - DNA, 96 bp, Fusarium cuneirostrum
  misc_feature: 31
aatcattatcactcacccgttcgtgatcgctttcgctctatcattcttgcctaatcgtcaagtctcggcgctgcctcaatcaacaaactgaaccaa

SEQ ID NO: 41418 - DNA, 96 bp, Fusarium cuneirostrum
  misc_feature: 31
ttggtatagggggggactacgggacacgggacagtgaagaatgaacgtgtgtacccaggagtaatcgtcttgagtcagcttgctgaccttgacgac

SEQ ID NO: 41419 - DNA, 96 bp, Fusarium cuneirostrum
  misc_feature: 31
ttggagccttttatttagtgttcgctccactactctctcggttgtgctcacatatcactgtctatactaactacaataccacttgaggtcatcacc

SEQ ID NO: 41420 - DNA, 96 bp, Fusarium cuneirostrum
  misc_feature: 31
atatagagtaatctaatataattaaccgatataaactaagagtaattcttattaatattaatctcgccttattactatattagcttaatcccgcaa

SEQ ID NO: 41421 - DNA, 96 bp, Fusarium cuneirostrum
  misc_feature: 31
ttgcgggagcgttatggtaagagggaggaggagtagagacgaccaagtataatgttgtaggatatcacacgtgtggggtgtgatttagttgccttt

SEQ ID NO: 41422 - DNA, 96 bp, Fusarium cuneirostrum
  misc_feature: 31
atagcctcacctttttttgactttgtgactttgagactttgactgtgatgatgactacttgtgagcccttgacataacataagcagggcgaggcaa

SEQ ID NO: 41423 - DNA, 96 bp, Fusarium cuneirostrum
  misc_feature: 31
ttgcccgttgcacttggagtgcttttggcgcccggggcgtcaaccttttttctgacgcgtttcattacgcgctcgctcgaacggattgtgagcgac

SEQ ID NO: 41424 - DNA, 96 bp, Fusarium cuneirostrum
  misc_feature: 31
cacattatctagcaccacttcgacctcgttcctcggtctcgtactgcacgtcggcttacgcctccgtaattctttacacagttcttgcttgggcaa

SEQ ID NO: 41425 - DNA, 96 bp, Fusarium cuneirostrum
  misc_feature: 31
tgttgccttctccaagcgctagagacgaacaaactaatagaaaatcagagtaaacatcttgtaactattattgctactaaagtacacctcaatcaa

SEQ ID NO: 41426 - DNA, 96 bp, Fusarium cuneirostrum
  misc_feature: 31
ttgatgaggctctgcgagggcaagtgttggttacgcagaactggggcgtctctttgttgccaaggcacaagtaattagcaattggattgagtttga

SEQ ID NO: 41427 - DNA, 96 bp, Fusarium cuneirostrum
  misc_feature: 31
ttgaggttctagtaacctcgtatcgtgatcgctccgctctcactctactccgcacgtcgccctacgggctccgtaattaaaaacacagtcatagac

SEQ ID NO: 41428 - DNA, 96 bp, Fusarium cuneirostrum
  misc_feature: 31
aagtgcgtcgcatacttggatgcgtcgcatgcttatcatgtacgttacatcacaagtgagtgaaacacacaagcgagtgaaacaaaaatccctcaa

SEQ ID NO: 41429 - DNA, 96 bp, Fusarium cuneirostrum
  misc_feature: 31
acggcgaagccgtttcttaaccttggtatagggggggactacgggacacgggacagtgagggacgaacgtagtgtcactaaggcgaccgagctcaa

SEQ ID NO: 41430 - DNA, 96 bp, Fusarium cuneirostrum
  misc_feature: 31
ttgacagcctacacggcaagctcactcatccgacttcgaacaacgcgagaagaaaacaaacaataatgttgtctgacaccgaaacagtgtcgcgaa

SEQ ID NO: 41431 - DNA, 96 bp, Fusarium cuneirostrum
  misc_feature: 31
agtacggacgaccggagggaggacgtgcggagtgagtgtgacgaaggaacacgtagcgacgttacagacatcacacagagatggtgatgacttcaa

SEQ ID NO: 41432 - DNA, 96 bp, Fusarium cuneirostrum
  misc_feature: 31
ttctttctttacttaccctaaataattatatttcttttttctctttaaccttctttacttaaactctttacttctttaacccttaaaaccctttta

SEQ ID NO: 41433 - DNA, 96 bp, Fusarium cuneirostrum
  misc_feature: 31
ttcttgactttggatgcgagcatatgatgacttggattttgtgattctacgtgattgtaattgtaaatgtaattgtgactgtaaacaccatcgtag

SEQ ID NO: 41434 - DNA, 96 bp, Fusarium cuneirostrum
  misc_feature: 31
ttcgtcacactcactccgcacgtcctccctccggtcgtccgtactaaggatatagtcatagactcggccctccgcgggcgctcgtaactcttcatg

SEQ ID NO: 41435 - DNA, 96 bp, Fusarium cuneirostrum
  misc_feature: 31
atagactgaactcaagtgaagagttcatcctccaagcaagaactatgttctaaacttacggagccttcaggcgacgtgtcgttagtgatgagcgaa

SEQ ID NO: 41436 - DNA, 96 bp, Fusarium cuneirostrum
  misc_feature: 31
ttcccggataccatacacaatgtctgtcgtcgtctctactcctcccatatttcaatgaaaattaaattggcgatctcccctttcctatgacacctt

SEQ ID NO: 41437 - DNA, 96 bp, Fusarium cuneirostrum
  misc_feature: 31
ttccaaacgaggggaaccgagtttgggaagagaaagtggacggaacgttagttctgtccctgtttttttaaattgtcaagcatagtaattatgctt

SEQ ID NO: 41438 - DNA, 96 bp, Fusarium cuneirostrum
  misc_feature: 31
ttcatcaccaaactcgtccacaccctcgacgagtgtcttcacctcttctacagccctcggcttcacctccgatatgggcgcagccgcccccgtctg

SEQ ID NO: 41439 - DNA, 96 bp, Fusarium cuneirostrum
  misc_feature: 31
tgaggagcactacttaaggcgcagggcgcccacttcgtgtagacgatcaagtttctcagaaacttccctctttcatctacatttccttgtagtgaa

SEQ ID NO: 41440 - DNA, 96 bp, Fusarium cuneirostrum
  misc_feature: 31
gaggtgaagacactcgtcgagggtgtggacgagtttggtgatgaatgggtcgatgacgatcttggagatttttagtgtagatagatgcaatgtgaa

SEQ ID NO: 41441 - DNA, 96 bp, Fusarium cuneirostrum
  misc_feature: 31
ccggaagcagagctgaggacataagtagggcatcgcccactgaccgaacagagtgagatttctcttcctttcatcatcattccagaggaatgtgaa

SEQ ID NO: 41442 - DNA, 96 bp, Fusarium cuneirostrum
  misc_feature: 31
taaaggaagttatcacgaataacgagaggtcagaaattagggttaaaccctcggttaatcataagagcgtaaatacggttaacttaatgtattgaa

SEQ ID NO: 41443 - DNA, 96 bp, Fusarium cuneirostrum
  misc_feature: 31
cgcgaataaccaatagtagggcccgcccgcgcccactctagtcaacctaactaacgcggaaataaaagacgcttctagcactagcagcgacaataa

SEQ ID NO: 41444 - DNA, 96 bp, Fusarium cuneirostrum
  misc_feature: 31
ttattaattaataatcttaataaagaattaaagttaattataaaggaagaataagaattaaataataaaataagaagattaggtctttaaaataag

SEQ ID NO: 41445 - DNA, 96 bp, Fusarium cuneirostrum
  misc_feature: 31
cgagcggagcgatggggtgcggagcagagggtgagggacgaacccgtcgcgaggttataataatgagcaaggtcgcaaggtcactgctcacgataa

SEQ ID NO: 41446 - DNA, 96 bp, Fusarium cuneirostrum
  misc_feature: 31
ttatagtggtttatagtggtttatagcggttcatagcggtttatagcggtttatagtagttcgcagcggtttatagcggtttataacggccttaag

SEQ ID NO: 41447 - DNA, 96 bp, Fusarium cuneirostrum
  misc_feature: 31
ttagcaattggattgagtttgaggactaaattcttgctcgtacgtgagaccggagatctctgtgccgtcgctagtggcaatgctgcttgctgggag

SEQ ID NO: 41448 - DNA, 96 bp, Fusarium cuneirostrum
  misc_feature: 31
aagaatggcattatttttaactatataggctatttaatatatattcactttagtatttattaagcgtctatattatactaactctctcttaagtaa

SEQ ID NO: 41449 - DNA, 96 bp, Fusarium cuneirostrum
  misc_feature: 31
ttactatctaccacaaagaaaaagaagccatcgtcatctccgaattaggcaacctcgcggtatgctggtggattaccgctccgtccacacgcctcc

SEQ ID NO: 41450 - DNA, 96 bp, Fusarium cuneirostrum
  misc_feature: 31
ttaccgaaagagatagatataaagataaaagatttaagaaaggttaaagagtaagtatatatacatataataatataatagcccttcttaaggact

SEQ ID NO: 41451 - DNA, 96 bp, Fusarium cuneirostrum
  misc_feature: 31
ttaaacaagcctatagactagcacgagtgagctgggtaccagcgaaacgagggctgataactttggtctataagcggtttttttgacaaaactcgt

SEQ ID NO: 41452 - DNA, 96 bp, Fusarium cuneirostrum
  misc_feature: 31
atgggcgagcattaaataaagacggagcgcacataaactaaaaagggcacacatattagtgagctcccgcatttatatatagcgagcatgttttaa

SEQ ID NO: 41453 - DNA, 96 bp, Fusarium cuneirostrum
  misc_feature: 31
tctttcaaaatggcaactacttctcaatcatatccgatcattagactgccgataaagcccaccgacgggcacgaagaccactagtatcaggcaaca

SEQ ID NO: 41454 - DNA, 96 bp, Fusarium cuneirostrum
  misc_feature: 31
tgttctgttggagaagcagtaaattagagttgggaatggcttcacttttttccactcttggatatgtagatagtgacacttgtaattgacgctcgc

SEQ ID NO: 41455 - DNA, 96 bp, Fusarium cuneirostrum
  misc_feature: 31
gatataagctaggttgctcccttcggtcgcgggaagtctctatacttccttaacatttgtgaccaaattcccactccgttctcacgtttgctcaca

SEQ ID NO: 41456 - DNA, 96 bp, Fusarium cuneirostrum
  misc_feature: 31
gacagcgcccaaggctcgtcttgacaccaacaaacacggatccatcctgtctccttctgctccgcatctccatataaaaggatgtcttcccagaca

SEQ ID NO: 41457 - DNA, 96 bp, Fusarium cuneirostrum
  misc_feature: 31
tgtcggtcgactcgttctgcacctcgccctgacgggcttcggtagaactatacagttcctgcttcctctccgagggtcaggttcagttgtcaagcc

SEQ ID NO: 41458 - DNA, 96 bp, Fusarium cuneirostrum
  misc_feature: 31
tgtcctcggtctcgaccttgctcttgtcctcggtctcgaccttgctcttgtcctcggtctcgaccttgctcttgtcctcggtctcgaccttgctct

SEQ ID NO: 41459 - DNA, 96 bp, Fusarium cuneirostrum
  misc_feature: 31
taaattggcgagcactttgtgaatgaacgacttaatcaccacttgaggcccgagccgacgagcgagcgtagcgaaggaggagcggagggcttgaca

SEQ ID NO: 41460 - DNA, 96 bp, Fusarium cuneirostrum
  misc_feature: 31
tgtaggccacctctcgcggcccaaatgatccacaggcttccgcctgattgggtctccgaccccaccaagtgcgtgtcattggatgacacttgttct

SEQ ID NO: 41461 - DNA, 96 bp, Fusarium cuneirostrum
  misc_feature: 31
tgtagacaccatcgtagcttgagtcctgagccgggaggagcgcatgcgacggtgcggtgaaggattgactagtagagttaatcttgacggagtcat

SEQ ID NO: 41462 - DNA, 96 bp, Fusarium cuneirostrum
  misc_feature: 31
tggtttttcgagcgggttataactttggtctataggcgttttctttcaaaagccttggcttgattgaaaaggtgggggagagagcttgctcgaggg

SEQ ID NO: 41463 - DNA, 96 bp, Fusarium cuneirostrum
  misc_feature: 31
gcagacatgactttgatgtatgacttgtgatttgaattgattgtgcatttgtgaacgagaagagtgaactgttattgtagtggtaaaagagaacca

SEQ ID NO: 41464 - DNA, 96 bp, Fusarium cuneirostrum
  misc_feature: 31
cttccacatcaggcaactctacaaatctcaccaagttcacattgcatctatctacactaaaaatctccaagatcgtcatcgacccattcatcacca

SEQ ID NO: 41465 - DNA, 96 bp, Fusarium cuneirostrum
  misc_feature: 31
gcacccgacgctattcttggttttattcggaatgtccgggagacggacaggcgttattcgtacgagcgtgtgcgaggttttttggagaaagtacca

SEQ ID NO: 41466 - DNA, 96 bp, Fusarium cuneirostrum
  misc_feature: 31
tgggcgagcattaaataaagacggagcgcacataaactaaaaagggcacacatattagtgagctcccgcatttatatatagcgagcatgttttaat

SEQ ID NO: 41467 - DNA, 96 bp, Fusarium cuneirostrum
  misc_feature: 31
ctcaccctactgtaagctctaggtttttcagcctcgctccctacctacttagtactcgctctaaaatctacgtaattgaagtcatcatcacttcca

SEQ ID NO: 41468 - DNA, 96 bp, Fusarium cuneirostrum
  misc_feature: 31
tgctggtgactcgcttgttcaagctcgagcaggcacaaaagtaaaaaaacagaagcaagttcatgttttgcgcgacagcgctgaagaagtgggcgt

SEQ ID NO: 41469 - DNA, 96 bp, Fusarium cuneirostrum
  misc_feature: 31
tatgcgagcccataaccttacgtggggcgagacaaataattattaaaaccacttttaatgtgtcgagaaccactactttttttcacttggcgagca

SEQ ID NO: 41470 - DNA, 96 bp, Fusarium cuneirostrum
  misc_feature: 31
tgctcactaatctaataaaaagaataaccagggctcgtcaaacgagtttatttaaattattatttgcctcgccctgcttatgttatgtcaagggct

SEQ ID NO: 41471 - DNA, 96 bp, Fusarium cuneirostrum
  misc_feature: 31
atacttcctcgccccctcgtcagtatccacttatgcccggatcgctacgctgcaccttattcgtcgttcctcctcataacgttccgtccacccgca

SEQ ID NO: 41472 - DNA, 96 bp, Fusarium cuneirostrum
  misc_feature: 31
tgcgggagcgttatggtaagagggaggaggagtagagacgaccaagtataatgttgtaggatatcacacgtgtggggtgtgatttagttgcctttc

SEQ ID NO: 41473 - DNA, 96 bp, Fusarium cuneirostrum
  misc_feature: 31
tgcggatgcgcgaccgacagaagtgtgtcgagggtcgagcagacccgagccagaaacgagctcaaaactggaacagttttttggtgagttcaatcc

SEQ ID NO: 41474 - DNA, 96 bp, Fusarium cuneirostrum
  misc_feature: 31
tgcgcacatcgaaagatgataccgaagtgggtgtacgaggtgagtagatgagggagtgcggatgcgcgaccgacagaagtgtgtcgagggtcgagc

SEQ ID NO: 41475 - DNA, 96 bp, Fusarium cuneirostrum
  misc_feature: 31
tgccccgtttaggctaatgcataatagatagggggtcttatacgaaaagaaagcatgacgattactttcaagatagccattcagctcctcgggatg

SEQ ID NO: 41476 - DNA, 96 bp, Fusarium cuneirostrum
  misc_feature: 31
aacaagcccggggcctcttcaacgagacggcaagtccgcaagtcttggggatcgctcaatatggacgtagctatctccaacaacggtgtaagtgca

SEQ ID NO: 41477 - DNA, 96 bp, Fusarium cuneirostrum
  misc_feature: 31
gcataaaagttgaaaagtgttattttgcatagcgaaaggtgatggtggaaattgtgttgtagcaaaatttgatatgattatggtgatgttacatca

SEQ ID NO: 41478 - DNA, 96 bp, Fusarium cuneirostrum
  misc_feature: 31
tgatcctacactcttcgccttcgtgcctcaggctccctatttactgggaaggcaatggtgctgcgcacctaaagcctgactcagtccacacgttcg

SEQ ID NO: 41479 - DNA, 96 bp, Fusarium cuneirostrum
  misc_feature: 31
ggactcatttatggatgaagccattcccatgtcttcttactacgactacgttcatatcacatttcatttaaggtcacatacaaatcacaagtatca

SEQ ID NO: 41480 - DNA, 96 bp, Fusarium cuneirostrum
  misc_feature: 31
tgagtttgtattctatccggaggaggagtgaacgagtgagcgatcatctacttacattaattgctggacagcatcttctcgggaagagaagaaaag

SEQ ID NO: 41481 - DNA, 96 bp, Fusarium cuneirostrum
  misc_feature: 31
agcatgttttaatctgatgtgaataacttcaaaagtattttcccgaggccgaggacgtaggacgcaggctgagggattgacaatagactgaactca

SEQ ID NO: 41482 - DNA, 96 bp, Fusarium cuneirostrum
  misc_feature: 31
tgagtgtgacgaaggaacacgtagcgacgttacagacatcacacagagatggtgatgacttcaattgacagcagtcaaacatgaatgcaggatgcg

SEQ ID NO: 41483 - DNA, 96 bp, Fusarium cuneirostrum
  misc_feature: 31
ctcaatccccaaatcctcttatatcaccaaagttataacccgctcgaaaaaccaggtaccctggttcctcgcggtagtgtaagagattaatgctca

SEQ ID NO: 41484 - DNA, 96 bp, Fusarium cuneirostrum
  misc_feature: 31
cttccagatatgtatagacactcacctgttcgtgtttccacggccgtggaataaacagaactgattccagtcgaaatcagactcgactccgtctca

SEQ ID NO: 41485 - DNA, 96 bp, Fusarium cuneirostrum
  misc_feature: 31
tgacgggcttcggtagaactatacagttcctgcttcctctccgagggtcaggttcagttgtcaagccctccgctcctccttcgctacgctcgctcg

SEQ ID NO: 41486 - DNA, 96 bp, Fusarium cuneirostrum
  misc_feature: 31
tgacgaaggagcccgatgcgaggttacgagaacaccatggatatgtgtgttaccatttcatgtaggagtgcacgacggcttcacgactcagtagag

SEQ ID NO: 41487 - DNA, 96 bp, Fusarium cuneirostrum
  misc_feature: 31
tgacccacactccgggtcatcttacacacagtgacatttcatgtttacgtgaggggattcacagagcgcatctctgttgaattaaagtaacatcac

SEQ ID NO: 41488 - DNA, 96 bp, Fusarium cuneirostrum
  misc_feature: 31
tccggaggtgtaactcaagttgacaatcccgggtcgtcgtccctcctcctccccgggactcacgtttaggtttaattataaaaacaattacattca

SEQ ID NO: 41489 - DNA, 96 bp, Fusarium cuneirostrum
  misc_feature: 31
tgaataaaacaaacaaacaaacaaacaaacaaacaaacatcgattggttgtatgccggtcaaagtgcttaagccactcgagaccggtctcgttatc

SEQ ID NO: 41490 - DNA, 96 bp, Fusarium cuneirostrum
  misc_feature: 31
tgaagtcatcaccatgtcttcttactactacgtttacaatttatatttacagtcacaactgttattaaatcatcgctcgccattaagtacaatctt

SEQ ID NO: 41491 - DNA, 96 bp, Fusarium cuneirostrum
  misc_feature: 31
ctcatcagtgtgccatgcatctctggctagcgggcctcgcgccaatgctgttcgcttgagcgtcaaggatgagccccagttaagcgctcgagttca

SEQ ID NO: 41492 - DNA, 96 bp, Fusarium cuneirostrum
  misc_feature: 31
tcgttcccgtgcttagccactctccttcgttcgtccctcactctcgtcgtctatgacccacatctgattccactccgttccatcgatgtctaaaga

SEQ ID NO: 41493 - DNA, 96 bp, Fusarium cuneirostrum
  misc_feature: 31
ctctccgcgaggctcgtaactctttactcgagtttattagatagtccatccctcgggctgcgtcctacgtcctcgccctccggactcgtttaaaga

SEQ ID NO: 41494 - DNA, 96 bp, Fusarium cuneirostrum
  misc_feature: 31
aagcctatctcacacgcattaggaaacatctctttctgaaaagaagaaagaagaaagaagaaagaagaaagaagaaagaagaaagaagaaagaaga

SEQ ID NO: 41495 - DNA, 96 bp, Fusarium cuneirostrum
  misc_feature: 31
tcttcgccttcgtgcctcaggctccctatttactgggaaggcaatggtgctgcgcacctaaagcctgactcagtccacacgttcgtccctcactgt

SEQ ID NO: 41496 - DNA, 96 bp, Fusarium cuneirostrum
  misc_feature: 31
cggagccggattggcaagagtagtgcagctgcccgcagggccgagtccatgactgtataattctaccccgagcggagcgatggggtgcggagcaga

SEQ ID NO: 41497 - DNA, 96 bp, Fusarium cuneirostrum
  misc_feature: 31
aatttagtcctcaaactcaatccaattgctaattacttgtgccttggcaacaaagagacgccccagttctgcgtaaccaacacttgccctcgcaga

SEQ ID NO: 41498 - DNA, 96 bp, Fusarium cuneirostrum
  misc_feature: 31
tctgcacctcgccctgacgggcttcggtagaactatacagttcctgcttcctctccgagggtcaggttcagttgtcaagccctccgctcctccttc

SEQ ID NO: 41499 - DNA, 96 bp, Fusarium cuneirostrum
  misc_feature: 31
tctcccactttcagtctccctcttcggtcgattagtatatatgtgtgcccgtctcgtgcacatgtgtccagacacaaatcattatcactcacccgt

SEQ ID NO: 41500 - DNA, 96 bp, Fusarium cuneirostrum
  misc_feature: 31
aaaagagatggagtgaaacgagatcgaagaagtaatagaaacctgagccatgcgaaggttgatcaagagggacagatcttggatgtgtcccgtaga

SEQ ID NO: 41501 - DNA, 96 bp, Fusarium cuneirostrum
  misc_feature: 31
tctaacttaataaataatatagagctaaataaataaatattaacgaagtaaataatattaaattaaataaaggaataaagccgaagctaaataata

SEQ ID NO: 41502 - DNA, 96 bp, Fusarium cuneirostrum
  misc_feature: 31
tcgtggttctcttttaccactacaataacagttcactcttctcgttcacaaatgcacaatcaattcaaatcacaagtcatacatcaaagtcatgtc

SEQ ID NO: 41503 - DNA, 96 bp, Fusarium cuneirostrum
  misc_feature: 31
tcgtgcacatgtgtccagacacaaatcattatcactcacccgttcgtgatcgctttcgctctatcattcttgcctaatcgtcaagtctcggcgctg

SEQ ID NO: 41504 - DNA, 96 bp, Fusarium cuneirostrum
  misc_feature: 31
tcggcactaacaatcgctacacgattcccacctcaatctcgcgatttcgcccgccattctcagtttcgttcacatacaaaaagtatgtcgatttga

SEQ ID NO: 41505 - DNA, 96 bp, Fusarium cuneirostrum
  misc_feature: 31
ggtacgaacgttccgtccacaatctcataccccgcagacagagtcgaggagtataagacagcgtcttttcccccgagaggttgagtgagcaggcga

SEQ ID NO: 41506 - DNA, 96 bp, Fusarium cuneirostrum
  misc_feature: 31
tcgccggagctcctcgacaattgaagggatacttagacaattctcgtcagctaatgtcagacaattagttccacagggatcagtgatggcaccggt

SEQ ID NO: 41507 - DNA, 96 bp, Fusarium cuneirostrum
  misc_feature: 31
tcgccacttgtgactcaccccgttcttgagcccaaagcacagcttttgtcaaaaaacctcttatagaccaaagttattgcacctcgcttcgcccgg

SEQ ID NO: 41508 - DNA, 96 bp, Fusarium cuneirostrum
  misc_feature: 31
gtgagtagtaacggagtaactgtacatcgcaagactcaaaatctaccggattttgggacttttcagaaactggcacagttttaatatgggttgcga

SEQ ID NO: 41509 - DNA, 96 bp, Fusarium cuneirostrum
  misc_feature: 31
tcgagtcgctcacaatccgttcgagcgagcgcgtaatgaaacgcgtcagaaaaaaggttgacgccccgggcgccaaaagcactccaagtgcaacgg

SEQ ID NO: 41510 - DNA, 96 bp, Fusarium cuneirostrum
  misc_feature: 31
tacagttagatatatcttgatgaaggtgctatagttgaagtgtatatttagcccaagagagattgatgattgggttgttatggtaataccgctcga

SEQ ID NO: 41511 - DNA, 96 bp, Fusarium cuneirostrum
  misc_feature: 31
aatgcgcacatcgaaagatgataccgaagtgggtgtacgaggtgagtagatgagggagtgcggatgcgcgaccgacagaagtgtgtcgagggtcga

SEQ ID NO: 41512 - DNA, 96 bp, Fusarium cuneirostrum
  misc_feature: 31
ctattacttcttcgatctcgtttcactccatctcttttcatgatctagtgaagttattcgcacttcacctcttcacattatctagcaccacttcga

SEQ ID NO: 41513 - DNA, 96 bp, Fusarium cuneirostrum
  misc_feature: 31
ctacggctccggtcgggtttgtgtgtgcccacgcacccactttctctccgttccatttcattccacatttcatttcatgcctacacattcaaagga

SEQ ID NO: 41514 - DNA, 96 bp, Fusarium cuneirostrum
  misc_feature: 31
agagagataggaggtaaataggcagtggaattagtccttataaaaagctaattaataaaataaggaattatatagctagaaaagtaggttaaagga

SEQ ID NO: 41515 - DNA, 96 bp, Fusarium cuneirostrum
  misc_feature: 31
ccactcctgttccattcacattctacgtcacaattccatctaacactacaattacaattacaattacaatcagtcacgatggctcgccattaggga

SEQ ID NO: 41516 - DNA, 96 bp, Fusarium cuneirostrum
  misc_feature: 31
cagtcaatagacatccgaggtcacgaggaatgtggatgtagccactcgaatgagggacgaagaagagtggagtaagtaagcacgagaaggagggga

SEQ ID NO: 41517 - DNA, 96 bp, Fusarium cuneirostrum
  misc_feature: 31
tccaaacgaggggaaccgagtttgggaagagaaagtggacggaacgttagttctgtccctgtttttttaaattgtcaagcatagtaattatgcttg

SEQ ID NO: 41518 - DNA, 96 bp, Fusarium cuneirostrum
  misc_feature: 31
tcattgctgattgctgaccttggggtgtttgctgatgtagattgtaagtaaacgcctgagatggatgagatagcgatgattgctaaccttgggtgt

SEQ ID NO: 41519 - DNA, 96 bp, Fusarium cuneirostrum
  misc_feature: 31
acttggttcagtttgttgattgaggcagcgccgagacttgacgattaggcaagaatgatagagcgaaagcgatcacgaacgggtgagtgataatga

SEQ ID NO: 41520 - DNA, 96 bp, Fusarium cuneirostrum
  misc_feature: 31
tcagtctattgtcaatccctcagcctgcgtcctacgtcctcggcctcgggaaaatacttttgaagttattcacattcacatctacgattacaattt

SEQ ID NO: 41521 - DNA, 96 bp, Fusarium cuneirostrum
  misc_feature: 31
tcagtcgcatcctgcattcatgtttgactgctgtcaattgaagtcatcaccatctctgtgtgatgtctgtaacgtcgctacgtgttccttcgtcac

SEQ ID NO: 41522 - DNA, 96 bp, Fusarium cuneirostrum
  misc_feature: 31
tcagagagcgagtcgatcttggattcctatgcaagtcgtctttcaattgcgctggcgcgcgactaggaacagagtgacggtatttcaatcggagat

SEQ ID NO: 41523 - DNA, 96 bp, Fusarium cuneirostrum
  misc_feature: 31
tatttaggattattattaatatagctaagttattattataattaatacttttagcctaatatatataataagcgaacaaaataaataagcaagtga

SEQ ID NO: 41524 - DNA, 96 bp, Fusarium cuneirostrum
  misc_feature: 31
gtgatcagcctgtggataggagagttcgtttccggaaggtattggaagagattgagtcggcgtagtagtagacttttcccaatgtagatatcgtga

SEQ ID NO: 41525 - DNA, 96 bp, Fusarium cuneirostrum
  misc_feature: 31
agcgaaatgggagctcctaactttggtcaataagaggtttttttttccgagtagcttgctacggttaaaaaactgggggcgaacaacttgttgtga

SEQ ID NO: 41526 - DNA, 96 bp, Fusarium cuneirostrum
  misc_feature: 31
ggggtgcggagcagagggtgagggacgaacccgtcgcgaggttataataatgagcaaggtcgcaaggtcactgctcacgataacatcatcaattga

SEQ ID NO: 41527 - DNA, 96 bp, Fusarium cuneirostrum
  misc_feature: 31
tcaagtcttcgactgcgtcctcgcaggggcagacgttccgtcttatacttcctcgccccctcgtcagtatccacttatgcccggatcgctacgctg

SEQ ID NO: 41528 - DNA, 96 bp, Fusarium cuneirostrum
  misc_feature: 31
tcaagtacttaagggcctggagaccggcccatctcccgagcctggtcttcccaaccacattgcgctcggaagacaaagccacagggggtcagctcg

SEQ ID NO: 41529 - DNA, 96 bp, Fusarium cuneirostrum
  misc_feature: 31
aaggtataagaagctttcaataagattaaggaactcatcttaagcgaactagtccttaagatatttgacttatctcgattaattaaatttaaaata

SEQ ID NO: 41530 - DNA, 96 bp, Fusarium cuneirostrum
  misc_feature: 31
tatttctccctctttcttttttcccttcctcttttcttctcccctctttctttttcttttctctctccttccttttttatcccttttttctttttt

SEQ ID NO: 41531 - DNA, 96 bp, Fusarium cuneirostrum
  misc_feature: 31
gagtccacgagccgagcgcgtagcgtgcaggcgaggggattgtcaatgtaatttattcagggaataattacccttccaagcaggaactgtgaaata

SEQ ID NO: 41532 - DNA, 96 bp, Fusarium cuneirostrum
  misc_feature: 31
tatttatattatttataaaagcctatttaatagctaaaaggggtctatttatgtaaaggactgaaggatatagactataaagtcctcgtaaggtgt

SEQ ID NO: 41533 - DNA, 96 bp, Fusarium cuneirostrum
  misc_feature: 31
tattgaaatatatagctaattatttattacttttaggcttatttcttatattaatatcggtatttatatttaggctattacttattagatattacg

SEQ ID NO: 41534 - DNA, 96 bp, Fusarium cuneirostrum
  misc_feature: 31
tattatttatattatttataaaagcctatttaatagctaaaaggggtctatttatgtaaaggactgaaggatatagactataaagtcctcgtaagg

SEQ ID NO: 41535 - DNA, 96 bp, Fusarium cuneirostrum
  misc_feature: 31
tattatgggcgagcattaaataaagacggagcgcacataaactaaaaagggcacacatattagtgagctcccgcatttatatatagcgagcatgtt

SEQ ID NO: 41536 - DNA, 96 bp, Fusarium cuneirostrum
  misc_feature: 31
tattatattagattctaagtcataaattatattacgcttaaaactatctattatatattttactttactttaatagcttagcttattattttttat

SEQ ID NO: 41537 - DNA, 96 bp, Fusarium cuneirostrum
  misc_feature: 31
gtattaaccttataattactaattcttaggttttataatttcttttacgagaattattaattattaatcttaattacctttccgatataattaata

SEQ ID NO: 41538 - DNA, 96 bp, Fusarium cuneirostrum
  misc_feature: 31
agattttagagcgagtactaagtaggtagggagcgaggctgaaaaacctagagcttacagtagggtgagctcccgcacttgtgttacgcgagcata

SEQ ID NO: 41539 - DNA, 96 bp, Fusarium cuneirostrum
  misc_feature: 31
gggcagacgttccgtcttatacttcctcgccccctcgtcagtatccacttatgcccggatcgctacgctgcaccttattcgtcgttcctcctcata

SEQ ID NO: 41540 - DNA, 96 bp, Fusarium cuneirostrum
  misc_feature: 31
ctaatcgtgcctttaaggcctaatatacttatattaaccttctaaggggcccttaagccctctaaggctgcaataaaggccttagccttaaggata

SEQ ID NO: 41541 - DNA, 96 bp, Fusarium cuneirostrum
  misc_feature: 31
tatcccattggggatacgaacgtggtgagtattggagtgattcggagaatgagtgaggagaacgaacggtatgctaaaagcaaacaggagcgaagc

SEQ ID NO: 41542 - DNA, 96 bp, Fusarium cuneirostrum
  misc_feature: 31
cgagataattaattaaaggggcgatataattatatataattaggttagattatagataaccgagatatccgatatattagataatttagtaatata

SEQ ID NO: 41543 - DNA, 96 bp, Fusarium cuneirostrum
  misc_feature: 31
tatacgacggacgtcgctgtctttttctattttctctgtttgcggaagcacggttgagagggattcgagaccctttcttactcagctggagagctg

SEQ ID NO: 41544 - DNA, 96 bp, Fusarium cuneirostrum
  misc_feature: 31
tagtatatcactaaagaagccgacttaaattaaggctatttacttaataggggctctaatattaagttttattcctattctttagcgataggtata

SEQ ID NO: 41545 - DNA, 96 bp, Fusarium cuneirostrum
  misc_feature: 31
tataactaaatatataaccttatttttcatataaagtaaaagactattacgttaaataatagtataaaggaattagagtagcacgactttaattcc

SEQ ID NO: 41546 - DNA, 96 bp, Fusarium cuneirostrum
  misc_feature: 31
ctcgcatgaaatgttacagtcacagtctcagtccacaaaaagtgaggccatcacgacatccacattaggaaagatctaccactacaaatcaaacta

SEQ ID NO: 41547 - DNA, 96 bp, Fusarium cuneirostrum
  misc_feature: 31
ctgccgcgacctggcgggaggtttccacagctcaagggatataccaaggaggaaggaataacctgatccatcaccttagtcgttcatcagtcacta

SEQ ID NO: 41548 - DNA, 96 bp, Fusarium cuneirostrum
  misc_feature: 31
atattcctatataacccttaaacttacctttaaccttaaccttttaacctagctttaaccctaattcttaaatttactattaacccttaactccta

SEQ ID NO: 41549 - DNA, 96 bp, Fusarium cuneirostrum
  misc_feature: 31
tagcttcacatgtattatgggcgagcattaaataaagacggagcgcacataaactaaaaagggcacacatattagtgagctcccgcatttatatat

SEQ ID NO: 41550 - DNA, 96 bp, Fusarium cuneirostrum
  misc_feature: 31
gtcatcaccattacctattccggtaagtctcacaaagcatcgttggagttactcctccacacttgacccaactcaaacacagcatcatcaaatcta

SEQ ID NO: 41551 - DNA, 96 bp, Fusarium cuneirostrum
  misc_feature: 31
ggacggaggacgagtttaccgcaacaacgtgaggagacgaacagagtgagtttgtattctatccggaggaggagtgaacgagtgagcgatcatcta

SEQ ID NO: 41552 - DNA, 96 bp, Fusarium cuneirostrum
  misc_feature: 31
aactgttattgtagtggtaaaagagaaccacgagctagacggcgagtggtgagggtgagacagcagtcgaatagagcccagagggcgaacgatcta

SEQ ID NO: 41553 - DNA, 96 bp, Fusarium cuneirostrum
  misc_feature: 31
tagagacgacgacagacattgtgtatggtatccgggaacagggaggttcacggcataaaagttgaaaagtgttattttgcatagcgaaaggtgatg

SEQ ID NO: 41554 - DNA, 96 bp, Fusarium cuneirostrum
  misc_feature: 31
tagagacgaccaagtataatgttgtaggatatcacacgtgtggggtgtgatttagttgcctttcttagtagttgtgatagcttcatttatctttat

SEQ ID NO: 41555 - DNA, 96 bp, Fusarium cuneirostrum
  misc_feature: 31
ctcatccgctcgggactcatggatgaggaatacatttacagtcaccaacataaacattcacaatctgaaatcatgctcgccaagtgaaaaaaagta

SEQ ID NO: 41556 - DNA, 96 bp, Fusarium cuneirostrum
  misc_feature: 31
tactttgctcgccactgtttaatatggggcgaggcaaataaatacgttttaaatagactcgtttgacgagccccaattactattttatgcgagcag

SEQ ID NO: 41557 - DNA, 96 bp, Fusarium cuneirostrum
  misc_feature: 31
tactttagtagcaataatagttacaagatgtttactctgattttctattagtttgttcgtctctagcgcttggagaaggcaacatgatagctgtcc

SEQ ID NO: 41558 - DNA, 96 bp, Fusarium cuneirostrum
  misc_feature: 31
gaagagtggagtaagtaagcacgagaaggaggggaccgactgaagtgcgggtggacggaacgttatgaggaggaacgacgaataaggtgcagcgta

SEQ ID NO: 41559 - DNA, 96 bp, Fusarium cuneirostrum
  misc_feature: 31
tacctcctagctatattaaagattaataagatttataatatagtagtatatttagctttatatataagggtattttcttactaaagatactaaagt

SEQ ID NO: 41560 - DNA, 96 bp, Fusarium cuneirostrum
  misc_feature: 31
ggattcacagagcgcatctctgttgaattaaagtaacatcacatcgtctccctgtcggtcgactcgttctgcacctcgccctgacgggcttcggta

SEQ ID NO: 41561 - DNA, 96 bp, Fusarium cuneirostrum
  misc_feature: 31
aaagggccgcatggcccgatttgcgacactgtttggtgtcagacaacattcttgtttgtcttattttttggctgaacagcgtgagcttgccgtgta

SEQ ID NO: 41562 - DNA, 96 bp, Fusarium cuneirostrum
  misc_feature: 31
aacgtcgctacgtgttccttcgtcacactcactccgcacgtcgccctccgggctccgtaggattatacagttccgactcgggcctccggcggtgta

SEQ ID NO: 41563 - DNA, 96 bp, Fusarium cuneirostrum
  misc_feature: 31
gctcactgcgttcgctaacaatcagtacctgattcccgactccgtctcaggatttgactcaccaaatctcagaaacgaacacatacaaattttgta

SEQ ID NO: 41564 - DNA, 96 bp, Fusarium cuneirostrum
  misc_feature: 31
taatgatacttgtgatttgtatgtgaccttaaatgaaatgtgatatgaacgtagtcgtagtaagaagacatgggaatggcttcatccataaatgag

SEQ ID NO: 41565 - DNA, 96 bp, Fusarium cuneirostrum
  misc_feature: 31
taatgagcaaggtcgcaaggtcactgctcacgataacatcatcaattgaccaacagtcaatgcgcacatcgaaagatgataccgaagtgggtgtac

SEQ ID NO: 41566 - DNA, 96 bp, Fusarium cuneirostrum
  misc_feature: 31
taataatgagcaaggtcgcaaggtcactgctcacgataacatcatcaattgaccaacagtcaatgcgcacatcgaaagatgataccgaagtgggtg

SEQ ID NO: 41567 - DNA, 96 bp, Fusarium cuneirostrum
  misc_feature: 31
ggaaagtggtgcatatacttgcttggtgcacatgcttatcatgtacgttatagctaattattaatattaatagctttaagttaatttataatctta

SEQ ID NO: 41568 - DNA, 96 bp, Fusarium cuneirostrum
  misc_feature: 31
taacgcgagtgacccggaacggggcaaacgagcgtccataactttggtctataagaggtttttttccaaaacgcaccgcgttggttaaaactgggg

SEQ ID NO: 41569 - DNA, 96 bp, Fusarium cuneirostrum
  misc_feature: 31
taacgatttaatactacgagcaccatttttatttcgatggcgagctatgatgaatgattatggaatgtgaatgccttcccgcataaatgagtctgg

SEQ ID NO: 41570 - DNA, 96 bp, Fusarium cuneirostrum
  misc_feature: 31
ctacaattacaattacaattacaatcagtcacgatggctcgccattagggagggaaatggtgctcgacaagtttaaagaagtgtatttaaatgtta

SEQ ID NO: 41571 - DNA, 96 bp, Fusarium cuneirostrum
  misc_feature: 31
taaatgataatcgatgacgacgctaaaatgtacagggtgaactctatcgaagtcgactgatgtcatcgacagcagcgcatgattcgggatgactcg

SEQ ID NO: 41572 - DNA, 96 bp, Fusarium cuneirostrum
  misc_feature: 31
taaataaagacggagcgcacataaactaaaaagggcacacatattagtgagctcccgcatttatatatagcgagcatgttttaatctgatgtgaat

SEQ ID NO: 41573 - DNA, 96 bp, Fusarium cuneirostrum
  misc_feature: 31
taaaagggcttcattcaatgtcagccatcatactcgctccgcgatctgcccaacaaggcagggaaaccagtgctctctccggtcgcatcttcatgt

SEQ ID NO: 41574 - DNA, 96 bp, Fusarium cuneirostrum
  misc_feature: 31
cagacacaaatcattatcactcacccgttcgtgatcgctttcgctctatcattcttgcctaatcgtcaagtctcggcgctgcctcaatcaacaaac

SEQ ID NO: 41575 - DNA, 96 bp, Fusarium cuneirostrum
  misc_feature: 31
gtttgactgctgtcaattgaagtcatcaccatctctgtgtgatgtctgtaacgtcgctacgtgttccttcgtcacactcactccgcacgtcctccc

SEQ ID NO: 41576 - DNA, 96 bp, Fusarium cuneirostrum
  misc_feature: 31
agcagatcaagattttatccaacgctgcaattagcttgctgtttggtaatacatttcgtcggtgacgtttggtttacggcaaattgaaattgcaac

SEQ ID NO: 41577 - DNA, 96 bp, Fusarium cuneirostrum
  misc_feature: 31
gttcttcactcgagtatgactccattgtcaatccactccggcaccgtcgcatgcgctcctcccctccgtggactctacgataacaagtttacattc

SEQ ID NO: 41578 - DNA, 96 bp, Fusarium cuneirostrum
  misc_feature: 31
ataaaccgctgcgaaccactacgaaccgctataaaccgctgcgaaccactataaaccgctataaaccgctacgaaccgctataaactattgcgaac

SEQ ID NO: 41579 - DNA, 96 bp, Fusarium cuneirostrum
  misc_feature: 31
gttcgcaaaaagtcccaaaatccggtagattttgagtcttgcgatgtacctcgacttctgtctcggtgttgatggtcgaccccatcctggcgtctc

SEQ ID NO: 41580 - DNA, 96 bp, Fusarium cuneirostrum
  misc_feature: 31
gttcagtttgttgattgaggcagcgccgagacttgacgattaggcaagaatgatagagcgaaagcgatcacgaacgggtgagtgataatgatttgt

SEQ ID NO: 41581 - DNA, 96 bp, Fusarium cuneirostrum
  misc_feature: 31
gcgagcatgttttaatctgatgtgaataacttcaaaagtattttcccgaggccgaggacgtaggacgcaggctgagggattgacaatagactgaac

SEQ ID NO: 41582 - DNA, 96 bp, Fusarium cuneirostrum
  misc_feature: 31
aggtgaagacactcgtcgagggtgtggacgagtttggtgatgaatgggtcgatgacgatcttggagatttttagtgtagatagatgcaatgtgaac

SEQ ID NO: 41583 - DNA, 96 bp, Fusarium cuneirostrum
  misc_feature: 31
cacttcggtatcatctttcgatgtgcgcattgactgttggtcaattgatgatgttatcgtgagcagtgaccttgcgaccttgctcattattataac

SEQ ID NO: 41584 - DNA, 96 bp, Fusarium cuneirostrum
  misc_feature: 31
gttagtaaaggaatattcagagtaaaatgcctggctgcgtaccttgccaccatcaatagagatggtacccccattaatcgccttcccgcctccgtg

SEQ ID NO: 41585 - DNA, 96 bp, Fusarium cuneirostrum
  misc_feature: 31
gttactttaattcaacagagatgcgctctgtgaatcccctcacgtaaacatgaaatgtcactgtgtgtaagatgacccggagtgtgggtcatggtg

SEQ ID NO: 41586 - DNA, 96 bp, Fusarium cuneirostrum
  misc_feature: 31
gtctcaaaactggaacagtttttgtatggactcgattctggcatttggtgagccaaatcctgagaatgggccgagaaatcggtcacttctgttaac

SEQ ID NO: 41587 - DNA, 96 bp, Fusarium cuneirostrum
  misc_feature: 31
gtgtgcgagtgattgattaaattgtaatcgtagatgtgaatgtgaataacttcaaaagtattttcccgaggccgaggacgtaggacgcaggctgag

SEQ ID NO: 41588 - DNA, 96 bp, Fusarium cuneirostrum
  misc_feature: 31
ggaaaacggtcccgttacatagtcactactcaacaaccctttcgggtctctacaaaatcaaaacatttacatctgctgggctccctctcggcacac

SEQ ID NO: 41589 - DNA, 96 bp, Fusarium cuneirostrum
  misc_feature: 31
aatataagggttaaaggtagagttaaataagaaagataaataaaaaaaatataacgtacatgataagcgagtgggacactcaagcgagtgggacac

SEQ ID NO: 41590 - DNA, 96 bp, Fusarium cuneirostrum
  misc_feature: 31
gtgtcccactcacttgagtgtcccactcgcttatcatatacgttatcttcatttatatatactaataagcttatatattcggatttctatattgcg

SEQ ID NO: 41591 - DNA, 96 bp, Fusarium cuneirostrum
  misc_feature: 31
gtgtacgaggtgagtagatgagggagtgcggatgcgcgaccgacagaagtgtgtcgagggtcgagcagacccgagccagaaacgagctcaaaactg

SEQ ID NO: 41592 - DNA, 96 bp, Fusarium cuneirostrum
  misc_feature: 31
cctattaatctcttatagactaacgcgagtgacccggaacggggcaaacgagcgtccataactttggtctataagaggtttttttccaaaacgcac

SEQ ID NO: 41593 - DNA, 96 bp, Fusarium cuneirostrum
  misc_feature: 31
ccctcttgatcaaccttcgcatggctcaggtttctattacttcttcgatctcgtttcactccatctcttttcatgatctagtgaagttattcgcac

SEQ ID NO: 41594 - DNA, 96 bp, Fusarium cuneirostrum
  misc_feature: 31
gtgcacatgtgtccagacacaaatcattatcactcacccgttcgtgatcgctttcgctctatcattcttgcctaatcgtcaagtctcggcgctgcc

SEQ ID NO: 41595 - DNA, 96 bp, Fusarium cuneirostrum
  misc_feature: 31
gataatcgtttccgctccgctcttacagccctcgatctccgtttcttctccgcatcgagataaaccttcgacacctcttccatcgtcactccagac

SEQ ID NO: 41596 - DNA, 96 bp, Fusarium cuneirostrum
  misc_feature: 31
gtctcccactttcagtctccctcttcggtcgattagtatatatgtgtgcccgtctcgtgcacatgtgtccagacacaaatcattatcactcacccg

SEQ ID NO: 41597 - DNA, 96 bp, Fusarium cuneirostrum
  misc_feature: 31
ctgtgtgatgtctgtaacgtcgctacgtgttccttcgtcacactcactccgcacgtcctccctccggtcgtccgtactaaggatatagtcatagac

SEQ ID NO: 41598 - DNA, 96 bp, Fusarium cuneirostrum
  misc_feature: 31
gtcgcgggaagtctctatacttccttaacatttgtgaccaaattcccactccgttctcacgtttgctcacaccaaacgccagatcgcaacccatat

SEQ ID NO: 41599 - DNA, 96 bp, Fusarium cuneirostrum
  misc_feature: 31
agtcttctgtctttgtacactgagactgctgctgtatacgcagctgggttacctgaacgtgcgtaagtcagtgagaaggatgtcggacgacatgac

SEQ ID NO: 41600 - DNA, 96 bp, Fusarium cuneirostrum
  misc_feature: 31
gtcagcaagctgactaaaggcagactcagtccacacgttcgtccctcactgtcccgtgtcccgtagtccccccctataccaaggttaagaaacggc

SEQ ID NO: 41601 - DNA, 96 bp, Fusarium cuneirostrum
  misc_feature: 31
gtagtaacagtaatgttcactccgttcacgatagcagtcgcttcgctcctgtttgcttttagcataccgttcgttctcctcactcattctccgaat

SEQ ID NO: 41602 - DNA, 96 bp, Fusarium cuneirostrum
  misc_feature: 31
cctgattgggtctccgaccccaccaagtgcgtgtcattggatgacacttgttctcacaggagttgcggtccccgcagcatggacggaacgttctac

SEQ ID NO: 41603 - DNA, 96 bp, Fusarium cuneirostrum
  misc_feature: 31
ctcgttcctcggtgttcccccagcttccaatcaacgcacgcgtttgaaaggaaaccgcttatagaccaaagttatcagccctcgtttcgctggtac

SEQ ID NO: 41604 - DNA, 96 bp, Fusarium cuneirostrum
  misc_feature: 31
gtaattctttacacagttcttgcttgggcaatgaactcttcacttgagttcagtctattgtcaatccctcagcctgcgtcctacgtcctcggcctc

SEQ ID NO: 41605 - DNA, 96 bp, Fusarium cuneirostrum
  misc_feature: 31
gtaatgcagacatcgatatctagcgaggtgcgccatgtttcccggagcaagcgacatcgtcataatctgaacaaagcctgcagctaaaaagcaaag

SEQ ID NO: 41606 - DNA, 96 bp, Fusarium cuneirostrum
  misc_feature: 31
cccggatcgctacgctgcaccttattcgtcgttcctcctcataacgttccgtccacccgcacttcagtcggtcccctccttctcgtgcttacttac

SEQ ID NO: 41607 - DNA, 96 bp, Fusarium cuneirostrum
  misc_feature: 31
gaggagtataagacagcgtcttttcccccgagaggttgagtgagcaggcgaactctgacttgttttatttttttcgaggacggaggacgagtttac

SEQ ID NO: 41608 - DNA, 96 bp, Fusarium cuneirostrum
  misc_feature: 31
gtaaaagggcttcattcaatgtcagccatcatactcgctccgcgatctgcccaacaaggcagggaaaccagtgctctctccggtcgcatcttcatg

SEQ ID NO: 41609 - DNA, 96 bp, Fusarium cuneirostrum
  misc_feature: 31
ggtttttggagtgccataactttggtctataagaggttttttgacaaaagctgtgctttgggctcaagaacggggtgagtcacaagtggcgatggg

SEQ ID NO: 41610 - DNA, 96 bp, Fusarium cuneirostrum
  misc_feature: 31
ggttggggagcgggacgcgacccaggaccatgttcgagcgagggggagcaagagcgagcccgacttgaaatcccatttcaaaatttgtacaaaatt

SEQ ID NO: 41611 - DNA, 96 bp, Fusarium cuneirostrum
  misc_feature: 31
ggtggatttgacggagtctcaaaactggaacagtttttgtatggactcgattctggcatttggtgagccaaatcctgagaatgggccgagaaatcg

SEQ ID NO: 41612 - DNA, 96 bp, Fusarium cuneirostrum
  misc_feature: 31
ggtgcagaacgagtcgaccgacagggagacgatgtgatgttactttaattcaacagagatgcgctctgtgaatcccctcacgtaaacatgaaatgt

SEQ ID NO: 41613 - DNA, 96 bp, Fusarium cuneirostrum
  misc_feature: 31
aatgcggtttgaaagtgatattcctcagcttcgtcgactatataggccccggagatccttattgcagtaaggacgacttttcctttgtttgcgacc

SEQ ID NO: 41614 - DNA, 96 bp, Fusarium cuneirostrum
  misc_feature: 31
ggcgagactttacttaaacttaaataaaatggacgaggcccacgacttttttctacttggcgagcacttaatgatacttgtgatttgtatgtgacc

SEQ ID NO: 41615 - DNA, 96 bp, Fusarium cuneirostrum
  misc_feature: 31
caatctcaggatcgaactcatacaaaatttgtacaaattttgaaatggattctggctcgagtctgacccgactctcgacatcccccctcttccccc

SEQ ID NO: 41616 - DNA, 96 bp, Fusarium cuneirostrum
  misc_feature: 31
ggggcgaccgtaagacagaggggcgagattgtgtcgagcccgaatgtgaaatttttcgagattttggtgaggaacaagcaaaatcggattcaaatt

SEQ ID NO: 41617 - DNA, 96 bp, Fusarium cuneirostrum
  misc_feature: 31
ccaaatgccagaatcgagtccatacaaaaactgttccagttttgagactccgtcaaatccacctcgagcgctgctctcgccatgtaccctttcccc

SEQ ID NO: 41618 - DNA, 96 bp, Fusarium cuneirostrum
  misc_feature: 31
gggcttaataaattaggtcgattaacccgattaaccgggccggtagggcgcgccgagatagaaggtgctaagattagctatagcgctaaatagaag

SEQ ID NO: 41619 - DNA, 96 bp, Fusarium cuneirostrum
  misc_feature: 31
gggcgaagcgaggtgcaataactttggtgatataagcggtttttttacaaacgctctgcgttgggctgaaaaagacggggacaagcagcttgtctg

SEQ ID NO: 41620 - DNA, 96 bp, Fusarium cuneirostrum
  misc_feature: 31
caaaaagtgttccagtttcgagctcaaagtgaactcgaatctctcgtcgcccttcgggctcctgttcccctcccatcggtcccctcggtcgggccc

SEQ ID NO: 41621 - DNA, 96 bp, Fusarium cuneirostrum
  misc_feature: 31
gggattgacaatagactgaactcaagtgaagagttcattgcccaagcaagaactgtgtaaagaattacggaggcgtaagccgacgtgcagtacgag

SEQ ID NO: 41622 - DNA, 96 bp, Fusarium cuneirostrum
  misc_feature: 31
gggattcacagagcgcatctctgttgaattaaagtaacatcacatcgtctccctgtcggtcgactcgttctgcacctcgccctgacgggcttcggt

SEQ ID NO: 41623 - DNA, 96 bp, Fusarium cuneirostrum
  misc_feature: 31
gggagcgaaatgggagctcctaactttggtcaataagaggtttttttttccgagtagcttgctacggttaaaaaactgggggcgaacaacttgttg

SEQ ID NO: 41624 - DNA, 96 bp, Fusarium cuneirostrum
  misc_feature: 31
gggaaaagtgcgtcgcatacttggatgcgtcgcatgcttatcatgtacgttactcaaaagtcggtccattttacataatgtcccctggggcaaagc

SEQ ID NO: 41625 - DNA, 96 bp, Fusarium cuneirostrum
  misc_feature: 31
ggcttcggtagaactatacagttcctgcttcctctccgagggtcaggttcagttgtcaagccctccgctcctccttcgctacgctcgctcgtcggc

SEQ ID NO: 41626 - DNA, 96 bp, Fusarium cuneirostrum
  misc_feature: 31
ccttgcatggcttgccagtaacaaatgcttaccagcaacccatcgtttgtttgtttgtttgtttgtttgttttattcatagactgtcccagccgcc

SEQ ID NO: 41627 - DNA, 96 bp, Fusarium cuneirostrum
  misc_feature: 31
ggcggaggaggagggacgacggagccggattggcaagagtagtgcagctgcccgcagggccgagtccatgactgtataattctaccccgagcggag

SEQ ID NO: 41628 - DNA, 96 bp, Fusarium cuneirostrum
  misc_feature: 31
ggcgaagcgaggtgcaataactttggtctataagaggttttttgacaaaagctgtgctttgggctcaagaacggggtgagtcacaagtggcgatgg

SEQ ID NO: 41629 - DNA, 96 bp, Fusarium cuneirostrum
  misc_feature: 31
ggcctgaccgttaggttaagccgattaggccggggactaagacagaaaggcgccgagactaattataataccagactaaaggaagtagctaaatat

SEQ ID NO: 41630 - DNA, 96 bp, Fusarium cuneirostrum
  misc_feature: 31
aatagtcccgaatcccgaggacgaaggacgcagggtgagggattgacaagagtatgttggcaacccatgaagagttacgagcgcccgcggagggcc

SEQ ID NO: 41631 - DNA, 96 bp, Fusarium cuneirostrum
  misc_feature: 31
acctttcgctatgcaaaataacacttttcaacttttatgccgtgaacctccctgttcccggataccatacacaatgtctgtcgtcgtctctactcc

SEQ ID NO: 41632 - DNA, 96 bp, Fusarium cuneirostrum
  misc_feature: 31
ggaggaacgacgcagcctgaaggattgactagtagagtctcatctgcatgtgaagagttcatctccaagcagagactgtggtctcaataccgagcg

SEQ ID NO: 41633 - DNA, 96 bp, Fusarium cuneirostrum
  misc_feature: 31
gctttttagctgcaggctttgttcagattatgacgatgtcgcttgctccgggaaacatggcgcacctcgctagatatcgatgtctgcattacatgg

SEQ ID NO: 41634 - DNA, 96 bp, Fusarium cuneirostrum
  misc_feature: 31
ctactctctcggttgtgctcacatatcactgtctatactaactacaataccacttgaggtcatcaccattacctattccggtaagtctcacaaagc

SEQ ID NO: 41635 - DNA, 96 bp, Fusarium cuneirostrum
  misc_feature: 31
gctttgcaagagcaaacgaacccgtatatccatatcggaacgagaagtgacgagcaataggagtggagcgacgatcgattatttatttcgagtaag

SEQ ID NO: 41636 - DNA, 96 bp, Fusarium cuneirostrum
  misc_feature: 31
atatagttaagataatacatataactataatatatgcgataataataagtataaggataactatattacctatactatatcgggaaactaggaagc

SEQ ID NO: 41637 - DNA, 96 bp, Fusarium cuneirostrum
  misc_feature: 31
agtcgatcggcgtgaagcatgggtacattgacgagcaggccatcggtcctaaagtcctccacaagctgctgcatactctcatgcgttgccggaagc

SEQ ID NO: 41638 - DNA, 96 bp, Fusarium cuneirostrum
  misc_feature: 31
gaatggcattatttttaactatataggctatttaatatatattcactttagtatttattaagcgtctatattatactaactctctcttaagtaagc

SEQ ID NO: 41639 - DNA, 96 bp, Fusarium cuneirostrum
  misc_feature: 31
aatccacaatcttgagatttactgttgcaatttcaatttgccgtaaaccaaacgtcaccgacgaaatgtattaccaaacagcaagctaattgcagc

SEQ ID NO: 41640 - DNA, 96 bp, Fusarium cuneirostrum
  misc_feature: 31
gctccgcacgtcgccctacgggctccgtatttaaaaaaggaatggaagacctctctccgcgaggctcgtaactctttactcgagtttattagatag

SEQ ID NO: 41641 - DNA, 96 bp, Fusarium cuneirostrum
  misc_feature: 31
gctcacgataacatcatcaattgaccaacagtcaatgcgcacatcgaaagatgataccgaagtgggtgtacgaggtgagtagatgagggagtgcgg

SEQ ID NO: 41642 - DNA, 96 bp, Fusarium cuneirostrum
  misc_feature: 31
agagggaagagtttccctcctacatcatctgtctgagctcagagagcgagtcgatcttggattcctatgcaagtcgtctttcaattgcgctggcgc

SEQ ID NO: 41643 - DNA, 96 bp, Fusarium cuneirostrum
  misc_feature: 31
gcgattcgctctgtttgttgggaagtcagagaaagtattggggacaagcgcatttctccgttacctttctcactgaaacctccaccagactctatt

SEQ ID NO: 41644 - DNA, 96 bp, Fusarium cuneirostrum
  misc_feature: 31
gccgagacttgacgattaggcaagaatgatagagcgaaagcgatcacgaacgggtgagtgataatgatttgtgtctggacacatgtgcacgagacg

SEQ ID NO: 41645 - DNA, 96 bp, Fusarium cuneirostrum
  misc_feature: 31
aaggagtggacgtgtgggatgatggggcccactcatggtagtacgttatgtacggacataatcttacttgcgagggtgcgagacaagtataagggc

SEQ ID NO: 41646 - DNA, 96 bp, Fusarium cuneirostrum
  misc_feature: 31
aggaggaaatgggagtaagccaggtcatatctcaaatctaattaatatttggccctttcatagttgctcactgcgaatgtagagaagtttcagggc

SEQ ID NO: 41647 - DNA, 96 bp, Fusarium cuneirostrum
  misc_feature: 31
gcattgcgttcatccttcacttcatcttccagatatgtatagacactcacctgttcgtgtttccacggccgtggaataaacagaactgattccagt

SEQ ID NO: 41648 - DNA, 96 bp, Fusarium cuneirostrum
  misc_feature: 31
ctcccgtttcagcatagtcgggaaaacggtcccgttacatagtcactactcaacaaccctttcgggtctctacaaaatcaaaacatttacatctgc

SEQ ID NO: 41649 - DNA, 96 bp, Fusarium cuneirostrum
  misc_feature: 31
gcacatttaaatctgctaccaaggcacatttatgagaaaactacattccctaccaattattgtaaacgtgccttgaccaaggcacatttaatttat

SEQ ID NO: 41650 - DNA, 96 bp, Fusarium cuneirostrum
  misc_feature: 31
gcacacgaaagatgtagccgagtggggatcacgaggaggataagtgagagggagggtgtggcccgaccgtcatacccgagtcgagaggacgagggg

SEQ ID NO: 41651 - DNA, 96 bp, Fusarium cuneirostrum
  misc_feature: 31
gcaagactcaaaatctaccggattttgggactttttgcgaacgagcatcgagatttggtgggaacgaatctggcgttgtatgcgactggatctggg

SEQ ID NO: 41652 - DNA, 96 bp, Fusarium cuneirostrum
  misc_feature: 31
aggtggatttgacggagtctcaaaactggaacagtttttgtatggactcgattctggcatttggtgagccaaatcctgagaatgggccgagaaatc

SEQ ID NO: 41653 - DNA, 96 bp, Fusarium cuneirostrum
  misc_feature: 31
atgtgtccagacacaaatcattatcactcacccgttcgtgatcgctttcgctctatcattcttgcctaatcgtcaagtctcggcgctgcctcaatc

SEQ ID NO: 41654 - DNA, 96 bp, Fusarium cuneirostrum
  misc_feature: 31
gatggtgtgttcaaaatatgggtagaaaaagaaaacagcaaggatatatcgactttcgtgcaagctgagctctcttcgttctgtgaacggacatcg

SEQ ID NO: 41655 - DNA, 96 bp, Fusarium cuneirostrum
  misc_feature: 31
ctctctcggttgtgctcacatatcactgtctatactaactacaataccacttgaggtcatcaccattacctattccggtaagtctcacaaagcatc

SEQ ID NO: 41656 - DNA, 96 bp, Fusarium cuneirostrum
  misc_feature: 31
gatgatatgctattcttgagagcatattactgcgtcgcttatctgacgcatatcttttctacggtaagctatcttcggaaggaagaagtagtgaag

SEQ ID NO: 41657 - DNA, 96 bp, Fusarium cuneirostrum
  misc_feature: 31
cctcatctcattggcaccccgagccgagttagggctcaaggaattggccgtggagtcagagtgcgtaatcaaccaactacttccaatcgttggatc

SEQ ID NO: 41658 - DNA, 96 bp, Fusarium cuneirostrum
  misc_feature: 31
gatcaagatgaatgcgactgagctattcccggcagcagctttcttgcctctagagccttcaatcccacatgtgtacacaggacggcattctcgttt

SEQ ID NO: 41659 - DNA, 96 bp, Fusarium cuneirostrum
  misc_feature: 31
cttttatagataggtcttttagttttttaataatatatagccagtatagttatactcgtaattattattattatatactttatagttatatatatc

SEQ ID NO: 41660 - DNA, 96 bp, Fusarium cuneirostrum
  misc_feature: 31
gataactgaaccacatcttgtggtgttttagtaacgtcgctacgtgttccttcgtcacactcactccgcacgtcgccctccgggctccgtaggatt

SEQ ID NO: 41661 - DNA, 96 bp, Fusarium cuneirostrum
  misc_feature: 31
aggagtagagacgaccaagtataatgttgtaggatatcacacgtgtggggtgtgatttagttgcctttcttagtagttgtgatagcttcatttatc

SEQ ID NO: 41662 - DNA, 96 bp, Fusarium cuneirostrum
  misc_feature: 31
gataaatcccgaggacccgtcctctcatgcgcgacgcgccatcacaactcgactcttcgtctcggtccatatcgtcgccggtccccgtctcccact

SEQ ID NO: 41663 - DNA, 96 bp, Fusarium cuneirostrum
  misc_feature: 31
gagggattgacaatagactgaactcaagtgaagagttcattgcccaagcaagaactgtgtaaagaattacggaggcgtaagccgacgtgcagtacg

SEQ ID NO: 41664 - DNA, 96 bp, Fusarium cuneirostrum
  misc_feature: 31
attactatctaccacaaagaaaaagaagccatcgtcatctccgaattaggcaacctcgcggtatgctggtggattaccgctccgtccacacgcctc

SEQ ID NO: 41665 - DNA, 96 bp, Fusarium cuneirostrum
  misc_feature: 31
gaggatgcggttaaaatctgcttatttggtggagttggttattgaggagttggttattgaggagttggttattgaggagttggtgaggagttggtg

SEQ ID NO: 41666 - DNA, 96 bp, Fusarium cuneirostrum
  misc_feature: 31
gaggacgaaggacgcagggtgagggattgacaagagtatgttggcaacccatgaagagttacgagcgcccgcggagggccgagtctatgactatat

SEQ ID NO: 41667 - DNA, 96 bp, Fusarium cuneirostrum
  misc_feature: 31
ctgacgggcttcggtagaactatacagttcctgcttcctctccgagggtcaggttcagttgtcaagccctccgctcctccttcgctacgctcgctc

SEQ ID NO: 41668 - DNA, 96 bp, Fusarium cuneirostrum
  misc_feature: 31
gagcaagagcgagcccgacttgaaatcccatttcaaaatttgtacaaaatttgtatgtgttcgtttctgagatttggtgagtcaaatcctgagacg

SEQ ID NO: 41669 - DNA, 96 bp, Fusarium cuneirostrum
  misc_feature: 31
catccgaccttctctcactccgttcgttctcggtcttacatactggattccgctcgtccctcactctcatccaataataacgtcgctgacgctctc

SEQ ID NO: 41670 - DNA, 96 bp, Fusarium cuneirostrum
  misc_feature: 31
gagagaaataagctatatagtttaataatagaatttctaactcgtaaaccaaataatctagatttaattcctagtaacgtacatgataagcatatg

SEQ ID NO: 41671 - DNA, 96 bp, Fusarium cuneirostrum
  misc_feature: 31
gactggagagtcgaggggaagagggaggcccagagggccgaccagaatccagctcaaaactggaacagttttttggtgagttcgtttctgagattg

SEQ ID NO: 41672 - DNA, 96 bp, Fusarium cuneirostrum
  misc_feature: 31
ctcgttcctcggtctcgtactgcacgtcggcttacgcctccgtaattctttacacagttcttgcttgggcaatgaactcttcacttgagttcagtc

SEQ ID NO: 41673 - DNA, 96 bp, Fusarium cuneirostrum
  misc_feature: 31
gactacttgtgagcccttgacataacataagcagggcgaggcaaataataatttaaataaactcgtttgacgagccctggttattctttttattag

SEQ ID NO: 41674 - DNA, 96 bp, Fusarium cuneirostrum
  misc_feature: 31
cagttttaaccaacgcggtgcgttttggaaaaaaacctcttatagaccaaagttatggacgctcgtttgccccgttccgggtcactcgcgttagtc

SEQ ID NO: 41675 - DNA, 96 bp, Fusarium cuneirostrum
  misc_feature: 31
gacgctctatacgctcctgtgatccagatcttgccctttcttctgttagaaacgtgctatgattgccaggctggttattttctaatgccttacgct

SEQ ID NO: 41676 - DNA, 96 bp, Fusarium cuneirostrum
  misc_feature: 31
cacgggacagtgaagaatgaacgtgtgtacccaggagtaatcgtcttgagtcagcttgctgaccttgacgaccccagtcaatagacatccgaggtc

SEQ ID NO: 41677 - DNA, 96 bp, Fusarium cuneirostrum
  misc_feature: 31
gacataacttgattgattgagcgagccaccactttactggggcgagtcattccttttttaaataacattttaatgtgacgagcaccactacgcctt

SEQ ID NO: 41678 - DNA, 96 bp, Fusarium cuneirostrum
  misc_feature: 31
ctcgagtttattagatagtccatccctcgggctgcgtcctacgtcctcgccctccggactcgtttaaagatgaggttattcacaatcacataattc

SEQ ID NO: 41679 - DNA, 96 bp, Fusarium cuneirostrum
  misc_feature: 31
gaattaggtcacttctgttagtgccgaaggcacgaatgcgaccggagggagcattaatctcttatagacgctaacatgagcgaccgccagggagcg

SEQ ID NO: 41680 - DNA, 96 bp, Fusarium cuneirostrum
  misc_feature: 31
cagatgtcgaggggaaagggtacatggcgagagcagcgctcgaggtggatttgacggagtctcaaaactggaacagtttttgtatggactcgattc

SEQ ID NO: 41681 - DNA, 96 bp, Fusarium cuneirostrum
  misc_feature: 31
gaatccacaatcttgagatttactgttgcaatttcaatttgccgtaaaccaaacgtcaccgacgaaatgtattaccaaacagcaagctaattgcag

SEQ ID NO: 41682 - DNA, 96 bp, Fusarium cuneirostrum
  misc_feature: 31
gaatattcctttactaacaaggtgtcataggaaaggggagatcgccaatttaattttcattgaaatatgggaggagtagagacgacgacagacatt

SEQ ID NO: 41683 - DNA, 96 bp, Fusarium cuneirostrum
  misc_feature: 31
cgcatcgtctcgccctgctcgactacgctccgcacctccctccggtcggtagaggactacagttcctgcctcccctgcgggagcttatcattcttc

SEQ ID NO: 41684 - DNA, 96 bp, Fusarium cuneirostrum
  misc_feature: 31
gaaagtaaactctcgctatatacttatattagctaacttgaacttttatactaaatcttaagtaaaagaataacttatgatatattagcggcaggg

SEQ ID NO: 41685 - DNA, 96 bp, Fusarium cuneirostrum
  misc_feature: 31
aactcaatcccctcgccccgctcggttgacatgacaggatcatgtggtagacggccgaatgcacggcacgtaaacctcttcttcgccgcacacaag

SEQ ID NO: 41686 - DNA, 96 bp, Fusarium cuneirostrum
  misc_feature: 31
cttggttcagtttgttgattgaggcagcgccgagacttgacgattaggcaagaatgatagagcgaaagcgatcacgaacgggtgagtgataatgat

SEQ ID NO: 41687 - DNA, 96 bp, Fusarium cuneirostrum
  misc_feature: 31
aaatccttgattatgggattagtatatagaaggcttattacggaaggctacttcgagataaataaatagcgtattaacttctaattcattagtaag

SEQ ID NO: 41688 - DNA, 96 bp, Fusarium cuneirostrum
  misc_feature: 31
ccagaggatcaagtgcacgagtgcacgactaactttaactgtagcccggaacgaggagtgaggacgaatatcattcaagtgaatgaaatccgacag

SEQ ID NO: 41689 - DNA, 96 bp, Fusarium cuneirostrum
  misc_feature: 31
ctcttcccctcgtcctctcgactcgggtatgacggtcgggccacaccctccctctcacttatcctcctcgtgatccccactcggctacatctttcg

SEQ ID NO: 41690 - DNA, 96 bp, Fusarium cuneirostrum
  misc_feature: 31
ctcgtggttctcttttaccactacaataacagttcactcttctcgttcacaaatgcacaatcaattcaaatcacaagtcatacatcaaagtcatgt

SEQ ID NO: 41691 - DNA, 96 bp, Fusarium cuneirostrum
  misc_feature: 31
ctcgtggttcaccggttcccggttcctgtcggatttcattcacttgaatgatattcgtcctcactcctcgttccgggctacagttaaagttagtcg

SEQ ID NO: 41692 - DNA, 96 bp, Fusarium cuneirostrum
  misc_feature: 31
agacttttcccaatgtagatatcgtgataacctcattttgtgtaacctgtgacataacttgattgattgagcgagccaccactttactggggcgag

SEQ ID NO: 41693 - DNA, 96 bp, Fusarium cuneirostrum
  misc_feature: 31
atgcgcacatcgaaagatgataccgaagtgggtgtacgaggtgagtagatgagggagtgcggatgcgcgaccgacagaagtgtgtcgagggtcgag

SEQ ID NO: 41694 - DNA, 96 bp, Fusarium cuneirostrum
  misc_feature: 31
acactcgtcgagggtgtggacgagtttggtgatgaatgggtcgatgacgatcttggagatttttagtgtagatagatgcaatgtgaacttggtgag

SEQ ID NO: 41695 - DNA, 96 bp, Fusarium cuneirostrum
  misc_feature: 31
ctattcttggttttattcggaatgtccgggagacggacaggcgttattcgtacgagcgtgtgcgaggttttttggagaaagtaccagaggtggctt

SEQ ID NO: 41696 - DNA, 96 bp, Fusarium cuneirostrum
  misc_feature: 31
actccattccgcaccttccctcactccgttcggtcggtattcagaacatagttctgcttggggtatgggttcttcactcgaacccaactctactag

SEQ ID NO: 41697 - DNA, 96 bp, Fusarium cuneirostrum
  misc_feature: 31
cgactgtgacttagtgtgcgagtgattgattaaattgtaatcgtagatgtgaatgtgaataacttcaaaagtattttcccgaggccgaggacgtag

SEQ ID NO: 41698 - DNA, 96 bp, Fusarium cuneirostrum
  misc_feature: 31
cgttcttgagcccaaagcacagcttttgtcaaaaaacctcttatagaccaaagttattgcacctcgcttcgcccggtacccggtctcgctcgttag

SEQ ID NO: 41699 - DNA, 96 bp, Fusarium cuneirostrum
  misc_feature: 31
ctaaaccgatcctcattggcgatgctgaccggaagtgagtccatccgagcgcccccgcggtgtgatggccagaaatcgggccgtgttgccctcacg

SEQ ID NO: 41700 - DNA, 96 bp, Fusarium cuneirostrum
  misc_feature: 31
cgtttccccaaaaaaccgcttatagaccaaagttatggacgctcgtttgccccgttccgggtcactcgcgttagtctataagctggaaagctccct

SEQ ID NO: 41701 - DNA, 96 bp, Fusarium cuneirostrum
  misc_feature: 31
ataatatagagtaatctaatataattaaccgatataaactaagagtaattcttattaatattaatctcgccttattactatattagcttaatcccg

SEQ ID NO: 41702 - DNA, 96 bp, Fusarium cuneirostrum
  misc_feature: 31
cggcgaagccgtttcttaaccttggtatagggggggactacgggacacgggacagtgaagaatgaacgtgtgtacccaggagtaatcgtcttgagt

SEQ ID NO: 41703 - DNA, 96 bp, Fusarium cuneirostrum
  misc_feature: 31
acattcaaaggatcacaaccacatcccgtggtgttgaggttatactaacctcgcaacgactcacgtccgttcgtctctgctccgcacgtcgctccg

SEQ ID NO: 41704 - DNA, 96 bp, Fusarium cuneirostrum
  misc_feature: 31
aaaatatgggtagaaaaagaaaacagcaaggatatatcgactttcgtgcaagctgagctctcttcgttctgtgaacggacatcgtcgacgattccg

SEQ ID NO: 41705 - DNA, 96 bp, Fusarium cuneirostrum
  misc_feature: 31
atttatctttatgcgagcacttatctggaaccaacagctcgccgtaatgaatccaaaaagtaagcctaaaggcgagcgactgtgacttagtgtgcg

SEQ ID NO: 41706 - DNA, 96 bp, Fusarium cuneirostrum
  misc_feature: 31
cgaggcaaataaatacgttttaaatagactcgtttgacgagccccaattactattttatgcgagcagacatgactttgatgtatgacttgtgattt

SEQ ID NO: 41707 - DNA, 96 bp, Fusarium cuneirostrum
  misc_feature: 31
cgagcaagaatccatttcaaaatttgtacaaaatttgtatgtgttcgtttctgagatttggtgagtcaaatcctgagacggagtcgggaatcaggt

SEQ ID NO: 41708 - DNA, 96 bp, Fusarium cuneirostrum
  misc_feature: 31
atatattgagctgtcgtaggacgctttctggagttggggatccaacgacctttacttttttatttgaccggaggtcattgtatacgacggacgtcg

SEQ ID NO: 41709 - DNA, 96 bp, Fusarium cuneirostrum
  misc_feature: 31
cacgggggtccccttcccttccccctgtcttttgagcccaaaacgagttttgtcaaaaaaaccgcttatagaccaaagttatcagccctcgtttcg

SEQ ID NO: 41710 - DNA, 96 bp, Fusarium cuneirostrum
  misc_feature: 31
ccttcctctaggctaaggaagagattctaatattacttattaaggatagaaaccttaataataggtataatatccgacttaaagttataattactt

SEQ ID NO: 41711 - DNA, 96 bp, Fusarium cuneirostrum
  misc_feature: 31
cctgcgaacgacagtgagcattaatctcttacactaccgcgaggaaccagggtacctggtttttcgagcgggttataactttggtgatataagagg

SEQ ID NO: 41712 - DNA, 96 bp, Fusarium cuneirostrum
  misc_feature: 31
cctaaccctaattctaatctcttttttaattttattttccttatttattatatatatatattctttttttattattttctcttttttttctttttt

SEQ ID NO: 41713 - DNA, 96 bp, Fusarium cuneirostrum
  misc_feature: 31
ccgatcaacaattaaccatccaaaatccaagtctatttgtgagttaatattcaacaagagagccgaccggtgtgcgggcactgagctgctgaaatt

SEQ ID NO: 41714 - DNA, 96 bp, Fusarium cuneirostrum
  misc_feature: 31
ccgaataatcacgcctcggtcacccagtcatcgtcttaggacgagcgcagttttaaggcgcagcatctgccaataataaaacttagcgtcgagctg

SEQ ID NO: 41715 - DNA, 96 bp, Fusarium cuneirostrum
  misc_feature: 31
cccctcttttatttctcctcgtgcactcacttcagtcgcatcctgcattcatgtttgactgctgtcaattgaagtcatcaccatctctgtgtgatg

SEQ ID NO: 41716 - DNA, 96 bp, Fusarium cuneirostrum
  misc_feature: 31
aagttggatttgtcgaagcagtttaatgcggagcaattgtttcgtatggtgttggattgtgagcagacgggggcggctgcgcccatatcggagggg

SEQ ID NO: 41717 - DNA, 96 bp, Fusarium cuneirostrum
  misc_feature: 31
ccccctcttttatttctcctcgtgcactcacttcagtcgcatcctgcattcatgtttgactgctgtcaattgaagtcatcaccatctctgtgtgat

SEQ ID NO: 41718 - DNA, 96 bp, Fusarium cuneirostrum
  misc_feature: 31
acgctattcttggttttattcggaatgtccgggagacggacaggcgttattcgtacgagcgtgtgcgaggttttttggagaaagtaccagaggtgg

SEQ ID NO: 41719 - DNA, 96 bp, Fusarium cuneirostrum
  misc_feature: 31
catcttacacacagtgacatttcatgtttacgtgaggggattcacagagcgcatctctgttgaattaaagtaacatcacatcgtctccctgtcggt

SEQ ID NO: 41720 - DNA, 96 bp, Fusarium cuneirostrum
  misc_feature: 31
ataacgatttaatactacgagcaccatttttatttcgatggcgagctatgatgaatgattatggaatgtgaatgccttcccgcataaatgagtctg

SEQ ID NO: 41721 - DNA, 96 bp, Fusarium cuneirostrum
  misc_feature: 31
aaagtcttcagtcgtctcgttgttcactcggtcattgttcacattcctctggaatgatgatgaaaggaagagaaatctcactctgttcggtcagtg

SEQ ID NO: 41722 - DNA, 96 bp, Fusarium cuneirostrum
  misc_feature: 31
cacctccctccggtcggtagaggactacagttcctgcctcccctgcgggagcttatcattcttcatatgcagatgaggagactactgtcaatcctt

SEQ ID NO: 41723 - DNA, 96 bp, Fusarium cuneirostrum
  misc_feature: 31
cacccgttcgtgatcgctttcgctctatcattcttgcctaatcgtcaagtctcggcgctgcctcaatcaacaaactgaaccaagttcagatgacct

SEQ ID NO: 41724 - DNA, 96 bp, Fusarium cuneirostrum
  misc_feature: 31
caatcccagaactgaacccatacaaaagttgttcaaattttgatcgagtttgagctcgggtctgctcgaccctcgacacactctgcccctccccct

SEQ ID NO: 41725 - DNA, 96 bp, Fusarium cuneirostrum
  misc_feature: 31
aagctacgcttatatcactaccgaatgagacccggaacgggtcgaaatgaggtggcataactttggtgatataagcggattccgggattgaacttg

SEQ ID NO: 41726 - DNA, 96 bp, Fusarium cuneirostrum
  misc_feature: 31
caagggctttctcaattgtcaggatgtagccttaaatgtctctgctctacgacgaacttgtctcaccgcataaagctgtctggaacaagaatgcct

SEQ ID NO: 41727 - DNA, 96 bp, Fusarium cuneirostrum
  misc_feature: 31
caagaagcgctgcaactcgcgcggatgccactgccactgtttgcccggcttgccaacagtttcgcaccgttgttggaatgtgtcgacaaggtctgt

SEQ ID NO: 41728 - DNA, 96 bp, Fusarium cuneirostrum
  misc_feature: 31
agttgtctgatacagttgaaagagtgggtgaactgtgttttaagattgcggaggcgtgtggacggagcggtaatccaccagcataccgcgaggttg

SEQ ID NO: 41729 - DNA, 96 bp, Fusarium cuneirostrum
  misc_feature: 31
atttaagtaaaaggaataaagctagaaataaaataaaataataataaaagaaaaattattttagataggattattaagataataaaaaaaggcttt

SEQ ID NO: 41730 - DNA, 96 bp, Fusarium cuneirostrum
  misc_feature: 31
attgttcacattcctctggaatgatgatgaaaggaagagaaatctcactctgttcggtcagtgggcgatgccctacttatgtcctcagctctgctt

SEQ ID NO: 41731 - DNA, 96 bp, Fusarium cuneirostrum
  misc_feature: 31
attcaaaggatcacaaccacatcccgtggtgttgaggttatactaacctcgcaacgactcacgtccgttcgtctctgctccgcacgtcgctccgct

SEQ ID NO: 41732 - DNA, 96 bp, Fusarium cuneirostrum
  misc_feature: 31
attatttatattatttataaaagcctatttaatagctaaaaggggtctatttatgtaaaggactgaaggatatagactataaagtcctcgtaaggt

SEQ ID NO: 41733 - DNA, 96 bp, Fusarium cuneirostrum
  misc_feature: 31
atgcgagcccataaccttacgtggggcgagacaaataattattaaaaccacttttaatgtgtcgagaaccactactttttttcacttggcgagcat

SEQ ID NO: 41734 - DNA, 96 bp, Fusarium cuneirostrum
  misc_feature: 31
aatccctcaccctgcgtccttcgtcctcgggattcgggactattccagtgtggatgaaaatgaggccattcacaactccatctacagtaacatcat

SEQ ID NO: 41735 - DNA, 96 bp, Fusarium cuneirostrum
  misc_feature: 31
agaaacttaattcgatatattaaaaggcattattagcgatagaaataagattattataagtaagttctaaaagcttcttataaagataaaagagat

SEQ ID NO: 41736 - DNA, 96 bp, Fusarium cuneirostrum
  misc_feature: 31
ataatcgattaaggccgcgatagatatatccactaatactaagcacgatagtgcgttaagcgggattgatagatatgcacctaggcgatcccggat

SEQ ID NO: 41737 - DNA, 96 bp, Fusarium cuneirostrum
  misc_feature: 31
atcagctttctaggacctgcatacgttacttgacgatggaggagattgatcggtcaacaaactacgggcgtgataagctaacaatcgactttcctt

SEQ ID NO: 41738 - DNA, 96 bp, Fusarium cuneirostrum
  misc_feature: 31
actttaggtaagaagattaatattaagatagataaagatagtgaggtaattaaggaattaattaattaattcctaaaaagctaaaaaggtttttat

SEQ ID NO: 41739 - DNA, 96 bp, Fusarium cuneirostrum
  misc_feature: 31
agttaagcgctcgagttcaatgggccagccatagcgtcagcaaattgcgtagataagacgagaactttgtaaacatgtttgtcacgagctcgatct

SEQ ID NO: 41740 - DNA, 96 bp, Fusarium cuneirostrum
  misc_feature: 31
agcttatcgtaatttaataaagctatagctaaatatagctaaaataaaaatagatagaagattttaatatatcttactatcttccttataaggcct

SEQ ID NO: 41741 - DNA, 96 bp, Fusarium cuneirostrum
  misc_feature: 31
aggaaagtggtgcatatacttgcttggtgcacatgcttatcatgtacgttatagctaattattaatattaatagctttaagttaatttataatctt

SEQ ID NO: 41742 - DNA, 96 bp, Fusarium cuneirostrum
  misc_feature: 31
aaaaagaagccatcgtcatctccgaattaggcaacctcgcggtatgctggtggattaccgctccgtccacacgcctccgcaatcttaaaacacagt

SEQ ID NO: 41743 - DNA, 96 bp, Fusarium cuneirostrum
  misc_feature: 31
acgcagtcgaagacttgagactgtatttatttttttgtgtgagacggagtcgagtctgatttcgactggaatcagttctgtttattccacggccgt

SEQ ID NO: 41744 - DNA, 96 bp, Fusarium cuneirostrum
  misc_feature: 31
acgaagtcactttttcttggtggcggagacaccaagctacgcttatatcactaccgaatgagacccggaacgggtcgaaatgaggtggcataactt

SEQ ID NO: 41745 - DNA, 96 bp, Fusarium cuneirostrum
  misc_feature: 31
aagcaaaggggttatgcagttgccttgctattcgcgcgttcgttcatcaatctggcgacacacctcctggtctaacaaacctcctttctgagtttt

SEQ ID NO: 41746 - DNA, 96 bp, Fusarium cuneirostrum
  misc_feature: 31
aagaagaaagaagaaagaagaaagaagaaagaagaaagaagaaagaagaaagaagaaagaagaaagaagaaacctactgctcaagcggttgagttt

SEQ ID NO: 41747 - DNA, 96 bp, Fusarium cuneirostrum
  misc_feature: 31
aaagcaaaggggttatgcagttgccttgctattcgcgcgttcgttcatcaatctggcgacacacctcctggtctaacaaacctcctttctgagttt

SEQ ID NO: 41748 - DNA, 96 bp, Fusarium cuneirostrum
  misc_feature: 30
agaaaaaaaagggataaataagaatatataggagaaagtaaaaaaaaaggataaaaggagagagaaaaataaaaaagagaaagggaaaaaaaaaaa

SEQ ID NO: 41749 - DNA, 96 bp, Fusarium cuneirostrum
  misc_feature: 30
aaaagtgcgtcgcatacttggatgcgtcgcatgcttatcatgtacgttattatatattatttctttttttatacctaaggagttagttaataaaaa

SEQ ID NO: 41750 - DNA, 96 bp, Fusarium cuneirostrum
  misc_feature: 30
tttttacttcaggcgagcactgaatgactttgtgatacttgtgactgtaattgtaattgtgaatgccttcgtaaatgagtccgtgagccgagcgcg

SEQ ID NO: 41751 - DNA, 96 bp, Fusarium cuneirostrum
  misc_feature: 30
ttttctttctatacgtcaaggccgttaggttaatgactgcattcgcgcgtagataaaatggatttgcttctatatctgctgcctagctaccgtagt

SEQ ID NO: 41752 - DNA, 96 bp, Fusarium cuneirostrum
  misc_feature: 30
ttttacacttgaatgcgagcaggacttgtgattgtatttaattaaacctgagtccggcggaggaggagggacgacggagccggattgacaagagta

SEQ ID NO: 41753 - DNA, 96 bp, Fusarium cuneirostrum
  misc_feature: 30
tttgagagacacgcacttacttacgaacggaggtgagtaattgttgtctttcatattgccagaggcgattatcttttttttctttcttttcttttc

SEQ ID NO: 41754 - DNA, 96 bp, Fusarium cuneirostrum
  misc_feature: 30
cattgactagcaaaaaggctcgctaaaaaacgaaggtatcgcaacatccaaaacaggaaacaatgtagactaatctaagatacaaaacctccgaaa

SEQ ID NO: 41755 - DNA, 96 bp, Fusarium cuneirostrum
  misc_feature: 30
tttcggactgaaatacgctgggcgttttcggaggttttgtatcttagattagtctacattgtttcctgttttggatgttgcgataccttcgttttt

SEQ ID NO: 41756 - DNA, 96 bp, Fusarium cuneirostrum
  misc_feature: 30
atggggccgacccatttgcctgagttgctcacccaacgctcaccacctacttaggttaaagcagcgagcgctcaggacactgggcgagaagggaaa

SEQ ID NO: 41757 - DNA, 96 bp, Fusarium cuneirostrum
  misc_feature: 30
tttcactccatctcttttcatgatctagtgaagttattcgcacttcacctcttcacattatctagcaccacttcgacctcgttcctcggtctcgta

SEQ ID NO: 41758 - DNA, 96 bp, Fusarium cuneirostrum
  misc_feature: 30
aagagaggaaatattatacttattattccccatttttatagattttaaataggttataaaaagtattattttaagccttttttaagacttaataaa

SEQ ID NO: 41759 - DNA, 96 bp, Fusarium cuneirostrum
  misc_feature: 30
attcctatataacccttaaacttacctttaaccttaaccttttaacctagctttaaccctaattcttaaatttactattaacccttaactcctaaa

SEQ ID NO: 41760 - DNA, 96 bp, Fusarium cuneirostrum
  misc_feature: 30
cacattctcctagtctattagaatttaaattgtcaagatcgtcttattcactgctcagctaccgaactagaagcgtctatatcatctctcgctaaa

SEQ ID NO: 41761 - DNA, 96 bp, Fusarium cuneirostrum
  misc_feature: 30
cttcgttcccgtgcttagccactctccttcgttcgtccctcactctcgtcgtctatgacccacatctgattccactccgttccatcgatgtctaaa

SEQ ID NO: 41762 - DNA, 96 bp, Fusarium cuneirostrum
  misc_feature: 30
aaagtaggagggagcctgtggggcgaccgtaagacagaggggcgagattgtgtcgagcccgaatgtgaaatttttcgagattttggtgaggaacaa

SEQ ID NO: 41763 - DNA, 96 bp, Fusarium cuneirostrum
  misc_feature: 30
ttgttcacattcctctggaatgatgatgaaaggaagagaaatctcactctgttcggtcagtgggcgatgccctacttatgtcctcagctctgcttc

SEQ ID NO: 41764 - DNA, 96 bp, Fusarium cuneirostrum
  misc_feature: 30
ctcgcctaagttcgctgcgctcactaacaaatggtacccatttcccacctcgattctgggttccaacccatacaatctcagaaacgaactcaccaa

SEQ ID NO: 41765 - DNA, 96 bp, Fusarium cuneirostrum
  misc_feature: 30
ctcgcgatttcgcccgccattctcagtttcgttcacatacaaaaagtatgtcgatttgagtccaatttgaatccgattttgcttgttcctcaccaa

SEQ ID NO: 41766 - DNA, 96 bp, Fusarium cuneirostrum
  misc_feature: 30
ttcgttcctcagtggagccgtccatccgaccttctctcactccgttcgttctcggtcttacatactggattccgctcgtccctcactctcatccaa

SEQ ID NO: 41767 - DNA, 96 bp, Fusarium cuneirostrum
  misc_feature: 30
ttgctgctgaattgttggtaggatacggagctattcccttcttgaatatttctgagccaagacatccttaggtcagcaatcattttgtcgagcttc

SEQ ID NO: 41768 - DNA, 96 bp, Fusarium cuneirostrum
  misc_feature: 30
gtgtccagacacaaatcattatcactcacccgttcgtgatcgctttcgctctatcattcttgcctaatcgtcaagtctcggcgctgcctcaatcaa

SEQ ID NO: 41769 - DNA, 96 bp, Fusarium cuneirostrum
  misc_feature: 30
ctggagtgtatccatgcagatattgctggacctttcccggaagtgggagtagacgggggccagtactgggcctgcttcattgaagacttcactcaa

SEQ ID NO: 41770 - DNA, 96 bp, Fusarium cuneirostrum
  misc_feature: 30
ttgagagacacgcacttacttacgaacggaggtgagtaattgttgtctttcatattgccagaggcgattatcttttttttctttcttttcttttct

SEQ ID NO: 41771 - DNA, 96 bp, Fusarium cuneirostrum
  misc_feature: 30
aataataatatccttaagactatattatagtatctagagaaagtagcttaattagatatttattagcttttaatacttattaagatagaggaagaa

SEQ ID NO: 41772 - DNA, 96 bp, Fusarium cuneirostrum
  misc_feature: 30
cgggcttaataaattaggtcgattaacccgattaaccgggccggtagggcgcgccgagatagaaggtgctaagattagctatagcgctaaatagaa

SEQ ID NO: 41773 - DNA, 96 bp, Fusarium cuneirostrum
  misc_feature: 30
ttcggcactaacaatcgctacacgattcccacctcaatctcgcgatttcgcccgccattctcagtttcgttcacatacaaaaagtatgtcgatttg

SEQ ID NO: 41774 - DNA, 96 bp, Fusarium cuneirostrum
  misc_feature: 30
ggtttccgagcgtccctaactttggtctataagcggttttttggggaaacgaaggggaccccgacgccttcctaagagcttgctcaggttggcgaa

SEQ ID NO: 41775 - DNA, 96 bp, Fusarium cuneirostrum
  misc_feature: 30
tcctgagacggagtcgggaatcaggtactgattgttagcgaacgcagtgagcttccagcttatatcactagcacgagtgaccgcgggacgcgggaa

SEQ ID NO: 41776 - DNA, 96 bp, Fusarium cuneirostrum
  misc_feature: 30
ttcccctcgactctccagtctcgggttgatgtcggtcgggccacgccctcccttctactcttaccttcaccatgacccacactccgggtcatctta

SEQ ID NO: 41777 - DNA, 96 bp, Fusarium cuneirostrum
  misc_feature: 30
gtaaatagggagcctgaggcacgaaggcgaagagtgtaggatcatggaggagggacgacgcaatgatcggttgactaaggacgggaacgaatggaa

SEQ ID NO: 41778 - DNA, 96 bp, Fusarium cuneirostrum
  misc_feature: 30
aaataaaatggacgaggcccacgacttttttctacttggcgagcacttaatgatacttgtgatttgtatgtgaccttaaatgaaatgtgatatgaa

SEQ ID NO: 41779 - DNA, 96 bp, Fusarium cuneirostrum
  misc_feature: 30
ttcactccatctcttttcatgatctagtgaagttattcgcacttcacctcttcacattatctagcaccacttcgacctcgttcctcggtctcgtac

SEQ ID NO: 41780 - DNA, 96 bp, Fusarium cuneirostrum
  misc_feature: 30
ttattcttaacttagatttataaggatttcctccttatttatatattaacgtacatgataagcatgtgcaccaagcaagtatgtgcaccactttcc

SEQ ID NO: 41781 - DNA, 96 bp, Fusarium cuneirostrum
  misc_feature: 30
cattacgttagtagtaaagagaaaatttttataagttagagttacctaccgaaaatacttagtcattaaagctagccttaaggataagactaataa

SEQ ID NO: 41782 - DNA, 96 bp, Fusarium cuneirostrum
  misc_feature: 30
ttattaagaaatgtagcggaataatattattatataccttaataatagtattataccggatattagtattatactatatatatagactaatagcga

SEQ ID NO: 41783 - DNA, 96 bp, Fusarium cuneirostrum
  misc_feature: 30
gaacgacgcagccggaaggattgtcaaagtcttctcatctgccagggaagagttacttccccaagcaggaactgtgaaatagagaccgagccataa

SEQ ID NO: 41784 - DNA, 96 bp, Fusarium cuneirostrum
  misc_feature: 30
ttatatatagcgagcatgttttaatctgatgtgaataacttcaaaagtattttcccgaggccgaggacgtaggacgcaggctgagggattgacaat

SEQ ID NO: 41785 - DNA, 96 bp, Fusarium cuneirostrum
  misc_feature: 30
ttatagagggtctaaatcttaagataaagtagtatagaggtttatatataaagcgataatagttaatatataaatagctaatagaaaaataagacc

SEQ ID NO: 41786 - DNA, 96 bp, Fusarium cuneirostrum
  misc_feature: 30
ttatactcactataatattattaagtttatcctagctataaatataattatttatctaatattagctaatttctagaacctagtctttagggatct

SEQ ID NO: 41787 - DNA, 96 bp, Fusarium cuneirostrum
  misc_feature: 30
ttagatcgttcgccctctgggctctattcgactgctgtctcaccctcaccactcgccgtctagctcgtggttctcttttaccactacaataacagt

SEQ ID NO: 41788 - DNA, 96 bp, Fusarium cuneirostrum
  misc_feature: 30
ttagaaggtaagccgacacctccaagatagacgatatggtggcgattgctgaccttagtgtgtttactgatgtagtttgtaagtgaacgcctctaa

SEQ ID NO: 41789 - DNA, 96 bp, Fusarium cuneirostrum
  misc_feature: 30
ttagagctctaggagcgagagggtctgagttttcgaaggcgatggacgagagggagcgagacatggaattctgtgcggatgggcacaagtttgtag

SEQ ID NO: 41790 - DNA, 96 bp, Fusarium cuneirostrum
  misc_feature: 30
aaaaaaaggttagggttacgaaagggaattataatggtatttattatttagttatattctattatcgcgaattatctagatattttaggatagtaa

SEQ ID NO: 41791 - DNA, 96 bp, Fusarium cuneirostrum
  misc_feature: 30
taaatccttgattatgggattagtatatagaaggcttattacggaaggctacttcgagataaataaatagcgtattaacttctaattcattagtaa

SEQ ID NO: 41792 - DNA, 96 bp, Fusarium cuneirostrum
  misc_feature: 30
ttaatatctggtttttatttatatttatcttaatctctttttactaatatattatatccgcttcgcgatattataataagtttaattatttaaatc

SEQ ID NO: 41793 - DNA, 96 bp, Fusarium cuneirostrum
  misc_feature: 30
ttaagtaacttaaagaataaaatataatatctaagatataaggacgagggatatagagatataaataatcgctaaattatagttcttagattactt

SEQ ID NO: 41794 - DNA, 96 bp, Fusarium cuneirostrum
  misc_feature: 30
atttcgctattagtctatatatatagtataatactaatatccggtataatactattattaaggtatataataatattattccgctacatttcttaa

SEQ ID NO: 41795 - DNA, 96 bp, Fusarium cuneirostrum
  misc_feature: 30
taaaagccttcttttattatcttaataattctatctaaaatagcttttcttttattattattttattttatttctagctttactcctcttatttaa

SEQ ID NO: 41796 - DNA, 96 bp, Fusarium cuneirostrum
  misc_feature: 30
ttaaactataaggttatatagtttaagagtaatagtgagaataaggataaagataaagatataagagagtaaagataaaggtttatttaggattat

SEQ ID NO: 41797 - DNA, 96 bp, Fusarium cuneirostrum
  misc_feature: 30
taaagtaggagggagcctgtggggcgaccgtaagacagaggggcgagattgtgtcgagcccgaatgtgaaatttttcgagattttggtgaggaaca

SEQ ID NO: 41798 - DNA, 96 bp, Fusarium cuneirostrum
  misc_feature: 30
tgtgtgatgtctgtaacgtcgctacgtgttccttcgtcacactcactccgcacgtcctccctccggtcgtccgtactaaggatatagtcatagact

SEQ ID NO: 41799 - DNA, 96 bp, Fusarium cuneirostrum
  misc_feature: 30
tgtggtgttttagtaacgtcgctacgtgttccttcgtcacactcactccgcacgtcgccctccgggctccgtaggattatacagttccgactcggg

SEQ ID NO: 41800 - DNA, 96 bp, Fusarium cuneirostrum
  misc_feature: 30
caccctactgtaagctctaggtttttcagcctcgctccctacctacttagtactcgctctaaaatctacgtaattgaagtcatcatcacttccaca

SEQ ID NO: 41801 - DNA, 96 bp, Fusarium cuneirostrum
  misc_feature: 30
tgtgccactcaaagacgtttctgagggacccctcgccacaagtggctctcccccagtttccccaagcacctaaaggtgtcaagggttaaaaccgct

SEQ ID NO: 41802 - DNA, 96 bp, Fusarium cuneirostrum
  misc_feature: 30
gacccacactccgggtcatcttacacacagtgacatttcatgtttacgtgaggggattcacagagcgcatctctgttgaattaaagtaacatcaca

SEQ ID NO: 41803 - DNA, 96 bp, Fusarium cuneirostrum
  misc_feature: 30
tgtgaatgtaattgtttttataattaaacctaaacgtgagtcccggggaggaggagggacgacgacccgggattgtcaacttgagttacacctccg

SEQ ID NO: 41804 - DNA, 96 bp, Fusarium cuneirostrum
  misc_feature: 30
tgtgaacttggtgagatttgtagagttgcctgatgtggaagtgatgatgacttcaattacgtagattttagagcgagtactaagtaggtagggagc

SEQ ID NO: 41805 - DNA, 96 bp, Fusarium cuneirostrum
  misc_feature: 30
ctttattcaagccgtaggatgacgctataactactaaacaatattaaaacagacctgccgatatatcatcttgtttttagcacgctcagtgcgaca

SEQ ID NO: 41806 - DNA, 96 bp, Fusarium cuneirostrum
  misc_feature: 30
taatataagggttaaaggtagagttaaataagaaagataaataaaaaaaatataacgtacatgataagcgagtgggacactcaagcgagtgggaca

SEQ ID NO: 41807 - DNA, 96 bp, Fusarium cuneirostrum
  misc_feature: 30
tgtcagcaagctgactaaaggcagactcagtccacacgttcgtccctcactgtcccgtgtcccgtagtccccccctataccaaggttaagaaacgg

SEQ ID NO: 41808 - DNA, 96 bp, Fusarium cuneirostrum
  misc_feature: 30
ggcgctctgcgcccatgtgcatctccgatgctctcctgtcctcctccgtcgtccttcctcgcactcgaaccatctcgttcatcactccgtgataca

SEQ ID NO: 41809 - DNA, 96 bp, Fusarium cuneirostrum
  misc_feature: 30
ctgaaccacatcttgtggtgttttagtaacgtcgctacgtgttccttcgtcacactcactccgcacgtcgccctccgggctccgtaggattataca

SEQ ID NO: 41810 - DNA, 96 bp, Fusarium cuneirostrum
  misc_feature: 30
ggaatcaacccatcactcatgggttatagtaacctcgcatcgtctcgccctgctcgactacgctccgcacctccctccggtcggtagaggactaca

SEQ ID NO: 41811 - DNA, 96 bp, Fusarium cuneirostrum
  misc_feature: 30
aacaatgtagactaatctaagatacaaaacctccgaaaacgcccagcgtatttcagtccgaaaatagttccgcccccttggctccatcgagttaca

SEQ ID NO: 41812 - DNA, 96 bp, Fusarium cuneirostrum
  misc_feature: 30
cccctccgggggttatctacgattgccaatccctcagtcttccttcgctacgctcactcatccgctcgggactcatggatgaggaatacatttaca

SEQ ID NO: 41813 - DNA, 96 bp, Fusarium cuneirostrum
  misc_feature: 30
tggtgtaactctcaccactcctgttccattcacattctacgtcacaattccatctaacactacaattacaattacaattacaatcagtcacgatgg

SEQ ID NO: 41814 - DNA, 96 bp, Fusarium cuneirostrum
  misc_feature: 30
tggtatcctgcgagaggtgatcgagtcagggttgcgggagcgttatggtaagagggaggaggagtagagacgaccaagtataatgttgtaggatat

SEQ ID NO: 41815 - DNA, 96 bp, Fusarium cuneirostrum
  misc_feature: 30
tgggattttctgcgtctggagtgacgatggaagaggtgtcgaaggtttatctcgatgcggagaagaaacggagatcgagggctgtaagagcggagc

SEQ ID NO: 41816 - DNA, 96 bp, Fusarium cuneirostrum
  misc_feature: 30
tggatttgacggagtctcaaaactggaacagtttttgtatggactcgattctggcatttggtgagccaaatcctgagaatgggccgagaaatcggt

SEQ ID NO: 41817 - DNA, 96 bp, Fusarium cuneirostrum
  misc_feature: 30
tgctgaaacgggagttggtgatgacttcacttctgccgactccacatactttgctcgccactgtttaatatggggcgaggcaaataaatacgtttt

SEQ ID NO: 41818 - DNA, 96 bp, Fusarium cuneirostrum
  misc_feature: 30
tgctcacatatcactgtctatactaactacaataccacttgaggtcatcaccattacctattccggtaagtctcacaaagcatcgttggagttact

SEQ ID NO: 41819 - DNA, 96 bp, Fusarium cuneirostrum
  misc_feature: 30
cgacctggaatcagagtgagaatctggtacagattgttagcgaccgaagggagctttccagcttatagactaacgcgagtgacccggaacggggca

SEQ ID NO: 41820 - DNA, 96 bp, Fusarium cuneirostrum
  misc_feature: 30
tgcaatccagtccaacgagtccgcagatggtgacgccacaacagacgacgccgatgccgccgtctgagctccctgcagaacatcacggcaacgtac

SEQ ID NO: 41821 - DNA, 96 bp, Fusarium cuneirostrum
  misc_feature: 30
tgattttattaggggtttaaggcttcttaataataataaaaatctaatttaaagttaaaataaaagtaattaaatataatagggaaattttacaga

SEQ ID NO: 41822 - DNA, 96 bp, Fusarium cuneirostrum
  misc_feature: 30
tgatgaggctctgcgagggcaagtgttggttacgcagaactggggcgtctctttgttgccaaggcacaagtaattagcaattggattgagtttgag

SEQ ID NO: 41823 - DNA, 96 bp, Fusarium cuneirostrum
  misc_feature: 30
tgatgacttcacttctgccgactccacatactttgctcgccactgtttaatatggggcgaggcaaataaatacgttttaaatagactcgtttgacg

SEQ ID NO: 41824 - DNA, 96 bp, Fusarium cuneirostrum
  misc_feature: 30
ccattagtttaggcctgagccagggaacaccatcaactcgttagagcggcttttaggagatcggaagagcacacgtctgaactccagtcacgatca

SEQ ID NO: 41825 - DNA, 96 bp, Fusarium cuneirostrum
  misc_feature: 30
tgagtttaggcgtttgcctaacaaagtgcaggaagcacttgaatgtccgatggagtcggatgatatgctattcttgagagcatattactgcgtcgc

SEQ ID NO: 41826 - DNA, 96 bp, Fusarium cuneirostrum
  misc_feature: 30
tgagtagtaacggagtaactgtacatcgcaagactcaaaatctaccggattttgggacttttcagaaactggcacagttttaatatgggttgcgat

SEQ ID NO: 41827 - DNA, 96 bp, Fusarium cuneirostrum
  misc_feature: 30
acttttaatgtgtcgagaaccactactttttttcacttggcgagcatgatttcagattgtgaatgtttatgttggtgactgtaaatgtattcctca

SEQ ID NO: 41828 - DNA, 96 bp, Fusarium cuneirostrum
  misc_feature: 30
cagcctgcgtcctacgtcctcggcctcgggaaaatacttttgaagttattcacatcagattaaaacatgctcgctatatataaatgcgggagctca

SEQ ID NO: 41829 - DNA, 96 bp, Fusarium cuneirostrum
  misc_feature: 30
gcactgaacgttgatcaagctcaaatactcttcgcctcattcgatgagtggtttggcgaaaagaatctggaaacgatagcattgactacttgctca

SEQ ID NO: 41830 - DNA, 96 bp, Fusarium cuneirostrum
  misc_feature: 30
tgactgattgtaattgtaattgtaattgtagtgttagatggaattgtgacgtagaatgtgaatggaacaggagtggtgagagttacaccacttgag

SEQ ID NO: 41831 - DNA, 96 bp, Fusarium cuneirostrum
  misc_feature: 30
tgactccacattcgtcgcatcccactctcgtgtttgactactgtcaattgaggccatcacaaactgtgattacaacgcatcttgcgtgagttatag

SEQ ID NO: 41832 - DNA, 96 bp, Fusarium cuneirostrum
  misc_feature: 30
tgacaccagcagagcgacacaaagtagcaagagatatcgcgagaattcccggaatcatcaaagaccagcttgcactagaagggtttcagtttcctc

SEQ ID NO: 41833 - DNA, 96 bp, Fusarium cuneirostrum
  misc_feature: 30
tgaagagggggagggtgacccgaccccgatgtgtgaccgagacagatgtcgaggggaaagggtacatggcgagagcagcgctcgaggtggatttga

SEQ ID NO: 41834 - DNA, 96 bp, Fusarium cuneirostrum
  misc_feature: 30
tgaaaaacctagagcttacagtagggtgagctcccgcacttgtgttacgcgagcatatataaagtagatggtgataacctcaaaagagtccacgag

SEQ ID NO: 41835 - DNA, 96 bp, Fusarium cuneirostrum
  misc_feature: 30
acatctctttctgaaaagaagaaagaagaaagaagaaagaagaaagaagaaagaagaaagaagaaagaagaaagaagaaagaagaaagaagaaaga

SEQ ID NO: 41836 - DNA, 96 bp, Fusarium cuneirostrum
  misc_feature: 30
tcttcccctcgtcctctcgactcgggtatgacggtcgggccacaccctccctctcacttatcctcctcgtgatccccactcggctacatctttcgt

SEQ ID NO: 41837 - DNA, 96 bp, Fusarium cuneirostrum
  misc_feature: 30
tctgcgtttcccgcagatggctcatttgccacggtaccgcgttcttgacacgttccgatcaacaattaaccatccaaaatccaagtctatttgtga

SEQ ID NO: 41838 - DNA, 96 bp, Fusarium cuneirostrum
  misc_feature: 30
tctctgtgtgatgtctgtaacgtcgctacgtgttccttcgtcacactcactccgcacgtcctccctccggtcgtccgtactaaggatatagtcata

SEQ ID NO: 41839 - DNA, 96 bp, Fusarium cuneirostrum
  misc_feature: 30
atatgctattcttgagagcatattactgcgtcgcttatctgacgcatatcttttctacggtaagctatcttcggaaggaagaagtagtgaaggaga

SEQ ID NO: 41840 - DNA, 96 bp, Fusarium cuneirostrum
  misc_feature: 30
ctcagagagcgagtcgatcttggattcctatgcaagtcgtctttcaattgcgctggcgcgcgactaggaacagagtgacggtatttcaatcggaga

SEQ ID NO: 41841 - DNA, 96 bp, Fusarium cuneirostrum
  misc_feature: 30
aacaccgcttctgagtctcgtttatataccctgttatctctagctagtagggtctactggaatctgcttaattaaagccatttagaaagttggaga

SEQ ID NO: 41842 - DNA, 96 bp, Fusarium cuneirostrum
  misc_feature: 30
tctcactctgattccaggtcgttgcccatacaatctcagaaatcttcccatacaaaatttgtacaaattttgtatgggaagatttctgagattgta

SEQ ID NO: 41843 - DNA, 96 bp, Fusarium cuneirostrum
  misc_feature: 30
gttgaggttctagtaacctcgtatcgtgatcgctccgctctcactctactccgcacgtcgccctacgggctccgtaattaaaaacacagtcataga

SEQ ID NO: 41844 - DNA, 96 bp, Fusarium cuneirostrum
  misc_feature: 30
gacgaaccaatccgctacgcagtaaggttccgtccatatgcagaggtgcccggaagcagagctgaggacataagtagggcatcgcccactgaccga

SEQ ID NO: 41845 - DNA, 96 bp, Fusarium cuneirostrum
  misc_feature: 30
catactttatttaatcgagcgagctgtgcatatgtgacattattattattttgaatcgtagtcgtgatcatgtacccaagatagtcctgagcccga

SEQ ID NO: 41846 - DNA, 96 bp, Fusarium cuneirostrum
  misc_feature: 30
cacatggaatgtgggcgacgaggacggagagtccgagtggggaggccgaaggccgaccggggaaagtgtgtcgagagcgagggggagcccgagcga

SEQ ID NO: 41847 - DNA, 96 bp, Fusarium cuneirostrum
  misc_feature: 30
tcgctcactccttcgctcttacttacatccgacaacaaagattgtctctggcgctctgcgcccatgtgcatctccgatgctctcctgtcctcctcc

SEQ ID NO: 41848 - DNA, 96 bp, Fusarium cuneirostrum
  misc_feature: 30
taacatcatcaattgaccaacagtcaatgcgcacatcgaaagatgataccgaagtgggtgtacgaggtgagtagatgagggagtgcggatgcgcga

SEQ ID NO: 41849 - DNA, 96 bp, Fusarium cuneirostrum
  misc_feature: 30
tcgcatgaaatgttacagtcacagtctcagtccacaaaaagtgaggccatcacgacatccacattaggaaagatctaccactacaaatcaaactac

SEQ ID NO: 41850 - DNA, 96 bp, Fusarium cuneirostrum
  misc_feature: 30
tcgcagagcctcatcaaacagcgcgttaccatctctctccgctccatctctctcaggataagcgcgagtaggtagtcaagttcaatatgcaagtcc

SEQ ID NO: 41851 - DNA, 96 bp, Fusarium cuneirostrum
  misc_feature: 30
tcgagtccatacaaaaactgttccagttttgagactccgtcaaatccacctcgagcgctgctctcgccatgtaccctttcccctcgacatctgtct

SEQ ID NO: 41852 - DNA, 96 bp, Fusarium cuneirostrum
  misc_feature: 30
tcgagggtgtggacgagtttggtgatgaatgggtcgatgacgatcttggagatttttagtgtagatagatgcaatgtgaacttggtgagatttgta

SEQ ID NO: 41853 - DNA, 96 bp, Fusarium cuneirostrum
  misc_feature: 30
tcgacagctgccaagtcaagccctgtcgacaacggagataatatctctccacaagttcgtagcgaccacaatcgctacaaatagaaaggacaagat

SEQ ID NO: 41854 - DNA, 96 bp, Fusarium cuneirostrum
  misc_feature: 30
tcgaagaactaccatgatgcgttaaaagtctgccgccacttaacactaaccctatagttatttctttctgaaatcagtagaattcagacaaaaact

SEQ ID NO: 41855 - DNA, 96 bp, Fusarium cuneirostrum
  misc_feature: 30
tcgaaccatctcgttcatcactccgtgatacaaaagaataaaccacgttcgcccgtctcactaaatctccgattgaaataccgtcactctgttcct

SEQ ID NO: 41856 - DNA, 96 bp, Fusarium cuneirostrum
  misc_feature: 30
ctcgctccgcgatctgcccaacaaggcagggaaaccagtgctctctccggtcgcatcttcatgtcttccgacaagactaaaacaaaaccaaaagga

SEQ ID NO: 41857 - DNA, 96 bp, Fusarium cuneirostrum
  misc_feature: 30
tcctgtcccctcccctaccggtccgggtccacatacgtcctcgtgccctgcatctcggctcattccatttcattcatgtgcgacgaagccatcgtc

SEQ ID NO: 41858 - DNA, 96 bp, Fusarium cuneirostrum
  misc_feature: 30
caattgcgctggcgcgcgactaggaacagagtgacggtatttcaatcggagatttagtgagacgggcgaacgtggtttattcttttgtatcacgga

SEQ ID NO: 41859 - DNA, 96 bp, Fusarium cuneirostrum
  misc_feature: 30
atcaggcatagccactcagacgagggacgagtatgaagtggagtaagtaagaccgggaacgaagggactgagtggaggtcggttttgttggacgga

SEQ ID NO: 41860 - DNA, 96 bp, Fusarium cuneirostrum
  misc_feature: 30
tccgaataatcacgcctcggtcacccagtcatcgtcttaggacgagcgcagttttaaggcgcagcatctgccaataataaaacttagcgtcgagct

SEQ ID NO: 41861 - DNA, 96 bp, Fusarium cuneirostrum
  misc_feature: 30
aagtgaaagtgaaagtgaaagtgaaagtgaaagtgaaagtgaaagtgaaagtgaaagtgaaagtgaaagtgaaagtgaaagtgaaagggaaaggga

SEQ ID NO: 41862 - DNA, 96 bp, Fusarium cuneirostrum
  misc_feature: 30
atcctgagacggagtcgggaatcaggtactgattgttagcgaacgcagtgagcttccagcttatatcactagcacgagtgaccgcgggacgcggga

SEQ ID NO: 41863 - DNA, 96 bp, Fusarium cuneirostrum
  misc_feature: 30
gtaaatgtattcctcatccatgagtcccgagcggatgagtgagcgtagcgaaggaagactgagggattggcaatcgtagataacccccggagggga

SEQ ID NO: 41864 - DNA, 96 bp, Fusarium cuneirostrum
  misc_feature: 30
ggaaggctcacgggagagtccccacgtcgctgtgctcctgtccccgttcaatttttccaagcccagcatgctgggcttggaaaaattgaacgggga

SEQ ID NO: 41865 - DNA, 96 bp, Fusarium cuneirostrum
  misc_feature: 30
tccattcacattctacgtcacaattccatctaacactacaattacaattacaattacaatcagtcacgatggctcgccattagggagggaaatggt

SEQ ID NO: 41866 - DNA, 96 bp, Fusarium cuneirostrum
  misc_feature: 30
tccatgatcctacactcttcgccttcgtgcctcaggctccctatttactgggaaggcaatggtgctgcgcacctaaagcctgactcagtccacacg

SEQ ID NO: 41867 - DNA, 96 bp, Fusarium cuneirostrum
  misc_feature: 30
acgagaaggaggggaccgactgaagtgcgggtggacggaacgttatgaggaggaacgacgaataaggtgcagcgtagcgatccgggcataagtgga

SEQ ID NO: 41868 - DNA, 96 bp, Fusarium cuneirostrum
  misc_feature: 30
tcatttcccagaaaccgcttatatcaccaaagttatacagccctcgttcccccattctggggtcactcgtgctagtgatataagagtagattacgc

SEQ ID NO: 41869 - DNA, 96 bp, Fusarium cuneirostrum
  misc_feature: 30
tcattcttgctctcgcaatgcatttcatgtttacgtgaggggattcacagagcgcatctctgttgaattaaagtaacatcacatcgtctccctgtc

SEQ ID NO: 41870 - DNA, 96 bp, Fusarium cuneirostrum
  misc_feature: 30
tcatcaccattacctattccggtaagtctcacaaagcatcgttggagttactcctccacacttgacccaactcaaacacagcatcatcaaatctac

SEQ ID NO: 41871 - DNA, 96 bp, Fusarium cuneirostrum
  misc_feature: 30
taatatggggcgaggcaaataaatacgttttaaatagactcgtttgacgagccccaattactattttatgcgagcagacatgactttgatgtatga

SEQ ID NO: 41872 - DNA, 96 bp, Fusarium cuneirostrum
  misc_feature: 30
aaaaagtgaacactgactgaagacggatgtcgagattgaaccacgaacgtggaagacgaacagtgtggatgtgagtcttctgtctttgtacactga

SEQ ID NO: 41873 - DNA, 96 bp, Fusarium cuneirostrum
  misc_feature: 30
tcaggcatagccactcagacgagggacgagtatgaagtggagtaagtaagaccgggaacgaagggactgagtggaggtcggttttgttggacggac

SEQ ID NO: 41874 - DNA, 96 bp, Fusarium cuneirostrum
  misc_feature: 30
tcagcctgcgtcctacgtcctcggcctcgggaaaatacttttgaagttattcacattcacatctacgattacaatttaatcaatcactcgcacact

SEQ ID NO: 41875 - DNA, 96 bp, Fusarium cuneirostrum
  misc_feature: 30
atccctcagtcttccttcgctacgctcactcatccgctcgggactcatggatgaggaatacatttacagtcaccaacataaacattcacaatctga

SEQ ID NO: 41876 - DNA, 96 bp, Fusarium cuneirostrum
  misc_feature: 30
tcacgataacatcatcaattgaccaacagtcaatgcgcacatcgaaagatgataccgaagtgggtgtacgaggtgagtagatgagggagtgcggat

SEQ ID NO: 41877 - DNA, 96 bp, Fusarium cuneirostrum
  misc_feature: 30
tcaccctactgtaagctctaggtttttcagcctcgctccctacctacttagtactcgctctaaaatctacgtaattgaagtcatcatcacttccac

SEQ ID NO: 41878 - DNA, 96 bp, Fusarium cuneirostrum
  misc_feature: 30
tatgcaatccaaatatcgacttccactatttcccttctcgcccagtgtcctgagcgctcgctgctttaacctaagtaggtggtgagcgttgggtga

SEQ ID NO: 41879 - DNA, 96 bp, Fusarium cuneirostrum
  misc_feature: 30
gacactcgtcgagggtgtggacgagtttggtgatgaatgggtcgatgacgatcttggagatttttagtgtagatagatgcaatgtgaacttggtga

SEQ ID NO: 41880 - DNA, 96 bp, Fusarium cuneirostrum
  misc_feature: 30
tcaatccccaaatcctcttatatcaccaaagttatacagccctcgttcccccattctggggtcactcgtgctagtgatataagctaggttaggctc

SEQ ID NO: 41881 - DNA, 96 bp, Fusarium cuneirostrum
  misc_feature: 30
acaaatgagagaggtacgaacgttccgtccacaatctcataccccgcagacagagtcgaggagtataagacagcgtcttttcccccgagaggttga

SEQ ID NO: 41882 - DNA, 96 bp, Fusarium cuneirostrum
  misc_feature: 30
tatttttaataaagatttaaataaggtattttatttattaaaagatatattattctaataatagggaatataatataatattacgcggaaatatat

SEQ ID NO: 41883 - DNA, 96 bp, Fusarium cuneirostrum
  misc_feature: 30
aattattaattaataatcttaataaagaattaaagttaattataaaggaagaataagaattaaataataaaataagaagattaggtctttaaaata

SEQ ID NO: 41884 - DNA, 96 bp, Fusarium cuneirostrum
  misc_feature: 30
tattatagtatatataagatagagaggttagaggaggtatattataaggtagatatatatctatgaagggggatagatatatagaagagaataaag

SEQ ID NO: 41885 - DNA, 96 bp, Fusarium cuneirostrum
  misc_feature: 30
tattaattatagcggaagggtaattaagattaataattaataattctcgtggaagaaattataaagcctaagaattaataattagaaggttaatac

SEQ ID NO: 41886 - DNA, 96 bp, Fusarium cuneirostrum
  misc_feature: 30
aaaagggttaagagaggagagaaataaagaaaattaaagaagaaagaataattatagaagaaatagaagaaatataataaggagaaagaaaagata

SEQ ID NO: 41887 - DNA, 96 bp, Fusarium cuneirostrum
  misc_feature: 30
aaaaggtaaatatcttctatagccttataagctagcctaatattaattatagtatctatatatttattatcgatattaataataataggtaagata

SEQ ID NO: 41888 - DNA, 96 bp, Fusarium cuneirostrum
  misc_feature: 30
gaaacttaattcgatatattaaaaggcattattagcgatagaaataagattattataagtaagttctaaaagcttcttataaagataaaagagata

SEQ ID NO: 41889 - DNA, 96 bp, Fusarium cuneirostrum
  misc_feature: 30
gatcagcctgtggataggagagttcgtttccggaaggtattggaagagattgagtcggcgtagtagtagacttttcccaatgtagatatcgtgata

SEQ ID NO: 41890 - DNA, 96 bp, Fusarium cuneirostrum
  misc_feature: 30
tatatataataagaaaagaagaataaatagtttatggaaataagaaaaataaataagaataggaattatagtaaaagattaaggataatagtgaat

SEQ ID NO: 41891 - DNA, 96 bp, Fusarium cuneirostrum
  misc_feature: 30
tatagagtagtctagcgtaattaaccgatataaaccaagagtagttctcgttagtattagtctcgccttattaccgtactagctcagtcccataat

SEQ ID NO: 41892 - DNA, 96 bp, Fusarium cuneirostrum
  misc_feature: 30
cctgtctgctcggattgctgtctgaaatctctttcatcctctctggaagcattacgggagaactggtggtcgatttccggaccgatgatgtctata

SEQ ID NO: 41893 - DNA, 96 bp, Fusarium cuneirostrum
  misc_feature: 30
tagtttaacaccgggcgggcactactattgatctttgtaataccctgccttttttcttctttcatgacccgtttggcgttagaagcactcttgatt

SEQ ID NO: 41894 - DNA, 96 bp, Fusarium cuneirostrum
  misc_feature: 30
ataaagtaggatagttaagtaaaagataaagaattattactttctttaaatattaatttaaatagttaacttaacaataacttaactaaataacta

SEQ ID NO: 41895 - DNA, 96 bp, Fusarium cuneirostrum
  misc_feature: 30
tagtggtatattatctataaaaactcctccgcccctctctcctcttctctttttctttttcttccctctattattctcttatatataactaccggg

SEQ ID NO: 41896 - DNA, 96 bp, Fusarium cuneirostrum
  misc_feature: 30
tagtgaacaggaacgggacgctggtgcctcaggctgggatctctcctcaacaccaactggccaaaagagcacaatgctcgatcggaaggctaaacc

SEQ ID NO: 41897 - DNA, 96 bp, Fusarium cuneirostrum
  misc_feature: 30
ggttaactccccgagcagagactgctttaatctaccgaacgtagtgaggtgcggagtgaagatggagacggagtcgacatcgtaacgaggttacta

SEQ ID NO: 41898 - DNA, 96 bp, Fusarium cuneirostrum
  misc_feature: 30
actggggtcgtcaaggtcagcaagctgactcaagacgattactcctgggtacacacgttcattcttcactgtcccgtgtcccgtagtcccccccta

SEQ ID NO: 41899 - DNA, 96 bp, Fusarium cuneirostrum
  misc_feature: 30
taggaaaggggagatcgccaatttaattttcattgaaatatgggaggagtagagacgacgacagacattgtgtatggtatccgggaacagggaggt

SEQ ID NO: 41900 - DNA, 96 bp, Fusarium cuneirostrum
  misc_feature: 30
cacatccaagatctgtccctcttgatcaaccttcgcatggctcaggtttctattacttcttcgatctcgtttcactccatctcttttcatgatcta

SEQ ID NO: 41901 - DNA, 96 bp, Fusarium cuneirostrum
  misc_feature: 30
ggcattctggtcttattatacctttaaacccttatttattaccccttaattattattaacctaactggaaccttaaattactagggatatactcta

SEQ ID NO: 41902 - DNA, 96 bp, Fusarium cuneirostrum
  misc_feature: 30
catacttctctcctaatagctataatattattatagatatcctattaagtcactaaagaattgtaattctattatatatatatttagatatctcta

SEQ ID NO: 41903 - DNA, 96 bp, Fusarium cuneirostrum
  misc_feature: 30
tagagaaggcattaactaagatattaattaaataattaattaagatataggctaagataatattaaggaaggtattaataataaagcagctaaggc

SEQ ID NO: 41904 - DNA, 96 bp, Fusarium cuneirostrum
  misc_feature: 30
ctgcatctcggctcattccatttcattcatgtgcgacgaagccatcgtcgagtagaaaaaagatgatcaacaccacatactctggtgttttaagta

SEQ ID NO: 41905 - DNA, 96 bp, Fusarium cuneirostrum
  misc_feature: 30
ataaatccttgattatgggattagtatatagaaggcttattacggaaggctacttcgagataaataaatagcgtattaacttctaattcattagta

SEQ ID NO: 41906 - DNA, 96 bp, Fusarium cuneirostrum
  misc_feature: 30
tactaaatcgaggtattataggaatataataagatctataaatactaataagcggatcgatataataggctactatataataattaaatcactaag

SEQ ID NO: 41907 - DNA, 96 bp, Fusarium cuneirostrum
  misc_feature: 30
tacgggctccgtatttaaaaaaggaatggaagacctctctccgcgaggctcgtaactctttactcgagtttattagatagtccatccctcgggctg

SEQ ID NO: 41908 - DNA, 96 bp, Fusarium cuneirostrum
  misc_feature: 30
tacgcgagcatatataaagtagatggtgataacctcaaaagagtccacgagccgagcgcgtagcgtgcaggcgaggggattgtcaatgtaatttat

SEQ ID NO: 41909 - DNA, 96 bp, Fusarium cuneirostrum
  misc_feature: 30
tacatggcgagagcagcgctcgaggtggatttgacggagtctcaaaactggaacagtttttgtatggactcgattctggcatttggtgagccaaat

SEQ ID NO: 41910 - DNA, 96 bp, Fusarium cuneirostrum
  misc_feature: 30
tacaacatcaggtaatcatagaacaaaacacatgatgtaacatcaccataatcatatcaaattttgctacaacacaatttccaccatcacctttcg

SEQ ID NO: 41911 - DNA, 96 bp, Fusarium cuneirostrum
  misc_feature: 30
cttagagctctaggagcgagagggtctgagttttcgaaggcgatggacgagagggagcgagacatggaattctgtgcggatgggcacaagtttgta

SEQ ID NO: 41912 - DNA, 96 bp, Fusarium cuneirostrum
  misc_feature: 30
ccctaaattaattcagggccggcaatttccccacttttaacgacattaaataaagaggcgctcgataatagcgcaataggatatatagcgtaatta

SEQ ID NO: 41913 - DNA, 96 bp, Fusarium cuneirostrum
  misc_feature: 30
cgaggggattgagtttaggcgtttgcctaacaaagtgcaggaagcacttgaatgtccgatggagtcggatgatatgctattcttgagagcatatta

SEQ ID NO: 41914 - DNA, 96 bp, Fusarium cuneirostrum
  misc_feature: 30
cttcctctaggctaaggaagagattctaatattacttattaaggatagaaaccttaataataggtataatatccgacttaaagttataattactta

SEQ ID NO: 41915 - DNA, 96 bp, Fusarium cuneirostrum
  misc_feature: 30
taagactaaatacggcctataagttaatatatatataggtattaataaagctttttcaataagctaaataaaaagaaataaaataagcgagaatat

SEQ ID NO: 41916 - DNA, 96 bp, Fusarium cuneirostrum
  misc_feature: 30
gatctgtccctcttgatcaaccttcgcatggctcaggtttctattacttcttcgatctcgtttcactccatctcttttcatgatctagtgaagtta

SEQ ID NO: 41917 - DNA, 96 bp, Fusarium cuneirostrum
  misc_feature: 30
taacatttgtgaccaaattcccactccgttctcacgtttgctcacaccaaacgccagatcgcaacccatattaaaactgtgccagtttctgaaaag

SEQ ID NO: 41918 - DNA, 96 bp, Fusarium cuneirostrum
  misc_feature: 30
taacaatcgctacacgattcccacctcaatctcgcgatttcgcccgccattctcagtttcgttcacatacaaaaagtatgtcgatttgagtccaat

SEQ ID NO: 41919 - DNA, 96 bp, Fusarium cuneirostrum
  misc_feature: 30
taaatttaaagaaatattagaataataaacttaataaataacttaagaatatattagaataatatagaatttacgagaagctcttttaagaggaac

SEQ ID NO: 41920 - DNA, 96 bp, Fusarium cuneirostrum
  misc_feature: 30
attatttatatttaatattaaagttagaaatatttttaggtatctttttatttatagataatctatttattaatacttaataccgaaaataattta

SEQ ID NO: 41921 - DNA, 96 bp, Fusarium cuneirostrum
  misc_feature: 30
atgaaaatgaggccattcacaactccatctacagtaacatcatgctcactaatctaataaaaagaataaccagggctcgtcaaacgagtttattta

SEQ ID NO: 41922 - DNA, 96 bp, Fusarium cuneirostrum
  misc_feature: 30
taaaggtggagggagtgcggatgcgcgaccggtagacacacatcgagggaggggaccgaccgagcaagaatccatttcaaaatttgtacaaaattt

SEQ ID NO: 41923 - DNA, 96 bp, Fusarium cuneirostrum
  misc_feature: 30
gaggcgtcttgagtagaactcagacttgtattcttacttttgcaagtaagaaagagcgagggacgagtttgatcgagtgatcgatcttgttcttta

SEQ ID NO: 41924 - DNA, 96 bp, Fusarium cuneirostrum
  misc_feature: 30
taaaccgctgcgaaccactacgaaccgctataaaccgctgcgaaccactataaaccgctataaaccgctacgaaccgctataaactattgcgaacc

SEQ ID NO: 41925 - DNA, 96 bp, Fusarium cuneirostrum
  misc_feature: 30
ctccggaggatccacttacgtcctaaacacccaaggttagcaatcatcgctatctcatccatctcaggcgtttacttacaatctacatcagcaaac

SEQ ID NO: 41926 - DNA, 96 bp, Fusarium cuneirostrum
  misc_feature: 30
acatcgcaagactcaaaatctaccggattttgggacttttcagaaactggcacagttttaatatgggttgcgatctggcgtttggtgtgagcaaac

SEQ ID NO: 41927 - DNA, 96 bp, Fusarium cuneirostrum
  misc_feature: 30
gtttccgagcgtccctaactttggtctataagcggttttttggggaaacgaaggggaccccgacgccttcctaagagcttgctcaggttggcgaac

SEQ ID NO: 41928 - DNA, 96 bp, Fusarium cuneirostrum
  misc_feature: 30
gggttatctacgattgccaatccctcagtcttccttcgctacgctcactcatccgctcgggactcatggatgaggaatacatttacagtcaccaac

SEQ ID NO: 41929 - DNA, 96 bp, Fusarium cuneirostrum
  misc_feature: 30
gttggagccttttatttagtgttcgctccactactctctcggttgtgctcacatatcactgtctatactaactacaataccacttgaggtcatcac

SEQ ID NO: 41930 - DNA, 96 bp, Fusarium cuneirostrum
  misc_feature: 30
cttgattgaggtgtactttagtagcaataatagttacaagatgtttactctgattttctattagtttgttcgtctctagcgcttggagaaggcaac

SEQ ID NO: 41931 - DNA, 96 bp, Fusarium cuneirostrum
  misc_feature: 30
gttgcctgatactagtggtcttcgtgcccgtcggtgggctttatcggcagtctaatgatcggatatgattgagaagtagttgccattttgaaagag

SEQ ID NO: 41932 - DNA, 96 bp, Fusarium cuneirostrum
  misc_feature: 30
gttgagtagtgactatgtaacgggaccgttttcccgactatgctgaaacgggagttggtgatgacttcacttctgccgactccacatactttgctc

SEQ ID NO: 41933 - DNA, 96 bp, Fusarium cuneirostrum
  misc_feature: 30
agcagagcgaccacggaatgaggttactataatcctcatgagacatgagttgattgcgcccgacagtggttggcgataacttcatcagagatgaac

SEQ ID NO: 41934 - DNA, 96 bp, Fusarium cuneirostrum
  misc_feature: 30
gttcatatcacatttcatttaaggtcacatacaaatcacaagtatcattaagtgctcgccaagtagaaaaaagtcgtgggcctcgtccattttatt

SEQ ID NO: 41935 - DNA, 96 bp, Fusarium cuneirostrum
  misc_feature: 30
gttacatcatgtgttttgttctatgattacctgatgttgtagtgacgatagcttcacatgtattatgggcgagcattaaataaagacggagcgcac

SEQ ID NO: 41936 - DNA, 96 bp, Fusarium cuneirostrum
  misc_feature: 30
atgtcagaaacgaactcatacaaaaactgttccagttttgagatggatttcaagtcgggctcgctcacgctccccctctgtctgtggtcgacccac

SEQ ID NO: 41937 - DNA, 96 bp, Fusarium cuneirostrum
  misc_feature: 30
gtactcgccggagctcctcgacaattgaagggatacttagacaattctcgtcagctaatgtcagacaattagttccacagggatcagtgatggcac

SEQ ID NO: 41938 - DNA, 96 bp, Fusarium cuneirostrum
  misc_feature: 30
gtgagtgtgacgaaggaacacgtagcgacgttactaaaacaccacaagatgtggttcagttatcttcatgagagtgcatgatgacctcaagtggag

SEQ ID NO: 41939 - DNA, 96 bp, Fusarium cuneirostrum
  misc_feature: 30
gtcttccctgcgcccctacggggcttgctcatccgttcgggactcaagtggtgtaactctcaccactcctgttccattcacattctacgtcacaat

SEQ ID NO: 41940 - DNA, 96 bp, Fusarium cuneirostrum
  misc_feature: 30
ggagcaagagcgagcccgacttgaaatcccatttcaaaatttgtacaaaatttgtatgtgttcgtttctgagatttggtgagtcaaatcctgagac

SEQ ID NO: 41941 - DNA, 96 bp, Fusarium cuneirostrum
  misc_feature: 30
agggcgcttggggttggtgccagtaaccaaaggctaccagtaccacacctcgcggatgtttgtttgtttgtttgtttgtttgtttgtttcatagac

SEQ ID NO: 41942 - DNA, 96 bp, Fusarium cuneirostrum
  misc_feature: 30
gtcgctacgtgttccttcgtcacactcactccgcacgtcgccctccgggctccgtaggattatacagttccgactcgggcctccggcggtgtaatg

SEQ ID NO: 41943 - DNA, 96 bp, Fusarium cuneirostrum
  misc_feature: 30
aagtacttaagggcctggagaccggcccatctcccgagcctggtcttcccaaccacattgcgctcggaagacaaagccacagggggtcagctcgac

SEQ ID NO: 41944 - DNA, 96 bp, Fusarium cuneirostrum
  misc_feature: 30
gtaatataagggttaaaggtagagttaaataagaaagataaataaaaaaaatataacgtacatgataagcgagtgggacactcaagcgagtgggac

SEQ ID NO: 41945 - DNA, 96 bp, Fusarium cuneirostrum
  misc_feature: 30
ataatactcgtcccagcctcgtccttactcgaaataaataatcgatcgtcgctccactcctattgctcgtcacttctcgttccgatatggatatac

SEQ ID NO: 41946 - DNA, 96 bp, Fusarium cuneirostrum
  misc_feature: 30
gtagtaagaagacatgggaatggcttcatccataaatgagtcctgagggcgaggaggaacgacgcagcctgaaggattgactagtagagtctcatc

SEQ ID NO: 41947 - DNA, 96 bp, Fusarium cuneirostrum
  misc_feature: 30
aatagaaaaagacagcgacgtccgtcgtatacaatgacctccggtcaaataaaaaagtaaaggtcgttggatccccaactccagaaagcgtcctac

SEQ ID NO: 41948 - DNA, 96 bp, Fusarium cuneirostrum
  misc_feature: 30
ggacgcagggtgagggattgacaagagtatgttggcaacccatgaagagttacgagcgcccgcggagggccgagtctatgactatatccttagtac

SEQ ID NO: 41949 - DNA, 96 bp, Fusarium cuneirostrum
  misc_feature: 30
atgtcccacgtaatgagtgatcaaaaaatggaggcaaagaaggaaagacaattcaagcatccagacatcaccaccaaaacacctctttccctttac

SEQ ID NO: 41950 - DNA, 96 bp, Fusarium cuneirostrum
  misc_feature: 30
agaatgggggaacggacgttgataactttggtgatataagcggttttaccctttcaacgcttgcgtgattgggaaactggggccgacggagtttac

SEQ ID NO: 41951 - DNA, 96 bp, Fusarium cuneirostrum
  misc_feature: 30
ggtcgactcgttctgcacctcgccctgacgggcttcggtagaactatacagttcctgcttcctctccgagggtcaggttcagttgtcaagccctcc

SEQ ID NO: 41952 - DNA, 96 bp, Fusarium cuneirostrum
  misc_feature: 30
ggtcattcttgctctcgcaatgcatttcatgtttacgtgaggggattcacagagcgcatctctgttgaattaaagtaacatcacatcgtctccctg

SEQ ID NO: 41953 - DNA, 96 bp, Fusarium cuneirostrum
  misc_feature: 30
aaacgagcgtccataactttggtctataagaggttttgttttcaagctttagctgattacaaagctggggagggacacttgtgtcacggggacccc

SEQ ID NO: 41954 - DNA, 96 bp, Fusarium cuneirostrum
  misc_feature: 30
atgaggaggaacgacgaataaggtgcagcgtagcgatccgggcataagtggatactgacgagggggcgaggaagtataagacggaacgtctgcccc

SEQ ID NO: 41955 - DNA, 96 bp, Fusarium cuneirostrum
  misc_feature: 30
acgcagcccgagggatggactatctaataaactcgagtaaagagttacgagcctcgcggagagaggtcttccattccttttttaaatacggagccc

SEQ ID NO: 41956 - DNA, 96 bp, Fusarium cuneirostrum
  misc_feature: 30
gggcgaccgtaagacagaggggcgagattgtgtcgagcccgaatgtgaaatttttcgagattttggtgaggaacaagcaaaatcggattcaaattg

SEQ ID NO: 41957 - DNA, 96 bp, Fusarium cuneirostrum
  misc_feature: 30
ggctcggtgcctctcccattctcccaaccgggtaactctagtccagttatggtcatagagatgttcaagcccagccggagtgtttgcaatagcgtg

SEQ ID NO: 41958 - DNA, 96 bp, Fusarium cuneirostrum
  misc_feature: 30
ggcgaagcgaggtgcaataactttggtgatataagcggtttttttacaaacgctctgcgttgggctgaaaaagacggggacaagcagcttgtctgc

SEQ ID NO: 41959 - DNA, 96 bp, Fusarium cuneirostrum
  misc_feature: 30
ggccaaggtcgttccactcccttcttccccattcgctcgctccgctcgtcttacatgggtccccaccggcctccactcattccattcgttcccgtc

SEQ ID NO: 41960 - DNA, 96 bp, Fusarium cuneirostrum
  misc_feature: 30
ctcatctcattggcaccccgagccgagttagggctcaaggaattggccgtggagtcagagtgcgtaatcaaccaactacttccaatcgttggatcc

SEQ ID NO: 41961 - DNA, 96 bp, Fusarium cuneirostrum
  misc_feature: 30
cctacgggtaatcgagtcgctcacaatccgttcgagcgagcgcgtaatgaaacgcgtcagaaaaaaggttgacgccccgggcgccaaaagcactcc

SEQ ID NO: 41962 - DNA, 96 bp, Fusarium cuneirostrum
  misc_feature: 30
ggagaccggatgggcgaccacagacggagggcgagactgtgtcgagaccgattgcaaaagttggacaacttttcaactttttctgacatttttggt

SEQ ID NO: 41963 - DNA, 96 bp, Fusarium cuneirostrum
  misc_feature: 30
ggactagtagagttgggttcgagtgaagaacccataccccaagcagaactatgttctgaataccgaccgaacggagtgagggaaggtgcggaatgg

SEQ ID NO: 41964 - DNA, 96 bp, Fusarium cuneirostrum
  misc_feature: 30
ccgtcttatacttcctcgccccctcgtcagtatccacttatgcccggatcgctacgctgcaccttattcgtcgttcctcctcataacgttccgtcc

SEQ ID NO: 41965 - DNA, 96 bp, Fusarium cuneirostrum
  misc_feature: 30
gctcaccctactgtaagctctaggtttttcagcctcgctccctacctacttagtactcgctctaaaatctacgtaattgaagtcatcatcacttcc

SEQ ID NO: 41966 - DNA, 96 bp, Fusarium cuneirostrum
  misc_feature: 30
acgagtgaccgcgggacgcgggaaacgagggccataactttggtgatataagaggatttttgggaaacgcatgcgttgggacccaaactgacttcc

SEQ ID NO: 41967 - DNA, 96 bp, Fusarium cuneirostrum
  misc_feature: 30
ctgaagaagtgggcgtccgcccattatgtactcgctcactagctccgtccatgattacggtcgtacattctgttcgaccataagcgggtcccttcc

SEQ ID NO: 41968 - DNA, 96 bp, Fusarium cuneirostrum
  misc_feature: 30
aggaggaacgacgcagcctgaaggattgactagtagagtctcatctgcatgtgaagagttcatctccaagcagagactgtggtctcaataccgagc

SEQ ID NO: 41969 - DNA, 96 bp, Fusarium cuneirostrum
  misc_feature: 30
gctcgggactcatggatgaggaatacatttacagtcaccaacataaacattcacaatctgaaatcatgctcgccaagtgaaaaaaagtagtggttc

SEQ ID NO: 41970 - DNA, 96 bp, Fusarium cuneirostrum
  misc_feature: 30
cacgtcgaggtggtcaagctacttctcgagaagggggccgatgtcgcggtcgcgaacaagaatggatggacaccactgaacacagcatcgaatagc

SEQ ID NO: 41971 - DNA, 96 bp, Fusarium cuneirostrum
  misc_feature: 30
ctagtgtatccgaataatcacgcctcggtcacccagtcatcgtcttaggacgagcgcagttttaaggcgcagcatctgccaataataaaacttagc

SEQ ID NO: 41972 - DNA, 96 bp, Fusarium cuneirostrum
  misc_feature: 30
accttaaatgaaatgtgatatgaacgtagtcgtagtaagaagacatgggaatggcttcatccataaatgagtcctgagggcgaggaggaacgacgc

SEQ ID NO: 41973 - DNA, 96 bp, Fusarium cuneirostrum
  misc_feature: 30
gcggtaaactcgtcctccgtcctcgaaaaaaataaaacaagtcagagttcgcctgctcactcaacctctcgggggaaaagacgctgtcttatactc

SEQ ID NO: 41974 - DNA, 96 bp, Fusarium cuneirostrum
  misc_feature: 30
cctagccggcctaggttcagataatcagatagttaatattaatgatggccagcagatagtcacctctagctctagctctggttcagatatcagcgc

SEQ ID NO: 41975 - DNA, 96 bp, Fusarium cuneirostrum
  misc_feature: 30
catcagttcctatcgatggacgaaacactcgacaaggttgctcaaaattagtcaaacactcgttccatcatccaagccatgcgctcaacgcacggc

SEQ ID NO: 41976 - DNA, 96 bp, Fusarium cuneirostrum
  misc_feature: 30
gcccgttgcacttggagtgcttttggcgcccggggcgtcaaccttttttctgacgcgtttcattacgcgctcgctcgaacggattgtgagcgactc

SEQ ID NO: 41977 - DNA, 96 bp, Fusarium cuneirostrum
  misc_feature: 30
gccccacttttcctagcttactaagcagcttattaagccgcttactataaaagaccttttaatatataagggactttataaataattctagtatat

SEQ ID NO: 41978 - DNA, 96 bp, Fusarium cuneirostrum
  misc_feature: 30
cgtccttctcggcaagtctctgatcagaagagaaagcacgctccgtatactccgcttctttggtactccaactaaaagcaacacaacagttgatgc

SEQ ID NO: 41979 - DNA, 96 bp, Fusarium cuneirostrum
  misc_feature: 30
gcacctccctccggtcggtagaggactacagttcctgcctcccctgcgggagcttatcattcttcatatgcagatgaggagactactgtcaatcct

SEQ ID NO: 41980 - DNA, 96 bp, Fusarium cuneirostrum
  misc_feature: 30
gattgactagtagagtctcatctgcatgtgaagagttcatctccaagcagagactgtggtctcaataccgagcgaagcgaaggtgcggaacggagt

SEQ ID NO: 41981 - DNA, 96 bp, Fusarium cuneirostrum
  misc_feature: 30
cacgtaaacatgaaatgtcactgtgtgtaagatgacccggagtgtgggtcatggtgaaggtaagagtagaagggagggcgtggcccgaccgacatc

SEQ ID NO: 41982 - DNA, 96 bp, Fusarium cuneirostrum
  misc_feature: 30
gatggggtgcggagcagagggtgagggacgaacccgtcgcgaggttataataatgagcaaggtcgcaaggtcactgctcacgataacatcatcaat

SEQ ID NO: 41983 - DNA, 96 bp, Fusarium cuneirostrum
  misc_feature: 30
ctgttggagccttttatttagtgttcgctccactactctctcggttgtgctcacatatcactgtctatactaactacaataccacttgaggtcatc

SEQ ID NO: 41984 - DNA, 96 bp, Fusarium cuneirostrum
  misc_feature: 30
gacgtcgctgtctttttctattttctctgtttgcggaagcacggttgagagggattcgagaccctttcttactcagctggagagctgttggagatc

SEQ ID NO: 41985 - DNA, 96 bp, Fusarium cuneirostrum
  misc_feature: 30
gatcgtcatcgacccattcatcaccaaactcgtccacaccctcgacgagtgtcttcacctcttctacagccctcggcttcacctccgatatgggcg

SEQ ID NO: 41986 - DNA, 96 bp, Fusarium cuneirostrum
  misc_feature: 30
agcatcaataaaatagcatcgcctttactaatatagctctctaccttaattatcgataggaggcgggggctatccgggatcgcctaggtgcatatc

SEQ ID NO: 41987 - DNA, 96 bp, Fusarium cuneirostrum
  misc_feature: 30
gaggctcatcgacgtaagagattttatcatctatgtaaggcatgttgagtttgagtgcatgtgcgtgcagatagagaaagaaaacaggtcaagttg

SEQ ID NO: 41988 - DNA, 96 bp, Fusarium cuneirostrum
  misc_feature: 30
gaggaggaacgacgcagcctgaaggattgactagtagagtctcatctgcatgtgaagagttcatctccaagcagagactgtggtctcaataccgag

SEQ ID NO: 41989 - DNA, 96 bp, Fusarium cuneirostrum
  misc_feature: 30
gaggaatacatttacagtcaccaacataaacattcacaatctgaaatcatgctcgccaagtgaaaaaaagtagtggttctcgacacattaaaagtg

SEQ ID NO: 41990 - DNA, 96 bp, Fusarium cuneirostrum
  misc_feature: 30
aagtacgggcggcgtttcattatccagtcgcacgaacctagttggtgatatgggacagcttatctatgctaacctaattaggaaatcgtcacgctc

SEQ ID NO: 41991 - DNA, 96 bp, Fusarium cuneirostrum
  misc_feature: 30
atcgtcgttgttattgtcgtcgtcgtcgctatcgttgttgtagttattgtcgttgtagtcatcgtcgttaacctcgtggtcactgggccaaggctc

SEQ ID NO: 41992 - DNA, 96 bp, Fusarium cuneirostrum
  misc_feature: 30
gagcctgaggcacgaaggcgaagagtgtaggatcatggaggagggacgacgcaatgatcggttgactaaggacgggaacgaatggaatgagtggag

SEQ ID NO: 41993 - DNA, 96 bp, Fusarium cuneirostrum
  misc_feature: 30
cctcaatccccaaatcctcttatatcaccaaagttataacccgctcgaaaaaccaggtaccctggttcctcgcggtagtgtaagagattaatgctc

SEQ ID NO: 41994 - DNA, 96 bp, Fusarium cuneirostrum
  misc_feature: 30
gagacgggcacacatatatactaatcgaccgaagagggagactgaaagtgggagacggggaccggcgacgatatggaccgagacgaagagtcgagt

SEQ ID NO: 41995 - DNA, 96 bp, Fusarium cuneirostrum
  misc_feature: 30
aattaatatatttttaatatattacctttagcttatattaccttttataaaagatatcctcgctaatttattattaaattagctttagactttctc

SEQ ID NO: 41996 - DNA, 96 bp, Fusarium cuneirostrum
  misc_feature: 30
gacggaacgtctgcccctgcgaggacgcagtcgaagacttgagactgtatttatttttttgtgtgagacggagtcgagtctgatttcgactggaat

SEQ ID NO: 41997 - DNA, 96 bp, Fusarium cuneirostrum
  misc_feature: 30
atgtacggacataatcttacttgcgagggtgcgagacaagtataagggcaggggattgcccgttgcacttggagtgcttttggcgcccggggcgtc

SEQ ID NO: 41998 - DNA, 96 bp, Fusarium cuneirostrum
  misc_feature: 30
agaaacagccctcctgtttccaagaataatactcgtcccagcctcgtccttactcgaaataaataatcgatcgtcgctccactcctattgctcgtc

SEQ ID NO: 41999 - DNA, 96 bp, Fusarium cuneirostrum
  misc_feature: 30
cctctcatgcgcgacgcgccatcacaactcgactcttcgtctcggtccatatcgtcgccggtccccgtctcccactttcagtctccctcttcggtc

SEQ ID NO: 42000 - DNA, 96 bp, Fusarium cuneirostrum
  misc_feature: 30
gacagtggaattagcctcaagatgatccaatctcacgagctcaattcatacgaaaataatgctcaatgagcacgccaattgctggggtttttgggt

SEQ ID NO: 42001 - DNA, 96 bp, Fusarium cuneirostrum
  misc_feature: 30
aatttgtacaaattttgaaatggattcttgtcggccctctgggcctcctgtcccctcacttccgttcggtcccccctccccacggtcgggtgtgtc

SEQ ID NO: 42002 - DNA, 96 bp, Fusarium cuneirostrum
  misc_feature: 30
attctcctagtctattagaatttaaattgtcaagatcgtcttattcactgctcagctaccgaactagaagcgtctatatcatctctcgctaaattc

SEQ ID NO: 42003 - DNA, 96 bp, Fusarium cuneirostrum
  misc_feature: 30
ctttctcaattgtcaggatgtagccttaaatgtctctgctctacgacgaacttgtctcaccgcataaagctgtctggaacaagaatgcctccattc

SEQ ID NO: 42004 - DNA, 96 bp, Fusarium cuneirostrum
  misc_feature: 30
gaagtctctatacttccttaacatttgtgaccaaattcccactccgttctcacgtttgctcacaccaaacgccagatcgcaacccatattaaaact

SEQ ID NO: 42005 - DNA, 96 bp, Fusarium cuneirostrum
  misc_feature: 30
cacgcagacaagctgcttgtccccgtctttttcagcccaacgcagagcgtttgtaaaaaaaccgcttatatcaccaaagttattgcacctcgcttc

SEQ ID NO: 42006 - DNA, 96 bp, Fusarium cuneirostrum
  misc_feature: 30
agcaagctgactaaaggcagactcagtccacacgttcgtccctcactgtcccgtgtcccgtagtccccccctataccaaggttaagaaacggcttc

SEQ ID NO: 42007 - DNA, 96 bp, Fusarium cuneirostrum
  misc_feature: 30
ctgtcagcgttttgctatggcgaaaattttggcggcgtctcgctttacacaaccgcgtccgttctatcacatactaaacaagcccggggcctcttc

SEQ ID NO: 42008 - DNA, 96 bp, Fusarium cuneirostrum
  misc_feature: 30
gaactcgagcgcttaactggggctcatccttgacgctcaagcgaacagcattggcgcgaggcccgctagccagagatgcatggcacactgatgagt

SEQ ID NO: 42009 - DNA, 96 bp, Fusarium cuneirostrum
  misc_feature: 30
gaaagtagtatttatacttacttagtgtatatacttattatatacgttataagaaaatataataaatatattctatatatttaggctttcttaagt

SEQ ID NO: 42010 - DNA, 96 bp, Fusarium cuneirostrum
  misc_feature: 30
gaaagactttacactttagaaagcttgcgggaagaggtatacttagaaactcggcttaacattacgttagtagtaaagagaaaatttttataagtt

SEQ ID NO: 42011 - DNA, 96 bp, Fusarium cuneirostrum
  misc_feature: 30
gaaaagagatggagtgaaacgagatcgaagaagtaatagaaacctgagccatgcgaaggttgatcaagagggacagatcttggatgtgtcccgtag

SEQ ID NO: 42012 - DNA, 96 bp, Fusarium cuneirostrum
  misc_feature: 30
ctgtgttttaagattgcggaggcgtgtggacggagcggtaatccaccagcataccgcgaggttgcctaattcggagatgacgatggcttctttttc

SEQ ID NO: 42013 - DNA, 96 bp, Fusarium cuneirostrum
  misc_feature: 30
aagaagggggagagggggggaagggagtgaaagagaggggataaataagaatatataggagaaagtaaaaagaagggataaggggagagagaaaag

SEQ ID NO: 42014 - DNA, 96 bp, Fusarium cuneirostrum
  misc_feature: 30
cttctttctttacttaccctaaataattatatttcttttttctctttaaccttctttacttaaactctttacttctttaacccttaaaaccctttt

SEQ ID NO: 42015 - DNA, 96 bp, Fusarium cuneirostrum
  misc_feature: 30
cttcgctacgctcgctcgtcggctcgggcctcaagtggtgattaagtcgttcattcacaaagtgctcgccaatttaaaaggcgtagtggtgctcgt

SEQ ID NO: 42016 - DNA, 96 bp, Fusarium cuneirostrum
  misc_feature: 30
cttattaattatagcggaagggtaattaagattaataattaataattctcgtggaagaaattataaagcctaagaattaataattagaaggttaat

SEQ ID NO: 42017 - DNA, 96 bp, Fusarium cuneirostrum
  misc_feature: 30
cttatggttgtaccaaacgtacggacgtaatacccatgcacgcagacagtggtcgagtacataaacccagagggttttcttttcatctaatgttgg

SEQ ID NO: 42018 - DNA, 96 bp, Fusarium cuneirostrum
  misc_feature: 30
aagcacgagaaggaggggaccgactgaagtgcgggtggacggaacgttatgaggaggaacgacgaataaggtgcagcgtagcgatccgggcataag

SEQ ID NO: 42019 - DNA, 96 bp, Fusarium cuneirostrum
  misc_feature: 30
cttaaggcgcagggcgcccacttcgtgtagacgatcaagtttctcagaaacttccctctttcatctacatttccttgtagtgaacagtgaccgcag

SEQ ID NO: 42020 - DNA, 96 bp, Fusarium cuneirostrum
  misc_feature: 30
cttaaagggccgcatggcccgatttgcgacactgtttggtgtcagacaacattcttgtttgtcttattttttggctgaacagcgtgagcttgccgt

SEQ ID NO: 42021 - DNA, 96 bp, Fusarium cuneirostrum
  misc_feature: 30
actcacctgttcgtgtttccacggccgtggaataaacagaactgattccagtcgaaatcagactcgactccgtctcacacaaaaaaataaatacag

SEQ ID NO: 42022 - DNA, 96 bp, Fusarium cuneirostrum
  misc_feature: 30
ctgaggcttgcattcaagtcggagcgaatgccaatcttggcttcatgggcacacgcgagtcatcccgaatcatgcgctgctgtcgatgacatcagt

SEQ ID NO: 42023 - DNA, 96 bp, Fusarium cuneirostrum
  misc_feature: 30
ctcgggtctgctcgaccctcgacacacttctgtcggtcgcgcatccgcactccctcatctactcacctcgtacacccacttcggtatcatctttcg

SEQ ID NO: 42024 - DNA, 96 bp, Fusarium cuneirostrum
  misc_feature: 30
agaatgataagctcccgcaggggaggcaggaactgtagtcctctaccgaccggagggaggtgcggagcgtagtcgagcagggcgagacgatgcgag

SEQ ID NO: 42025 - DNA, 96 bp, Fusarium cuneirostrum
  misc_feature: 30
ctatactttattatcttcttttttatttttatttttttccttttttttcttatctcttattttttttctttttatttatttttatatttattttat

SEQ ID NO: 42026 - DNA, 96 bp, Fusarium cuneirostrum
  misc_feature: 30
ctacttgtgagcccttgacataacataagcagggcgaggcaaataataatttaaataaactcgtttgacgagccctggttattctttttattagat

SEQ ID NO: 42027 - DNA, 96 bp, Fusarium cuneirostrum
  misc_feature: 30
aaccagtgctctctccggtcgcatcttcatgtcttccgacaagactaaaacaaaaccaaaaggagacaactcacctccgttcgtgtcaacacgtag

SEQ ID NO: 42028 - DNA, 96 bp, Fusarium cuneirostrum
  misc_feature: 30
agcttacagtagggtgagctcccgcacttgtgttacgcgagcatatataaagtagatggtgataacctcaaaagagtccacgagccgagcgcgtag

SEQ ID NO: 42029 - DNA, 96 bp, Fusarium cuneirostrum
  misc_feature: 30
ctaaatcttaagataaagtagtatagaggtttatatataaagcgataatagttaatatataaatagctaatagaaaaataagaccttaggatagtt

SEQ ID NO: 42030 - DNA, 96 bp, Fusarium cuneirostrum
  misc_feature: 30
cgtctgcccctgcgaggacgcagtcgaagacttgagactgtatttatttttttgtgtgagacggagtcgagtctgatttcgactggaatcagttct

SEQ ID NO: 42031 - DNA, 96 bp, Fusarium cuneirostrum
  misc_feature: 30
cgtctcacacaaaaaaataaatacagtctcaagtcttcgactgcgtcctcgcaggggcagacgttccgtcttatacttcctcgccccctcgtcagt

SEQ ID NO: 42032 - DNA, 96 bp, Fusarium cuneirostrum
  misc_feature: 30
cgtcgctacgtgttccttcgtcacactcactccgcacgtcgccctccgggctccgtaggattatacagttccgactcgggcctccggcggtgtaat

SEQ ID NO: 42033 - DNA, 96 bp, Fusarium cuneirostrum
  misc_feature: 30
cgtccacaatctcataccccgcagacagagtcgaggagtataagacagcgtcttttcccccgagaggttgagtgagcaggcgaactctgacttgtt

SEQ ID NO: 42034 - DNA, 96 bp, Fusarium cuneirostrum
  misc_feature: 30
catgtgaccttgtccgactctacccgttttttaacgaacgggaaggaggtagcgactgggagtgaggaatttagcggaacggaggaaggattgacg

SEQ ID NO: 42035 - DNA, 96 bp, Fusarium cuneirostrum
  misc_feature: 30
cgtaggacgcagcccgagggatggactatctaataaactcgagtaaagagttacgagcctcgcggagagaggtcttccattccttttttaaatacg

SEQ ID NO: 42036 - DNA, 96 bp, Fusarium cuneirostrum
  misc_feature: 30
atagaaaaagacagcgacgtccgtcgtatacaatgacctccggtcaaataaaaaagtaaaggtcgttggatccccaactccagaaagcgtcctacg

SEQ ID NO: 42037 - DNA, 96 bp, Fusarium cuneirostrum
  misc_feature: 30
cgggcgaagcgaggtgcaataactttggtgatataagcggtttttttacaaacgctctgcgttgggctgaaaaagacggggacaagcagcttgtct

SEQ ID NO: 42038 - DNA, 96 bp, Fusarium cuneirostrum
  misc_feature: 30
cgctcactccttcgctcttacttacatccgacaacaaagattgtctctggcgctctgcgcccatgtgcatctccgatgctctcctgtcctcctccg

SEQ ID NO: 42039 - DNA, 96 bp, Fusarium cuneirostrum
  misc_feature: 30
cgctcgggctcaggactatcttgggtacatgatcacgactacgattcaaaataataataatgtcacatatgcacagctcgctcgattaaataaagt

SEQ ID NO: 42040 - DNA, 96 bp, Fusarium cuneirostrum
  misc_feature: 30
caaatcctgagacggagtcgggaatcaggtactgattgttagcgaacgcagtgagcttccagcttatatcactagcacgagtgaccgcgggacgcg

SEQ ID NO: 42041 - DNA, 96 bp, Fusarium cuneirostrum
  misc_feature: 30
ataaatcccgagttctgaaccactaattataataggactaataaactaaggactaatatcgttcctagattacgtcagtcttagaataatatcgcg

SEQ ID NO: 42042 - DNA, 96 bp, Fusarium cuneirostrum
  misc_feature: 30
atactaatcgaccgaagagggagactgaaagtgggagacggggaccggcgacgatatggaccgagacgaagagtcgagttgtgatggcgcgtcgcg

SEQ ID NO: 42043 - DNA, 96 bp, Fusarium cuneirostrum
  misc_feature: 30
aatccaccagcataccgcgaggttgcctaattcggagatgacgatggcttctttttctttgtggtagatagtaatgtgacctgattgatttatgcg

SEQ ID NO: 42044 - DNA, 96 bp, Fusarium cuneirostrum
  misc_feature: 30
aagtttagaacatagttcttgcttggaggatgaactcttcacttgagttcagtctattgtcaatccctcagcctgcgtcctacgtcctcggcctcg

SEQ ID NO: 42045 - DNA, 96 bp, Fusarium cuneirostrum
  misc_feature: 30
cgagagggcagagggaagagtttccctcctacatcatctgtctgagctcagagagcgagtcgatcttggattcctatgcaagtcgtctttcaattg

SEQ ID NO: 42046 - DNA, 96 bp, Fusarium cuneirostrum
  misc_feature: 30
agtctcctcatctgcatatgaagaatgataagctcccgcaggggaggcaggaactgtagtcctctaccgaccggagggaggtgcggagcgtagtcg

SEQ ID NO: 42047 - DNA, 96 bp, Fusarium cuneirostrum
  misc_feature: 30
aaacaacttcaaattcaatctactcctgcgcctcctccttcatactatctaaaggcctgtaaagtttctgtcctcgacgtagctttacaactgtcg

SEQ ID NO: 42048 - DNA, 96 bp, Fusarium cuneirostrum
  misc_feature: 30
cctcacaacaagttgttcgcccccagttttttaaccgtagcaagctactcggaaaaaaaaacctcttattgaccaaagttaggagctcccatttcg

SEQ ID NO: 42049 - DNA, 96 bp, Fusarium cuneirostrum
  misc_feature: 30
ccttttttcttctttcatgacccgtttggcgttagaagcactcttgattgaggtgtactttagtagcaataatagttacaagatgtttactctgat

SEQ ID NO: 42050 - DNA, 96 bp, Fusarium cuneirostrum
  misc_feature: 30
attatagtatatataagatagagaggttagaggaggtatattataaggtagatatatatctatgaagggggatagatatatagaagagaataaagg

SEQ ID NO: 42051 - DNA, 96 bp, Fusarium cuneirostrum
  misc_feature: 30
ccttcagctacggctttcatacttactaagttgatcttggcagttgtctttaaactggctgagcttaacgtgttattgcgtaggtgcttaggcgtt

SEQ ID NO: 42052 - DNA, 96 bp, Fusarium cuneirostrum
  misc_feature: 30
aatccttgattatgggattagtatatagaaggcttattacggaaggctacttcgagataaataaatagcgtattaacttctaattcattagtaagg

SEQ ID NO: 42053 - DNA, 96 bp, Fusarium cuneirostrum
  misc_feature: 30
cctagattcgtccaaatctgaatcatgtgcttggtgggagaagcgtgtcagatttgaacgttttttttgcctgaaaaggggacaaattgtactgtt

SEQ ID NO: 42054 - DNA, 96 bp, Fusarium cuneirostrum
  misc_feature: 30
cctagacgtgggatttggcacaaaaaaatgacgatggccctttagagacttttacttgaccgcaacgctagcattacgggaaccaagctgagaggg

SEQ ID NO: 42055 - DNA, 96 bp, Fusarium cuneirostrum
  misc_feature: 30
cctaccttataatatagctagcatatttcctaacttatattccactacttaagttaccgtatttagctacttcttctatttagcgctatagctaat

SEQ ID NO: 42056 - DNA, 96 bp, Fusarium cuneirostrum
  misc_feature: 30
ccggcgctgatatctgaaccagagctagagctagaggtgactatctgctggccatcattaatattaactatctgattatctgaacctaggccggct

SEQ ID NO: 42057 - DNA, 96 bp, Fusarium cuneirostrum
  misc_feature: 30
caggtcaatcagagcactgaccatgattaatgagcgaagcgcatccacttcgccctctctgcgacacttctctacgagatacacaaaactcagcgg

SEQ ID NO: 42058 - DNA, 96 bp, Fusarium cuneirostrum
  misc_feature: 30
aaagtgaaagtgaaagtgaaagtgaaagtgaaagtgaaagtgaaagtgaaagtgaaagtgaaagtgaaagtgaaagtgaaagtgaaagggaaaggg

SEQ ID NO: 42059 - DNA, 96 bp, Fusarium cuneirostrum
  misc_feature: 30
caactgttgtgttgcttttagttggagtaccaaagaagcggagtatacggagcgtgctttctcttctgatcagagacttgccgagaaggacgaggg

SEQ ID NO: 42060 - DNA, 96 bp, Fusarium cuneirostrum
  misc_feature: 30
cccgaattctagaaataattgtattcttattattttcggtgactttttcccatcaggcttataagttgcactttatatggggaaatttttttcgct

SEQ ID NO: 42061 - DNA, 96 bp, Fusarium cuneirostrum
  misc_feature: 30
aaacgagggctgataactttggtctataagcggtttcctttcaaacgcgtgcgttgattggaagctgggggaacaccgaggaacgaggggatgggg

SEQ ID NO: 42062 - DNA, 96 bp, Fusarium cuneirostrum
  misc_feature: 30
ccccacttttcctagcttactaagcagcttattaagccgcttactataaaagaccttttaatatataagggactttataaataattctagtatatt

SEQ ID NO: 42063 - DNA, 96 bp, Fusarium cuneirostrum
  misc_feature: 30
cccacttatggttgtaccaaacgtacggacgtaatacccatgcacgcagacagtggtcgagtacataaacccagagggttttcttttcatctaatg

SEQ ID NO: 42064 - DNA, 96 bp, Fusarium cuneirostrum
  misc_feature: 30
ccatctacgaacacggcatcaagatatgacaccagcagagcgacacaaagtagcaagagatatcgcgagaattcccggaatcatcaaagaccagct

SEQ ID NO: 42065 - DNA, 96 bp, Fusarium cuneirostrum
  misc_feature: 30
ccacttatggttgtaccaaacgtacggacgtaatacccatgcacgcagacagtggtcgagtacataaacccagagggttttcttttcatctaatgt

SEQ ID NO: 42066 - DNA, 96 bp, Fusarium cuneirostrum
  misc_feature: 30
agcgtagcttggtgtctccgccaccaagaaaaagtgacttcgttaacagaagtgaccgatttctcggcccattctcaggatttggctcaccaaatg

SEQ ID NO: 42067 - DNA, 96 bp, Fusarium cuneirostrum
  misc_feature: 30
cattcggccgtctaccacatgatcctgtcatgtcaaccgagcggggcgaggggattgagtttaggcgtttgcctaacaaagtgcaggaagcacttg

SEQ ID NO: 42068 - DNA, 96 bp, Fusarium cuneirostrum
  misc_feature: 30
ataaaagttgaaaagtgttattttgcatagcgaaaggtgatggtggaaattgtgttgtagcaaaatttgatatgattatggtgatgttacatcatg

SEQ ID NO: 42069 - DNA, 96 bp, Fusarium cuneirostrum
  misc_feature: 30
catcgtcgttgttattgtcgtcgtcgtcgctatcgttgttgtagttattgtcgttgtagtcatcgtcgttaacctcgtggtcactgggccaaggct

SEQ ID NO: 42070 - DNA, 96 bp, Fusarium cuneirostrum
  misc_feature: 30
agagacgaccaagtataatgttgtaggatatcacacgtgtggggtgtgatttagttgcctttcttagtagttgtgatagcttcatttatctttatg

SEQ ID NO: 42071 - DNA, 96 bp, Fusarium cuneirostrum
  misc_feature: 30
cataaaagttgaaaagtgttattttgcatagcgaaaggtgatggtggaaattgtgttgtagcaaaatttgatatgattatggtgatgttacatcat

SEQ ID NO: 42072 - DNA, 96 bp, Fusarium cuneirostrum
  misc_feature: 30
cagaggtcccgcttcgcgacactgtttcggtgtcagacaacattattgtttgttttcttctcgcgttgttcgaagtcggatgagtgagcttgccgt

SEQ ID NO: 42073 - DNA, 96 bp, Fusarium cuneirostrum
  misc_feature: 30
cactactcaacaaccctttcgggtctctacaaaatcaaaacatttacatctgctgggctccctctcggcacacgcccaagatactgtccacaacct

SEQ ID NO: 42074 - DNA, 96 bp, Fusarium cuneirostrum
  misc_feature: 30
cacactcactccgcacgtcgccctccgggctccgtaggattatacagttccgactcgggcctccggcggtgtaatgactattgccaatccctcagt

SEQ ID NO: 42075 - DNA, 96 bp, Fusarium cuneirostrum
  misc_feature: 30
caatccctcagtcttccttcgctacgctcactcatccgctcgggactcatggatgaggaatacatttacagtcaccaacataaacattcacaatct

SEQ ID NO: 42076 - DNA, 96 bp, Fusarium cuneirostrum
  misc_feature: 30
caaggattaggcgggaacaaagaggaattggaaatggggaccattcgttcatttgtagaggatctcgacctgtatctagccactctttcatgattt

SEQ ID NO: 42077 - DNA, 96 bp, Fusarium cuneirostrum
  misc_feature: 30
attttcggactgaaatacgctgggcgttttcggaggttttgtatcttagattagtctacattgtttcctgttttggatgttgcgataccttcgttt

SEQ ID NO: 42078 - DNA, 96 bp, Fusarium cuneirostrum
  misc_feature: 30
atttctataaaagaagaagaactcccttagaattagaacctcccttagaattagaacctctcttagatctatatcctctcatataatacaaccaat

SEQ ID NO: 42079 - DNA, 96 bp, Fusarium cuneirostrum
  misc_feature: 30
atgtgaagctatcgtcactacaacatcaggtaatcatagaacaaaacacatgatgtaacatcaccataatcatatcaaattttgctacaacacaat

SEQ ID NO: 42080 - DNA, 96 bp, Fusarium cuneirostrum
  misc_feature: 30
agtgcggatgcgcgaccgacagaagtgtgtcgagggtcgagcagacccgagccagaaacgagctcaaaactggaacagttttttggtgagttcaat

SEQ ID NO: 42081 - DNA, 96 bp, Fusarium cuneirostrum
  misc_feature: 30
ataataatatccttaagactatattatagtatctagagaaagtagcttaattagatatttattagcttttaatacttattaagatagaggaagaat

SEQ ID NO: 42082 - DNA, 96 bp, Fusarium cuneirostrum
  misc_feature: 30
attccaaacgaggggaaccgagtttgggaagagaaagtggacggaacgttagttctgtccctgtttttttaaattgtcaagcatagtaattatgct

SEQ ID NO: 42083 - DNA, 96 bp, Fusarium cuneirostrum
  misc_feature: 30
attatgggcgagcattaaataaagacggagcgcacataaactaaaaagggcacacatattagtgagctcccgcatttatatatagcgagcatgttt

SEQ ID NO: 42084 - DNA, 96 bp, Fusarium cuneirostrum
  misc_feature: 30
aattaaagtttttttctttttaattttatatattttaaatgcgatttatttaatttataaaattaggcataaataataaaaaataaagaaattaat

SEQ ID NO: 42085 - DNA, 96 bp, Fusarium cuneirostrum
  misc_feature: 30
atgtgggcgacgaggacggagagtccgagtggggaggccgaaggccgaccggggaaagtgtgtcgagagcgagggggagcccgagcgaaatcgagt

SEQ ID NO: 42086 - DNA, 96 bp, Fusarium cuneirostrum
  misc_feature: 30
accctactgtaagctctaggtttttcagcctcgctccctacctacttagtactcgctctaaaatctacgtaattgaagtcatcatcacttccacat

SEQ ID NO: 42087 - DNA, 96 bp, Fusarium cuneirostrum
  misc_feature: 30
atgacaccagcagagcgacacaaagtagcaagagatatcgcgagaattcccggaatcatcaaagaccagcttgcactagaagggtttcagtttcct

SEQ ID NO: 42088 - DNA, 96 bp, Fusarium cuneirostrum
  misc_feature: 30
aaactagataattaaatcctgagttatcgcataaagatatatataactatagaggtttttatgaggttatcgcgagatagaccaataagggcagat

SEQ ID NO: 42089 - DNA, 96 bp, Fusarium cuneirostrum
  misc_feature: 30
atctcgagcgaaggaagctctgtgaggaacccacgaagacgggctaggagtttgacgagttcgctatgctctttggggaggcactgacgggagctt

SEQ ID NO: 42090 - DNA, 96 bp, Fusarium cuneirostrum
  misc_feature: 30
aggttcacggcataaaagttgaaaagtgttattttgcatagcgaaaggtgatggtggaaattgtgttgtagcaaaatttgatatgattatggtgat

SEQ ID NO: 42091 - DNA, 96 bp, Fusarium cuneirostrum
  misc_feature: 30
atcacaccgccggcggtgcctggatcaattccctggaagcagacagttcatgacgtaagcaagcgagcaccaactctgcattaagggtttccgatt

SEQ ID NO: 42092 - DNA, 96 bp, Fusarium cuneirostrum
  misc_feature: 30
aatatttttaataaagatttaaataaggtattttatttattaaaagatatattattctaataatagggaatataatataatattacgcggaaatat

SEQ ID NO: 42093 - DNA, 96 bp, Fusarium cuneirostrum
  misc_feature: 30
agagatagagaatatattataaatctatatccttaataataactctagcttaacatacttaataagcgagtaaaataaaaatcctaaccttcctat

SEQ ID NO: 42094 - DNA, 96 bp, Fusarium cuneirostrum
  misc_feature: 30
atagaccaaagttatggcactccaaaaaccgggtaccccggtatttctcgttagtgatataagctaggttgctcccttcggtcgcgggaagtctct

SEQ ID NO: 42095 - DNA, 96 bp, Fusarium cuneirostrum
  misc_feature: 30
agtatgtggtgttgatcatcttttttctactcgacgatggcttcgtcgcacatgaatgaaatggaatgagccgagatgcagggcacgaggacgtat

SEQ ID NO: 42096 - DNA, 96 bp, Fusarium cuneirostrum
  misc_feature: 30
ataccaaggttaagaaacggcttcgccgtttgggggggacttacctctcgctacgctcgagtgcggagtgacaagtcactccttaacttgggggtt

SEQ ID NO: 42097 - DNA, 96 bp, Fusarium cuneirostrum
  misc_feature: 30
ataaattaaatatgccttagttaaggtatatttataataattagtagggttattttcggctaattagaaatctaagttagaaaactaaaagaattt

SEQ ID NO: 42098 - DNA, 96 bp, Fusarium cuneirostrum
  misc_feature: 30
aggttaaccgcagggctctactatattaaatatagaatatataaataaagtaagtaagaaaagaggtaaaaataagctagcgtgatttaactttat

SEQ ID NO: 42099 - DNA, 96 bp, Fusarium cuneirostrum
  misc_feature: 30
acgagtctatttaaaacgtatttatttgcctcgccccatattaaacagtggcgagcaaagtatgtggagtcggcagaagtgaagtcatcaccaact

SEQ ID NO: 42100 - DNA, 96 bp, Fusarium cuneirostrum
  misc_feature: 30
aagtaaaagttaaattccattaagttaatactatctctaaatataacgtacatcacaagtgagtgaaacacacaagcgagtgaaacaaaaatccct

SEQ ID NO: 42101 - DNA, 96 bp, Fusarium cuneirostrum
  misc_feature: 30
aggccaaggtcgttccactcccttcttccccattcgctcgctccgctcgtcttacatgggtccccaccggcctccactcattccattcgttcccgt

SEQ ID NO: 42102 - DNA, 96 bp, Fusarium cuneirostrum
  misc_feature: 30
agattaataaaacttcgttaatattaatattaaggttatcgctattactatctaaattaattatttataattttaattctttacttaaatactcct

SEQ ID NO: 42103 - DNA, 96 bp, Fusarium cuneirostrum
  misc_feature: 30
aagatctgtccctcttgatcaaccttcgcatggctcaggtttctattacttcttcgatctcgtttcactccatctcttttcatgatctagtgaagt

SEQ ID NO: 42104 - DNA, 96 bp, Fusarium cuneirostrum
  misc_feature: 30
acacacttctgtcggtcgcgcatccgcactccctcatctactcacctcgtacacccacttcggtatcatctttcgatgtgcgcattgactgttggt

SEQ ID NO: 42105 - DNA, 96 bp, Fusarium cuneirostrum
  misc_feature: 30
acataacttgattgattgagcgagccaccactttactggggcgagtcattccttttttaaataacattttaatgtgacgagcaccactacgccttt

SEQ ID NO: 42106 - DNA, 96 bp, Fusarium cuneirostrum
  misc_feature: 30
acacgacagtgaagaatgacccggagtgtgggtcatgacgtgagtaaagtaggagggagcctgtggggcgaccgtaagacagaggggcgagattgt

SEQ ID NO: 42107 - DNA, 96 bp, Fusarium cuneirostrum
  misc_feature: 30
aactataggctactttagtatctagtttttatttatattcgtctttatcccttcttattagtatattatatctattttataatatcgcgataaatt

SEQ ID NO: 42108 - DNA, 96 bp, Fusarium cuneirostrum
  misc_feature: 30
aaagaagaaagaagaaagaagaaagaagaaagaagaaagaagaaagaagaaagaagaaagaagaaagaagaaacctactgctcaagcggttgagtt

SEQ ID NO: 42109 - DNA, 96 bp, Fusarium cuneirostrum
  misc_feature: 30
aaataattatatttcttttttctctttaaccttctttacttaaactctttacttctttaacccttaaaacccttttaccttctttaaattattttt

SEQ ID NO: 42110 - DNA, 96 bp, Fusarium cuneirostrum
  misc_feature: 29
gagaaaaaaaagggataaataagaatatataggagaaagtaaaaaaaaaggataaaaggagagagaaaaataaaaaagagaaagggaaaaaaaaaa

SEQ ID NO: 42111 - DNA, 96 bp, Fusarium cuneirostrum
  misc_feature: 29
agaatggcctgttggtgagaaatgtgaaaaggggctcatgggtcggccgatatgaaaattaggttgtggattgatctgtccgttggcgtaaaaaaa

SEQ ID NO: 42112 - DNA, 96 bp, Fusarium cuneirostrum
  misc_feature: 29
tttttcgagcgggttataactttggtgatataagaggatttggggattgaggggaccccaaccggcttggagacagcttgctggcccttgacggac

SEQ ID NO: 42113 - DNA, 96 bp, Fusarium cuneirostrum
  misc_feature: 29
ggagaatggcctgttggtgagaaatgtgaaaaggggctcatgggtcggccgatatgaaaattaggttgtggattgatctgtccgttggcgtaaaaa

SEQ ID NO: 42114 - DNA, 96 bp, Fusarium cuneirostrum
  misc_feature: 29
tttttaattttattttccttatttattatatatatatattctttttttattattttctcttttttttcttttttataattatatcttttttttttt

SEQ ID NO: 42115 - DNA, 96 bp, Fusarium cuneirostrum
  misc_feature: 29
cttcgggactttagtcatctgcgtttcccgcagatggctcatttgccacggtaccgcgttcttgacacgttccgatcaacaattaaccatccaaaa

SEQ ID NO: 42116 - DNA, 96 bp, Fusarium cuneirostrum
  misc_feature: 29
ggtaatcatagaacaaaacacatgatgtaacatcaccataatcatatcaaattttgctacaacacaatttccaccatcacctttcgctatgcaaaa

SEQ ID NO: 42117 - DNA, 96 bp, Fusarium cuneirostrum
  misc_feature: 29
ttttattattttctcttttttttcttttttataattatatctttttttttttcttttaattatttatttatttttaattcttgattcttttttctt

SEQ ID NO: 42118 - DNA, 96 bp, Fusarium cuneirostrum
  misc_feature: 29
gaaaagtgcgtcgcatacttggatgcgtcgcatgcttatcatgtacgttattatatattatttctttttttatacctaaggagttagttaataaaa

SEQ ID NO: 42119 - DNA, 96 bp, Fusarium cuneirostrum
  misc_feature: 29
ttttaatatgggttgcgatctggcgtttggtgtgagcaaacgtgagaacggagtgggaatttggtcacaaatgttaaggaagtatagagacttccc

SEQ ID NO: 42120 - DNA, 96 bp, Fusarium cuneirostrum
  misc_feature: 29
tttgtatggactcgattctggcatttggtgagccaaatcctgagaatgggccgagaaatcggtcacttctgttaacgaagtcactttttcttggtg

SEQ ID NO: 42121 - DNA, 96 bp, Fusarium cuneirostrum
  misc_feature: 29
tttctcgttagtgatataagctaggttgctcccttcggtcgcgggaagtctctatacttccttaacatttgtgaccaaattgtcactccgttccca

SEQ ID NO: 42122 - DNA, 96 bp, Fusarium cuneirostrum
  misc_feature: 29
gaaaaaaagaaaaaagggataaaaaaggaaggagagagaaaagaaaaagaaagaggggagaagaaaagaggaagggaaaaaagaaagagggagaaa

SEQ ID NO: 42123 - DNA, 96 bp, Fusarium cuneirostrum
  misc_feature: 29
tttctataaaagaagaagaactcccttagaattagaacctcccttagaattagaacctctcttagatctatatcctctcatataatacaaccaata

SEQ ID NO: 42124 - DNA, 96 bp, Fusarium cuneirostrum
  misc_feature: 29
taagccgacgtgcagtacgagaccgaggaacgaggtcgaagtggtgctagataatgtgaagaggtgaagtgcgaataacttcactagatcatgaaa

SEQ ID NO: 42125 - DNA, 96 bp, Fusarium cuneirostrum
  misc_feature: 29
tatggacgtgatgggtttgtcctagattcgtccaaatctgaatcatgtgcttggtgggagaagcgtgtcagatttgaacgttttttttgcctgaaa

SEQ ID NO: 42126 - DNA, 96 bp, Fusarium cuneirostrum
  misc_feature: 29
gtattatagtatatataagatagagaggttagaggaggtatattataaggtagatatatatctatgaagggggatagatatatagaagagaataaa

SEQ ID NO: 42127 - DNA, 96 bp, Fusarium cuneirostrum
  misc_feature: 29
tttattatttatcttttctttctccttattatatttcttctatttcttctataattattctttcttctttaattttctttatttctctcctctctt

SEQ ID NO: 42128 - DNA, 96 bp, Fusarium cuneirostrum
  misc_feature: 29
aataaagagaatataagatttaggcttaataaattaaaggttaggtaaattatatttaataataaatataaaagcgaggataaaggtaataataaa

SEQ ID NO: 42129 - DNA, 96 bp, Fusarium cuneirostrum
  misc_feature: 29
tttaggattattattaatatagctaagttattattataattaatacttttagcctaatatatataataagcgaacaaaataaataagcaagtgaga

SEQ ID NO: 42130 - DNA, 96 bp, Fusarium cuneirostrum
  misc_feature: 29
tttagcgtcgtcatcgattatcatttaccgtcattctagattatctcggatatgagataataagcggcgtgctgcaactgagagtctggggaactt

SEQ ID NO: 42131 - DNA, 96 bp, Fusarium cuneirostrum
  misc_feature: 29
tttaattactctcgactaccttaacctctataagcgggtctagcttatctaattttgtaaaggactgaaggatatagactataaagtcctcgtaag

SEQ ID NO: 42132 - DNA, 96 bp, Fusarium cuneirostrum
  misc_feature: 29
tttaatctgatgtgaataacttcaaaagtattttcccgaggccgaggacgtaggacgcaggctgagggattgacaatagactgaactcaagtgaag

SEQ ID NO: 42133 - DNA, 96 bp, Fusarium cuneirostrum
  misc_feature: 29
aggacgtaggacgcagcccgagggatggactatctaataaactcgagtaaagagttacgagcctcgcggagagaggtcttccattccttttttaaa

SEQ ID NO: 42134 - DNA, 96 bp, Fusarium cuneirostrum
  misc_feature: 29
ttggagttactcctccacacttgacccaactcaaacacagcatcatcaaatctacttcgaaactcccttctcagtacccatggcgtggataaacaa

SEQ ID NO: 42135 - DNA, 96 bp, Fusarium cuneirostrum
  misc_feature: 29
aactccaacgatgctttgtgagacttaccggaataggtaatggtgatgacctcaagtggtattgtagttagtatagacagtgatatgtgagcacaa

SEQ ID NO: 42136 - DNA, 96 bp, Fusarium cuneirostrum
  misc_feature: 29
ccacaggctccctcctactttactcacgtcatgacccacactccgggtcattcttcactgtcgtgtttgactctgcgtcaattgaaggcatcacaa

SEQ ID NO: 42137 - DNA, 96 bp, Fusarium cuneirostrum
  misc_feature: 29
tatcctacaacattatacttggtcgtctctactcctcctccctcttaccataacgctcccgcaaccctgactcgatcacctctcgcaggataccaa

SEQ ID NO: 42138 - DNA, 96 bp, Fusarium cuneirostrum
  misc_feature: 29
ttcttgctctcgcaatgcatttcatgtttacgtgaggggattcacagagcgcatctctgttgaattaaagtaacatcacatcgtctccctgtcggt

SEQ ID NO: 42139 - DNA, 96 bp, Fusarium cuneirostrum
  misc_feature: 29
agcctatctcacacgcattaggaaacatctctttctgaaaagaagaaagaagaaagaagaaagaagaaagaagaaagaagaaagaagaaagaagaa

SEQ ID NO: 42140 - DNA, 96 bp, Fusarium cuneirostrum
  misc_feature: 29
gcattaggaaacatctctttctgaaaagaagaaagaagaaagaagaaagaagaaagaagaaagaagaaagaagaaagaagaaagaagaaagaagaa

SEQ ID NO: 42141 - DNA, 96 bp, Fusarium cuneirostrum
  misc_feature: 29
ttctataatttaatcctttttaccttttagcgttaatttaatatcttatttatttatttaagttttttaattttagccttaaataagataacctta

SEQ ID NO: 42142 - DNA, 96 bp, Fusarium cuneirostrum
  misc_feature: 29
gatcgctcactcgttcactcctcctccggatagaatacaaactcactctgttcgtctcctcacgttgttgcggtaaactcgtcctccgtcctcgaa

SEQ ID NO: 42143 - DNA, 96 bp, Fusarium cuneirostrum
  misc_feature: 29
ttcccttctcgcccagtgtcctgagcgctcgctgctttaacctaagtaggtggtgagcgttgggtgagcaactcaggcaaatgggtcggccccatc

SEQ ID NO: 42144 - DNA, 96 bp, Fusarium cuneirostrum
  misc_feature: 29
taagataaacccgggttaataataactaatatatatagtaataagcttctctatactcttaattaactaataattatagttaataaatagcgggaa

SEQ ID NO: 42145 - DNA, 96 bp, Fusarium cuneirostrum
  misc_feature: 29
ctagatatagtcgcagtgccttctctaatattccctggggtaccactactatacgttagatggtagttatcgcaattgagttgcttagcccctgaa

SEQ ID NO: 42146 - DNA, 96 bp, Fusarium cuneirostrum
  misc_feature: 29
ttcagacaacctccgcttcagcagatccgcgtccaagaagcagatcgtcacagcgcacacgctggaccgtagacagcgcccaaggctcgtcttgac

SEQ ID NO: 42147 - DNA, 96 bp, Fusarium cuneirostrum
  misc_feature: 29
acgaacgtggtgagtattggagtgattcggagaatgagtgaggagaacgaacggtatgctaaaagcaaacaggagcgaagcgactgctatcgtgaa

SEQ ID NO: 42148 - DNA, 96 bp, Fusarium cuneirostrum
  misc_feature: 29
aagtatataagtaaagataaataaattaagttaaagaaataaggaaaataaagtatttaaaattaataaaaaagggtaaaaaaaagtaaaaaataa

SEQ ID NO: 42149 - DNA, 96 bp, Fusarium cuneirostrum
  misc_feature: 29
ttatttatatttaatattaaagttagaaatatttttaggtatctttttatttatagataatctatttattaatacttaataccgaaaataatttat

SEQ ID NO: 42150 - DNA, 96 bp, Fusarium cuneirostrum
  misc_feature: 29
gtgtttagatcgttcgccctctgggctctattcgactgctgtctcaccctcaccactcgccgtctagctcgtggttctcttttaccactacaataa

SEQ ID NO: 42151 - DNA, 96 bp, Fusarium cuneirostrum
  misc_feature: 29
ttattaagcttaagtaataaaggtatattctttttatacttaaagctttctatatttctaccctttttattattatatctataaaataagactttt

SEQ ID NO: 42152 - DNA, 96 bp, Fusarium cuneirostrum
  misc_feature: 29
tataaccaattaattaattagtgtctattatctcttgatccttaatggccatgaaagtcactactccgtcgattttgagagatattgctaggataa

SEQ ID NO: 42153 - DNA, 96 bp, Fusarium cuneirostrum
  misc_feature: 29
ccacttcggtatcatctttcgatgtgcgcattgactgttggtcaattgatgatgttatcgtgagcagtgaccttgcgaccttgctcattattataa

SEQ ID NO: 42154 - DNA, 96 bp, Fusarium cuneirostrum
  misc_feature: 29
cttatcgtaatttaataaagctatagctaaatatagctaaaataaaaatagatagaagattttaatatatcttactatcttccttataaggcctaa

SEQ ID NO: 42155 - DNA, 96 bp, Fusarium cuneirostrum
  misc_feature: 29
ttagataattaatataaattaggaataatattaacttaggcttaaatactattatatcgattaaataatattaaatgcttaacttagtagagcttt

SEQ ID NO: 42156 - DNA, 96 bp, Fusarium cuneirostrum
  misc_feature: 29
cgtcagggcgaggtgcagaacgagtcgaccgacagggagacgatgtgatgttactttaattcaacagagatgcgctctgtgaatcccctcacgtaa

SEQ ID NO: 42157 - DNA, 96 bp, Fusarium cuneirostrum
  misc_feature: 29
ttacctctcgctacgctcgagtgcggagtgacaagtcactccttagcgagacaaaataaatctcgctctcccttacgggacaagcataattactat

SEQ ID NO: 42158 - DNA, 96 bp, Fusarium cuneirostrum
  misc_feature: 29
ttaattattattaacctaactggaaccttaaattactagggatatactctaggtaattccgctattaaatagttttcgcttaataaaataatattc

SEQ ID NO: 42159 - DNA, 96 bp, Fusarium cuneirostrum
  misc_feature: 29
attattaataatttaaatttaggtttaaatcttaacttaataattaaagatagctttcttctcgctattacctacttaagtaagagctttaattaa

SEQ ID NO: 42160 - DNA, 96 bp, Fusarium cuneirostrum
  misc_feature: 29
ttaatgatacttgtgatttgtatgtgaccttaaatgaaatgtgatatgaacgtagtcgtagtaagaagacatgggaatggcttcatccataaatga

SEQ ID NO: 42161 - DNA, 96 bp, Fusarium cuneirostrum
  misc_feature: 29
ttaatctgatgtgaataacttcaaaagtattttcccgaggccgaggacgtaggacgcaggctgagggattgacaatagactgaactcaagtgaaga

SEQ ID NO: 42162 - DNA, 96 bp, Fusarium cuneirostrum
  misc_feature: 29
tatttttaatactaaagataagggagccttttttaatatcttacttttacctttctctttagcgttattattatcctttataattattattattaa

SEQ ID NO: 42163 - DNA, 96 bp, Fusarium cuneirostrum
  misc_feature: 29
acgatattaaagctaggcttaaaatataggtattttccatccggttttaaataatatacttaataagcgagccggttagataaataagctagttaa

SEQ ID NO: 42164 - DNA, 96 bp, Fusarium cuneirostrum
  misc_feature: 29
ggactaaattcttttagttttctaacttagatttctaattagccgaaaataaccctactaattattataaatataccttaactaaggcatatttaa

SEQ ID NO: 42165 - DNA, 96 bp, Fusarium cuneirostrum
  misc_feature: 29
acttattcttatatttattgattttaaccttagcggctattaatatagattttaattataggatattaaaagttagtagtgggatatatactttaa

SEQ ID NO: 42166 - DNA, 96 bp, Fusarium cuneirostrum
  misc_feature: 29
ttaaactcaagaatccatgccatcatcgcttgaccgtgacgatttcctcctttggattagtacagtttttgaagagcgtgacgatttcctaattag

SEQ ID NO: 42167 - DNA, 96 bp, Fusarium cuneirostrum
  misc_feature: 29
gttggagttactcctccacacttgacccaactcaaacacagcatcatcaaatctacttcgaaactcccttctcagtacccatggcgtggataaaca

SEQ ID NO: 42168 - DNA, 96 bp, Fusarium cuneirostrum
  misc_feature: 29
tgttgagtagtgactatgtaacgggaccgttttcccgactatgctgaaacgggagttggtgatgacttcacttctgccgactccacatactttgct

SEQ ID NO: 42169 - DNA, 96 bp, Fusarium cuneirostrum
  misc_feature: 29
acggaggcgggaaggcgattaatgggggtaccatctctattgatggtggcaaggtacgcagccaggcattttactctgaatattcctttactaaca

SEQ ID NO: 42170 - DNA, 96 bp, Fusarium cuneirostrum
  misc_feature: 29
cgaaagggttgttgagtagtgactatgtaacgggaccgttttcccgactatgctgaaacgggagttggtgatgacttcacttctgccgactccaca

SEQ ID NO: 42171 - DNA, 96 bp, Fusarium cuneirostrum
  misc_feature: 29
tgtgatgtctgtaacgtcgctacgtgttccttcgtcacactcactccgcacgtcctccctccggtcgtccgtactaaggatatagtcatagactcg

SEQ ID NO: 42172 - DNA, 96 bp, Fusarium cuneirostrum
  misc_feature: 29
tgtgagtcttctgtctttgtacactgagactgctgctgtatacgcagctgggttacctgaacgtgcgtaagtcagtgagaaggatgtcggacgaca

SEQ ID NO: 42173 - DNA, 96 bp, Fusarium cuneirostrum
  misc_feature: 29
gtcaaataaaaaagtaaaggtcgttggatccccaactccagaaagcgtcctacgacagctcaatatataaccctacgggtaatcgagtcgctcaca

SEQ ID NO: 42174 - DNA, 96 bp, Fusarium cuneirostrum
  misc_feature: 29
tgtctgctcggattgctgtctgaaatctctttcatcctctctggaagcattacgggagaactggtggtcgatttccggaccgatgatgtctatacc

SEQ ID NO: 42175 - DNA, 96 bp, Fusarium cuneirostrum
  misc_feature: 29
tgtcaatccttcaccctgcacgctacgcgctcgggctcaggactatcttgggtacatgatcacgactacgattcaaaataataataatgtcacata

SEQ ID NO: 42176 - DNA, 96 bp, Fusarium cuneirostrum
  misc_feature: 29
gccaccaagaaaaagtgacttcgttaacagaagtgaccgatttctcggcccattctcaggatttggctcaccaaatgccagaatcgagtccataca

SEQ ID NO: 42177 - DNA, 96 bp, Fusarium cuneirostrum
  misc_feature: 29
tgtatagcactcctctcgtcgtgtgtacgcggtcgcgtacataaagaacaagatcgatcactcgatcaaactcgtccctcgctctttcttacttgc

SEQ ID NO: 42178 - DNA, 96 bp, Fusarium cuneirostrum
  misc_feature: 29
tgtaaatgtaaatgtaaatgtcttcttttattgttttcactgagtccggcggaggaggagggacgacggagccggattggcaagagtagtgcagct

SEQ ID NO: 42179 - DNA, 96 bp, Fusarium cuneirostrum
  misc_feature: 29
ctactgttggtcactccgttccccgcactcgtccgcatctttcgtgtcccactcaatccgtgcacaacatgaggctgtcaagacagaccacgacca

SEQ ID NO: 42180 - DNA, 96 bp, Fusarium cuneirostrum
  misc_feature: 29
caattgcttctctggcgttgtaacagggaaacgctgaatgatctcatagcagcctgaccgaacatgacgaagcccggccgcaacgaacctcgacca

SEQ ID NO: 42181 - DNA, 96 bp, Fusarium cuneirostrum
  misc_feature: 29
tgggtaccagcgaaacgagggctgataactttggtctataagcggtttcctttcaaacgcgtgcgttgattggaagctgggggaacaccgaggaac

SEQ ID NO: 42182 - DNA, 96 bp, Fusarium cuneirostrum
  misc_feature: 29
acatttcgtcggtgacgtttggtttacggcaaattgaaattgcaacagtaaatctcaagattgtggattcatacatataaatcctctcatcgccca

SEQ ID NO: 42183 - DNA, 96 bp, Fusarium cuneirostrum
  misc_feature: 29
ctacgggtaatcgagtcgctcacaatccgttcgagcgagcgcgtaatgaaacgcgtcagaaaaaaggttgacgccccgggcgccaaaagcactcca

SEQ ID NO: 42184 - DNA, 96 bp, Fusarium cuneirostrum
  misc_feature: 29
tggaaattgtgttgtagcaaaatttgatatgattatggtgatgttacatcatgtgttttgttctatgattacctgatgttgtagtgacgatagctt

SEQ ID NO: 42185 - DNA, 96 bp, Fusarium cuneirostrum
  misc_feature: 29
gcgcacatcgaaagatgataccgaagtgggtgtacgaggtgagtagatgagggagtgcggatgcgcgaccgacagaagtgtgtcgagggtcgagca

SEQ ID NO: 42186 - DNA, 96 bp, Fusarium cuneirostrum
  misc_feature: 29
tgacttagtgtgcgagtgattgattaaattgtaatcgtagatgtgaatgtgaataacttcaaaagtattttcccgaggccgaggacgtaggacgca

SEQ ID NO: 42187 - DNA, 96 bp, Fusarium cuneirostrum
  misc_feature: 29
tgcggagcgtagggtgacgaaggagcccgatgcgaggttacgagaacaccatggatatgtgtgttaccatttcatgtaggagtgcacgacggcttc

SEQ ID NO: 42188 - DNA, 96 bp, Fusarium cuneirostrum
  misc_feature: 29
tgcgagcccataaccttacgtggggcgagacaaataattattaaaaccacttttaatgtgtcgagaaccactactttttttcacttggcgagcatg

SEQ ID NO: 42189 - DNA, 96 bp, Fusarium cuneirostrum
  misc_feature: 29
gatagcctcacctttttttgactttgtgactttgagactttgactgtgatgatgactacttgtgagcccttgacataacataagcagggcgaggca

SEQ ID NO: 42190 - DNA, 96 bp, Fusarium cuneirostrum
  misc_feature: 29
tgcccctcggagacaagctcctctccccagttttaaccgcggataatccgcttggaaaaaaacctcttatagaccaaagttagagcacgctcgttt

SEQ ID NO: 42191 - DNA, 96 bp, Fusarium cuneirostrum
  misc_feature: 29
tgcagtatgtaagtggacgcctctaagacagacgagacggcgatgattgctgaccttggtgtatttgctggtgcagcgggtaagcggatacttccg

SEQ ID NO: 42192 - DNA, 96 bp, Fusarium cuneirostrum
  misc_feature: 29
tgcaagtcgtctttcaattgcgctggcgcgcgactaggaacagagtgacggtatttcaatcggagatttagtgagacgggcgaacgtggtttattc

SEQ ID NO: 42193 - DNA, 96 bp, Fusarium cuneirostrum
  misc_feature: 29
gccgtctagctcgtggttctcttttaccactacaataacagttcactcttctcgttcacaaatgcacaatcaattcaaatcacaagtcatacatca

SEQ ID NO: 42194 - DNA, 96 bp, Fusarium cuneirostrum
  misc_feature: 29
tgaaaattaaattggcgatctcccctttcctatgacaccttgttagtaaaggaatattcagagtaaaatgcctggctgcgtaccttgccaccatca

SEQ ID NO: 42195 - DNA, 96 bp, Fusarium cuneirostrum
  misc_feature: 29
tcacttccacatcaggcaactctacaaatctcaccaagttcacattgcatctatctacactaaaaatctccaagatcgtcatcgacccattcatca

SEQ ID NO: 42196 - DNA, 96 bp, Fusarium cuneirostrum
  misc_feature: 29
tccttcactacttcttccttccgaagatagcttaccgtagaaaagatatgcgtcagataagcgacgcagtaatatgctctcaagaatagcatatca

SEQ ID NO: 42197 - DNA, 96 bp, Fusarium cuneirostrum
  misc_feature: 29
aagtgggtgtacgaggtgagtagatgagggagtgcggatgcgcgaccgacagaagtgtgtcgagggtcgagcagacccgagccagaaacgagctca

SEQ ID NO: 42198 - DNA, 96 bp, Fusarium cuneirostrum
  misc_feature: 29
tgactgctgtcaattgaagtcatcaccatctctgtgtgatgtctgtaacgtcgctacgtgttccttcgtcacactcactccgcacgtcctccctcc

SEQ ID NO: 42199 - DNA, 96 bp, Fusarium cuneirostrum
  misc_feature: 29
tgacagcagtcaaacatgaatgcaggatgcgactgaagtgagtgcacgaggagaaataaaagagggggagacggacgtcgacccagacacacccga

SEQ ID NO: 42200 - DNA, 96 bp, Fusarium cuneirostrum
  misc_feature: 29
tgacaactgaacctgaccctcggagaggaagcaggaactgtatagttctaccgaagcccgtcagggcgaggtgcagaacgagtcgaccgacaggga

SEQ ID NO: 42201 - DNA, 96 bp, Fusarium cuneirostrum
  misc_feature: 29
tgaaggttgccttgttgagcctgaacctccttcgtgacatagaggccggccgtacgaacgcttttgggtgaacaaactttctccgacgcagcagcg

SEQ ID NO: 42202 - DNA, 96 bp, Fusarium cuneirostrum
  misc_feature: 29
gaaaggggagatcgccaatttaattttcattgaaatatgggaggagtagagacgacgacagacattgtgtatggtatccgggaacagggaggttca

SEQ ID NO: 42203 - DNA, 96 bp, Fusarium cuneirostrum
  misc_feature: 29
tgaaatggtaacacacatatccatggtgttctcgtaacctcgcatcgggctccttcgtcaccctacgctccgcacgtcgccctacgggctccgtat

SEQ ID NO: 42204 - DNA, 96 bp, Fusarium cuneirostrum
  misc_feature: 29
ataaatagctatttctctataaagaaatttttctaaaagtccataaaaatatatatagcttattttatagttaaaaagctaaaaatagctttttca

SEQ ID NO: 42205 - DNA, 96 bp, Fusarium cuneirostrum
  misc_feature: 29
tctttttttttctttttttcttctctctctatttaatagcttactcctttctctctttttaccctagatattattttatttctctcctagacctta

SEQ ID NO: 42206 - DNA, 96 bp, Fusarium cuneirostrum
  misc_feature: 29
gatcgtacatctccttcactacttcttccttccgaagatagcttaccgtagaaaagatatgcgtcagataagcgacgcagtaatatgctctcaaga

SEQ ID NO: 42207 - DNA, 96 bp, Fusarium cuneirostrum
  misc_feature: 29
tcttccctgcgcccctacggggcttgctcatccgttcgggactcaagtggtgtaactctcaccactcctgttccattcacattctacgtcacaatt

SEQ ID NO: 42208 - DNA, 96 bp, Fusarium cuneirostrum
  misc_feature: 29
tctgttggagaagcagtaaattagagttgggaatggcttcacttttttccactcttggatatgtagatagtgacacttgtaattgacgctcgccct

SEQ ID NO: 42209 - DNA, 96 bp, Fusarium cuneirostrum
  misc_feature: 29
attagtttaggcctgagccagggaacaccatcaactcgttagagcggcttttaggagatcggaagagcacacgtctgaactccagtcacgatcaga

SEQ ID NO: 42210 - DNA, 96 bp, Fusarium cuneirostrum
  misc_feature: 29
ctcgaggtggatttgacggagtctcaaaactggaacagtttttgtatggactcgattctggcatttggtgagccaaatcctgagaatgggccgaga

SEQ ID NO: 42211 - DNA, 96 bp, Fusarium cuneirostrum
  misc_feature: 29
tctccgcgaggctcgtaactctttactcgagtttattagatagtccatccctcgggctgcgtcctacgtcctcgccctccggactcgtttaaagat

SEQ ID NO: 42212 - DNA, 96 bp, Fusarium cuneirostrum
  misc_feature: 29
tctatgaaacaaacaaacaaacaaacaaacaaacaaacatccgcgaggtgtggtactggtagcctttggttactggcaccaaccccaagcgccctt

SEQ ID NO: 42213 - DNA, 96 bp, Fusarium cuneirostrum
  misc_feature: 29
ggttatggatgaggctcgctcagtagccagtcacgcattgaagctattcccaactcccgttcgggaaatctcacttccacagaaaagtctcctaga

SEQ ID NO: 42214 - DNA, 96 bp, Fusarium cuneirostrum
  misc_feature: 29
tcgttcctcggtctcgtactgcacgtcggcttacgcctccgtaattctttacacagttcttgcttgggcaatgaactcttcacttgagttcagtct

SEQ ID NO: 42215 - DNA, 96 bp, Fusarium cuneirostrum
  misc_feature: 29
tcgtccgacatccttctcactgacttacgcacgttcaggtaacccagctgcgtatacagcagcagtctcagtgtacaaagacagaagactcacatc

SEQ ID NO: 42216 - DNA, 96 bp, Fusarium cuneirostrum
  misc_feature: 29
cttggtatagggggggactacgggacacgggacagtgaagaatgaacgtgtgtacccaggagtaatcgtcttgagtcagcttgctgaccttgacga

SEQ ID NO: 42217 - DNA, 96 bp, Fusarium cuneirostrum
  misc_feature: 29
tatgcagttgccttgctattcgcgcgttcgttcatcaatctggcgacacacctcctggtctaacaaacctcctttctgagttttaggtaacagcga

SEQ ID NO: 42218 - DNA, 96 bp, Fusarium cuneirostrum
  misc_feature: 29
aggctaaagccgctcccggcagggaaagcagacactgcgtaataaatgccgacgaacggagtgaggaggtgcggagagaagatggaagcgtagcga

SEQ ID NO: 42219 - DNA, 96 bp, Fusarium cuneirostrum
  misc_feature: 29
gaagagaataattaatatagagaaagcttaatatataaaaagaataagaaatctaagttatataaatataaatatagataagaaaaatattagcga

SEQ ID NO: 42220 - DNA, 96 bp, Fusarium cuneirostrum
  misc_feature: 29
tcgcgggaagtctctatacttccttaacatttgtgaccaaattcccactccgttctcacgtttgctcacaccaaacgccagatcgcaacccatatt

SEQ ID NO: 42221 - DNA, 96 bp, Fusarium cuneirostrum
  misc_feature: 29
taaaagcaaacaggagcgaagcgactgctatcgtgaacggagtgaacattactgttactacgacgaccggagggagttatcgcaaagcgaaggcga

SEQ ID NO: 42222 - DNA, 96 bp, Fusarium cuneirostrum
  misc_feature: 29
acccggtttttggagtgccataactttggtctataagaggttttttgacaaaagctgtgctttgggctcaagaacggggtgagtcacaagtggcga

SEQ ID NO: 42223 - DNA, 96 bp, Fusarium cuneirostrum
  misc_feature: 29
aagaatgataagctcccgcaggggaggcaggaactgtagtcctctaccgaccggagggaggtgcggagcgtagtcgagcagggcgagacgatgcga

SEQ ID NO: 42224 - DNA, 96 bp, Fusarium cuneirostrum
  misc_feature: 29
tcgataataagaatatactctatcttattatatttctcttgctttaatacttctagcttataaagtctctaattaagtataaactttataaaaaat

SEQ ID NO: 42225 - DNA, 96 bp, Fusarium cuneirostrum
  misc_feature: 29
cacattctacgtcacaattccatctaacactacaattacaattacaattacaatcagtcacgatggctcgccattagggagggaaatggtgctcga

SEQ ID NO: 42226 - DNA, 96 bp, Fusarium cuneirostrum
  misc_feature: 29
cgtcgttcctcctcataacgttccgtccacccgcacttcagtcggtcccctccttctcgtgcttacttactccactcttcttcgtccctcattcga

SEQ ID NO: 42227 - DNA, 96 bp, Fusarium cuneirostrum
  misc_feature: 29
gttctctctctgcctcctcagcgcgtttctgttccctttcggcgcgttgctgctctctcgcagcgcgttgttccgactcctttaaaagccgttcga

SEQ ID NO: 42228 - DNA, 96 bp, Fusarium cuneirostrum
  misc_feature: 29
ctgacttgttttatttttttcgaggacggaggacgagtttaccgcaacaacgtgaggagacgaacagagtgagtttgtattctatccggaggagga

SEQ ID NO: 42229 - DNA, 96 bp, Fusarium cuneirostrum
  misc_feature: 29
gtttccctcctacatcatctgtctgagctcagagagcgagtcgatcttggattcctatgcaagtcgtctttcaattgcgctggcgcgcgactagga

SEQ ID NO: 42230 - DNA, 96 bp, Fusarium cuneirostrum
  misc_feature: 29
acatattagtgagctcccgcatttatatatagcgagcatgttttaatctgatgtgaataacttcaaaagtattttcccgaggccgaggacgtagga

SEQ ID NO: 42231 - DNA, 96 bp, Fusarium cuneirostrum
  misc_feature: 29
atgagcaagccccgtaggggcgcagggaagactgagggattggcaatagtcattacaccgccggaggcccgagtcggaactgtataatcctacgga

SEQ ID NO: 42232 - DNA, 96 bp, Fusarium cuneirostrum
  misc_feature: 29
tccgggaacagggaggttcacggcataaaagttgaaaagtgttattttgcatagcgaaaggtgatggtggaaattgtgttgtagcaaaatttgata

SEQ ID NO: 42233 - DNA, 96 bp, Fusarium cuneirostrum
  misc_feature: 29
aaaagtgcgtcgcatacttggatgcgtcgcatgcttatcatgtacgttactcaaaagtcggtccattttacataatgtcccctggggcaaagcgga

SEQ ID NO: 42234 - DNA, 96 bp, Fusarium cuneirostrum
  misc_feature: 29
tcccggataccatacacaatgtctgtcgtcgtctctactcctcccatatttcaatgaaaattaaattggcgatctcccctttcctatgacaccttg

SEQ ID NO: 42235 - DNA, 96 bp, Fusarium cuneirostrum
  misc_feature: 29
tccccctcttttatttctcctcgtgcactcacttcagtcgcatcctgcattcatgtttgactgctgtcaattgaagtcatcaccatctctgtgtga

SEQ ID NO: 42236 - DNA, 96 bp, Fusarium cuneirostrum
  misc_feature: 29
tccacttgaggtcatcatgcactctcatgaagataactgaaccacatcttgtggtgttttagtaacgtcgctacgtgttccttcgtcacactcact

SEQ ID NO: 42237 - DNA, 96 bp, Fusarium cuneirostrum
  misc_feature: 29
tccacaatctcataccccgcagacagagtcgaggagtataagacagcgtcttttcccccgagaggttgagtgagcaggcgaactctgacttgtttt

SEQ ID NO: 42238 - DNA, 96 bp, Fusarium cuneirostrum
  misc_feature: 29
tcattttcatccacactggaatagtcccgaatcccgaggacgaaggacgcagggtgagggattgacaagagtatgttggcaacccatgaagagtta

SEQ ID NO: 42239 - DNA, 96 bp, Fusarium cuneirostrum
  misc_feature: 29
tcagttgtctgatacagttgaaagagtgggtgaactgtgttttaagattgcggaggcgtgtggacggagcggtaatccaccagcataccgcgaggt

SEQ ID NO: 42240 - DNA, 96 bp, Fusarium cuneirostrum
  misc_feature: 29
tcagcaagctgactaaaggcagactcagtccacacgttcgtccctcactgtcccgtgtcccgtagtccccccctataccaaggttaagaaacggct

SEQ ID NO: 42241 - DNA, 96 bp, Fusarium cuneirostrum
  misc_feature: 29
cgagcattaaataaagacggagcgcacataaactaaaaagggcacacatattagtgagctcccgcatttatatatagcgagcatgttttaatctga

SEQ ID NO: 42242 - DNA, 96 bp, Fusarium cuneirostrum
  misc_feature: 29
tatttaaataagaaatataataaaagattaagaataatacctttagtaataataatatattaacgtatatgataagcgagtgggacactcaagtga

SEQ ID NO: 42243 - DNA, 96 bp, Fusarium cuneirostrum
  misc_feature: 29
gaagacgaacagtgtggatgtgagtcttctgtctttgtacactgagactgctgctgtatacgcagctgggttacctgaacgtgcgtaagtcagtga

SEQ ID NO: 42244 - DNA, 96 bp, Fusarium cuneirostrum
  misc_feature: 29
gactgtatttatttttttgtgtgagacggagtcgagtctgatttcgactggaatcagttctgtttattccacggccgtggaaacacgaacaggtga

SEQ ID NO: 42245 - DNA, 96 bp, Fusarium cuneirostrum
  misc_feature: 29
aaacttaaataaaatggacgaggcccacgacttttttctacttggcgagcacttaatgatacttgtgatttgtatgtgaccttaaatgaaatgtga

SEQ ID NO: 42246 - DNA, 96 bp, Fusarium cuneirostrum
  misc_feature: 29
tcacatggaatgtgggcgacgaggacggagagtccgagtggggaggccgaaggccgaccggggaaagtgtgtcgagagcgagggggagcccgagcg

SEQ ID NO: 42247 - DNA, 96 bp, Fusarium cuneirostrum
  misc_feature: 29
tcacaagatcctccgtcgtaacctccttcggtgctacaagataaatcccgaggacccgtcctctcatgcgcgacgcgccatcacaactcgactctt

SEQ ID NO: 42248 - DNA, 96 bp, Fusarium cuneirostrum
  misc_feature: 29
tcaatcaatcaagttatgtcacaggttacacaaaatgaggttatcacgatatctacattgggaaaagtctactactacgccgactcaatctcttcc

SEQ ID NO: 42249 - DNA, 96 bp, Fusarium cuneirostrum
  misc_feature: 29
tatatattctttttttattattttctcttttttttcttttttataattatatctttttttttttcttttaattatttatttatttttaattcttga

SEQ ID NO: 42250 - DNA, 96 bp, Fusarium cuneirostrum
  misc_feature: 29
tcaaacgaagttccacaatcagcgatatagtcgcagaaccgaccgggagtaaatatgtgacggctaccaatccggctgttcagtgaccggcggggg

SEQ ID NO: 42251 - DNA, 96 bp, Fusarium cuneirostrum
  misc_feature: 29
acattacgttagtagtaaagagaaaatttttataagttagagttacctaccgaaaatacttagtcattaaagctagccttaaggataagactaata

SEQ ID NO: 42252 - DNA, 96 bp, Fusarium cuneirostrum
  misc_feature: 29
tattacttcttcgatctcgtttcactccatctcttttcatgatctagtgaagttattcgcacttcacctcttcacattatctagcaccacttcgac

SEQ ID NO: 42253 - DNA, 96 bp, Fusarium cuneirostrum
  misc_feature: 29
tatcttgggtacatgatcacgactacgattcaaaataataataatgtcacatatgcacagctcgctcgattaaataaagtatgaagtggtgctcgt

SEQ ID NO: 42254 - DNA, 96 bp, Fusarium cuneirostrum
  misc_feature: 29
atatttttaataaagatttaaataaggtattttatttattaaaagatatattattctaataatagggaatataatataatattacgcggaaatata

SEQ ID NO: 42255 - DNA, 96 bp, Fusarium cuneirostrum
  misc_feature: 29
agcttcacatgtattatgggcgagcattaaataaagacggagcgcacataaactaaaaagggcacacatattagtgagctcccgcatttatatata

SEQ ID NO: 42256 - DNA, 96 bp, Fusarium cuneirostrum
  misc_feature: 29
tatagaccaaagttatggcactccaaaaaccgggtaccccggtatttctcgttagtgatataagctaggttgctcccttcggtcgcgggaagtctc

SEQ ID NO: 42257 - DNA, 96 bp, Fusarium cuneirostrum
  misc_feature: 29
tataattacgtataggaagcctaattattaaattatatcactatttattttaaatagattaactttatagactataatattattgcggctatatat

SEQ ID NO: 42258 - DNA, 96 bp, Fusarium cuneirostrum
  misc_feature: 29
tataagggcaagcttatcgtaatttaataaagctatagctaaatatagctaaaataaaaatagatagaagattttaatatatcttactatcttcct

SEQ ID NO: 42259 - DNA, 96 bp, Fusarium cuneirostrum
  misc_feature: 29
tataagctaggttgctcccttcggtcgcgggaagtctctatacttccttaacatttgtgaccaaattcccactccgttctcacgtttgctcacacc

SEQ ID NO: 42260 - DNA, 96 bp, Fusarium cuneirostrum
  misc_feature: 29
cataacgtactaccatgagtgggccccatcatcccacacgtccactccttgcaccactgtgcatcgttcccttattacgcctccacttcggtccta

SEQ ID NO: 42261 - DNA, 96 bp, Fusarium cuneirostrum
  misc_feature: 29
ggtttaattcccagtaatatatagcgtatataataagcctctttttatatataatagcccttactttattatataactatagtaggttagtagcta

SEQ ID NO: 42262 - DNA, 96 bp, Fusarium cuneirostrum
  misc_feature: 29
tagcatcaataaaatagcatcgcctttactaatatagctctctaccttaattatcgataggaggcgggggctatccgggatcgcctaggtgcatat

SEQ ID NO: 42263 - DNA, 96 bp, Fusarium cuneirostrum
  misc_feature: 29
tagaatttaatagccctttattaaagctctcgcttaaataaataatagcgagaataaaggtatctttaattattaaattaagacttaaatttagat

SEQ ID NO: 42264 - DNA, 96 bp, Fusarium cuneirostrum
  misc_feature: 29
agacactttttaaatttaaaatacttttgaacctgtcgagacccattttcttgactttggatgcgagcatatgatgacttggattttgtgattcta

SEQ ID NO: 42265 - DNA, 96 bp, Fusarium cuneirostrum
  misc_feature: 29
gctcgggctcaggactatcttgggtacatgatcacgactacgattcaaaataataataatgtcacatatgcacagctcgctcgattaaataaagta

SEQ ID NO: 42266 - DNA, 96 bp, Fusarium cuneirostrum
  misc_feature: 29
atagtcattacaccgccggaggcccgagtcggaactgtataatcctacggagcccggagggcgacgtgcggagtgagtgtgacgaaggaacacgta

SEQ ID NO: 42267 - DNA, 96 bp, Fusarium cuneirostrum
  misc_feature: 29
gagcttacagtagggtgagctcccgcacttgtgttacgcgagcatatataaagtagatggtgataacctcaaaagagtccacgagccgagcgcgta

SEQ ID NO: 42268 - DNA, 96 bp, Fusarium cuneirostrum
  misc_feature: 29
ctaatatgtgtgccctttttagtttatgtgcgctccgtctttatttaatgctcgcccataatacatgtgaagctatcgtcactacaacatcaggta

SEQ ID NO: 42269 - DNA, 96 bp, Fusarium cuneirostrum
  misc_feature: 29
cctcgttcctcggtgttcccccagcttccaatcaacgcacgcgtttgaaaggaaaccgcttatagaccaaagttatcagccctcgtttcgctggta

SEQ ID NO: 42270 - DNA, 96 bp, Fusarium cuneirostrum
  misc_feature: 29
tacaccttttgaggactttatagtcgatattcttcagtcctttacatagccactagctataggttataagtgagaataatctatcgattatatatt

SEQ ID NO: 42271 - DNA, 96 bp, Fusarium cuneirostrum
  misc_feature: 29
tacaaattaaatgtgccttggtcaaggcacgtttacaataattggtagggggctggcagcgtatatataaccctaaccatctaatcagttactatg

SEQ ID NO: 42272 - DNA, 96 bp, Fusarium cuneirostrum
  misc_feature: 29
aagaaatgtagcggaataatattattatataccttaataatagtattataccggatattagtattatactatatatatagactaatagcgaaatta

SEQ ID NO: 42273 - DNA, 96 bp, Fusarium cuneirostrum
  misc_feature: 29
aatgaggccattcacaactccatctacagtaacatcatgctcactaatctaataaaaagaataaccagggctcgtcaaacgagtttatttaaatta

SEQ ID NO: 42274 - DNA, 96 bp, Fusarium cuneirostrum
  misc_feature: 29
cggccttgacgtatagaaagaaaagagggctaataaaaaaacgacctctattaagttacccgagtttccatttattatttgcaaatcatgccatta

SEQ ID NO: 42275 - DNA, 96 bp, Fusarium cuneirostrum
  misc_feature: 29
actcggtgtcatcttcgaccaccgtctcagttcatctctgatgaagttatcgccaaccactgtcgggcgcaatcaactcatgtctcatgaggatta

SEQ ID NO: 42276 - DNA, 96 bp, Fusarium cuneirostrum
  misc_feature: 29
attaaactataaggttatatagtttaagagtaatagtgagaataaggataaagataaagatataagagagtaaagataaaggtttatttaggatta

SEQ ID NO: 42277 - DNA, 96 bp, Fusarium cuneirostrum
  misc_feature: 29
agatagagaatatattataaatctatatccttaataataactctagcttaacatacttaataagcgagtaaaataaaaatcctaaccttcctatta

SEQ ID NO: 42278 - DNA, 96 bp, Fusarium cuneirostrum
  misc_feature: 29
taataaggcgagactaatactaacgagaactactcttggtttatatcggttaattacgctagactactctatattatagggttagagtaatatatt

SEQ ID NO: 42279 - DNA, 96 bp, Fusarium cuneirostrum
  misc_feature: 29
taagtaaaagttaaattccattaagttaatactatctctaaatataacgtacatcacaagtgagtgaaacacacaagcgagtgaaacaaaaatccc

SEQ ID NO: 42280 - DNA, 96 bp, Fusarium cuneirostrum
  misc_feature: 29
taagggcgcttggggttggtgccagtaaccaaaggctaccagtaccacacctcgcggatgtttgtttgtttgtttgtttgtttgtttgtttcatag

SEQ ID NO: 42281 - DNA, 96 bp, Fusarium cuneirostrum
  misc_feature: 29
taaatagggagcctgaggcacgaaggcgaagagtgtaggatcatggaggagggacgacgcaatgatcggttgactaaggacgggaacgaatggaat

SEQ ID NO: 42282 - DNA, 96 bp, Fusarium cuneirostrum
  misc_feature: 29
cttcgtcacatgttcctcgccccagtttttaatgccgtgcaaagcccggttcaaaaaaaaaccgcttatagaccaaagttatggcactccaaaaac

SEQ ID NO: 42283 - DNA, 96 bp, Fusarium cuneirostrum
  misc_feature: 29
gtgacccgaccccgatgtgtgaccgagacagatgtcgaggggaaagggtacatggcgagagcagcgctcgaggtggatttgacggagtctcaaaac

SEQ ID NO: 42284 - DNA, 96 bp, Fusarium cuneirostrum
  misc_feature: 29
cctggaatcagagtgagaatctggtacagattgttagcgaccgaagggagctttccagcttatagactaacgcgagtgacccggaacggggcaaac

SEQ ID NO: 42285 - DNA, 96 bp, Fusarium cuneirostrum
  misc_feature: 29
gttgtggacagtatcttgggcgtgtgccgagagggagcccagcagatgtaaatgttttgattttgtagagacccgaaagggttgttgagtagtgac

SEQ ID NO: 42286 - DNA, 96 bp, Fusarium cuneirostrum
  misc_feature: 29
aatgattatggaatgtgaatgccttcccgcataaatgagtctgggacccgaggacgtaggacgcaggggaccggattgacaacagagttgggcaac

SEQ ID NO: 42287 - DNA, 96 bp, Fusarium cuneirostrum
  misc_feature: 29
gttcccgtgcttagccactctccttcgttcgtccctcactctcgtcgtctatgacccacatctgattccactccgttccatcgatgtctaaagact

SEQ ID NO: 42288 - DNA, 96 bp, Fusarium cuneirostrum
  misc_feature: 29
gttatggatgaggctcgctcagtagccagtcacgcattgaagctattcccaactcccgttcgggaaatctcacttccacagaaaagtctcctagac

SEQ ID NO: 42289 - DNA, 96 bp, Fusarium cuneirostrum
  misc_feature: 29
gtgtatccatgcagatattgctggacctttcccggaagtgggagtagacgggggccagtactgggcctgcttcattgaagacttcactcaaatgtc

SEQ ID NO: 42290 - DNA, 96 bp, Fusarium cuneirostrum
  misc_feature: 29
gtgtatagcactcctctcgtcgtgtgtacgcggtcgcgtacataaagaacaagatcgatcactcgatcaaactcgtccctcgctctttcttacttg

SEQ ID NO: 42291 - DNA, 96 bp, Fusarium cuneirostrum
  misc_feature: 29
gtgtagtttgatttgtagtggtagatctttcctaatgtggatgtcgtgatggcctcactttttgtggactgagactgtgactgtaacatttcatgc

SEQ ID NO: 42292 - DNA, 96 bp, Fusarium cuneirostrum
  misc_feature: 29
gtgtacgttgccgtgatgttctgcagggagctcagacggcggcatcggcgtcgtctgttgtggcgtcaccatctgcggactcgttggactggattg

SEQ ID NO: 42293 - DNA, 96 bp, Fusarium cuneirostrum
  misc_feature: 29
gtggtttattcttttgtatcacggagtgatgaacgagatggttcgagtgcgaggaaggacgacggaggaggacaggagagcatcggagatgcacat

SEQ ID NO: 42294 - DNA, 96 bp, Fusarium cuneirostrum
  misc_feature: 29
gtgcggagcgtagggtgacgaaggagcccgatgcgaggttacgagaacaccatggatatgtgtgttaccatttcatgtaggagtgcacgacggctt

SEQ ID NO: 42295 - DNA, 96 bp, Fusarium cuneirostrum
  misc_feature: 29
gctacggctttcatacttactaagttgatcttggcagttgtctttaaactggctgagcttaacgtgttattgcgtaggtgcttaggcgttccgcac

SEQ ID NO: 42296 - DNA, 96 bp, Fusarium cuneirostrum
  misc_feature: 29
gtgatgtctgtaacgtcgctacgtgttccttcgtcacactcactccgcacgtcctccctccggtcgtccgtactaaggatatagtcatagactcgg

SEQ ID NO: 42297 - DNA, 96 bp, Fusarium cuneirostrum
  misc_feature: 29
gtgagtgtgacgaaggaacacgtagcgacgttacagacatcacacagagatggtgatgacttcaattgacagcagtcaaacatgaatgcaggatgc

SEQ ID NO: 42298 - DNA, 96 bp, Fusarium cuneirostrum
  misc_feature: 29
ggtgagacagcagtcgaatagagcccagagggcgaacgatctaaacaccaggtagtggtggattgtggtgtggaacacgtttggtgagagagtcac

SEQ ID NO: 42299 - DNA, 96 bp, Fusarium cuneirostrum
  misc_feature: 29
gtgaccgagacagatgtcgaggggaaagggtacatggcgagagcagcgctcgaggtggatttgacggagtctcaaaactggaacagtttttgtatg

SEQ ID NO: 42300 - DNA, 96 bp, Fusarium cuneirostrum
  misc_feature: 29
cgttcccgtgcttagccactctccttcgttcgtccctcactctcgtcgtctatgacccacatctgattccactccgttccatcgatgtctaaagac

SEQ ID NO: 42301 - DNA, 96 bp, Fusarium cuneirostrum
  misc_feature: 29
catcattttcacctgtgcacggcagtaggtcagtatctggcctttagtctcatggcgcttggtctgccgggtgaacaactgttgcgtgggcaagac

SEQ ID NO: 42302 - DNA, 96 bp, Fusarium cuneirostrum
  misc_feature: 29
gtctgcccctgcgaggacgcagtcgaagacttgagactgtatttatttttttgtgtgagacggagtcgagtctgatttcgactggaatcagttctg

SEQ ID NO: 42303 - DNA, 96 bp, Fusarium cuneirostrum
  misc_feature: 29
gtctacggtccagcgtgtgcgctgtgacgatctgcttcttggacgcggatctgctgaagcggaggttgtctgaactaccgacctttttactcgaag

SEQ ID NO: 42304 - DNA, 96 bp, Fusarium cuneirostrum
  misc_feature: 29
gtcgtccgacatccttctcactgacttacgcacgttcaggtaacccagctgcgtatacagcagcagtctcagtgtacaaagacagaagactcacat

SEQ ID NO: 42305 - DNA, 96 bp, Fusarium cuneirostrum
  misc_feature: 29
aacatcatcaattgaccaacagtcaatgcgcacatcgaaagatgataccgaagtgggtgtacgaggtgagtagatgagggagtgcggatgcgcgac

SEQ ID NO: 42306 - DNA, 96 bp, Fusarium cuneirostrum
  misc_feature: 29
gtcctgtcccctcccctaccggtccgggtccacatacgtcctcgtgccctgcatctcggctcattccatttcattcatgtgcgacgaagccatcgt

SEQ ID NO: 42307 - DNA, 96 bp, Fusarium cuneirostrum
  misc_feature: 29
gtaagacgagcggagcgagcgaatggggaagaagggagtggaacgaccggttttcatttggacgagtgagggacgatccgtccatactgcggggac

SEQ ID NO: 42308 - DNA, 96 bp, Fusarium cuneirostrum
  misc_feature: 29
ccagctgagtaagaaagggtctcgaatccctctcaaccgtgcttccgcaaacagagaaaatagaaaaagacagcgacgtccgtcgtatacaatgac

SEQ ID NO: 42309 - DNA, 96 bp, Fusarium cuneirostrum
  misc_feature: 29
gtcattcttgctctcgcaatgcatttcatgtttacgtgaggggattcacagagcgcatctctgttgaattaaagtaacatcacatcgtctccctgt

SEQ ID NO: 42310 - DNA, 96 bp, Fusarium cuneirostrum
  misc_feature: 29
gtcagcaaccgatcagtggccctagccaccgggctctaacccggcagctctgtttgtttgtttgtttgtttgtttgttttattcatagactgtccc

SEQ ID NO: 42311 - DNA, 96 bp, Fusarium cuneirostrum
  misc_feature: 29
gtagttgctcgcctctttctttaacggaaatggggcgagttaaaatattcttaaataacgatttaatactacgagcaccatttttatttcgatggc

SEQ ID NO: 42312 - DNA, 96 bp, Fusarium cuneirostrum
  misc_feature: 29
gtagagacgacgacagacattgtgtatggtatccgggaacagggaggttcacggcataaaagttgaaaagtgttattttgcatagcgaaaggtgat

SEQ ID NO: 42313 - DNA, 96 bp, Fusarium cuneirostrum
  misc_feature: 29
gtacgttatgtacggacataatcttacttgcgagggtgcgagacaagtataagggcaggggattgcccgttgcacttggagtgcttttggcgcccg

SEQ ID NO: 42314 - DNA, 96 bp, Fusarium cuneirostrum
  misc_feature: 29
gtaactgtacatcgcaagactcaaaatctaccggattttgggacttttcagaaactggcacagttttaatatgggttgcgatctggcgtttggtgt

SEQ ID NO: 42315 - DNA, 96 bp, Fusarium cuneirostrum
  misc_feature: 29
ggtttttcgagcgggttataactttggtctataggcgttttctttcaaaagccttggcttgattgaaaaggtgggggagagagcttgctcgagggg

SEQ ID NO: 42316 - DNA, 96 bp, Fusarium cuneirostrum
  misc_feature: 29
ggtttggggttggctctctcaaccaatgctgacgaaaagcgcgctgcgagagcttgatcgttggaacaccgaaggcagagaatttctcgaagagat

SEQ ID NO: 42317 - DNA, 96 bp, Fusarium cuneirostrum
  misc_feature: 29
atgacaccgtacgcactcctgtgctcagtaaaagggcttcattcaatgtcagccatcatactcgctccgcgatctgcccaacaaggcagggaaacc

SEQ ID NO: 42318 - DNA, 96 bp, Fusarium cuneirostrum
  misc_feature: 29
ggttattaagaaatgtagcggaataatattattatataccttaataatagtattataccggatattagtattatactatatatatagactaatagc

SEQ ID NO: 42319 - DNA, 96 bp, Fusarium cuneirostrum
  misc_feature: 29
ataaaagataactaattaggaaccgcgacctataatatataccgtaagcctgacctagatttatagaaggacttatgacttaccataagcttaacc

SEQ ID NO: 42320 - DNA, 96 bp, Fusarium cuneirostrum
  misc_feature: 29
ggtgatcagcctgtggataggagagttcgtttccggaaggtattggaagagattgagtcggcgtagtagtagacttttcccaatgtagatatcgtg

SEQ ID NO: 42321 - DNA, 96 bp, Fusarium cuneirostrum
  misc_feature: 29
ggtgagtagtaacggagtaactgtacatcgcaagactcaaaatctaccggattttgggacttttcagaaactggcacagttttaatatgggttgcg

SEQ ID NO: 42322 - DNA, 96 bp, Fusarium cuneirostrum
  misc_feature: 29
attacttcttcgatctcgtttcactccatctcttttcatgatctagtgaagttattcgcacttcacctcttcacattatctagcaccacttcgacc

SEQ ID NO: 42323 - DNA, 96 bp, Fusarium cuneirostrum
  misc_feature: 29
gacgtgcggagtgagtgtgacgaaggaacacgtagcgacgttactaaaacaccacaagatgtggttcagttatcttcatgagagtgcatgatgacc

SEQ ID NO: 42324 - DNA, 96 bp, Fusarium cuneirostrum
  misc_feature: 29
ccgctcctccctgcgccttcggcttgctcgtcggctcgggactatagttggtgactctctcaccaaacgtgttccacaccacaatccaccactacc

SEQ ID NO: 42325 - DNA, 96 bp, Fusarium cuneirostrum
  misc_feature: 29
ggtagtacgttatgtacggacataatcttacttgcgagggtgcgagacaagtataagggcaggggattgcccgttgcacttggagtgcttttggcg

SEQ ID NO: 42326 - DNA, 96 bp, Fusarium cuneirostrum
  misc_feature: 29
ataaatcaatcaggtcacattactatctaccacaaagaaaaagaagccatcgtcatctccgaattaggcaacctcgcggtatgctggtggattacc

SEQ ID NO: 42327 - DNA, 96 bp, Fusarium cuneirostrum
  misc_feature: 29
cgttcctcggtgttcccccagcttccaatcaacgcacgcgtttgaaaggaaaccgcttatagaccaaagttatcagccctcgtttcgctggtaccc

SEQ ID NO: 42328 - DNA, 96 bp, Fusarium cuneirostrum
  misc_feature: 29
gattcattacggcgagctgttggttccagataagtgctcgcataaagataaatgaagctatcacaactactaagaaaggcaactaaatcacacccc

SEQ ID NO: 42329 - DNA, 96 bp, Fusarium cuneirostrum
  misc_feature: 29
acaatcccagaactgaacccatacaaaagttgttcaaattttgatcgagtttgagctcgggtctgctcgaccctcgacacactctgcccctccccc

SEQ ID NO: 42330 - DNA, 96 bp, Fusarium cuneirostrum
  misc_feature: 29
agtacgttatgtacggacataatcttacttgcgagggtgcgagacaagtataagggcaggggattgcccgttgcacttggagtgcttttggcgccc

SEQ ID NO: 42331 - DNA, 96 bp, Fusarium cuneirostrum
  misc_feature: 29
atttgtgaccaaattcccactccgttctcacgtttgctcacaccaaacgccagatcgcaacccatattaaaactgtgccagtttctgaaaagtccc

SEQ ID NO: 42332 - DNA, 96 bp, Fusarium cuneirostrum
  misc_feature: 29
gggacaaaagaagcaagaagagaccgaagaacggcaaacggcaaacgacggagacgtcggggcgcgcgctcgcaatcatggaacagaactcgacag

SEQ ID NO: 42333 - DNA, 96 bp, Fusarium cuneirostrum
  misc_feature: 29
aatggcattatttttaactatataggctatttaatatatattcactttagtatttattaagcgtctatattatactaactctctcttaagtaagcc

SEQ ID NO: 42334 - DNA, 96 bp, Fusarium cuneirostrum
  misc_feature: 29
caagttgacaatcccgggtcgtcgtccctcctcctccccgggactcacgtttaggtttaattataaaaacaattacattcacatcatatgctcgcc

SEQ ID NO: 42335 - DNA, 96 bp, Fusarium cuneirostrum
  misc_feature: 29
ggccttgacgtatagaaagaaaagagggctaataaaaaaacgacctctattaagttacccgagtttccatttattatttgcaaatcatgccattat

SEQ ID NO: 42336 - DNA, 96 bp, Fusarium cuneirostrum
  misc_feature: 29
aagcttatcgtaatttaataaagctatagctaaatatagctaaaataaaaatagatagaagattttaatatatcttactatcttccttataaggcc

SEQ ID NO: 42337 - DNA, 96 bp, Fusarium cuneirostrum
  misc_feature: 29
ataagtaaaagttaaattccattaagttaatactatctctaaatataacgtacatcacaagtgagtgaaacacacaagcgagtgaaacaaaaatcc

SEQ ID NO: 42338 - DNA, 96 bp, Fusarium cuneirostrum
  misc_feature: 29
cgcacctccctccggtcggtagaggactacagttcctgcctcccctgcgggagcttatcattcttcatatgcagatgaggagactactgtcaatcc

SEQ ID NO: 42339 - DNA, 96 bp, Fusarium cuneirostrum
  misc_feature: 29
acttcttccttccgaagatagcttaccgtagaaaagatatgcgtcagataagcgacgcagtaatatgctctcaagaatagcatatcatccgactcc

SEQ ID NO: 42340 - DNA, 96 bp, Fusarium cuneirostrum
  misc_feature: 29
caacacgtcatacaaatgactcccgtccatctctcgtgccaacacgataatgtctcccgacataacacgccactcagtccttcgtggtcgtactcc

SEQ ID NO: 42341 - DNA, 96 bp, Fusarium cuneirostrum
  misc_feature: 29
ggagccggattggcaagagtagtgcagctgcccgcagggccgagtccatgactgtataattctaccccgagcggagcgatggggtgcggagcagag

SEQ ID NO: 42342 - DNA, 96 bp, Fusarium cuneirostrum
  misc_feature: 29
ccaaaacaggaaacaatgtagactaatctaagatacaaaacctccgaaaacgcccagcgtatttcagtccgaaaatagttccgcccccttggctcc

SEQ ID NO: 42343 - DNA, 96 bp, Fusarium cuneirostrum
  misc_feature: 29
catttgtgaccaaattcccactccgttctcacgtttgctcacaccaaacgccagatcgcaacccatattaaaactgtgccagtttctgaaaagtcc

SEQ ID NO: 42344 - DNA, 96 bp, Fusarium cuneirostrum
  misc_feature: 29
ggaatggcttcatccataaatgagtcctgagggcgaggaggaacgacgcagcctgaaggattgactagtagagtctcatctgcatgtgaagagttc

SEQ ID NO: 42345 - DNA, 96 bp, Fusarium cuneirostrum
  misc_feature: 29
caaaatatgggtagaaaaagaaaacagcaaggatatatcgactttcgtgcaagctgagctctcttcgttctgtgaacggacatcgtcgacgattcc

SEQ ID NO: 42346 - DNA, 96 bp, Fusarium cuneirostrum
  misc_feature: 29
ggaagcgtagatgggaaccgggtgtgaagccagtgttccagcgtcagcgcagtaaaagtgtgcgtgtcagtaggatacggagcccggctcggaagg

SEQ ID NO: 42347 - DNA, 96 bp, Fusarium cuneirostrum
  misc_feature: 29
accggccctgaaacttctctacattcgcagtgagcaactatgaaagggccaaatattaattagatttgagatatgacctggcttactcccatttcc

SEQ ID NO: 42348 - DNA, 96 bp, Fusarium cuneirostrum
  misc_feature: 29
aacgagcgtccataactttggtctataagaggtttttttccaaaacgcaccgcgttggttaaaactggggatgtcactttagggacaggggtttcc

SEQ ID NO: 42349 - DNA, 96 bp, Fusarium cuneirostrum
  misc_feature: 29
aactcgatggagccaagggggcggaactattttcggactgaaatacgctgggcgttttcggaggttttgtatcttagattagtctacattgtttcc

SEQ ID NO: 42350 - DNA, 96 bp, Fusarium cuneirostrum
  misc_feature: 29
cccatctacgaacacggcatcaagatatgacaccagcagagcgacacaaagtagcaagagatatcgcgagaattcccggaatcatcaaagaccagc

SEQ ID NO: 42351 - DNA, 96 bp, Fusarium cuneirostrum
  misc_feature: 29
aatgcccgcgttttcgtcgagatacaggttctttatcctgatagaccataattcgtcatcgcagtagcactctcgtcgccagccagatggatcagc

SEQ ID NO: 42352 - DNA, 96 bp, Fusarium cuneirostrum
  misc_feature: 29
gctgaagaagtgggcgtccgcccattatgtactcgctcactagctccgtccatgattacggtcgtacattctgttcgaccataagcgggtcccttc

SEQ ID NO: 42353 - DNA, 96 bp, Fusarium cuneirostrum
  misc_feature: 29
atcaaaagctctcttttttctctttaaccttatctatcttttaacccactttttataagagcttatactctataaaggcttaagccctttaagagc

SEQ ID NO: 42354 - DNA, 96 bp, Fusarium cuneirostrum
  misc_feature: 29
gctcgtggttctcttttaccactacaataacagttcactcttctcgttcacaaatgcacaatcaattcaaatcacaagtcatacatcaaagtcatg

SEQ ID NO: 42355 - DNA, 96 bp, Fusarium cuneirostrum
  misc_feature: 29
atcacatggaatgtgggcgacgaggacggagagtccgagtggggaggccgaaggccgaccggggaaagtgtgtcgagagcgagggggagcccgagc

SEQ ID NO: 42356 - DNA, 96 bp, Fusarium cuneirostrum
  misc_feature: 29
gctcgcatgaaatgttacagtcacagtctcagtccacaaaaagtgaggccatcacgacatccacattaggaaagatctaccactacaaatcaaact

SEQ ID NO: 42357 - DNA, 96 bp, Fusarium cuneirostrum
  misc_feature: 29
ctcctcatctgcatatgaagaatgataagctcccgcaggggaggcaggaactgtagtcctctaccgaccggagggaggtgcggagcgtagtcgagc

SEQ ID NO: 42358 - DNA, 96 bp, Fusarium cuneirostrum
  misc_feature: 29
gacacgcacacttttactgcgctgacgctggaacactggcttcacacccggttcccatctacgcttccgcttacactgcggcgcatcactgaccgc

SEQ ID NO: 42359 - DNA, 96 bp, Fusarium cuneirostrum
  misc_feature: 29
gcgaggcaaataaatacgttttaaatagactcgtttgacgagccccaattactattttatgcgagcagacatgactttgatgtatgacttgtgatt

SEQ ID NO: 42360 - DNA, 96 bp, Fusarium cuneirostrum
  misc_feature: 29
gcgaggaggaacgacgcagcctgaaggattgactagtagagtctcatctgcatgtgaagagttcatctccaagcagagactgtggtctcaataccg

SEQ ID NO: 42361 - DNA, 96 bp, Fusarium cuneirostrum
  misc_feature: 29
acaatctcaggattgaactcaccaaaaaactgttccagttttgagctcgtttctggctcgggtctgctcgaccctcgacacacttctgtcggtcgc

SEQ ID NO: 42362 - DNA, 96 bp, Fusarium cuneirostrum
  misc_feature: 29
cctacgggctccgtatttaaaaaaggaatggaagacctctctccgcgaggctcgtaactctttactcgagtttattagatagtccatccctcgggc

SEQ ID NO: 42363 - DNA, 96 bp, Fusarium cuneirostrum
  misc_feature: 29
aaaccagcggtggatctttccgcgatccgtgacgacctgacctgccggctacctggttggtgcttcctcgagaagccggagaatgggctgatgggc

SEQ ID NO: 42364 - DNA, 96 bp, Fusarium cuneirostrum
  misc_feature: 29
gccactgtttaatatggggcgaggcaaataaatacgttttaaatagactcgtttgacgagccccaattactattttatgcgagcagacatgacttt

SEQ ID NO: 42365 - DNA, 96 bp, Fusarium cuneirostrum
  misc_feature: 29
acaaattaaatgtgccttggtcaaggcacgtttacaataattggtagggggctggcagcgtatatataaccctaaccatctaatcagttactatgc

SEQ ID NO: 42366 - DNA, 96 bp, Fusarium cuneirostrum
  misc_feature: 29
cacaaagaaacagccctcctgtttccaagaataatactcgtcccagcctcgtccttactcgaaataaataatcgatcgtcgctccactcctattgc

SEQ ID NO: 42367 - DNA, 96 bp, Fusarium cuneirostrum
  misc_feature: 29
gatttgaattgaattgtgattgcgagccatcattcataacgaaatggggcgagacctaaaatataatttctaaacgtgttgagacccattttcttt

SEQ ID NO: 42368 - DNA, 96 bp, Fusarium cuneirostrum
  misc_feature: 29
gattcccgactccgtctcaggatttgactcaccaaatctcagaaacgaacacatacaaattttgtacaaattttgaaatggattcttgctcggtcg

SEQ ID NO: 42369 - DNA, 96 bp, Fusarium cuneirostrum
  misc_feature: 29
gaggtgcagttccctcacaagatcctccgtcgtaacctccttcggtgctacaagataaatcccgaggacccgtcctctcatgcgcgacgcgccatc

SEQ ID NO: 42370 - DNA, 96 bp, Fusarium cuneirostrum
  misc_feature: 29
gatgacttcaattacgtagattttagagcgagtactaagtaggtagggagcgaggctgaaaaacctagagcttacagtagggtgagctcccgcact

SEQ ID NO: 42371 - DNA, 96 bp, Fusarium cuneirostrum
  misc_feature: 29
cagttaagcgctcgagttcaatgggccagccatagcgtcagcaaattgcgtagataagacgagaactttgtaaacatgtttgtcacgagctcgatc

SEQ ID NO: 42372 - DNA, 96 bp, Fusarium cuneirostrum
  misc_feature: 29
caattacaatcagtcacgatggctcgccattagggagggaaatggtgctcgacaagtttaaagaagtgtatttaaatgttattgtctcgccctatc

SEQ ID NO: 42373 - DNA, 96 bp, Fusarium cuneirostrum
  misc_feature: 29
gatagcgaaagcggcataaaataagatagcctctaggatatctaggcttactataaatccttgattatgggattagtatatagaaggcttattacg

SEQ ID NO: 42374 - DNA, 96 bp, Fusarium cuneirostrum
  misc_feature: 29
gagtttaggcgtttgcctaacaaagtgcaggaagcacttgaatgtccgatggagtcggatgatatgctattcttgagagcatattactgcgtcgct

SEQ ID NO: 42375 - DNA, 96 bp, Fusarium cuneirostrum
  misc_feature: 29
cgagtctatttaaaacgtatttatttgcctcgccccatattaaacagtggcgagcaaagtatgtggagtcggcagaagtgaagtcatcaccaactc

SEQ ID NO: 42376 - DNA, 96 bp, Fusarium cuneirostrum
  misc_feature: 29
gagtgatgaacgagatggttcgagtgcgaggaaggacgacggaggaggacaggagagcatcggagatgcacatgggcgcagagcgccagagacaat

SEQ ID NO: 42377 - DNA, 96 bp, Fusarium cuneirostrum
  misc_feature: 29
agtaaaagttaaattccattaagttaatactatctctaaatataacgtacatcacaagtgagtgaaacacacaagcgagtgaaacaaaaatccctc

SEQ ID NO: 42378 - DNA, 96 bp, Fusarium cuneirostrum
  misc_feature: 29
ctttcgctatgcaaaataacacttttcaacttttatgccgtgaacctccctgttcccggataccatacacaatgtctgtcgtcgtctctactcctc

SEQ ID NO: 42379 - DNA, 96 bp, Fusarium cuneirostrum
  misc_feature: 29
gaattaaagtaacatcacatcgtctccctgtcggtcgactcgttctgcacctcgccctgacgggcttcggtagaactatacagttcctgcttcctc

SEQ ID NO: 42380 - DNA, 96 bp, Fusarium cuneirostrum
  misc_feature: 29
cttcgtttccccaaaaaaccgcttatagaccaaagttatggacgctcgtttgccccgttccgggtcactcgcgttagtctataagctggaaagctc

SEQ ID NO: 42381 - DNA, 96 bp, Fusarium cuneirostrum
  misc_feature: 29
ctcaagtacttaagggcctggagaccggcccatctcccgagcctggtcttcccaaccacattgcgctcggaagacaaagccacagggggtcagctc

SEQ ID NO: 42382 - DNA, 96 bp, Fusarium cuneirostrum
  misc_feature: 29
gagcggatgagtgagcgtagcgaaggaagactgagggattggcaatcgtagataacccccggaggggaagcagacactgcgtaataaaaccgaccg

SEQ ID NO: 42383 - DNA, 96 bp, Fusarium cuneirostrum
  misc_feature: 29
gagcattaaataaagacggagcgcacataaactaaaaagggcacacatattagtgagctcccgcatttatatatagcgagcatgttttaatctgat

SEQ ID NO: 42384 - DNA, 96 bp, Fusarium cuneirostrum
  misc_feature: 29
gagcatgatttcagattgtgaatgtttatgttggtgactgtaaatgtattcctcatccatgagtcccgagcggatgagtgagcgtagcgaaggaag

SEQ ID NO: 42385 - DNA, 96 bp, Fusarium cuneirostrum
  misc_feature: 29
ccttctactcttaccttcaccatgacccacactccgggtcatcttacacacagtgacatttcatgtttacgtgaggggattcacagagcgcatctc

SEQ ID NO: 42386 - DNA, 96 bp, Fusarium cuneirostrum
  misc_feature: 29
gagataataatacttaaataaacttgacgagcaccactcgactttaaatatggcgagcacttacttaatgtgacttttgtaattatttgtgactgt

SEQ ID NO: 42387 - DNA, 96 bp, Fusarium cuneirostrum
  misc_feature: 29
gagagtccgagtggggaggccgaaggccgaccggggaaagtgtgtcgagagcgagggggagcccgagcgaaatcgagttcaaaactggaacagttt

SEQ ID NO: 42388 - DNA, 96 bp, Fusarium cuneirostrum
  misc_feature: 29
gagaccggatgggcgaccacagacggagggcgagactgtgtcgagaccgattgcaaaagttggacaacttttcaactttttctgacatttttggtg

SEQ ID NO: 42389 - DNA, 96 bp, Fusarium cuneirostrum
  misc_feature: 29
agagcgagcccgacttgaaatcccatttcaaaatttgtacaaaatttgtatgtgttcgtttctgagatttggtgagtcaaatcctgagacggagtc

SEQ ID NO: 42390 - DNA, 96 bp, Fusarium cuneirostrum
  misc_feature: 29
gacgggcgaacgtggtttattcttttgtatcacggagtgatgaacgagatggttcgagtgcgaggaaggacgacggaggaggacaggagagcatcg

SEQ ID NO: 42391 - DNA, 96 bp, Fusarium cuneirostrum
  misc_feature: 29
agaaaatagaaaaagacagcgacgtccgtcgtatacaatgacctccggtcaaataaaaaagtaaaggtcgttggatccccaactccagaaagcgtc

SEQ ID NO: 42392 - DNA, 96 bp, Fusarium cuneirostrum
  misc_feature: 29
acgggcttcggtagaactatacagttcctgcttcctctccgagggtcaggttcagttgtcaagccctccgctcctccttcgctacgctcgctcgtc

SEQ ID NO: 42393 - DNA, 96 bp, Fusarium cuneirostrum
  misc_feature: 29
gaccaaagttatggacgctcgtttgccccgttccgggtcactcgcgttagtctataagagattaataggtggctccgccaccaagtggaagatact

SEQ ID NO: 42394 - DNA, 96 bp, Fusarium cuneirostrum
  misc_feature: 29
gacattgtgtatggtatccgggaacagggaggttcacggcataaaagttgaaaagtgttattttgcatagcgaaaggtgatggtggaaattgtgtt

SEQ ID NO: 42395 - DNA, 96 bp, Fusarium cuneirostrum
  misc_feature: 29
cgataacgagaccggtctcgagtggcttaagcactttgaccggcatacaaccaatcgatgtttgtttgtttgtttgtttgtttgtttgttttattc

SEQ ID NO: 42396 - DNA, 96 bp, Fusarium cuneirostrum
  misc_feature: 29
gaacgagtcgaccgacagggagacgatgtgatgttactttaattcaacagagatgcgctctgtgaatcccctcacgtaaacatgaaatgtcactgt

SEQ ID NO: 42397 - DNA, 96 bp, Fusarium cuneirostrum
  misc_feature: 29
cgttcgatcattccagtcgctccgctcctgtttgctattagcattgcgttcatccttcacttcatcttccagatatgtatagacactcacctgttc

SEQ ID NO: 42398 - DNA, 96 bp, Fusarium cuneirostrum
  misc_feature: 29
gaaagtgggagacggggaccggcgacgatatggaccgagacgaagagtcgagttgtgatggcgcgtcgcgcatgagaggacgggtcctcgggattt

SEQ ID NO: 42399 - DNA, 96 bp, Fusarium cuneirostrum
  misc_feature: 29
cttttctttctatacgtcaaggccgttaggttaatgactgcattcgcgcgtagataaaatggatttgcttctatatctgctgcctagctaccgtag

SEQ ID NO: 42400 - DNA, 96 bp, Fusarium cuneirostrum
  misc_feature: 29
atctacgtaattgaagtcatcatcacttccacatcaggcaactctacaaatctcaccaagttcacattgcatctatctacactaaaaatctccaag

SEQ ID NO: 42401 - DNA, 96 bp, Fusarium cuneirostrum
  misc_feature: 29
cgatcgtacatctccttcactacttcttccttccgaagatagcttaccgtagaaaagatatgcgtcagataagcgacgcagtaatatgctctcaag

SEQ ID NO: 42402 - DNA, 96 bp, Fusarium cuneirostrum
  misc_feature: 29
cttcaattgacgcagagtcaaacacgacagtgaagaatgacccggagtgtgggtcatgacgtgagtaaagtaggagggagcctgtggggcgaccgt

SEQ ID NO: 42403 - DNA, 96 bp, Fusarium cuneirostrum
  misc_feature: 29
cttaggttaaagcagcgagcgctcaggacactgggcgagaagggaaatagtggaagtcgatatttggattgcatattgggctgtattggttccctt

SEQ ID NO: 42404 - DNA, 96 bp, Fusarium cuneirostrum
  misc_feature: 29
ctattatttatattatttataaaagcctatttaatagctaaaaggggtctatttatgtaaaggactgaaggatatagactataaagtcctcgtaag

SEQ ID NO: 42405 - DNA, 96 bp, Fusarium cuneirostrum
  misc_feature: 29
cttaaagggacagaggtcccgcttcgcgacactgtttcggtgtcagacaacattattgtttgttttcttctcgcgttgttcgaagtcggatgagtg

SEQ ID NO: 42406 - DNA, 96 bp, Fusarium cuneirostrum
  misc_feature: 29
ctggggtcgtcaaggtcagcaagctgactcaagacgattactcctgggtacacacgttcattcttcactgtcccgtgtcccgtagtccccccctat

SEQ ID NO: 42407 - DNA, 96 bp, Fusarium cuneirostrum
  misc_feature: 29
atcgatcgcatgcatctcaacaaaggcaacgataggaacactagagtcatccatctgagattaaagaactaaagtatcgtacatgtaaaaaagcag

SEQ ID NO: 42408 - DNA, 96 bp, Fusarium cuneirostrum
  misc_feature: 29
ctgattcccgactccgtctcaggatttgactcaccaaatctcagaaacgaacacatacaaattttgtacaaattttgaaatggattcttgctcggt

SEQ ID NO: 42409 - DNA, 96 bp, Fusarium cuneirostrum
  misc_feature: 29
cattagtttaggcctgagccagggaacaccatcaactcgttagagcggcttttaggagatcggaagagcacacgtctgaactccagtcacgatcag

SEQ ID NO: 42410 - DNA, 96 bp, Fusarium cuneirostrum
  misc_feature: 29
caactcaaacctgtcacttcaacgacacatcaccatggagactgccggcctcgttattggggtcgccgggctcgccgggctcgccgggctcttcag

SEQ ID NO: 42411 - DNA, 96 bp, Fusarium cuneirostrum
  misc_feature: 29
cagaggtgcccggaagcagagctgaggacataagtagggcatcgcccactgaccgaacagagtgagatttctcttcctttcatcatcattccagag

SEQ ID NO: 42412 - DNA, 96 bp, Fusarium cuneirostrum
  misc_feature: 29
ctcgatggagccaagggggcggaactattttcggactgaaatacgctgggcgttttcggaggttttgtatcttagattagtctacattgtttcctg

SEQ ID NO: 42413 - DNA, 96 bp, Fusarium cuneirostrum
  misc_feature: 29
ctcctgtttccaagaataatactcgtcccagcctcgtccttactcgaaataaataatcgatcgtcgctccactcctattgctcgtcacttctcgtt

SEQ ID NO: 42414 - DNA, 96 bp, Fusarium cuneirostrum
  misc_feature: 29
ctcctgtaggttatggatgaggctcgctcagtagccagtcacgcattgaagctattcccaactcccgttcgggaaatctcacttccacagaaaagt

SEQ ID NO: 42415 - DNA, 96 bp, Fusarium cuneirostrum
  misc_feature: 29
cactcctgttccattcacattctacgtcacaattccatctaacactacaattacaattacaattacaatcagtcacgatggctcgccattagggag

SEQ ID NO: 42416 - DNA, 96 bp, Fusarium cuneirostrum
  misc_feature: 29
ctcccactttcagtctccctcttcggtcgattagtatatatgtgtgcccgtctcgtgcacatgtgtccagacacaaatcattatcactcacccgtt

SEQ ID NO: 42417 - DNA, 96 bp, Fusarium cuneirostrum
  misc_feature: 29
ctccaacagctctccagctgagtaagaaagggtctcgaatccctctcaaccgtgcttccgcaaacagagaaaatagaaaaagacagcgacgtccgt

SEQ ID NO: 42418 - DNA, 96 bp, Fusarium cuneirostrum
  misc_feature: 29
aaaagtgaacactgactgaagacggatgtcgagattgaaccacgaacgtggaagacgaacagtgtggatgtgagtcttctgtctttgtacactgag

SEQ ID NO: 42419 - DNA, 96 bp, Fusarium cuneirostrum
  misc_feature: 29
ctcacttgagtgtcccactcgcttatcatatacgttaatatattattattactaaaggtattattcttaatcttttattatatttcttatttaaat

SEQ ID NO: 42420 - DNA, 96 bp, Fusarium cuneirostrum
  misc_feature: 29
aaagggtacatggcgagagcagcgctcgaggtggatttgacggagtctcaaaactggaacagtttttgtatggactcgattctggcatttggtgag

SEQ ID NO: 42421 - DNA, 96 bp, Fusarium cuneirostrum
  misc_feature: 29
caaatgagagaggtacgaacgttccgtccacaatctcataccccgcagacagagtcgaggagtataagacagcgtcttttcccccgagaggttgag

SEQ ID NO: 42422 - DNA, 96 bp, Fusarium cuneirostrum
  misc_feature: 29
ctatgaataaaacaaacaaacaaacaaacaaacaaacaaacatcgattggttgtatgccggtcaaagtgcttaagccactcgagaccggtctcgtt

SEQ ID NO: 42423 - DNA, 96 bp, Fusarium cuneirostrum
  misc_feature: 29
ctagaactagataactctcctaagagatattattttctaaagaaatagtgctatataaggtagatagaagtcgctaaaacatttgaggaatataat

SEQ ID NO: 42424 - DNA, 96 bp, Fusarium cuneirostrum
  misc_feature: 29
ctacgggctccgtatttaaaaaaggaatggaagacctctctccgcgaggctcgtaactctttactcgagtttattagatagtccatccctcgggct

SEQ ID NO: 42425 - DNA, 96 bp, Fusarium cuneirostrum
  misc_feature: 29
actagattcttttagttttctatcctagattactagaaaagtatattcctatcgtatattaatacttaaaacttatagatagataaaagaataacg

SEQ ID NO: 42426 - DNA, 96 bp, Fusarium cuneirostrum
  misc_feature: 29
cgttatgtacggacataatcttacttgcgagggtgcgagacaagtataagggcaggggattgcccgttgcacttggagtgcttttggcgcccgggg

SEQ ID NO: 42427 - DNA, 96 bp, Fusarium cuneirostrum
  misc_feature: 29
atgaaatgtggaatgaaatggaacggagagaaagtgggtgcgtgggcacacacaaacccgaccggagccgtaggggcgaagggaggacgggagacg

SEQ ID NO: 42428 - DNA, 96 bp, Fusarium cuneirostrum
  misc_feature: 29
cgtctaccacatgatcctgtcatgtcaaccgagcggggcgaggggattgagtttaggcgtttgcctaacaaagtgcaggaagcacttgaatgtccg

SEQ ID NO: 42429 - DNA, 96 bp, Fusarium cuneirostrum
  misc_feature: 29
acttcgagaccaaacgtatacgagctgggcatcttgtgatcgaggcttgctttggatcaaagggaagcccggctctgggaagtcgacgttgctacg

SEQ ID NO: 42430 - DNA, 96 bp, Fusarium cuneirostrum
  misc_feature: 29
aatgagcaaggtcgcaaggtcactgctcacgataacatcatcaattgaccaacagtcaatgcgcacatcgaaagatgataccgaagtgggtgtacg

SEQ ID NO: 42431 - DNA, 96 bp, Fusarium cuneirostrum
  misc_feature: 29
aacgctcccgcaaccctgactcgatcacctctcgcaggataccaagtcgatcgtacatctccttcactacttcttccttccgaagatagcttaccg

SEQ ID NO: 42432 - DNA, 96 bp, Fusarium cuneirostrum
  misc_feature: 29
cggggcaaacgagcgtccataactttggtctataagaggttttgttttcaagctttagctgattacaaagctggggagggacacttgtgtcacggg

SEQ ID NO: 42433 - DNA, 96 bp, Fusarium cuneirostrum
  misc_feature: 29
cgggacttctctcgacgttccaatttcgaccacctctagatccaccagggatggcctagagtccttcgtgtgggcgccctgagcttctgtgcgctg

SEQ ID NO: 42434 - DNA, 96 bp, Fusarium cuneirostrum
  misc_feature: 29
cggcaagctcactcatccgacttcgaacaacgcgagaagaaaacaaacaataatgttgtctgacaccgaaacagtgtcgcgaagcgggacctctgt

SEQ ID NO: 42435 - DNA, 96 bp, Fusarium cuneirostrum
  misc_feature: 29
cggagatgcacatgggcgcagagcgccagagacaatctttgttgtcggatgtaagtaagagcgaaggagtgagcgatggactctttggatccttgg

SEQ ID NO: 42436 - DNA, 96 bp, Fusarium cuneirostrum
  misc_feature: 29
accttttgaggactttatagtcgatattcttcagtcctttacatagccactagctataggttataagtgagaataatctatcgattatatattccg

SEQ ID NO: 42437 - DNA, 96 bp, Fusarium cuneirostrum
  misc_feature: 29
atccacaatcttgagatttactgttgcaatttcaatttgccgtaaaccaaacgtcaccgacgaaatgtattaccaaacagcaagctaattgcagcg

SEQ ID NO: 42438 - DNA, 96 bp, Fusarium cuneirostrum
  misc_feature: 29
acgaagagtgaggacacataagacaacgtcttctgccggaggcgtcttgagtagaactcagacttgtattcttacttttgcaagtaagaaagagcg

SEQ ID NO: 42439 - DNA, 96 bp, Fusarium cuneirostrum
  misc_feature: 29
cgctcgtcttacatgggtccccaccggcctccactcattccattcgttcccgtccttagtcaaccgatcattgcgtcgtccctcctccatgatcct

SEQ ID NO: 42440 - DNA, 96 bp, Fusarium cuneirostrum
  misc_feature: 29
cgctcattttttatattatgataggttctgtatagcgacggaattgcgttgcgtggttactgggatattccgtgatgccctggacaattatcatcg

SEQ ID NO: 42441 - DNA, 96 bp, Fusarium cuneirostrum
  misc_feature: 29
cgcagtcctcgagttacgtccgtacgaagcgtactaccgtagtgtgggtccctgacatcccacagcgtccagtcatcaacgctcgcgctattcctt

SEQ ID NO: 42442 - DNA, 96 bp, Fusarium cuneirostrum
  misc_feature: 29
cgattagtatatatgtgtgcccgtctcgtgcacatgtgtccagacacaaatcattatcactcacccgttcgtgatcgctttcgctctatcattctt

SEQ ID NO: 42443 - DNA, 96 bp, Fusarium cuneirostrum
  misc_feature: 29
cgatcaagatgaatgcgactgagctattcccggcagcagctttcttgcctctagagccttcaatcccacatgtgtacacaggacggcattctcgtt

SEQ ID NO: 42444 - DNA, 96 bp, Fusarium cuneirostrum
  misc_feature: 29
cgagtcgaccgacagggagacgatgtgatgttactttaattcaacagagatgcgctctgtgaatcccctcacgtaaacatgaaatgtcactgtgtg

SEQ ID NO: 42445 - DNA, 96 bp, Fusarium cuneirostrum
  misc_feature: 29
cgaggctcatcgacgtaagagattttatcatctatgtaaggcatgttgagtttgagtgcatgtgcgtgcagatagagaaagaaaacaggtcaagtt

SEQ ID NO: 42446 - DNA, 96 bp, Fusarium cuneirostrum
  misc_feature: 29
cgacggacgtcgctgtctttttctattttctctgtttgcggaagcacggttgagagggattcgagaccctttcttactcagctggagagctgttgg

SEQ ID NO: 42447 - DNA, 96 bp, Fusarium cuneirostrum
  misc_feature: 29
caatgcgcacatcgaaagatgataccgaagtgggtgtacgaggtgagtagatgagggagtgcggatgcgcgaccgacagaagtgtgtcgagggtcg

SEQ ID NO: 42448 - DNA, 96 bp, Fusarium cuneirostrum
  misc_feature: 29
aatcccaaaaatccgcttatagaccaaagttatggacgctcgtttgccccgttccgggtcactcgcgttagtctataagctggaaagctcccttcg

SEQ ID NO: 42449 - DNA, 96 bp, Fusarium cuneirostrum
  misc_feature: 29
cctcatccgtctcggcggcatccacttacgtcctaaacaccagtgaacgcgccagggtcagcaattgttgctatcctgtccatctcgtcggcttcg

SEQ ID NO: 42450 - DNA, 96 bp, Fusarium cuneirostrum
  misc_feature: 29
cctacggctccggtcgggtttgtgtgtgcccacgcacccactttctctccgttccatttcattccacatttcatttcatgcctacacattcaaagg

SEQ ID NO: 42451 - DNA, 96 bp, Fusarium cuneirostrum
  misc_feature: 29
atccctctcaaccgtgcttccgcaaacagagaaaatagaaaaagacagcgacgtccgtcgtatacaatgacctccggtcaaataaaaaagtaaagg

SEQ ID NO: 42452 - DNA, 96 bp, Fusarium cuneirostrum
  misc_feature: 29
ccactctcgtcaatccttcctccgttccgctaaattcctcactcccagtcgctacctccttcccgttcgttaaaaaacgggtagagtcggacaagg

SEQ ID NO: 42453 - DNA, 96 bp, Fusarium cuneirostrum
  misc_feature: 29
agtgactgatgaacgactaaggtgatggatcaggttattccttcctccttggtatatcccttgagctgtggaaacctcccgccaggtcgcggcagg

SEQ ID NO: 42454 - DNA, 96 bp, Fusarium cuneirostrum
  misc_feature: 29
cctgaccctcggagaggaagcaggaactgtatagttctaccgaagcccgtcagggcgaggtgcagaacgagtcgaccgacagggagacgatgtgat

SEQ ID NO: 42455 - DNA, 96 bp, Fusarium cuneirostrum
  misc_feature: 29
cctcagactgcccatttggtccgtttgacttggctagactaaactagcagtccgtctgacattggtcagactggactagcagtctgactgagatct

SEQ ID NO: 42456 - DNA, 96 bp, Fusarium cuneirostrum
  misc_feature: 29
cattctggtcttattatacctttaaacccttatttattaccccttaattattattaacctaactggaaccttaaattactagggatatactctagg

SEQ ID NO: 42457 - DNA, 96 bp, Fusarium cuneirostrum
  misc_feature: 29
cattccccacgcctccgttcattcgctatccagcgatcactccgttattgctcctcattcccagtccatacgtccttcccattcgttattacacgg

SEQ ID NO: 42458 - DNA, 96 bp, Fusarium cuneirostrum
  misc_feature: 29
ccagtcgctccgctcctgtttgctattagcattgcgttcatccttcacttcatcttccagatatgtatagacactcacctgttcgtgtttccacgg

SEQ ID NO: 42459 - DNA, 96 bp, Fusarium cuneirostrum
  misc_feature: 29
acctggtattctgaggcacataactttggtctataagaggttttgttttcaagctttagctgattacaaagctggggagggacacttgtgtcacgg

SEQ ID NO: 42460 - DNA, 96 bp, Fusarium cuneirostrum
  misc_feature: 29
ccgtccacaatctcataccccgcagacagagtcgaggagtataagacagcgtcttttcccccgagaggttgagtgagcaggcgaactctgacttgt

SEQ ID NO: 42461 - DNA, 96 bp, Fusarium cuneirostrum
  misc_feature: 29
catcaggcatagccactcagacgagggacgagtatgaagtggagtaagtaagaccgggaacgaagggactgagtggaggtcggttttgttggacgg

SEQ ID NO: 42462 - DNA, 96 bp, Fusarium cuneirostrum
  misc_feature: 29
ccggtttttggagtgccataactttggtctataagaggttttttgacaaaagctgtgctttgggctcaagaacggggtgagtcacaagtggcgatg

SEQ ID NO: 42463 - DNA, 96 bp, Fusarium cuneirostrum
  misc_feature: 29
caaattcccactccgttctcacgtttgctcacaccaaacgccagatcgcaacccatattaaaactgtgccagtttctgaaaagtcccaaaatccgg

SEQ ID NO: 42464 - DNA, 96 bp, Fusarium cuneirostrum
  misc_feature: 29
ccgaatgtgaaatttttcgagattttggtgaggaacaagcaaaatcggattcaaattggactcaaatcgacatactttttgtatgtgaacgaaact

SEQ ID NO: 42465 - DNA, 96 bp, Fusarium cuneirostrum
  misc_feature: 29
acgggacacgggacaagctgggacagctcgtggactgagtacagcttccaggcgtagccggttgctgccccagtttttaggcatccgacgcaaggg

SEQ ID NO: 42466 - DNA, 96 bp, Fusarium cuneirostrum
  misc_feature: 29
ccctcttcccctcgtcctctcgactcgggtatgacggtcgggccacaccctccctctcacttatcctcctcgtgatccccactcggctacatcttt

SEQ ID NO: 42467 - DNA, 96 bp, Fusarium cuneirostrum
  misc_feature: 29
cccggataccatacacaatgtctgtcgtcgtctctactcctcccatatttcaatgaaaattaaattggcgatctcccctttcctatgacaccttgt

SEQ ID NO: 42468 - DNA, 96 bp, Fusarium cuneirostrum
  misc_feature: 29
cactctcatgaagataactgaaccacatcttgtggtgttttagtaacgtcgctacgtgttccttcgtcacactcactccgcacgtcgccctccggg

SEQ ID NO: 42469 - DNA, 96 bp, Fusarium cuneirostrum
  misc_feature: 29
ccccccaaacggcgaagccgtttcttaaccttggtatagggggggactacgggacacgggacagtgagggacgaacgtgtggactgagtctgcctt

SEQ ID NO: 42470 - DNA, 96 bp, Fusarium cuneirostrum
  misc_feature: 29
ccatctcaggcgtttacttacaatctacatcagcaaacaccccaaggtcagcaatcagcaatgaccaccctcttgtccattttagaggcgtttact

SEQ ID NO: 42471 - DNA, 96 bp, Fusarium cuneirostrum
  misc_feature: 29
acccgaccccgatgtgtgaccgagacagatgtcgaggggaaagggtacatggcgagagcagcgctcgaggtggatttgacggagtctcaaaactgg

SEQ ID NO: 42472 - DNA, 96 bp, Fusarium cuneirostrum
  misc_feature: 29
cacgagaaggaggggaccgactgaagtgcgggtggacggaacgttatgaggaggaacgacgaataaggtgcagcgtagcgatccgggcataagtgg

SEQ ID NO: 42473 - DNA, 96 bp, Fusarium cuneirostrum
  misc_feature: 29
ccacgcagacaagctgcttgtccccgtctttttcagcccaacgcagagcgtttgtaaaaaaaccgcttatatcaccaaagttattgcacctcgctt

SEQ ID NO: 42474 - DNA, 96 bp, Fusarium cuneirostrum
  misc_feature: 29
atggtagtacgttatgtacggacataatcttacttgcgagggtgcgagacaagtataagggcaggggattgcccgttgcacttggagtgcttttgg

SEQ ID NO: 42475 - DNA, 96 bp, Fusarium cuneirostrum
  misc_feature: 29
ataaagaaaaaagctacttttaagctcttctttattaagtcttaaaaaaggcttaaaataaatactttttataacctatttaaatctataaaaatg

SEQ ID NO: 42476 - DNA, 96 bp, Fusarium cuneirostrum
  misc_feature: 29
cattgttcacattcctctggaatgatgatgaaaggaagagaaatctcactctgttcggtcagtgggcgatgccctacttatgtcctcagctctgct

SEQ ID NO: 42477 - DNA, 96 bp, Fusarium cuneirostrum
  misc_feature: 29
cattatcttcaaactagctagtatggcactctttcgtataataatttagtcttatattattaataacgactaaccagtagagcttaatatattatt

SEQ ID NO: 42478 - DNA, 96 bp, Fusarium cuneirostrum
  misc_feature: 29
cattagggagggaaatggtgctcgacaagtttaaagaagtgtatttaaatgttattgtctcgccctatctcctgtaggttatggatgaggctcgct

SEQ ID NO: 42479 - DNA, 96 bp, Fusarium cuneirostrum
  misc_feature: 29
attgaactcgagcgcttaactggggctcatccttgacgctcaagcgaacagcattggcgcgaggcccgctagccagagatgcatggcacactgatg

SEQ ID NO: 42480 - DNA, 96 bp, Fusarium cuneirostrum
  misc_feature: 29
atgatttcagattgtgaatgtttatgttggtgactgtaaatgtattcctcatccatgagtcccgagcggatgagtgagcgtagcgaaggaagactg

SEQ ID NO: 42481 - DNA, 96 bp, Fusarium cuneirostrum
  misc_feature: 29
aagctcacgctgttcagccaaaaaataagacaaacaagaatgttgtctgacaccaaacagtgtcgcaaatcgggccatgcggccctttaagtactg

SEQ ID NO: 42482 - DNA, 96 bp, Fusarium cuneirostrum
  misc_feature: 29
cagtaacgacggggttacagttagatatatcttgatgaaggtgctatagttgaagtgtatatttagcccaagagagattgatgattgggttgttat

SEQ ID NO: 42483 - DNA, 96 bp, Fusarium cuneirostrum
  misc_feature: 29
atatgcaatccaaatatcgacttccactatttcccttctcgcccagtgtcctgagcgctcgctgctttaacctaagtaggtggtgagcgttgggtg

SEQ ID NO: 42484 - DNA, 96 bp, Fusarium cuneirostrum
  misc_feature: 29
aacgagtcgaccgacagggagacgatgtgatgttactttaattcaacagagatgcgctctgtgaatcccctcacgtaaacatgaaatgtcactgtg

SEQ ID NO: 42485 - DNA, 96 bp, Fusarium cuneirostrum
  misc_feature: 29
caacatcaggtaatcatagaacaaaacacatgatgtaacatcaccataatcatatcaaattttgctacaacacaatttccaccatcacctttcgct

SEQ ID NO: 42486 - DNA, 96 bp, Fusarium cuneirostrum
  misc_feature: 29
actttacttaaacttaaataaaatggacgaggcccacgacttttttctacttggcgagcacttaatgatacttgtgatttgtatgtgaccttaaat

SEQ ID NO: 42487 - DNA, 96 bp, Fusarium cuneirostrum
  misc_feature: 29
acattatctagcaccacttcgacctcgttcctcggtctcgtactgcacgtcggcttacgcctccgtaattctttacacagttcttgcttgggcaat

SEQ ID NO: 42488 - DNA, 96 bp, Fusarium cuneirostrum
  misc_feature: 29
acacaatgtctgtcgtcgtctctactcctcccatatttcaatgaaaattaaattggcgatctcccctttcctatgacaccttgttagtaaaggaat

SEQ ID NO: 42489 - DNA, 96 bp, Fusarium cuneirostrum
  misc_feature: 29
attattaagcttaagtaataaaggtatattctttttatacttaaagctttctatatttctaccctttttattattatatctataaaataagacttt

SEQ ID NO: 42490 - DNA, 96 bp, Fusarium cuneirostrum
  misc_feature: 29
atggtgtgttcaaaatatgggtagaaaaagaaaacagcaaggatatatcgactttcgtgcaagctgagctctcttcgttctgtgaacggacatcgt

SEQ ID NO: 42491 - DNA, 96 bp, Fusarium cuneirostrum
  misc_feature: 29
atggcattatttttaactatataggctatttaatatatattcactttagtatttattaagcgtctatattatactaactctctcttaagtaagcct

SEQ ID NO: 42492 - DNA, 96 bp, Fusarium cuneirostrum
  misc_feature: 29
acagtctctgcttggagatgaactcttcacatgcagatgagactctactagtcaatccttcaggctgcgtcgttcctcctcgccctcaggactcat

SEQ ID NO: 42493 - DNA, 96 bp, Fusarium cuneirostrum
  misc_feature: 29
ataacgagaccggtctcgagtggcttaagcactttgaccggcatacaaccaatcgatgtttgtttgtttgtttgtttgtttgtttgttttattcat

SEQ ID NO: 42494 - DNA, 96 bp, Fusarium cuneirostrum
  misc_feature: 29
atctcgcgagctcatgttggagctcatgttggagctcatgttggagctcatgttggagctcatgttggagctcatgttggagctcatgttggagct

SEQ ID NO: 42495 - DNA, 96 bp, Fusarium cuneirostrum
  misc_feature: 29
atcatgtacccaagatagtcctgagcccgagcgcgtagcgtgcagggtgaaggattgacagtagtctcctcatctgcatatgaagaatgataagct

SEQ ID NO: 42496 - DNA, 96 bp, Fusarium cuneirostrum
  misc_feature: 29
aaaggtaaatatcttctatagccttataagctagcctaatattaattatagtatctatatatttattatcgatattaataataataggtaagatat

SEQ ID NO: 42497 - DNA, 96 bp, Fusarium cuneirostrum
  misc_feature: 29
atacatttacagtcaccaacataaacattcacaatctgaaatcatgctcgccaagtgaaaaaaagtagtggttctcgacacattaaaagtggtttt

SEQ ID NO: 42498 - DNA, 96 bp, Fusarium cuneirostrum
  misc_feature: 29
aacgagagggctagtatatattaagactactatagggccaaacccgatatagcgataaagtaagactaatacttatagggattactttaagcttat

SEQ ID NO: 42499 - DNA, 96 bp, Fusarium cuneirostrum
  misc_feature: 29
aagtgggagacggggaccggcgacgatatggaccgagacgaagagtcgagttgtgatggcgcgtcgcgcatgagaggacgggtcctcgggatttat

SEQ ID NO: 42500 - DNA, 96 bp, Fusarium cuneirostrum
  misc_feature: 29
accctacgctccgcacgtcgccctacgggctccgtatttaaaaaaggaatggaagacctctctccgcgaggctcgtaactctttactcgagtttat

SEQ ID NO: 42501 - DNA, 96 bp, Fusarium cuneirostrum
  misc_feature: 29
agattattaatttatacattattaaataataagaattaataatttaagagtacttaagataagattctaaggcaaaattaataagctcttttttat

SEQ ID NO: 42502 - DNA, 96 bp, Fusarium cuneirostrum
  misc_feature: 29
agacacaaatcattatcactcacccgttcgtgatcgctttcgctctatcattcttgcctaatcgtcaagtctcggcgctgcctcaatcaacaaact

SEQ ID NO: 42503 - DNA, 96 bp, Fusarium cuneirostrum
  misc_feature: 29
acttcctcgccccctcgtcagtatccacttatgcccggatcgctacgctgcaccttattcgtcgttcctcctcataacgttccgtccacccgcact

SEQ ID NO: 42504 - DNA, 96 bp, Fusarium cuneirostrum
  misc_feature: 29
aataattattaaaaccacttttaatgtgtcgagaaccactactttttttcacttggcgagcatgatttcagattgtgaatgtttatgttggtgact

SEQ ID NO: 42505 - DNA, 96 bp, Fusarium cuneirostrum
  misc_feature: 29
aggctcggtgcctctcccattctcccaaccgggtaactctagtccagttatggtcatagagatgttcaagcccagccggagtgtttgcaatagcgt

SEQ ID NO: 42506 - DNA, 96 bp, Fusarium cuneirostrum
  misc_feature: 29
actcgatggagccaagggggcggaactattttcggactgaaatacgctgggcgttttcggaggttttgtatcttagattagtctacattgtttcct

SEQ ID NO: 42507 - DNA, 96 bp, Fusarium cuneirostrum
  misc_feature: 29
agctcccttcggtcgctaacaatctgtaccagattctcactctgattccaggtcgttgcccatacaatctcagaaatcttcccatacaaaatttgt

SEQ ID NO: 42508 - DNA, 96 bp, Fusarium cuneirostrum
  misc_feature: 29
agcccaaggctaccggtatttgatcaacctagacgtgggatttggcacaaaaaaatgacgatggccctttagagacttttacttgaccgcaacgct

SEQ ID NO: 42509 - DNA, 96 bp, Fusarium cuneirostrum
  misc_feature: 29
agatttgaattgaattgtgattgcgagccatcattcataacgaaatggggcgagacctaaaatataatttctaaacgtgttgagacccattttctt

SEQ ID NO: 42510 - DNA, 96 bp, Fusarium cuneirostrum
  misc_feature: 29
aatcatcgccgtctcgtctgtcttagaggcgtccacttacatactgcacaccaacaaacactccaagatcagctatcatcgccatctcatccatct

SEQ ID NO: 42511 - DNA, 96 bp, Fusarium cuneirostrum
  misc_feature: 29
aaaactcgagctgatcaaggagctcatgccagctgttacaatgaaattgttgaaatgagaagatgctaattgcttaattcatcctaaaagtgcagt

SEQ ID NO: 42512 - DNA, 96 bp, Fusarium cuneirostrum
  misc_feature: 29
actataggctactttagtatctagtttttatttatattcgtctttatcccttcttattagtatattatatctattttataatatcgcgataaattt

SEQ ID NO: 42513 - DNA, 96 bp, Fusarium cuneirostrum
  misc_feature: 29
aatatgcaatccaaatatcgacttccactatttcccttctcgcccagtgtcctgagcgctcgctgctttaacctaagtaggtggtgagcgttgggt

SEQ ID NO: 42514 - DNA, 96 bp, Fusarium cuneirostrum
  misc_feature: 29
acaatctcataccccgcagacagagtcgaggagtataagacagcgtcttttcccccgagaggttgagtgagcaggcgaactctgacttgttttatt

SEQ ID NO: 42515 - DNA, 96 bp, Fusarium cuneirostrum
  misc_feature: 29
aaggtcttatttaagaactccttagccttaaggctaattaaataaaattataatttaagtttctattaatattaattatttataaggggaatcttt

SEQ ID NO: 42516 - DNA, 96 bp, Fusarium cuneirostrum
  misc_feature: 28
tgtatagacactcacctgttcgtgtttccacggccgtggaataaacagaactgattccagtcgaaatcagactcgactccgtctcacacaaaaaaa

SEQ ID NO: 42517 - DNA, 96 bp, Fusarium cuneirostrum
  misc_feature: 28
ttttttaattttattttccttatttattatatatatatattctttttttattattttctcttttttttcttttttataattatatctttttttttt

SEQ ID NO: 42518 - DNA, 96 bp, Fusarium cuneirostrum
  misc_feature: 28
ccttcgtcacatgttcctcgccccagtttttaatgccgtgcaaagcccggttcaaaaaaaaaccgcttatagaccaaagttatggcactccaaaaa

SEQ ID NO: 42519 - DNA, 96 bp, Fusarium cuneirostrum
  misc_feature: 28
atataaagaaaaaagctacttttaagctcttctttattaagtcttaaaaaaggcttaaaataaatactttttataacctatttaaatctataaaaa

SEQ ID NO: 42520 - DNA, 96 bp, Fusarium cuneirostrum
  misc_feature: 28
actcgataataagaatatactctatcttattatatttctcttgctttaatacttctagcttataaagtctctaattaagtataaactttataaaaa

SEQ ID NO: 42521 - DNA, 96 bp, Fusarium cuneirostrum
  misc_feature: 28
tcgtcacattaaaatgttatttaaaaaaggaatgactcgccccagtaaagtggtggctcgctcaatcaatcaagttatgtcacaggttacacaaaa

SEQ ID NO: 42522 - DNA, 96 bp, Fusarium cuneirostrum
  misc_feature: 28
ttttgtatggactcgattctggcatttggtgagccaaatcctgagaatgggccgagaaatcggtcacttctgttaacgaagtcactttttcttggt

SEQ ID NO: 42523 - DNA, 96 bp, Fusarium cuneirostrum
  misc_feature: 28
ggtgacccgaccccgatgtgtgaccgagacagatgtcgaggggaaagggtacatggcgagagcagcgctcgaggtggatttgacggagtctcaaaa

SEQ ID NO: 42524 - DNA, 96 bp, Fusarium cuneirostrum
  misc_feature: 28
ttttatagataggtcttttagttttttaataatatatagccagtatagttatactcgtaattattattattatatactttatagttatatatatcg

SEQ ID NO: 42525 - DNA, 96 bp, Fusarium cuneirostrum
  misc_feature: 28
ctcgtcacattaaaatgttatttaaaaaaggaatgactcgccccagtaaagtggtggctcgctcaatcaatcaagttatgtcacaggttacacaaa

SEQ ID NO: 42526 - DNA, 96 bp, Fusarium cuneirostrum
  misc_feature: 28
cgctctgcgcccatgtgcatctccgatgctctcctgtcctcctccgtcgtccttcctcgcactcgaaccatctcgttcatcactccgtgatacaaa

SEQ ID NO: 42527 - DNA, 96 bp, Fusarium cuneirostrum
  misc_feature: 28
tctccggaggatccacttacgtcctaaacacccaaggttagcaatcatcgctatctcatccatctcaggcgtttacttacaatctacatcagcaaa

SEQ ID NO: 42528 - DNA, 96 bp, Fusarium cuneirostrum
  misc_feature: 28
gtggggcgaccgtaagacagaggggcgagattgtgtcgagcccgaatgtgaaatttttcgagattttggtgaggaacaagcaaaatcggattcaaa

SEQ ID NO: 42529 - DNA, 96 bp, Fusarium cuneirostrum
  misc_feature: 28
cgaggtggatttgacggagtctcaaaactggaacagtttttgtatggactcgattctggcatttggtgagccaaatcctgagaatgggccgagaaa

SEQ ID NO: 42530 - DNA, 96 bp, Fusarium cuneirostrum
  misc_feature: 28
tttcgctatgcaaaataacacttttcaacttttatgccgtgaacctccctgttcccggataccatacacaatgtctgtcgtcgtctctactcctcc

SEQ ID NO: 42531 - DNA, 96 bp, Fusarium cuneirostrum
  misc_feature: 28
atcgctcactcgttcactcctcctccggatagaatacaaactcactctgttcgtctcctcacgttgttgcggtaaactcgtcctccgtcctcgaaa

SEQ ID NO: 42532 - DNA, 96 bp, Fusarium cuneirostrum
  misc_feature: 28
tttcaactgtatcagacaactgactagccacaagtcgacaagaacaccaagcacctgtctccagaccatgtgccgcatcccaggaccacaatacct

SEQ ID NO: 42533 - DNA, 96 bp, Fusarium cuneirostrum
  misc_feature: 28
ataggtaatggtgatgacctcaagtggtattgtagttagtatagacagtgatatgtgagcacaaccgagagagtagtggagcgaacactaaataaa

SEQ ID NO: 42534 - DNA, 96 bp, Fusarium cuneirostrum
  misc_feature: 28
cgcgctcgggctcaggactatcttgggtacatgatcacgactacgattcaaaataataataatgtcacatatgcacagctcgctcgattaaataaa

SEQ ID NO: 42535 - DNA, 96 bp, Fusarium cuneirostrum
  misc_feature: 28
ggaaaagtgcgtcgcatacttggatgcgtcgcatgcttatcatgtacgttattatatattatttctttttttatacctaaggagttagttaataaa

SEQ ID NO: 42536 - DNA, 96 bp, Fusarium cuneirostrum
  misc_feature: 28
tttatagtggtttatagtggtttatagcggttcatagcggtttatagcggtttatagtagttcgcagcggtttatagcggtttataacggccttaa

SEQ ID NO: 42537 - DNA, 96 bp, Fusarium cuneirostrum
  misc_feature: 28
tttagccttccgatcgagcattgtgctcttttggccagttggtgttgaggagagatcccagcctgaggcaccagcgtcccgttcctgttcactaca

SEQ ID NO: 42538 - DNA, 96 bp, Fusarium cuneirostrum
  misc_feature: 28
tttagatatatatattcgctaattctaataattctatactatagttataggttattttatagattataatagctctaaggaagtatataaggtatt

SEQ ID NO: 42539 - DNA, 96 bp, Fusarium cuneirostrum
  misc_feature: 28
ttgttcaagctcgagcaggcacaaaagtaaaaaaacagaagcaagttcatgttttgcgcgacagcgctgaagaagtgggcgtccgcccattatgta

SEQ ID NO: 42540 - DNA, 96 bp, Fusarium cuneirostrum
  misc_feature: 28
ttgtggacagtatcttgggcgtgtgccgagagggagcccagcagatgtaaatgttttgattttgtagagacccgaaagggttgttgagtagtgact

SEQ ID NO: 42541 - DNA, 96 bp, Fusarium cuneirostrum
  misc_feature: 28
ttgtaggccacctctcgcggcccaaatgatccacaggcttccgcctgattgggtctccgaccccaccaagtgcgtgtcattggatgacacttgttc

SEQ ID NO: 42542 - DNA, 96 bp, Fusarium cuneirostrum
  misc_feature: 28
tcttgattgaggtgtactttagtagcaataatagttacaagatgtttactctgattttctattagtttgttcgtctctagcgcttggagaaggcaa

SEQ ID NO: 42543 - DNA, 96 bp, Fusarium cuneirostrum
  misc_feature: 28
gacctggaatcagagtgagaatctggtacagattgttagcgaccgaagggagctttccagcttatagactaacgcgagtgacccggaacggggcaa

SEQ ID NO: 42544 - DNA, 96 bp, Fusarium cuneirostrum
  misc_feature: 28
aagcagatcaagattttatccaacgctgcaattagcttgctgtttggtaatacatttcgtcggtgacgtttggtttacggcaaattgaaattgcaa

SEQ ID NO: 42545 - DNA, 96 bp, Fusarium cuneirostrum
  misc_feature: 28
cgtaaacatgaaatgtcactgtgtgtaagatgacccggagtgtgggtcatggtgaaggtaagagtagaagggagggcgtggcccgaccgacatcaa

SEQ ID NO: 42546 - DNA, 96 bp, Fusarium cuneirostrum
  misc_feature: 28
ttgatcgattggttgtatgccggtcaaagtgcttaagccacaaactcgcctcgacagaacacgcaatgcacttcttactccagcgaatacacgaag

SEQ ID NO: 42547 - DNA, 96 bp, Fusarium cuneirostrum
  misc_feature: 28
atcatgttgccttctccaagcgctagagacgaacaaactaatagaaaatcagagtaaacatcttgtaactattattgctactaaagtacacctcaa

SEQ ID NO: 42548 - DNA, 96 bp, Fusarium cuneirostrum
  misc_feature: 28
taaatagctatttctctataaagaaatttttctaaaagtccataaaaatatatatagcttattttatagttaaaaagctaaaaatagctttttcaa

SEQ ID NO: 42549 - DNA, 96 bp, Fusarium cuneirostrum
  misc_feature: 28
ttcttctttcttctttcttctttcttctttcttctttcttctttcttctttcttctttcttctttcttctttcttctttcttctttcttctttctt

SEQ ID NO: 42550 - DNA, 96 bp, Fusarium cuneirostrum
  misc_feature: 28
ttctgttggagccttttatttagtgttcgctccactactctctcggttgtgctcacatatcactgtctatactaactacaataccacttgaggtca

SEQ ID NO: 42551 - DNA, 96 bp, Fusarium cuneirostrum
  misc_feature: 28
ttctctctctgcctcctcagcgcgtttctgttccctttcggcgcgttgctgctctctcgcagcgcgttgttccgactcctttaaaagccgttcgag

SEQ ID NO: 42552 - DNA, 96 bp, Fusarium cuneirostrum
  misc_feature: 28
aataagaagggggagagggggggaagggagtgaaagagaggggataaataagaatatataggagaaagtaaaaagaagggataaggggagagagaa

SEQ ID NO: 42553 - DNA, 96 bp, Fusarium cuneirostrum
  misc_feature: 28
ttctcccaaccgggtaactctagtccagttatggtcatagagatgttcaagcccagccggagtgtttgcaatagcgtgctggagttgtttcttgtt

SEQ ID NO: 42554 - DNA, 96 bp, Fusarium cuneirostrum
  misc_feature: 28
ttcgctacgctcgctcgtcggctcgggcctcaagtggtgattaagtcgttcattcacaaagtgctcgccaatttaaaaggcgtagtggtgctcgtc

SEQ ID NO: 42555 - DNA, 96 bp, Fusarium cuneirostrum
  misc_feature: 28
tataaaccgctgcgaaccactacgaaccgctataaaccgctgcgaaccactataaaccgctataaaccgctacgaaccgctataaactattgcgaa

SEQ ID NO: 42556 - DNA, 96 bp, Fusarium cuneirostrum
  misc_feature: 28
aacctcaaaagagtccacgagccgagcgcgtagcgtgcaggcgaggggattgtcaatgtaatttattcagggaataattacccttccaagcaggaa

SEQ ID NO: 42557 - DNA, 96 bp, Fusarium cuneirostrum
  misc_feature: 28
ttcctatataacccttaaacttacctttaaccttaaccttttaacctagctttaaccctaattcttaaatttactattaacccttaactcctaaat

SEQ ID NO: 42558 - DNA, 96 bp, Fusarium cuneirostrum
  misc_feature: 28
acacgaaagatgtagccgagtggggatcacgaggaggataagtgagagggagggtgtggcccgaccgtcatacccgagtcgagaggacgaggggaa

SEQ ID NO: 42559 - DNA, 96 bp, Fusarium cuneirostrum
  misc_feature: 28
ttccccagactctcagttgcagcacgccgcttattatctcatatccgagataatctagaatgacggtaaatgataatcgatgacgacgctaaaatg

SEQ ID NO: 42560 - DNA, 96 bp, Fusarium cuneirostrum
  misc_feature: 28
ttcccacctcgattctgggttccaacccatacaatctcaggatcgaactcatacaaaatttgtacaaattttgtatgagttcgatcctgagattgt

SEQ ID NO: 42561 - DNA, 96 bp, Fusarium cuneirostrum
  misc_feature: 28
ggatgatatgctattcttgagagcatattactgcgtcgcttatctgacgcatatcttttctacggtaagctatcttcggaaggaagaagtagtgaa

SEQ ID NO: 42562 - DNA, 96 bp, Fusarium cuneirostrum
  misc_feature: 28
ttcaacgagacggcaagtccgcaagtcttggggatcgctcaatatggacgtagctatctccaacaacggtgtaagtgcatcctatcgtgccaaacg

SEQ ID NO: 42563 - DNA, 96 bp, Fusarium cuneirostrum
  misc_feature: 28
ttatttctccctctttcttttttcccttcctcttttcttctcccctctttctttttcttttctctctccttccttttttatcccttttttcttttt

SEQ ID NO: 42564 - DNA, 96 bp, Fusarium cuneirostrum
  misc_feature: 28
ttattaattatagcggaagggtaattaagattaataattaataattctcgtggaagaaattataaagcctaagaattaataattagaaggttaata

SEQ ID NO: 42565 - DNA, 96 bp, Fusarium cuneirostrum
  misc_feature: 28
ctctcttaaccctcctttaggatataattaaatagtatatcgataataaaattaaagttaaggataatatagcgatttatatatagagagagataa

SEQ ID NO: 42566 - DNA, 96 bp, Fusarium cuneirostrum
  misc_feature: 28
agacttcccgcgaccgaagggagcaacctagcttatatcactaacgagaaataccggggtacccggtttttggagtgccataactttggtctataa

SEQ ID NO: 42567 - DNA, 96 bp, Fusarium cuneirostrum
  misc_feature: 28
ttagtttatgtgcgctccgtctttatttaatgctcgcccataatacatgtgaagctatcgtcactacaacatcaggtaatcatagaacaaaacaca

SEQ ID NO: 42568 - DNA, 96 bp, Fusarium cuneirostrum
  misc_feature: 28
ccctgcgtccttcgtcctcgggattcgggactattccagtgtggatgaaaatgaggccattcacaactccatctacagtaacatcatgctcactaa

SEQ ID NO: 42569 - DNA, 96 bp, Fusarium cuneirostrum
  misc_feature: 28
ttactttatttacctataattacctctatcctttatattcattatttatttctctttttattttcttttttaaccctctactttattatttatctt

SEQ ID NO: 42570 - DNA, 96 bp, Fusarium cuneirostrum
  misc_feature: 28
cctgagcgctcgctgctttaacctaagtaggtggtgagcgttgggtgagcaactcaggcaaatgggtcggccccatcgacctagaattgtgcgtaa

SEQ ID NO: 42571 - DNA, 96 bp, Fusarium cuneirostrum
  misc_feature: 28
tgtgttacgcgagcatatataaagtagatggtgataacctcaaaagagtccacgagccgagcgcgtagcgtgcaggcgaggggattgtcaatgtaa

SEQ ID NO: 42572 - DNA, 96 bp, Fusarium cuneirostrum
  misc_feature: 28
ttacagtcacaattacatttacaattacaatcacgtagaatcacaaaatccaagtcatcatatgctcgcatccaaagtcaagaaaatgggtctcga

SEQ ID NO: 42573 - DNA, 96 bp, Fusarium cuneirostrum
  misc_feature: 28
gcgagacaaacagttaatatattttgacgagcaccacttaattattaagattgtacttaatggcgagcgatgatttaataacagttgtgactgtaa

SEQ ID NO: 42574 - DNA, 96 bp, Fusarium cuneirostrum
  misc_feature: 28
ttaattatagcggaagggtaattaagattaataattaataattctcgtggaagaaattataaagcctaagaattaataattagaaggttaatacct

SEQ ID NO: 42575 - DNA, 96 bp, Fusarium cuneirostrum
  misc_feature: 28
gcgggaagtctctatacttccttaacatttgtgaccaaattcccactccgttctcacgtttgctcacaccaaacgccagatcgcaacccatattaa

SEQ ID NO: 42576 - DNA, 96 bp, Fusarium cuneirostrum
  misc_feature: 28
tatattataaggtcttttataaataccttgagattaaagataagagttatagtcttttacatagacttagcctataagtaaaataaaataacttaa

SEQ ID NO: 42577 - DNA, 96 bp, Fusarium cuneirostrum
  misc_feature: 28
ttaagtagctccctaataagctcgctaataataagcctcttattaattgtaaaagcttatactctataaaggcttaagccctttaagagcttaagc

SEQ ID NO: 42578 - DNA, 96 bp, Fusarium cuneirostrum
  misc_feature: 28
ccacaaagaaaaagaagccatcgtcatctccgaattaggcaacctcgcggtatgctggtggattaccgctccgtccacacgcctccgcaatcttaa

SEQ ID NO: 42579 - DNA, 96 bp, Fusarium cuneirostrum
  misc_feature: 28
ttaagataaggtaattaagataaagtggttaagataaagtagttaagataaggtaattaagataaagtaattaagataaaggtagattataagaga

SEQ ID NO: 42580 - DNA, 96 bp, Fusarium cuneirostrum
  misc_feature: 28
actctaataagttattaatattatatatatattaaccttaattatcttataattataggattataaggcatttataataatatcttaagctcttaa

SEQ ID NO: 42581 - DNA, 96 bp, Fusarium cuneirostrum
  misc_feature: 28
agtctcaaaactggaacagtttttgtatggactcgattctggcatttggtgagccaaatcctgagaatgggccgagaaatcggtcacttctgttaa

SEQ ID NO: 42582 - DNA, 96 bp, Fusarium cuneirostrum
  misc_feature: 28
tgaaaatgaggccattcacaactccatctacagtaacatcatgctcactaatctaataaaaagaataaccagggctcgtcaaacgagtttatttaa

SEQ ID NO: 42583 - DNA, 96 bp, Fusarium cuneirostrum
  misc_feature: 28
catatcacatttcatttaaggtcacatacaaatcacaagtatcattaagtgctcgccaagtagaaaaaagtcgtgggcctcgtccattttatttaa

SEQ ID NO: 42584 - DNA, 96 bp, Fusarium cuneirostrum
  misc_feature: 28
atattaagatctatctattatttatagctaatttaggctaatataaagtataatcgcgaaatataatatttaattaaataatatctagaactttaa

SEQ ID NO: 42585 - DNA, 96 bp, Fusarium cuneirostrum
  misc_feature: 28
ttaaagaaataagacctcattcttttatatcgtcttaaaattttattttatttttacaattctttttatatatcatacattaataacgcaagaggt

SEQ ID NO: 42586 - DNA, 96 bp, Fusarium cuneirostrum
  misc_feature: 28
catgggcgcagagcgccagagacaatctttgttgtcggatgtaagtaagagcgaaggagtgagcgatggactctttggatccttgggatcaaaaca

SEQ ID NO: 42587 - DNA, 96 bp, Fusarium cuneirostrum
  misc_feature: 28
ggaggcccgagtcggaactgtataatcctacggagcccggagggcgacgtgcggagtgagtgtgacgaaggaacacgtagcgacgttactaaaaca

SEQ ID NO: 42588 - DNA, 96 bp, Fusarium cuneirostrum
  misc_feature: 28
tccggaggatccacttacgtcctaaacacccaaggttagcaatcatcgctatctcatccatctcaggcgtttacttacaatctacatcagcaaaca

SEQ ID NO: 42589 - DNA, 96 bp, Fusarium cuneirostrum
  misc_feature: 28
tgttagatggaattgtgacgtagaatgtgaatggaacaggagtggtgagagttacaccacttgagtcccgaacggatgagcaagccccgtaggggc

SEQ ID NO: 42590 - DNA, 96 bp, Fusarium cuneirostrum
  misc_feature: 28
taaactcaatcccctcgccccgctcggttgacatgacaggatcatgtggtagacggccgaatgcacggcacgtaaacctcttcttcgccgcacaca

SEQ ID NO: 42591 - DNA, 96 bp, Fusarium cuneirostrum
  misc_feature: 28
actgttggtcactccgttccccgcactcgtccgcatctttcgtgtcccactcaatccgtgcacaacatgaggctgtcaagacagaccacgaccaca

SEQ ID NO: 42592 - DNA, 96 bp, Fusarium cuneirostrum
  misc_feature: 28
cccacaggctccctcctactttactcacgtcatgacccacactccgggtcattcttcactgtcgtgtttgactctgcgtcaattgaaggcatcaca

SEQ ID NO: 42593 - DNA, 96 bp, Fusarium cuneirostrum
  misc_feature: 28
tgtctctggcgctctgcgcccatgtgcatctccgatgctctcctgtcctcctccgtcgtccttcctcgcactcgaaccatctcgttcatcactccg

SEQ ID NO: 42594 - DNA, 96 bp, Fusarium cuneirostrum
  misc_feature: 28
tgtctccttctgctccgcatctccatataaaaggatgtcttcccagacaatcccttgcgctcaccttccagggttcgcctctccaccacttgtctt

SEQ ID NO: 42595 - DNA, 96 bp, Fusarium cuneirostrum
  misc_feature: 28
tggtattgtagttagtatagacagtgatatgtgagcacaaccgagagagtagtggagcgaacactaaataaaaggctccaacagaagtgagcgaca

SEQ ID NO: 42596 - DNA, 96 bp, Fusarium cuneirostrum
  misc_feature: 28
gctaaagccgctcccggcagggaaagcagacactgcgtaataaatgccgacgaacggagtgaggaggtgcggagagaagatggaagcgtagcgaca

SEQ ID NO: 42597 - DNA, 96 bp, Fusarium cuneirostrum
  misc_feature: 28
tgtacacaggacggcattctcgtttggcacgataggatgcacttacaccgttgttggagatagctacgtccatattgagcgatccccaagacttgc

SEQ ID NO: 42598 - DNA, 96 bp, Fusarium cuneirostrum
  misc_feature: 28
ataagctaggttgctcccttcggtcgcgggaagtctctatacttccttaacatttgtgaccaaattcccactccgttctcacgtttgctcacacca

SEQ ID NO: 42599 - DNA, 96 bp, Fusarium cuneirostrum
  misc_feature: 28
tggagccttttatttagtgttcgctccactactctctcggttgtgctcacatatcactgtctatactaactacaataccacttgaggtcatcacca

SEQ ID NO: 42600 - DNA, 96 bp, Fusarium cuneirostrum
  misc_feature: 28
tggtatagggggggactacgggacacgggacagtgagggacgaacgtgtggactgagtctgcctttagtcagcttgctgacattggcatcccagtt

SEQ ID NO: 42601 - DNA, 96 bp, Fusarium cuneirostrum
  misc_feature: 28
tggtataagcgatagccggcaggcgtccccagctagctctagttcagatgatcaaatagttgacgtcgacgataaccaggagatagacctagccgg

SEQ ID NO: 42602 - DNA, 96 bp, Fusarium cuneirostrum
  misc_feature: 28
tgggttatagtaacctcgcatcgtctcgccctgctcgactacgctccgcacctccctccggtcggtagaggactacagttcctgcctcccctgcgg

SEQ ID NO: 42603 - DNA, 96 bp, Fusarium cuneirostrum
  misc_feature: 28
tccgaccgttggtcgttggttgtcaatcgacaagggtgtcgtgccgtccaccacaaagaaacagccctcctgtttccaagaataatactcgtccca

SEQ ID NO: 42604 - DNA, 96 bp, Fusarium cuneirostrum
  misc_feature: 28
aaagtcgaagaaaaaggtcgtgttacctcacgaaaccacaaatgcgattaccaacatcgccaaaagagaaacaacacaaagcaataagctttgcca

SEQ ID NO: 42605 - DNA, 96 bp, Fusarium cuneirostrum
  misc_feature: 28
tggagatctaagagttccaactgctgacaatccacgtcagacaaggaatcaaatgcatcgccctctgggcccataatgtctagaggcgacacgcct

SEQ ID NO: 42606 - DNA, 96 bp, Fusarium cuneirostrum
  misc_feature: 28
atgcagaggtgcccggaagcagagctgaggacataagtagggcatcgcccactgaccgaacagagtgagatttctcttcctttcatcatcattcca

SEQ ID NO: 42607 - DNA, 96 bp, Fusarium cuneirostrum
  misc_feature: 28
cgagtgaccgcgggacgcgggaaacgagggccataactttggtgatataagaggatttttgggaaacgcatgcgttgggacccaaactgacttcca

SEQ ID NO: 42608 - DNA, 96 bp, Fusarium cuneirostrum
  misc_feature: 28
tggaagctcactgcgttcgctaacaatcagtacctgattcccgactccgtctcaggatttgactcaccaaatctcagaaacgaacacatacaaatt

SEQ ID NO: 42609 - DNA, 96 bp, Fusarium cuneirostrum
  misc_feature: 28
tcgcaggataccaagtcgatcgtacatctccttcactacttcttccttccgaagatagcttaccgtagaaaagatatgcgtcagataagcgacgca

SEQ ID NO: 42610 - DNA, 96 bp, Fusarium cuneirostrum
  misc_feature: 28
tcgggtctctacaaaatcaaaacatttacatctgctgggctccctctcggcacacgcccaagatactgtccacaacctcatctagtacaattggca

SEQ ID NO: 42611 - DNA, 96 bp, Fusarium cuneirostrum
  misc_feature: 28
ctacgattgacaatccctctcgcacaccgtcgcatgcgctcctcctgctacgggactattatggtgtgggttgaagctattcgcaagtcacctgca

SEQ ID NO: 42612 - DNA, 96 bp, Fusarium cuneirostrum
  misc_feature: 28
tgcagaacgagtcgaccgacagggagacgatgtgatgttactttaattcaacagagatgcgctctgtgaatcccctcacgtaaacatgaaatgtca

SEQ ID NO: 42613 - DNA, 96 bp, Fusarium cuneirostrum
  misc_feature: 28
tgcacatgtgtccagacacaaatcattatcactcacccgttcgtgatcgctttcgctctatcattcttgcctaatcgtcaagtctcggcgctgcct

SEQ ID NO: 42614 - DNA, 96 bp, Fusarium cuneirostrum
  misc_feature: 28
tgatttcagattgtgaatgtttatgttggtgactgtaaatgtattcctcatccatgagtcccgagcggatgagtgagcgtagcgaaggaagactga

SEQ ID NO: 42615 - DNA, 96 bp, Fusarium cuneirostrum
  misc_feature: 28
gggttgcccaactctgttgtcaatccggtcccctgcgtcctacgtcctcgggtcccagactcatttatgcgggaaggcattcacattccataatca

SEQ ID NO: 42616 - DNA, 96 bp, Fusarium cuneirostrum
  misc_feature: 28
caatccctcaccctgcgtccttcgtcctcgggattcgggactattccagtgtggatgaaaatgaggccattcacaactccatctacagtaacatca

SEQ ID NO: 42617 - DNA, 96 bp, Fusarium cuneirostrum
  misc_feature: 28
acgtaaacatgaaatgtcactgtgtgtaagatgacccggagtgtgggtcatggtgaaggtaagagtagaagggagggcgtggcccgaccgacatca

SEQ ID NO: 42618 - DNA, 96 bp, Fusarium cuneirostrum
  misc_feature: 28
tgatcgattggttgtatgccggtcaaagtgcttaagccacaaactcgcctcgacagaacacgcaatgcacttcttactccagcgaatacacgaagc

SEQ ID NO: 42619 - DNA, 96 bp, Fusarium cuneirostrum
  misc_feature: 28
ctcattcggtagtgatataagcgtagcttggtgtctccgccaccaagaaaaagtgacttcgttaacagaagtgaccgatttctcggcccattctca

SEQ ID NO: 42620 - DNA, 96 bp, Fusarium cuneirostrum
  misc_feature: 28
tagctcgtggttctcttttaccactacaataacagttcactcttctcgttcacaaatgcacaatcaattcaaatcacaagtcatacatcaaagtca

SEQ ID NO: 42621 - DNA, 96 bp, Fusarium cuneirostrum
  misc_feature: 28
catctctgtgtgatgtctgtaacgtcgctacgtgttccttcgtcacactcactccgcacgtcctccctccggtcgtccgtactaaggatatagtca

SEQ ID NO: 42622 - DNA, 96 bp, Fusarium cuneirostrum
  misc_feature: 28
tgacgagggggcgaggaagtataagacggaacgtctgcccctgcgaggacgcagtcgaagacttgagactgtatttatttttttgtgtgagacgga

SEQ ID NO: 42623 - DNA, 96 bp, Fusarium cuneirostrum
  misc_feature: 28
catgcacctccacttgaggtcatcatgcactctcatgaagataactgaaccacatcttgtggtgttttagtaacgtcgctacgtgttccttcgtca

SEQ ID NO: 42624 - DNA, 96 bp, Fusarium cuneirostrum
  misc_feature: 28
tgaagttattcccacttcacgtctacgatggcatctacagtctacgacaagacatacatatcacaattataactacattcatcaaatgctcgccag

SEQ ID NO: 42625 - DNA, 96 bp, Fusarium cuneirostrum
  misc_feature: 28
tctttttattagattagtgagcatgatgttactgtagatggagttgtgaatggcctcattttcatccacactggaatagtcccgaatcccgaggac

SEQ ID NO: 42626 - DNA, 96 bp, Fusarium cuneirostrum
  misc_feature: 28
gcaaggtcgagaccgaggacaagagcaaggtcgagaccgaggacaagagcaaggtcgagaccgaggacaagagcaaggtcgagaccgaggacaaga

SEQ ID NO: 42627 - DNA, 96 bp, Fusarium cuneirostrum
  misc_feature: 28
gagtacaaaaggcgcggagcgcccacctggaaggtcatctgaacttggttcagtttgttgattgaggcagcgccgagacttgacgattaggcaaga

SEQ ID NO: 42628 - DNA, 96 bp, Fusarium cuneirostrum
  misc_feature: 28
cgcattaggaaacatctctttctgaaaagaagaaagaagaaagaagaaagaagaaagaagaaagaagaaagaagaaagaagaaagaagaaagaaga

SEQ ID NO: 42629 - DNA, 96 bp, Fusarium cuneirostrum
  misc_feature: 28
tctggggtccccgtgacacaagtgtccctccccagctttgtaatcagctaaagcttgaaaacaaaacctcttatagaccaaagttatggacgctcg

SEQ ID NO: 42630 - DNA, 96 bp, Fusarium cuneirostrum
  misc_feature: 28
tagacagcgcccaaggctcgtcttgacaccaacaaacacggatccatcctgtctccttctgctccgcatctccatataaaaggatgtcttcccaga

SEQ ID NO: 42631 - DNA, 96 bp, Fusarium cuneirostrum
  misc_feature: 28
agcttggtgtctccgccaccaagaaaaagtgacttcgttaacagaagtgaccgatttctcggcccattctcaggatttggctcaccaaatgccaga

SEQ ID NO: 42632 - DNA, 96 bp, Fusarium cuneirostrum
  misc_feature: 28
gcagaggtgcccggaagcagagctgaggacataagtagggcatcgcccactgaccgaacagagtgagatttctcttcctttcatcatcattccaga

SEQ ID NO: 42633 - DNA, 96 bp, Fusarium cuneirostrum
  misc_feature: 28
tagaaacttaattcgatatattaaaaggcattattagcgatagaaataagattattataagtaagttctaaaagcttcttataaagataaaagaga

SEQ ID NO: 42634 - DNA, 96 bp, Fusarium cuneirostrum
  misc_feature: 28
tctcttaaccctcctttaggatataattaaatagtatatcgataataaaattaaagttaaggataatatagcgatttatatatagagagagataat

SEQ ID NO: 42635 - DNA, 96 bp, Fusarium cuneirostrum
  misc_feature: 28
ctttaaacgagtccggagggcgaggacgtaggacgcagcccgagggatggactatctaataaactcgagtaaagagttacgagcctcgcggagaga

SEQ ID NO: 42636 - DNA, 96 bp, Fusarium cuneirostrum
  misc_feature: 28
tctcgcgagctcatgttggagctcatgttggagctcatgttggagctcatgttggagctcatgttggagctcatgttggagctcatgttggagctc

SEQ ID NO: 42637 - DNA, 96 bp, Fusarium cuneirostrum
  misc_feature: 28
tctccccctcttttatttctcctcgtgcactcacttcagtcgcatcctgcattcatgtttgactgctgtcaattgaagtcatcaccatctctgtgt

SEQ ID NO: 42638 - DNA, 96 bp, Fusarium cuneirostrum
  misc_feature: 28
tctcaccaacggatagatcgcccactttttttttacgccaacggacagatcaatccacaacctaattttcatatcggccgacccatgagccccttt

SEQ ID NO: 42639 - DNA, 96 bp, Fusarium cuneirostrum
  misc_feature: 28
tctataaaaatttcagacttgatctactcttttgtgctgctttgccggtcacagtttttgtctgaattctactgatttcagaaagaaataactata

SEQ ID NO: 42640 - DNA, 96 bp, Fusarium cuneirostrum
  misc_feature: 28
tcgtttccagattcttttcgccaaaccactcatcgaatgaggcgaagagtatttgagcttgatcaacgttcagtgccgtgtcgagtagaccctttg

SEQ ID NO: 42641 - DNA, 96 bp, Fusarium cuneirostrum
  misc_feature: 28
tcgtggttcaccggttcccggttcctgtcggatttcattcacttgaatgatattcgtcctcactcctcgttccgggctacagttaaagttagtcgt

SEQ ID NO: 42642 - DNA, 96 bp, Fusarium cuneirostrum
  misc_feature: 28
gacggaggaggagtacaaaaggcgcggagcgcccacctggaaggtcatctgaacttggttcagtttgttgattgaggcagcgccgagacttgacga

SEQ ID NO: 42643 - DNA, 96 bp, Fusarium cuneirostrum
  misc_feature: 28
tcgggactcatggatgaggaatacatttacagtcaccaacataaacattcacaatctgaaatcatgctcgccaagtgaaaaaaagtagtggttctc

SEQ ID NO: 42644 - DNA, 96 bp, Fusarium cuneirostrum
  misc_feature: 28
taatcacaccgccggcggtgcctggatcaattccctggaagcagacagttcatgacgtaagcaagcgagcaccaactctgcattaagggtttccga

SEQ ID NO: 42645 - DNA, 96 bp, Fusarium cuneirostrum
  misc_feature: 28
aaaataaatctcggaatataataaataactccctaataacgaaaagatagataaataataagtcccggataaactataatataactttatacgcga

SEQ ID NO: 42646 - DNA, 96 bp, Fusarium cuneirostrum
  misc_feature: 28
gttgacagcctacacggcaagctcactcatccgacttcgaacaacgcgagaagaaaacaaacaataatgttgtctgacaccgaaacagtgtcgcga

SEQ ID NO: 42647 - DNA, 96 bp, Fusarium cuneirostrum
  misc_feature: 28
tcgccttcccgcctccgtgattaccatccagagcaatctggaaagcacggcaataatgtggatgatccttaaagatcacagggcagtccgtcttgt

SEQ ID NO: 42648 - DNA, 96 bp, Fusarium cuneirostrum
  misc_feature: 28
ggtgatgacttcaattgacagcagtcaaacatgaatgcaggatgcgactgaagtgagtgcacgaggagaaataaaagagggggagacggacgtcga

SEQ ID NO: 42649 - DNA, 96 bp, Fusarium cuneirostrum
  misc_feature: 28
ggcggctgcgcccatatcggaggtgaagccgagggctgtagaagaggtgaagacactcgtcgagggtgtggacgagtttggtgatgaatgggtcga

SEQ ID NO: 42650 - DNA, 96 bp, Fusarium cuneirostrum
  misc_feature: 28
ctttaccgaaagagatagatataaagataaaagatttaagaaaggttaaagagtaagtatatatacatataataatataatagcccttcttaagga

SEQ ID NO: 42651 - DNA, 96 bp, Fusarium cuneirostrum
  misc_feature: 28
tcctccggaggtgtaactcaagttgacaatcccgggtcgtcgtccctcctcctccccgggactcacgtttaggtttaattataaaaacaattacat

SEQ ID NO: 42652 - DNA, 96 bp, Fusarium cuneirostrum
  misc_feature: 28
tccgtccacaatctcataccccgcagacagagtcgaggagtataagacagcgtcttttcccccgagaggttgagtgagcaggcgaactctgacttg

SEQ ID NO: 42653 - DNA, 96 bp, Fusarium cuneirostrum
  misc_feature: 28
tccgctcctccctgcgccttcggcttgctcgtcggctcgggactatagttggtgactctctcaccaaacgtgttccacaccacaatccaccactac

SEQ ID NO: 42654 - DNA, 96 bp, Fusarium cuneirostrum
  misc_feature: 28
atgctttgttgtgatgccttcaattgacgcagagtcaaacacgacagtgaagaatgacccggagtgtgggtcatgacgtgagtaaagtaggaggga

SEQ ID NO: 42655 - DNA, 96 bp, Fusarium cuneirostrum
  misc_feature: 28
tccctcactccgttcggtcggtattcagaacatagttctgcttggggtatgggttcttcactcgaacccaactctactagtcaatccctctcgcac

SEQ ID NO: 42656 - DNA, 96 bp, Fusarium cuneirostrum
  misc_feature: 28
cacacgaaagatgtagccgagtggggatcacgaggaggataagtgagagggagggtgtggcccgaccgtcatacccgagtcgagaggacgagggga

SEQ ID NO: 42657 - DNA, 96 bp, Fusarium cuneirostrum
  misc_feature: 28
tcccacctcgattctgggttccaacccatacaatctcaggatcgaactcatacaaaatttgtacaaattttgtatgagttcgatcctgagattgta

SEQ ID NO: 42658 - DNA, 96 bp, Fusarium cuneirostrum
  misc_feature: 28
tccatacaaaaactgttccagttttgagactccgtcaaatccacctcgagcgctgctctcgccatgtaccctttcccctcgacatctgtctcggtc

SEQ ID NO: 42659 - DNA, 96 bp, Fusarium cuneirostrum
  misc_feature: 28
tccaggttctagcccatacattctcagaatcgaactcatacaaaatttgtacaaatttcagatcaaactgaaatgcgaccggcgcagagacagcag

SEQ ID NO: 42660 - DNA, 96 bp, Fusarium cuneirostrum
  misc_feature: 28
ctgagaatgggccgagaaatcggtcacttctgttaacgaagtcactttttcttggtggcggagacaccaagctacgcttatatcactaccgaatga

SEQ ID NO: 42661 - DNA, 96 bp, Fusarium cuneirostrum
  misc_feature: 28
gagtcttctgtctttgtacactgagactgctgctgtatacgcagctgggttacctgaacgtgcgtaagtcagtgagaaggatgtcggacgacatga

SEQ ID NO: 42662 - DNA, 96 bp, Fusarium cuneirostrum
  misc_feature: 28
tcatctcattggcaccccgagccgagttagggctcaaggaattggccgtggagtcagagtgcgtaatcaaccaactacttccaatcgttggatccg

SEQ ID NO: 42663 - DNA, 96 bp, Fusarium cuneirostrum
  misc_feature: 28
tcatcgtcgttgttattgtcgtcgtcgtcgctatcgttgttgtagttattgtcgttgtagtcatcgtcgttaacctcgtggtcactgggccaaggc

SEQ ID NO: 42664 - DNA, 96 bp, Fusarium cuneirostrum
  misc_feature: 28
tcatccgctcgggactcatggatgaggaatacatttacagtcaccaacataaacattcacaatctgaaatcatgctcgccaagtgaaaaaaagtag

SEQ ID NO: 42665 - DNA, 96 bp, Fusarium cuneirostrum
  misc_feature: 28
gtacgacgaaccaatccgctacgcagtaaggttccgtccatatgcagaggtgcccggaagcagagctgaggacataagtagggcatcgcccactga

SEQ ID NO: 42666 - DNA, 96 bp, Fusarium cuneirostrum
  misc_feature: 28
tcagctttctaggacctgcatacgttacttgacgatggaggagattgatcggtcaacaaactacgggcgtgataagctaacaatcgactttccttt

SEQ ID NO: 42667 - DNA, 96 bp, Fusarium cuneirostrum
  misc_feature: 28
tacagtaacacctgctggtgactcgcttgttcaagctcgagcaggcacaaaagtaaaaaaacagaagcaagttcatgttttgcgcgacagcgctga

SEQ ID NO: 42668 - DNA, 96 bp, Fusarium cuneirostrum
  misc_feature: 28
ggtcatctgaacttggttcagtttgttgattgaggcagcgccgagacttgacgattaggcaagaatgatagagcgaaagcgatcacgaacgggtga

SEQ ID NO: 42669 - DNA, 96 bp, Fusarium cuneirostrum
  misc_feature: 28
gaaagggtacatggcgagagcagcgctcgaggtggatttgacggagtctcaaaactggaacagtttttgtatggactcgattctggcatttggtga

SEQ ID NO: 42670 - DNA, 96 bp, Fusarium cuneirostrum
  misc_feature: 28
agaggtgaagacactcgtcgagggtgtggacgagtttggtgatgaatgggtcgatgacgatcttggagatttttagtgtagatagatgcaatgtga

SEQ ID NO: 42671 - DNA, 96 bp, Fusarium cuneirostrum
  misc_feature: 28
ataaaggaagttatcacgaataacgagaggtcagaaattagggttaaaccctcggttaatcataagagcgtaaatacggttaacttaatgtattga

SEQ ID NO: 42672 - DNA, 96 bp, Fusarium cuneirostrum
  misc_feature: 28
gcgacctggcgggaggtttccacagctcaagggatataccaaggaggaaggaataacctgatccatcaccttagtcgttcatcagtcactacttga

SEQ ID NO: 42673 - DNA, 96 bp, Fusarium cuneirostrum
  misc_feature: 28
cactcgttcactcctcctccggatagaatacaaactcactctgttcgtctcctcacgttgttgcggtaaactcgtcctccgtcctcgaaaaaaata

SEQ ID NO: 42674 - DNA, 96 bp, Fusarium cuneirostrum
  misc_feature: 28
tattttcggactgaaatacgctgggcgttttcggaggttttgtatcttagattagtctacattgtttcctgttttggatgttgcgataccttcgtt

SEQ ID NO: 42675 - DNA, 96 bp, Fusarium cuneirostrum
  misc_feature: 28
ataatttaatacttaaaagttttattattaataaaatttactttttattcgccttttttaaagaattataaataaaccccttttagctattaaata

SEQ ID NO: 42676 - DNA, 96 bp, Fusarium cuneirostrum
  misc_feature: 28
tatttaagtaaaaggaataaagctagaaataaaataaaataataataaaagaaaaattattttagataggattattaagataataaaaaaaggctt

SEQ ID NO: 42677 - DNA, 96 bp, Fusarium cuneirostrum
  misc_feature: 28
tattcttggttttattcggaatgtccgggagacggacaggcgttattcgtacgagcgtgtgcgaggttttttggagaaagtaccagaggtggcttt

SEQ ID NO: 42678 - DNA, 96 bp, Fusarium cuneirostrum
  misc_feature: 28
taaccaattaattaattagtgtctattatctcttgatccttaatggccatgaaagtcactactccgtcgattttgagagatattgctaggataata

SEQ ID NO: 42679 - DNA, 96 bp, Fusarium cuneirostrum
  misc_feature: 28
ataaatataggcttattaagaaggagaaaaagaaagggataaagatattatagataaaggtataataataaataaaaggaaaactattttataata

SEQ ID NO: 42680 - DNA, 96 bp, Fusarium cuneirostrum
  misc_feature: 28
tattaagataaacccgggttaataataactaatatatatagtaataagcttctctatactcttaattaactaataattatagttaataaatagcgg

SEQ ID NO: 42681 - DNA, 96 bp, Fusarium cuneirostrum
  misc_feature: 28
tatgctattcttgagagcatattactgcgtcgcttatctgacgcatatcttttctacggtaagctatcttcggaaggaagaagtagtgaaggagat

SEQ ID NO: 42682 - DNA, 96 bp, Fusarium cuneirostrum
  misc_feature: 28
taacgagaccggtctcgagtggcttaagcactttgaccggcatacaaccaatcgatgtttgtttgtttgtttgtttgtttgtttgttttattcata

SEQ ID NO: 42683 - DNA, 96 bp, Fusarium cuneirostrum
  misc_feature: 28
tagaccaaagttatggacgctcgtttgccccgttccgggtcactcgcgttagtctataagagattaataggtggctccgccaccaagtggaagata

SEQ ID NO: 42684 - DNA, 96 bp, Fusarium cuneirostrum
  misc_feature: 28
tatctccttagataatatctaataaatcgcttttaaggattataaaagctaataccctagcttaaaacttacctattttaatttacctattattat

SEQ ID NO: 42685 - DNA, 96 bp, Fusarium cuneirostrum
  misc_feature: 28
tatcgtgagcagtgaccttgcgaccttgctcattattataacctcgcgacgggttcgtccctcaccctctgctccgcaccccatcgctccgctcgg

SEQ ID NO: 42686 - DNA, 96 bp, Fusarium cuneirostrum
  misc_feature: 28
tatcggaaggcaatgggtctgcctttaagatatagcaagctgactacgactggtgcctcgactggaagcaaatgaccaagcgttgtataacgccag

SEQ ID NO: 42687 - DNA, 96 bp, Fusarium cuneirostrum
  misc_feature: 28
tatccttagtacggacgaccggagggaggacgtgcggagtgagtgtgacgaaggaacacgtagcgacgttacagacatcacacagagatggtgatg

SEQ ID NO: 42688 - DNA, 96 bp, Fusarium cuneirostrum
  misc_feature: 28
acctagtcgagagaaataagctatatagtttaataatagaatttctaactcgtaaaccaaataatctagatttaattcctagtaacgtacatgata

SEQ ID NO: 42689 - DNA, 96 bp, Fusarium cuneirostrum
  misc_feature: 28
gaaaatctttcggatggactacaatacgaaggcattcacacatcaaataacatcacgatcacaaatataattaaaaatcacagctcgccaaatata

SEQ ID NO: 42690 - DNA, 96 bp, Fusarium cuneirostrum
  misc_feature: 28
tatatatattctttttttattattttctcttttttttcttttttataattatatctttttttttttcttttaattatttatttatttttaattctt

SEQ ID NO: 42691 - DNA, 96 bp, Fusarium cuneirostrum
  misc_feature: 28
tatagctaggacgatatatataactataaagcatgcgataataaggactataagtatgactatattagctatatattattaaaaaactaggaaacc

SEQ ID NO: 42692 - DNA, 96 bp, Fusarium cuneirostrum
  misc_feature: 28
gattcttttagttttctatcctagattactagaaaagtatattcctatcgtatattaatacttaaaacttatagatagataaaagaataacgtata

SEQ ID NO: 42693 - DNA, 96 bp, Fusarium cuneirostrum
  misc_feature: 28
tataccaaggttaagaaacggcttcgccgtttgggggggacttacctctcgctacgctcgagtgcggagtgacaagtcactccttaacttgggggt

SEQ ID NO: 42694 - DNA, 96 bp, Fusarium cuneirostrum
  misc_feature: 28
ctcacttatcacatacgttatgcctagaggcacgaaattaataaaaactatttactatgttttaaatatacttagtaagatcttgtaatatttata

SEQ ID NO: 42695 - DNA, 96 bp, Fusarium cuneirostrum
  misc_feature: 28
tataaagtaggatagttaagtaaaagataaagaattattactttctttaaatattaatttaaatagttaacttaacaataacttaactaaataact

SEQ ID NO: 42696 - DNA, 96 bp, Fusarium cuneirostrum
  misc_feature: 28
tagtaacagtaatgttcactccgttcacgatagcagtcgcttcgctcctgtttgcttttagcataccgttcgttctcctcactcattctccgaatc

SEQ ID NO: 42697 - DNA, 96 bp, Fusarium cuneirostrum
  misc_feature: 28
agtaagctgcttagtaagctgcttagtaagctgcttagtaagctgcttagtaagctgcttagtaagctgcttagtaagctaggaaaagtagagcta

SEQ ID NO: 42698 - DNA, 96 bp, Fusarium cuneirostrum
  misc_feature: 28
cctatttaaaatatcttatagagttcttatttaaaaaagatttttagtattattttagtgatatttatagtattttcgaaaagcctataatagcta

SEQ ID NO: 42699 - DNA, 96 bp, Fusarium cuneirostrum
  misc_feature: 28
atactcgcttattatatacgttatagctattaaaataagttaataaaaaggaagaaaattttagttataaagatagaaaggtttaagctatagcta

SEQ ID NO: 42700 - DNA, 96 bp, Fusarium cuneirostrum
  misc_feature: 28
gagacagattcctcaccctctctcatcctctctcatcctctctcatcctctctcatcctctctcatcctctctcatcctctctcatccttactcta

SEQ ID NO: 42701 - DNA, 96 bp, Fusarium cuneirostrum
  misc_feature: 28
tagaccaaagttatggcactccaaaaaccgggtaccccggtatttctcgttagtgatataagctaggttgctcccttcggtcgcgggaagtctcta

SEQ ID NO: 42702 - DNA, 96 bp, Fusarium cuneirostrum
  misc_feature: 28
gatatcggagatatttataggcctctaacccctttcttaagaactagatatacttattaaccttattatattcctcaaatgttttagcgacttcta

SEQ ID NO: 42703 - DNA, 96 bp, Fusarium cuneirostrum
  misc_feature: 28
gcctgattgggtctccgaccccaccaagtgcgtgtcattggatgacacttgttctcacaggagttgcggtccccgcagcatggacggaacgttcta

SEQ ID NO: 42704 - DNA, 96 bp, Fusarium cuneirostrum
  misc_feature: 28
tacttgtctcgcaccctcgcaagtaagattatgtccgtacataacgtactaccatgagtgggccccatcatcccacacgtccactccttgcaccac

SEQ ID NO: 42705 - DNA, 96 bp, Fusarium cuneirostrum
  misc_feature: 28
tacttctctcctaatagctataatattattatagatatcctattaagtcactaaagaattgtaattctattatatatatatttagatatctctagg

SEQ ID NO: 42706 - DNA, 96 bp, Fusarium cuneirostrum
  misc_feature: 28
gaaaaaaaggttagggttacgaaagggaattataatggtatttattatttagttatattctattatcgcgaattatctagatattttaggatagta

SEQ ID NO: 42707 - DNA, 96 bp, Fusarium cuneirostrum
  misc_feature: 28
aggacgcagggtgagggattgacaagagtatgttggcaacccatgaagagttacgagcgcccgcggagggccgagtctatgactatatccttagta

SEQ ID NO: 42708 - DNA, 96 bp, Fusarium cuneirostrum
  misc_feature: 28
gagtatgtggtgttgatcatcttttttctactcgacgatggcttcgtcgcacatgaatgaaatggaatgagccgagatgcagggcacgaggacgta

SEQ ID NO: 42709 - DNA, 96 bp, Fusarium cuneirostrum
  misc_feature: 28
gcattatttagaacgtgtcgtagcaacgtcgacttcccagagccgggcttccctttgatccaaagcaagcctcgatcacaagatgcccagctcgta

SEQ ID NO: 42710 - DNA, 96 bp, Fusarium cuneirostrum
  misc_feature: 28
gagcaagaatccatttcaaaatttgtacaaaatttgtatgtgttcgtttctgagatttggtgagtcaaatcctgagacggagtcgggaatcaggta

SEQ ID NO: 42711 - DNA, 96 bp, Fusarium cuneirostrum
  misc_feature: 28
taaagaaataagacctcattcttttatatcgtcttaaaattttattttatttttacaattctttttatatatcatacattaataacgcaagaggta

SEQ ID NO: 42712 - DNA, 96 bp, Fusarium cuneirostrum
  misc_feature: 28
taccaaccctgtctgctcggattgctgtctgaaatctctttcatcctctctggaagcattacgggagaactggtggtcgatttccggaccgatgat

SEQ ID NO: 42713 - DNA, 96 bp, Fusarium cuneirostrum
  misc_feature: 28
gactttagtgctttaggctctttataatagtaaggagcttttgctagcttatggcctatctttattcttagtttttaagcttccttaattaatgta

SEQ ID NO: 42714 - DNA, 96 bp, Fusarium cuneirostrum
  misc_feature: 28
tacacaggacggcattctcgtttggcacgataggatgcacttacaccgttgttggagatagctacgtccatattgagcgatccccaagacttgcgg

SEQ ID NO: 42715 - DNA, 96 bp, Fusarium cuneirostrum
  misc_feature: 28
tacacacgagcctacggcgagctgttatttcgagagaaatacatttatcctttttttatactgcgaacggacgtgagacagttggttctcatgtcg

SEQ ID NO: 42716 - DNA, 96 bp, Fusarium cuneirostrum
  misc_feature: 28
ctggagagtcgaggggaagagggaggcccagagggccgaccagaatccagctcaaaactggaacagttttttggtgagttcgtttctgagattgta

SEQ ID NO: 42717 - DNA, 96 bp, Fusarium cuneirostrum
  misc_feature: 28
gaagtcgaggtacatcgcaagactcaaaatctaccggattttgggactttttgcgaacgagcatcgagatttggtgggaacgaatctggcgttgta

SEQ ID NO: 42718 - DNA, 96 bp, Fusarium cuneirostrum
  misc_feature: 28
taaattaaagtttttttctttttaattttatatattttaaatgcgatttatttaatttataaaattaggcataaataataaaaaataaagaaatta

SEQ ID NO: 42719 - DNA, 96 bp, Fusarium cuneirostrum
  misc_feature: 28
ccgttcgggactcaagtggtgtaactctcaccactcctgttccattcacattctacgtcacaattccatctaacactacaattacaattacaatta

SEQ ID NO: 42720 - DNA, 96 bp, Fusarium cuneirostrum
  misc_feature: 28
taattataccgctatatataattaccttcccctaactatatattgccatctatatatagataaccttatatacctactttattatttccttatctt

SEQ ID NO: 42721 - DNA, 96 bp, Fusarium cuneirostrum
  misc_feature: 28
taattaagttaagggttaaggttaagtaattataataaaaattaagaggaataattaagttaagggttaattaaggggagtaattaagttaagagt

SEQ ID NO: 42722 - DNA, 96 bp, Fusarium cuneirostrum
  misc_feature: 28
taatctgatgtgaataacttcaaaagtattttcccgaggccgaggacgtaggacgcaggctgagggattgacaatagactgaactcaagtgaagag

SEQ ID NO: 42723 - DNA, 96 bp, Fusarium cuneirostrum
  misc_feature: 28
taatccaccagcataccgcgaggttgcctaattcggagatgacgatggcttctttttctttgtggtagatagtaatgtgacctgattgatttatgc

SEQ ID NO: 42724 - DNA, 96 bp, Fusarium cuneirostrum
  misc_feature: 28
ctattccgcttttctaatttttctctcttatgctcagatgtgagaggcatctcgtgtagggtatctttgtgtgatgtgcattctcggattttatta

SEQ ID NO: 42725 - DNA, 96 bp, Fusarium cuneirostrum
  misc_feature: 28
taaggactaaattcttttagttttctaacttagatttctaattagccgaaaataaccctactaattattataaatataccttaactaaggcatatt

SEQ ID NO: 42726 - DNA, 96 bp, Fusarium cuneirostrum
  misc_feature: 28
gaagtcatcaccatgtcttcttactactacgtttacaatttatatttacagtcacaactgttattaaatcatcgctcgccattaagtacaatctta

SEQ ID NO: 42727 - DNA, 96 bp, Fusarium cuneirostrum
  misc_feature: 28
taaatcttaagataaagtagtatagaggtttatatataaagcgataatagttaatatataaatagctaatagaaaaataagaccttaggatagtta

SEQ ID NO: 42728 - DNA, 96 bp, Fusarium cuneirostrum
  misc_feature: 28
aacgatattaaagctaggcttaaaatataggtattttccatccggttttaaataatatacttaataagcgagccggttagataaataagctagtta

SEQ ID NO: 42729 - DNA, 96 bp, Fusarium cuneirostrum
  misc_feature: 28
acaccgccggaggcccgagtcggaactgtataatcctacggagcccggagggcgacgtgcggagtgagtgtgacgaaggaacacgtagcgacgtta

SEQ ID NO: 42730 - DNA, 96 bp, Fusarium cuneirostrum
  misc_feature: 28
actatcttacgaagacatttacaatcacaaatagtatcagtcacagtgctcgcatattaaagtcaagtggtgctcgttgtattaaattgttattta

SEQ ID NO: 42731 - DNA, 96 bp, Fusarium cuneirostrum
  misc_feature: 28
cggagaggaagcaggaactgtatagttctaccgaagcccgtcagggcgaggtgcagaacgagtcgaccgacagggagacgatgtgatgttacttta

SEQ ID NO: 42732 - DNA, 96 bp, Fusarium cuneirostrum
  misc_feature: 28
gggaatagcttcaatgcgtgactggctactgagcgagcctcatccataacctacaggagatagggcgagacaataacatttaaatacacttcttta

SEQ ID NO: 42733 - DNA, 96 bp, Fusarium cuneirostrum
  misc_feature: 28
cagaatgggggaacggacgttgataactttggtgatataagcggttttaccctttcaacgcttgcgtgattgggaaactggggccgacggagttta

SEQ ID NO: 42734 - DNA, 96 bp, Fusarium cuneirostrum
  misc_feature: 28
atccatctcaggcgtttacttacaatctacatcagcaaacaccccaaggtcagcaatcagcaatgaccaccctcttgtccattttagaggcgttta

SEQ ID NO: 42735 - DNA, 96 bp, Fusarium cuneirostrum
  misc_feature: 28
taaaacaacttcaaattcaatctactcctgcgcctcctccttcatactatctaaaggcctgtaaagtttctgtcctcgacgtagctttacaactgt

SEQ ID NO: 42736 - DNA, 96 bp, Fusarium cuneirostrum
  misc_feature: 28
ggcctcgggaaaatacttttgaagttattcacatcagattaaaacatgctcgctatatataaatgcgggagctcactaatatgtgtgcccttttta

SEQ ID NO: 42737 - DNA, 96 bp, Fusarium cuneirostrum
  misc_feature: 28
gtttcttctttcttctttcttctttcttctttcttctttcttctttcttctttcttctttcttctttcttctttcttctttcttctttcttctttc

SEQ ID NO: 42738 - DNA, 96 bp, Fusarium cuneirostrum
  misc_feature: 28
cgttggagttactcctccacacttgacccaactcaaacacagcatcatcaaatctacttcgaaactcccttctcagtacccatggcgtggataaac

SEQ ID NO: 42739 - DNA, 96 bp, Fusarium cuneirostrum
  misc_feature: 28
gtttaattcccagtaatatatagcgtatataataagcctctttttatatataatagcccttactttattatataactatagtaggttagtagctag

SEQ ID NO: 42740 - DNA, 96 bp, Fusarium cuneirostrum
  misc_feature: 28
actccaacgatgctttgtgagacttaccggaataggtaatggtgatgacctcaagtggtattgtagttagtatagacagtgatatgtgagcacaac

SEQ ID NO: 42741 - DNA, 96 bp, Fusarium cuneirostrum
  misc_feature: 28
gcagttccctcacaagatcctccgtcgtaacctccttcggtgctacaagataaatcccgaggacccgtcctctcatgcgcgacgcgccatcacaac

SEQ ID NO: 42742 - DNA, 96 bp, Fusarium cuneirostrum
  misc_feature: 28
gtaaacatgaaatgtcactgtgtgtaagatgacccggagtgtgggtcatggtgaaggtaagagtagaagggagggcgtggcccgaccgacatcaac

SEQ ID NO: 42743 - DNA, 96 bp, Fusarium cuneirostrum
  misc_feature: 28
caagcatgaactgtatagttctaccgaagcccgtcagggcgaggtgcagaacgagtcgaccgacagggagacgatgtgatgttactttaattcaac

SEQ ID NO: 42744 - DNA, 96 bp, Fusarium cuneirostrum
  misc_feature: 28
aggagagccgagtttgacagagatctcgctgttacctaaaactcagaaaggaggtttgttagaccaggaggtgtgtcgccagattgatgaacgaac

SEQ ID NO: 42745 - DNA, 96 bp, Fusarium cuneirostrum
  misc_feature: 28
gttcgatcattccagtcgctccgctcctgtttgctattagcattgcgttcatccttcacttcatcttccagatatgtatagacactcacctgttcg

SEQ ID NO: 42746 - DNA, 96 bp, Fusarium cuneirostrum
  misc_feature: 28
gtgacgagggcgacggattcctccgtgacggggctctttgtgggcattttgatcgccgtgccgactcatggaaagggcctgctggagcctaggaac

SEQ ID NO: 42747 - DNA, 96 bp, Fusarium cuneirostrum
  misc_feature: 28
gttaaccgcagggctctactatattaaatatagaatatataaataaagtaagtaagaaaagaggtaaaaataagctagcgtgatttaactttatac

SEQ ID NO: 42748 - DNA, 96 bp, Fusarium cuneirostrum
  misc_feature: 28
gtgttttagtaacgtcgctacgtgttccttcgtcacactcactccgcacgtcgccctccgggctccgtaggattatacagttccgactcgggcctc

SEQ ID NO: 42749 - DNA, 96 bp, Fusarium cuneirostrum
  misc_feature: 28
gtggagatcatcgcatttgtgcgtgacgcattctgagaagatgcgaagttgcgagggaggaaagcggagaatgctggctgaatgtccgcgggctgc

SEQ ID NO: 42750 - DNA, 96 bp, Fusarium cuneirostrum
  misc_feature: 28
gtggacagtatcttgggcgtgtgccgagagggagcccagcagatgtaaatgttttgattttgtagagacccgaaagggttgttgagtagtgactat

SEQ ID NO: 42751 - DNA, 96 bp, Fusarium cuneirostrum
  misc_feature: 28
ggtgcagttccctcacaagatcctccgtcgtaacctccttcggtgctacaagataaatcccgaggacccgtcctctcatgcgcgacgcgccatcac

SEQ ID NO: 42752 - DNA, 96 bp, Fusarium cuneirostrum
  misc_feature: 28
ggtcaaataaaaaagtaaaggtcgttggatccccaactccagaaagcgtcctacgacagctcaatatataaccctacgggtaatcgagtcgctcac

SEQ ID NO: 42753 - DNA, 96 bp, Fusarium cuneirostrum
  misc_feature: 28
aatgcgggagctcactaatatgtgtgccctttttagtttatgtgcgctccgtctttatttaatgctcgcccataatacatgtgaagctatcgtcac

SEQ ID NO: 42754 - DNA, 96 bp, Fusarium cuneirostrum
  misc_feature: 28
gtctggggtccccgtgacacaagtgtccctccccagctttgtaatcagctaaagcttgaaaacaaaacctcttatagaccaaagttatggacgctc

SEQ ID NO: 42755 - DNA, 96 bp, Fusarium cuneirostrum
  misc_feature: 28
aaccgataataaacggcgggatcgaccagccttccgcattaatcgcttgaatgaccgtttgttttgtttgtttgtttgtttgttttattcatagac

SEQ ID NO: 42756 - DNA, 96 bp, Fusarium cuneirostrum
  misc_feature: 28
agtcaggctttaggtgcgcagcaccattgccttcccagtaaatagggagcctgaggcacgaaggcgaagagtgtaggatcatggaggagggacgac

SEQ ID NO: 42757 - DNA, 96 bp, Fusarium cuneirostrum
  misc_feature: 28
agaaaaagacagcgacgtccgtcgtatacaatgacctccggtcaaataaaaaagtaaaggtcgttggatccccaactccagaaagcgtcctacgac

SEQ ID NO: 42758 - DNA, 96 bp, Fusarium cuneirostrum
  misc_feature: 28
aggaaattcctctttgagttagatcggccgtgccgaaatataacatattacgttcgaacctttaagaatggaacagggctctttgagagccccgac

SEQ ID NO: 42759 - DNA, 96 bp, Fusarium cuneirostrum
  misc_feature: 28
caatgcggtttgaaagtgatattcctcagcttcgtcgactatataggccccggagatccttattgcagtaaggacgacttttcctttgtttgcgac

SEQ ID NO: 42760 - DNA, 96 bp, Fusarium cuneirostrum
  misc_feature: 28
ccattgccttcccagtaaatagggagcctgaggcacgaaggcgaagagtgtaggatcatggaggagggacgacgcaatgatcggttgactaaggac

SEQ ID NO: 42761 - DNA, 96 bp, Fusarium cuneirostrum
  misc_feature: 28
gtcctcggcctcgggaaaatacttttgaagttattcacattcacatctacgattacaatttaatcaatcactcgcacactaagtcacagtcgctcg

SEQ ID NO: 42762 - DNA, 96 bp, Fusarium cuneirostrum
  misc_feature: 28
ctgtgacttagtgtgcgagtgattgattaaattgtaatcgtagatgtgaatgtgaataacttcaaaagtattttcccgaggccgaggacgtaggac

SEQ ID NO: 42763 - DNA, 96 bp, Fusarium cuneirostrum
  misc_feature: 28
gaacggggcaaacgagcgtccataactttggtctataagaggtttttttccaaaacgcaccgcgttggttaaaactggggatgtcactttagggac

SEQ ID NO: 42764 - DNA, 96 bp, Fusarium cuneirostrum
  misc_feature: 28
gtcatctccgaattaggcaacctcgcggtatgctggtggattaccgctccgtccacacgcctccgcaatcttaaaacacagttcacccactctttc

SEQ ID NO: 42765 - DNA, 96 bp, Fusarium cuneirostrum
  misc_feature: 28
caattcccactggtattggcacccaataacatttttcctagtccgtgcacgcttctcggatctcgtaacaagactgtcgcataacattcgtgtgac

SEQ ID NO: 42766 - DNA, 96 bp, Fusarium cuneirostrum
  misc_feature: 28
gtcaagtctcggcgctgcctcaatcaacaaactgaaccaagttcagatgaccttccaggtgggcgctccgcgccttttgtactcctcctccgtcgt

SEQ ID NO: 42767 - DNA, 96 bp, Fusarium cuneirostrum
  misc_feature: 28
gtattggagtgattcggagaatgagtgaggagaacgaacggtatgctaaaagcaaacaggagcgaagcgactgctatcgtgaacggagtgaacatt

SEQ ID NO: 42768 - DNA, 96 bp, Fusarium cuneirostrum
  misc_feature: 28
gtatagacactcacctgttcgtgtttccacggccgtggaataaacagaactgattccagtcgaaatcagactcgactccgtctcacacaaaaaaat

SEQ ID NO: 42769 - DNA, 96 bp, Fusarium cuneirostrum
  misc_feature: 28
gcttacgcctccgtaattctttacacagttcttgcttgggcaatgaactcttcacttgagttcagtctattgtcaatccctcagcctgcgtcctac

SEQ ID NO: 42770 - DNA, 96 bp, Fusarium cuneirostrum
  misc_feature: 28
gtagattgaatttgaagttgttttagtgctacaaagtgtatgacttgtgatgttattatgtatgaatgaaaacgtagaatgtgaaatgtgtgaatg

SEQ ID NO: 42771 - DNA, 96 bp, Fusarium cuneirostrum
  misc_feature: 28
cttggaaaaagtgaacactgactgaagacggatgtcgagattgaaccacgaacgtggaagacgaacagtgtggatgtgagtcttctgtctttgtac

SEQ ID NO: 42772 - DNA, 96 bp, Fusarium cuneirostrum
  misc_feature: 28
gtaataaggcgagactaatactaacgagaactactcttggtttatatcggttaattacgctagactactctatattatagggttagagtaatatat

SEQ ID NO: 42773 - DNA, 96 bp, Fusarium cuneirostrum
  misc_feature: 28
gagccgggctccgtatcctactgacacgcacacttttactgcgctgacgctggaacactggcttcacacccggttcccatctacgcttccgcttac

SEQ ID NO: 42774 - DNA, 96 bp, Fusarium cuneirostrum
  misc_feature: 28
gtaaattatatttaataataaatataaaagcgaggataaaggtaataataaagaagaatatatagataaaggggagaataataaataaaaagactt

SEQ ID NO: 42775 - DNA, 96 bp, Fusarium cuneirostrum
  misc_feature: 28
gtaaatgataatcgatgacgacgctaaaatgtacagggtgaactctatcgaagtcgactgatgtcatcgacagcagcgcatgattcgggatgactc

SEQ ID NO: 42776 - DNA, 96 bp, Fusarium cuneirostrum
  misc_feature: 28
gtaaaggtggagggagtgcggatgcgcgaccggtagacacacatcgagggaggggaccgaccgagcaagaatccatttcaaaatttgtacaaaatt

SEQ ID NO: 42777 - DNA, 96 bp, Fusarium cuneirostrum
  misc_feature: 28
ggttcttcactcgagtatgactccattgtcaatccactccggcaccgtcgcatgcgctcctcccctccgtggactctacgataacaagtttacatt

SEQ ID NO: 42778 - DNA, 96 bp, Fusarium cuneirostrum
  misc_feature: 28
actataatcctcatgagacatgagttgattgcgcccgacagtggttggcgataacttcatcagagatgaactgagacggtggtcgaagatgacacc

SEQ ID NO: 42779 - DNA, 96 bp, Fusarium cuneirostrum
  misc_feature: 28
ggtggctttaccggaggacacatcgaactggggtgagatgggagtgcaccaggtattgtggtcctgggatgcggcacatggtctggagacaggtgc

SEQ ID NO: 42780 - DNA, 96 bp, Fusarium cuneirostrum
  misc_feature: 28
ggtggaggaaactgaaacccttctagtgcaagctggtctttgatgattccgggaattctcgcgatatctcttgctactttgtgtcgctctgctggt

SEQ ID NO: 42781 - DNA, 96 bp, Fusarium cuneirostrum
  misc_feature: 28
ggtggaaattgtgttgtagcaaaatttgatatgattatggtgatgttacatcatgtgttttgttctatgattacctgatgttgtagtgacgatagc

SEQ ID NO: 42782 - DNA, 96 bp, Fusarium cuneirostrum
  misc_feature: 28
acatcatcaattgaccaacagtcaatgcgcacatcgaaagatgataccgaagtgggtgtacgaggtgagtagatgagggagtgcggatgcgcgacc

SEQ ID NO: 42783 - DNA, 96 bp, Fusarium cuneirostrum
  misc_feature: 28
aattcccactggtattggcacccaataacatttttcctagtccgtgcacgcttctcggatctcgtaacaagactgtcgcataacattcgtgtgacc

SEQ ID NO: 42784 - DNA, 96 bp, Fusarium cuneirostrum
  misc_feature: 28
acgtgagtcccggggaggaggagggacgacgacccgggattgtcaacttgagttacacctccggaggaccggagtatgaactgtataatttctacc

SEQ ID NO: 42785 - DNA, 96 bp, Fusarium cuneirostrum
  misc_feature: 28
aggagtataagacagcgtcttttcccccgagaggttgagtgagcaggcgaactctgacttgttttatttttttcgaggacggaggacgagtttacc

SEQ ID NO: 42786 - DNA, 96 bp, Fusarium cuneirostrum
  misc_feature: 28
gggtctgctcgaccctcgacacacttctgtcggtcgcgcatccgcactccctcatctactcacctcgtacacccacttcggtatcatctttcgatg

SEQ ID NO: 42787 - DNA, 96 bp, Fusarium cuneirostrum
  misc_feature: 28
gacagctcaatatataaccctacgggtaatcgagtcgctcacaatccgttcgagcgagcgcgtaatgaaacgcgtcagaaaaaaggttgacgcccc

SEQ ID NO: 42788 - DNA, 96 bp, Fusarium cuneirostrum
  misc_feature: 28
ggggcgagtcattccttttttaaataacattttaatgtgacgagcaccactacgccttttaaattggcgagcactttgtgaatgaacgacttaatc

SEQ ID NO: 42789 - DNA, 96 bp, Fusarium cuneirostrum
  misc_feature: 28
cttgactttaatatgcgagcactgtgactgatactatttgtgattgtaaatgtcttcgtaagatagtccggagggcgaggacgtaggacgcagccc

SEQ ID NO: 42790 - DNA, 96 bp, Fusarium cuneirostrum
  misc_feature: 28
cattattataacctcgcgacgggttcgtccctcaccctctgctccgcaccccatcgctccgctcggggtagaattatacagtcatggactcggccc

SEQ ID NO: 42791 - DNA, 96 bp, Fusarium cuneirostrum
  misc_feature: 28
gggaataaagagaatataagatttaggcttaataaattaaaggttaggtaaattatatttaataataaatataaaagcgaggataaaggtaataat

SEQ ID NO: 42792 - DNA, 96 bp, Fusarium cuneirostrum
  misc_feature: 28
ggctattttaatatctggtttttatttatatttatcttaatctctttttactaatatattatatccgcttcgcgatattataataagtttaattat

SEQ ID NO: 42793 - DNA, 96 bp, Fusarium cuneirostrum
  misc_feature: 28
agataaagttagaattcttagagatactaataataagtaagtagatattaatattaataaatagactaattaataagctagagaatcttaatagcc

SEQ ID NO: 42794 - DNA, 96 bp, Fusarium cuneirostrum
  misc_feature: 28
ggcgctgatatctgaaccagagctagagctagaggtgactatctgctggccatcattaatattaactatctgattatctgaacctaggccggctag

SEQ ID NO: 42795 - DNA, 96 bp, Fusarium cuneirostrum
  misc_feature: 28
caatatataaccctacgggtaatcgagtcgctcacaatccgttcgagcgagcgcgtaatgaaacgcgtcagaaaaaaggttgacgccccgggcgcc

SEQ ID NO: 42796 - DNA, 96 bp, Fusarium cuneirostrum
  misc_feature: 28
cttgacctccgtctgcggtcactgttcactacaaggaaatgtagatgaaagagggaagtttctgagaaacttgatcgtctacacgaagtgggcgcc

SEQ ID NO: 42797 - DNA, 96 bp, Fusarium cuneirostrum
  misc_feature: 28
ggcccacgacttttttctacttggcgagcacttaatgatacttgtgatttgtatgtgaccttaaatgaaatgtgatatgaacgtagtcgtagtaag

SEQ ID NO: 42798 - DNA, 96 bp, Fusarium cuneirostrum
  misc_feature: 28
ccaagggctttctcaattgtcaggatgtagccttaaatgtctctgctctacgacgaacttgtctcaccgcataaagctgtctggaacaagaatgcc

SEQ ID NO: 42799 - DNA, 96 bp, Fusarium cuneirostrum
  misc_feature: 28
gcatcggagatgcacatgggcgcagagcgccagagacaatctttgttgtcggatgtaagtaagagcgaaggagtgagcgatggactctttggatcc

SEQ ID NO: 42800 - DNA, 96 bp, Fusarium cuneirostrum
  misc_feature: 28
ggagatctaagagttccaactgctgacaatccacgtcagacaaggaatcaaatgcatcgccctctgggcccataatgtctagaggcgacacgcctt

SEQ ID NO: 42801 - DNA, 96 bp, Fusarium cuneirostrum
  misc_feature: 28
ggaacgaggtcgaagtggtgctagataatgtgaagaggtgaagtgcgaataacttcactagatcatgaaaagagatggagtgaaacgagatcgaag

SEQ ID NO: 42802 - DNA, 96 bp, Fusarium cuneirostrum
  misc_feature: 28
ggaaattcctctttgagttagatcggccgtgccgaaatataacatattacgttcgaacctttaagaatggaacagggctctttgagagccccgacg

SEQ ID NO: 42803 - DNA, 96 bp, Fusarium cuneirostrum
  misc_feature: 28
gctttctggagttggggatccaacgacctttacttttttatttgaccggaggtcattgtatacgacggacgtcgctgtctttttctattttctctg

SEQ ID NO: 42804 - DNA, 96 bp, Fusarium cuneirostrum
  misc_feature: 28
ctgtcggtcgactcgttctgcacctcgccctgacgggcttcggtagaactatacagttcctgcttcctctccgagggtcaggttcagttgtcaagc

SEQ ID NO: 42805 - DNA, 96 bp, Fusarium phaseoli
  misc_feature: 1932
agaaggagaggggataaacaagaatatatgggagagagtaagaagaagggatgaggggggagagaagagtaaagaagagaaagggaaagaagagag

SEQ ID NO: 42806 - DNA, 96 bp, Fusarium phaseoli
  misc_feature: 1898
gagaaggagaggggataaacaagaatatatgggagagagtaagaagaagggatgaggggggagagaagagtaaagaagagaaagggaaagaagaga

SEQ ID NO: 42807 - DNA, 96 bp, Fusarium phaseoli
  misc_feature: 1849
gaaggagaggggataaacaagaatatatgggagagagtaagaagaagggatgaggggggagagaagagtaaagaagagaaagggaaagaagagagt

SEQ ID NO: 42808 - DNA, 96 bp, Fusarium phaseoli
  misc_feature: 1686
aaggagaggggataaacaagaatatatgggagagagtaagaagaagggatgaggggggagagaagagtaaagaagagaaagggaaagaagagagta

SEQ ID NO: 42809 - DNA, 96 bp, Fusarium phaseoli
  misc_feature: 1594
ggagaaggagaggggataaacaagaatatatgggagagagtaagaagaagggatgaggggggagagaagagtaaagaagagaaagggaaagaagag

SEQ ID NO: 42810 - DNA, 96 bp, Fusarium phaseoli
  misc_feature: 1501
aggagaggggataaacaagaatatatgggagagagtaagaagaagggatgaggggggagagaagagtaaagaagagaaagggaaagaagagagtaa

SEQ ID NO: 42811 - DNA, 96 bp, Fusarium phaseoli
  misc_feature: 1332
gggagaaggagaggggataaacaagaatatatgggagagagtaagaagaagggatgaggggggagagaagagtaaagaagagaaagggaaagaaga

SEQ ID NO: 42812 - DNA, 96 bp, Fusarium phaseoli
  misc_feature: 1155
ggagaggggataaacaagaatatatgggagagagtaagaagaagggatgaggggggagagaagagtaaagaagagaaagggaaagaagagagtaag

SEQ ID NO: 42813 - DNA, 96 bp, Fusarium phaseoli
  misc_feature: 925
ggggagaaggagaggggataaacaagaatatatgggagagagtaagaagaagggatgaggggggagagaagagtaaagaagagaaagggaaagaag

SEQ ID NO: 42814 - DNA, 96 bp, Fusarium phaseoli
  misc_feature: 918
gagaggggataaacaagaatatatgggagagagtaagaagaagggatgaggggggagagaagagtaaagaagagaaagggaaagaagagagtaaga

SEQ ID NO: 42815 - DNA, 96 bp, Fusarium phaseoli
  misc_feature: 861
aactataattttaattaattaaccctaacccttaacttaattactactcttaaacgttaactataacttttacttaaataaacccctctcttacta

SEQ ID NO: 42816 - DNA, 96 bp, Fusarium phaseoli
  misc_feature: 850
actataattttaattaattaaccctaacccttaacttaattactactcttaaacgttaactataacttttacttaaataaacccctctcttactat

SEQ ID NO: 42817 - DNA, 96 bp, Fusarium phaseoli
  misc_feature: 818
taactataattttaattaattaaccctaacccttaacttaattactactcttaaacgttaactataacttttacttaaataaacccctctcttact

SEQ ID NO: 42818 - DNA, 96 bp, Fusarium phaseoli
  misc_feature: 797
taatagtaagagaggggtttatttaagtaaaagttatagttaacgtttaagagtagtaattaagttaagggttagggttaattaattaaaattata

SEQ ID NO: 42819 - DNA, 96 bp, Fusarium phaseoli
  misc_feature: 785
aatagtaagagaggggtttatttaagtaaaagttatagttaacgtttaagagtagtaattaagttaagggttagggttaattaattaaaattatag

SEQ ID NO: 42820 - DNA, 96 bp, Fusarium phaseoli
  misc_feature: 771
agagttagaaggggggcaagagagggttaataataagaagaagtgataatgaagagagtaggtaaaaagtaaagagaaggtaagataaaaagtgag

SEQ ID NO: 42821 - DNA, 96 bp, Fusarium phaseoli
  misc_feature: 767
caaacggtggtccaataacgccatgacgacctgcaatgtcaacccgtccactcggtcctcgtctaatggatgtgcctccggatcatcgacgtgcac

SEQ ID NO: 42822 - DNA, 96 bp, Fusarium phaseoli
  misc_feature: 765
aaacggtggtccaataacgccatgacgacctgcaatgtcaacccgtccactcggtcctcgtctaatggatgtgcctccggatcatcgacgtgcacc

SEQ ID NO: 42823 - DNA, 96 bp, Fusarium phaseoli
  misc_feature: 760
tctctggttgcatatcgtctataaacccccctcccctctcttctcgaactctccccttaattcttcctttctccctccaccactcgaccgaataac

SEQ ID NO: 42824 - DNA, 96 bp, Fusarium phaseoli
  misc_feature: 758
ctctctggttgcatatcgtctataaacccccctcccctctcttctcgaactctccccttaattcttcctttctccctccaccactcgaccgaataa

SEQ ID NO: 42825 - DNA, 96 bp, Fusarium phaseoli
  misc_feature: 757
ctctggttgcatatcgtctataaacccccctcccctctcttctcgaactctccccttaattcttcctttctccctccaccactcgaccgaataacc

SEQ ID NO: 42826 - DNA, 96 bp, Fusarium phaseoli
  misc_feature: 739
cctctctggttgcatatcgtctataaacccccctcccctctcttctcgaactctccccttaattcttcctttctccctccaccactcgaccgaata

SEQ ID NO: 42827 - DNA, 96 bp, Fusarium phaseoli
  misc_feature: 722
gagttagaaggggggcaagagagggttaataataagaagaagtgataatgaagagagtaggtaaaaagtaaagagaaggtaagataaaaagtgagg

SEQ ID NO: 42828 - DNA, 96 bp, Fusarium phaseoli
  misc_feature: 707
ataatagtaagagaggggtttatttaagtaaaagttatagttaacgtttaagagtagtaattaagttaagggttagggttaattaattaaaattat

SEQ ID NO: 42829 - DNA, 96 bp, Fusarium phaseoli
  misc_feature: 660
agttagaaggggggcaagagagggttaataataagaagaagtgataatgaagagagtaggtaaaaagtaaagagaaggtaagataaaaagtgaggg

SEQ ID NO: 42830 - DNA, 96 bp, Fusarium phaseoli
  misc_feature: 642
gggggagaaggagaggggataaacaagaatatatgggagagagtaagaagaagggatgaggggggagagaagagtaaagaagagaaagggaaagaa

SEQ ID NO: 42831 - DNA, 96 bp, Fusarium phaseoli
  misc_feature: 626
aataatagtaagagaggggtttatttaagtaaaagttatagttaacgtttaagagtagtaattaagttaagggttagggttaattaattaaaatta

SEQ ID NO: 42832 - DNA, 96 bp, Fusarium phaseoli
  misc_feature: 614
tctggttgcatatcgtctataaacccccctcccctctcttctcgaactctccccttaattcttcctttctccctccaccactcgaccgaataacca

SEQ ID NO: 42833 - DNA, 96 bp, Fusarium phaseoli
  misc_feature: 612
atgtcaacccgtccactcggtcctcgtctaatggatgtgcctccggatcatcgacgtgcacctcgaccaaatccgccaaatcatccatcaaatcac

SEQ ID NO: 42834 - DNA, 96 bp, Fusarium phaseoli
  misc_feature: 606
agaggggataaacaagaatatatgggagagagtaagaagaagggatgaggggggagagaagagtaaagaagagaaagggaaagaagagagtaagag

SEQ ID NO: 42835 - DNA, 96 bp, Fusarium phaseoli
  misc_feature: 602
aaaaaagtaaaaagaagaaaaaaaaagaagagaaaaaggtaagtaaagttaaaaagaaagaaaaaaaaagggttaagtagaaagattaagttaagg

SEQ ID NO: 42836 - DNA, 96 bp, Fusarium phaseoli
  misc_feature: 601
ctggttgcatatcgtctataaacccccctcccctctcttctcgaactctccccttaattcttcctttctccctccaccactcgaccgaataaccac

SEQ ID NO: 42837 - DNA, 96 bp, Fusarium phaseoli
  misc_feature: 583
gataaacaagaatatatgggagagagtaagaagaagggatgaggggggagagaagagtaaagaagagaaagggaaagaagagagtaagagtgggaa

SEQ ID NO: 42838 - DNA, 96 bp, Fusarium phaseoli
  misc_feature: 581
aaacaagaatatatgggagagagtaagaagaagggatgaggggggagagaagagtaaagaagagaaagggaaagaagagagtaagagtgggaaagg

SEQ ID NO: 42839 - DNA, 96 bp, Fusarium phaseoli
  misc_feature: 578
taaacaagaatatatgggagagagtaagaagaagggatgaggggggagagaagagtaaagaagagaaagggaaagaagagagtaagagtgggaaag

SEQ ID NO: 42840 - DNA, 96 bp, Fusarium phaseoli
  misc_feature: 573
aagtgattaagttgagggttagggttaagtggttgtggtgaaggttagggggagtggttgtggtgaaggttagggggagtggttgtggtgaaggtt

SEQ ID NO: 42841 - DNA, 96 bp, Fusarium phaseoli
  misc_feature: 561
gttagaaggggggcaagagagggttaataataagaagaagtgataatgaagagagtaggtaaaaagtaaagagaaggtaagataaaaagtgagggg

SEQ ID NO: 42842 - DNA, 96 bp, Fusarium phaseoli
  misc_feature: 560
ataaacaagaatatatgggagagagtaagaagaagggatgaggggggagagaagagtaaagaagagaaagggaaagaagagagtaagagtgggaaa

SEQ ID NO: 42843 - DNA, 96 bp, Fusarium phaseoli
  misc_feature: 549
agaaggaaggaaagtgtaaaaagaaagagaaaagaataaaaagagggagaaagaaggtatagaggatagaagaggagagttatgaaggataaagga

SEQ ID NO: 42844 - DNA, 96 bp, Fusarium phaseoli
  misc_feature: 546
gaagtgattaagttgagggttagggttaagtggttgtggtgaaggttagggggagtggttgtggtgaaggttagggggagtggttgtggtgaaggt

SEQ ID NO: 42845 - DNA, 96 bp, Fusarium phaseoli
  misc_feature: 545
ggaagtgattaagttgagggttagggttaagtggttgtggtgaaggttagggggagtggttgtggtgaaggttagggggagtggttgtggtgaagg

SEQ ID NO: 42846 - DNA, 96 bp, Fusarium phaseoli
  misc_feature: 533
agtgattaagttgagggttagggttaagtggttgtggtgaaggttagggggagtggttgtggtgaaggttagggggagtggttgtggtgaaggtta

SEQ ID NO: 42847 - DNA, 96 bp, Fusarium phaseoli
  misc_feature: 532
tgtcaacccgtccactcggtcctcgtctaatggatgtgcctccggatcatcgacgtgcacctcgaccaaatccgccaaatcatccatcaaatcacc

SEQ ID NO: 42848 - DNA, 96 bp, Fusarium phaseoli
  misc_feature: 524
gaggggataaacaagaatatatgggagagagtaagaagaagggatgaggggggagagaagagtaaagaagagaaagggaaagaagagagtaagagt

SEQ ID NO: 42849 - DNA, 96 bp, Fusarium phaseoli
  misc_feature: 520
gaaggaaggaaagtgtaaaaagaaagagaaaagaataaaaagagggagaaagaaggtatagaggatagaagaggagagttatgaaggataaaggaa

SEQ ID NO: 42850 - DNA, 96 bp, Fusarium phaseoli
  misc_feature: 517
ggaaaatgaagggtaaaagtgtagggtaaagtaaattaaagaagaaagtatagagtaaagaaaataaagaataaaaatatagggtaaagtaaatta

SEQ ID NO: 42851 - DNA, 96 bp, Fusarium phaseoli
  misc_feature: 510
gaaaatgaagggtaaaagtgtagggtaaagtaaattaaagaagaaagtatagagtaaagaaaataaagaataaaaatatagggtaaagtaaattaa

SEQ ID NO: 42852 - DNA, 96 bp, Fusarium phaseoli
  misc_feature: 507
aacaagaatatatgggagagagtaagaagaagggatgaggggggagagaagagtaaagaagagaaagggaaagaagagagtaagagtgggaaagga

SEQ ID NO: 42853 - DNA, 96 bp, Fusarium phaseoli
  misc_feature: 505
gaaggagagaagagtagaggggagaaagagtggaggggggaagagaaagagaggagtaaagagaaagtaaggagaggaagaggaatgaaaagaaag

SEQ ID NO: 42854 - DNA, 96 bp, Fusarium phaseoli
  misc_feature: 501
ggataaacaagaatatatgggagagagtaagaagaagggatgaggggggagagaagagtaaagaagagaaagggaaagaagagagtaagagtggga

SEQ ID NO: 42855 - DNA, 96 bp, Fusarium phaseoli
  misc_feature: 498
actcccttaacttaatctttctacttaaccctttttttttctttctttttaactttacttacctttttctcttctttttttttcttctttttactt

SEQ ID NO: 42856 - DNA, 96 bp, Fusarium phaseoli
  misc_feature: 494
aagaagggggtttattaaagaggtaagagagtttagtaggtaagtatattagagaaggggaagggagaggaagaagagagaagaaggagagaagag

SEQ ID NO: 42857 - DNA, 96 bp, Fusarium phaseoli
  misc_feature: 492
ctaaccttcaccacaaccactccccctaaccttcaccacaaccactccccctaaccttcaccacaaccacttaaccctaaccctcaacttaatcac

SEQ ID NO: 42858 - DNA, 96 bp, Fusarium phaseoli
  misc_feature: 491
agaagggggtttattaaagaggtaagagagtttagtaggtaagtatattagagaaggggaagggagaggaagaagagagaagaaggagagaagagt

SEQ ID NO: 42859 - DNA, 96 bp, Fusarium phaseoli
  misc_feature: 482
agaagagaggtaagggttagagaggaggcaaggaagataagagggagggttagagaggaggcaaggaagataagagggagagttagagaagaaata

SEQ ID NO: 42860 - DNA, 96 bp, Fusarium phaseoli
  misc_feature: 482
aaaaagtaaaaagaagaaaaaaaaagaagagaaaaaggtaagtaaagttaaaaagaaagaaaaaaaaagggttaagtagaaagattaagttaaggg

SEQ ID NO: 42861 - DNA, 96 bp, Fusarium phaseoli
  misc_feature: 481
aaaatgaagggtaaaagtgtagggtaaagtaaattaaagaagaaagtatagagtaaagaaaataaagaataaaaatatagggtaaagtaaattaaa

SEQ ID NO: 42862 - DNA, 96 bp, Fusarium phaseoli
  misc_feature: 475
aactcccttaacttaatctttctacttaaccctttttttttctttctttttaactttacttacctttttctcttctttttttttcttctttttact

SEQ ID NO: 42863 - DNA, 96 bp, Fusarium phaseoli
  misc_feature: 473
aaaagtaaaaagaagaaaaaaaaagaagagaaaaaggtaagtaaagttaaaaagaaagaaaaaaaaagggttaagtagaaagattaagttaaggga

SEQ ID NO: 42864 - DNA, 96 bp, Fusarium phaseoli
  misc_feature: 472
gaagggggtttattaaagaggtaagagagtttagtaggtaagtatattagagaaggggaagggagaggaagaagagagaagaaggagagaagagta

SEQ ID NO: 42865 - DNA, 96 bp, Fusarium phaseoli
  misc_feature: 471
ctttaatttactttaccctatatttttattctttattttctttactctatactttcttctttaatttactttaccctacacttttacccttcattt

SEQ ID NO: 42866 - DNA, 96 bp, Fusarium phaseoli
  misc_feature: 471
aggaaaatgaagggtaaaagtgtagggtaaagtaaattaaagaagaaagtatagagtaaagaaaataaagaataaaaatatagggtaaagtaaatt

SEQ ID NO: 42867 - DNA, 96 bp, Fusarium phaseoli
  misc_feature: 466
taactcccttaacttaatctttctacttaaccctttttttttctttctttttaactttacttacctttttctcttctttttttttcttctttttac

SEQ ID NO: 42868 - DNA, 96 bp, Fusarium phaseoli
  misc_feature: 465
taataatagtaagagaggggtttatttaagtaaaagttatagttaacgtttaagagtagtaattaagttaagggttagggttaattaattaaaatt

SEQ ID NO: 42869 - DNA, 96 bp, Fusarium phaseoli
  misc_feature: 464
gggataaacaagaatatatgggagagagtaagaagaagggatgaggggggagagaagagtaaagaagagaaagggaaagaagagagtaagagtggg

SEQ ID NO: 42870 - DNA, 96 bp, Fusarium phaseoli
  misc_feature: 463
aagaagagaggtaagggttagagaggaggcaaggaagataagagggagggttagagaggaggcaaggaagataagagggagagttagagaagaaat

SEQ ID NO: 42871 - DNA, 96 bp, Fusarium phaseoli
  misc_feature: 460
aaaagaagggggtttattaaagaggtaagagagtttagtaggtaagtatattagagaaggggaagggagaggaagaagagagaagaaggagagaag

SEQ ID NO: 42872 - DNA, 96 bp, Fusarium phaseoli
  misc_feature: 458
gaagagaggtaagggttagagaggaggcaaggaagataagagggagggttagagaggaggcaaggaagataagagggagagttagagaagaaataa

SEQ ID NO: 42873 - DNA, 96 bp, Fusarium phaseoli
  misc_feature: 457
aataagaaaagaagggggtttattaaagaggtaagagagtttagtaggtaagtatattagagaaggggaagggagaggaagaagagagaagaagga

SEQ ID NO: 42874 - DNA, 96 bp, Fusarium phaseoli
  misc_feature: 453
aagagaggtaagggttagagaggaggcaaggaagataagagggagggttagagaggaggcaaggaagataagagggagagttagagaagaaataaa

SEQ ID NO: 42875 - DNA, 96 bp, Fusarium phaseoli
  misc_feature: 453
ctcccttaacttaatctttctacttaaccctttttttttctttctttttaactttacttacctttttctcttctttttttttcttctttttacttt

SEQ ID NO: 42876 - DNA, 96 bp, Fusarium phaseoli
  misc_feature: 452
cctaaccttcaccacaaccactccccctaaccttcaccacaaccactccccctaaccttcaccacaaccacttaaccctaaccctcaacttaatca

SEQ ID NO: 42877 - DNA, 96 bp, Fusarium phaseoli
  misc_feature: 451
aagggggtttattaaagaggtaagagagtttagtaggtaagtatattagagaaggggaagggagaggaagaagagagaagaaggagagaagagtag

SEQ ID NO: 42878 - DNA, 96 bp, Fusarium phaseoli
  misc_feature: 450
aaagaagggggtttattaaagaggtaagagagtttagtaggtaagtatattagagaaggggaagggagaggaagaagagagaagaaggagagaaga

SEQ ID NO: 42879 - DNA, 96 bp, Fusarium phaseoli
  misc_feature: 449
ttagaaggggggcaagagagggttaataataagaagaagtgataatgaagagagtaggtaaaaagtaaagagaaggtaagataaaaagtgaggggt

SEQ ID NO: 42880 - DNA, 96 bp, Fusarium phaseoli
  misc_feature: 449
cttcttctctcttcttcctctcccttccccttctctaatatacttacctactaaactctcttacctctttaataaacccccttcttttcttattac

SEQ ID NO: 42881 - DNA, 96 bp, Fusarium phaseoli
  misc_feature: 447
tgcatatcgtctataaacccccctcccctctcttctcgaactctccccttaattcttcctttctccctccaccactcgaccgaataaccaccgacc

SEQ ID NO: 42882 - DNA, 96 bp, Fusarium phaseoli
  misc_feature: 445
gggaagtgattaagttgagggttagggttaagtggttgtggtgaaggttagggggagtggttgtggtgaaggttagggggagtggttgtggtgaag

SEQ ID NO: 42883 - DNA, 96 bp, Fusarium phaseoli
  misc_feature: 444
tatttagggtaagtaaagaaagaaggggagagtaataagaaaagaagggggtttattaaagaggtaagagagtttagtaggtaagtatattagaga

SEQ ID NO: 42884 - DNA, 96 bp, Fusarium phaseoli
  misc_feature: 444
ccttcttctctcttcttcctctcccttccccttctctaatatacttacctactaaactctcttacctctttaataaacccccttcttttcttatta

SEQ ID NO: 42885 - DNA, 96 bp, Fusarium phaseoli
  misc_feature: 442
taagggttagagaggaggcaaggaagataagagggagggttagagaggaggcaaggaagataagagggagagttagagaagaaataaaaggaagta

SEQ ID NO: 42886 - DNA, 96 bp, Fusarium phaseoli
  misc_feature: 440
aaggaaggaaagtgtaaaaagaaagagaaaagaataaaaagagggagaaagaaggtatagaggatagaagaggagagttatgaaggataaaggaaa

SEQ ID NO: 42887 - DNA, 96 bp, Fusarium phaseoli
  misc_feature: 438
aagtagttatttagggtaagtaaagaaagaaggggagagtaataagaaaagaagggggtttattaaagaggtaagagagtttagtaggtaagtata

SEQ ID NO: 42888 - DNA, 96 bp, Fusarium phaseoli
  misc_feature: 436
ataagaaaagaagggggtttattaaagaggtaagagagtttagtaggtaagtatattagagaaggggaagggagaggaagaagagagaagaaggag

SEQ ID NO: 42889 - DNA, 96 bp, Fusarium phaseoli
  misc_feature: 435
gagaggtaagggttagagaggaggcaaggaagataagagggagggttagagaggaggcaaggaagataagagggagagttagagaagaaataaaag

SEQ ID NO: 42890 - DNA, 96 bp, Fusarium phaseoli
  misc_feature: 435
agtagttatttagggtaagtaaagaaagaaggggagagtaataagaaaagaagggggtttattaaagaggtaagagagtttagtaggtaagtatat

SEQ ID NO: 42891 - DNA, 96 bp, Fusarium phaseoli
  misc_feature: 434
agagaggtaagggttagagaggaggcaaggaagataagagggagggttagagaggaggcaaggaagataagagggagagttagagaagaaataaaa

SEQ ID NO: 42892 - DNA, 96 bp, Fusarium phaseoli
  misc_feature: 434
aaccttcaccacaaccacttaaccctaaccctcaactcaaccactccccctaaccttcaccacaaccactccccctaaccttcaccacaaccactc

SEQ ID NO: 42893 - DNA, 96 bp, Fusarium phaseoli
  misc_feature: 434
aaggaaaatgaagggtaaaagtgtagggtaaagtaaattaaagaagaaagtatagagtaaagaaaataaagaataaaaatatagggtaaagtaaat

SEQ ID NO: 42894 - DNA, 96 bp, Fusarium phaseoli
  misc_feature: 432
ggggataaacaagaatatatgggagagagtaagaagaagggatgaggggggagagaagagtaaagaagagaaagggaaagaagagagtaagagtgg

SEQ ID NO: 42895 - DNA, 96 bp, Fusarium phaseoli
  misc_feature: 431
taagaaaagaagggggtttattaaagaggtaagagagtttagtaggtaagtatattagagaaggggaagggagaggaagaagagagaagaaggaga

SEQ ID NO: 42896 - DNA, 96 bp, Fusarium phaseoli
  misc_feature: 429
aagaaaagaagggggtttattaaagaggtaagagagtttagtaggtaagtatattagagaaggggaagggagaggaagaagagagaagaaggagag

SEQ ID NO: 42897 - DNA, 96 bp, Fusarium phaseoli
  misc_feature: 429
caagtagttatttagggtaagtaaagaaagaaggggagagtaataagaaaagaagggggtttattaaagaggtaagagagtttagtaggtaagtat

SEQ ID NO: 42898 - DNA, 96 bp, Fusarium phaseoli
  misc_feature: 428
tggttgcatatcgtctataaacccccctcccctctcttctcgaactctccccttaattcttcctttctccctccaccactcgaccgaataaccacc

SEQ ID NO: 42899 - DNA, 96 bp, Fusarium phaseoli
  misc_feature: 427
gaagaagagaggtaagggttagagaggaggcaaggaagataagagggagggttagagaggaggcaaggaagataagagggagagttagagaagaaa

SEQ ID NO: 42900 - DNA, 96 bp, Fusarium phaseoli
  misc_feature: 427
tataactcccttaacttaatctttctacttaaccctttttttttctttctttttaactttacttacctttttctcttctttttttttcttcttttt

SEQ ID NO: 42901 - DNA, 96 bp, Fusarium phaseoli
  misc_feature: 427
gtaagggttagagaggaggcaaggaagataagagggagggttagagaggaggcaaggaagataagagggagagttagagaagaaataaaaggaagt

SEQ ID NO: 42902 - DNA, 96 bp, Fusarium phaseoli
  misc_feature: 427
gcatatcgtctataaacccccctcccctctcttctcgaactctccccttaattcttcctttctccctccaccactcgaccgaataaccaccgaccg

SEQ ID NO: 42903 - DNA, 96 bp, Fusarium phaseoli
  misc_feature: 427
aggaaggaaagtgtaaaaagaaagagaaaagaataaaaagagggagaaagaaggtatagaggatagaagaggagagttatgaaggataaaggaaag

SEQ ID NO: 42904 - DNA, 96 bp, Fusarium phaseoli
  misc_feature: 426
tacttacctactaaactctcttacctctttaataaacccccttcttttcttattactctccccttctttctttacttaccctaaataactacttgt

SEQ ID NO: 42905 - DNA, 96 bp, Fusarium phaseoli
  misc_feature: 425
accttcaccacaaccacttaaccctaaccctcaactcaaccactccccctaaccttcaccacaaccactccccctaaccttcaccacaaccactcc

SEQ ID NO: 42906 - DNA, 96 bp, Fusarium phaseoli
  misc_feature: 424
gaaaagaagggggtttattaaagaggtaagagagtttagtaggtaagtatattagagaaggggaagggagaggaagaagagagaagaaggagagaa

SEQ ID NO: 42907 - DNA, 96 bp, Fusarium phaseoli
  misc_feature: 424
atttagggtaagtaaagaaagaaggggagagtaataagaaaagaagggggtttattaaagaggtaagagagtttagtaggtaagtatattagagaa

SEQ ID NO: 42908 - DNA, 96 bp, Fusarium phaseoli
  misc_feature: 424
acaagaatatatgggagagagtaagaagaagggatgaggggggagagaagagtaaagaagagaaagggaaagaagagagtaagagtgggaaaggag

SEQ ID NO: 42909 - DNA, 96 bp, Fusarium phaseoli
  misc_feature: 423
tttagggtaagtaaagaaagaaggggagagtaataagaaaagaagggggtttattaaagaggtaagagagtttagtaggtaagtatattagagaag

SEQ ID NO: 42910 - DNA, 96 bp, Fusarium phaseoli
  misc_feature: 422
ttatttagggtaagtaaagaaagaaggggagagtaataagaaaagaagggggtttattaaagaggtaagagagtttagtaggtaagtatattagag

SEQ ID NO: 42911 - DNA, 96 bp, Fusarium phaseoli
  misc_feature: 422
ataactcccttaacttaatctttctacttaaccctttttttttctttctttttaactttacttacctttttctcttctttttttttcttcttttta

SEQ ID NO: 42912 - DNA, 96 bp, Fusarium phaseoli
  misc_feature: 421
ccttcaccacaaccacttaaccctaaccctcaactcaaccactccccctaaccttcaccacaaccactccccctaaccttcaccacaaccactccc

SEQ ID NO: 42913 - DNA, 96 bp, Fusarium phaseoli
  misc_feature: 420
agaaaagaagggggtttattaaagaggtaagagagtttagtaggtaagtatattagagaaggggaagggagaggaagaagagagaagaaggagaga

SEQ ID NO: 42914 - DNA, 96 bp, Fusarium phaseoli
  misc_feature: 419
ttagggtaagtaaagaaagaaggggagagtaataagaaaagaagggggtttattaaagaggtaagagagtttagtaggtaagtatattagagaagg

SEQ ID NO: 42915 - DNA, 96 bp, Fusarium phaseoli
  misc_feature: 419
ggtaagggttagagaggaggcaaggaagataagagggagggttagagaggaggcaaggaagataagagggagagttagagaagaaataaaaggaag

SEQ ID NO: 42916 - DNA, 96 bp, Fusarium phaseoli
  misc_feature: 413
gtagttatttagggtaagtaaagaaagaaggggagagtaataagaaaagaagggggtttattaaagaggtaagagagtttagtaggtaagtatatt

SEQ ID NO: 42917 - DNA, 96 bp, Fusarium phaseoli
  misc_feature: 407
ggaaggaaagtgtaaaaagaaagagaaaagaataaaaagagggagaaagaaggtatagaggatagaagaggagagttatgaaggataaaggaaaga

SEQ ID NO: 42918 - DNA, 96 bp, Fusarium phaseoli
  misc_feature: 407
taaccttcaccacaaccacttaaccctaaccctcaactcaaccactccccctaaccttcaccacaaccactccccctaaccttcaccacaaccact

SEQ ID NO: 42919 - DNA, 96 bp, Fusarium phaseoli
  misc_feature: 406
agggggtttattaaagaggtaagagagtttagtaggtaagtatattagagaaggggaagggagaggaagaagagagaagaaggagagaagagtaga

SEQ ID NO: 42920 - DNA, 96 bp, Fusarium phaseoli
  misc_feature: 403
tagaaggggggcaagagagggttaataataagaagaagtgataatgaagagagtaggtaaaaagtaaagagaaggtaagataaaaagtgaggggta

SEQ ID NO: 42921 - DNA, 96 bp, Fusarium phaseoli
  misc_feature: 403
agttatttagggtaagtaaagaaagaaggggagagtaataagaaaagaagggggtttattaaagaggtaagagagtttagtaggtaagtatattag

SEQ ID NO: 42922 - DNA, 96 bp, Fusarium phaseoli
  misc_feature: 403
aactctccctcttatcttccttgcctcctctctaaccctccctcttatcttccttgcctcctctctaacccttacctctcttcttcaccttctcat

SEQ ID NO: 42923 - DNA, 96 bp, Fusarium phaseoli
  misc_feature: 401
aggggataaacaagaatatatgggagagagtaagaagaagggatgaggggggagagaagagtaaagaagagaaagggaaagaagagagtaagagtg

SEQ ID NO: 42924 - DNA, 96 bp, Fusarium phaseoli
  misc_feature: 399
gtaataatagtaagagaggggtttatttaagtaaaagttatagttaacgtttaagagtagtaattaagttaagggttagggttaattaattaaaat

SEQ ID NO: 42925 - DNA, 96 bp, Fusarium phaseoli
  misc_feature: 398
ggttgcatatcgtctataaacccccctcccctctcttctcgaactctccccttaattcttcctttctccctccaccactcgaccgaataaccaccg

SEQ ID NO: 42926 - DNA, 96 bp, Fusarium phaseoli
  misc_feature: 397
tagttatttagggtaagtaaagaaagaaggggagagtaataagaaaagaagggggtttattaaagaggtaagagagtttagtaggtaagtatatta

SEQ ID NO: 42927 - DNA, 96 bp, Fusarium phaseoli
  misc_feature: 394
gttatttagggtaagtaaagaaagaaggggagagtaataagaaaagaagggggtttattaaagaggtaagagagtttagtaggtaagtatattaga

SEQ ID NO: 42928 - DNA, 96 bp, Fusarium phaseoli
  misc_feature: 393
ccctaaccttcaccacaaccactccccctaaccttcaccacaaccactccccctaaccttcaccacaaccacttaaccctaaccctcaacttaatc

SEQ ID NO: 42929 - DNA, 96 bp, Fusarium phaseoli
  misc_feature: 392
ggggggagaaggagaggggataaacaagaatatatgggagagagtaagaagaagggatgaggggggagagaagagtaaagaagagaaagggaaaga

SEQ ID NO: 42930 - DNA, 96 bp, Fusarium phaseoli
  misc_feature: 391
agaagaaagaggaaggagagggagttaatttagggtaggtagagaggaggggaaaggagagagagagaaagaatagagaagaagaagaggggaaag

SEQ ID NO: 42931 - DNA, 96 bp, Fusarium phaseoli
  misc_feature: 389
gaaggaaagtgtaaaaagaaagagaaaagaataaaaagagggagaaagaaggtatagaggatagaagaggagagttatgaaggataaaggaaagaa

SEQ ID NO: 42932 - DNA, 96 bp, Fusarium phaseoli
  misc_feature: 389
gaagaaagaggaaggagagggagttaatttagggtaggtagagaggaggggaaaggagagagagagaaagaatagagaagaagaagaggggaaagg

SEQ ID NO: 42933 - DNA, 96 bp, Fusarium phaseoli
  misc_feature: 387
aacaagtagttatttagggtaagtaaagaaagaaggggagagtaataagaaaagaagggggtttattaaagaggtaagagagtttagtaggtaagt

SEQ ID NO: 42934 - DNA, 96 bp, Fusarium phaseoli
  misc_feature: 386
aagaagaaagaggaaggagagggagttaatttagggtaggtagagaggaggggaaaggagagagagagaaagaatagagaagaagaagaggggaaa

SEQ ID NO: 42935 - DNA, 96 bp, Fusarium phaseoli
  misc_feature: 384
cttcaccacaaccacttaaccctaaccctcaactcaaccactccccctaaccttcaccacaaccactccccctaaccttcaccacaaccactcccc

SEQ ID NO: 42936 - DNA, 96 bp, Fusarium phaseoli
  misc_feature: 383
taactctccctcttatcttccttgcctcctctctaaccctccctcttatcttccttgcctcctctctaacccttacctctcttcttcaccttctca

SEQ ID NO: 42937 - DNA, 96 bp, Fusarium phaseoli
  misc_feature: 380
ccctacccctcactttttatcttaccttctctttactttttacctactctcttcattatcacttcttcttattattaaccctctcttgcccccctt

SEQ ID NO: 42938 - DNA, 96 bp, Fusarium phaseoli
  misc_feature: 379
agaaggggggcaagagagggttaataataagaagaagtgataatgaagagagtaggtaaaaagtaaagagaaggtaagataaaaagtgaggggtag

SEQ ID NO: 42939 - DNA, 96 bp, Fusarium phaseoli
  misc_feature: 378
gaagaagaaagaggaaggagagggagttaatttagggtaggtagagaggaggggaaaggagagagagagaaagaatagagaagaagaagaggggaa

SEQ ID NO: 42940 - DNA, 96 bp, Fusarium phaseoli
  misc_feature: 378
caagaatatatgggagagagtaagaagaagggatgaggggggagagaagagtaaagaagagaaagggaaagaagagagtaagagtgggaaaggaga

SEQ ID NO: 42941 - DNA, 96 bp, Fusarium phaseoli
  misc_feature: 374
ctaactctccctcttatcttccttgcctcctctctaaccctccctcttatcttccttgcctcctctctaacccttacctctcttcttcaccttctc

SEQ ID NO: 42942 - DNA, 96 bp, Fusarium phaseoli
  misc_feature: 373
cctacccctcactttttatcttaccttctctttactttttacctactctcttcattatcacttcttcttattattaaccctctcttgccccccttc

SEQ ID NO: 42943 - DNA, 96 bp, Fusarium phaseoli
  misc_feature: 373
agaggtaagggttagagaggaggcaaggaagataagagggagggttagagaggaggcaaggaagataagagggagagttagagaagaaataaaagg

SEQ ID NO: 42944 - DNA, 96 bp, Fusarium phaseoli
  misc_feature: 369
aagaaagaggaaggagagggagttaatttagggtaggtagagaggaggggaaaggagagagagagaaagaatagagaagaagaagaggggaaagga

SEQ ID NO: 42945 - DNA, 96 bp, Fusarium phaseoli
  misc_feature: 369
ctaaccttcaccacaaccacttaaccctaaccctcaactcaaccactccccctaaccttcaccacaaccactccccctaaccttcaccacaaccac

SEQ ID NO: 42946 - DNA, 96 bp, Fusarium phaseoli
  misc_feature: 367
agtaataatagtaagagaggggtttatttaagtaaaagttatagttaacgtttaagagtagtaattaagttaagggttagggttaattaattaaaa

SEQ ID NO: 42947 - DNA, 96 bp, Fusarium phaseoli
  misc_feature: 367
ttataactcccttaacttaatctttctacttaaccctttttttttctttctttttaactttacttacctttttctcttctttttttttcttctttt

SEQ ID NO: 42948 - DNA, 96 bp, Fusarium phaseoli
  misc_feature: 358
cttctttcctttatccttcataactctcctcttctatcctctataccttctttctccctctttttattcttttctctttctttttacactttcctt

SEQ ID NO: 42949 - DNA, 96 bp, Fusarium phaseoli
  misc_feature: 357
ggggagtggttgagttgagggttagggggagtggttgagataaagtttagagtgaagggttagaaagaggtgggtttgagaagtggtaaaaattaa

SEQ ID NO: 42950 - DNA, 96 bp, Fusarium phaseoli
  misc_feature: 357
gttgcatatcgtctataaacccccctcccctctcttctcgaactctccccttaattcttcctttctccctccaccactcgaccgaataaccaccga

SEQ ID NO: 42951 - DNA, 96 bp, Fusarium phaseoli
  misc_feature: 356
gtgaagaagagaggtaagggttagagaggaggcaaggaagataagagggagggttagagaggaggcaaggaagataagagggagagttagagaaga

SEQ ID NO: 42952 - DNA, 96 bp, Fusarium phaseoli
  misc_feature: 356
gaggtaagggttagagaggaggcaaggaagataagagggagggttagagaggaggcaaggaagataagagggagagttagagaagaaataaaagga

SEQ ID NO: 42953 - DNA, 96 bp, Fusarium phaseoli
  misc_feature: 356
agaagaagaaagaggaaggagagggagttaatttagggtaggtagagaggaggggaaaggagagagagagaaagaatagagaagaagaagagggga

SEQ ID NO: 42954 - DNA, 96 bp, Fusarium phaseoli
  misc_feature: 355
aggtaagggttagagaggaggcaaggaagataagagggagggttagagaggaggcaaggaagataagagggagagttagagaagaaataaaaggaa

SEQ ID NO: 42955 - DNA, 96 bp, Fusarium phaseoli
  misc_feature: 354
ggggaagtgattaagttgagggttagggttaagtggttgtggtgaaggttagggggagtggttgtggtgaaggttagggggagtggttgtggtgaa

SEQ ID NO: 42956 - DNA, 96 bp, Fusarium phaseoli
  misc_feature: 353
ttgcatatcgtctataaacccccctcccctctcttctcgaactctccccttaattcttcctttctccctccaccactcgaccgaataaccaccgac

SEQ ID NO: 42957 - DNA, 96 bp, Fusarium phaseoli
  misc_feature: 352
tgaagaagagaggtaagggttagagaggaggcaaggaagataagagggagggttagagaggaggcaaggaagataagagggagagttagagaagaa

SEQ ID NO: 42958 - DNA, 96 bp, Fusarium phaseoli
  misc_feature: 347
cttataactcccttaacttaatctttctacttaaccctttttttttctttctttttaactttacttacctttttctcttctttttttttcttcttt

SEQ ID NO: 42959 - DNA, 96 bp, Fusarium phaseoli
  misc_feature: 347
aaacaagtagttatttagggtaagtaaagaaagaaggggagagtaataagaaaagaagggggtttattaaagaggtaagagagtttagtaggtaag

SEQ ID NO: 42960 - DNA, 96 bp, Fusarium phaseoli
  misc_feature: 345
tctaactctccctcttatcttccttgcctcctctctaaccctccctcttatcttccttgcctcctctctaacccttacctctcttcttcaccttct

SEQ ID NO: 42961 - DNA, 96 bp, Fusarium phaseoli
  misc_feature: 343
tatatttcccccttctttcctttatccttcataactctcctcttctatcctctataccttctttctccctctttttattcttttctctttcttttt

SEQ ID NO: 42962 - DNA, 96 bp, Fusarium phaseoli
  misc_feature: 341
tttatatttcccccttctttcctttatccttcataactctcctcttctatcctctataccttctttctccctctttttattcttttctctttcttt

SEQ ID NO: 42963 - DNA, 96 bp, Fusarium phaseoli
  misc_feature: 340
agaaagaggaaggagagggagttaatttagggtaggtagagaggaggggaaaggagagagagagaaagaatagagaagaagaagaggggaaaggag

SEQ ID NO: 42964 - DNA, 96 bp, Fusarium phaseoli
  misc_feature: 336
aaaacaagtagttatttagggtaagtaaagaaagaaggggagagtaataagaaaagaagggggtttattaaagaggtaagagagtttagtaggtaa

SEQ ID NO: 42965 - DNA, 96 bp, Fusarium phaseoli
  misc_feature: 330
ctctcttataactcccttaacttaatctttctacttaaccctttttttttctttctttttaactttacttacctttttctcttctttttttttctt

SEQ ID NO: 42966 - DNA, 96 bp, Fusarium phaseoli
  misc_feature: 327
taaggaaaatgaagggtaaaagtgtagggtaaagtaaattaaagaagaaagtatagagtaaagaaaataaagaataaaaatatagggtaaagtaaa

SEQ ID NO: 42967 - DNA, 96 bp, Fusarium phaseoli
  misc_feature: 323
ggtgaagaagagaggtaagggttagagaggaggcaaggaagataagagggagggttagagaggaggcaaggaagataagagggagagttagagaag

SEQ ID NO: 42968 - DNA, 96 bp, Fusarium phaseoli
  misc_feature: 322
ttatatttcccccttctttcctttatccttcataactctcctcttctatcctctataccttctttctccctctttttattcttttctctttctttt

SEQ ID NO: 42969 - DNA, 96 bp, Fusarium phaseoli
  misc_feature: 317
cctaaccttcaccacaaccacttaaccctaaccctcaactcaaccactccccctaaccttcaccacaaccactccccctaaccttcaccacaacca

SEQ ID NO: 42970 - DNA, 96 bp, Fusarium phaseoli
  misc_feature: 315
tctctcttataactcccttaacttaatctttctacttaaccctttttttttctttctttttaactttacttacctttttctcttctttttttttct

SEQ ID NO: 42971 - DNA, 96 bp, Fusarium phaseoli
  misc_feature: 315
gaaggtgaagaagagaggtaagggttagagaggaggcaaggaagataagagggagggttagagaggaggcaaggaagataagagggagagttagag

SEQ ID NO: 42972 - DNA, 96 bp, Fusarium phaseoli
  misc_feature: 314
tagaagaagaaagaggaaggagagggagttaatttagggtaggtagagaggaggggaaaggagagagagagaaagaatagagaagaagaagagggg

SEQ ID NO: 42973 - DNA, 96 bp, Fusarium phaseoli
  misc_feature: 314
cctctttctaacccttcactctaaactttatctcaaccactccccctaaccctcaactcaaccactccccctaaccttcaccacaaccactccccc

SEQ ID NO: 42974 - DNA, 96 bp, Fusarium phaseoli
  misc_feature: 313
aggggaagtgattaagttgagggttagggttaagtggttgtggtgaaggttagggggagtggttgtggtgaaggttagggggagtggttgtggtga

SEQ ID NO: 42975 - DNA, 96 bp, Fusarium phaseoli
  misc_feature: 312
aggtgaagaagagaggtaagggttagagaggaggcaaggaagataagagggagggttagagaggaggcaaggaagataagagggagagttagagaa

SEQ ID NO: 42976 - DNA, 96 bp, Fusarium phaseoli
  misc_feature: 306
gtaaggaaaatgaagggtaaaagtgtagggtaaagtaaattaaagaagaaagtatagagtaaagaaaataaagaataaaaatatagggtaaagtaa

SEQ ID NO: 42977 - DNA, 96 bp, Fusarium phaseoli
  misc_feature: 304
ccttctttcctttatccttcataactctcctcttctatcctctataccttctttctccctctttttattcttttctctttctttttacactttcct

SEQ ID NO: 42978 - DNA, 96 bp, Fusarium phaseoli
  misc_feature: 301
atctctcttataactcccttaacttaatctttctacttaaccctttttttttctttctttttaactttacttacctttttctcttctttttttttc

SEQ ID NO: 42979 - DNA, 96 bp, Fusarium phaseoli
  misc_feature: 300
gggggagtggttgagttgagggttagggggagtggttgagataaagtttagagtgaagggttagaaagaggtgggtttgagaagtggtaaaaatta

SEQ ID NO: 42980 - DNA, 96 bp, Fusarium phaseoli
  misc_feature: 299
aaggtgaagaagagaggtaagggttagagaggaggcaaggaagataagagggagggttagagaggaggcaaggaagataagagggagagttagaga

SEQ ID NO: 42981 - DNA, 96 bp, Fusarium phaseoli
  misc_feature: 297
ctctttctaacccttcactctaaactttatctcaaccactccccctaaccctcaactcaaccactccccctaaccttcaccacaaccactccccct

SEQ ID NO: 42982 - DNA, 96 bp, Fusarium phaseoli
  misc_feature: 296
tctcctttcccctcttcttcttctctattctttctctctctctcctttcccctcctctctacctaccctaaattaactccctctccttcctctttc

SEQ ID NO: 42983 - DNA, 96 bp, Fusarium phaseoli
  misc_feature: 295
gtagaagaagaaagaggaaggagagggagttaatttagggtaggtagagaggaggggaaaggagagagagagaaagaatagagaagaagaagaggg

SEQ ID NO: 42984 - DNA, 96 bp, Fusarium phaseoli
  misc_feature: 292
ttcaccacaaccacttaaccctaaccctcaactcaaccactccccctaaccttcaccacaaccactccccctaaccttcaccacaaccactccccc

SEQ ID NO: 42985 - DNA, 96 bp, Fusarium phaseoli
  misc_feature: 288
taggggaagtgattaagttgagggttagggttaagtggttgtggtgaaggttagggggagtggttgtggtgaaggttagggggagtggttgtggtg

SEQ ID NO: 42986 - DNA, 96 bp, Fusarium phaseoli
  misc_feature: 288
ggtaaggaaaatgaagggtaaaagtgtagggtaaagtaaattaaagaagaaagtatagagtaaagaaaataaagaataaaaatatagggtaaagta

SEQ ID NO: 42987 - DNA, 96 bp, Fusarium phaseoli
  misc_feature: 287
ggaaagtgtaaaaagaaagagaaaagaataaaaagagggagaaagaaggtatagaggatagaagaggagagttatgaaggataaaggaaagaaggg

SEQ ID NO: 42988 - DNA, 96 bp, Fusarium phaseoli
  misc_feature: 286
atatttcccccttctttcctttatccttcataactctcctcttctatcctctataccttctttctccctctttttattcttttctctttcttttta

SEQ ID NO: 42989 - DNA, 96 bp, Fusarium phaseoli
  misc_feature: 284
gatataagaataaataagaaaataaaaaaaagttagataataaaagaagaaaagggagaattataaaaggggaaaaagaggaaataatagaggaaa

SEQ ID NO: 42990 - DNA, 96 bp, Fusarium phaseoli
  misc_feature: 281
tatttcccccttctttcctttatccttcataactctcctcttctatcctctataccttctttctccctctttttattcttttctctttctttttac

SEQ ID NO: 42991 - DNA, 96 bp, Fusarium phaseoli
  misc_feature: 280
atttcccccttctttcctttatccttcataactctcctcttctatcctctataccttctttctccctctttttattcttttctctttctttttaca

SEQ ID NO: 42992 - DNA, 96 bp, Fusarium phaseoli
  misc_feature: 280
aagtagaagaagaaagaggaaggagagggagttaatttagggtaggtagagaggaggggaaaggagagagagagaaagaatagagaagaagaagag

SEQ ID NO: 42993 - DNA, 96 bp, Fusarium phaseoli
  misc_feature: 278
tctcttataactcccttaacttaatctttctacttaaccctttttttttctttctttttaactttacttacctttttctcttctttttttttcttc

SEQ ID NO: 42994 - DNA, 96 bp, Fusarium phaseoli
  misc_feature: 276
tctttctaacccttcactctaaactttatctcaaccactccccctaaccctcaactcaaccactccccctaaccttcaccacaaccactcccccta

SEQ ID NO: 42995 - DNA, 96 bp, Fusarium phaseoli
  misc_feature: 274
aagaatatatgggagagagtaagaagaagggatgaggggggagagaagagtaaagaagagaaagggaaagaagagagtaagagtgggaaaggagaa

SEQ ID NO: 42996 - DNA, 96 bp, Fusarium phaseoli
  misc_feature: 274
agtagaagaagaaagaggaaggagagggagttaatttagggtaggtagagaggaggggaaaggagagagagagaaagaatagagaagaagaagagg

SEQ ID NO: 42997 - DNA, 96 bp, Fusarium phaseoli
  misc_feature: 271
agaatatatgggagagagtaagaagaagggatgaggggggagagaagagtaaagaagagaaagggaaagaagagagtaagagtgggaaaggagaaa

SEQ ID NO: 42998 - DNA, 96 bp, Fusarium phaseoli
  misc_feature: 271
ctcttataactcccttaacttaatctttctacttaaccctttttttttctttctttttaactttacttacctttttctcttctttttttttcttct

SEQ ID NO: 42999 - DNA, 96 bp, Fusarium phaseoli
  misc_feature: 270
aaagtgtaaaaagaaagagaaaagaataaaaagagggagaaagaaggtatagaggatagaagaggagagttatgaaggataaaggaaagaaggggg

SEQ ID NO: 43000 - DNA, 96 bp, Fusarium phaseoli
  misc_feature: 269
tcttataactcccttaacttaatctttctacttaaccctttttttttctttctttttaactttacttacctttttctcttctttttttttcttctt

SEQ ID NO: 43001 - DNA, 96 bp, Fusarium phaseoli
  misc_feature: 267
tttcccccttctttcctttatccttcataactctcctcttctatcctctataccttctttctccctctttttattcttttctctttctttttacac

SEQ ID NO: 43002 - DNA, 96 bp, Fusarium phaseoli
  misc_feature: 266
gaaagtgtaaaaagaaagagaaaagaataaaaagagggagaaagaaggtatagaggatagaagaggagagttatgaaggataaaggaaagaagggg

SEQ ID NO: 43003 - DNA, 96 bp, Fusarium phaseoli
  misc_feature: 264
cccctaaccttcaccacaaccactccccctaaccttcaccacaaccactccccctaaccttcaccacaaccacttaaccctaaccctcaacttaat

SEQ ID NO: 43004 - DNA, 96 bp, Fusarium phaseoli
  misc_feature: 256
tcccccttctttcctttatccttcataactctcctcttctatcctctataccttctttctccctctttttattcttttctctttctttttacactt

SEQ ID NO: 43005 - DNA, 96 bp, Fusarium phaseoli
  misc_feature: 250
ttcccccttctttcctttatccttcataactctcctcttctatcctctataccttctttctccctctttttattcttttctctttctttttacact

SEQ ID NO: 43006 - DNA, 96 bp, Fusarium phaseoli
  misc_feature: 248
ttctaacccttcactctaaactttatctcaaccactccccctaaccctcaactcaaccactccccctaaccttcaccacaaccactccccctaacc

SEQ ID NO: 43007 - DNA, 96 bp, Fusarium phaseoli
  misc_feature: 246
caactcaaccactccccctaaccttcaccacaaccactccccctaaccttcaccacaaccactccccctaaccttcaccacaaccacttaacccta

SEQ ID NO: 43008 - DNA, 96 bp, Fusarium phaseoli
  misc_feature: 246
ctaaccttcaccacaaccactccccctaaccttcaccacaaccacttaaccctaaccctcaactcaaccactccccctaaccttcaccacaaccac

SEQ ID NO: 43009 - DNA, 96 bp, Fusarium phaseoli
  misc_feature: 245
taaccttcaccacaaccactccccctaaccttcaccacaaccacttaaccctaaccctcaactcaaccactccccctaaccttcaccacaaccact

SEQ ID NO: 43010 - DNA, 96 bp, Fusarium phaseoli
  misc_feature: 245
gggtaaggaaaatgaagggtaaaagtgtagggtaaagtaaattaaagaagaaagtatagagtaaagaaaataaagaataaaaatatagggtaaagt

SEQ ID NO: 43011 - DNA, 96 bp, Fusarium phaseoli
  misc_feature: 245
gagtggttgtggtgaaggttagggggagtggttgagttgagggttagggggagtggttgagataaagtttagagtgaagggttagaaagaggtggg

SEQ ID NO: 43012 - DNA, 96 bp, Fusarium phaseoli
  misc_feature: 244
tcaccacaaccacttaaccctaaccctcaactcaaccactccccctaaccttcaccacaaccactccccctaaccttcaccacaaccactccccct

SEQ ID NO: 43013 - DNA, 96 bp, Fusarium phaseoli
  misc_feature: 240
caaccactccccctaaccttcaccacaaccactccccctaaccttcaccacaaccacttaaccctaaccctcaacttaatcacttcccctaaccct

SEQ ID NO: 43014 - DNA, 96 bp, Fusarium phaseoli
  misc_feature: 239
ccccctaaccttcaccacaaccactccccctaaccttcaccacaaccactccccctaaccttcaccacaaccacttaaccctaaccctcaacttaa

SEQ ID NO: 43015 - DNA, 96 bp, Fusarium phaseoli
  misc_feature: 238
ggttaggggaagtgattaagttgagggttagggttaagtggttgtggtgaaggttagggggagtggttgtggtgaaggttagggggagtggttgtg

SEQ ID NO: 43016 - DNA, 96 bp, Fusarium phaseoli
  misc_feature: 236
tttctaacccttcactctaaactttatctcaaccactccccctaaccctcaactcaaccactccccctaaccttcaccacaaccactccccctaac

SEQ ID NO: 43017 - DNA, 96 bp, Fusarium phaseoli
  misc_feature: 236
ctttctaacccttcactctaaactttatctcaaccactccccctaaccctcaactcaaccactccccctaaccttcaccacaaccactccccctaa

SEQ ID NO: 43018 - DNA, 96 bp, Fusarium phaseoli
  misc_feature: 233
ccttcaccacaaccactccccctaaccttcaccacaaccacttaaccctaaccctcaactcaaccactccccctaaccttcaccacaaccactccc

SEQ ID NO: 43019 - DNA, 96 bp, Fusarium phaseoli
  misc_feature: 232
gttaggggaagtgattaagttgagggttagggttaagtggttgtggtgaaggttagggggagtggttgtggtgaaggttagggggagtggttgtgg

SEQ ID NO: 43020 - DNA, 96 bp, Fusarium phaseoli
  misc_feature: 231
caaacccacctctttctaacccttcactctaaactttatctcaaccactccccctaaccctcaactcaaccactccccctaaccttcaccacaacc

SEQ ID NO: 43021 - DNA, 96 bp, Fusarium phaseoli
  misc_feature: 230
aaccttcaccacaaccactccccctaaccttcaccacaaccacttaaccctaaccctcaactcaaccactccccctaaccttcaccacaaccactc

SEQ ID NO: 43022 - DNA, 96 bp, Fusarium phaseoli
  misc_feature: 229
gatttgctagcgaatccgccgcgcagctaggatagcgccttttttttttgtatgggaaacccattggatttgctagcgaatccgccgcgcagctag

SEQ ID NO: 43023 - DNA, 96 bp, Fusarium phaseoli
  misc_feature: 227
cctaaccttcaccacaaccactccccctaaccttcaccacaaccacttaaccctaaccctcaactcaaccactccccctaaccttcaccacaacca

SEQ ID NO: 43024 - DNA, 96 bp, Fusarium phaseoli
  misc_feature: 226
atttgctagcgaatccgccgcgcagctaggatagcgccttttttttttgtatgggaaacccattggatttgctagcgaatccgccgcgcagctagg

SEQ ID NO: 43025 - DNA, 96 bp, Fusarium phaseoli
  misc_feature: 225
gggggggagaaggagaggggataaacaagaatatatgggagagagtaagaagaagggatgaggggggagagaagagtaaagaagagaaagggaaag

SEQ ID NO: 43026 - DNA, 96 bp, Fusarium phaseoli
  misc_feature: 224
aactcaaccactccccctaaccttcaccacaaccactccccctaaccttcaccacaaccactccccctaaccttcaccacaaccacttaaccctaa

SEQ ID NO: 43027 - DNA, 96 bp, Fusarium phaseoli
  misc_feature: 224
cctcaactcaaccactccccctaaccttcaccacaaccactccccctaaccttcaccacaaccactccccctaaccttcaccacaaccacttaacc

SEQ ID NO: 43028 - DNA, 96 bp, Fusarium phaseoli
  misc_feature: 223
ctcaaccactccccctaaccttcaccacaaccactccccctaaccttcaccacaaccactccccctaaccttcaccacaaccacttaaccctaacc

SEQ ID NO: 43029 - DNA, 96 bp, Fusarium phaseoli
  misc_feature: 220
atcctagctgcgcggcggattcgctagcaaatccaatgggtttcccatacaaaaaaaaaaggcgctatcctagctgcgcggcggattcgctagcaa

SEQ ID NO: 43030 - DNA, 96 bp, Fusarium phaseoli
  misc_feature: 219
actcaaccactccccctaaccttcaccacaaccactccccctaaccttcaccacaaccactccccctaaccttcaccacaaccacttaaccctaac

SEQ ID NO: 43031 - DNA, 96 bp, Fusarium phaseoli
  misc_feature: 218
agggggagtggttgagttgagggttagggggagtggttgagataaagtttagagtgaagggttagaaagaggtgggtttgagaagtggtaaaaatt

SEQ ID NO: 43032 - DNA, 96 bp, Fusarium phaseoli
  misc_feature: 217
ctcaactcaaccactccccctaaccttcaccacaaccactccccctaaccttcaccacaaccactccccctaaccttcaccacaaccacttaaccc

SEQ ID NO: 43033 - DNA, 96 bp, Fusarium phaseoli
  misc_feature: 217
ggagtggttgtggtgaaggttagggggagtggttgagttgagggttagggggagtggttgagataaagtttagagtgaagggttagaaagaggtgg

SEQ ID NO: 43034 - DNA, 96 bp, Fusarium phaseoli
  misc_feature: 216
ttaggggaagtgattaagttgagggttagggttaagtggttgtggtgaaggttagggggagtggttgtggtgaaggttagggggagtggttgtggt

SEQ ID NO: 43035 - DNA, 96 bp, Fusarium phaseoli
  misc_feature: 216
tcaactcaaccactccccctaaccttcaccacaaccactccccctaaccttcaccacaaccactccccctaaccttcaccacaaccacttaaccct

SEQ ID NO: 43036 - DNA, 96 bp, Fusarium phaseoli
  misc_feature: 215
gggaacacattattccggatcatatgggcgcagataggttggatatataaatggtttggagcattagttgattagggtggaaggaccggcgggggg

SEQ ID NO: 43037 - DNA, 96 bp, Fusarium phaseoli
  misc_feature: 214
tcctagctgcgcggcggattcgctagcaaatccaatgggtttcccatacaaaaaaaaaaggcgctatcctagctgcgcggcggattcgctagcaaa

SEQ ID NO: 43038 - DNA, 96 bp, Fusarium phaseoli
  misc_feature: 214
ccctaaccttcaccacaaccacttaaccctaaccctcaactcaaccactccccctaaccttcaccacaaccactccccctaaccttcaccacaacc

SEQ ID NO: 43039 - DNA, 96 bp, Fusarium phaseoli
  misc_feature: 214
gggagtggttgtggtgaaggttagggggagtggttgagttgagggttagggggagtggttgagataaagtttagagtgaagggttagaaagaggtg

SEQ ID NO: 43040 - DNA, 96 bp, Fusarium phaseoli
  misc_feature: 214
accttcaccacaaccactccccctaaccttcaccacaaccacttaaccctaaccctcaactcaaccactccccctaaccttcaccacaaccactcc

SEQ ID NO: 43041 - DNA, 96 bp, Fusarium phaseoli
  misc_feature: 213
acaaccactccccctaaccttcaccacaaccactccccctaaccttcaccacaaccacttaaccctaaccctcaacttaatcacttcccctaaccc

SEQ ID NO: 43042 - DNA, 96 bp, Fusarium phaseoli
  misc_feature: 213
caaccactccccctaaccttcaccacaaccactccccctaaccttcaccacaaccactccccctaaccttcaccacaaccacttaaccctaaccct

SEQ ID NO: 43043 - DNA, 96 bp, Fusarium phaseoli
  misc_feature: 212
tctaacccttcactctaaactttatctcaaccactccccctaaccctcaactcaaccactccccctaaccttcaccacaaccactccccctaacct

SEQ ID NO: 43044 - DNA, 96 bp, Fusarium phaseoli
  misc_feature: 212
aaccactccccctaaccttcaccacaaccactccccctaaccttcaccacaaccactccccctaaccttcaccacaaccacttaaccctaaccctc

SEQ ID NO: 43045 - DNA, 96 bp, Fusarium phaseoli
  misc_feature: 209
ggggagtggttgtggtgaaggttagggggagtggttgagttgagggttagggggagtggttgagataaagtttagagtgaagggttagaaagaggt

SEQ ID NO: 43046 - DNA, 96 bp, Fusarium phaseoli
  misc_feature: 206
tggatttgctagcgaatccgccgcgcagctaggatagcgccttttttttttgtatgggaaacccattggatttgctagcgaatccgccgcgcagct

SEQ ID NO: 43047 - DNA, 96 bp, Fusarium phaseoli
  misc_feature: 205
caccacaaccacttaaccctaaccctcaactcaaccactccccctaaccttcaccacaaccactccccctaaccttcaccacaaccactcccccta

SEQ ID NO: 43048 - DNA, 96 bp, Fusarium phaseoli
  misc_feature: 204
tcaaacccacctctttctaacccttcactctaaactttatctcaaccactccccctaaccctcaactcaaccactccccctaaccttcaccacaac

SEQ ID NO: 43049 - DNA, 96 bp, Fusarium phaseoli
  misc_feature: 203
ccctcaactcaaccactccccctaaccttcaccacaaccactccccctaaccttcaccacaaccactccccctaaccttcaccacaaccacttaac

SEQ ID NO: 43050 - DNA, 96 bp, Fusarium phaseoli
  misc_feature: 201
tcaaccactccccctaaccttcaccacaaccactccccctaaccttcaccacaaccactccccctaaccttcaccacaaccacttaaccctaaccc

SEQ ID NO: 43051 - DNA, 96 bp, Fusarium phaseoli
  misc_feature: 200
tatcctagctgcgcggcggattcgctagcaaatccaatgggtttcccatacaaaaaaaaaaggcgctatcctagctgcgcggcggattcgctagca

SEQ ID NO: 43052 - DNA, 96 bp, Fusarium phaseoli
  misc_feature: 197
agatataagaataaataagaaaataaaaaaaagttagataataaaagaagaaaagggagaattataaaaggggaaaaagaggaaataatagaggaa

SEQ ID NO: 43053 - DNA, 96 bp, Fusarium phaseoli
  misc_feature: 194
aaacccacctctttctaacccttcactctaaactttatctcaaccactccccctaaccctcaactcaaccactccccctaaccttcaccacaacca

SEQ ID NO: 43054 - DNA, 96 bp, Fusarium phaseoli
  misc_feature: 194
ggatttgctagcgaatccgccgcgcagctaggatagcgccttttttttttgtatgggaaacccattggatttgctagcgaatccgccgcgcagcta

SEQ ID NO: 43055 - DNA, 96 bp, Fusarium phaseoli
  misc_feature: 193
ttctcaaacccacctctttctaacccttcactctaaactttatctcaaccactccccctaaccctcaactcaaccactccccctaaccttcaccac

SEQ ID NO: 43056 - DNA, 96 bp, Fusarium phaseoli
  misc_feature: 193
aacccacctctttctaacccttcactctaaactttatctcaaccactccccctaaccctcaactcaaccactccccctaaccttcaccacaaccac

SEQ ID NO: 43057 - DNA, 96 bp, Fusarium phaseoli
  misc_feature: 192
cttaaccctaaccctcaactcaaccactccccctaaccttcaccacaaccactccccctaaccttcaccacaaccactccccctaaccttcaccac

SEQ ID NO: 43058 - DNA, 96 bp, Fusarium phaseoli
  misc_feature: 192
gtagatataagaataaataagaaaataaaaaaaagttagataataaaagaagaaaagggagaattataaaaggggaaaaagaggaaataatagagg

SEQ ID NO: 43059 - DNA, 96 bp, Fusarium phaseoli
  misc_feature: 192
agtagatataagaataaataagaaaataaaaaaaagttagataataaaagaagaaaagggagaattataaaaggggaaaaagaggaaataatagag

SEQ ID NO: 43060 - DNA, 96 bp, Fusarium phaseoli
  misc_feature: 191
ctcaaacccacctctttctaacccttcactctaaactttatctcaaccactccccctaaccctcaactcaaccactccccctaaccttcaccacaa

SEQ ID NO: 43061 - DNA, 96 bp, Fusarium phaseoli
  misc_feature: 190
gctgcgcggcggattcgctagcaaatccaatgggtttcccatacaaaaaaaaaaggcgctatcctagctgcgcggcggattcgctagcaaatccaa

SEQ ID NO: 43062 - DNA, 96 bp, Fusarium phaseoli
  misc_feature: 189
aaccacttaaccctaaccctcaactcaaccactccccctaaccttcaccacaaccactccccctaaccttcaccacaaccactccccctaaccttc

SEQ ID NO: 43063 - DNA, 96 bp, Fusarium phaseoli
  misc_feature: 184
tctcaaacccacctctttctaacccttcactctaaactttatctcaaccactccccctaaccctcaactcaaccactccccctaaccttcaccaca

SEQ ID NO: 43064 - DNA, 96 bp, Fusarium phaseoli
  misc_feature: 184
ctatcctagctgcgcggcggattcgctagcaaatccaatgggtttcccatacaaaaaaaaaaggcgctatcctagctgcgcggcggattcgctagc

SEQ ID NO: 43065 - DNA, 96 bp, Fusarium phaseoli
  misc_feature: 183
cactccccctaaccttcaccacaaccactccccctaaccttcaccacaaccactccccctaaccttcaccacaaccacttaaccctaaccctcaac

SEQ ID NO: 43066 - DNA, 96 bp, Fusarium phaseoli
  misc_feature: 183
cacttaaccctaaccctcaactcaaccactccccctaaccttcaccacaaccactccccctaaccttcaccacaaccactccccctaaccttcacc

SEQ ID NO: 43067 - DNA, 96 bp, Fusarium phaseoli
  misc_feature: 182
ccctaaccctcaactcaaccactccccctaaccttcaccacaaccactccccctaaccttcaccacaaccacttaaccctaaccctcaactcaacc

SEQ ID NO: 43068 - DNA, 96 bp, Fusarium phaseoli
  misc_feature: 181
cttctcaaacccacctctttctaacccttcactctaaactttatctcaaccactccccctaaccctcaactcaaccactccccctaaccttcacca

SEQ ID NO: 43069 - DNA, 96 bp, Fusarium phaseoli
  misc_feature: 181
tccccctaaccttcaccacaaccactccccctaaccttcaccacaaccactccccctaaccttcaccacaaccacttaaccctaaccctcaactta

SEQ ID NO: 43070 - DNA, 96 bp, Fusarium phaseoli
  misc_feature: 180
ctccccctaaccttcaccacaaccactccccctaaccttcaccacaaccactccccctaaccttcaccacaaccacttaaccctaaccctcaactt

SEQ ID NO: 43071 - DNA, 96 bp, Fusarium phaseoli
  misc_feature: 179
cgtatgcaatggtttcggtcggtggttattcggtcgagtggtggagggagaaaggaagaattaaggggagagttcgagaagagaggggaggggggg

SEQ ID NO: 43072 - DNA, 96 bp, Fusarium phaseoli
  misc_feature: 178
tagatataagaataaataagaaaataaaaaaaagttagataataaaagaagaaaagggagaattataaaaggggaaaaagaggaaataatagagga

SEQ ID NO: 43073 - DNA, 96 bp, Fusarium phaseoli
  misc_feature: 178
actccccctaaccttcaccacaaccactccccctaaccttcaccacaaccactccccctaaccttcaccacaaccacttaaccctaaccctcaact

SEQ ID NO: 43074 - DNA, 96 bp, Fusarium phaseoli
  misc_feature: 178
acccacctctttctaacccttcactctaaactttatctcaaccactccccctaaccctcaactcaaccactccccctaaccttcaccacaaccact

SEQ ID NO: 43075 - DNA, 96 bp, Fusarium phaseoli
  misc_feature: 177
cacaaccacttaaccctaaccctcaactcaaccactccccctaaccttcaccacaaccactccccctaaccttcaccacaaccactccccctaacc

SEQ ID NO: 43076 - DNA, 96 bp, Fusarium phaseoli
  misc_feature: 177
acttctcaaacccacctctttctaacccttcactctaaactttatctcaaccactccccctaaccctcaactcaaccactccccctaaccttcacc

SEQ ID NO: 43077 - DNA, 96 bp, Fusarium phaseoli
  misc_feature: 176
ttaaccctaaccctcaactcaaccactccccctaaccttcaccacaaccactccccctaaccttcaccacaaccactccccctaaccttcaccaca

SEQ ID NO: 43078 - DNA, 96 bp, Fusarium phaseoli
  misc_feature: 175
cccctaaccctcaactcaaccactccccctaaccttcaccacaaccactccccctaaccttcaccacaaccacttaaccctaaccctcaactcaac

SEQ ID NO: 43079 - DNA, 96 bp, Fusarium phaseoli
  misc_feature: 175
ccacaaccacttaaccctaaccctcaactcaaccactccccctaaccttcaccacaaccactccccctaaccttcaccacaaccactccccctaac

SEQ ID NO: 43080 - DNA, 96 bp, Fusarium phaseoli
  misc_feature: 175
ccacttaaccctaaccctcaactcaaccactccccctaaccttcaccacaaccactccccctaaccttcaccacaaccactccccctaaccttcac

SEQ ID NO: 43081 - DNA, 96 bp, Fusarium phaseoli
  misc_feature: 172
acttaaccctaaccctcaactcaaccactccccctaaccttcaccacaaccactccccctaaccttcaccacaaccactccccctaaccttcacca

SEQ ID NO: 43082 - DNA, 96 bp, Fusarium phaseoli
  misc_feature: 171
aaactttatctcaaccactccccctaaccctcaactcaaccactccccctaaccttcaccacaaccactccccctaaccttcaccacaaccactta

SEQ ID NO: 43083 - DNA, 96 bp, Fusarium phaseoli
  misc_feature: 171
ctgcgcggcggattcgctagcaaatccaatgggtttcccatacaaaaaaaaaaggcgctatcctagctgcgcggcggattcgctagcaaatccaat

SEQ ID NO: 43084 - DNA, 96 bp, Fusarium phaseoli
  misc_feature: 170
aaccctcaactcaaccactccccctaaccttcaccacaaccactccccctaaccttcaccacaaccactccccctaaccttcaccacaaccactta

SEQ ID NO: 43085 - DNA, 96 bp, Fusarium phaseoli
  misc_feature: 169
acaaccacttaaccctaaccctcaactcaaccactccccctaaccttcaccacaaccactccccctaaccttcaccacaaccactccccctaacct

SEQ ID NO: 43086 - DNA, 96 bp, Fusarium phaseoli
  misc_feature: 168
accacaaccacttaaccctaaccctcaactcaaccactccccctaaccttcaccacaaccactccccctaaccttcaccacaaccactccccctaa

SEQ ID NO: 43087 - DNA, 96 bp, Fusarium phaseoli
  misc_feature: 167
accctcaactcaaccactccccctaaccttcaccacaaccactccccctaaccttcaccacaaccactccccctaaccttcaccacaaccacttaa

SEQ ID NO: 43088 - DNA, 96 bp, Fusarium phaseoli
  misc_feature: 167
tgcgcggcggattcgctagcaaatccaatgggtttcccatacaaaaaaaaaaggcgctatcctagctgcgcggcggattcgctagcaaatccaatg

SEQ ID NO: 43089 - DNA, 96 bp, Fusarium phaseoli
  misc_feature: 167
taaactttatctcaaccactccccctaaccctcaactcaaccactccccctaaccttcaccacaaccactccccctaaccttcaccacaaccactt

SEQ ID NO: 43090 - DNA, 96 bp, Fusarium phaseoli
  misc_feature: 167
aaccctaaccctcaactcaaccactccccctaaccttcaccacaaccactccccctaaccttcaccacaaccactccccctaaccttcaccacaac

SEQ ID NO: 43091 - DNA, 96 bp, Fusarium phaseoli
  misc_feature: 167
ggtgaaggttagggggagtggttgtggtgaaggttagggggagtggttgagttgagggttagggggagtggttgagataaagtttagagtgaaggg

SEQ ID NO: 43092 - DNA, 96 bp, Fusarium phaseoli
  misc_feature: 167
ctaaactttatctcaaccactccccctaaccctcaactcaaccactccccctaaccttcaccacaaccactccccctaaccttcaccacaaccact

SEQ ID NO: 43093 - DNA, 96 bp, Fusarium phaseoli
  misc_feature: 166
caaccacttaaccctaaccctcaactcaaccactccccctaaccttcaccacaaccactccccctaaccttcaccacaaccactccccctaacctt

SEQ ID NO: 43094 - DNA, 96 bp, Fusarium phaseoli
  misc_feature: 165
accacttaaccctaaccctcaactcaaccactccccctaaccttcaccacaaccactccccctaaccttcaccacaaccactccccctaaccttca

SEQ ID NO: 43095 - DNA, 96 bp, Fusarium phaseoli
  misc_feature: 165
atttttaccacttctcaaacccacctctttctaacccttcactctaaactttatctcaaccactccccctaaccctcaactcaaccactcccccta

SEQ ID NO: 43096 - DNA, 96 bp, Fusarium phaseoli
  misc_feature: 163
ttgagttgagggttagggttaagtggttgtggtgaaggttagggggagtggttgtggtgaaggttagggggagtggttgagttgagggttaggggg

SEQ ID NO: 43097 - DNA, 96 bp, Fusarium phaseoli
  misc_feature: 162
accctaaccctcaactcaaccactccccctaaccttcaccacaaccactccccctaaccttcaccacaaccactccccctaaccttcaccacaacc

SEQ ID NO: 43098 - DNA, 96 bp, Fusarium phaseoli
  misc_feature: 162
ccctaaccttcaccacaaccactccccctaaccttcaccacaaccacttaaccctaaccctcaactcaaccactccccctaaccttcaccacaacc

SEQ ID NO: 43099 - DNA, 96 bp, Fusarium phaseoli
  misc_feature: 162
gggaaacccattggatttgctagcgaatccgccgcgcagctaggatagcgccttttttttttgtatgggaaacccattggatttgctagcgaatcc

SEQ ID NO: 43100 - DNA, 96 bp, Fusarium phaseoli
  misc_feature: 161
taaccctaaccctcaactcaaccactccccctaaccttcaccacaaccactccccctaaccttcaccacaaccactccccctaaccttcaccacaa

SEQ ID NO: 43101 - DNA, 96 bp, Fusarium phaseoli
  misc_feature: 160
ctaacccttcactctaaactttatctcaaccactccccctaaccctcaactcaaccactccccctaaccttcaccacaaccactccccctaacctt

SEQ ID NO: 43102 - DNA, 96 bp, Fusarium phaseoli
  misc_feature: 159
accactccccctaaccttcaccacaaccactccccctaaccttcaccacaaccactccccctaaccttcaccacaaccacttaaccctaaccctca

SEQ ID NO: 43103 - DNA, 96 bp, Fusarium phaseoli
  misc_feature: 158
taaccctcaactcaaccactccccctaaccttcaccacaaccactccccctaaccttcaccacaaccactccccctaaccttcaccacaaccactt

SEQ ID NO: 43104 - DNA, 96 bp, Fusarium phaseoli
  misc_feature: 155
ccactccccctaaccttcaccacaaccactccccctaaccttcaccacaaccactccccctaaccttcaccacaaccacttaaccctaaccctcaa

SEQ ID NO: 43105 - DNA, 96 bp, Fusarium phaseoli
  misc_feature: 155
attaactataaactctaacctttaaaccctttattaactctaacctttaattctttattaaccctaactatttaattaattaccccataccctaac

SEQ ID NO: 43106 - DNA, 96 bp, Fusarium phaseoli
  misc_feature: 155
cgcggcggattcgctagcaaatccaatgggtttcccatacaaaaaaaaaaggcgctatcctagctgcgcggcggattcgctagcaaatccaatggg

SEQ ID NO: 43107 - DNA, 96 bp, Fusarium phaseoli
  misc_feature: 153
tctaaactttatctcaaccactccccctaaccctcaactcaaccactccccctaaccttcaccacaaccactccccctaaccttcaccacaaccac

SEQ ID NO: 43108 - DNA, 96 bp, Fusarium phaseoli
  misc_feature: 153
taattaactataaactctaacctttaaaccctttattaactctaacctttaattctttattaaccctaactatttaattaattaccccatacccta

SEQ ID NO: 43109 - DNA, 96 bp, Fusarium phaseoli
  misc_feature: 153
cccctaaccttcaccacaaccacttaaccctaaccctcaactcaaccactccccctaaccttcaccacaaccactccccctaaccttcaccacaac

SEQ ID NO: 43110 - DNA, 96 bp, Fusarium phaseoli
  misc_feature: 151
aattaactataaactctaacctttaaaccctttattaactctaacctttaattctttattaaccctaactatttaattaattaccccataccctaa

SEQ ID NO: 43111 - DNA, 96 bp, Fusarium phaseoli
  misc_feature: 151
ttaactataaactctaacctttaaaccctttattaactctaacctttaattctttattaaccctaactatttaattaattaccccataccctaacc

SEQ ID NO: 43112 - DNA, 96 bp, Fusarium phaseoli
  misc_feature: 151
taacccttcactctaaactttatctcaaccactccccctaaccctcaactcaaccactccccctaaccttcaccacaaccactccccctaaccttc

SEQ ID NO: 43113 - DNA, 96 bp, Fusarium phaseoli
  misc_feature: 150
ttaattaactataaactctaacctttaaaccctttattaactctaacctttaattctttattaaccctaactatttaattaattaccccataccct

SEQ ID NO: 43114 - DNA, 96 bp, Fusarium phaseoli
  misc_feature: 149
cctaaccctcaactcaaccactccccctaaccttcaccacaaccactccccctaaccttcaccacaaccactccccctaaccttcaccacaaccac

SEQ ID NO: 43115 - DNA, 96 bp, Fusarium phaseoli
  misc_feature: 149
gcgcggcggattcgctagcaaatccaatgggtttcccatacaaaaaaaaaaggcgctatcctagctgcgcggcggattcgctagcaaatccaatgg

SEQ ID NO: 43116 - DNA, 96 bp, Fusarium phaseoli
  misc_feature: 148
cctaaccctcaactcaaccactccccctaaccttcaccacaaccactccccctaaccttcaccacaaccacttaaccctaaccctcaactcaacca

SEQ ID NO: 43117 - DNA, 96 bp, Fusarium phaseoli
  misc_feature: 147
ctaaccctcaactcaaccactccccctaaccttcaccacaaccactccccctaaccttcaccacaaccacttaaccctaaccctcaactcaaccac

SEQ ID NO: 43118 - DNA, 96 bp, Fusarium phaseoli
  misc_feature: 144
aactttatctcaaccactccccctaaccctcaactcaaccactccccctaaccttcaccacaaccactccccctaaccttcaccacaaccacttaa

SEQ ID NO: 43119 - DNA, 96 bp, Fusarium phaseoli
  misc_feature: 144
ctttatctcaaccactccccctaaccctcaactcaaccactccccctaaccttcaccacaaccactccccctaaccttcaccacaaccacttaacc

SEQ ID NO: 43120 - DNA, 96 bp, Fusarium phaseoli
  misc_feature: 144
accacttctcaaacccacctctttctaacccttcactctaaactttatctcaaccactccccctaaccctcaactcaaccactccccctaaccttc

SEQ ID NO: 43121 - DNA, 96 bp, Fusarium phaseoli
  misc_feature: 143
ccctaaccctcaactcaaccactccccctaaccttcaccacaaccactccccctaaccttcaccacaaccactccccctaaccttcaccacaacca

SEQ ID NO: 43122 - DNA, 96 bp, Fusarium phaseoli
  misc_feature: 142
tttttaccacttctcaaacccacctctttctaacccttcactctaaactttatctcaaccactccccctaaccctcaactcaaccactccccctaa

SEQ ID NO: 43123 - DNA, 96 bp, Fusarium phaseoli
  misc_feature: 142
cttttttttttgtatgggaaacccattggatttgctagcgaatccgccgcgcagctaggatagcgccttttttttttgtatgggaaacccattgga

SEQ ID NO: 43124 - DNA, 96 bp, Fusarium phaseoli
  misc_feature: 142
cttaattaactataaactctaacctttaaaccctttattaactctaacctttaattctttattaaccctaactatttaattaattaccccataccc

SEQ ID NO: 43125 - DNA, 96 bp, Fusarium phaseoli
  misc_feature: 141
actttatctcaaccactccccctaaccctcaactcaaccactccccctaaccttcaccacaaccactccccctaaccttcaccacaaccacttaac

SEQ ID NO: 43126 - DNA, 96 bp, Fusarium phaseoli
  misc_feature: 140
taccacttctcaaacccacctctttctaacccttcactctaaactttatctcaaccactccccctaaccctcaactcaaccactccccctaacctt

SEQ ID NO: 43127 - DNA, 96 bp, Fusarium phaseoli
  misc_feature: 140
cacttctcaaacccacctctttctaacccttcactctaaactttatctcaaccactccccctaaccctcaactcaaccactccccctaaccttcac

SEQ ID NO: 43128 - DNA, 96 bp, Fusarium phaseoli
  misc_feature: 139
ttaccacttctcaaacccacctctttctaacccttcactctaaactttatctcaaccactccccctaaccctcaactcaaccactccccctaacct

SEQ ID NO: 43129 - DNA, 96 bp, Fusarium phaseoli
  misc_feature: 139
ctaaccctcaactcaaccactccccctaaccttcaccacaaccactccccctaaccttcaccacaaccactccccctaaccttcaccacaaccact

SEQ ID NO: 43130 - DNA, 96 bp, Fusarium phaseoli
  misc_feature: 138
taactataaactctaacctttaaaccctttattaactctaacctttaattctttattaaccctaactatttaattaattaccccataccctaaccc

SEQ ID NO: 43131 - DNA, 96 bp, Fusarium phaseoli
  misc_feature: 138
aaacccattggatttgctagcgaatccgccgcgcagctaggatagcgccttttttttttgtatgggaaacccattggatttgctagcgaatccgcc

SEQ ID NO: 43132 - DNA, 96 bp, Fusarium phaseoli
  misc_feature: 137
ggaaacccattggatttgctagcgaatccgccgcgcagctaggatagcgccttttttttttgtatgggaaacccattggatttgctagcgaatccg

SEQ ID NO: 43133 - DNA, 96 bp, Fusarium phaseoli
  misc_feature: 136
ctctaaactttatctcaaccactccccctaaccctcaactcaaccactccccctaaccttcaccacaaccactccccctaaccttcaccacaacca

SEQ ID NO: 43134 - DNA, 96 bp, Fusarium phaseoli
  misc_feature: 135
tttaccacttctcaaacccacctctttctaacccttcactctaaactttatctcaaccactccccctaaccctcaactcaaccactccccctaacc

SEQ ID NO: 43135 - DNA, 96 bp, Fusarium phaseoli
  misc_feature: 134
gaaacccattggatttgctagcgaatccgccgcgcagctaggatagcgccttttttttttgtatgggaaacccattggatttgctagcgaatccgc

SEQ ID NO: 43136 - DNA, 96 bp, Fusarium phaseoli
  misc_feature: 133
tgggaaacccattggatttgctagcgaatccgccgcgcagctaggatagcgccttttttttttgtatgggaaacccattggatttgctagcgaatc

SEQ ID NO: 43137 - DNA, 96 bp, Fusarium phaseoli
  misc_feature: 133
aacccttcactctaaactttatctcaaccactccccctaaccctcaactcaaccactccccctaaccttcaccacaaccactccccctaaccttca

SEQ ID NO: 43138 - DNA, 96 bp, Fusarium phaseoli
  misc_feature: 132
taaccctcaactcaaccactccccctaaccttcaccacaaccactccccctaaccttcaccacaaccacttaaccctaaccctcaactcaaccact

SEQ ID NO: 43139 - DNA, 96 bp, Fusarium phaseoli
  misc_feature: 131
ccacttctcaaacccacctctttctaacccttcactctaaactttatctcaaccactccccctaaccctcaactcaaccactccccctaaccttca

SEQ ID NO: 43140 - DNA, 96 bp, Fusarium phaseoli
  misc_feature: 131
ctaaccttcaccacaaccactccccctaaccttcaccacaaccactccccctaaccttcaccacaaccacttaaccctaaccctcaactcaaccac

SEQ ID NO: 43141 - DNA, 96 bp, Fusarium phaseoli
  misc_feature: 131
aacccattggatttgctagcgaatccgccgcgcagctaggatagcgccttttttttttgtatgggaaacccattggatttgctagcgaatccgccg

SEQ ID NO: 43142 - DNA, 96 bp, Fusarium phaseoli
  misc_feature: 131
atcctatcctagctgcgcggcggattcgctagcaaatccaatgggtttcccatacaaaaaaaaaaggcgctatcctagctgcgcggcggattcgct

SEQ ID NO: 43143 - DNA, 96 bp, Fusarium phaseoli
  misc_feature: 129
gtggtgaaggttagggggagtggttgtggtgaaggttagggggagtggttgagttgagggttagggggagtggttgagataaagtttagagtgaag

SEQ ID NO: 43144 - DNA, 96 bp, Fusarium phaseoli
  misc_feature: 129
cctatcctagctgcgcggcggattcgctagcaaatccaatgggtttcccatacaaaaaaaaaaggcgctatcctagctgcgcggcggattcgctag

SEQ ID NO: 43145 - DNA, 96 bp, Fusarium phaseoli
  misc_feature: 128
ttttaccacttctcaaacccacctctttctaacccttcactctaaactttatctcaaccactccccctaaccctcaactcaaccactccccctaac

SEQ ID NO: 43146 - DNA, 96 bp, Fusarium phaseoli
  misc_feature: 128
acccttcactctaaactttatctcaaccactccccctaaccctcaactcaaccactccccctaaccttcaccacaaccactccccctaaccttcac

SEQ ID NO: 43147 - DNA, 96 bp, Fusarium phaseoli
  misc_feature: 128
acccattggatttgctagcgaatccgccgcgcagctaggatagcgccttttttttttgtatgggaaacccattggatttgctagcgaatccgccgc

SEQ ID NO: 43148 - DNA, 96 bp, Fusarium phaseoli
  misc_feature: 127
cctaaccttcaccacaaccactccccctaaccttcaccacaaccactccccctaaccttcaccacaaccacttaaccctaaccctcaactcaacca

SEQ ID NO: 43149 - DNA, 96 bp, Fusarium phaseoli
  misc_feature: 127
atgggaaacccattggatttgctagcgaatccgccgcgcagctaggatagcgccttttttttttgtatgggaaacccattggatttgctagcgaat

SEQ ID NO: 43150 - DNA, 96 bp, Fusarium phaseoli
  misc_feature: 126
gttagcacccaccgagagcagtaaggaggatggaggtgaaataccgagttttgagagtggggtggttttaaacggaggggcgacggcggagagggt

SEQ ID NO: 43151 - DNA, 96 bp, Fusarium phaseoli
  misc_feature: 124
tggtgaaggttagggggagtggttgtggtgaaggttagggggagtggttgagttgagggttagggggagtggttgagataaagtttagagtgaagg

SEQ ID NO: 43152 - DNA, 96 bp, Fusarium phaseoli
  misc_feature: 123
gttgtggtgaaggttagggggagtggttgtggtgaaggttagggggagtggttgagttgagggttagggggagtggttgagataaagtttagagtg

SEQ ID NO: 43153 - DNA, 96 bp, Fusarium phaseoli
  misc_feature: 122
ttagcacccaccgagagcagtaaggaggatggaggtgaaataccgagttttgagagtggggtggttttaaacggaggggcgacggcggagagggta

SEQ ID NO: 43154 - DNA, 96 bp, Fusarium phaseoli
  misc_feature: 120
ggggggggagaaggagaggggataaacaagaatatatgggagagagtaagaagaagggatgaggggggagagaagagtaaagaagagaaagggaaa

SEQ ID NO: 43155 - DNA, 96 bp, Fusarium phaseoli
  misc_feature: 120
tttatctcaaccactccccctaaccctcaactcaaccactccccctaaccttcaccacaaccactccccctaaccttcaccacaaccacttaaccc

SEQ ID NO: 43156 - DNA, 96 bp, Fusarium phaseoli
  misc_feature: 120
gggagtggttgagttgagggttagggttaagtggttgtggtgaaggttagggggagtggttgtggtgaaggttagggggagtggttgagttgaggg

SEQ ID NO: 43157 - DNA, 96 bp, Fusarium phaseoli
  misc_feature: 119
ccttttttttttgtatgggaaacccattggatttgctagcgaatccgccgcgcagctaggatagcgccttttttttttgtatgggaaacccattgg

SEQ ID NO: 43158 - DNA, 96 bp, Fusarium phaseoli
  misc_feature: 118
ccctaaccttcaccacaaccactccccctaaccttcaccacaaccactccccctaaccttcaccacaaccacttaaccctaaccctcaactcaacc

SEQ ID NO: 43159 - DNA, 96 bp, Fusarium phaseoli
  misc_feature: 118
ctatcctatcctatcctagctgcgcggcggattcgctagcaaatccaatgggtttcccatacaaaaaaaaaaggcgctatcctagctgcgcggcgg

SEQ ID NO: 43160 - DNA, 96 bp, Fusarium phaseoli
  misc_feature: 116
taaccttcaccacaaccactccccctaaccttcaccacaaccactccccctaaccttcaccacaaccacttaaccctaaccctcaactcaaccact

SEQ ID NO: 43161 - DNA, 96 bp, Fusarium phaseoli
  misc_feature: 116
aaccctcaactcaaccactccccctaaccttcaccacaaccactccccctaaccttcaccacaaccacttaaccctaaccctcaactcaaccactc

SEQ ID NO: 43162 - DNA, 96 bp, Fusarium phaseoli
  misc_feature: 115
ccccctaaccttcaccacaaccacttaaccctaaccctcaactcaaccactccccctaaccttcaccacaaccactccccctaaccttcaccacaa

SEQ ID NO: 43163 - DNA, 96 bp, Fusarium phaseoli
  misc_feature: 115
tatcctatcctagctgcgcggcggattcgctagcaaatccaatgggtttcccatacaaaaaaaaaaggcgctatcctagctgcgcggcggattcgc

SEQ ID NO: 43164 - DNA, 96 bp, Fusarium phaseoli
  misc_feature: 115
cgttagcacccaccgagagcagtaaggaggatggaggtgaaataccgagttttgagagtggggtggttttaaacggaggggcgacggcggagaggg

SEQ ID NO: 43165 - DNA, 96 bp, Fusarium phaseoli
  misc_feature: 114
gttgtggtgaaggttagggggagtggttgagttgagggttagggttaagtggttgtggtgaaggttagggggagtggttgtggtgaaggttagggg

SEQ ID NO: 43166 - DNA, 96 bp, Fusarium phaseoli
  misc_feature: 114
actctaaactttatctcaaccactccccctaaccctcaactcaaccactccccctaaccttcaccacaaccactccccctaaccttcaccacaacc

SEQ ID NO: 43167 - DNA, 96 bp, Fusarium phaseoli
  misc_feature: 113
tgtggtgaaggttagggggagtggttgtggtgaaggttagggggagtggttgagttgagggttagggggagtggttgagataaagtttagagtgaa

SEQ ID NO: 43168 - DNA, 96 bp, Fusarium phaseoli
  misc_feature: 113
ctatcctatcctagctgcgcggcggattcgctagcaaatccaatgggtttcccatacaaaaaaaaaaggcgctatcctagctgcgcggcggattcg

SEQ ID NO: 43169 - DNA, 96 bp, Fusarium phaseoli
  misc_feature: 112
tcttaattaactataaactctaacctttaaaccctttattaactctaacctttaattctttattaaccctaactatttaattaattaccccatacc

SEQ ID NO: 43170 - DNA, 96 bp, Fusarium phaseoli
  misc_feature: 112
tcctatcctagctgcgcggcggattcgctagcaaatccaatgggtttcccatacaaaaaaaaaaggcgctatcctagctgcgcggcggattcgcta

SEQ ID NO: 43171 - DNA, 96 bp, Fusarium phaseoli
  misc_feature: 111
ctcttaattaactataaactctaacctttaaaccctttattaactctaacctttaattctttattaaccctaactatttaattaattaccccatac

SEQ ID NO: 43172 - DNA, 96 bp, Fusarium phaseoli
  misc_feature: 110
atcctatcctatcctagctgcgcggcggattcgctagcaaatccaatgggtttcccatacaaaaaaaaaaggcgctatcctagctgcgcggcggat

SEQ ID NO: 43173 - DNA, 96 bp, Fusarium phaseoli
  misc_feature: 109
tatcctatcctatcctagctgcgcggcggattcgctagcaaatccaatgggtttcccatacaaaaaaaaaaggcgctatcctagctgcgcggcgga

SEQ ID NO: 43174 - DNA, 96 bp, Fusarium phaseoli
  misc_feature: 109
gtacgatacaaataacccaccgggcctccttcttgggccggcttgcttatttaacttgcaccttcactattcgtattttataaataacggccgggg

SEQ ID NO: 43175 - DNA, 96 bp, Fusarium phaseoli
  misc_feature: 108
taaactctaacctttaaaccctttattaactctaacctttaattctttattaaccctaactatttaattaattaccccataccctaaccctttata

SEQ ID NO: 43176 - DNA, 96 bp, Fusarium phaseoli
  misc_feature: 108
cctatcctatcctagctgcgcggcggattcgctagcaaatccaatgggtttcccatacaaaaaaaaaaggcgctatcctagctgcgcggcggattc

SEQ ID NO: 43177 - DNA, 96 bp, Fusarium phaseoli
  misc_feature: 107
ggaacacattattccggatcatatgggcgcagataggttggatatataaatggtttggagcattagttgattagggtggaaggaccggcgggggga

SEQ ID NO: 43178 - DNA, 96 bp, Fusarium phaseoli
  misc_feature: 107
cctcttaattaactataaactctaacctttaaaccctttattaactctaacctttaattctttattaaccctaactatttaattaattaccccata

SEQ ID NO: 43179 - DNA, 96 bp, Fusarium phaseoli
  misc_feature: 107
gtgatttgatggatgatttggcggatttggtcgaggtgcacgtcgatgatccggaggcacatccattagacgaggaccgagtggacggggtgacat

SEQ ID NO: 43180 - DNA, 96 bp, Fusarium phaseoli
  misc_feature: 107
aaccttcaccacaaccactccccctaaccttcaccacaaccactccccctaaccttcaccacaaccacttaaccctaaccctcaactcaaccactc

SEQ ID NO: 43181 - DNA, 96 bp, Fusarium phaseoli
  misc_feature: 106
tccccctaaccctcaactcaaccactccccctaaccttcaccacaaccactccccctaaccttcaccacaaccacttaaccctaaccctcaactca

SEQ ID NO: 43182 - DNA, 96 bp, Fusarium phaseoli
  misc_feature: 106
accctcaactcaaccactccccctaaccttcaccacaaccactccccctaaccttcaccacaaccacttaaccctaaccctcaactcaaccactcc

SEQ ID NO: 43183 - DNA, 96 bp, Fusarium phaseoli
  misc_feature: 105
ttgtggtgaaggttagggggagtggttgtggtgaaggttagggggagtggttgagttgagggttagggggagtggttgagataaagtttagagtga

SEQ ID NO: 43184 - DNA, 96 bp, Fusarium phaseoli
  misc_feature: 105
tcctatcctatcctagctgcgcggcggattcgctagcaaatccaatgggtttcccatacaaaaaaaaaaggcgctatcctagctgcgcggcggatt

SEQ ID NO: 43185 - DNA, 96 bp, Fusarium phaseoli
  misc_feature: 105
cctatcctatcctatcctagctgcgcggcggattcgctagcaaatccaatgggtttcccatacaaaaaaaaaaggcgctatcctagctgcgcggcg

SEQ ID NO: 43186 - DNA, 96 bp, Fusarium phaseoli
  misc_feature: 105
cagggtgatttgatggatgatttggcggatttggtcgaggtgcacgtcgatgatccggaggcacatccattagacgaggaccgagtggacggggtg

SEQ ID NO: 43187 - DNA, 96 bp, Fusarium phaseoli
  misc_feature: 104
ttgtggtgaaggttagggggagtggttgagttgagggttagggttaagtggttgtggtgaaggttagggggagtggttgtggtgaaggttaggggg

SEQ ID NO: 43188 - DNA, 96 bp, Fusarium phaseoli
  misc_feature: 104
ctccccctaaccctcaactcaaccactccccctaaccttcaccacaaccactccccctaaccttcaccacaaccacttaaccctaaccctcaactc

SEQ ID NO: 43189 - DNA, 96 bp, Fusarium phaseoli
  misc_feature: 103
tctttccctctctctttccctctctctttccctctctctttccctctctctttccctctctctttccctctctctttccctctctctttccctctc

SEQ ID NO: 43190 - DNA, 96 bp, Fusarium phaseoli
  misc_feature: 103
tctctttccctctctctttccctctctctttccctctctctttccctctctctttccctctctctttccctctctctttccctctctctttccctc

SEQ ID NO: 43191 - DNA, 96 bp, Fusarium phaseoli
  misc_feature: 103
ataaactctaacctttaaaccctttattaactctaacctttaattctttattaaccctaactatttaattaattaccccataccctaaccctttat

SEQ ID NO: 43192 - DNA, 96 bp, Fusarium phaseoli
  misc_feature: 102
ggtgatttgatggatgatttggcggatttggtcgaggtgcacgtcgatgatccggaggcacatccattagacgaggaccgagtggacggggtgaca

SEQ ID NO: 43193 - DNA, 96 bp, Fusarium phaseoli
  misc_feature: 102
ggggagtggttgagttgagggttagggttaagtggttgtggtgaaggttagggggagtggttgtggtgaaggttagggggagtggttgagttgagg

SEQ ID NO: 43194 - DNA, 96 bp, Fusarium phaseoli
  misc_feature: 101
ttcgctagcaaatccaatgggtttcccatacaaaaaaaaaaggcgctatcctagctgcgcggcggattcgctagcaaatccaatgggtttcccata

SEQ ID NO: 43195 - DNA, 96 bp, Fusarium phaseoli
  misc_feature: 99
ggcagggtgatttgatggatgatttggcggatttggtcgaggtgcacgtcgatgatccggaggcacatccattagacgaggaccgagtggacgggg

SEQ ID NO: 43196 - DNA, 96 bp, Fusarium phaseoli
  misc_feature: 98
ctctttccctctctctttccctctctctttccctctctctttccctctctctttccctctctctttccctctctctttccctctctctttccctct

SEQ ID NO: 43197 - DNA, 96 bp, Fusarium phaseoli
  misc_feature: 97
accttcaccacaaccactccccctaaccttcaccacaaccactccccctaaccttcaccacaaccacttaaccctaaccctcaactcaaccactcc

SEQ ID NO: 43198 - DNA, 96 bp, Fusarium phaseoli
  misc_feature: 97
aaccactccccctaaccttcaccacaaccacttaaccctaaccctcaactcaaccactccccctaaccttcaccacaaccactccccctaaccttc

SEQ ID NO: 43199 - DNA, 96 bp, Fusarium phaseoli
  misc_feature: 97
aactataaactctaacctttaaaccctttattaactctaacctttaattctttattaaccctaactatttaattaattaccccataccctaaccct

SEQ ID NO: 43200 - DNA, 96 bp, Fusarium phaseoli
  misc_feature: 96
tccccctaaccttcaccacaaccacttaaccctaaccctcaactcaaccactccccctaaccttcaccacaaccactccccctaaccttcaccaca

SEQ ID NO: 43201 - DNA, 96 bp, Fusarium phaseoli
  misc_feature: 96
aaaattagggttaattatttagtctatcctatcctatcctatcctatcctagctgcgcggcggattcgctagcaaatccaatgggtttcccataca

SEQ ID NO: 43202 - DNA, 96 bp, Fusarium phaseoli
  misc_feature: 96
gtggtgaaggttagggggagtggttgtggtgaaggttagggggagtggttgagttgagggttagggttaagtggttgtggtgaaggttagggggag

SEQ ID NO: 43203 - DNA, 96 bp, Fusarium phaseoli
  misc_feature: 94
ttttgtatgggaaacccattggatttgctagcgaatccgccgcgcagctaggatagcgccttttttttttgtatgggaaacccattggatttgcta

SEQ ID NO: 43204 - DNA, 96 bp, Fusarium phaseoli
  misc_feature: 94
gacggcggagaggttacggtcgagatatcgagaggccgaacgaacccgtatgcaatggtttcggtcggtggttattcggtcgagtggtggaggggg

SEQ ID NO: 43205 - DNA, 96 bp, Fusarium phaseoli
  misc_feature: 94
ctctctttccctctctctttccctctctctttccctctctctttccctctctctttccctctctctttccctctctctttccctctctctttccct

SEQ ID NO: 43206 - DNA, 96 bp, Fusarium phaseoli
  misc_feature: 93
attagggttaattatttagtctatcctatcctatcctatcctatcctagctgcgcggcggattcgctagcaaatccaatgggtttcccatacaaaa

SEQ ID NO: 43207 - DNA, 96 bp, Fusarium phaseoli
  misc_feature: 93
tttgtatgggaaacccattggatttgctagcgaatccgccgcgcagctaggatagcgccttttttttttgtatgggaaacccattggatttgctag

SEQ ID NO: 43208 - DNA, 96 bp, Fusarium phaseoli
  misc_feature: 93
ttatctcaaccactccccctaaccctcaactcaaccactccccctaaccttcaccacaaccactccccctaaccttcaccacaaccacttaaccct

SEQ ID NO: 43209 - DNA, 96 bp, Fusarium phaseoli
  misc_feature: 93
cgtacgatacaaataacccaccgggcctccttcttgggccggcttgcttatttaacttgcaccttcactattcgtattttataaataacggccggg

SEQ ID NO: 43210 - DNA, 96 bp, Fusarium phaseoli
  misc_feature: 92
ttgtatgggaaacccattggatttgctagcgaatccgccgcgcagctaggatagcgccttttttttttgtatgggaaacccattggatttgctagc

SEQ ID NO: 43211 - DNA, 96 bp, Fusarium phaseoli
  misc_feature: 92
tgtatgggaaacccattggatttgctagcgaatccgccgcgcagctaggatagcgccttttttttttgtatgggaaacccattggatttgctagcg

SEQ ID NO: 43212 - DNA, 96 bp, Fusarium phaseoli
  misc_feature: 92
gcagggtgatttgatggatgatttggcggatttggtcgaggtgcacgtcgatgatccggaggcacatccattagacgaggaccgagtggacggggt

SEQ ID NO: 43213 - DNA, 96 bp, Fusarium phaseoli
  misc_feature: 91
tataaactctaacctttaaaccctttattaactctaacctttaattctttattaaccctaactatttaattaattaccccataccctaacccttta

SEQ ID NO: 43214 - DNA, 96 bp, Fusarium phaseoli
  misc_feature: 91
ccctctctctttccctctctctttccctctctctttccctctctctttccctctctctttccctctctctttccctctctctttccctctctcttt

SEQ ID NO: 43215 - DNA, 96 bp, Fusarium phaseoli
  misc_feature: 90
taaaattagggttaattatttagtctatcctatcctatcctatcctatcctagctgcgcggcggattcgctagcaaatccaatgggtttcccatac

SEQ ID NO: 43216 - DNA, 96 bp, Fusarium phaseoli
  misc_feature: 90
ccttcaccacaaccactccccctaaccttcaccacaaccactccccctaaccttcaccacaaccacttaaccctaaccctcaactcaaccactccc

SEQ ID NO: 43217 - DNA, 96 bp, Fusarium phaseoli
  misc_feature: 89
aattagggttaattatttagtctatcctatcctatcctatcctatcctagctgcgcggcggattcgctagcaaatccaatgggtttcccatacaaa

SEQ ID NO: 43218 - DNA, 96 bp, Fusarium phaseoli
  misc_feature: 89
tcctatcctatcctatcctagctgcgcggcggattcgctagcaaatccaatgggtttcccatacaaaaaaaaaaggcgctatcctagctgcgcggc

SEQ ID NO: 43219 - DNA, 96 bp, Fusarium phaseoli
  misc_feature: 89
gggtgatttgatggatgatttggcggatttggtcgaggtgcacgtcgatgatccggaggcacatccattagacgaggaccgagtggacggggtgac

SEQ ID NO: 43220 - DNA, 96 bp, Fusarium phaseoli
  misc_feature: 89
ggtgaaggttagggggagtggttgtggtgaaggttagggggagtggttgagttgagggttagggttaagtggttgtggtgaaggttagggggagtg

SEQ ID NO: 43221 - DNA, 96 bp, Fusarium phaseoli
  misc_feature: 89
gggcgacggcggagaggttacggtcgagatatcgagaggccgaacgaacccgtatgcaatggtttcggtcggtggttattcggtcgagtggtgggg

SEQ ID NO: 43222 - DNA, 96 bp, Fusarium phaseoli
  misc_feature: 89
actccccctaaccctcaactcaaccactccccctaaccttcaccacaaccactccccctaaccttcaccacaaccacttaaccctaaccctcaact

SEQ ID NO: 43223 - DNA, 96 bp, Fusarium phaseoli
  misc_feature: 88
ttagggttaattatttagtctatcctatcctatcctatcctatcctagctgcgcggcggattcgctagcaaatccaatgggtttcccatacaaaaa

SEQ ID NO: 43224 - DNA, 96 bp, Fusarium phaseoli
  misc_feature: 88
aaattagggttaattatttagtctatcctatcctatcctatcctatcctagctgcgcggcggattcgctagcaaatccaatgggtttcccatacaa

SEQ ID NO: 43225 - DNA, 96 bp, Fusarium phaseoli
  misc_feature: 88
ttatttagtctatcctatcctatcctatcctatcctagctgcgcggcggattcgctagcaaatccaatgggtttcccatacaaaaaaaaaaggcgc

SEQ ID NO: 43226 - DNA, 96 bp, Fusarium phaseoli
  misc_feature: 88
tatttagtctatcctatcctatcctatcctatcctagctgcgcggcggattcgctagcaaatccaatgggtttcccatacaaaaaaaaaaggcgct

SEQ ID NO: 43227 - DNA, 96 bp, Fusarium phaseoli
  misc_feature: 88
atttagtctatcctatcctatcctatcctatcctagctgcgcggcggattcgctagcaaatccaatgggtttcccatacaaaaaaaaaaggcgcta

SEQ ID NO: 43228 - DNA, 96 bp, Fusarium phaseoli
  misc_feature: 88
taattattaagtataaaattagggttaattatttagtctatcctatcctatcctatcctatcctagctgcgcggcggattcgctagcaaatccaat

SEQ ID NO: 43229 - DNA, 96 bp, Fusarium phaseoli
  misc_feature: 88
gggggagtggttgagttgagggttagggttaagtggttgtggtgaaggttagggggagtggttgtggtgaaggttagggggagtggttgagttgag

SEQ ID NO: 43230 - DNA, 96 bp, Fusarium phaseoli
  misc_feature: 88
cctcatcaccacgatcatcgccaccgccgccaatgccgtcctggctgccccggctctccatttcggcctgcctcctctccctctgctccgtctccc

SEQ ID NO: 43231 - DNA, 96 bp, Fusarium phaseoli
  misc_feature: 88
actataaactctaacctttaaaccctttattaactctaacctttaattctttattaaccctaactatttaattaattaccccataccctaaccctt

SEQ ID NO: 43232 - DNA, 96 bp, Fusarium phaseoli
  misc_feature: 87
tccctctctctttccctctctctttccctctctctttccctctctctttccctctctctttccctctctctttccctctctctttccctctctctt

SEQ ID NO: 43233 - DNA, 96 bp, Fusarium phaseoli
  misc_feature: 87
caactcaaccactccccctaaccttcaccacaaccactccccctaaccttcaccacaaccacttaaccctaaccctcaactcaaccactcccccta

SEQ ID NO: 43234 - DNA, 96 bp, Fusarium phaseoli
  misc_feature: 87
cactccccctaaccctcaactcaaccactccccctaaccttcaccacaaccactccccctaaccttcaccacaaccacttaaccctaaccctcaac

SEQ ID NO: 43235 - DNA, 96 bp, Fusarium phaseoli
  misc_feature: 87
gtgaaggttagggggagtggttgtggtgaaggttagggggagtggttgagttgagggttagggttaagtggttgtggtgaaggttagggggagtgg

SEQ ID NO: 43236 - DNA, 96 bp, Fusarium phaseoli
  misc_feature: 87
agcaatgagcccggaggttattgccgagcaagtgattagagaagtgaatgaagtatagtcaccggccgttatttataaaatacgaatagtgaaggg

SEQ ID NO: 43237 - DNA, 96 bp, Fusarium phaseoli
  misc_feature: 86
gaaagagagagggaaagagagagggaaagagagagggaaagagagagggaaagagagagggaaagagagagggaaagagagagggaaagagagagg

SEQ ID NO: 43238 - DNA, 96 bp, Fusarium phaseoli
  misc_feature: 85
ataattattaagtataaaattagggttaattatttagtctatcctatcctatcctatcctatcctagctgcgcggcggattcgctagcaaatccaa

SEQ ID NO: 43239 - DNA, 96 bp, Fusarium phaseoli
  misc_feature: 85
gtatgggaaacccattggatttgctagcgaatccgccgcgcagctaggatagcgccttttttttttgtatgggaaacccattggatttgctagcga

SEQ ID NO: 43240 - DNA, 96 bp, Fusarium phaseoli
  misc_feature: 85
tcgatggtcccgccggccggcgtgttgaaccgaatatgcatcccgtacgtgcgtgcctcgtaaatccaatccatcggcgttggctcggcgtggggg

SEQ ID NO: 43241 - DNA, 96 bp, Fusarium phaseoli
  misc_feature: 85
gatccacggaaatgcagcccgctcgctgcagctgtgcatacgcagaattctgagatcctatcgatgctgctagatgcaggcgcagatccaaacgcc

SEQ ID NO: 43242 - DNA, 96 bp, Fusarium phaseoli
  misc_feature: 85
attattaagtataaaattagggttaattatttagtctatcctatcctatcctatcctatcctagctgcgcggcggattcgctagcaaatccaatgg

SEQ ID NO: 43243 - DNA, 96 bp, Fusarium phaseoli
  misc_feature: 84
tttccctctctctttccctctctctttccctctctctttccctctctctttccctctctctttccctctctctttccctctctctttccctctctc

SEQ ID NO: 43244 - DNA, 96 bp, Fusarium phaseoli
  misc_feature: 84
ttgatggatgatttggcggatttggtcgaggtgcacgtcgatgatccggaggcacatccattagacgaggaccgagtggacggggtgacattgcag

SEQ ID NO: 43245 - DNA, 96 bp, Fusarium phaseoli
  misc_feature: 84
ttattaagtataaaattagggttaattatttagtctatcctatcctatcctatcctatcctagctgcgcggcggattcgctagcaaatccaatggg

SEQ ID NO: 43246 - DNA, 96 bp, Fusarium phaseoli
  misc_feature: 84
tattaagtataaaattagggttaattatttagtctatcctatcctatcctatcctatcctagctgcgcggcggattcgctagcaaatccaatgggt

SEQ ID NO: 43247 - DNA, 96 bp, Fusarium phaseoli
  misc_feature: 84
gtttggcgtctaagagcttcttgacggagtcgagcgtcccagcgaaacaggcatactgtaacagacccggggcggcgtttggatctgcgcctgcat

SEQ ID NO: 43248 - DNA, 96 bp, Fusarium phaseoli
  misc_feature: 84
aattatttagtctatcctatcctatcctatcctatcctagctgcgcggcggattcgctagcaaatccaatgggtttcccatacaaaaaaaaaaggc

SEQ ID NO: 43249 - DNA, 96 bp, Fusarium phaseoli
  misc_feature: 84
aattattaagtataaaattagggttaattatttagtctatcctatcctatcctatcctatcctagctgcgcggcggattcgctagcaaatccaatg

SEQ ID NO: 43250 - DNA, 96 bp, Fusarium phaseoli
  misc_feature: 84
caaccactccccctaaccttcaccacaaccacttaaccctaaccctcaactcaaccactccccctaaccttcaccacaaccactccccctaacctt

SEQ ID NO: 43251 - DNA, 96 bp, Fusarium phaseoli
  misc_feature: 83
attatttagtctatcctatcctatcctatcctatcctagctgcgcggcggattcgctagcaaatccaatgggtttcccatacaaaaaaaaaaggcg

SEQ ID NO: 43252 - DNA, 96 bp, Fusarium phaseoli
  misc_feature: 82
tctctctttccctctctctttccctctctctttccctctctctttccctctctctttccctctctctttccctctctctttccctctctctttccc

SEQ ID NO: 43253 - DNA, 96 bp, Fusarium phaseoli
  misc_feature: 82
tcaactcaaccactccccctaaccttcaccacaaccactccccctaaccttcaccacaaccacttaaccctaaccctcaactcaaccactccccct

SEQ ID NO: 43254 - DNA, 96 bp, Fusarium phaseoli
  misc_feature: 82
ataaaattagggttaattatttagtctatcctatcctatcctatcctatcctagctgcgcggcggattcgctagcaaatccaatgggtttcccata

SEQ ID NO: 43255 - DNA, 96 bp, Fusarium phaseoli
  misc_feature: 82
ctttccctctctctttccctctctctttccctctctctttccctctctctttccctctctctttccctctctctttccctctctctttccctctct

SEQ ID NO: 43256 - DNA, 96 bp, Fusarium phaseoli
  misc_feature: 81
tgatccacggaaatgcagcccgctcgctgcagctgtgcatacgcagaattctgagatcctatcgatgctgctagatgcaggcgcagatccaaacgc

SEQ ID NO: 43257 - DNA, 96 bp, Fusarium phaseoli
  misc_feature: 81
atcctatcctatcctatcctagctgcgcggcggattcgctagcaaatccaatgggtttcccatacaaaaaaaaaaggcgctatcctagctgcgcgg

SEQ ID NO: 43258 - DNA, 96 bp, Fusarium phaseoli
  misc_feature: 80
tcctcatcaccacgatcatcgccaccgccgccaatgccgtcctggctgccccggctctccatttcggcctgcctcctctccctctgctccgtctcc

SEQ ID NO: 43259 - DNA, 96 bp, Fusarium phaseoli
  misc_feature: 80
taattatttagtctatcctatcctatcctatcctatcctagctgcgcggcggattcgctagcaaatccaatgggtttcccatacaaaaaaaaaagg

SEQ ID NO: 43260 - DNA, 96 bp, Fusarium phaseoli
  misc_feature: 80
gcaatgagcccggaggttattgccgagcaagtgattagagaagtgaatgaagtatagtcaccggccgttatttataaaatacgaatagtgaagggg

SEQ ID NO: 43261 - DNA, 96 bp, Fusarium phaseoli
  misc_feature: 80
ctataaactctaacctttaaaccctttattaactctaacctttaattctttattaaccctaactatttaattaattaccccataccctaacccttt

SEQ ID NO: 43262 - DNA, 96 bp, Fusarium phaseoli
  misc_feature: 79
tatctcaaccactccccctaaccctcaactcaaccactccccctaaccttcaccacaaccactccccctaaccttcaccacaaccacttaacccta

SEQ ID NO: 43263 - DNA, 96 bp, Fusarium phaseoli
  misc_feature: 79
ggttgtggtgaaggttagggggagtggttgagttgagggttagggggagtggttgagataaagtttagagtgaagggttagaaagaggtggggttg

SEQ ID NO: 43264 - DNA, 96 bp, Fusarium phaseoli
  misc_feature: 79
ggggcgacggcggagaggttacggtcgagatatcgagaggccgaacgaacccgtatgcaatggtttcggtcggtggttattcggtcgagtggtggg

SEQ ID NO: 43265 - DNA, 96 bp, Fusarium phaseoli
  misc_feature: 79
gacggcggagaggttacggtcgagatatcgagaggccgaacgaacccgtatgcaatggtttcggtcggtggttattcggtcgagtggtgggggggg

SEQ ID NO: 43266 - DNA, 96 bp, Fusarium phaseoli
  misc_feature: 79
cgacggcggagaggttacggtcgagatatcgagaggccgaacgaacccgtatgcaatggtttcggtcggtggttattcggtcgagtggtggggggg

SEQ ID NO: 43267 - DNA, 96 bp, Fusarium phaseoli
  misc_feature: 78
tttggcgtctaagagcttcttgacggagtcgagcgtcccagcgaaacaggcatactgtaacagacccggggcggcgtttggatctgcgcctgcatc

SEQ ID NO: 43268 - DNA, 96 bp, Fusarium phaseoli
  misc_feature: 78
attaagtataaaattagggttaattatttagtctatcctatcctatcctatcctatcctagctgcgcggcggattcgctagcaaatccaatgggtt

SEQ ID NO: 43269 - DNA, 96 bp, Fusarium phaseoli
  misc_feature: 77
tgtttggcgtctaagagcttcttgacggagtcgagcgtcccagcgaaacaggcatactgtaacagacccggggcggcgtttggatctgcgcctgca

SEQ ID NO: 43270 - DNA, 96 bp, Fusarium phaseoli
  misc_feature: 77
cccctaaccttcaccacaaccactccccctaaccttcaccacaaccactccccctaaccttcaccacaaccacttaaccctaaccctcaactcaac

SEQ ID NO: 43271 - DNA, 96 bp, Fusarium phaseoli
  misc_feature: 77
gaacacattattccggatcatatgggcgcagataggttggatatataaatggtttggagcattagttgattagggtggaaggaccggcggggggat

SEQ ID NO: 43272 - DNA, 96 bp, Fusarium phaseoli
  misc_feature: 77
cgacggcggagaggttacggtcgagatatcgagaggccgaacgaacccgtatgcaatggtttcggtcggtggttattcggtcgagtggtggagggg

SEQ ID NO: 43273 - DNA, 96 bp, Fusarium phaseoli
  misc_feature: 76
tttagtctatcctatcctatcctatcctatcctagctgcgcggcggattcgctagcaaatccaatgggtttcccatacaaaaaaaaaaggcgctat

SEQ ID NO: 43274 - DNA, 96 bp, Fusarium phaseoli
  misc_feature: 76
ttggcgtctaagagcttcttgacggagtcgagcgtcccagcgaaacaggcatactgtaacagacccggggcggcgtttggatctgcgcctgcatct

SEQ ID NO: 43275 - DNA, 96 bp, Fusarium phaseoli
  misc_feature: 76
ggaaagagagagggaaagagagagggaaagagagagggaaagagagagggaaagagagagggaaagagagagggaaagagagagggaaagagagag

SEQ ID NO: 43276 - DNA, 96 bp, Fusarium phaseoli
  misc_feature: 76
gcggaacaaccgctggctctggactccggtacgccacggcacatgctgcgcttctgtggcccgtgtctgcaaactccctcctctccgtctgggggt

SEQ ID NO: 43277 - DNA, 96 bp, Fusarium phaseoli
  misc_feature: 75
aactcaaccactccccctaaccttcaccacaaccactccccctaaccttcaccacaaccacttaaccctaaccctcaactcaaccactccccctaa

SEQ ID NO: 43278 - DNA, 96 bp, Fusarium phaseoli
  misc_feature: 74
gttgatccacggaaatgcagcccgctcgctgcagctgtgcatacgcagaattctgagatcctatcgatgctgctagatgcaggcgcagatccaaac

SEQ ID NO: 43279 - DNA, 96 bp, Fusarium phaseoli
  misc_feature: 74
acggaaatgcagcccgctcgctgcagctgtgcatacgcagaattctgagatcctatcgatgctgctagatgcaggcgcagatccaaacgccgcccc

SEQ ID NO: 43280 - DNA, 96 bp, Fusarium phaseoli
  misc_feature: 74
gcaggcgcagatccaaacgccgccccgggtctgttacagtatgcctgtttcgctgggacgctcgactccgtcaagaagctcttagacgccaaacag

SEQ ID NO: 43281 - DNA, 96 bp, Fusarium phaseoli
  misc_feature: 74
gaaggagaggggataaacaagaatatatgggagagagtaagaagaagggatgaggggggagagaagagtaaagaagagaaagggaaagaagagagg

SEQ ID NO: 43282 - DNA, 96 bp, Fusarium phaseoli
  misc_feature: 73
tctcaaccactccccctaaccctcaactcaaccactccccctaaccttcaccacaaccactccccctaaccttcaccacaaccacttaaccctaac

SEQ ID NO: 43283 - DNA, 96 bp, Fusarium phaseoli
  misc_feature: 72
gttaattatttagtctatcctatcctatcctatcctatcctagctgcgcggcggattcgctagcaaatccaatgggtttcccatacaaaaaaaaaa

SEQ ID NO: 43284 - DNA, 96 bp, Fusarium phaseoli
  misc_feature: 72
ggttaattatttagtctatcctatcctatcctatcctatcctagctgcgcggcggattcgctagcaaatccaatgggtttcccatacaaaaaaaaa

SEQ ID NO: 43285 - DNA, 96 bp, Fusarium phaseoli
  misc_feature: 72
tagggttaattatttagtctatcctatcctatcctatcctatcctagctgcgcggcggattcgctagcaaatccaatgggtttcccatacaaaaaa

SEQ ID NO: 43286 - DNA, 96 bp, Fusarium phaseoli
  misc_feature: 72
tgcggaacaaccgctggctctggactccggtacgccacggcacatgctgcgcttctgtggcccgtgtctgcaaactccctcctctccgtctggggg

SEQ ID NO: 43287 - DNA, 96 bp, Fusarium phaseoli
  misc_feature: 72
ggaacacattattccggatcatatgggcgcagataggttggatatataaatggtttggagcattagttgattagggtggaaggaccggcggggggg

SEQ ID NO: 43288 - DNA, 96 bp, Fusarium phaseoli
  misc_feature: 71
ttgatccacggaaatgcagcccgctcgctgcagctgtgcatacgcagaattctgagatcctatcgatgctgctagatgcaggcgcagatccaaacg

SEQ ID NO: 43289 - DNA, 96 bp, Fusarium phaseoli
  misc_feature: 71
atctcaaccactccccctaaccctcaactcaaccactccccctaaccttcaccacaaccactccccctaaccttcaccacaaccacttaaccctaa

SEQ ID NO: 43290 - DNA, 96 bp, Fusarium phaseoli
  misc_feature: 71
tggtgaaggttagggggagtggttgtggtgaaggttagggggagtggttgagttgagggttagggttaagtggttgtggtgaaggttagggggagt

SEQ ID NO: 43291 - DNA, 96 bp, Fusarium phaseoli
  misc_feature: 71
gtttttacagacgatatgccagtaaagaagcatgcgaccaagagagatgcgaccaagagagatgcgaccaagagagatgccaccaagagagatgcc

SEQ ID NO: 43292 - DNA, 96 bp, Fusarium phaseoli
  misc_feature: 71
acaaccactccccctaaccttcaccacaaccacttaaccctaaccctcaactcaaccactccccctaaccttcaccacaaccactccccctaacct

SEQ ID NO: 43293 - DNA, 96 bp, Fusarium phaseoli
  misc_feature: 70
ttgagttgagggttagggttaagtggttgtggtgaaggttagggggagtggttgtggtgaaggttagggggagtggttgtggtgaaggttaggggg

SEQ ID NO: 43294 - DNA, 96 bp, Fusarium phaseoli
  misc_feature: 70
ttccctctctctttccctctctctttccctctctctttccctctctctttccctctctctttccctctctctttccctctctctttccctctctct

SEQ ID NO: 43295 - DNA, 96 bp, Fusarium phaseoli
  misc_feature: 70
ttaagtataaaattagggttaattatttagtctatcctatcctatcctatcctatcctagctgcgcggcggattcgctagcaaatccaatgggttt

SEQ ID NO: 43296 - DNA, 96 bp, Fusarium phaseoli
  misc_feature: 70
tataattattaagtataaaattagggttaattatttagtctatcctatcctatcctatcctatcctagctgcgcggcggattcgctagcaaatcca

SEQ ID NO: 43297 - DNA, 96 bp, Fusarium phaseoli
  misc_feature: 70
tataaaattagggttaattatttagtctatcctatcctatcctatcctatcctagctgcgcggcggattcgctagcaaatccaatgggtttcccat

SEQ ID NO: 43298 - DNA, 96 bp, Fusarium phaseoli
  misc_feature: 70
taagtataaaattagggttaattatttagtctatcctatcctatcctatcctatcctagctgcgcggcggattcgctagcaaatccaatgggtttc

SEQ ID NO: 43299 - DNA, 96 bp, Fusarium phaseoli
  misc_feature: 70
agtataaaattagggttaattatttagtctatcctatcctatcctatcctatcctagctgcgcggcggattcgctagcaaatccaatgggtttccc

SEQ ID NO: 43300 - DNA, 96 bp, Fusarium phaseoli
  misc_feature: 70
gaaacaggcatactgtaacagacccggggcggcgtttggatctgcgcctgcatctagcagcatcgataggatctcagaattctgcgtatgcacagc

SEQ ID NO: 43301 - DNA, 96 bp, Fusarium phaseoli
  misc_feature: 70
gatggtcccgccggccggcgtgttgaaccgaatatgcatcccgtacgtgcgtgcctcgtaaatccaatccatcggcgttggctcggcgtgggggtc

SEQ ID NO: 43302 - DNA, 96 bp, Fusarium phaseoli
  misc_feature: 70
cccggggcggcgtttggatctgcgcctgcatctagcagcatcgataggatctcagaattctgcgtatgcacagctgcagcgagcgggctgcatttc

SEQ ID NO: 43303 - DNA, 96 bp, Fusarium phaseoli
  misc_feature: 69
tggcgtctaagagcttcttgacggagtcgagcgtcccagcgaaacaggcatactgtaacagacccggggcggcgtttggatctgcgcctgcatcta

SEQ ID NO: 43304 - DNA, 96 bp, Fusarium phaseoli
  misc_feature: 69
tatcctatcctatcctatcctagctgcgcggcggattcgctagcaaatccaatgggtttcccatacaaaaaaaaaaggcgctatcctagctgcgcg

SEQ ID NO: 43305 - DNA, 96 bp, Fusarium phaseoli
  misc_feature: 69
actcaaccactccccctaaccttcaccacaaccactccccctaaccttcaccacaaccacttaaccctaaccctcaactcaaccactccccctaac

SEQ ID NO: 43306 - DNA, 96 bp, Fusarium phaseoli
  misc_feature: 69
ctcaaccactccccctaaccctcaactcaaccactccccctaaccttcaccacaaccactccccctaaccttcaccacaaccacttaaccctaacc

SEQ ID NO: 43307 - DNA, 96 bp, Fusarium phaseoli
  misc_feature: 69
aagtataaaattagggttaattatttagtctatcctatcctatcctatcctatcctagctgcgcggcggattcgctagcaaatccaatgggtttcc

SEQ ID NO: 43308 - DNA, 96 bp, Fusarium phaseoli
  misc_feature: 68
tacgatacaaataacccaccgggcctccttcttgggccggcttgcttatttaacttgcaccttcactattcgtattttataaataacggccggggg

SEQ ID NO: 43309 - DNA, 96 bp, Fusarium phaseoli
  misc_feature: 68
caatgagcccggaggttattgccgagcaagtgattagagaagtgaatgaagtatagtcaccggccgttatttataaaatacgaatagtgaaggggc

SEQ ID NO: 43310 - DNA, 96 bp, Fusarium phaseoli
  misc_feature: 68
acagacccggggcggcgtttggatctgcgcctgcatctagcagcatcgataggatctcagaattctgcgtatgcacagctgcagcgagcgggctgc

SEQ ID NO: 43311 - DNA, 96 bp, Fusarium phaseoli
  misc_feature: 68
cgatggtcccgccggccggcgtgttgaaccgaatatgcatcccgtacgtgcgtgcctcgtaaatccaatccatcggcgttggctcggcgtgggggt

SEQ ID NO: 43312 - DNA, 96 bp, Fusarium phaseoli
  misc_feature: 67
tttttacagacgatatgccagtaaagaagcatgcgaccaagagagatgcgaccaagagagatgcgaccaagagagatgccaccaagagagatgcca

SEQ ID NO: 43313 - DNA, 96 bp, Fusarium phaseoli
  misc_feature: 67
gcgaaacaggcatactgtaacagacccggggcggcgtttggatctgcgcctgcatctagcagcatcgataggatctcagaattctgcgtatgcaca

SEQ ID NO: 43314 - DNA, 96 bp, Fusarium phaseoli
  misc_feature: 67
taactataaactctaacctttaaaccctttattaactctaacctttaattctttattaaccctaactatttaattaattaccctataccctaaccc

SEQ ID NO: 43315 - DNA, 96 bp, Fusarium phaseoli
  misc_feature: 67
taaagttaagtataattattaagtataaaattagggttaattatttagtctatcctatcctatcctatcctatcctagctgcgcggcggattcgct

SEQ ID NO: 43316 - DNA, 96 bp, Fusarium phaseoli
  misc_feature: 67
cacggaaatgcagcccgctcgctgcagctgtgcatacgcagaattctgagatcctatcgatgctgctagatgcaggcgcagatccaaacgccgccc

SEQ ID NO: 43317 - DNA, 96 bp, Fusarium phaseoli
  misc_feature: 67
ataaagttaagtataattattaagtataaaattagggttaattatttagtctatcctatcctatcctatcctatcctagctgcgcggcggattcgc

SEQ ID NO: 43318 - DNA, 96 bp, Fusarium phaseoli
  misc_feature: 67
aagttaagtataattattaagtataaaattagggttaattatttagtctatcctatcctatcctatcctatcctagctgcgcggcggattcgctag

SEQ ID NO: 43319 - DNA, 96 bp, Fusarium phaseoli
  misc_feature: 67
agacccggggcggcgtttggatctgcgcctgcatctagcagcatcgataggatctcagaattctgcgtatgcacagctgcagcgagcgggctgcat

SEQ ID NO: 43320 - DNA, 96 bp, Fusarium phaseoli
  misc_feature: 66
agcgaaacaggcatactgtaacagacccggggcggcgtttggatctgcgcctgcatctagcagcatcgataggatctcagaattctgcgtatgcac

SEQ ID NO: 43321 - DNA, 96 bp, Fusarium phaseoli
  misc_feature: 66
ggcggcgtttggatctgcgcctgcatctagcagcatcgataggatctcagaattctgcgtatgcacagctgcagcgagcgggctgcatttccgtgg

SEQ ID NO: 43322 - DNA, 96 bp, Fusarium phaseoli
  misc_feature: 66
gatctgcgcctgcatctagcagcatcgataggatctcagaattctgcgtatgcacagctgcagcgagcgggctgcatttccgtggatcaacatgtg

SEQ ID NO: 43323 - DNA, 96 bp, Fusarium phaseoli
  misc_feature: 66
atccacggaaatgcagcccgctcgctgcagctgtgcatacgcagaattctgagatcctatcgatgctgctagatgcaggcgcagatccaaacgccg

SEQ ID NO: 43324 - DNA, 96 bp, Fusarium phaseoli
  misc_feature: 66
aacagacccggggcggcgtttggatctgcgcctgcatctagcagcatcgataggatctcagaattctgcgtatgcacagctgcagcgagcgggctg

SEQ ID NO: 43325 - DNA, 96 bp, Fusarium phaseoli
  misc_feature: 65
ttaactataaactctaacctttaaaccctttattaactctaacctttaattctttattaaccctaactatttaattaattaccctataccctaacc

SEQ ID NO: 43326 - DNA, 96 bp, Fusarium phaseoli
  misc_feature: 65
tgagttgagggttagggttaagtggttgtggtgaaggttagggggagtggttgtggtgaaggttagggggagtggttgagttgagggttagggggg

SEQ ID NO: 43327 - DNA, 96 bp, Fusarium phaseoli
  misc_feature: 65
aaggagaggggataaacaagaatatatgggagagagtaagaagaagggatgaggggggagagaagagtaaagaagagaaagggaaagaagagagga

SEQ ID NO: 43328 - DNA, 96 bp, Fusarium phaseoli
  misc_feature: 65
tccacggaaatgcagcccgctcgctgcagctgtgcatacgcagaattctgagatcctatcgatgctgctagatgcaggcgcagatccaaacgccgc

SEQ ID NO: 43329 - DNA, 96 bp, Fusarium phaseoli
  misc_feature: 65
aaagttaagtataattattaagtataaaattagggttaattatttagtctatcctatcctatcctatcctatcctagctgcgcggcggattcgcta

SEQ ID NO: 43330 - DNA, 96 bp, Fusarium phaseoli
  misc_feature: 65
gtttgcagacacgggccacagaagcgcagcatgtgccgtggcgtaccggagtccagagccagcggttgttccgcaatgggccggccagcggttggg

SEQ ID NO: 43331 - DNA, 96 bp, Fusarium phaseoli
  misc_feature: 65
ctccccctaaccttcaccacaaccactccccctaaccttcaccacaaccacttaaccctaaccctcaactcaaccactccccctaaccttcaccac

SEQ ID NO: 43332 - DNA, 96 bp, Fusarium phaseoli
  misc_feature: 65
ggatctgcgcctgcatctagcagcatcgataggatctcagaattctgcgtatgcacagctgcagcgagcgggctgcatttccgtggatcaacatgt

SEQ ID NO: 43333 - DNA, 96 bp, Fusarium phaseoli
  misc_feature: 65
aactcaaagttacaatcgttcactctgccaacacctgaacatcttccgctggagcctatagatgtagaacggctcatgaacgaacgagaggctggc

SEQ ID NO: 43334 - DNA, 96 bp, Fusarium phaseoli
  misc_feature: 65
cgaaacaggcatactgtaacagacccggggcggcgtttggatctgcgcctgcatctagcagcatcgataggatctcagaattctgcgtatgcacag

SEQ ID NO: 43335 - DNA, 96 bp, Fusarium phaseoli
  misc_feature: 64
agggttaattatttagtctatcctatcctatcctatcctatcctagctgcgcggcggattcgctagcaaatccaatgggtttcccatacaaaaaaa

SEQ ID NO: 43336 - DNA, 96 bp, Fusarium phaseoli
  misc_feature: 64
gagggttagggttaagtggttgtggtgaaggttagggggagtggttgtggtgaaggttagggggagtggttgagttgagggttagggggagtggtt

SEQ ID NO: 43337 - DNA, 96 bp, Fusarium phaseoli
  misc_feature: 64
ctcatcaccacgatcatcgccaccgccgccaatgccgtcctggctgccccggctctccatttcggcctgcctcctctccctctgctccgtctccct

SEQ ID NO: 43338 - DNA, 96 bp, Fusarium phaseoli
  misc_feature: 64
agtggttgtggtgaaggttagggggagtggttgagttgagggttagggggagtggttgagataaagtttagagtgaagggttagaaagaggtgggg

SEQ ID NO: 43339 - DNA, 96 bp, Fusarium phaseoli
  misc_feature: 64
atctgcgcctgcatctagcagcatcgataggatctcagaattctgcgtatgcacagctgcagcgagcgggctgcatttccgtggatcaacatgtgg

SEQ ID NO: 43340 - DNA, 96 bp, Fusarium phaseoli
  misc_feature: 63
gttaagtataattattaagtataaaattagggttaattatttagtctatcctatcctatcctatcctatcctagctgcgcggcggattcgctagca

SEQ ID NO: 43341 - DNA, 96 bp, Fusarium phaseoli
  misc_feature: 63
cagcgaaacaggcatactgtaacagacccggggcggcgtttggatctgcgcctgcatctagcagcatcgataggatctcagaattctgcgtatgca

SEQ ID NO: 43342 - DNA, 96 bp, Fusarium phaseoli
  misc_feature: 63
taggtgacggctttccttgtttctggaacaggcgcgctttcgatcaggacaatggcaaaactaaagttgtttggtgaactggttttgaaagaatca

SEQ ID NO: 43343 - DNA, 96 bp, Fusarium phaseoli
  misc_feature: 63
agttaagtataattattaagtataaaattagggttaattatttagtctatcctatcctatcctatcctatcctagctgcgcggcggattcgctagc

SEQ ID NO: 43344 - DNA, 96 bp, Fusarium phaseoli
  misc_feature: 62
ccactccccctaaccctcaactcaaccactccccctaaccttcaccacaaccactccccctaaccttcaccacaaccacttaaccctaaccctcaa

SEQ ID NO: 43345 - DNA, 96 bp, Fusarium phaseoli
  misc_feature: 62
ttaattatttagtctatcctatcctatcctatcctatcctagctgcgcggcggattcgctagcaaatccaatgggtttcccatacaaaaaaaaaag

SEQ ID NO: 43346 - DNA, 96 bp, Fusarium phaseoli
  misc_feature: 62
tccccctaaccttcaccacaaccactccccctaaccttcaccacaaccacttaaccctaaccctcaactcaaccactccccctaaccttcaccaca

SEQ ID NO: 43347 - DNA, 96 bp, Fusarium phaseoli
  misc_feature: 62
attaactataaactctaacctttaaaccctttattaactctaacctttaattctttattaaccctaactatttaattaattaccctataccctaac

SEQ ID NO: 43348 - DNA, 96 bp, Fusarium phaseoli
  misc_feature: 62
gtcgacaatggatggagtcgaagaagacgacgatggtgtggacgacaacccgatcgatttacaagccggtcatggaacgcacgtggccggcatggg

SEQ ID NO: 43349 - DNA, 96 bp, Fusarium phaseoli
  misc_feature: 62
gctatcctagctgcgcggcggattcgctagcaaatccaatgggtttcccatacaaaaaaaaaaggcgctatcctagctgcgcggcggattcgctag

SEQ ID NO: 43350 - DNA, 96 bp, Fusarium phaseoli
  misc_feature: 62
gacccggggcggcgtttggatctgcgcctgcatctagcagcatcgataggatctcagaattctgcgtatgcacagctgcagcgagcgggctgcatt

SEQ ID NO: 43351 - DNA, 96 bp, Fusarium phaseoli
  misc_feature: 62
aagtataattattaagtataaaattagggttaattatttagtctatcctatcctatcctatcctatcctagctgcgcggcggattcgctagcaaat

SEQ ID NO: 43352 - DNA, 96 bp, Fusarium phaseoli
  misc_feature: 62
atcctagctgcgcggcggattcgctagcaaatccaatgggtttcccatacaaaaaaaaaaggcgctatcctatcctagctgcgcggcggattcgct

SEQ ID NO: 43353 - DNA, 96 bp, Fusarium phaseoli
  misc_feature: 61
taagtataattattaagtataaaattagggttaattatttagtctatcctatcctatcctatcctatcctagctgcgcggcggattcgctagcaaa

SEQ ID NO: 43354 - DNA, 96 bp, Fusarium phaseoli
  misc_feature: 61
ttattataaagttaagtataattattaagtataaaattagggttaattatttagtctatcctatcctatcctatcctatcctagctgcgcggcgga

SEQ ID NO: 43355 - DNA, 96 bp, Fusarium phaseoli
  misc_feature: 61
gtataaaattagggttaattatttagtctatcctatcctatcctatcctatcctagctgcgcggcggattcgctagcaaatccaatgggtttccca

SEQ ID NO: 43356 - DNA, 96 bp, Fusarium phaseoli
  misc_feature: 61
gaaccaaccgctggccggcccattgcggaacaaccgctggctctggactccggtacgccacggcacatgctgcgcttctgtggcccgtgtctgcca

SEQ ID NO: 43357 - DNA, 96 bp, Fusarium phaseoli
  misc_feature: 61
tataaagttaagtataattattaagtataaaattagggttaattatttagtctatcctatcctatcctatcctatcctagctgcgcggcggattcg

SEQ ID NO: 43358 - DNA, 96 bp, Fusarium phaseoli
  misc_feature: 61
gggtggttttaaacggaggggcgacggcggagaggttacggtcgagatatcgagaggccgaacgaacccgtatgcaatggtttcggtcggtgggta

SEQ ID NO: 43359 - DNA, 96 bp, Fusarium phaseoli
  misc_feature: 61
agcctcgagcttccaacctccctgatagccaaggagaaccaagtatcgacacaaagtgggatcccaactcagactgccgtctccttggtcatcaac

SEQ ID NO: 43360 - DNA, 96 bp, Fusarium phaseoli
  misc_feature: 61
gtataattattaagtataaaattagggttaattatttagtctatcctatcctatcctatcctatcctagctgcgcggcggattcgctagcaaatcc

SEQ ID NO: 43361 - DNA, 96 bp, Fusarium phaseoli
  misc_feature: 61
ggttagggggagtggttgagttgagggttagggttaagtggttgtggtgaaggttagggggagtggttgtggtgaaggttagggggagtggttgag

SEQ ID NO: 43362 - DNA, 96 bp, Fusarium phaseoli
  misc_feature: 61
gggtttttacagacgatatgccagtaaagaagcatgcgaccaagagagatgcgaccaagagagatgcgaccaagagagatgccaccaagagagatg

SEQ ID NO: 43363 - DNA, 96 bp, Fusarium phaseoli
  misc_feature: 61
cttcaccacaaccactccccctaaccttcaccacaaccactccccctaaccttcaccacaaccacttaaccctaaccctcaactcaaccactcccc

SEQ ID NO: 43364 - DNA, 96 bp, Fusarium phaseoli
  misc_feature: 61
cgaaccaaccgctggccggcccattgcggaacaaccgctggctctggactccggtacgccacggcacatgctgcgcttctgtggcccgtgtctgcc

SEQ ID NO: 43365 - DNA, 96 bp, Fusarium phaseoli
  misc_feature: 61
agtataattattaagtataaaattagggttaattatttagtctatcctatcctatcctatcctatcctagctgcgcggcggattcgctagcaaatc

SEQ ID NO: 43366 - DNA, 96 bp, Fusarium phaseoli
  misc_feature: 61
cgacaatggatggagtcgaagaagacgacgatggtgtggacgacaacccgatcgatttacaagccggtcatggaacgcacgtggccggcatgggat

SEQ ID NO: 43367 - DNA, 96 bp, Fusarium phaseoli
  misc_feature: 61
caactcaaagttacaatcgttcactctgccaacacctgaacatcttccgctggagcctatagatgtagaacggctcatgaacgaacgagaggctgg

SEQ ID NO: 43368 - DNA, 96 bp, Fusarium phaseoli
  misc_feature: 60
ttttacagacgatatgccagtaaagaagcatgcgaccaagagagatgcgaccaagagagatgcgaccaagagagatgccaccaagagagatgccac

SEQ ID NO: 43369 - DNA, 96 bp, Fusarium phaseoli
  misc_feature: 60
tgagggttagggttaagtggttgtggtgaaggttagggggagtggttgtggtgaaggttagggggagtggttgagttgagggttagggggagtggt

SEQ ID NO: 43370 - DNA, 96 bp, Fusarium phaseoli
  misc_feature: 60
caacatcacccgtccacatgttgatccacggaaatgcagcccgctcgctgcagctgtgcatacgcagaattctgagatcctatcgatgctgctaga

SEQ ID NO: 43371 - DNA, 96 bp, Fusarium phaseoli
  misc_feature: 60
ggtttttacagacgatatgccagtaaagaagcatgcgaccaagagagatgcgaccaagagagatgcgaccaagagagatgccaccaagagagatgc

SEQ ID NO: 43372 - DNA, 96 bp, Fusarium phaseoli
  misc_feature: 60
gaatgaagtatagtcaccggccgttatttataaaatacgaatagtgaaggtgcaagttaaataagcaagccggcccaagaaggaggcccggtgggg

SEQ ID NO: 43373 - DNA, 96 bp, Fusarium phaseoli
  misc_feature: 60
cggggcggcgtttggatctgcgcctgcatctagcagcatcgataggatctcagaattctgcgtatgcacagctgcagcgagcgggctgcatttccg

SEQ ID NO: 43374 - DNA, 96 bp, Fusarium phaseoli
  misc_feature: 60
cgaggtagtatttatgagaagtgaatagcaatgagcccggaggttattgccgagcaagtgattagagaagtgaatgaagtatagtcaccggccggt

SEQ ID NO: 43375 - DNA, 96 bp, Fusarium phaseoli
  misc_feature: 60
cccagcgaaacaggcatactgtaacagacccggggcggcgtttggatctgcgcctgcatctagcagcatcgataggatctcagaattctgcgtatg

SEQ ID NO: 43376 - DNA, 96 bp, Fusarium phaseoli
  misc_feature: 59
tttgcagacacgggccacagaagcgcagcatgtgccgtggcgtaccggagtccagagccagcggttgttccgcaatgggccggccagcggttgggt

SEQ ID NO: 43377 - DNA, 96 bp, Fusarium phaseoli
  misc_feature: 59
tttacagacgatatgccagtaaagaagcatgcgaccaagagagatgcgaccaagagagatgcgaccaagagagatgccaccaagagagatgccacc

SEQ ID NO: 43378 - DNA, 96 bp, Fusarium phaseoli
  misc_feature: 59
gggggggggagaaggagaggggataaacaagaatatatgggagagagtaagaagaagggatgaggggggagagaagagtaaagaagagaaagggaa

SEQ ID NO: 43379 - DNA, 96 bp, Fusarium phaseoli
  misc_feature: 59
cagacccggggcggcgtttggatctgcgcctgcatctagcagcatcgataggatctcagaattctgcgtatgcacagctgcagcgagcgggctgca

SEQ ID NO: 43380 - DNA, 96 bp, Fusarium phaseoli
  misc_feature: 59
taattaactataaactctaacctttaaaccctttattaactctaacctttaattctttattaaccctaactatttaattaattaccctatacccta

SEQ ID NO: 43381 - DNA, 96 bp, Fusarium phaseoli
  misc_feature: 59
taacagacccggggcggcgtttggatctgcgcctgcatctagcagcatcgataggatctcagaattctgcgtatgcacagctgcagcgagcgggct

SEQ ID NO: 43382 - DNA, 96 bp, Fusarium phaseoli
  misc_feature: 59
ggggtggttttaaacggaggggcgacggcggagaggttacggtcgagatatcgagaggccgaacgaacccgtatgcaatggtttcggtcggtgggt

SEQ ID NO: 43383 - DNA, 96 bp, Fusarium phaseoli
  misc_feature: 59
gagtttgcagacacgggccacagaagcgcagcatgtgccgtggcgtaccggagtccagagccagcggttgttccgcaatgggccggccagcgggtg

SEQ ID NO: 43384 - DNA, 96 bp, Fusarium phaseoli
  misc_feature: 58
aggtgacggctttccttgtttctggaacaggcgcgctttcgatcaggacaatggcaaaactaaagttgtttggtgaactggttttgaaagaatcaa

SEQ ID NO: 43385 - DNA, 96 bp, Fusarium phaseoli
  misc_feature: 58
aagcctcgagcttccaacctccctgatagccaaggagaaccaagtatcgacacaaagtgggatcccaactcagactgccgtctccttggtcatcaa

SEQ ID NO: 43386 - DNA, 96 bp, Fusarium phaseoli
  misc_feature: 58
ttataaagttaagtataattattaagtataaaattagggttaattatttagtctatcctatcctatcctatcctatcctagctgcgcggcggattc

SEQ ID NO: 43387 - DNA, 96 bp, Fusarium phaseoli
  misc_feature: 58
ctgatctgattaattgattgcctttgttcctcttttactcacactacttcccagcatattagcgggcagattgtttgaaaacctcatacaagtaga

SEQ ID NO: 43388 - DNA, 96 bp, Fusarium phaseoli
  misc_feature: 58
tcgaggtagtatttatgagaagtgaatagcaatgagcccggaggttattgccgagcaagtgattagagaagtgaatgaagtatagtcaccggccgg

SEQ ID NO: 43389 - DNA, 96 bp, Fusarium phaseoli
  misc_feature: 58
tatcctagctgcgcggcggattcgctagcaaatccaatgggtttcccatacaaaaaaaaaaggcgctatcctatcctagctgcgcggcggattcgc

SEQ ID NO: 43390 - DNA, 96 bp, Fusarium phaseoli
  misc_feature: 58
taaccctctggtctggattgtggctgtatcttggttgcatgcctctttggtggcatctctcttggtggcatctctcttggtggcatctctcttggt

SEQ ID NO: 43391 - DNA, 96 bp, Fusarium phaseoli
  misc_feature: 58
gtggttgtggtgaaggttagggggagtggttgagttgagggttagggggagtggttgagataaagtttagagtgaagggttagaaagaggtggggt

SEQ ID NO: 43392 - DNA, 96 bp, Fusarium phaseoli
  misc_feature: 58
ggaaatgtgtaaatgtcgacgcccataaagaaaaaaaaacatacatatatggcaacgactttgagggcctgatgtttttcgctatatgatggtact

SEQ ID NO: 43393 - DNA, 96 bp, Fusarium phaseoli
  misc_feature: 58
ctatcctatcctatcctatcctagctgcgcggcggattcgctagcaaatccaatgggtttcccatacaaaaaaaaaaggcgctatcctagctgcgc

SEQ ID NO: 43394 - DNA, 96 bp, Fusarium phaseoli
  misc_feature: 58
gccagtcgatttgggtgattctccgctaatgtcttctcctgaatcgcaaccacatgctctagcagttctgttgccttctcgatctgaccgttggct

SEQ ID NO: 43395 - DNA, 96 bp, Fusarium phaseoli
  misc_feature: 58
ctaggtgacggctttccttgtttctggaacaggcgcgctttcgatcaggacaatggcaaaactaaagttgtttggtgaactggttttgaaagaatc

SEQ ID NO: 43396 - DNA, 96 bp, Fusarium phaseoli
  misc_feature: 58
gaaggttgccggagagcaaggggcaaaagggcgggggcagttagggactagtaacctctggcgttaagagttagaaaagtgaaggtaaccgctact

SEQ ID NO: 43397 - DNA, 96 bp, Fusarium phaseoli
  misc_feature: 58
atgcaggttctctcgaccctgagaagacttttgcttgtggttcgcaagataggtggcacaacgaatcatagacgccttaaactgaatgtcggtgtg

SEQ ID NO: 43398 - DNA, 96 bp, Fusarium phaseoli
  misc_feature: 58
aaggttagggggagtggttgagttgagggttagggttaagtggttgtggtgaaggttagggggagtggttgtggtgaaggttagggggagtggttg

SEQ ID NO: 43399 - DNA, 96 bp, Fusarium phaseoli
  misc_feature: 58
attataaagttaagtataattattaagtataaaattagggttaattatttagtctatcctatcctatcctatcctatcctagctgcgcggcggatt

SEQ ID NO: 43400 - DNA, 96 bp, Fusarium phaseoli
  misc_feature: 58
acccggggcggcgtttggatctgcgcctgcatctagcagcatcgataggatctcagaattctgcgtatgcacagctgcagcgagcgggctgcattt

SEQ ID NO: 43401 - DNA, 96 bp, Fusarium phaseoli
  misc_feature: 58
aatgaagtatagtcaccggccgttatttataaaatacgaatagtgaaggtgcaagttaaataagcaagccggcccaagaaggaggcccggtggggt

SEQ ID NO: 43402 - DNA, 96 bp, Fusarium phaseoli
  misc_feature: 57
tttctacttgtatgaggttttcaaacaatctgcccgctaatatgctgggaagtagtgtgagtaaaagaggaacaaaggcaatcaattaatcagatc

SEQ ID NO: 43403 - DNA, 96 bp, Fusarium phaseoli
  misc_feature: 57
tttattataaagttaagtataattattaagtataaaattagggttaattatttagtctatcctatcctatcctatcctatcctagctgcgcggcgg

SEQ ID NO: 43404 - DNA, 96 bp, Fusarium phaseoli
  misc_feature: 57
ttaagtataattattaagtataaaattagggttaattatttagtctatcctatcctatcctatcctatcctagctgcgcggcggattcgctagcaa

SEQ ID NO: 43405 - DNA, 96 bp, Fusarium phaseoli
  misc_feature: 57
ttagtctatcctatcctatcctatcctatcctagctgcgcggcggattcgctagcaaatccaatgggtttcccatacaaaaaaaaaaggcgctatc

SEQ ID NO: 43406 - DNA, 96 bp, Fusarium phaseoli
  misc_feature: 57
aattaactataaactctaacctttaaaccctttattaactctaacctttaattctttattaaccctaactatttaattaattaccctataccctaa

SEQ ID NO: 43407 - DNA, 96 bp, Fusarium phaseoli
  misc_feature: 57
ggtgatttgatggatgatttggcggatttggtcgaggtgcacgtcgatgatccggaggcacatccattagacgaggaccgagtggacggggtggca

SEQ ID NO: 43408 - DNA, 96 bp, Fusarium phaseoli
  misc_feature: 57
atgaagtatagtcaccggccgttatttataaaatacgaatagtgaaggtgcaagttaaataagcaagccggcccaagaaggaggcccggtggggta

SEQ ID NO: 43409 - DNA, 96 bp, Fusarium phaseoli
  misc_feature: 57
ccagatcgagattacgtgggcgccctcactgatgcgctgtccttgaagtgcagtggagcacatgctcaaccaccggtcatgccgtattataccgtg

SEQ ID NO: 43410 - DNA, 96 bp, Fusarium phaseoli
  misc_feature: 57
aacaggcatactgtaacagacccggggcggcgtttggatctgcgcctgcatctagcagcatcgataggatctcagaattctgcgtatgcacagctg

SEQ ID NO: 43411 - DNA, 96 bp, Fusarium phaseoli
  misc_feature: 57
aaacaggcatactgtaacagacccggggcggcgtttggatctgcgcctgcatctagcagcatcgataggatctcagaattctgcgtatgcacagct

SEQ ID NO: 43412 - DNA, 96 bp, Fusarium phaseoli
  misc_feature: 56
tggttgtggtgaaggttagggggagtggttgagttgagggttagggggagtggttgagataaagtttagagtgaagggttagaaagaggtggggtt

SEQ ID NO: 43413 - DNA, 96 bp, Fusarium phaseoli
  misc_feature: 56
gttaagatgaggtagttaagataaaggcggattataagagaagtaggaggttaatttacggttagggataaagtgaatattaaatatgaggaagga

SEQ ID NO: 43414 - DNA, 96 bp, Fusarium phaseoli
  misc_feature: 56
gggagtttgcagacacgggccacagaagcgcagcatgtgccgtggcgtaccggagtccagagccagcggttgttccgcaatgggccggccagcggg

SEQ ID NO: 43415 - DNA, 96 bp, Fusarium phaseoli
  misc_feature: 56
ggagtttgcagacacgggccacagaagcgcagcatgtgccgtggcgtaccggagtccagagccagcggttgttccgcaatgggccggccagcgggt

SEQ ID NO: 43416 - DNA, 96 bp, Fusarium phaseoli
  misc_feature: 56
ccggggcggcgtttggatctgcgcctgcatctagcagcatcgataggatctcagaattctgcgtatgcacagctgcagcgagcgggctgcatttcc

SEQ ID NO: 43417 - DNA, 96 bp, Fusarium phaseoli
  misc_feature: 56
ccagtcgatttgggtgattctccgctaatgtcttctcctgaatcgcaaccacatgctctagcagttctgttgccttctcgatctgaccgttggctc

SEQ ID NO: 43418 - DNA, 96 bp, Fusarium phaseoli
  misc_feature: 56
aagatgcaggttctctcgaccctgagaagacttttgcttgtggttcgcaagataggtggcacaacgaatcatagacgccttaaactgaatgtcggt

SEQ ID NO: 43419 - DNA, 96 bp, Fusarium phaseoli
  misc_feature: 55
ttctacttgtatgaggttttcaaacaatctgcccgctaatatgctgggaagtagtgtgagtaaaagaggaacaaaggcaatcaattaatcagatca

SEQ ID NO: 43420 - DNA, 96 bp, Fusarium phaseoli
  misc_feature: 55
tgaaggttgccggagagcaaggggcaaaagggcgggggcagttagggactagtaacctctggcgttaagagttagaaaagtgaaggtaaccgctac

SEQ ID NO: 43421 - DNA, 96 bp, Fusarium phaseoli
  misc_feature: 55
tcgacaatggatggagtcgaagaagacgacgatggtgtggacgacaacccgatcgatttacaagccggtcatggaacgcacgtggccggcatggga

SEQ ID NO: 43422 - DNA, 96 bp, Fusarium phaseoli
  misc_feature: 55
tattataaagttaagtataattattaagtataaaattagggttaattatttagtctatcctatcctatcctatcctatcctagctgcgcggcggat

SEQ ID NO: 43423 - DNA, 96 bp, Fusarium phaseoli
  misc_feature: 55
atgaaggttgccggagagcaaggggcaaaagggcgggggcagttagggactagtaacctctggcgttaagagttagaaaagtgaaggtaaccgcta

SEQ ID NO: 43424 - DNA, 96 bp, Fusarium phaseoli
  misc_feature: 55
taaacggaggggcgacggcggagaggttacggtcgagatatcgagaggccgaacgaacccgtatgcaatggtttcggtcggtggttattcggtcgg

SEQ ID NO: 43425 - DNA, 96 bp, Fusarium phaseoli
  misc_feature: 55
gttgagggttagggttaagtggttgtggtgaaggttagggggagtggttgtggtgaaggttagggggagtggttgtggtgaaggttaggggggggg

SEQ ID NO: 43426 - DNA, 96 bp, Fusarium phaseoli
  misc_feature: 55
gtaacagacccggggcggcgtttggatctgcgcctgcatctagcagcatcgataggatctcagaattctgcgtatgcacagctgcagcgagcgggc

SEQ ID NO: 43427 - DNA, 96 bp, Fusarium phaseoli
  misc_feature: 55
gcctcgagcttccaacctccctgatagccaaggagaaccaagtatcgacacaaagtgggatcccaactcagactgccgtctccttggtcatcaacc

SEQ ID NO: 43428 - DNA, 96 bp, Fusarium phaseoli
  misc_feature: 55
ccagcgaaacaggcatactgtaacagacccggggcggcgtttggatctgcgcctgcatctagcagcatcgataggatctcagaattctgcgtatgc

SEQ ID NO: 43429 - DNA, 96 bp, Fusarium phaseoli
  misc_feature: 55
gcagcagctcaataaaccggacgaggaggacgaggaggacgaggaagagatggaagagatggaagaggacaatcgagtgttggtgctgtccagttc

SEQ ID NO: 43430 - DNA, 96 bp, Fusarium phaseoli
  misc_feature: 55
gagttgagggttagggttaagtggttgtggtgaaggttagggggagtggttgtggtgaaggttagggggagtggttgagttgagggttaggggggg

SEQ ID NO: 43431 - DNA, 96 bp, Fusarium phaseoli
  misc_feature: 55
cagaattctgagatcctatcgatgctgctagatgcaggcgcagatccaaacgccgccccgggtctgttacagtatgcctgtttcgctgggacgctc

SEQ ID NO: 43432 - DNA, 96 bp, Fusarium phaseoli
  misc_feature: 55
aaccctctggtctggattgtggctgtatcttggttgcatgcctctttggtggcatctctcttggtggcatctctcttggtggcatctctcttggtc

SEQ ID NO: 43433 - DNA, 96 bp, Fusarium phaseoli
  misc_feature: 55
gaacacattattccggatcatatgggcgcagataggttggatatataaatggtttggagcattagttgattagggtggaaggaccggcgggggggt

SEQ ID NO: 43434 - DNA, 96 bp, Fusarium phaseoli
  misc_feature: 55
actgatctgattaattgattgcctttgttcctcttttactcacactacttcccagcatattagcgggcagattgtttgaaaacctcatacaagtag

SEQ ID NO: 43435 - DNA, 96 bp, Fusarium phaseoli
  misc_feature: 55
aacatcacccgtccacatgttgatccacggaaatgcagcccgctcgctgcagctgtgcatacgcagaattctgagatcctatcgatgctgctagat

SEQ ID NO: 43436 - DNA, 96 bp, Fusarium phaseoli
  misc_feature: 54
aggagaggggataaacaagaatatatgggagagagtaagaagaagggatgaggggggagagaagagtaaagaagagaaagggaaagaagagaggaa

SEQ ID NO: 43437 - DNA, 96 bp, Fusarium phaseoli
  misc_feature: 54
ttaattaactataaactctaacctttaaaccctttattaactctaacctttaattctttattaaccctaactatttaattaattaccctataccct

SEQ ID NO: 43438 - DNA, 96 bp, Fusarium phaseoli
  misc_feature: 54
tgccagtcgatttgggtgattctccgctaatgtcttctcctgaatcgcaaccacatgctctagcagttctgttgccttctcgatctgaccgttggc

SEQ ID NO: 43439 - DNA, 96 bp, Fusarium phaseoli
  misc_feature: 54
gggtgatttgatggatgatttggcggatttggtcgaggtgcacgtcgatgatccggaggcacatccattagacgaggaccgagtggacggggtggc

SEQ ID NO: 43440 - DNA, 96 bp, Fusarium phaseoli
  misc_feature: 54
ctgcccccgcccttttgccccttgctctccggcaaccttcataacctcccgcttacctcttgacttcccgggtcaaacgaaaacctaggcattgcc

SEQ ID NO: 43441 - DNA, 96 bp, Fusarium phaseoli
  misc_feature: 54
actcaaagttacaatcgttcactctgccaacacctgaacatcttccgctggagcctatagatgtagaacggctcatgaacgaacgagaggctggcg

SEQ ID NO: 43442 - DNA, 96 bp, Fusarium phaseoli
  misc_feature: 54
agttaagatgaggtagttaagataaaggcggattataagagaagtaggaggttaatttacggttagggataaagtgaatattaaatatgaggaagg

SEQ ID NO: 43443 - DNA, 96 bp, Fusarium phaseoli
  misc_feature: 54
caatgcctaggttttcgtttgacccgggaagtcaagaggtaagcgggaggttatgaaggttgccggagagcaaggggcaaaagggcgggggcagtt

SEQ ID NO: 43444 - DNA, 96 bp, Fusarium phaseoli
  misc_feature: 54
agggttagggttaagtggttgtggtgaaggttagggggagtggttgtggtgaaggttagggggagtggttgagttgagggttagggggagtggttg

SEQ ID NO: 43445 - DNA, 96 bp, Fusarium phaseoli
  misc_feature: 53
tcaaccactccccctaaccctcaactcaaccactccccctaaccttcaccacaaccactccccctaaccttcaccacaaccacttaaccctaaccc

SEQ ID NO: 43446 - DNA, 96 bp, Fusarium phaseoli
  misc_feature: 53
gtttcccatacaaaaaaaaaaggcgctatcctagctgcgcggcggattcgctagcaaatccaatgggtttcccatacaaaaaaaaaaggcgctatc

SEQ ID NO: 43447 - DNA, 96 bp, Fusarium phaseoli
  misc_feature: 53
gttgagggttagggggagtggttgagataaagtttagagtgaagggttagaaagaggtgggtttgagaagtggtaaaaattaaaaagaaggggggg

SEQ ID NO: 43448 - DNA, 96 bp, Fusarium phaseoli
  misc_feature: 53
gtgatttgatggatgatttggcggatttggtcgaggtgcacgtcgatgatccggaggcacatccattagacgaggaccgagtggacggggtggcat

SEQ ID NO: 43449 - DNA, 96 bp, Fusarium phaseoli
  misc_feature: 53
ggttgccggagagcaaggggcaaaagggcgggggcagttagggactagtaacctctggcgttaagagttagaaaagtgaaggtaaccgctactgtc

SEQ ID NO: 43450 - DNA, 96 bp, Fusarium phaseoli
  misc_feature: 53
cttaattaactataaactctaacctttaaaccctttattaactctaacctttaattctttattaaccctaactatttaattaattaccctataccc

SEQ ID NO: 43451 - DNA, 96 bp, Fusarium phaseoli
  misc_feature: 53
ggggtttttacagacgatatgccagtaaagaagcatgcgaccaagagagatgcgaccaagagagatgcgaccaagagagatgccaccaagagagat

SEQ ID NO: 43452 - DNA, 96 bp, Fusarium phaseoli
  misc_feature: 53
gaaggttagggggagtggttgagttgagggttagggttaagtggttgtggtgaaggttagggggagtggttgtggtgaaggttagggggagtggtt

SEQ ID NO: 43453 - DNA, 96 bp, Fusarium phaseoli
  misc_feature: 53
cgcagcagctcaataaaccggacgaggaggacgaggaggacgaggaagagatggaagagatggaagaggacaatcgagtgttggtgctgtccagtt

SEQ ID NO: 43454 - DNA, 96 bp, Fusarium phaseoli
  misc_feature: 53
agaattctgagatcctatcgatgctgctagatgcaggcgcagatccaaacgccgccccgggtctgttacagtatgcctgtttcgctgggacgctcg

SEQ ID NO: 43455 - DNA, 96 bp, Fusarium phaseoli
  misc_feature: 53
atgccagtcgatttgggtgattctccgctaatgtcttctcctgaatcgcaaccacatgctctagcagttctgttgccttctcgatctgaccgttgg

SEQ ID NO: 43456 - DNA, 96 bp, Fusarium phaseoli
  misc_feature: 53
aaggttgccggagagcaaggggcaaaagggcgggggcagttagggactagtaacctctggcgttaagagttagaaaagtgaaggtaaccgctactg

SEQ ID NO: 43457 - DNA, 96 bp, Fusarium phaseoli
  misc_feature: 52
gggttaattatttagtctatcctatcctatcctatcctatcctagctgcgcggcggattcgctagcaaatccaatgggtttcccatacaaaaaaaa

SEQ ID NO: 43458 - DNA, 96 bp, Fusarium phaseoli
  misc_feature: 52
tttaatattcactttatccctaaccgtaaattaacctcctacttctcttataatccgcctttatcttaactacctcatcttaactaccttatcttg

SEQ ID NO: 43459 - DNA, 96 bp, Fusarium phaseoli
  misc_feature: 52
ttgcagacacgggccacagaagcgcagcatgtgccgtggcgtaccggagtccagagccagcggttgttccgcaatgggccggccagcggttgggtc

SEQ ID NO: 43460 - DNA, 96 bp, Fusarium phaseoli
  misc_feature: 52
ttacagacgatatgccagtaaagaagcatgcgaccaagagagatgcgaccaagagagatgcgaccaagagagatgccaccaagagagatgccacca

SEQ ID NO: 43461 - DNA, 96 bp, Fusarium phaseoli
  misc_feature: 52
tgtaacagacccggggcggcgtttggatctgcgcctgcatctagcagcatcgataggatctcagaattctgcgtatgcacagctgcagcgagcggg

SEQ ID NO: 43462 - DNA, 96 bp, Fusarium phaseoli
  misc_feature: 52
tagttaagatgaggtagttaagataaaggcggattataagagaagtaggaggttaatttacggttagggataaagtgaatattaaatatgaggaag

SEQ ID NO: 43463 - DNA, 96 bp, Fusarium phaseoli
  misc_feature: 52
ggacagcaccaacactcgattgtcctcttccatctcttccatctcttcctcgtcctcctcgtcctcctcgtccggtttattgagctgctgcgcatc

SEQ ID NO: 43464 - DNA, 96 bp, Fusarium phaseoli
  misc_feature: 52
gctgacgtttggagaatccttcaggtctgtcgccaattggaaaccagacatctacgtctcgctcatcctggaatttacgaagcatttcactctgct

SEQ ID NO: 43465 - DNA, 96 bp, Fusarium phaseoli
  misc_feature: 52
actgcccccgcccttttgccccttgctctccggcaaccttcataacctcccgcttacctcttgacttcccgggtcaaacgaaaacctaggcattgc

SEQ ID NO: 43466 - DNA, 96 bp, Fusarium phaseoli
  misc_feature: 52
cctatcctatcctatcctatcctagctgcgcggcggattcgctagcaaatccaatgggtttcccatacaaaaaaaaaaggcgctatcctagctgcg

SEQ ID NO: 43467 - DNA, 96 bp, Fusarium phaseoli
  misc_feature: 52
aaatgaatcgcagtccaaggttattgaggacaaccctattggaaatggccttgatgccttttgtgcgtccttcaattcgatatgcgaaggcgcagg

SEQ ID NO: 43468 - DNA, 96 bp, Fusarium phaseoli
  misc_feature: 52
aaacggaggggcgacggcggagaggttacggtcgagatatcgagaggccgaacgaacccgtatgcaatggtttcggtcggtggttattcggtcggg

SEQ ID NO: 43469 - DNA, 96 bp, Fusarium phaseoli
  misc_feature: 51
tttcccatacaaaaaaaaaaggcgctatcctagctgcgcggcggattcgctagcaaatccaatgggtttcccatacaaaaaaaaaaggcgctatcc

SEQ ID NO: 43470 - DNA, 96 bp, Fusarium phaseoli
  misc_feature: 51
aaccaaccgctggccggcccattgcggaacaaccgctggctctggactccggtacgccacggcacatgctgcgcttctgtggcccgtgtctgccaa

SEQ ID NO: 43471 - DNA, 96 bp, Fusarium phaseoli
  misc_feature: 51
tcctagctgcgcggcggattcgctagcaaatccaatgggtttcccatacaaaaaaaaaaggcgctatcctatcctagctgcgcggcggattcgcta

SEQ ID NO: 43472 - DNA, 96 bp, Fusarium phaseoli
  misc_feature: 51
aatgcctaggttttcgtttgacccgggaagtcaagaggtaagcgggaggttatgaaggttgccggagagcaaggggcaaaagggcgggggcagtta

SEQ ID NO: 43473 - DNA, 96 bp, Fusarium phaseoli
  misc_feature: 51
gtgaacaaaaaaaaaggaaaaacaaaaacaattaaaagaacagagtagaaaagaaaataaaagaaaaaggagctggtgcattaggacatatttaat

SEQ ID NO: 43474 - DNA, 96 bp, Fusarium phaseoli
  misc_feature: 51
ccctctggtctggattgtggctgtatcttggttgcatgcctctttggtggcatctctcttggtggcatctctcttggtggcatctctcttggtcgc

SEQ ID NO: 43475 - DNA, 96 bp, Fusarium phaseoli
  misc_feature: 51
attgcctttgttcctcttttactcacactacttcccagcatattagcgggcagattgtttgaaaacctcatacaagtagaaatggcgctattaaag

SEQ ID NO: 43476 - DNA, 96 bp, Fusarium phaseoli
  misc_feature: 51
ctcgatgcgcagcagctcaataaaccggacgaggaggacgaggaggacgaggaagagatggaagagatggaagaggacaatcgagtgttggtgctg

SEQ ID NO: 43477 - DNA, 96 bp, Fusarium phaseoli
  misc_feature: 51
cagcagctcaataaaccggacgaggaggacgaggaggacgaggaagagatggaagagatggaagaggacaatcgagtgttggtgctgtccagttcg

SEQ ID NO: 43478 - DNA, 96 bp, Fusarium phaseoli
  misc_feature: 51
aggttgccggagagcaaggggcaaaagggcgggggcagttagggactagtaacctctggcgttaagagttagaaaagtgaaggtaaccgctactgt

SEQ ID NO: 43479 - DNA, 96 bp, Fusarium phaseoli
  misc_feature: 50
ttaatattcactttatccctaaccgtaaattaacctcctacttctcttataatccgcctttatcttaactacctcatcttaactaccttatcttga

SEQ ID NO: 43480 - DNA, 96 bp, Fusarium phaseoli
  misc_feature: 50
acagcaccaacactcgattgtcctcttccatctcttccatctcttcctcgtcctcctcgtcctcctcgtccggtttattgagctgctgcgcatcga

SEQ ID NO: 43481 - DNA, 96 bp, Fusarium phaseoli
  misc_feature: 50
taaggtagttaagatgaggtagttaagataaaggcggattataagagaagtaggaggttaatttacggttagggataaagtgaatattaaatatga

SEQ ID NO: 43482 - DNA, 96 bp, Fusarium phaseoli
  misc_feature: 50
gttgtggtgaaggttagggggagtggttgagttgagggttagggggagtggttgagataaagtttagagtgaagggttagaaagaggtggggttga

SEQ ID NO: 43483 - DNA, 96 bp, Fusarium phaseoli
  misc_feature: 50
tagtctatcctatcctatcctatcctatcctagctgcgcggcggattcgctagcaaatccaatgggtttcccatacaaaaaaaaaaggcgctatcc

SEQ ID NO: 43484 - DNA, 96 bp, Fusarium phaseoli
  misc_feature: 50
gtctatcctatcctatcctatcctatcctagctgcgcggcggattcgctagcaaatccaatgggtttcccatacaaaaaaaaaaggcgctatccta

SEQ ID NO: 43485 - DNA, 96 bp, Fusarium phaseoli
  misc_feature: 50
agttctccctactagatttcaacgatgctccatttcgcggcatcgttcactcccgtcctcaccaccatgagccatgcgaggcccgtcagctggcac

SEQ ID NO: 43486 - DNA, 96 bp, Fusarium phaseoli
  misc_feature: 50
aattctgagatcctatcgatgctgctagatgcaggcgcagatccaaacgccgccccgggtctgttacagtatgcctgtttcgctgggacgctcgac

SEQ ID NO: 43487 - DNA, 96 bp, Fusarium phaseoli
  misc_feature: 50
gggaacacattattccggatcatatgggcgcagataggttggatatataaatggtttggagcattagttgattagggtggaaggaccggcggtggg

SEQ ID NO: 43488 - DNA, 96 bp, Fusarium phaseoli
  misc_feature: 50
agcgtcccagcgaaacaggcatactgtaacagacccggggcggcgtttggatctgcgcctgcatctagcagcatcgataggatctcagaattctgc

SEQ ID NO: 43489 - DNA, 96 bp, Fusarium phaseoli
  misc_feature: 50
gaaatgtgtaaatgtcgacgcccataaagaaaaaaaaacatacatatatggcaacgactttgagggcctgatgtttttcgctatatgatggtactg

SEQ ID NO: 43490 - DNA, 96 bp, Fusarium phaseoli
  misc_feature: 50
ctggattgtggctgtatcttggttgcatgcctctttggtggcatctctcttggtggcatctctcttggtggcatctctcttggtcgcatctctctt

SEQ ID NO: 43491 - DNA, 96 bp, Fusarium phaseoli
  misc_feature: 50
ctatcctagctgcgcggcggattcgctagcaaatccaatgggtttcccatacaaaaaaaaaaggcgctatcctatcctagctgcgcggcggattcg

SEQ ID NO: 43492 - DNA, 96 bp, Fusarium phaseoli
  misc_feature: 50
accctctggtctggattgtggctgtatcttggttgcatgcctctttggtggcatctctcttggtggcatctctcttggtggcatctctcttggtcg

SEQ ID NO: 43493 - DNA, 96 bp, Fusarium phaseoli
  misc_feature: 50
atttctacttgtatgaggttttcaaacaatctgcccgctaatatgctgggaagtagtgtgagtaaaagaggaacaaaggcaatcaattaatcagat

SEQ ID NO: 43494 - DNA, 96 bp, Fusarium phaseoli
  misc_feature: 50
actcgatgcgcagcagctcaataaaccggacgaggaggacgaggaggacgaggaagagatggaagagatggaagaggacaatcgagtgttggtgct

SEQ ID NO: 43495 - DNA, 96 bp, Fusarium phaseoli
  misc_feature: 49
taagggtaaggttaagggtaaggttaagggtaaggttaaggatcagtgtggtcttcagggttggggttggggcggtcgtgaaagtgtcagcgaaaa

SEQ ID NO: 43496 - DNA, 96 bp, Fusarium phaseoli
  misc_feature: 49
gattgcctttgttcctcttttactcacactacttcccagcatattagcgggcagattgtttgaaaacctcatacaagtagaaatggcgctattaaa

SEQ ID NO: 43497 - DNA, 96 bp, Fusarium phaseoli
  misc_feature: 49
tctggattgtggctgtatcttggttgcatgcctctttggtggcatctctcttggtggcatctctcttggtggcatctctcttggtcgcatctctct

SEQ ID NO: 43498 - DNA, 96 bp, Fusarium phaseoli
  misc_feature: 49
tacgatacaaataacccaccgggcctccttcttgggccggcttgcttatttaacttgcaccttcactattcgtattttataaataacggccgggga

SEQ ID NO: 43499 - DNA, 96 bp, Fusarium phaseoli
  misc_feature: 49
tcccatacaaaaaaaaaaggcgctatcctagctgcgcggcggattcgctagcaaatccaatgggtttcccatacaaaaaaaaaaggcgctatccta

SEQ ID NO: 43500 - DNA, 96 bp, Fusarium phaseoli
  misc_feature: 49
ggtttcccatacaaaaaaaaaaggcgctatcctagctgcgcggcggattcgctagcaaatccaatgggtttcccatacaaaaaaaaaaggcgctat

SEQ ID NO: 43501 - DNA, 96 bp, Fusarium phaseoli
  misc_feature: 49
gaattttcgctgacactttcacgaccgccccaaccccaaccctgaagaccacactgatccttaaccttacccttaaccttacccttaaccttaccc

SEQ ID NO: 43502 - DNA, 96 bp, Fusarium phaseoli
  misc_feature: 49
actggacagcaccaacactcgattgtcctcttccatctcttccatctcttcctcgtcctcctcgtcctcctcgtccggtttattgagctgctgcgc

SEQ ID NO: 43503 - DNA, 96 bp, Fusarium phaseoli
  misc_feature: 49
cagatcgagattacgtgggcgccctcactgatgcgctgtccttgaagtgcagtggagcacatgctcaaccaccggtcatgccgtattataccgtgc

SEQ ID NO: 43504 - DNA, 96 bp, Fusarium phaseoli
  misc_feature: 49
gacggggaaccaaagagtaagtaaaggcctgaccctgactctgaccttgaccttgaccttgacccttaggccttagtataacctaggaagcgaggg

SEQ ID NO: 43505 - DNA, 96 bp, Fusarium phaseoli
  misc_feature: 49
cttaaactaaccctcataaccacccgctccctccctcgcttcctaggttatactaaggcctaagggtcaaggtcaaggtcaaggtcagagtcaggg

SEQ ID NO: 43506 - DNA, 96 bp, Fusarium phaseoli
  misc_feature: 49
ccttaaactaaccctcataaccacccgctccctccctcgcttcctaggttatactaaggcctaagggtcaaggtcaaggtcaaggtcagagtcagg

SEQ ID NO: 43507 - DNA, 96 bp, Fusarium phaseoli
  misc_feature: 49
caagatgcaggttctctcgaccctgagaagacttttgcttgtggttcgcaagataggtggcacaacgaatcatagacgccttaaactgaatgtcgg

SEQ ID NO: 43508 - DNA, 96 bp, Fusarium phaseoli
  misc_feature: 49
agttgagggttagggttaagtggttgtggtgaaggttagggggagtggttgtggtgaaggttagggggagtggttgtggtgaaggttagggggggg

SEQ ID NO: 43509 - DNA, 96 bp, Fusarium phaseoli
  misc_feature: 49
aaatttgtatggtacagttttgtacgtacagaaaagttgtacgtacgtacagctacccaaaatacagtacgtacgtacgtacgtgtacagaaaaat

SEQ ID NO: 43510 - DNA, 96 bp, Fusarium phaseoli
  misc_feature: 49
agtctatcctatcctatcctatcctatcctagctgcgcggcggattcgctagcaaatccaatgggtttcccatacaaaaaaaaaaggcgctatcct

SEQ ID NO: 43511 - DNA, 96 bp, Fusarium phaseoli
  misc_feature: 49
accagatcgagattacgtgggcgccctcactgatgcgctgtccttgaagtgcagtggagcacatgctcaaccaccggtcatgccgtattataccgt

SEQ ID NO: 43512 - DNA, 96 bp, Fusarium phaseoli
  misc_feature: 48
tgattgcctttgttcctcttttactcacactacttcccagcatattagcgggcagattgtttgaaaacctcatacaagtagaaatggcgctattaa

SEQ ID NO: 43513 - DNA, 96 bp, Fusarium phaseoli
  misc_feature: 48
gatgcatttttctgtacacgtacgtacgtacgtactgtattttgggtagctgtacgtacgtacaacttttctgtacgtacaaaactgtaccataca

SEQ ID NO: 43514 - DNA, 96 bp, Fusarium phaseoli
  misc_feature: 48
cagttctccctactagatttcaacgatgctccatttcgcggcatcgttcactcccgtcctcaccaccatgagccatgcgaggcccgtcagctggca

SEQ ID NO: 43515 - DNA, 96 bp, Fusarium phaseoli
  misc_feature: 48
tgatgcatttttctgtacacgtacgtacgtacgtactgtattttgggtagctgtacgtacgtacaacttttctgtacgtacaaaactgtaccatac

SEQ ID NO: 43516 - DNA, 96 bp, Fusarium phaseoli
  misc_feature: 48
tctttggtggcatctctcttggtggcatctctcttggtggcatctctcttggtcgcatctctcttggtcgcatctctcttggtcgcatgcttcttt

SEQ ID NO: 43517 - DNA, 96 bp, Fusarium phaseoli
  misc_feature: 48
gaattctgagatcctatcgatgctgctagatgcaggcgcagatccaaacgccgccccgggtctgttacagtatgcctgtttcgctgggacgctcga

SEQ ID NO: 43518 - DNA, 96 bp, Fusarium phaseoli
  misc_feature: 48
gtgatgcatttttctgtacacgtacgtacgtacgtactgtattttgggtagctgtacgtacgtacaacttttctgtacgtacaaaactgtaccata

SEQ ID NO: 43519 - DNA, 96 bp, Fusarium phaseoli
  misc_feature: 48
tactttatcccccctattctcccttctgctctgaccaccgtctctccaaccgcgtaataacctggcatccacggcttgcttatatgccaccgcccg

SEQ ID NO: 43520 - DNA, 96 bp, Fusarium phaseoli
  misc_feature: 48
tactgatctgattaattgattgcctttgttcctcttttactcacactacttcccagcatattagcgggcagattgtttgaaaacctcatacaagta

SEQ ID NO: 43521 - DNA, 96 bp, Fusarium phaseoli
  misc_feature: 48
gtctggattgtggctgtatcttggttgcatgcctctttggtggcatctctcttggtggcatctctcttggtggcatctctcttggtcgcatctctc

SEQ ID NO: 43522 - DNA, 96 bp, Fusarium phaseoli
  misc_feature: 48
ggtctttaatagcgccatttctacttgtatgaggttttcaaacaatctgcccgctaatatgctgggaagtagtgtgagtaaaagaggaacaaaggc

SEQ ID NO: 43523 - DNA, 96 bp, Fusarium phaseoli
  misc_feature: 48
agatcgagattacgtgggcgccctcactgatgcgctgtccttgaagtgcagtggagcacatgctcaaccaccggtcatgccgtattataccgtgcc

SEQ ID NO: 43524 - DNA, 96 bp, Fusarium phaseoli
  misc_feature: 48
acaggcatactgtaacagacccggggcggcgtttggatctgcgcctgcatctagcagcatcgataggatctcagaattctgcgtatgcacagctgc

SEQ ID NO: 43525 - DNA, 96 bp, Fusarium phaseoli
  misc_feature: 48
agctgacgtttggagaatccttcaggtctgtcgccaattggaaaccagacatctacgtctcgctcatcctggaatttacgaagcatttcactctgc

SEQ ID NO: 43526 - DNA, 96 bp, Fusarium phaseoli
  misc_feature: 48
aactaaccctcataaccacccgctccctccctcgcttcctaggttatactaaggcctaagggtcaaggtcaaggtcaaggtcagagtcagggtcag

SEQ ID NO: 43527 - DNA, 96 bp, Fusarium phaseoli
  misc_feature: 48
cctctttggtggcatctctcttggtggcatctctcttggtggcatctctcttggtcgcatctctcttggtcgcatctctcttggtcgcatgcttct

SEQ ID NO: 43528 - DNA, 96 bp, Fusarium phaseoli
  misc_feature: 48
acggcggagaggttacggtcgagatatcgagaggccgaacgaacccgtatgcaatggtttcggtcggtggttattcggtcgagtggtggggggggg

SEQ ID NO: 43529 - DNA, 96 bp, Fusarium phaseoli
  misc_feature: 48
agggtgatttgatggatgatttggcggatttggtcgaggtgcacgtcgatgatccggaggcacatccattagacgaggaccgagtggacggggtgg

SEQ ID NO: 43530 - DNA, 96 bp, Fusarium phaseoli
  misc_feature: 48
acatcacccgtccacatgttgatccacggaaatgcagcccgctcgctgcagctgtgcatacgcagaattctgagatcctatcgatgctgctagatg

SEQ ID NO: 43531 - DNA, 96 bp, Fusarium phaseoli
  misc_feature: 48
atcctatcctatcctatcctatcctagctgcgcggcggattcgctagcaaatccaatgggtttcccatacaaaaaaaaaaggcgctatcctagctg

SEQ ID NO: 43532 - DNA, 96 bp, Fusarium phaseoli
  misc_feature: 48
attttcgctgacactttcacgaccgccccaaccccaaccctgaagaccacactgatccttaaccttacccttaaccttacccttaaccttaccctt

SEQ ID NO: 43533 - DNA, 96 bp, Fusarium phaseoli
  misc_feature: 47
ttaagggtaaggttaagggtaaggttaagggtaaggttaaggatcagtgtggtcttcagggttggggttggggcggtcgtgaaagtgtcagcgaaa

SEQ ID NO: 43534 - DNA, 96 bp, Fusarium phaseoli
  misc_feature: 47
ttgattgcctttgttcctcttttactcacactacttcccagcatattagcgggcagattgtttgaaaacctcatacaagtagaaatggcgctatta

SEQ ID NO: 43535 - DNA, 96 bp, Fusarium phaseoli
  misc_feature: 47
ttcccatacaaaaaaaaaaggcgctatcctagctgcgcggcggattcgctagcaaatccaatgggtttcccatacaaaaaaaaaaggcgctatcct

SEQ ID NO: 43536 - DNA, 96 bp, Fusarium phaseoli
  misc_feature: 47
tggatttgctgcacctgttcattagcgccttttttttttgtatgggaaacccattggatttgctagcgaatccgccgcgcagctaggataggatag

SEQ ID NO: 43537 - DNA, 96 bp, Fusarium phaseoli
  misc_feature: 47
tgcagctgtgcatacgcagaattctgagatcctatcgatgctgctagatgcaggcgcagatccaaacgccgccccgggtctgttacagtatgcctg

SEQ ID NO: 43538 - DNA, 96 bp, Fusarium phaseoli
  misc_feature: 47
tgatttgatggatgatttggcggatttggtcgaggtgcacgtcgatgatccggaggcacatccattagacgaggaccgagtggacggggtggcatt

SEQ ID NO: 43539 - DNA, 96 bp, Fusarium phaseoli
  misc_feature: 47
catttctacttgtatgaggttttcaaacaatctgcccgctaatatgctgggaagtagtgtgagtaaaagaggaacaaaggcaatcaattaatcaga

SEQ ID NO: 43540 - DNA, 96 bp, Fusarium phaseoli
  misc_feature: 47
ggctttcggattcttaccaacttccattctaactgaggcccagttggggaaggacagatcgttaaagatacatggtcaggaactcgtgcatagaga

SEQ ID NO: 43541 - DNA, 96 bp, Fusarium phaseoli
  misc_feature: 47
agcggttaccttcacttttctaactcttaacgccagaggttactagtccctaactgcccccgcccttttgccccttgctctccggcaaccttcata

SEQ ID NO: 43542 - DNA, 96 bp, Fusarium phaseoli
  misc_feature: 47
taaactctaacctttaaaccctttattaactctaacctttaattctttattaaccctaactatttaattaattaccctataccctaaccctttata

SEQ ID NO: 43543 - DNA, 96 bp, Fusarium phaseoli
  misc_feature: 47
taaagaagcatgcgaccaagagagatgcgaccaagagagatgcgaccaagagagatgccaccaagagagatgccaccaagagagatgccaccaaag

SEQ ID NO: 43544 - DNA, 96 bp, Fusarium phaseoli
  misc_feature: 47
gaccctgactctgaccttgaccttgaccttgacccttaggccttagtataacctaggaagcgagggagggagcgggtggttatgagggttagttta

SEQ ID NO: 43545 - DNA, 96 bp, Fusarium phaseoli
  misc_feature: 47
gctttcggattcttaccaacttccattctaactgaggcccagttggggaaggacagatcgttaaagatacatggtcaggaactcgtgcatagagac

SEQ ID NO: 43546 - DNA, 96 bp, Fusarium phaseoli
  misc_feature: 47
gtctagtcacgtcaggaattggtccttgttgtctccttggagtggcaagatctcgatctagtcgcagaagttggtaggggctgtacctggtatctt

SEQ ID NO: 43547 - DNA, 96 bp, Fusarium phaseoli
  misc_feature: 47
ctagtccctaactgcccccgcccttttgccccttgctctccggcaaccttcataacctcccgcttacctcttgacttcccgggtcaaacgaaaacc

SEQ ID NO: 43548 - DNA, 96 bp, Fusarium phaseoli
  misc_feature: 47
ggtgaaggttagggggagtggttgagttgagggttagggttaagtggttgtggtgaaggttagggggagtggttgtggtgaaggttagggggagtg

SEQ ID NO: 43549 - DNA, 96 bp, Fusarium phaseoli
  misc_feature: 47
gggcagggcgtaagggtgacggggaaccaaagagtaagtaaaggcctgaccctgactctgaccttgaccttgaccttgacccttaggccttagtat

SEQ ID NO: 43550 - DNA, 96 bp, Fusarium phaseoli
  misc_feature: 47
acgatacaaataacccaccgggcctccttcttgggccggcttgcttatttaacttgcaccttcactattcgtattttataaataacggccgggggc

SEQ ID NO: 43551 - DNA, 96 bp, Fusarium phaseoli
  misc_feature: 47
ctgacgtttggagaatccttcaggtctgtcgccaattggaaaccagacatctacgtctcgctcatcctggaatttacgaagcatttcactctgctc

SEQ ID NO: 43552 - DNA, 96 bp, Fusarium phaseoli
  misc_feature: 47
ataacaccttagtccccttaaactaaccctcataaccacccgctccctccctcgcttcctaggttatactaaggcctaagggtcaaggtcaaggtc

SEQ ID NO: 43553 - DNA, 96 bp, Fusarium phaseoli
  misc_feature: 47
aaggtagttaagatgaggtagttaagataaaggcggattataagagaagtaggaggttaatttacggttagggataaagtgaatattaaatatgag

SEQ ID NO: 43554 - DNA, 96 bp, Fusarium phaseoli
  misc_feature: 47
atgcctaggttttcgtttgacccgggaagtcaagaggtaagcgggaggttatgaaggttgccggagagcaaggggcaaaagggcgggggcagttag

SEQ ID NO: 43555 - DNA, 96 bp, Fusarium phaseoli
  misc_feature: 47
agggcaggggggccagtgggcagaagatggggcattttggccgatgtttccagtaggcgttagcacccaccgagagcagtaaggaggatggagggg

SEQ ID NO: 43556 - DNA, 96 bp, Fusarium phaseoli
  misc_feature: 47
acgaacccgtatgcaatggtttcggtcggtggttattcggtcgagtggtggagggagaaaggaagaattaaggggagagttcgagaagagaggggg

SEQ ID NO: 43557 - DNA, 96 bp, Fusarium phaseoli
  misc_feature: 47
ccacggtcatcagccaaggcggggagaagaagaaaggcggcagccgcatcagacagggccaagtggccagcaaaggaagcagccgttgagcgggtt

SEQ ID NO: 43558 - DNA, 96 bp, Fusarium phaseoli
  misc_feature: 47
aatttgtatggtacagttttgtacgtacagaaaagttgtacgtacgtacagctacccaaaatacagtacgtacgtacgtacgtgtacagaaaaatg

SEQ ID NO: 43559 - DNA, 96 bp, Fusarium phaseoli
  misc_feature: 47
aattttcgctgacactttcacgaccgccccaaccccaaccctgaagaccacactgatccttaaccttacccttaaccttacccttaaccttaccct

SEQ ID NO: 43560 - DNA, 96 bp, Fusarium phaseoli
  misc_feature: 47
aagcgagggagggagcgggtggttatgagggttagtttaaggggactaaggtgttatttacctgtaaccctaaccctaaggcaatgcctaggtttt

SEQ ID NO: 43561 - DNA, 96 bp, Fusarium phaseoli
  misc_feature: 46
ttaacgtcctcattattattattatctcctcccaccttatatataataccacacccactccgcttatctaactctaccttaaaattcgccgtatct

SEQ ID NO: 43562 - DNA, 96 bp, Fusarium phaseoli
  misc_feature: 46
cctctggtctggattgtggctgtatcttggttgcatgcctctttggtggcatctctcttggtggcatctctcttggtggcatctctcttggtcgca

SEQ ID NO: 43563 - DNA, 96 bp, Fusarium phaseoli
  misc_feature: 46
aagaggacatttagatggccaaaagccaacgaactgttataccaaacgatgtttctaaaatggcatcatgtcggggatcacggcgccgacagtgca

SEQ ID NO: 43564 - DNA, 96 bp, Fusarium phaseoli
  misc_feature: 46
tgaccctgactctgaccttgaccttgaccttgacccttaggccttagtataacctaggaagcgagggagggagcgggtggttatgagggttagttt

SEQ ID NO: 43565 - DNA, 96 bp, Fusarium phaseoli
  misc_feature: 46
gggcaggggggccagtgggcagaagatggggcattttggccgatgtttccagtaggcgttagcacccaccgagagcagtaaggaggatggagggga

SEQ ID NO: 43566 - DNA, 96 bp, Fusarium phaseoli
  misc_feature: 46
aggttagggggagtggttgagttgagggttagggttaagtggttgtggtgaaggttagggggagtggttgtggtgaaggttagggggagtggttga

SEQ ID NO: 43567 - DNA, 96 bp, Fusarium phaseoli
  misc_feature: 46
gacgacgattaccagtttgacttccctgacgactataataatttgaaaatgggtaaggatatgaagtcagcgtcggcgattcgattgataccaata

SEQ ID NO: 43568 - DNA, 96 bp, Fusarium phaseoli
  misc_feature: 46
ggcatataagcaagccgtggatgccaggttattacgcggttggagagacggtggtcagagcagaagggagaataggggggataaagtagaggggta

SEQ ID NO: 43569 - DNA, 96 bp, Fusarium phaseoli
  misc_feature: 46
aacacattattccggatcatatgggcgcagataggttggatatataaatggtttggagcattagttgattagggtggaaggaccggcgggggggta

SEQ ID NO: 43570 - DNA, 96 bp, Fusarium phaseoli
  misc_feature: 46
taaccttcaccacaaccactccccctaaccttcaccacaaccacttaaccctaaccctcaactcaaccactccccctaaccctcacctcaaccact

SEQ ID NO: 43571 - DNA, 96 bp, Fusarium phaseoli
  misc_feature: 46
actagtccctaactgcccccgcccttttgccccttgctctccggcaaccttcataacctcccgcttacctcttgacttcccgggtcaaacgaaaac

SEQ ID NO: 43572 - DNA, 96 bp, Fusarium phaseoli
  misc_feature: 46
ggtctggattgtggctgtatcttggttgcatgcctctttggtggcatctctcttggtggcatctctcttggtggcatctctcttggtcgcatctct

SEQ ID NO: 43573 - DNA, 96 bp, Fusarium phaseoli
  misc_feature: 46
ctactttatcccccctattctcccttctgctctgaccaccgtctctccaaccgcgtaataacctggcatccacggcttgcttatatgccaccgccc

SEQ ID NO: 43574 - DNA, 96 bp, Fusarium phaseoli
  misc_feature: 46
aaacatcggccaaaatgccccatcttctgcccactggcccccctgccctcgccgttacatacggcaacggcactgtcacgctgcgtctctgcctcc

SEQ ID NO: 43575 - DNA, 96 bp, Fusarium phaseoli
  misc_feature: 46
gatgccagtcgatttgggtgattctccgctaatgtcttctcctgaatcgcaaccacatgctctagcagttctgttgccttctcgatctgaccgttg

SEQ ID NO: 43576 - DNA, 96 bp, Fusarium phaseoli
  misc_feature: 46
gacagcaccaacactcgattgtcctcttccatctcttccatctcttcctcgtcctcctcgtcctcctcgtccggtttattgagctgctgcgcatcg

SEQ ID NO: 43577 - DNA, 96 bp, Fusarium phaseoli
  misc_feature: 46
aaggttagggggagtggttgtggtgaaggttagggggagtggttgagttgagggttagggggagtggttgagataaagtttagagtgaaggggtag

SEQ ID NO: 43578 - DNA, 96 bp, Fusarium phaseoli
  misc_feature: 46
aaataacaccttagtccccttaaactaaccctcataaccacccgctccctccctcgcttcctaggttatactaaggcctaagggtcaaggtcaagg

SEQ ID NO: 43579 - DNA, 96 bp, Fusarium phaseoli
  misc_feature: 46
actaaccctcataaccacccgctccctccctcgcttcctaggttatactaaggcctaagggtcaaggtcaaggtcaaggtcagagtcagggtcagg

SEQ ID NO: 43580 - DNA, 96 bp, Fusarium phaseoli
  misc_feature: 46
aaaaaaaaaggcgctatcctagctgcgcggcggattcgctagcaaatccaatgggtttcccatacaaaaaaaaaaggcgctatcctagctgcgcgg

SEQ ID NO: 43581 - DNA, 96 bp, Fusarium phaseoli
  misc_feature: 46
atttggcggatttggtcgaggtgcacgtcgatgatccggaggcacatccattagacgaggaccgagtggacggggtgacattgcaggtcgtcatgg

SEQ ID NO: 43582 - DNA, 96 bp, Fusarium phaseoli
  misc_feature: 46
aagatccgctctctaggagacgacgattcctactacgatatttcacttggcagctatttctttctttccaagccaagggccgctgtggcaaactct

SEQ ID NO: 43583 - DNA, 96 bp, Fusarium phaseoli
  misc_feature: 46
aataacaccttagtccccttaaactaaccctcataaccacccgctccctccctcgcttcctaggttatactaaggcctaagggtcaaggtcaaggt

SEQ ID NO: 43584 - DNA, 96 bp, Fusarium phaseoli
  misc_feature: 45
gaaatttgtatggtacagttttgtacgtacagaaaagttgtacgtacgtacagctacccaaaatacagtacgtacgtacgtacgtgtacagaaaaa

SEQ ID NO: 43585 - DNA, 96 bp, Fusarium phaseoli
  misc_feature: 45
ttgtggtgaaggttagggggagtggttgagttgagggttagggggagtggttgagataaagtttagagtgaagggttagaaagaggtggggttgag

SEQ ID NO: 43586 - DNA, 96 bp, Fusarium phaseoli
  misc_feature: 45
gagcctgagattgatgactggggttcttttgtcgtaaagcctcaggagaaaaagaagcacgcgacaaagcttcagatgttatggaatgacttccaa

SEQ ID NO: 43587 - DNA, 96 bp, Fusarium phaseoli
  misc_feature: 45
ttgcctttgttcctcttttactcacactacttcccagcatattagcgggcagattgtttgaaaacctcatacaagtagaaatggcgctattaaaga

SEQ ID NO: 43588 - DNA, 96 bp, Fusarium phaseoli
  misc_feature: 45
agtgaacaaaaaaaaaggaaaaacaaaaacaattaaaagaacagagtagaaaagaaaataaaagaaaaaggagctggtgcattaggacatatttaa

SEQ ID NO: 43589 - DNA, 96 bp, Fusarium phaseoli
  misc_feature: 45
tgtggtgaaggttagggggagtggttgagttgagggttagggttaagtggttgtggtgaaggttagggggagtggttgtggtgaaggttagggggg

SEQ ID NO: 43590 - DNA, 96 bp, Fusarium phaseoli
  misc_feature: 45
tggtctggattgtggctgtatcttggttgcatgcctctttggtggcatctctcttggtggcatctctcttggtggcatctctcttggtcgcatctc

SEQ ID NO: 43591 - DNA, 96 bp, Fusarium phaseoli
  misc_feature: 45
tggattgtggctgtatcttggttgcatgcctctttggtggcatctctcttggtggcatctctcttggtggcatctctcttggtcgcatctctcttg

SEQ ID NO: 43592 - DNA, 96 bp, Fusarium phaseoli
  misc_feature: 45
aacatcggccaaaatgccccatcttctgcccactggcccccctgccctcgccgttacatacggcaacggcactgtcacgctgcgtctctgcctcca

SEQ ID NO: 43593 - DNA, 96 bp, Fusarium phaseoli
  misc_feature: 45
gtctttaatagcgccatttctacttgtatgaggttttcaaacaatctgcccgctaatatgctgggaagtagtgtgagtaaaagaggaacaaaggca

SEQ ID NO: 43594 - DNA, 96 bp, Fusarium phaseoli
  misc_feature: 45
tgcctaggttttcgtttgacccgggaagtcaagaggtaagcgggaggttatgaaggttgccggagagcaaggggcaaaagggcgggggcagttagg

SEQ ID NO: 43595 - DNA, 96 bp, Fusarium phaseoli
  misc_feature: 45
tgcaggttctctcgaccctgagaagacttttgcttgtggttcgcaagataggtggcacaacgaatcatagacgccttaaactgaatgtcggtgtga

SEQ ID NO: 43596 - DNA, 96 bp, Fusarium phaseoli
  misc_feature: 45
aacggtcagatcgagaaggcaacagaactgctagagcatgtggttgcgattcaggagaagacattagcggagaatcacccaaatcgactggcatca

SEQ ID NO: 43597 - DNA, 96 bp, Fusarium phaseoli
  misc_feature: 45
tgacgtttggagaatccttcaggtctgtcgccaattggaaaccagacatctacgtctcgctcatcctggaatttacgaagcatttcactctgctcc

SEQ ID NO: 43598 - DNA, 96 bp, Fusarium phaseoli
  misc_feature: 45
tcgagattacgtgggcgccctcactgatgcgctgtccttgaagtgcagtggagcacatgctcaaccaccggtcatgccgtattataccgtgccgtc

SEQ ID NO: 43599 - DNA, 96 bp, Fusarium phaseoli
  misc_feature: 45
tcctatcctatcctatcctatcctagctgcgcggcggattcgctagcaaatccaatgggtttcccatacaaaaaaaaaaggcgctatcctagctgc

SEQ ID NO: 43600 - DNA, 96 bp, Fusarium phaseoli
  misc_feature: 45
tcccagcgaaacaggcatactgtaacagacccggggcggcgtttggatctgcgcctgcatctagcagcatcgataggatctcagaattctgcgtat

SEQ ID NO: 43601 - DNA, 96 bp, Fusarium phaseoli
  misc_feature: 45
ggcagggcgtaagggtgacggggaaccaaagagtaagtaaaggcctgaccctgactctgaccttgaccttgaccttgacccttaggccttagtata

SEQ ID NO: 43602 - DNA, 96 bp, Fusarium phaseoli
  misc_feature: 45
gtgaaggttagggggagtggttgtggtgaaggttagggggagtggttgagttgagggttagggggagtggttgagataaagtttagagtgaagggg

SEQ ID NO: 43603 - DNA, 96 bp, Fusarium phaseoli
  misc_feature: 45
gagagatgcgaccaagagagatgcgaccaagagagatgccaccaagagagatgccaccaagagagatgccaccaaagaggcatgcaaccaagatac

SEQ ID NO: 43604 - DNA, 96 bp, Fusarium phaseoli
  misc_feature: 45
gcgtcccagcgaaacaggcatactgtaacagacccggggcggcgtttggatctgcgcctgcatctagcagcatcgataggatctcagaattctgcg

SEQ ID NO: 43605 - DNA, 96 bp, Fusarium phaseoli
  misc_feature: 45
gcctctttggtggcatctctcttggtggcatctctcttggtggcatctctcttggtcgcatctctcttggtcgcatctctcttggtcgcatgcttc

SEQ ID NO: 43606 - DNA, 96 bp, Fusarium phaseoli
  misc_feature: 45
gatttggcggatttggtcgaggtgcacgtcgatgatccggaggcacatccattagacgaggaccgagtggacggggtgacattgcaggtcgtcatg

SEQ ID NO: 43607 - DNA, 96 bp, Fusarium phaseoli
  misc_feature: 45
atgtagacatgcagggtacctaactgttgctagataagtgcataggtctgggctagctgcatttttgcgaatcaggccttcttttgctagttaatc

SEQ ID NO: 43608 - DNA, 96 bp, Fusarium phaseoli
  misc_feature: 45
gatggggcattttggccgatgtttccagtaggcgttagcacccaccgagagcagtaaggaggatggaggtgaaataccgagttttgagagtggggg

SEQ ID NO: 43609 - DNA, 96 bp, Fusarium phaseoli
  misc_feature: 45
cttaacgtcctcattattattattatctcctcccaccttatatataataccacacccactccgcttatctaactctaccttaaaattcgccgtatc

SEQ ID NO: 43610 - DNA, 96 bp, Fusarium phaseoli
  misc_feature: 45
ctgtaacagacccggggcggcgtttggatctgcgcctgcatctagcagcatcgataggatctcagaattctgcgtatgcacagctgcagcgagcgg

SEQ ID NO: 43611 - DNA, 96 bp, Fusarium phaseoli
  misc_feature: 45
ctgcagctgtgcatacgcagaattctgagatcctatcgatgctgctagatgcaggcgcagatccaaacgccgccccgggtctgttacagtatgcct

SEQ ID NO: 43612 - DNA, 96 bp, Fusarium phaseoli
  misc_feature: 45
cctagctgcgcggcggattcgctagcaaatccaatgggtttcccatacaaaaaaaaaaggcgctatcctatcctagctgcgcggcggattcgctag

SEQ ID NO: 43613 - DNA, 96 bp, Fusarium phaseoli
  misc_feature: 45
cgtcccagcgaaacaggcatactgtaacagacccggggcggcgtttggatctgcgcctgcatctagcagcatcgataggatctcagaattctgcgt

SEQ ID NO: 43614 - DNA, 96 bp, Fusarium phaseoli
  misc_feature: 45
cagtcgatttgggtgattctccgctaatgtcttctcctgaatcgcaaccacatgctctagcagttctgttgccttctcgatctgaccgttggctcg

SEQ ID NO: 43615 - DNA, 96 bp, Fusarium phaseoli
  misc_feature: 45
aggggaaacagaaccaactcggtgatcgtccatttcaacagctccttgtcatcgtatttgatttgaatctgaagagtgagataagcatcccgcagg

SEQ ID NO: 43616 - DNA, 96 bp, Fusarium phaseoli
  misc_feature: 45
agtcgatttgggtgattctccgctaatgtcttctcctgaatcgcaaccacatgctctagcagttctgttgccttctcgatctgaccgttggctcgg

SEQ ID NO: 43617 - DNA, 96 bp, Fusarium phaseoli
  misc_feature: 45
aagttgtgagcatgcagctcagtgagacattcgcttatctgcgacattcgcttatcacgtacgttatcagactgctccgaattgagacggcgactg

SEQ ID NO: 43618 - DNA, 96 bp, Fusarium phaseoli
  misc_feature: 45
agacgacgattaccagtttgacttccctgacgactataataatttgaaaatgggtaaggatatgaagtcagcgtcggcgattcgattgataccaat

SEQ ID NO: 43619 - DNA, 96 bp, Fusarium phaseoli
  misc_feature: 44
gtaaagaagcatgcgaccaagagagatgcgaccaagagagatgcgaccaagagagatgccaccaagagagatgccaccaagagagatgccaccaaa

SEQ ID NO: 43620 - DNA, 96 bp, Fusarium phaseoli
  misc_feature: 44
agaggacatttagatggccaaaagccaacgaactgttataccaaacgatgtttctaaaatggcatcatgtcggggatcacggcgccgacagtgcaa

SEQ ID NO: 43621 - DNA, 96 bp, Fusarium phaseoli
  misc_feature: 44
ttaaactaaccctcataaccacccgctccctccctcgcttcctaggttatactaaggcctaagggtcaaggtcaaggtcaaggtcagagtcagggt

SEQ ID NO: 43622 - DNA, 96 bp, Fusarium phaseoli
  misc_feature: 44
gttactggcaaccaggggccgcgcctgctggttgttactggtcaactccctaccacggaacgtcataaaaaaacaccaccaccagctcagaacaca

SEQ ID NO: 43623 - DNA, 96 bp, Fusarium phaseoli
  misc_feature: 44
tggtctttaatagcgccatttctacttgtatgaggttttcaaacaatctgcccgctaatatgctgggaagtagtgtgagtaaaagaggaacaaagg

SEQ ID NO: 43624 - DNA, 96 bp, Fusarium phaseoli
  misc_feature: 44
gattttggacatctgcaaagtgatgattctagcctctgctgaatcgtgccgctataaatatccatcgctatggccaaagatctttcacactcatca

SEQ ID NO: 43625 - DNA, 96 bp, Fusarium phaseoli
  misc_feature: 44
tatcctatcctatcctatcctatcctagctgcgcggcggattcgctagcaaatccaatgggtttcccatacaaaaaaaaaaggcgctatcctagct

SEQ ID NO: 43626 - DNA, 96 bp, Fusarium phaseoli
  misc_feature: 44
tactggcaaccaggggccgcgcctgctggttgttactggtcaactccctaccacggaacgtcataaaaaaacaccaccaccagctcagaacacatt

SEQ ID NO: 43627 - DNA, 96 bp, Fusarium phaseoli
  misc_feature: 44
agggcagggcgtaagggtgacggggaaccaaagagtaagtaaaggcctgaccctgactctgaccttgaccttgaccttgacccttaggccttagta

SEQ ID NO: 43628 - DNA, 96 bp, Fusarium phaseoli
  misc_feature: 44
taacgtcctcattattattattatctcctcccaccttatatataataccacacccactccgcttatctaactctaccttaaaattcgccgtatctt

SEQ ID NO: 43629 - DNA, 96 bp, Fusarium phaseoli
  misc_feature: 44
gtggtgaaggttagggggagtggttgagttgagggttagggttaagtggttgtggtgaaggttagggggagtggttgtggtgaaggttaggggggg

SEQ ID NO: 43630 - DNA, 96 bp, Fusarium phaseoli
  misc_feature: 44
ggggaaccaaagagtaagtaaaggcctgaccctgactctgaccttgaccttgaccttgacccttaggccttagtataacctaggaagcgagggagg

SEQ ID NO: 43631 - DNA, 96 bp, Fusarium phaseoli
  misc_feature: 44
atctctcttggtggcatctctcttggtggcatctctcttggtcgcatctctcttggtcgcatctctcttggtcgcatgcttctttactggcatatc

SEQ ID NO: 43632 - DNA, 96 bp, Fusarium phaseoli
  misc_feature: 44
ctggtctggattgtggctgtatcttggttgcatgcctctttggtggcatctctcttggtggcatctctcttggtggcatctctcttggtcgcatct

SEQ ID NO: 43633 - DNA, 96 bp, Fusarium phaseoli
  misc_feature: 44
ccaagatgcaggttctctcgaccctgagaagacttttgcttgtggttcgcaagataggtggcacaacgaatcatagacgccttaaactgaatgtcg

SEQ ID NO: 43634 - DNA, 96 bp, Fusarium phaseoli
  misc_feature: 44
attttggacatctgcaaagtgatgattctagcctctgctgaatcgtgccgctataaatatccatcgctatggccaaagatctttcacactcatcat

SEQ ID NO: 43635 - DNA, 96 bp, Fusarium phaseoli
  misc_feature: 44
ataaatcaagtctaacacctgtaatgtgggggcgaaataaatcaattcagtagaattagtctcgaaacatcaccaccgctcatatcgataccacat

SEQ ID NO: 43636 - DNA, 96 bp, Fusarium phaseoli
  misc_feature: 44
aagagagatgcgaccaagagagatgcgaccaagagagatgccaccaagagagatgccaccaagagagatgccaccaaagaggcatgcaaccaagat

SEQ ID NO: 43637 - DNA, 96 bp, Fusarium phaseoli
  misc_feature: 44
ataaagggttagggtatagggtaattaattaaatagttagggttaataaagaattaaaggttagagttaataaagggtttaaaggttagagtttat

SEQ ID NO: 43638 - DNA, 96 bp, Fusarium phaseoli
  misc_feature: 43
gaataagacaagaatcgaatcacataaagtcaatatcttcaatcaaactagtagagccaaacaagaaaaaagaaagataaaaaagaaaaagaaaaa

SEQ ID NO: 43639 - DNA, 96 bp, Fusarium phaseoli
  misc_feature: 43
cctggtctttaatagcgccatttctacttgtatgaggttttcaaacaatctgcccgctaatatgctgggaagtagtgtgagtaaaagaggaacaaa

SEQ ID NO: 43640 - DNA, 96 bp, Fusarium phaseoli
  misc_feature: 43
gcagggcgtaagggtgacggggaaccaaagagtaagtaaaggcctgaccctgactctgaccttgaccttgaccttgacccttaggccttagtataa

SEQ ID NO: 43641 - DNA, 96 bp, Fusarium phaseoli
  misc_feature: 43
tatctattccttacttaacgtcctcattattattattatctcctcccaccttatatataataccacacccactccgcttatctaactctaccttaa

SEQ ID NO: 43642 - DNA, 96 bp, Fusarium phaseoli
  misc_feature: 43
actccccctaaccttcaccacaaccactccccctaaccttcaccacaaccacttaaccctaaccctcaactcaaccactccccctaaccttcacca

SEQ ID NO: 43643 - DNA, 96 bp, Fusarium phaseoli
  misc_feature: 43
agagcctgagattgatgactggggttcttttgtcgtaaagcctcaggagaaaaagaagcacgcgacaaagcttcagatgttatggaatgacttcca

SEQ ID NO: 43644 - DNA, 96 bp, Fusarium phaseoli
  misc_feature: 43
tgcccccgcccttttgccccttgctctccggcaaccttcataacctcccgcttacctcttgacttcccgggtcaaacgaaaacctaggcattgcct

SEQ ID NO: 43645 - DNA, 96 bp, Fusarium phaseoli
  misc_feature: 43
tctggtctggattgtggctgtatcttggttgcatgcctctttggtggcatctctcttggtggcatctctcttggtggcatctctcttggtcgcatc

SEQ ID NO: 43646 - DNA, 96 bp, Fusarium phaseoli
  misc_feature: 43
gtcccagcgaaacaggcatactgtaacagacccggggcggcgtttggatctgcgcctgcatctagcagcatcgataggatctcagaattctgcgta

SEQ ID NO: 43647 - DNA, 96 bp, Fusarium phaseoli
  misc_feature: 43
gaggtagtatttatgagaagtgaatagcaatgagcccggaggttattgccgagcaagtgattagagaagtgaatgaagtatagtcaccggccggta

SEQ ID NO: 43648 - DNA, 96 bp, Fusarium phaseoli
  misc_feature: 43
gaaggttagggggagtggttgtggtgaaggttagggggagtggttgagttgagggttagggggagtggttgagataaagtttagagtgaaggggta

SEQ ID NO: 43649 - DNA, 96 bp, Fusarium phaseoli
  misc_feature: 43
taagaggacatttagatggccaaaagccaacgaactgttataccaaacgatgtttctaaaatggcatcatgtcggggatcacggcgccgacagtgc

SEQ ID NO: 43650 - DNA, 96 bp, Fusarium phaseoli
  misc_feature: 43
acggtcagatcgagaaggcaacagaactgctagagcatgtggttgcgattcaggagaagacattagcggagaatcacccaaatcgactggcatcac

SEQ ID NO: 43651 - DNA, 96 bp, Fusarium phaseoli
  misc_feature: 43
aagggtcaaggtcaaggtcaaggtcagagtcagggtcaggcctttacttactctttggttccccgtcacccttacgccctgcccttgctcctcgcc

SEQ ID NO: 43652 - DNA, 96 bp, Fusarium phaseoli
  misc_feature: 43
cagagcctgagattgatgactggggttcttttgtcgtaaagcctcaggagaaaaagaagcacgcgacaaagcttcagatgttatggaatgacttcc

SEQ ID NO: 43653 - DNA, 96 bp, Fusarium phaseoli
  misc_feature: 43
ggaacacattattccggatcatatgggcgcagataggttggatatataaatggtttggagcattagttgattagggtggaaggaccggcggggggc

SEQ ID NO: 43654 - DNA, 96 bp, Fusarium phaseoli
  misc_feature: 43
atttgtatggtacagttttgtacgtacagaaaagttgtacgtacgtacagctacccaaaatacagtacgtacgtacgtacgtgtacagaaaaatgc

SEQ ID NO: 43655 - DNA, 96 bp, Fusarium phaseoli
  misc_feature: 43
aataagacaagaatcgaatcacataaagtcaatatcttcaatcaaactagtagagccaaacaagaaaaaagaaagataaaaaagaaaaagaaaaag

SEQ ID NO: 43656 - DNA, 96 bp, Fusarium phaseoli
  misc_feature: 43
ctctatgcacgagttcctgaccatgtatctttaacgatctgtccttccccaactgggcctcagttagaatggaagttggtaagaatccgaaagcct

SEQ ID NO: 43657 - DNA, 96 bp, Fusarium phaseoli
  misc_feature: 43
aaaaaaaggcgctatcctagctgcgcggcggattcgctagcaaatccaatgggtttcccatacaaaaaaaaaaggcgctatcctagctgcgcggcg

SEQ ID NO: 43658 - DNA, 96 bp, Fusarium phaseoli
  misc_feature: 43
cgaacccgtatgcaatggtttcggtcggtggttattcggtcgagtggtggagggagaaaggaagaattaaggggagagttcgagaagagagggggg

SEQ ID NO: 43659 - DNA, 96 bp, Fusarium phaseoli
  misc_feature: 43
agtgaatgaagtatagtcaccggccgttatttataaaatacgaatagtgaaggtgcaagttaaataagcaagccggcccaagaaggaggcccgggg

SEQ ID NO: 43660 - DNA, 96 bp, Fusarium phaseoli
  misc_feature: 43
acggcggagaggttacggtcgagatatcgagaggccgaacgaacccgtatgcaatggtttcggtcggtggttattcggtcgagtggtggagggggg

SEQ ID NO: 43661 - DNA, 96 bp, Fusarium phaseoli
  misc_feature: 43
ccagtaccatcatatagcgaaaaacatcaggccctcaaagtcgttgccatatatgtatgtttttttttctttatgggcgtcgacatttacacattt

SEQ ID NO: 43662 - DNA, 96 bp, Fusarium phaseoli
  misc_feature: 43
atcgagattacgtgggcgccctcactgatgcgctgtccttgaagtgcagtggagcacatgctcaaccaccggtcatgccgtattataccgtgccgt

SEQ ID NO: 43663 - DNA, 96 bp, Fusarium phaseoli
  misc_feature: 43
acgacgattaccagtttgacttccctgacgactataataatttgaaaatgggtaaggatatgaagtcagcgtcggcgattcgattgataccaatat

SEQ ID NO: 43664 - DNA, 96 bp, Fusarium phaseoli
  misc_feature: 43
agggttagggtatagggtaattaattaaatagttagggttaataaagaattaaaggttagagttaataaagggtttaaaggttagagtttatagtt

SEQ ID NO: 43665 - DNA, 96 bp, Fusarium phaseoli
  misc_feature: 43
aagggcagggcgtaagggtgacggggaaccaaagagtaagtaaaggcctgaccctgactctgaccttgaccttgaccttgacccttaggccttagt

SEQ ID NO: 43666 - DNA, 96 bp, Fusarium phaseoli
  misc_feature: 42
tactagtccctaactgcccccgcccttttgccccttgctctccggcaaccttcataacctcccgcttacctcttgacttcccgggtcaaacgaaaa

SEQ ID NO: 43667 - DNA, 96 bp, Fusarium phaseoli
  misc_feature: 42
gttaagggtaaggttaagggtaaggttaagggtaaggttaaggatcagtgtggtcttcagggttggggttggggcggtcgtgaaagtgtcagcgaa

SEQ ID NO: 43668 - DNA, 96 bp, Fusarium phaseoli
  misc_feature: 42
ttcaccacaaccactccccctaaccttcaccacaaccactccccctaaccttcaccacaaccacttaaccctaaccctcaactcaaccactccccc

SEQ ID NO: 43669 - DNA, 96 bp, Fusarium phaseoli
  misc_feature: 42
agtgaatagcaatgagcccggaggttattgccgagcaagtgattagagaagtgaatgaagtatagtcaccggccgttatttataaaatacgaataa

SEQ ID NO: 43670 - DNA, 96 bp, Fusarium phaseoli
  misc_feature: 42
ctggacagcaccaacactcgattgtcctcttccatctcttccatctcttcctcgtcctcctcgtcctcctcgtccggtttattgagctgctgcgca

SEQ ID NO: 43671 - DNA, 96 bp, Fusarium phaseoli
  misc_feature: 42
caaataagatctgttatgtaagctcgatgtgtgtgagtgtaagagagatctctcttcaatccacagggtgtcgcactgagcgtgctaaaaggatca

SEQ ID NO: 43672 - DNA, 96 bp, Fusarium phaseoli
  misc_feature: 42
gacgatatgccagtaaagaagcatgcgaccaagagagatgcgaccaagagagatgcgaccaagagagatgccaccaagagagatgccaccaagaga

SEQ ID NO: 43673 - DNA, 96 bp, Fusarium phaseoli
  misc_feature: 42
tctatgcacgagttcctgaccatgtatctttaacgatctgtccttccccaactgggcctcagttagaatggaagttggtaagaatccgaaagccta

SEQ ID NO: 43674 - DNA, 96 bp, Fusarium phaseoli
  misc_feature: 42
tctagtcacgtcaggaattggtccttgttgtctccttggagtggcaagatctcgatctagtcgcagaagttggtaggggctgtacctggtatcttt

SEQ ID NO: 43675 - DNA, 96 bp, Fusarium phaseoli
  misc_feature: 42
acggcggagaggttacggtcgagatatcgagaggccgaacgaacccgtatgcaatggtttcggtcggtggttattcggtcgagtggtggaggggga

SEQ ID NO: 43676 - DNA, 96 bp, Fusarium phaseoli
  misc_feature: 42
agagagatgcgaccaagagagatgcgaccaagagagatgccaccaagagagatgccaccaagagagatgccaccaaagaggcatgcaaccaagata

SEQ ID NO: 43677 - DNA, 96 bp, Fusarium phaseoli
  misc_feature: 42
ggcgtaagggtgacggggaaccaaagagtaagtaaaggcctgaccctgactctgaccttgaccttgaccttgacccttaggccttagtataaccta

SEQ ID NO: 43678 - DNA, 96 bp, Fusarium phaseoli
  misc_feature: 42
taatattcactttatccctaaccgtaaattaacctcctacttctcttataatccgcctttatcttaactacctcatcttaactaccttatcttgac

SEQ ID NO: 43679 - DNA, 96 bp, Fusarium phaseoli
  misc_feature: 42
gttgccggagagcaaggggcaaaagggcgggggcagttagggactagtaacctctggcgttaagagttagaaaagtgaaggtaaccgctactgtct

SEQ ID NO: 43680 - DNA, 96 bp, Fusarium phaseoli
  misc_feature: 42
ggttactggcaaccaggggccgcgcctgctggttgttactggtcaactccctaccacggaacgtcataaaaaaacaccaccaccagctcagaacac

SEQ ID NO: 43681 - DNA, 96 bp, Fusarium phaseoli
  misc_feature: 42
gtgaaggttagggggagtggttgagttgagggttagggttaagtggttgtggtgaaggttagggggagtggttgtggtgaaggttagggggagtgg

SEQ ID NO: 43682 - DNA, 96 bp, Fusarium phaseoli
  misc_feature: 42
caaattaaatgtgccttggtcaaggcacgtttacaataattggtagggttgtcgtccacaccatcgtcgtcttcttcgactccatccattgtcgac

SEQ ID NO: 43683 - DNA, 96 bp, Fusarium phaseoli
  misc_feature: 42
agggcgtaagggtgacggggaaccaaagagtaagtaaaggcctgaccctgactctgaccttgaccttgaccttgacccttaggccttagtataacc

SEQ ID NO: 43684 - DNA, 96 bp, Fusarium phaseoli
  misc_feature: 42
ctaccagatcgagattacgtgggcgccctcactgatgcgctgtccttgaagtgcagtggagcacatgctcaaccaccggtcatgccgtattatacc

SEQ ID NO: 43685 - DNA, 96 bp, Fusarium phaseoli
  misc_feature: 42
cgaacctcgcattggaaccgggctcattggtaccatcctcatcaccacgatcatcgccaccgccgccaatgccgtcctggctgccccggctctccc

SEQ ID NO: 43686 - DNA, 96 bp, Fusarium phaseoli
  misc_feature: 42
agggtgacggggaaccaaagagtaagtaaaggcctgaccctgactctgaccttgaccttgaccttgacccttaggccttagtataacctaggaagc

SEQ ID NO: 43687 - DNA, 96 bp, Fusarium phaseoli
  misc_feature: 42
gcgtaagggtgacggggaaccaaagagtaagtaaaggcctgaccctgactctgaccttgaccttgaccttgacccttaggccttagtataacctag

SEQ ID NO: 43688 - DNA, 96 bp, Fusarium phaseoli
  misc_feature: 42
cttttgccttttcagacggaaaattctaagcttacgatcaaagtgaaagttccaaaacttctggctcaagtgttggatatcgccaagtgacaaggc

SEQ ID NO: 43689 - DNA, 96 bp, Fusarium phaseoli
  misc_feature: 42
gcctaggttttcgtttgacccgggaagtcaagaggtaagcgggaggttatgaaggttgccggagagcaaggggcaaaagggcgggggcagttaggg

SEQ ID NO: 43690 - DNA, 96 bp, Fusarium phaseoli
  misc_feature: 42
aaaaaaaaggcgctatcctagctgcgcggcggattcgctagcaaatccaatgggtttcccatacaaaaaaaaaaggcgctatcctagctgcgcggc

SEQ ID NO: 43691 - DNA, 96 bp, Fusarium phaseoli
  misc_feature: 42
gcaagacgcagcgattgagggtgtggatcgatcagggtcgtttaatcgtggccacgaacgcgttagggttgggcgtcgacgtgccagatgtgcggg

SEQ ID NO: 43692 - DNA, 96 bp, Fusarium phaseoli
  misc_feature: 42
cagagtgaaatgcttcgtaaattccaggatgagcgagacgtagatgtctggtttccaattggcgacagacctgaaggattctccaaacgtcagctc

SEQ ID NO: 43693 - DNA, 96 bp, Fusarium phaseoli
  misc_feature: 42
ctggtctttaatagcgccatttctacttgtatgaggttttcaaacaatctgcccgctaatatgctgggaagtagtgtgagtaaaagaggaacaaag

SEQ ID NO: 43694 - DNA, 96 bp, Fusarium phaseoli
  misc_feature: 42
ctctttggtggcatctctcttggtggcatctctcttggtggcatctctcttggtcgcatctctcttggtcgcatctctcttggtcgcatgcttctt

SEQ ID NO: 43695 - DNA, 96 bp, Fusarium phaseoli
  misc_feature: 42
ctctggtctggattgtggctgtatcttggttgcatgcctctttggtggcatctctcttggtggcatctctcttggtggcatctctcttggtcgcat

SEQ ID NO: 43696 - DNA, 96 bp, Fusarium phaseoli
  misc_feature: 42
ctaatattaccgtaatcctctttatatactttatcctcctcccccgttatctatctacctccctgctctatccataacctatctaatcgtatcact

SEQ ID NO: 43697 - DNA, 96 bp, Fusarium phaseoli
  misc_feature: 42
cgctcgctgcagctgtgcatacgcagaattctgagatcctatcgatgctgctagatgcaggcgcagatccaaacgccgccccgggtctgttacagt

SEQ ID NO: 43698 - DNA, 96 bp, Fusarium phaseoli
  misc_feature: 42
cgatacaaataacccaccgggcctccttcttgggccggcttgcttatttaacttgcaccttcactattcgtattttataaataacggccgggggct

SEQ ID NO: 43699 - DNA, 96 bp, Fusarium phaseoli
  misc_feature: 42
ataaggtagttaagatgaggtagttaagataaaggcggattataagagaagtaggaggttaatttacggttagggataaagtgaatattaaatatg

SEQ ID NO: 43700 - DNA, 96 bp, Fusarium phaseoli
  misc_feature: 42
caagacgcagcgattgagggtgtggatcgatcagggtcgtttaatcgtggccacgaacgcgttagggttgggcgtcgacgtgccagatgtgcgggt

SEQ ID NO: 43701 - DNA, 96 bp, Fusarium phaseoli
  misc_feature: 42
aaattaaatgtgccttggtcaaggcacgtttacaataattggtagggttgtcgtccacaccatcgtcgtcttcttcgactccatccattgtcgact

SEQ ID NO: 43702 - DNA, 96 bp, Fusarium phaseoli
  misc_feature: 42
actggcaaccaggggccgcgcctgctggttgttactggtcaactccctaccacggaacgtcataaaaaaacaccaccaccagctcagaacacattt

SEQ ID NO: 43703 - DNA, 96 bp, Fusarium phaseoli
  misc_feature: 42
aagggttagggtatagggtaattaattaaatagttagggttaataaagaattaaaggttagagttaataaagggtttaaaggttagagtttatagt

SEQ ID NO: 43704 - DNA, 96 bp, Fusarium phaseoli
  misc_feature: 41
ggaaatttgtatggtacagttttgtacgtacagaaaagttgtacgtacgtacagctacccaaaatacagtacgtacgtacgtacgtgtacagaaaa

SEQ ID NO: 43705 - DNA, 96 bp, Fusarium phaseoli
  misc_feature: 41
tttgcactgtcggcgccgtgatccccgacatgatgccattttagaaacatcgtttggtataacagttcgttggcttttggccatctaaatgtcctc

SEQ ID NO: 43706 - DNA, 96 bp, Fusarium phaseoli
  misc_feature: 41
atctattccttacttaacgtcctcattattattattatctcctcccaccttatatataataccacacccactccgcttatctaactctaccttaaa

SEQ ID NO: 43707 - DNA, 96 bp, Fusarium phaseoli
  misc_feature: 41
catacaaaaaaaaaaggcgctatcctagctgcgcggcggattcgctagcaaatccaatgggtttcccatacaaaaaaaaaaggcgctaatgaacaa

SEQ ID NO: 43708 - DNA, 96 bp, Fusarium phaseoli
  misc_feature: 41
tacagacgatatgccagtaaagaagcatgcgaccaagagagatgcgaccaagagagatgcgaccaagagagatgccaccaagagagatgccaccaa

SEQ ID NO: 43709 - DNA, 96 bp, Fusarium phaseoli
  misc_feature: 41
ttcgtatcgcggctgatcaaggagattggcgtggagcttgattcagcacggctgaacctgtggtgcgataaccagcagacaattcgtctcgtcaat

SEQ ID NO: 43710 - DNA, 96 bp, Fusarium phaseoli
  misc_feature: 41
cataaatcaagtctaacacctgtaatgtgggggcgaaataaatcaattcagtagaattagtctcgaaacatcaccaccgctcatatcgataccaca

SEQ ID NO: 43711 - DNA, 96 bp, Fusarium phaseoli
  misc_feature: 41
tgtagacatgcagggtacctaactgttgctagataagtgcataggtctgggctagctgcatttttgcgaatcaggccttcttttgctagttaatcc

SEQ ID NO: 43712 - DNA, 96 bp, Fusarium phaseoli
  misc_feature: 41
tggacagcaccaacactcgattgtcctcttccatctcttccatctcttcctcgtcctcctcgtcctcctcgtccggtttattgagctgctgcgcat

SEQ ID NO: 43713 - DNA, 96 bp, Fusarium phaseoli
  misc_feature: 41
tgagggttagggggagtggttgagataaagtttagagtgaagggttagaaagaggtgggtttgagaagtggtaaaaattaaaaagaagggggggtg

SEQ ID NO: 43714 - DNA, 96 bp, Fusarium phaseoli
  misc_feature: 41
tgacggggaaccaaagagtaagtaaaggcctgaccctgactctgaccttgaccttgaccttgacccttaggccttagtataacctaggaagcgagg

SEQ ID NO: 43715 - DNA, 96 bp, Fusarium phaseoli
  misc_feature: 41
taacaccttagtccccttaaactaaccctcataaccacccgctccctccctcgcttcctaggttatactaaggcctaagggtcaaggtcaaggtca

SEQ ID NO: 43716 - DNA, 96 bp, Fusarium phaseoli
  misc_feature: 41
tgaaggttagggggagtggttgtggtgaaggttagggggagtggttgagttgagggttagggggagtggttgagataaagtttagagtgaaggggt

SEQ ID NO: 43717 - DNA, 96 bp, Fusarium phaseoli
  misc_feature: 41
gagaggagagttgggaaagtgagactaaccgctgctgtccgggggagaagagttggacaagtgaggctaaccgctattgtccaggagaggaggaga

SEQ ID NO: 43718 - DNA, 96 bp, Fusarium phaseoli
  misc_feature: 41
tccctcgcttcctaggttatactaaggcctaagggtcaaggtcaaggtcaaggtcagagtcagggtcaggcctttacttactctttggttccccgt

SEQ ID NO: 43719 - DNA, 96 bp, Fusarium phaseoli
  misc_feature: 41
tcatgacgtcccgtcaatacgcagtcgcgtaacaaatactcgggctccaacctcgtaatgtgcctccgcacaaacagaagatgcaaaaccagcctc

SEQ ID NO: 43720 - DNA, 96 bp, Fusarium phaseoli
  misc_feature: 41
agttgtgagcatgcagctcagtgagacattcgcttatctgcgacattcgcttatcacgtacgttatcagactgctccgaattgagacggcgactga

SEQ ID NO: 43721 - DNA, 96 bp, Fusarium phaseoli
  misc_feature: 41
agcctgagattgatgactggggttcttttgtcgtaaagcctcaggagaaaaagaagcacgcgacaaagcttcagatgttatggaatgacttccaac

SEQ ID NO: 43722 - DNA, 96 bp, Fusarium phaseoli
  misc_feature: 41
gttctccctactagatttcaacgatgctccatttcgcggcatcgttcactcccgtcctcaccaccatgagccatgcgaggcccgtcagctggcacg

SEQ ID NO: 43723 - DNA, 96 bp, Fusarium phaseoli
  misc_feature: 41
cagggcgtaagggtgacggggaaccaaagagtaagtaaaggcctgaccctgactctgaccttgaccttgaccttgacccttaggccttagtataac

SEQ ID NO: 43724 - DNA, 96 bp, Fusarium phaseoli
  misc_feature: 41
cctaatattaccgtaatcctctttatatactttatcctcctcccccgttatctatctacctccctgctctatccataacctatctaatcgtatcac

SEQ ID NO: 43725 - DNA, 96 bp, Fusarium phaseoli
  misc_feature: 41
cctaccagatcgagattacgtgggcgccctcactgatgcgctgtccttgaagtgcagtggagcacatgctcaaccaccggtcatgccgtattatac

SEQ ID NO: 43726 - DNA, 96 bp, Fusarium phaseoli
  misc_feature: 41
ctttcggattcttaccaacttccattctaactgaggcccagttggggaaggacagatcgttaaagatacatggtcaggaactcgtgcatagagacc

SEQ ID NO: 43727 - DNA, 96 bp, Fusarium phaseoli
  misc_feature: 41
ggtctagtcacgtcaggaattggtccttgttgtctccttggagtggcaagatctcgatctagtcgcagaagttggtaggggctgtacctggtatct

SEQ ID NO: 43728 - DNA, 96 bp, Fusarium phaseoli
  misc_feature: 41
ggtagagattgattgatcgacgtgaggctcggccatcgaaaggacgaagttccctcaatttcatcggcgtcttcggaaaatttgcatccttcgtat

SEQ ID NO: 43729 - DNA, 96 bp, Fusarium phaseoli
  misc_feature: 41
ggggcattttggccgatgtttccagtaggcgttagcacccaccgagagcagtaaggaggatggaggtgaaataccgagttttgagagtggggtggg

SEQ ID NO: 43730 - DNA, 96 bp, Fusarium phaseoli
  misc_feature: 41
ccctccctcgcttcctaggttatactaaggcctaagggtcaaggtcaaggtcaaggtcagagtcagggtcaggcctttacttactctttggttccc

SEQ ID NO: 43731 - DNA, 96 bp, Fusarium phaseoli
  misc_feature: 41
ggaagcgagggagggagcgggtggttatgagggttagtttaaggggactaaggtgttatttacctgtaaccctaaccctaaggcaatgcctaggtt

SEQ ID NO: 43732 - DNA, 96 bp, Fusarium phaseoli
  misc_feature: 41
gccaaagatctttcacactcatcatctttcatcatgcaagagcctgttcctcacggagtgttcgcggccttcactctatcgactgaacttcaacat

SEQ ID NO: 43733 - DNA, 96 bp, Fusarium phaseoli
  misc_feature: 41
ccaaagatctttcacactcatcatctttcatcatgcaagagcctgttcctcacggagtgttcgcggccttcactctatcgactgaacttcaacatc

SEQ ID NO: 43734 - DNA, 96 bp, Fusarium phaseoli
  misc_feature: 41
gatcgagattacgtgggcgccctcactgatgcgctgtccttgaagtgcagtggagcacatgctcaaccaccggtcatgccgtattataccgtgccg

SEQ ID NO: 43735 - DNA, 96 bp, Fusarium phaseoli
  misc_feature: 41
acagacgatatgccagtaaagaagcatgcgaccaagagagatgcgaccaagagagatgcgaccaagagagatgccaccaagagagatgccaccaag

SEQ ID NO: 43736 - DNA, 96 bp, Fusarium phaseoli
  misc_feature: 41
cgtaagggtgacggggaaccaaagagtaagtaaaggcctgaccctgactctgaccttgaccttgaccttgacccttaggccttagtataacctagg

SEQ ID NO: 43737 - DNA, 96 bp, Fusarium phaseoli
  misc_feature: 41
cctatctattccttacttaacgtcctcattattattattatctcctcccaccttatatataataccacacccactccgcttatctaactctacctt

SEQ ID NO: 43738 - DNA, 96 bp, Fusarium phaseoli
  misc_feature: 41
agcaggaggcccacggtcatcagccaaggcggggagaagaagaaaggcggcagccgcatcagacagggccaagtggccagcaaaggaagcagccgg

SEQ ID NO: 43739 - DNA, 96 bp, Fusarium phaseoli
  misc_feature: 41
cagcagcggttagcctcactttcccaactctcctcctctcctggacaatagcggttagcctcacttgtccaactcttctcccccggacagcagcgg

SEQ ID NO: 43740 - DNA, 96 bp, Fusarium phaseoli
  misc_feature: 41
attctgagatcctatcgatgctgctagatgcaggcgcagatccaaacgccgccccgggtctgttacagtatgcctgtttcgctgggacgctcgact

SEQ ID NO: 43741 - DNA, 96 bp, Fusarium phaseoli
  misc_feature: 41
acacattattccggatcatatgggcgcagataggttggatatataaatggtttggagcattagttgattagggtggaaggaccggcgggggggtat

SEQ ID NO: 43742 - DNA, 96 bp, Fusarium phaseoli
  misc_feature: 41
agatccgctctctaggagacgacgattcctactacgatatttcacttggcagctatttctttctttccaagccaagggccgctgtggcaaactctt

SEQ ID NO: 43743 - DNA, 96 bp, Fusarium phaseoli
  misc_feature: 40
aggaaatttgtatggtacagttttgtacgtacagaaaagttgtacgtacgtacagctacccaaaatacagtacgtacgtacgtacgtgtacagaaa

SEQ ID NO: 43744 - DNA, 96 bp, Fusarium phaseoli
  misc_feature: 40
agtaaagaagcatgcgaccaagagagatgcgaccaagagagatgcgaccaagagagatgccaccaagagagatgccaccaagagagatgccaccaa

SEQ ID NO: 43745 - DNA, 96 bp, Fusarium phaseoli
  misc_feature: 40
gcaagggcccaagggccaacagaatgttactctcgataacgctctgtatgttccggaaggatgctcaaacctactgtccgtgtcagcactggagaa

SEQ ID NO: 43746 - DNA, 96 bp, Fusarium phaseoli
  misc_feature: 40
ttactggcaaccaggggccgcgcctgctggttgttactggtcaactccctaccacggaacgtcataaaaaaacaccaccaccagctcagaacacat

SEQ ID NO: 43747 - DNA, 96 bp, Fusarium phaseoli
  misc_feature: 40
ttacgtctttgctcagctacttatcacaatatggcattccactcagctcaaacatgagctacggccgagtcagatccagcaatatattacgttaat

SEQ ID NO: 43748 - DNA, 96 bp, Fusarium phaseoli
  misc_feature: 40
ggtattatatataaggtgggaggagataataataataatgaggacgttaagtaaggaatagataggttagggtaagagggagtataagagggttaa

SEQ ID NO: 43749 - DNA, 96 bp, Fusarium phaseoli
  misc_feature: 40
tgtcgaacggccgccgtggcttcttgcccacctctttccgctgcacctcgaacaatgcatgactgccaacgtgggtgggcgtggctatggcgcggg

SEQ ID NO: 43750 - DNA, 96 bp, Fusarium phaseoli
  misc_feature: 40
agagatgcgaccaagagagatgcgaccaagagagatgccaccaagagagatgccaccaagagagatgccaccaaagaggcatgcaaccaagataca

SEQ ID NO: 43751 - DNA, 96 bp, Fusarium phaseoli
  misc_feature: 40
aaaaaggctaatgaaacgaccgtacgtcggtcgaattgccagtcagggctgagtgcagggattcatgacgccacaaggatcactcggacgaagcca

SEQ ID NO: 43752 - DNA, 96 bp, Fusarium phaseoli
  misc_feature: 40
tggcatataagcaagccgtggatgccaggttattacgcggttggagagacggtggtcagagcagaagggagaataggggggataaagtagaggggt

SEQ ID NO: 43753 - DNA, 96 bp, Fusarium phaseoli
  misc_feature: 40
acaggggaaacagaaccaactcggtgatcgtccatttcaacagctccttgtcatcgtatttgatttgaatctgaagagtgagataagcatcccgca

SEQ ID NO: 43754 - DNA, 96 bp, Fusarium phaseoli
  misc_feature: 40
aaagggaagtttgaaaagggaagtttgaaaagggaagtttgaaaagggaagtttgaaaagggaagtttgaaaagggaagtttgaaaaaggagggca

SEQ ID NO: 43755 - DNA, 96 bp, Fusarium phaseoli
  misc_feature: 40
tgagttgagggttagggttaagtggttgtggtgaaggttagggggagtggttgtggtgaaggttagggggagtggttgtggtgaaggttagggggg

SEQ ID NO: 43756 - DNA, 96 bp, Fusarium phaseoli
  misc_feature: 40
ataagacaagaatcgaatcacataaagtcaatatcttcaatcaaactagtagagccaaacaagaaaaaagaaagataaaaaagaaaaagaaaaaga

SEQ ID NO: 43757 - DNA, 96 bp, Fusarium phaseoli
  misc_feature: 40
tctctcttggtggcatctctcttggtggcatctctcttggtcgcatctctcttggtcgcatctctcttggtcgcatgcttctttactggcatatcg

SEQ ID NO: 43758 - DNA, 96 bp, Fusarium phaseoli
  misc_feature: 40
acaaattaaatgtgccttggtcaaggcacgtttacaataattggtagggttgtcgtccacaccatcgtcgtcttcttcgactccatccattgtcga

SEQ ID NO: 43759 - DNA, 96 bp, Fusarium phaseoli
  misc_feature: 40
tccccttaaactaaccctcataaccacccgctccctccctcgcttcctaggttatactaaggcctaagggtcaaggtcaaggtcaaggtcagagtc

SEQ ID NO: 43760 - DNA, 96 bp, Fusarium phaseoli
  misc_feature: 40
caccacaaccactccccctaaccttcaccacaaccactccccctaaccttcaccacaaccacttaaccctaaccctcaactcaaccactcccccta

SEQ ID NO: 43761 - DNA, 96 bp, Fusarium phaseoli
  misc_feature: 40
ggaggttatgaaggttgccggagagcaaggggcaaaagggcgggggcagttagggactagtaacctctggcgttaagagttagaaaagtgaaggta

SEQ ID NO: 43762 - DNA, 96 bp, Fusarium phaseoli
  misc_feature: 40
taccagatcgagattacgtgggcgccctcactgatgcgctgtccttgaagtgcagtggagcacatgctcaaccaccggtcatgccgtattataccg

SEQ ID NO: 43763 - DNA, 96 bp, Fusarium phaseoli
  misc_feature: 40
taagatccgctctctaggagacgacgattcctactacgatatttcacttggcagctatttctttctttccaagccaagggccgctgtggcaaactc

SEQ ID NO: 43764 - DNA, 96 bp, Fusarium phaseoli
  misc_feature: 40
cgaggactcaatatggtatctgatcacctgagactgttcacgatctacctttggaagtacctctctcccactcgagtgtatcttatttaagattta

SEQ ID NO: 43765 - DNA, 96 bp, Fusarium phaseoli
  misc_feature: 40
gagtgaacaaaaaaaaaggaaaaacaaaaacaattaaaagaacagagtagaaaagaaaataaaagaaaaaggagctggtgcattaggacatattta

SEQ ID NO: 43766 - DNA, 96 bp, Fusarium phaseoli
  misc_feature: 40
agatttaaccttggaatgaatagaagcttcacattgcatcatattaacgtcacttgagaagccccattgtctttgacagcgtaactaaagtgttta

SEQ ID NO: 43767 - DNA, 96 bp, Fusarium phaseoli
  misc_feature: 40
gttgtgagcatgcagctcagtgagacattcgcttatctgcgacattcgcttatcacgtacgttatcagactgctccgaattgagacggcgactgac

SEQ ID NO: 43768 - DNA, 96 bp, Fusarium phaseoli
  misc_feature: 40
ctaaccttcaccacaaccactccccctaaccttcaccacaaccacttaaccctaaccctcaactcaaccactccccctaaccctcacctcaaccac

SEQ ID NO: 43769 - DNA, 96 bp, Fusarium phaseoli
  misc_feature: 40
gtgacggggaaccaaagagtaagtaaaggcctgaccctgactctgaccttgaccttgaccttgacccttaggccttagtataacctaggaagcgag

SEQ ID NO: 43770 - DNA, 96 bp, Fusarium phaseoli
  misc_feature: 40
gatttaaccttggaatgaatagaagcttcacattgcatcatattaacgtcacttgagaagccccattgtctttgacagcgtaactaaagtgtttac

SEQ ID NO: 43771 - DNA, 96 bp, Fusarium phaseoli
  misc_feature: 40
ggattgtggctgtatcttggttgcatgcctctttggtggcatctctcttggtggcatctctcttggtggcatctctcttggtcgcatctctcttgg

SEQ ID NO: 43772 - DNA, 96 bp, Fusarium phaseoli
  misc_feature: 40
ggagaggagagttgggaaagtgagactaaccgctgctgtccgggggagaagagttggacaagtgaggctaaccgctattgtccaggagaggaggag

SEQ ID NO: 43773 - DNA, 96 bp, Fusarium phaseoli
  misc_feature: 40
ggaatttttagcgccgttttgatttatcccatgagtgcccacaagactgcaaccaggtcacgacggggggttgaggccaatcaaaactcccagtgg

SEQ ID NO: 43774 - DNA, 96 bp, Fusarium phaseoli
  misc_feature: 40
ctagctgcgcggcggattcgctagcaaatccaatgggtttcccatacaaaaaaaaaaggcgctatcctatcctagctgcgcggcggattcgctagc

SEQ ID NO: 43775 - DNA, 96 bp, Fusarium phaseoli
  misc_feature: 40
gcgagggagggagcgggtggttatgagggttagtttaaggggactaaggtgttatttacctgtaaccctaaccctaaggcaatgcctaggttttcg

SEQ ID NO: 43776 - DNA, 96 bp, Fusarium phaseoli
  misc_feature: 40
gaaagggaagtttgaaaagggaagtttgaaaagggaagtttgaaaagggaagtttgaaaagggaagtttgaaaagggaagtttgaaaaaggagggc

SEQ ID NO: 43777 - DNA, 96 bp, Fusarium phaseoli
  misc_feature: 40
aattaaatgtgccttggtcaaggcacgtttacaataattggtagggttgtcgtccacaccatcgtcgtcttcttcgactccatccattgtcgactc

SEQ ID NO: 43778 - DNA, 96 bp, Fusarium phaseoli
  misc_feature: 40
gaaaacagatcgtcgtcccattcccagacagcgggagtgatacaaagtgctgagactgctatgtgtttcatccttcggatagtctctatccggctc

SEQ ID NO: 43779 - DNA, 96 bp, Fusarium phaseoli
  misc_feature: 40
gacacggcagtgggcaagacgcagcgattgagggtgtggatcgatcagggtcgtttaatcgtggccacgaacgcgttagggttgggcgtcgacggg

SEQ ID NO: 43780 - DNA, 96 bp, Fusarium phaseoli
  misc_feature: 40
gaagttgtgagcatgcagctcagtgagacattcgcttatctgcgacattcgcttatcacgtacgttatcagactgctccgaattgagacggcgact

SEQ ID NO: 43781 - DNA, 96 bp, Fusarium phaseoli
  misc_feature: 40
agcgagggagggagcgggtggttatgagggttagtttaaggggactaaggtgttatttacctgtaaccctaaccctaaggcaatgcctaggttttc

SEQ ID NO: 43782 - DNA, 96 bp, Fusarium phaseoli
  misc_feature: 40
ctttgcactgtcggcgccgtgatccccgacatgatgccattttagaaacatcgtttggtataacagttcgttggcttttggccatctaaatgtcct

SEQ ID NO: 43783 - DNA, 96 bp, Fusarium phaseoli
  misc_feature: 40
ctctcttggtggcatctctcttggtggcatctctcttggtcgcatctctcttggtcgcatctctcttggtcgcatgcttctttactggcatatcgt

SEQ ID NO: 43784 - DNA, 96 bp, Fusarium phaseoli
  misc_feature: 40
acagcagcggttagcctcactttcccaactctcctcctctcctggacaatagcggttagcctcacttgtccaactcttctcccccggacagcagcg

SEQ ID NO: 43785 - DNA, 96 bp, Fusarium phaseoli
  misc_feature: 40
caggaggcccacggtcatcagccaaggcggggagaagaagaaaggcggcagccgcatcagacagggccaagtggccagcaaaggaagcagccggtg

SEQ ID NO: 43786 - DNA, 96 bp, Fusarium phaseoli
  misc_feature: 40
attacacgactaatcctttattattcttctatgcgctactctttatgtcttaactaaccaaatgatcagttaaccggccattccgaaacactattg

SEQ ID NO: 43787 - DNA, 96 bp, Fusarium phaseoli
  misc_feature: 40
attttatccggtaaaatgcattttaattacatgcaccgattcacgatataaagcattagatcggaagagcgtcgtgtagggaaagagtgtagatct

SEQ ID NO: 43788 - DNA, 96 bp, Fusarium phaseoli
  misc_feature: 40
acttaacgtcctcattattattattatctcctcccaccttatatataataccacacccactccgcttatctaactctaccttaaaattcgccgtat

SEQ ID NO: 43789 - DNA, 96 bp, Fusarium phaseoli
  misc_feature: 40
actttcacgaccgccccaaccccaaccctgaagaccacactgatccttaaccttacccttaaccttacccttaaccttacccttaaccttaccctt

SEQ ID NO: 43790 - DNA, 96 bp, Fusarium phaseoli
  misc_feature: 39
ttttgcacagacctcgcgctgctctgatgaactgacttgcgaaatgtgtataaacagacacaggacactgaaatggccaactgcacttttctgcaa

SEQ ID NO: 43791 - DNA, 96 bp, Fusarium phaseoli
  misc_feature: 39
ttttatccggtaaaatgcattttaattacatgcaccgattcacgatataaagcattagatcggaagagcgtcgtgtagggaaagagtgtagatctc

SEQ ID NO: 43792 - DNA, 96 bp, Fusarium phaseoli
  misc_feature: 39
tttcggattcttaccaacttccattctaactgaggcccagttggggaaggacagatcgttaaagatacatggtcaggaactcgtgcatagagacct

SEQ ID NO: 43793 - DNA, 96 bp, Fusarium phaseoli
  misc_feature: 39
aaaaggctaatgaaacgaccgtacgtcggtcgaattgccagtcagggctgagtgcagggattcatgacgccacaaggatcactcggacgaagccaa

SEQ ID NO: 43794 - DNA, 96 bp, Fusarium phaseoli
  misc_feature: 39
ttgagggttagggggagtggttgagataaagtttagagtgaagggttagaaagaggtgggtttgagaagtggtaaaaattaaaaagaagggggggt

SEQ ID NO: 43795 - DNA, 96 bp, Fusarium phaseoli
  misc_feature: 39
gaggaaatttgtatggtacagttttgtacgtacagaaaagttgtacgtacgtacagctacccaaaatacagtacgtacgtacgtacgtgtacagaa

SEQ ID NO: 43796 - DNA, 96 bp, Fusarium phaseoli
  misc_feature: 39
ttcctcttttcttcttatatataatataccctaatattaccgtaatcctctttatatactttatcctcctcccccgttatctatctacctccctgc

SEQ ID NO: 43797 - DNA, 96 bp, Fusarium phaseoli
  misc_feature: 39
ctatgtagacatgcagggtacctaactgttgctagataagtgcataggtctgggctagctgcatttttgcgaatcaggccttcttttgctagttaa

SEQ ID NO: 43798 - DNA, 96 bp, Fusarium phaseoli
  misc_feature: 39
ttaaatgtgccttggtcaaggcacgtttacaataattggtagggttgtcgtccacaccatcgtcgtcttcttcgactccatccattgtcgactcct

SEQ ID NO: 43799 - DNA, 96 bp, Fusarium phaseoli
  misc_feature: 39
ggccaaagatctttcacactcatcatctttcatcatgcaagagcctgttcctcacggagtgttcgcggccttcactctatcgactgaacttcaaca

SEQ ID NO: 43800 - DNA, 96 bp, Fusarium phaseoli
  misc_feature: 39
atttaaccttggaatgaatagaagcttcacattgcatcatattaacgtcacttgagaagccccattgtctttgacagcgtaactaaagtgtttaca

SEQ ID NO: 43801 - DNA, 96 bp, Fusarium phaseoli
  misc_feature: 39
cctaaccttcaccacaaccactccccctaaccttcaccacaaccacttaaccctaaccctcaactcaaccactccccctaaccctcacctcaacca

SEQ ID NO: 43802 - DNA, 96 bp, Fusarium phaseoli
  misc_feature: 39
tagtgatgcatttttctgtacacgtacgtacgtacgtactgtattttgggtagctgtacgtacgtacaacttttctgtacgtacaaaactgtacca

SEQ ID NO: 43803 - DNA, 96 bp, Fusarium phaseoli
  misc_feature: 39
tgcctctttggtggcatctctcttggtggcatctctcttggtggcatctctcttggtcgcatctctcttggtcgcatctctcttggtcgcatgctt

SEQ ID NO: 43804 - DNA, 96 bp, Fusarium phaseoli
  misc_feature: 39
tctgagatcctatcgatgctgctagatgcaggcgcagatccaaacgccgccccgggtctgttacagtatgcctgtttcgctgggacgctcgactcc

SEQ ID NO: 43805 - DNA, 96 bp, Fusarium phaseoli
  misc_feature: 39
agcacttgtcttctgtgaatgagctccacagaaagaagtggccgttcttatgcaaaagcgggtgcagcgattctgtcttccagatcaaggaataga

SEQ ID NO: 43806 - DNA, 96 bp, Fusarium phaseoli
  misc_feature: 39
ggggaaacagaaccaactcggtgatcgtccatttcaacagctccttgtcatcgtatttgatttgaatctgaagagtgagataagcatcccgcagga

SEQ ID NO: 43807 - DNA, 96 bp, Fusarium phaseoli
  misc_feature: 39
gtaagggtgacggggaaccaaagagtaagtaaaggcctgaccctgactctgaccttgaccttgaccttgacccttaggccttagtataacctagga

SEQ ID NO: 43808 - DNA, 96 bp, Fusarium phaseoli
  misc_feature: 39
tatgtagacatgcagggtacctaactgttgctagataagtgcataggtctgggctagctgcatttttgcgaatcaggccttcttttgctagttaat

SEQ ID NO: 43809 - DNA, 96 bp, Fusarium phaseoli
  misc_feature: 39
cctcttaattaactataaactctaacctttaaaccctttattaactctaacctttaattctttattaaccctaactatttaattaattaccctata

SEQ ID NO: 43810 - DNA, 96 bp, Fusarium phaseoli
  misc_feature: 39
gttgagttgagggttagggttaagtggttgtggtgaaggttagggggagtggttgtggtgaaggttagggggagtggttgagttgaggggtagggg

SEQ ID NO: 43811 - DNA, 96 bp, Fusarium phaseoli
  misc_feature: 39
cactgggagttttgattggcctcaaccccccgtcgtgacctggttgcagtcttgtgggcactcatgggataaatcaaaacggcgctaaaaattccc

SEQ ID NO: 43812 - DNA, 96 bp, Fusarium phaseoli
  misc_feature: 39
gaaaaaggctaatgaaacgaccgtacgtcggtcgaattgccagtcagggctgagtgcagggattcatgacgccacaaggatcactcggacgaagcc

SEQ ID NO: 43813 - DNA, 96 bp, Fusarium phaseoli
  misc_feature: 39
gctgcagctgtgcatacgcagaattctgagatcctatcgatgctgctagatgcaggcgcagatccaaacgccgccccgggtctgttacagtatgcc

SEQ ID NO: 43814 - DNA, 96 bp, Fusarium phaseoli
  misc_feature: 39
agatgcgaccaagagagatgcgaccaagagagatgccaccaagagagatgccaccaagagagatgccaccaaagaggcatgcaaccaagatacagc

SEQ ID NO: 43815 - DNA, 96 bp, Fusarium phaseoli
  misc_feature: 39
gattgtggctgtatcttggttgcatgcctctttggtggcatctctcttggtggcatctctcttggtggcatctctcttggtcgcatctctcttggt

SEQ ID NO: 43816 - DNA, 96 bp, Fusarium phaseoli
  misc_feature: 39
gagtggttgtggtgaaggttagggggagtggttgagttgagggttagggggagtggttgagataaagtttagagtgaagggttagaaagagggggg

SEQ ID NO: 43817 - DNA, 96 bp, Fusarium phaseoli
  misc_feature: 39
gagatgcgaccaagagagatgcgaccaagagagatgccaccaagagagatgccaccaagagagatgccaccaaagaggcatgcaaccaagatacag

SEQ ID NO: 43818 - DNA, 96 bp, Fusarium phaseoli
  misc_feature: 39
aagggtgacggggaaccaaagagtaagtaaaggcctgaccctgactctgaccttgaccttgaccttgacccttaggccttagtataacctaggaag

SEQ ID NO: 43819 - DNA, 96 bp, Fusarium phaseoli
  misc_feature: 39
cagcacttgtcttctgtgaatgagctccacagaaagaagtggccgttcttatgcaaaagcgggtgcagcgattctgtcttccagatcaaggaatag

SEQ ID NO: 43820 - DNA, 96 bp, Fusarium phaseoli
  misc_feature: 39
ctatcggagcagaatcggtcagggaagcgaacttttccaactctcgacgatatgcggccttggaggcgttgaataccccgttatctaatggctggg

SEQ ID NO: 43821 - DNA, 96 bp, Fusarium phaseoli
  misc_feature: 39
aaaaaaaaaaggcgctatcctagctgcgcggcggattcgctagcaaatccaatgggtttcccatacaaaaaaaaaaggcgctatcctagctgcgcg

SEQ ID NO: 43822 - DNA, 96 bp, Fusarium phaseoli
  misc_feature: 39
aagtgaatgaagtatagtcaccggccgttatttataaaatacgaatagtgaaggtgcaagttaaataagcaagccggcccaagaaggaggcccggg

SEQ ID NO: 43823 - DNA, 96 bp, Fusarium phaseoli
  misc_feature: 39
atcttctcggacaatgcggaaccaacgggttgcacgaagacattgttagcgccgtggaagatgaaagaagaatcgcagctattctcgaagcgatgg

SEQ ID NO: 43824 - DNA, 96 bp, Fusarium phaseoli
  misc_feature: 39
caacaccgtctagtttcggcctccggtcaggacaaacccacgcttgaccacatgctcggtatgggaagtgcgacgaactagttggcaatttcttct

SEQ ID NO: 43825 - DNA, 96 bp, Fusarium phaseoli
  misc_feature: 39
acttcctcttttcttcttatatataatataccctaatattaccgtaatcctctttatatactttatcctcctcccccgttatctatctacctccct

SEQ ID NO: 43826 - DNA, 96 bp, Fusarium phaseoli
  misc_feature: 39
aagagatgtgttgattgaatcaattatgattgttcctagtgaggttgtcagtaatgggagatccctcaatgcattctatcgctaactgatctcttt

SEQ ID NO: 43827 - DNA, 96 bp, Fusarium phaseoli
  misc_feature: 39
aaagagatgtgttgattgaatcaattatgattgttcctagtgaggttgtcagtaatgggagatccctcaatgcattctatcgctaactgatctctt

SEQ ID NO: 43828 - DNA, 96 bp, Fusarium phaseoli
  misc_feature: 38
tttttaaccctcttatactccctcttaccctaacctatctattccttacttaacgtcctcattattattattatctcctcccaccttatatataat

SEQ ID NO: 43829 - DNA, 96 bp, Fusarium phaseoli
  misc_feature: 38
ttttaaggtagagttagataagcggagtgggtgtggtattatatataaggtgggaggagataataataataatgaggacgttaagtaaggaataga

SEQ ID NO: 43830 - DNA, 96 bp, Fusarium phaseoli
  misc_feature: 38
tttaagttaaaggtaatacttttttcttctctttcttattatcttcttccttttttacctttatatctcgctagtttttccttaatagctcttact

SEQ ID NO: 43831 - DNA, 96 bp, Fusarium phaseoli
  misc_feature: 38
ccctggtctttaatagcgccatttctacttgtatgaggttttcaaacaatctgcccgctaatatgctgggaagtagtgtgagtaaaagaggaacaa

SEQ ID NO: 43832 - DNA, 96 bp, Fusarium phaseoli
  misc_feature: 38
ttgagttgagggttagggttaagtggttgtggtgaaggttagggggagtggttgtggtgaaggttagggggagtggttgagttgaggggtaggggg

SEQ ID NO: 43833 - DNA, 96 bp, Fusarium phaseoli
  misc_feature: 38
ttctcggacaatgcggaaccaacgggttgcacgaagacattgttagcgccgtggaagatgaaagaagaatcgcagctattctcgaagcgatggacg

SEQ ID NO: 43834 - DNA, 96 bp, Fusarium phaseoli
  misc_feature: 38
gctcagtaccgcataggcatcattcaacacaattagtcatcagctctcttacaagaggctatgaacgatcgctatatttggtatcatctccaaaca

SEQ ID NO: 43835 - DNA, 96 bp, Fusarium phaseoli
  misc_feature: 38
gcctgagattgatgactggggttcttttgtcgtaaagcctcaggagaaaaagaagcacgcgacaaagcttcagatgttatggaatgacttccaaca

SEQ ID NO: 43836 - DNA, 96 bp, Fusarium phaseoli
  misc_feature: 38
cccctggtctttaatagcgccatttctacttgtatgaggttttcaaacaatctgcccgctaatatgctgggaagtagtgtgagtaaaagaggaaca

SEQ ID NO: 43837 - DNA, 96 bp, Fusarium phaseoli
  misc_feature: 38
tagctgcgcggcggattcgctagcaaatccaatgggtttcccatacaaaaaaaaaaggcgctatcctatcctagctgcgcggcggattcgctagca

SEQ ID NO: 43838 - DNA, 96 bp, Fusarium phaseoli
  misc_feature: 38
tgaaggttagggggagtggttgagttgagggttagggttaagtggttgtggtgaaggttagggggagtggttgtggtgaaggttagggggagtggt

SEQ ID NO: 43839 - DNA, 96 bp, Fusarium phaseoli
  misc_feature: 38
ggttaagggtaaggttaagggtaaggttaagggtaaggttaaggatcagtgtggtcttcagggttggggttggggcggtcgtgaaagtgtcagcga

SEQ ID NO: 43840 - DNA, 96 bp, Fusarium phaseoli
  misc_feature: 38
aaaaaggcgctatcctagctgcgcggcggattcgctagcaaatccaatgggtttcccatacaaaaaaaaaaggcgctatcctagctgcgcggcgga

SEQ ID NO: 43841 - DNA, 96 bp, Fusarium phaseoli
  misc_feature: 38
tattacacgactaatcctttattattcttctatgcgctactctttatgtcttaactaaccaaatgatcagttaaccggccattccgaaacactatt

SEQ ID NO: 43842 - DNA, 96 bp, Fusarium phaseoli
  misc_feature: 38
tatcggagcagaatcggtcagggaagcgaacttttccaactctcgacgatatgcggccttggaggcgttgaataccccgttatctaatggctgggg

SEQ ID NO: 43843 - DNA, 96 bp, Fusarium phaseoli
  misc_feature: 38
gctcgctgcagctgtgcatacgcagaattctgagatcctatcgatgctgctagatgcaggcgcagatccaaacgccgccccgggtctgttacagta

SEQ ID NO: 43844 - DNA, 96 bp, Fusarium phaseoli
  misc_feature: 38
ctatctattccttacttaacgtcctcattattattattatctcctcccaccttatatataataccacacccactccgcttatctaactctacctta

SEQ ID NO: 43845 - DNA, 96 bp, Fusarium phaseoli
  misc_feature: 38
taagggtcaaggtcaaggtcaaggtcagagtcagggtcaggcctttacttactctttggttccccgtcacccttacgccctgcccttgctcctcgc

SEQ ID NO: 43846 - DNA, 96 bp, Fusarium phaseoli
  misc_feature: 38
taaagagatgtgttgattgaatcaattatgattgttcctagtgaggttgtcagtaatgggagatccctcaatgcattctatcgctaactgatctct

SEQ ID NO: 43847 - DNA, 96 bp, Fusarium phaseoli
  misc_feature: 38
gtggcatataagcaagccgtggatgccaggttattacgcggttggagagacggtggtcagagcagaagggagaataggggggataaagtagagggg

SEQ ID NO: 43848 - DNA, 96 bp, Fusarium phaseoli
  misc_feature: 38
aaatgtcaagcataagtacacacgcatactgtgtacactcttgctccatactagcagcatgcgtattcgtgtacttacctgactaatacaaatgac

SEQ ID NO: 43849 - DNA, 96 bp, Fusarium phaseoli
  misc_feature: 38
gtaatattaatttaaagaagagaaaaaaaaaaaaaagaaagaaataagtaataaaagaaaaggtttagggtagaagtaaataaaaaagagaggaag

SEQ ID NO: 43850 - DNA, 96 bp, Fusarium phaseoli
  misc_feature: 38
ggttgagttgagggttagggttaagtggttgtggtgaaggttagggggagtggttgtggtgaaggttagggggagtggttgagttgaggggtaggg

SEQ ID NO: 43851 - DNA, 96 bp, Fusarium phaseoli
  misc_feature: 38
ggcgctatcctagctgcgcggcggattcgctagcaaatccaatgggtttcccatacaaaaaaaaaaggcgctatcctagctgcgcggcggattcgc

SEQ ID NO: 43852 - DNA, 96 bp, Fusarium phaseoli
  misc_feature: 38
gacagcagcggttagcctcactttcccaactctcctcctctcctggacaatagcggttagcctcacttgtccaactcttctcccccggacagcagc

SEQ ID NO: 43853 - DNA, 96 bp, Fusarium phaseoli
  misc_feature: 38
aaggttaagggtaaggttaagggtaaggttaagggtaaggttaaggatcagtgtggtcttcagggttggggttggggcggtcgtgaaagtgtcagc

SEQ ID NO: 43854 - DNA, 96 bp, Fusarium phaseoli
  misc_feature: 38
gaaagcctcaaaaaccacaacaagagcaaaaagagccacaacaagagccaaaaggacagcgagagccaagagagtcacaacaagagccaaaaaggc

SEQ ID NO: 43855 - DNA, 96 bp, Fusarium phaseoli
  misc_feature: 38
gcacaggggaaacagaaccaactcggtgatcgtccatttcaacagctccttgtcatcgtatttgatttgaatctgaagagtgagataagcatcccg

SEQ ID NO: 43856 - DNA, 96 bp, Fusarium phaseoli
  misc_feature: 38
gcaaataagatctgttatgtaagctcgatgtgtgtgagtgtaagagagatctctcttcaatccacagggtgtcgcactgagcgtgctaaaaggatc

SEQ ID NO: 43857 - DNA, 96 bp, Fusarium phaseoli
  misc_feature: 38
gagttgagggttagggttaagtggttgtggtgaaggttagggggagtggttgtggtgaaggttagggggagtggttgtggtgaaggttaggggggg

SEQ ID NO: 43858 - DNA, 96 bp, Fusarium phaseoli
  misc_feature: 38
gaggactcaatatggtatctgatcacctgagactgttcacgatctacctttggaagtacctctctcccactcgagtgtatcttatttaagatttat

SEQ ID NO: 43859 - DNA, 96 bp, Fusarium phaseoli
  misc_feature: 38
gaagcgagggagggagcgggtggttatgagggttagtttaaggggactaaggtgttatttacctgtaaccctaaccctaaggcaatgcctaggttt

SEQ ID NO: 43860 - DNA, 96 bp, Fusarium phaseoli
  misc_feature: 38
cctcgttccgttgatgcttggtgaaaattcgatttgtaatgcgcttcggtttaagataaccgccagagtccgaggcgaatttctcgtgctagtttc

SEQ ID NO: 43861 - DNA, 96 bp, Fusarium phaseoli
  misc_feature: 38
cttcctcttttcttcttatatataatataccctaatattaccgtaatcctctttatatactttatcctcctcccccgttatctatctacctccctg

SEQ ID NO: 43862 - DNA, 96 bp, Fusarium phaseoli
  misc_feature: 38
cggagtcgagcgtcccagcgaaacaggcatactgtaacagacccggggcggcgtttggatctgcgcctgcatctagcagcatcgataggatctcag

SEQ ID NO: 43863 - DNA, 96 bp, Fusarium phaseoli
  misc_feature: 38
agaaactagcacgagaaattcgcctcggactctggcggttatcttaaaccgaagcgcattacaaatcgaattttcaccaagcatcaacggaacgag

SEQ ID NO: 43864 - DNA, 96 bp, Fusarium phaseoli
  misc_feature: 38
ctcgctgcagctgtgcatacgcagaattctgagatcctatcgatgctgctagatgcaggcgcagatccaaacgccgccccgggtctgttacagtat

SEQ ID NO: 43865 - DNA, 96 bp, Fusarium phaseoli
  misc_feature: 38
ctccctcgcttcctaggttatactaaggcctaagggtcaaggtcaaggtcaaggtcagagtcagggtcaggcctttacttactctttggttccccg

SEQ ID NO: 43866 - DNA, 96 bp, Fusarium phaseoli
  misc_feature: 38
ctaagatccgctctctaggagacgacgattcctactacgatatttcacttggcagctatttctttctttccaagccaagggccgctgtggcaaact

SEQ ID NO: 43867 - DNA, 96 bp, Fusarium phaseoli
  misc_feature: 38
cgaaaacagatcgtcgtcccattcccagacagcgggagtgatacaaagtgctgagactgctatgtgtttcatccttcggatagtctctatccggct

SEQ ID NO: 43868 - DNA, 96 bp, Fusarium phaseoli
  misc_feature: 38
agaaagcctcaaaaaccacaacaagagcaaaaagagccacaacaagagccaaaaggacagcgagagccaagagagtcacaacaagagccaaaaagg

SEQ ID NO: 43869 - DNA, 96 bp, Fusarium phaseoli
  misc_feature: 38
aaaaaaggcgctatcctagctgcgcggcggattcgctagcaaatccaatgggtttcccatacaaaaaaaaaaggcgctatcctagctgcgcggcgg

SEQ ID NO: 43870 - DNA, 96 bp, Fusarium phaseoli
  misc_feature: 38
atggggcattttggccgatgtttccagtaggcgttagcacccaccgagagcagtaaggaggatggaggtgaaataccgagttttgagagtgggggg

SEQ ID NO: 43871 - DNA, 96 bp, Fusarium phaseoli
  misc_feature: 38
cccacggtcatcagccaaggcggggagaagaagaaaggcggcagccgcatcagacagggccaagtggccagcaaaggaagcagccgttgagcgggt

SEQ ID NO: 43872 - DNA, 96 bp, Fusarium phaseoli
  misc_feature: 38
catcttctcggacaatgcggaaccaacgggttgcacgaagacattgttagcgccgtggaagatgaaagaagaatcgcagctattctcgaagcgatg

SEQ ID NO: 43873 - DNA, 96 bp, Fusarium phaseoli
  misc_feature: 38
catctctcttggtggcatctctcttggtggcatctctcttggtcgcatctctcttggtcgcatctctcttggtcgcatgcttctttactggcatat

SEQ ID NO: 43874 - DNA, 96 bp, Fusarium phaseoli
  misc_feature: 38
attctcccttctgctctgaccaccgtctctccaaccgcgtaataacctggcatccacggcttgcttatatgccaccgccggtccttccaccctcat

SEQ ID NO: 43875 - DNA, 96 bp, Fusarium phaseoli
  misc_feature: 38
acctatctattccttacttaacgtcctcattattattattatctcctcccaccttatatataataccacacccactccgcttatctaactctacct

SEQ ID NO: 43876 - DNA, 96 bp, Fusarium phaseoli
  misc_feature: 38
actttatcccccctattctcccttctgctctgaccaccgtctctccaaccgcgtaataacctggcatccacggcttgcttatatgccaccgcccgt

SEQ ID NO: 43877 - DNA, 96 bp, Fusarium phaseoli
  misc_feature: 37
tgaataagacaagaatcgaatcacataaagtcaatatcttcaatcaaactagtagagccaaacaagaaaaaagaaagataaaaaagaaaaagaaaa

SEQ ID NO: 43878 - DNA, 96 bp, Fusarium phaseoli
  misc_feature: 37
tgcatttttctgtacacgtacgtacgtacgtactgtattttgggtagctgtacgtacgtacaacttttctgtacgtacaaaactgtaccatacaaa

SEQ ID NO: 43879 - DNA, 96 bp, Fusarium phaseoli
  misc_feature: 37
tttgcacagacctcgcgctgctctgatgaactgacttgcgaaatgtgtataaacagacacaggacactgaaatggccaactgcacttttctgcaag

SEQ ID NO: 43880 - DNA, 96 bp, Fusarium phaseoli
  misc_feature: 37
cttgtgcgcatctatactgatctgattaattgattgcctttgttcctcttttactcacactacttcccagcatattagcgggcagattgtttgaaa

SEQ ID NO: 43881 - DNA, 96 bp, Fusarium phaseoli
  misc_feature: 37
ttgtcgaacggccgccgtggcttcttgcccacctctttccgctgcacctcgaacaatgcatgactgccaacgtgggtgggcgtggctatggcgcgg

SEQ ID NO: 43882 - DNA, 96 bp, Fusarium phaseoli
  misc_feature: 37
tattctcccttctgctctgaccaccgtctctccaaccgcgtaataacctggcatccacggcttgcttatatgccaccgccggtccttccaccccaa

SEQ ID NO: 43883 - DNA, 96 bp, Fusarium phaseoli
  misc_feature: 37
ttggcagtgcgagtcgagagtactgtcatttgtattagtcaggtaagtacacgaatacgcatgctgctagtatggagcaagagtgtacacagtatg

SEQ ID NO: 43884 - DNA, 96 bp, Fusarium phaseoli
  misc_feature: 37
gactttacaaagagcatgttgtttttggggcggaaagtgcaagtgctcaatactgtataggattaacagttctaacagttctaacctagcttccaa

SEQ ID NO: 43885 - DNA, 96 bp, Fusarium phaseoli
  misc_feature: 37
aaataagatctgttatgtaagctcgatgtgtgtgagtgtaagagagatctctcttcaatccacagggtgtcgcactgagcgtgctaaaaggatcaa

SEQ ID NO: 43886 - DNA, 96 bp, Fusarium phaseoli
  misc_feature: 37
aatattaatttaaagaagagaaaaaaaaaaaaaagaaagaaataagtaataaaagaaaaggtttagggtagaagtaaataaaaaagagaggaagaa

SEQ ID NO: 43887 - DNA, 96 bp, Fusarium phaseoli
  misc_feature: 37
ttctgagatcctatcgatgctgctagatgcaggcgcagatccaaacgccgccccgggtctgttacagtatgcctgtttcgctgggacgctcgactc

SEQ ID NO: 43888 - DNA, 96 bp, Fusarium phaseoli
  misc_feature: 37
ttcggattcttaccaacttccattctaactgaggcccagttggggaaggacagatcgttaaagatacatggtcaggaactcgtgcatagagaccta

SEQ ID NO: 43889 - DNA, 96 bp, Fusarium phaseoli
  misc_feature: 37
ttcctcctagtgcaagggcccaagggccaacagaatgttactctcgataacgctctgtatgttccggaaggatgctcaaacctactgtccgtgtca

SEQ ID NO: 43890 - DNA, 96 bp, Fusarium phaseoli
  misc_feature: 37
taagggtgacggggaaccaaagagtaagtaaaggcctgaccctgactctgaccttgaccttgaccttgacccttaggccttagtataacctaggaa

SEQ ID NO: 43891 - DNA, 96 bp, Fusarium phaseoli
  misc_feature: 37
atttttaaccctcttatactccctcttaccctaacctatctattccttacttaacgtcctcattattattattatctcctcccaccttatatataa

SEQ ID NO: 43892 - DNA, 96 bp, Fusarium phaseoli
  misc_feature: 37
gaggttatgaaggttgccggagagcaaggggcaaaagggcgggggcagttagggactagtaacctctggcgttaagagttagaaaagtgaaggtaa

SEQ ID NO: 43893 - DNA, 96 bp, Fusarium phaseoli
  misc_feature: 37
ttaagttaaaggtaatacttttttcttctctttcttattatcttcttccttttttacctttatatctcgctagtttttccttaatagctcttacta

SEQ ID NO: 43894 - DNA, 96 bp, Fusarium phaseoli
  misc_feature: 37
tggggtggttttaaacggaggggcgacggcggagaggttacggtcgagatatcgagaggccgaacgaacccgtatgcaatggtttcggtcggtggg

SEQ ID NO: 43895 - DNA, 96 bp, Fusarium phaseoli
  misc_feature: 37
agactttacaaagagcatgttgtttttggggcggaaagtgcaagtgctcaatactgtataggattaacagttctaacagttctaacctagcttcca

SEQ ID NO: 43896 - DNA, 96 bp, Fusarium phaseoli
  misc_feature: 37
tattctcccttctgctctgaccaccgtctctccaaccgcgtaataacctggcatccacggcttgcttatatgccaccgccggtccttccaccctca

SEQ ID NO: 43897 - DNA, 96 bp, Fusarium phaseoli
  misc_feature: 37
tcttttgccttttcagacggaaaattctaagcttacgatcaaagtgaaagttccaaaacttctggctcaagtgttggatatcgccaagtgacaagg

SEQ ID NO: 43898 - DNA, 96 bp, Fusarium phaseoli
  misc_feature: 37
atagataacgggggaggaggataaagtatataaagaggattacggtaatattagggtatattatatataagaagaaaagaggaagtacggaggaga

SEQ ID NO: 43899 - DNA, 96 bp, Fusarium phaseoli
  misc_feature: 37
tcgtatcgcggctgatcaaggagattggcgtggagcttgattcagcacggctgaacctgtggtgcgataaccagcagacaattcgtctcgtcaatg

SEQ ID NO: 43900 - DNA, 96 bp, Fusarium phaseoli
  misc_feature: 37
tcctcgttccgttgatgcttggtgaaaattcgatttgtaatgcgcttcggtttaagataaccgccagagtccgaggcgaatttctcgtgctagttt

SEQ ID NO: 43901 - DNA, 96 bp, Fusarium phaseoli
  misc_feature: 37
tccctccctcgcttcctaggttatactaaggcctaagggtcaaggtcaaggtcaaggtcagagtcagggtcaggcctttacttactctttggttcc

SEQ ID NO: 43902 - DNA, 96 bp, Fusarium phaseoli
  misc_feature: 37
cggcggagaggttacggtcgagatatcgagaggccgaacgaacccgtatgcaatggtttcggtcggtggttattcggtcgagtggtggggggggga

SEQ ID NO: 43903 - DNA, 96 bp, Fusarium phaseoli
  misc_feature: 37
tcaccacaaccactccccctaaccttcaccacaaccactccccctaaccttcaccacaaccacttaaccctaaccctcaactcaaccactccccct

SEQ ID NO: 43904 - DNA, 96 bp, Fusarium phaseoli
  misc_feature: 37
taaagggttagggtatagggtaattaattaaatagttagggttaataaagaattaaaggttagagttaataaagggtttaaaggttagagtttata

SEQ ID NO: 43905 - DNA, 96 bp, Fusarium phaseoli
  misc_feature: 37
atataataccacacccactccgcttatctaactctaccttaaaattcgccgtatcttacccctccttcctcatatttaatattcactttatcccta

SEQ ID NO: 43906 - DNA, 96 bp, Fusarium phaseoli
  misc_feature: 37
tagggactagtaacctctggcgttaagagttagaaaagtgaaggtaaccgctactgtctaggagaggagagttgggaaagtgagactaaccgctgc

SEQ ID NO: 43907 - DNA, 96 bp, Fusarium phaseoli
  misc_feature: 37
gagtagagacatgtagaagctgagcgtggcttctttgagctgattaaacgtcttggtaaccggttgattagatagatccccttgagactctttcta

SEQ ID NO: 43908 - DNA, 96 bp, Fusarium phaseoli
  misc_feature: 37
gtttacgtctttgctcagctacttatcacaatatggcattccactcagctcaaacatgagctacggccgagtcagatccagcaatatattacgtta

SEQ ID NO: 43909 - DNA, 96 bp, Fusarium phaseoli
  misc_feature: 37
gttcctcttttactcacactacttcccagcatattagcgggcagattgtttgaaaacctcatacaagtagaaatggcgctattaaagaccaggggg

SEQ ID NO: 43910 - DNA, 96 bp, Fusarium phaseoli
  misc_feature: 37
gcataaatcaagtctaacacctgtaatgtgggggcgaaataaatcaattcagtagaattagtctcgaaacatcaccaccgctcatatcgataccac

SEQ ID NO: 43911 - DNA, 96 bp, Fusarium phaseoli
  misc_feature: 37
gccagtaaagaagcatgcgaccaagagagatgcgaccaagagagatgcgaccaagagagatgccaccaagagagatgccaccaagagagatgccac

SEQ ID NO: 43912 - DNA, 96 bp, Fusarium phaseoli
  misc_feature: 37
acatcggccaaaatgccccatcttctgcccactggcccccctgccctcgccgttacatacggcaacggcactgtcacgctgcgtctctgcctccac

SEQ ID NO: 43913 - DNA, 96 bp, Fusarium phaseoli
  misc_feature: 37
gtgcgcatctatactgatctgattaattgattgcctttgttcctcttttactcacactacttcccagcatattagcgggcagattgtttgaaaacc

SEQ ID NO: 43914 - DNA, 96 bp, Fusarium phaseoli
  misc_feature: 37
aagggaagtttgaaaagggaagtttgaaaagggaagtttgaaaagggaagtttgaaaagggaagtttgaaaagggaagtttgaaaaaggagggcac

SEQ ID NO: 43915 - DNA, 96 bp, Fusarium phaseoli
  misc_feature: 37
ggaagttgtgagcatgcagctcagtgagacattcgcttatctgcgacattcgcttatcacgtacgttatcagactgctccgaattgagacggcgac

SEQ ID NO: 43916 - DNA, 96 bp, Fusarium phaseoli
  misc_feature: 37
accgagccaacggtcagatcgagaaggcaacagaactgctagagcatgtggttgcgattcaggagaagacattagcggagaatcacccaaatcgac

SEQ ID NO: 43917 - DNA, 96 bp, Fusarium phaseoli
  misc_feature: 37
ctttaagttaaaggtaatacttttttcttctctttcttattatcttcttccttttttacctttatatctcgctagtttttccttaatagctcttac

SEQ ID NO: 43918 - DNA, 96 bp, Fusarium phaseoli
  misc_feature: 37
ggttaccttcacttttctaactcttaacgccagaggttactagtccctaactgcccccgcccttttgccccttgctctccggcaaccttcataacc

SEQ ID NO: 43919 - DNA, 96 bp, Fusarium phaseoli
  misc_feature: 37
aatattcactttatccctaaccgtaaattaacctcctacttctcttataatccgcctttatcttaactacctcatcttaactaccttatcttgacc

SEQ ID NO: 43920 - DNA, 96 bp, Fusarium phaseoli
  misc_feature: 37
aacctatctattccttacttaacgtcctcattattattattatctcctcccaccttatatataataccacacccactccgcttatctaactctacc

SEQ ID NO: 43921 - DNA, 96 bp, Fusarium phaseoli
  misc_feature: 37
ggagtggttgtggtgaaggttagggggagtggttgagttgagggttagggggagtggttgagataaagtttagagtgaagggttagaaagaggggg

SEQ ID NO: 43922 - DNA, 96 bp, Fusarium phaseoli
  misc_feature: 37
gcgggaggttatgaaggttgccggagagcaaggggcaaaagggcgggggcagttagggactagtaacctctggcgttaagagttagaaaagtgaag

SEQ ID NO: 43923 - DNA, 96 bp, Fusarium phaseoli
  misc_feature: 37
gccagtgggcagaagatggggcattttggccgatgtttccagtaggcgttagcacccaccgagagcagtaaggaggatggaggtgaaataccgagg

SEQ ID NO: 43924 - DNA, 96 bp, Fusarium phaseoli
  misc_feature: 37
gaatttttagcgccgttttgatttatcccatgagtgcccacaagactgcaaccaggtcacgacggggggttgaggccaatcaaaactcccagtggc

SEQ ID NO: 43925 - DNA, 96 bp, Fusarium phaseoli
  misc_feature: 37
agttagatcggctgcgccgagaatataacacattacgttcgaactgggcttctaactttgtcaagcgacactcagagctcacaacgcgttttaatc

SEQ ID NO: 43926 - DNA, 96 bp, Fusarium phaseoli
  misc_feature: 37
gagggagggagcgggtggttatgagggttagtttaaggggactaaggtgttatttacctgtaaccctaaccctaaggcaatgcctaggttttcgtt

SEQ ID NO: 43927 - DNA, 96 bp, Fusarium phaseoli
  misc_feature: 37
gaggaggtaccagttgagttgaattggttgattacgcactctgacgagataccgagcttgttacacagagatagtcgagggtaaacaaatcccttg

SEQ ID NO: 43928 - DNA, 96 bp, Fusarium phaseoli
  misc_feature: 37
gaggaaaggaagcgagtgttgggaacaagtccgacgaggtatatatatagtgaaatcggcagtcattttaggacacttcacgatgaggcgaaactg

SEQ ID NO: 43929 - DNA, 96 bp, Fusarium phaseoli
  misc_feature: 37
gacttgatattgttagcatgctcttttgccttttcagacggaaaattctaagcttacgatcaaagtgaaagttccaaaacttctggctcaagtgtt

SEQ ID NO: 43930 - DNA, 96 bp, Fusarium phaseoli
  misc_feature: 37
ctccctccctcgcttcctaggttatactaaggcctaagggtcaaggtcaaggtcaaggtcagagtcagggtcaggcctttacttactctttggttc

SEQ ID NO: 43931 - DNA, 96 bp, Fusarium phaseoli
  misc_feature: 37
caagggcccaagggccaacagaatgttactctcgataacgctctgtatgttccggaaggatgctcaaacctactgtccgtgtcagcactggagaag

SEQ ID NO: 43932 - DNA, 96 bp, Fusarium phaseoli
  misc_feature: 37
ctggcaaccaggggccgcgcctgctggttgttactggtcaactccctaccacggaacgtcataaaaaaacaccaccaccagctcagaacacatttt

SEQ ID NO: 43933 - DNA, 96 bp, Fusarium phaseoli
  misc_feature: 37
cgagggagggagcgggtggttatgagggttagtttaaggggactaaggtgttatttacctgtaaccctaaccctaaggcaatgcctaggttttcgt

SEQ ID NO: 43934 - DNA, 96 bp, Fusarium phaseoli
  misc_feature: 37
aggcgctatcctagctgcgcggcggattcgctagcaaatccaatgggtttcccatacaaaaaaaaaaggcgctatcctagctgcgcggcggattcg

SEQ ID NO: 43935 - DNA, 96 bp, Fusarium phaseoli
  misc_feature: 37
agagagagattgaggatgcagccaacagtctaaagatacgcagagacccgtcagcaagccctgttagcaagaagtagtacgcaaggtggcgtaatg

SEQ ID NO: 43936 - DNA, 96 bp, Fusarium phaseoli
  misc_feature: 37
aagccggatgatcttattatccttgcaatagttctcaaattcgatagagtagtgactttcgtagctattgaggatcaagagacgataggaaccaat

SEQ ID NO: 43937 - DNA, 96 bp, Fusarium phaseoli
  misc_feature: 37
attaaataatactatattatcttcaataaatataatatatcgcttaagctttaatattacttaagatatagataataattataaaaagatttatat

SEQ ID NO: 43938 - DNA, 96 bp, Fusarium phaseoli
  misc_feature: 37
atactgatctgattaattgattgcctttgttcctcttttactcacactacttcccagcatattagcgggcagattgtttgaaaacctcatacaagt

SEQ ID NO: 43939 - DNA, 96 bp, Fusarium phaseoli
  misc_feature: 37
acctaggcattgccttagggttagggttacaggtaaataacaccttagtccccttaaactaaccctcataaccacccgctccctccctcgcttcct

SEQ ID NO: 43940 - DNA, 96 bp, Fusarium phaseoli
  misc_feature: 36
ttttggacatctgcaaagtgatgattctagcctctgctgaatcgtgccgctataaatatccatcgctatggccaaagatctttcacactcatcatc

SEQ ID NO: 43941 - DNA, 96 bp, Fusarium phaseoli
  misc_feature: 36
ttgtgcgcatctatactgatctgattaattgattgcctttgttcctcttttactcacactacttcccagcatattagcgggcagattgtttgaaaa

SEQ ID NO: 43942 - DNA, 96 bp, Fusarium phaseoli
  misc_feature: 36
tattatatataaggtgggaggagataataataataatgaggacgttaagtaaggaatagataggttagggtaagagggagtataagagggttaaaa

SEQ ID NO: 43943 - DNA, 96 bp, Fusarium phaseoli
  misc_feature: 36
tttggcggatttggtcgaggtgcacgtcgatgatccggaggcacatccattagacgaggaccgagtggacggggtgacattgcaggtcgtcatggc

SEQ ID NO: 43944 - DNA, 96 bp, Fusarium phaseoli
  misc_feature: 36
acagatttcgctgggtggagtgtcaattcaaagcactggccagttgtccgcagagcgaagaccttctcgaacaactgctcgattccctgcctcaaa

SEQ ID NO: 43945 - DNA, 96 bp, Fusarium phaseoli
  misc_feature: 36
tttcgtttgacccgggaagtcaagaggtaagcgggaggttatgaaggttgccggagagcaaggggcaaaagggcgggggcagttagggactagtaa

SEQ ID NO: 43946 - DNA, 96 bp, Fusarium phaseoli
  misc_feature: 36
ttaacgtaatatattgctggatctgactcggccgtagctcatgtttgagctgagtggaatgccatattgtgataagtagctgagcaaagacgtaaa

SEQ ID NO: 43947 - DNA, 96 bp, Fusarium phaseoli
  misc_feature: 36
gtattatatataaggtgggaggagataataataataatgaggacgttaagtaaggaatagataggttagggtaagagggagtataagagggttaaa

SEQ ID NO: 43948 - DNA, 96 bp, Fusarium phaseoli
  misc_feature: 36
ttgtgagcatgcagctcagtgagacattcgcttatctgcgacattcgcttatcacgtacgttatcagactgctccgaattgagacggcgactgacg

SEQ ID NO: 43949 - DNA, 96 bp, Fusarium phaseoli
  misc_feature: 36
atgcatttttctgtacacgtacgtacgtacgtactgtattttgggtagctgtacgtacgtacaacttttctgtacgtacaaaactgtaccatacaa

SEQ ID NO: 43950 - DNA, 96 bp, Fusarium phaseoli
  misc_feature: 36
agctgcgcggcggattcgctagcaaatccaatgggtttcccatacaaaaaaaaaaggcgctatcctatcctagctgcgcggcggattcgctagcaa

SEQ ID NO: 43951 - DNA, 96 bp, Fusarium phaseoli
  misc_feature: 36
ttgagggttagggttaagtggttgtggtgaaggttagggggagtggttgtggtgaaggttagggggagtggttgtggtgaaggttagggggggggg

SEQ ID NO: 43952 - DNA, 96 bp, Fusarium phaseoli
  misc_feature: 36
gcacttgtcttctgtgaatgagctccacagaaagaagtggccgttcttatgcaaaagcgggtgcagcgattctgtcttccagatcaaggaatagaa

SEQ ID NO: 43953 - DNA, 96 bp, Fusarium phaseoli
  misc_feature: 36
ttcgtttgacccgggaagtcaagaggtaagcgggaggttatgaaggttgccggagagcaaggggcaaaagggcgggggcagttagggactagtaac

SEQ ID NO: 43954 - DNA, 96 bp, Fusarium phaseoli
  misc_feature: 36
ggtaatattaatttaaagaagagaaaaaaaaaaaaaagaaagaaataagtaataaaagaaaaggtttagggtagaagtaaataaaaaagagaggaa

SEQ ID NO: 43955 - DNA, 96 bp, Fusarium phaseoli
  misc_feature: 36
gggaaagctcatgaagcaaatcctggcgactgcgagggtcatccatgtttttatggagttggtgaatccgatgtttgcgttcaatggcgacgtgaa

SEQ ID NO: 43956 - DNA, 96 bp, Fusarium phaseoli
  misc_feature: 36
gaaaccgacgaagtatgaagacggagaagaagatatggcaatcgcacaaggtaaaggggactctattcataatgagaaagcttgagaaagattgaa

SEQ ID NO: 43957 - DNA, 96 bp, Fusarium phaseoli
  misc_feature: 36
tggtgcctgatcaccatgctctggggtttgatcagggtgattgtgtaagtgatcgcggtaatcagaaaggtgatcaccgtgatcgttctggcgttg

SEQ ID NO: 43958 - DNA, 96 bp, Fusarium phaseoli
  misc_feature: 36
ggcataaatcaagtctaacacctgtaatgtgggggcgaaataaatcaattcagtagaattagtctcgaaacatcaccaccgctcatatcgatacca

SEQ ID NO: 43959 - DNA, 96 bp, Fusarium phaseoli
  misc_feature: 36
gtagacatgcagggtacctaactgttgctagataagtgcataggtctgggctagctgcatttttgcgaatcaggccttcttttgctagttaatcca

SEQ ID NO: 43960 - DNA, 96 bp, Fusarium phaseoli
  misc_feature: 36
gacgtttggagaatccttcaggtctgtcgccaattggaaaccagacatctacgtctcgctcatcctggaatttacgaagcatttcactctgctcca

SEQ ID NO: 43961 - DNA, 96 bp, Fusarium phaseoli
  misc_feature: 36
tgatttggcggatttggtcgaggtgcacgtcgatgatccggaggcacatccattagacgaggaccgagtggacggggtgacattgcaggtcgtcat

SEQ ID NO: 43962 - DNA, 96 bp, Fusarium phaseoli
  misc_feature: 36
acggagtcgagcgtcccagcgaaacaggcatactgtaacagacccggggcggcgtttggatctgcgcctgcatctagcagcatcgataggatctca

SEQ ID NO: 43963 - DNA, 96 bp, Fusarium phaseoli
  misc_feature: 36
tgacttgatattgttagcatgctcttttgccttttcagacggaaaattctaagcttacgatcaaagtgaaagttccaaaacttctggctcaagtgt

SEQ ID NO: 43964 - DNA, 96 bp, Fusarium phaseoli
  misc_feature: 36
tgacggcacggtataatacggcatgaccggtggttgagcatgtgctccactgcacttcaaggacagcgcatcagtgagggcgcccacgtaatctcg

SEQ ID NO: 43965 - DNA, 96 bp, Fusarium phaseoli
  misc_feature: 36
tgaaagggaagtttgaaaagggaagtttgaaaagggaagtttgaaaagggaagtttgaaaagggaagtttgaaaagggaagtttgaaaaaggaggg

SEQ ID NO: 43966 - DNA, 96 bp, Fusarium phaseoli
  misc_feature: 36
tcttctcggacaatgcggaaccaacgggttgcacgaagacattgttagcgccgtggaagatgaaagaagaatcgcagctattctcgaagcgatgga

SEQ ID NO: 43967 - DNA, 96 bp, Fusarium phaseoli
  misc_feature: 36
taatattaatttaaagaagagaaaaaaaaaaaaaagaaagaaataagtaataaaagaaaaggtttagggtagaagtaaataaaaaagagaggaaga

SEQ ID NO: 43968 - DNA, 96 bp, Fusarium phaseoli
  misc_feature: 36
tcgtttgacccgggaagtcaagaggtaagcgggaggttatgaaggttgccggagagcaaggggcaaaagggcgggggcagttagggactagtaacc

SEQ ID NO: 43969 - DNA, 96 bp, Fusarium phaseoli
  misc_feature: 36
ggtgacggggaaccaaagagtaagtaaaggcctgaccctgactctgaccttgaccttgaccttgacccttaggccttagtataacctaggaagcga

SEQ ID NO: 43970 - DNA, 96 bp, Fusarium phaseoli
  misc_feature: 36
tcgctgcagctgtgcatacgcagaattctgagatcctatcgatgctgctagatgcaggcgcagatccaaacgccgccccgggtctgttacagtatg

SEQ ID NO: 43971 - DNA, 96 bp, Fusarium phaseoli
  misc_feature: 36
gccgactttttccaccgaccagaattctctcacgcatcgctacatctgctgatgcagtccacaatctccagtaaccaagttgtagcccgtagtcga

SEQ ID NO: 43972 - DNA, 96 bp, Fusarium phaseoli
  misc_feature: 36
cggcggagaggttacggtcgagatatcgagaggccgaacgaacccgtatgcaatggtttcggtcggtggttattcggtcgagtggtggagggggga

SEQ ID NO: 43973 - DNA, 96 bp, Fusarium phaseoli
  misc_feature: 36
tatttttaaccctcttatactccctcttaccctaacctatctattccttacttaacgtcctcattattattattatctcctcccaccttatatata

SEQ ID NO: 43974 - DNA, 96 bp, Fusarium phaseoli
  misc_feature: 36
tattttatccggtaaaatgcattttaattacatgcaccgattcacgatataaagcattagatcggaagagcgtcgtgtagggaaagagtgtagatc

SEQ ID NO: 43975 - DNA, 96 bp, Fusarium phaseoli
  misc_feature: 36
tattcccatataatatagcgtttacgtttatatagaaaagctattttttattaagttatagcggttatttcctgacttagtcttgatttttttttt

SEQ ID NO: 43976 - DNA, 96 bp, Fusarium phaseoli
  misc_feature: 36
gaccatctcagccgttcttctcattaagtatcgaatcgactgttgagtcgttacgaaactgccaaccatcaaagcactacagttcagtgcaggata

SEQ ID NO: 43977 - DNA, 96 bp, Fusarium phaseoli
  misc_feature: 36
tatatataataccacacccactccgcttatctaactctaccttaaaattcgccgtatcttacccctccttcctcatatttaatattcactttatcc

SEQ ID NO: 43978 - DNA, 96 bp, Fusarium phaseoli
  misc_feature: 36
atgcgagctagatttaaccttggaatgaatagaagcttcacattgcatcatattaacgtcacttgagaagccccattgtctttgacagcgtaacta

SEQ ID NO: 43979 - DNA, 96 bp, Fusarium phaseoli
  misc_feature: 36
tagtatggagcaagagtgtacacagtatgcgtgtgtacttatgcttgacatttagggctttgtttttaaaacaagagttattgtaggagaggaagg

SEQ ID NO: 43980 - DNA, 96 bp, Fusarium phaseoli
  misc_feature: 36
cgctatcctagctgcgcggcggattcgctagcaaatccaatgggtttcccatacaaaaaaaaaaggcgctatcctagctgcgcggcggattcgcta

SEQ ID NO: 43981 - DNA, 96 bp, Fusarium phaseoli
  misc_feature: 36
ctaagaagatataagtctaagttctagaactatctaattaatctatccccattcagcccgagtcctctctatcactctcagcctcctcctcggcta

SEQ ID NO: 43982 - DNA, 96 bp, Fusarium phaseoli
  misc_feature: 36
tagccacgcccacccacgttggcagtcatgcattgttcgaggtgcagcggaaagaggtgggcaagaagccacggcggccgttcgacaaccggggcg

SEQ ID NO: 43983 - DNA, 96 bp, Fusarium phaseoli
  misc_feature: 36
tacttaacgtcctcattattattattatctcctcccaccttatatataataccacacccactccgcttatctaactctaccttaaaattcgccgta

SEQ ID NO: 43984 - DNA, 96 bp, Fusarium phaseoli
  misc_feature: 36
tacgtctttgctcagctacttatcacaatatggcattccactcagctcaaacatgagctacggccgagtcagatccagcaatatattacgttaatg

SEQ ID NO: 43985 - DNA, 96 bp, Fusarium phaseoli
  misc_feature: 36
tacaaagccggatgatcttattatccttgcaatagttctcaaattcgatagagtagtgactttcgtagctattgaggatcaagagacgataggaac

SEQ ID NO: 43986 - DNA, 96 bp, Fusarium phaseoli
  misc_feature: 36
cttgaccttgacccttaggccttagtataacctaggaagcgagggagggagcgggtggttatgagggttagtttaaggggactaaggtgttattta

SEQ ID NO: 43987 - DNA, 96 bp, Fusarium phaseoli
  misc_feature: 36
actagcagcatgcgtattcgtgtacttacctgactaatacaaatgacagtactctcgactcgcactgtcaacctgtctccacttccccggattcac

SEQ ID NO: 43988 - DNA, 96 bp, Fusarium phaseoli
  misc_feature: 36
gtccccttaaactaaccctcataaccacccgctccctccctcgcttcctaggttatactaaggcctaagggtcaaggtcaaggtcaaggtcagagt

SEQ ID NO: 43989 - DNA, 96 bp, Fusarium phaseoli
  misc_feature: 36
cttctcggacaatgcggaaccaacgggttgcacgaagacattgttagcgccgtggaagatgaaagaagaatcgcagctattctcgaagcgatggac

SEQ ID NO: 43990 - DNA, 96 bp, Fusarium phaseoli
  misc_feature: 36
gtaagaggacatttagatggccaaaagccaacgaactgttataccaaacgatgtttctaaaatggcatcatgtcggggatcacggcgccgacagtg

SEQ ID NO: 43991 - DNA, 96 bp, Fusarium phaseoli
  misc_feature: 36
ggtcaaggtcaaggtcaaggtcagagtcagggtcaggcctttacttactctttggttccccgtcacccttacgccctgcccttgctcctcgcctcc

SEQ ID NO: 43992 - DNA, 96 bp, Fusarium phaseoli
  misc_feature: 36
ggtaaggttaagggtaaggttaagggtaaggttaagggtaaggttaaggatcagtgtggtcttcagggttggggttggggcggtcgtgaaagtgtc

SEQ ID NO: 43993 - DNA, 96 bp, Fusarium phaseoli
  misc_feature: 36
gatgccttgaggaacgaagtgacgaaaggttttatgccgccatctttttccggggcctcaaaatcacctgacttcttccaatcaaaagtttgaccc

SEQ ID NO: 43994 - DNA, 96 bp, Fusarium phaseoli
  misc_feature: 36
cctattctcccttctgctctgaccaccgtctctccaaccgcgtaataacctggcatccacggcttgcttatatgccaccgccggtccttccacccc

SEQ ID NO: 43995 - DNA, 96 bp, Fusarium phaseoli
  misc_feature: 36
ccacgtctgtcgcggatggcaattgatctcttttcagttccggccatgtttgtttgtttgtttgtttgttttattcatagactgtcccagccgccc

SEQ ID NO: 43996 - DNA, 96 bp, Fusarium phaseoli
  misc_feature: 36
gggcattttggccgatgtttccagtaggcgttagcacccaccgagagcagtaaggaggatggaggtgaaataccgagttttgagagtggggtgggt

SEQ ID NO: 43997 - DNA, 96 bp, Fusarium phaseoli
  misc_feature: 36
atatataataccacacccactccgcttatctaactctaccttaaaattcgccgtatcttacccctccttcctcatatttaatattcactttatccc

SEQ ID NO: 43998 - DNA, 96 bp, Fusarium phaseoli
  misc_feature: 36
agacgatgccgcctgtaaagtgcttctgtactctccacctttcgcgttaatgtctgcacctttgtccagcagaagctgaacaattttctcattgcc

SEQ ID NO: 43999 - DNA, 96 bp, Fusarium phaseoli
  misc_feature: 36
ggaaatcgatcgtatagatcgattccgagccctgatcgatcgattcatatcgagcgtcaccttgtttgtttgtttgtttgtttgtttgtttgtttc

SEQ ID NO: 44000 - DNA, 96 bp, Fusarium phaseoli
  misc_feature: 36
agagagacagataacagttatgatccatccgtggatactatgctgcgattctattatgaaatagttaccgaacacttcgaagatagaagggcaagc

SEQ ID NO: 44001 - DNA, 96 bp, Fusarium phaseoli
  misc_feature: 36
gcttatggcaaagtattactttaaaagttattgaagctgctcttaaatgtatactgtgtctagaagcttgatagtgacactgtgtaggccctgcct

SEQ ID NO: 44002 - DNA, 96 bp, Fusarium phaseoli
  misc_feature: 36
cctcctagtgcaagggcccaagggccaacagaatgttactctcgataacgctctgtatgttccggaaggatgctcaaacctactgtccgtgtcagc

SEQ ID NO: 44003 - DNA, 96 bp, Fusarium phaseoli
  misc_feature: 36
cacaggggaaacagaaccaactcggtgatcgtccatttcaacagctccttgtcatcgtatttgatttgaatctgaagagtgagataagcatcccgc

SEQ ID NO: 44004 - DNA, 96 bp, Fusarium phaseoli
  misc_feature: 36
gcgctatcctagctgcgcggcggattcgctagcaaatccaatgggtttcccatacaaaaaaaaaaggcgctatcctagctgcgcggcggattcgct

SEQ ID NO: 44005 - DNA, 96 bp, Fusarium phaseoli
  misc_feature: 36
cgtatcgcggctgatcaaggagattggcgtggagcttgattcagcacggctgaacctgtggtgcgataaccagcagacaattcgtctcgtcaatgc

SEQ ID NO: 44006 - DNA, 96 bp, Fusarium phaseoli
  misc_feature: 36
cgctgcagctgtgcatacgcagaattctgagatcctatcgatgctgctagatgcaggcgcagatccaaacgccgccccgggtctgttacagtatgc

SEQ ID NO: 44007 - DNA, 96 bp, Fusarium phaseoli
  misc_feature: 36
gattcccaatcaatggcattgcgaacgcaacagttatgccaggagaacgtggaacctacttcctcctagtgcaagggcccaagggccaacagaatg

SEQ ID NO: 44008 - DNA, 96 bp, Fusarium phaseoli
  misc_feature: 36
gatagataacgggggaggaggataaagtatataaagaggattacggtaatattagggtatattatatataagaagaaaagaggaagtacggaggag

SEQ ID NO: 44009 - DNA, 96 bp, Fusarium phaseoli
  misc_feature: 36
ctccccctaaccttcaccacaaccactccccctaaccttcaccacaaccactccccctaaccttcaccacaaccacttaaccctaaccctcaactc

SEQ ID NO: 44010 - DNA, 96 bp, Fusarium phaseoli
  misc_feature: 36
aaccttcaccacaaccactccccctaaccttcaccacaaccacttaaccctaaccctcaactcaaccactccccctaaccctcaccacaaccactc

SEQ ID NO: 44011 - DNA, 96 bp, Fusarium phaseoli
  misc_feature: 36
gacccgtttttcccctctcattaacgtaatatattgctggatctgactcggccgtagctcatgtttgagctgagtggaatgccatattgtgataag

SEQ ID NO: 44012 - DNA, 96 bp, Fusarium phaseoli
  misc_feature: 36
gaaagagatcagttagcgatagaatgcattgagggatctcccattactgacaacctcactaggaacaatcataattgattcaatcaacacatctct

SEQ ID NO: 44013 - DNA, 96 bp, Fusarium phaseoli
  misc_feature: 36
agggaaagcgcaggtaatccgagggtaaagctcaggatataactaatcaatttccaccctatcacacttcgtcttaagcataagccttctaagaag

SEQ ID NO: 44014 - DNA, 96 bp, Fusarium phaseoli
  misc_feature: 36
agaggagagttgggaaagtgagactaaccgctgctgtccgggggagaagagttggacaagtgaggctaaccgctattgtccaggagaggaggagag

SEQ ID NO: 44015 - DNA, 96 bp, Fusarium phaseoli
  misc_feature: 36
cgtgaatccggggaagtggagacaggttgacagtgcgagtcgagagtactgtcatttgtattagtcaggtaagtacacgaatacgcatgctgctag

SEQ ID NO: 44016 - DNA, 96 bp, Fusarium phaseoli
  misc_feature: 36
cgggaggttatgaaggttgccggagagcaaggggcaaaagggcgggggcagttagggactagtaacctctggcgttaagagttagaaaagtgaagg

SEQ ID NO: 44017 - DNA, 96 bp, Fusarium phaseoli
  misc_feature: 36
cgagccggatagagactatccgaaggatgaaacacatagcagtctcagcactttgtatcactcccgctgtctgggaatgggacgacgatctgtttt

SEQ ID NO: 44018 - DNA, 96 bp, Fusarium phaseoli
  misc_feature: 36
cgacctcgtcagtgatgcaaggtgcctccaaatccagtggcgcatttttccaagagcgagagtaagacattaaccgaggacttgttaggcaactat

SEQ ID NO: 44019 - DNA, 96 bp, Fusarium phaseoli
  misc_feature: 36
cgaccatctcagccgttcttctcattaagtatcgaatcgactgttgagtcgttacgaaactgccaaccatcaaagcactacagttcagtgcaggat

SEQ ID NO: 44020 - DNA, 96 bp, Fusarium phaseoli
  misc_feature: 36
cgacaaccaaccaggaatcgatcgattcttttttgaatcgcctttttgatctacttcagccttctgctctaagcgtgagcaaggctctttccacgg

SEQ ID NO: 44021 - DNA, 96 bp, Fusarium phaseoli
  misc_feature: 36
ataacgggggaggaggataaagtatataaagaggattacggtaatattagggtatattatatataagaagaaaagaggaagtacggaggagaatgg

SEQ ID NO: 44022 - DNA, 96 bp, Fusarium phaseoli
  misc_feature: 36
aggaggtaccagttgagttgaattggttgattacgcactctgacgagataccgagcttgttacacagagatagtcgagggtaaacaaatcccttgg

SEQ ID NO: 44023 - DNA, 96 bp, Fusarium phaseoli
  misc_feature: 36
aggactcaatatggtatctgatcacctgagactgttcacgatctacctttggaagtacctctctcccactcgagtgtatcttatttaagatttatg

SEQ ID NO: 44024 - DNA, 96 bp, Fusarium phaseoli
  misc_feature: 36
cacgtctgtcgcggatggcaattgatctcttttcagttccggccatgtttgtttgtttgtttgtttgttttattcatagactgtcccagccgccct

SEQ ID NO: 44025 - DNA, 96 bp, Fusarium phaseoli
  misc_feature: 36
atgcctctttggtggcatctctcttggtggcatctctcttggtggcatctctcttggtcgcatctctcttggtcgcatctctcttggtcgcatgct

SEQ ID NO: 44026 - DNA, 96 bp, Fusarium phaseoli
  misc_feature: 36
aatgttgttggccagcagttgatacatcgcatggccactgacacgcggggtgagcccaaggatctcgttggagatgggacacagctctaggcagat

SEQ ID NO: 44027 - DNA, 96 bp, Fusarium phaseoli
  misc_feature: 36
aaccacccgctccctccctcgcttcctaggttatactaaggcctaagggtcaaggtcaaggtcaaggtcagagtcagggtcaggcctttacttact

SEQ ID NO: 44028 - DNA, 96 bp, Fusarium phaseoli
  misc_feature: 36
agggagggagcgggtggttatgagggttagtttaaggggactaaggtgttatttacctgtaaccctaaccctaaggcaatgcctaggttttcgttt

SEQ ID NO: 44029 - DNA, 96 bp, Fusarium phaseoli
  misc_feature: 36
aggctaatgaaacgaccgtacgtcggtcgaattgccagtcagggctgagtgcagggattcatgacgccacaaggatcactcggacgaagccaaatt

SEQ ID NO: 44030 - DNA, 96 bp, Fusarium phaseoli
  misc_feature: 36
aaggctttcttcctttcttttttttgttccttttagataaaatccataaatatagcggagagaaggcaagtgtcttgtagctcataggaaaggctt

SEQ ID NO: 44031 - DNA, 96 bp, Fusarium phaseoli
  misc_feature: 35
tttttcaaacttcccttttcaaacttcccttttcaaacttcccttttcaaacttcccttttcaaacttcccttttcaaacttccctttcaacccta

SEQ ID NO: 44032 - DNA, 96 bp, Fusarium phaseoli
  misc_feature: 35
tttcacgaccgccccaaccccaaccctgaagaccacactgatccttaaccttacccttaaccttacccttaaccttacccttaaccttacccttaa

SEQ ID NO: 44033 - DNA, 96 bp, Fusarium phaseoli
  misc_feature: 35
tttatccggtaaaatgcattttaattacatgcaccgattcacgatataaagcattagatcggaagagcgtcgtgtagggaaagagtgtagatctcg

SEQ ID NO: 44034 - DNA, 96 bp, Fusarium phaseoli
  misc_feature: 35
tttatcccccctattctcccttctgctctgaccaccgtctctccaaccgcgtaataacctggcatccacggcttgcttatatgccaccgccgggcc

SEQ ID NO: 44035 - DNA, 96 bp, Fusarium phaseoli
  misc_feature: 35
aggattcccaatcaatggcattgcgaacgcaacagttatgccaggagaacgtggaacctacttcctcctagtgcaagggcccaagggccaacagaa

SEQ ID NO: 44036 - DNA, 96 bp, Fusarium phaseoli
  misc_feature: 35
ttctccctactagatttcaacgatgctccatttcgcggcatcgttcactcccgtcctcaccaccatgagccatgcgaggcccgtcagctggcacgg

SEQ ID NO: 44037 - DNA, 96 bp, Fusarium phaseoli
  misc_feature: 35
gcggttaccttcacttttctaactcttaacgccagaggttactagtccctaactgcccccgcccttttgccccttgctctccggcaaccttcataa

SEQ ID NO: 44038 - DNA, 96 bp, Fusarium phaseoli
  misc_feature: 35
ttacacgactaatcctttattattcttctatgcgctactctttatgtcttaactaaccaaatgatcagttaaccggccattccgaaacactattgt

SEQ ID NO: 44039 - DNA, 96 bp, Fusarium phaseoli
  misc_feature: 35
cagtaaagaagcatgcgaccaagagagatgcgaccaagagagatgcgaccaagagagatgccaccaagagagatgccaccaagagagatgccacca

SEQ ID NO: 44040 - DNA, 96 bp, Fusarium phaseoli
  misc_feature: 35
tggtctagtcacgtcaggaattggtccttgttgtctccttggagtggcaagatctcgatctagtcgcagaagttggtaggggctgtacctggtatc

SEQ ID NO: 44041 - DNA, 96 bp, Fusarium phaseoli
  misc_feature: 35
ctattctcccttctgctctgaccaccgtctctccaaccgcgtaataacctggcatccacggcttgcttatatgccaccgccggtccttccacccca

SEQ ID NO: 44042 - DNA, 96 bp, Fusarium phaseoli
  misc_feature: 35
aacttgactcacttgaattgaagtcatcggaaaggcacctttcctatccgtagttccctctactgtaggtttcgctaaagcccgtcaatacaagca

SEQ ID NO: 44043 - DNA, 96 bp, Fusarium phaseoli
  misc_feature: 35
ctcctagtgcaagggcccaagggccaacagaatgttactctcgataacgctctgtatgttccggaaggatgctcaaacctactgtccgtgtcagca

SEQ ID NO: 44044 - DNA, 96 bp, Fusarium phaseoli
  misc_feature: 35
tctccagtgctgacacggacagtaggtttgagcatccttccggaacatacagagcgttatcgagagtaacattctgttggcccttgggcccttgca

SEQ ID NO: 44045 - DNA, 96 bp, Fusarium phaseoli
  misc_feature: 35
gaaatcgatcgtatagatcgattccgagccctgatcgatcgattcatatcgagcgtcaccttgtttgtttgtttgtttgtttgtttgtttgtttca

SEQ ID NO: 44046 - DNA, 96 bp, Fusarium phaseoli
  misc_feature: 35
caagagagatgcgaccaagagagatgcgaccaagagagatgccaccaagagagatgccaccaagagagatgccaccaaagaggcatgcaaccaaga

SEQ ID NO: 44047 - DNA, 96 bp, Fusarium phaseoli
  misc_feature: 35
aagggcccaagggccaacagaatgttactctcgataacgctctgtatgttccggaaggatgctcaaacctactgtccgtgtcagcactggagaaga

SEQ ID NO: 44048 - DNA, 96 bp, Fusarium phaseoli
  misc_feature: 35
gaaggagaggggataaacaagaatatatgggagagagtaagaagaagggatgaggggggagagaagagtaaagaagagaaagggaaagaagagaga

SEQ ID NO: 44049 - DNA, 96 bp, Fusarium phaseoli
  misc_feature: 35
tcctcctagtgcaagggcccaagggccaacagaatgttactctcgataacgctctgtatgttccggaaggatgctcaaacctactgtccgtgtcag

SEQ ID NO: 44050 - DNA, 96 bp, Fusarium phaseoli
  misc_feature: 35
aggaaaggaagcgagtgttgggaacaagtccgacgaggtatatatatagtgaaatcggcagtcattttaggacacttcacgatgaggcgaaactga

SEQ ID NO: 44051 - DNA, 96 bp, Fusarium phaseoli
  misc_feature: 35
tcagttctccctactagatttcaacgatgctccatttcgcggcatcgttcactcccgtcctcaccaccatgagccatgcgaggcccgtcagctggc

SEQ ID NO: 44052 - DNA, 96 bp, Fusarium phaseoli
  misc_feature: 35
tatgccagtaaagaagcatgcgaccaagagagatgcgaccaagagagatgcgaccaagagagatgccaccaagagagatgccaccaagagagatgc

SEQ ID NO: 44053 - DNA, 96 bp, Fusarium phaseoli
  misc_feature: 35
tatatgtaaccctattgcataagaacgctagctggaagagacttatacgtctgtatggatgtaccgacagagagctgtttcataaaccattaagtt

SEQ ID NO: 44054 - DNA, 96 bp, Fusarium phaseoli
  misc_feature: 35
tatagaaagttaaaggtttagcgataattaaaataaatataccttatttttagatattttatttagcgcttaagctccagttaatatcggtttagc

SEQ ID NO: 44055 - DNA, 96 bp, Fusarium phaseoli
  misc_feature: 35
tatactgatctgattaattgattgcctttgttcctcttttactcacactacttcccagcatattagcgggcagattgtttgaaaacctcatacaag

SEQ ID NO: 44056 - DNA, 96 bp, Fusarium phaseoli
  misc_feature: 35
gcgacctcgtcagtgatgcaaggtgcctccaaatccagtggcgcatttttccaagagcgagagtaagacattaaccgaggacttgttaggcaacta

SEQ ID NO: 44057 - DNA, 96 bp, Fusarium phaseoli
  misc_feature: 35
tagtccctaactgcccccgcccttttgccccttgctctccggcaaccttcataacctcccgcttacctcttgacttcccgggtcaaacgaaaacct

SEQ ID NO: 44058 - DNA, 96 bp, Fusarium phaseoli
  misc_feature: 35
tacaaattaaatgtgccttggtcaaggcacgtttacaataattggtagggttgtcgtccacaccatcgtcgtcttcttcgactccatccattgtcg

SEQ ID NO: 44059 - DNA, 96 bp, Fusarium phaseoli
  misc_feature: 35
ctttcacgaccgccccaaccccaaccctgaagaccacactgatccttaaccttacccttaaccttacccttaaccttacccttaaccttaccctta

SEQ ID NO: 44060 - DNA, 96 bp, Fusarium phaseoli
  misc_feature: 35
cctttaagttaaaggtaatacttttttcttctctttcttattatcttcttccttttttacctttatatctcgctagtttttccttaatagctctta

SEQ ID NO: 44061 - DNA, 96 bp, Fusarium phaseoli
  misc_feature: 35
taaatgtgccttggtcaaggcacgtttacaataattggtagggttgtcgtccacaccatcgtcgtcttcttcgactccatccattgtcgactcctt

SEQ ID NO: 44062 - DNA, 96 bp, Fusarium phaseoli
  misc_feature: 35
taaatcaagtctaacacctgtaatgtgggggcgaaataaatcaattcagtagaattagtctcgaaacatcaccaccgctcatatcgataccacatt

SEQ ID NO: 44063 - DNA, 96 bp, Fusarium phaseoli
  misc_feature: 35
gttcaatgactcgcaaaaggggcccttgattcgcaaaaatgcggtacttctgaaccgcgccaatttcctaggatttagaagtcacttcgttataag

SEQ ID NO: 44064 - DNA, 96 bp, Fusarium phaseoli
  misc_feature: 35
gtgccgactttttccaccgaccagaattctctcacgcatcgctacatctgctgatgcagtccacaatctccagtaaccaagttgtagcccgtagtc

SEQ ID NO: 44065 - DNA, 96 bp, Fusarium phaseoli
  misc_feature: 35
gtgagaacagaagatcaggagtttctgagaaggcttcattgtagatccaagatgctcacatatacttttgttcaagtctggccgagctaggcctgt

SEQ ID NO: 44066 - DNA, 96 bp, Fusarium phaseoli
  misc_feature: 35
caaaaacacaggaagaattgcgacgaaccacgaaggagaccagctgagattcgaagagcagtcgccctggattgaaaggacaggttgggataagac

SEQ ID NO: 44067 - DNA, 96 bp, Fusarium phaseoli
  misc_feature: 35
ggtttgttcctcttgacccagaaagggtggtctcgaagcttaatatgcggctatagacgctaatgcctaccgaggaggtagctaaactatcgaccc

SEQ ID NO: 44068 - DNA, 96 bp, Fusarium phaseoli
  misc_feature: 35
ggttctattccttgatctggaagacagaatcgctgcacccgcttttgcataagaacggccacttctttctgtggagctcattcacagaagacaagt

SEQ ID NO: 44069 - DNA, 96 bp, Fusarium phaseoli
  misc_feature: 35
ggttacaggtaaataacaccttagtccccttaaactaaccctcataaccacccgctccctccctcgcttcctaggttatactaaggcctaagggtc

SEQ ID NO: 44070 - DNA, 96 bp, Fusarium phaseoli
  misc_feature: 35
ccagtaaagaagcatgcgaccaagagagatgcgaccaagagagatgcgaccaagagagatgccaccaagagagatgccaccaagagagatgccacc

SEQ ID NO: 44071 - DNA, 96 bp, Fusarium phaseoli
  misc_feature: 35
aaaaacacaggaagaattgcgacgaaccacgaaggagaccagctgagattcgaagagcagtcgccctggattgaaaggacaggttgggataagacc

SEQ ID NO: 44072 - DNA, 96 bp, Fusarium phaseoli
  misc_feature: 35
cattcctccatcagttcggaggtagcacaaagagtggtccacaataatgctgcacaacaaaagctgtcaggacggaatgatcttccctccggaccc

SEQ ID NO: 44073 - DNA, 96 bp, Fusarium phaseoli
  misc_feature: 35
gaggcgaggagcaagggcagggcgtaagggtgacggggaaccaaagagtaagtaaaggcctgaccctgactctgaccttgaccttgaccttgaccc

SEQ ID NO: 44074 - DNA, 96 bp, Fusarium phaseoli
  misc_feature: 35
ggggagtggttgtggtgaaggttagggggagtggttgagttgagggttagggggagtggttgagataaagtttagagtgaagggttagaaagaggg

SEQ ID NO: 44075 - DNA, 96 bp, Fusarium phaseoli
  misc_feature: 35
gggaggttatgaaggttgccggagagcaaggggcaaaagggcgggggcagttagggactagtaacctctggcgttaagagttagaaaagtgaaggt

SEQ ID NO: 44076 - DNA, 96 bp, Fusarium phaseoli
  misc_feature: 35
cgctagcaaatccaatgggtttcccatacaaaaaaaaaaggcgctatcctatcctagctgcgcggcggattcgctagcaaatccaatgggtttccc

SEQ ID NO: 44077 - DNA, 96 bp, Fusarium phaseoli
  misc_feature: 35
ggctgtatcttggttgcatgcctctttggtggcatctctcttggtggcatctctcttggtggcatctctcttggtcgcatctctcttggtcgcatc

SEQ ID NO: 44078 - DNA, 96 bp, Fusarium phaseoli
  misc_feature: 35
ggattcccaatcaatggcattgcgaacgcaacagttatgccaggagaacgtggaacctacttcctcctagtgcaagggcccaagggccaacagaat

SEQ ID NO: 44079 - DNA, 96 bp, Fusarium phaseoli
  misc_feature: 35
attaaatgtgccttggtcaaggcacgtttacaataattggtagggttgtcgtccacaccatcgtcgtcttcttcgactccatccattgtcgactcc

SEQ ID NO: 44080 - DNA, 96 bp, Fusarium phaseoli
  misc_feature: 35
ggaggtaccagttgagttgaattggttgattacgcactctgacgagataccgagcttgttacacagagatagtcgagggtaaacaaatcccttggg

SEQ ID NO: 44081 - DNA, 96 bp, Fusarium phaseoli
  misc_feature: 35
caccaccatttagtcgttgaactgcacccgtatccgcgccccgggggggggctcggacttagagcttggctgcggattacccattgtcgcatctcc

SEQ ID NO: 44082 - DNA, 96 bp, Fusarium phaseoli
  misc_feature: 35
ggagaggggataaacaagaatatatgggagagagtaagaagaagggatgaggggggagagaagagtaaagaagagaaagggaaagaagagaggaag

SEQ ID NO: 44083 - DNA, 96 bp, Fusarium phaseoli
  misc_feature: 35
acgctcagtataccttgcatgcgtgtctgccagggagctagcgtgtaaggctgaatcactcccatggtgccctttggtgtttccttgcaaacgtcc

SEQ ID NO: 44084 - DNA, 96 bp, Fusarium phaseoli
  misc_feature: 35
ggacagcagcggttagcctcactttcccaactctcctcctctcctggacaatagcggttagcctcacttgtccaactcttctcccccggacagcag

SEQ ID NO: 44085 - DNA, 96 bp, Fusarium phaseoli
  misc_feature: 35
ggaaagtttgaatgaatgaatgatgcgatgagctgagctgagcgtgaaaagtaccggtagaagcagggacgtttctaagttaaaaagacaaggagc

SEQ ID NO: 44086 - DNA, 96 bp, Fusarium phaseoli
  misc_feature: 35
aactgtcgaacctcgcattggaaccgggctcattggtaccatcctcatcaccacgatcatcgccaccgccgccaatgccgtcctggctgcccccgc

SEQ ID NO: 44087 - DNA, 96 bp, Fusarium phaseoli
  misc_feature: 35
gcgataatcctagatcttaagtatactatctaccctaggtgcctattactaatcgacctttatagtcaatgggaagaggctattaatagctactag

SEQ ID NO: 44088 - DNA, 96 bp, Fusarium phaseoli
  misc_feature: 35
aggagcaagggcagggcgtaagggtgacggggaaccaaagagtaagtaaaggcctgaccctgactctgaccttgaccttgaccttgacccttaggc

SEQ ID NO: 44089 - DNA, 96 bp, Fusarium phaseoli
  misc_feature: 35
gatttgatttgatttagataaatttgatttgatttgaatagatttgaatttgatttatttgtttgcaagcctggttctcacagtcgtcgttctttg

SEQ ID NO: 44090 - DNA, 96 bp, Fusarium phaseoli
  misc_feature: 35
gattgatcgcaagcttgaaaaagtatgtgctctctattaatccaatatatgtgacccatgccaagagagcagtcgagggcttcagatatgatggcg

SEQ ID NO: 44091 - DNA, 96 bp, Fusarium phaseoli
  misc_feature: 35
aacgttttaaacggaacgaacgaacgaacgaacgaacgaaagtgcccatgtatgctcggccgtggattcctcgcaaagccgatatccctcgtaatc

SEQ ID NO: 44092 - DNA, 96 bp, Fusarium phaseoli
  misc_feature: 35
gataacgggggaggaggataaagtatataaagaggattacggtaatattagggtatattatatataagaagaaaagaggaagtacggaggagaatg

SEQ ID NO: 44093 - DNA, 96 bp, Fusarium phaseoli
  misc_feature: 35
cggaaaagtccctccggaatcaattacggccaaaacaccatagaattcattccaaagagacttatgacttctcaatcaattcccggcgaagcactc

SEQ ID NO: 44094 - DNA, 96 bp, Fusarium phaseoli
  misc_feature: 35
accacccgctccctccctcgcttcctaggttatactaaggcctaagggtcaaggtcaaggtcaaggtcagagtcagggtcaggcctttacttactc

SEQ ID NO: 44095 - DNA, 96 bp, Fusarium phaseoli
  misc_feature: 35
acccaccaccatttagtcgttgaactgcacccgtatccgcgccccgggggggggctcggacttagagcttggctgcggattacccattgtcgcctc

SEQ ID NO: 44096 - DNA, 96 bp, Fusarium phaseoli
  misc_feature: 35
attgtggctgtatcttggttgcatgcctctttggtggcatctctcttggtggcatctctcttggtggcatctctcttggtcgcatctctcttggtc

SEQ ID NO: 44097 - DNA, 96 bp, Fusarium phaseoli
  misc_feature: 35
gacaactcagccagcatcaaacgggagcggtctcggcaaccgaggacccatgcccggaaccaaagtttgcgcggctcgacgggctccttgtactgt

SEQ ID NO: 44098 - DNA, 96 bp, Fusarium phaseoli
  misc_feature: 35
cctatcctagctgcgcggcggattcgctagcaaatccaatgggtttcccatacaaaaaaaaaaggcgctatcctatcctagctgcgcggcggattc

SEQ ID NO: 44099 - DNA, 96 bp, Fusarium phaseoli
  misc_feature: 35
aagaaagcctcaaaaaccacaacaagagcaaaaagagccacaacaagagccaaaaggacagcgagagccaagagagtcacaacaagagccaaaaag

SEQ ID NO: 44100 - DNA, 96 bp, Fusarium phaseoli
  misc_feature: 35
ctttttcaaacttcccttttcaaacttcccttttcaaacttcccttttcaaacttcccttttcaaacttcccttttcaaacttccctttcaaccct

SEQ ID NO: 44101 - DNA, 96 bp, Fusarium phaseoli
  misc_feature: 35
ctcttttgccttttcagacggaaaattctaagcttacgatcaaagtgaaagttccaaaacttctggctcaagtgttggatatcgccaagtgacaag

SEQ ID NO: 44102 - DNA, 96 bp, Fusarium phaseoli
  misc_feature: 35
aatccttttagcacgctcagtgcgacaaaacccctcgagacaaaggaattgccttcgtctttcgacgccgccaagctggccctcggcttggccaag

SEQ ID NO: 44103 - DNA, 96 bp, Fusarium phaseoli
  misc_feature: 35
cttgactcacttgaattgaagtcatcggaaaggcacctttcctatccgtagttccctctactgtaggtttcgctaaagcccgtcaatacaagcatg

SEQ ID NO: 44104 - DNA, 96 bp, Fusarium phaseoli
  misc_feature: 35
ctagtatggagcaagagtgtacacagtatgcgtgtgtacttatgcttgacatttagggctttgtttttaaaacaagagttattgtaggagaggaag

SEQ ID NO: 44105 - DNA, 96 bp, Fusarium phaseoli
  misc_feature: 35
ctcgataataaccctctactttatcccccctattctcccttctgctctgaccaccgtctctccaaccgcgtaataacctggcatccacggctttct

SEQ ID NO: 44106 - DNA, 96 bp, Fusarium phaseoli
  misc_feature: 35
accaaatacccagataactcttaggtgttatgcgagctagatttaaccttggaatgaatagaagcttcacattgcatcatattaacgtcacttgag

SEQ ID NO: 44107 - DNA, 96 bp, Fusarium phaseoli
  misc_feature: 35
caactgtcgaacctcgcattggaaccgggctcattggtaccatcctcatcaccacgatcatcgccaccgccgccaatgccgtcctggctgcccccg

SEQ ID NO: 44108 - DNA, 96 bp, Fusarium phaseoli
  misc_feature: 35
aatttttagcgccgttttgatttatcccatgagtgcccacaagactgcaaccaggtcacgacggggggttgaggccaatcaaaactcccagtggcg

SEQ ID NO: 44109 - DNA, 96 bp, Fusarium phaseoli
  misc_feature: 35
catgacgtcccgtcaatacgcagtcgcgtaacaaatactcgggctccaacctcgtaatgtgcctccgcacaaacagaagatgcaaaaccagcctcg

SEQ ID NO: 44110 - DNA, 96 bp, Fusarium phaseoli
  misc_feature: 35
ccgctccctccctcgcttcctaggttatactaaggcctaagggtcaaggtcaaggtcaaggtcagagtcagggtcaggcctttacttactctttgg

SEQ ID NO: 44111 - DNA, 96 bp, Fusarium phaseoli
  misc_feature: 35
caaacaatctgcccgctaatatgctgggaagtagtgtgagtaaaagaggaacaaaggcaatcaattaatcagatcagtatagatgcgcacaagatg

SEQ ID NO: 44112 - DNA, 96 bp, Fusarium phaseoli
  misc_feature: 35
cacccgctccctccctcgcttcctaggttatactaaggcctaagggtcaaggtcaaggtcaaggtcagagtcagggtcaggcctttacttactctt

SEQ ID NO: 44113 - DNA, 96 bp, Fusarium phaseoli
  misc_feature: 35
attcccaatcaatggcattgcgaacgcaacagttatgccaggagaacgtggaacctacttcctcctagtgcaagggcccaagggccaacagaatgt

SEQ ID NO: 44114 - DNA, 96 bp, Fusarium phaseoli
  misc_feature: 35
acttgactcacttgaattgaagtcatcggaaaggcacctttcctatccgtagttccctctactgtaggtttcgctaaagcccgtcaatacaagcat

SEQ ID NO: 44115 - DNA, 96 bp, Fusarium phaseoli
  misc_feature: 35
aaatcgatcgtatagatcgattccgagccctgatcgatcgattcatatcgagcgtcaccttgtttgtttgtttgtttgtttgtttgtttgtttcat

SEQ ID NO: 44116 - DNA, 96 bp, Fusarium phaseoli
  misc_feature: 35
aaaaggcgctatcctagctgcgcggcggattcgctagcaaatccaatgggtttcccatacaaaaaaaaaaggcgctatcctagctgcgcggcggat

SEQ ID NO: 44117 - DNA, 96 bp, Fusarium phaseoli
  misc_feature: 35
aattgattgcctttgttcctcttttactcacactacttcccagcatattagcgggcagattgtttgaaaacctcatacaagtagaaatggcgctat

SEQ ID NO: 44118 - DNA, 96 bp, Fusarium phaseoli
  misc_feature: 35
agggaagtttgaaaagggaagtttgaaaagggaagtttgaaaagggaagtttgaaaagggaagtttgaaaagggaagtttgaaaaaggagggcact

SEQ ID NO: 44119 - DNA, 96 bp, Fusarium phaseoli
  misc_feature: 35
aggcgaggagcaagggcagggcgtaagggtgacggggaaccaaagagtaagtaaaggcctgaccctgactctgaccttgaccttgaccttgaccct

SEQ ID NO: 44120 - DNA, 96 bp, Fusarium phaseoli
  misc_feature: 35
aaaggctttcttcctttcttttttttgttccttttagataaaatccataaatatagcggagagaaggcaagtgtcttgtagctcataggaaaggct

SEQ ID NO: 44121 - DNA, 96 bp, Fusarium phaseoli
  misc_feature: 35
agagtagagacatgtagaagctgagcgtggcttctttgagctgattaaacgtcttggtaaccggttgattagatagatccccttgagactctttct

SEQ ID NO: 44122 - DNA, 96 bp, Fusarium phaseoli
  misc_feature: 35
acgtctgtcgcggatggcaattgatctcttttcagttccggccatgtttgtttgtttgtttgtttgttttattcatagactgtcccagccgccctt

SEQ ID NO: 44123 - DNA, 96 bp, Fusarium phaseoli
  misc_feature: 34
ttcaactcaatatattgaaatacattgacgtcaatcatttaccaactgttgaacatgtggggtgtcacgtgttggtcaaggatcttgagattaaaa

SEQ ID NO: 44124 - DNA, 96 bp, Fusarium phaseoli
  misc_feature: 34
tttgtcaagccgtcagccagcatatcgccggtaggtgtgtatgcgaccttgatcgtcttttgagaaacagcttgtcttagccaatggttgtgaata

SEQ ID NO: 44125 - DNA, 96 bp, Fusarium phaseoli
  misc_feature: 34
tttgatttgatttgatttagataaatttgatttgatttgaatagatttgaatttgatttatttgtttgcaagcctggttctcacagtcgtcgttct

SEQ ID NO: 44126 - DNA, 96 bp, Fusarium phaseoli
  misc_feature: 34
taatccttttagcacgctcagtgcgacaaaacccctcgagacaaaggaattgccttcgtctttcgacgccgccaagctggccctcggcttggccaa

SEQ ID NO: 44127 - DNA, 96 bp, Fusarium phaseoli
  misc_feature: 34
ttgccttttcagacggaaaattctaagcttacgatcaaagtgaaagttccaaaacttctggctcaagtgttggatatcgccaagtgacaaggcttc

SEQ ID NO: 44128 - DNA, 96 bp, Fusarium phaseoli
  misc_feature: 34
ttgatcgcaagcttgaaaaagtatgtgctctctattaatccaatatatgtgacccatgccaagagagcagtcgagggcttcagatatgatggcgtt

SEQ ID NO: 44129 - DNA, 96 bp, Fusarium phaseoli
  misc_feature: 34
aacaccttagtccccttaaactaaccctcataaccacccgctccctccctcgcttcctaggttatactaaggcctaagggtcaaggtcaaggtcaa

SEQ ID NO: 44130 - DNA, 96 bp, Fusarium phaseoli
  misc_feature: 34
agggcccaagggccaacagaatgttactctcgataacgctctgtatgttccggaaggatgctcaaacctactgtccgtgtcagcactggagaagaa

SEQ ID NO: 44131 - DNA, 96 bp, Fusarium phaseoli
  misc_feature: 34
ttcgctagcaaatccaatgggtttcccatacaaaaaaaaaaggcgctatcctatcctagctgcgcggcggattcgctagcaaatccaatgggtttc

SEQ ID NO: 44132 - DNA, 96 bp, Fusarium phaseoli
  misc_feature: 34
ttataacgaagtgacttctaaatcctaggaaattggcgcggttcagaagtaccgcatttttgcgaatcaagggccccttttgcgagtcattgaacc

SEQ ID NO: 44133 - DNA, 96 bp, Fusarium phaseoli
  misc_feature: 34
ttagggactagtaacctctggcgttaagagttagaaaagtgaaggtaaccgctactgtctaggagaggagagttgggaaagtgagactaaccgctg

SEQ ID NO: 44134 - DNA, 96 bp, Fusarium phaseoli
  misc_feature: 34
agtagagacatgtagaagctgagcgtggcttctttgagctgattaaacgtcttggtaaccggttgattagatagatccccttgagactctttctaa

SEQ ID NO: 44135 - DNA, 96 bp, Fusarium phaseoli
  misc_feature: 34
tgtttacgtctttgctcagctacttatcacaatatggcattccactcagctcaaacatgagctacggccgagtcagatccagcaatatattacgtt

SEQ ID NO: 44136 - DNA, 96 bp, Fusarium phaseoli
  misc_feature: 34
tgtgcgcatctatactgatctgattaattgattgcctttgttcctcttttactcacactacttcccagcatattagcgggcagattgtttgaaaac

SEQ ID NO: 44137 - DNA, 96 bp, Fusarium phaseoli
  misc_feature: 34
attcctccatcagttcggaggtagcacaaagagtggtccacaataatgctgcacaacaaaagctgtcaggacggaatgatcttccctccggaccca

SEQ ID NO: 44138 - DNA, 96 bp, Fusarium phaseoli
  misc_feature: 34
tgggaaagctcatgaagcaaatcctggcgactgcgagggtcatccatgtttttatggagttggtgaatccgatgtttgcgttcaatggcgacgtga

SEQ ID NO: 44139 - DNA, 96 bp, Fusarium phaseoli
  misc_feature: 34
gctagcaaatccaatgggtttcccatacaaaaaaaaaaggcgctatcctatcctagctgcgcggcggattcgctagcaaatccaatgggtttccca

SEQ ID NO: 44140 - DNA, 96 bp, Fusarium phaseoli
  misc_feature: 34
ggaaaagtccctccggaatcaattacggccaaaacaccatagaattcattccaaagagacttatgacttctcaatcaattcccggcgaagcactca

SEQ ID NO: 44141 - DNA, 96 bp, Fusarium phaseoli
  misc_feature: 34
tgaggaaaggaagcgagtgttgggaacaagtccgacgaggtatatatatagtgaaatcggcagtcattttaggacacttcacgatgaggcgaaact

SEQ ID NO: 44142 - DNA, 96 bp, Fusarium phaseoli
  misc_feature: 34
cagacgatatgccagtaaagaagcatgcgaccaagagagatgcgaccaagagagatgcgaccaagagagatgccaccaagagagatgccaccaaga

SEQ ID NO: 44143 - DNA, 96 bp, Fusarium phaseoli
  misc_feature: 34
tctcccttctgctctgaccaccgtctctccaaccgcgtaataacctggcatccacggcttgcttatatgccaccgccggtccttccaccctaatcc

SEQ ID NO: 44144 - DNA, 96 bp, Fusarium phaseoli
  misc_feature: 34
tctccctactagatttcaacgatgctccatttcgcggcatcgttcactcccgtcctcaccaccatgagccatgcgaggcccgtcagctggcacggt

SEQ ID NO: 44145 - DNA, 96 bp, Fusarium phaseoli
  misc_feature: 34
aggaagttgtgagcatgcagctcagtgagacattcgcttatctgcgacattcgcttatcacgtacgttatcagactgctccgaattgagacggcga

SEQ ID NO: 44146 - DNA, 96 bp, Fusarium phaseoli
  misc_feature: 34
acgaccatctcagccgttcttctcattaagtatcgaatcgactgttgagtcgttacgaaactgccaaccatcaaagcactacagttcagtgcagga

SEQ ID NO: 44147 - DNA, 96 bp, Fusarium phaseoli
  misc_feature: 34
tcctcttttcttcttatatataatataccctaatattaccgtaatcctctttatatactttatcctcctcccccgttatctatctacctccctgct

SEQ ID NO: 44148 - DNA, 96 bp, Fusarium phaseoli
  misc_feature: 34
aggaggttaatttacggttagggataaagtgaatattaaatatgaggaaggaggggtaagatacggcgaattttaaggtagagttagataagcgga

SEQ ID NO: 44149 - DNA, 96 bp, Fusarium phaseoli
  misc_feature: 34
tccctaactgcccccgcccttttgccccttgctctccggcaaccttcataacctcccgcttacctcttgacttcccgggtcaaacgaaaacctagg

SEQ ID NO: 44150 - DNA, 96 bp, Fusarium phaseoli
  misc_feature: 34
tcaaatcgcaaactattgggaaagaggaagatatctgtgctctttactgtatacccgctggctccttgtctttttaacttagaaacgtccctgctt

SEQ ID NO: 44151 - DNA, 96 bp, Fusarium phaseoli
  misc_feature: 34
tcaaacaatctgcccgctaatatgctgggaagtagtgtgagtaaaagaggaacaaaggcaatcaattaatcagatcagtatagatgcgcacaagat

SEQ ID NO: 44152 - DNA, 96 bp, Fusarium phaseoli
  misc_feature: 34
tagatcgataccattcccaccggaaatctcccttgacgaggcgcagcatgcgaccctccacacaggaaacacctccccaggatcagacaacatcac

SEQ ID NO: 44153 - DNA, 96 bp, Fusarium phaseoli
  misc_feature: 34
tagacatgcagggtacctaactgttgctagataagtgcataggtctgggctagctgcatttttgcgaatcaggccttcttttgctagttaatccac

SEQ ID NO: 44154 - DNA, 96 bp, Fusarium phaseoli
  misc_feature: 34
tacttcctcttttcttcttatatataatataccctaatattaccgtaatcctctttatatactttatcctcctcccccgttatctatctacctccc

SEQ ID NO: 44155 - DNA, 96 bp, Fusarium phaseoli
  misc_feature: 34
tactccctcttaccctaacctatctattccttacttaacgtcctcattattattattatctcctcccaccttatatataataccacacccactccg

SEQ ID NO: 44156 - DNA, 96 bp, Fusarium phaseoli
  misc_feature: 34
taaataatactatattatcttcaataaatataatatatcgcttaagctttaatattacttaagatatagataataattataaaaagatttatatta

SEQ ID NO: 44157 - DNA, 96 bp, Fusarium phaseoli
  misc_feature: 34
taagttaaaggtaatacttttttcttctctttcttattatcttcttccttttttacctttatatctcgctagtttttccttaatagctcttactat

SEQ ID NO: 44158 - DNA, 96 bp, Fusarium phaseoli
  misc_feature: 34
gtttgttcctcttgacccagaaagggtggtctcgaagcttaatatgcggctatagacgctaatgcctaccgaggaggtagctaaactatcgacccc

SEQ ID NO: 44159 - DNA, 96 bp, Fusarium phaseoli
  misc_feature: 34
agctcagtaccgcataggcatcattcaacacaattagtcatcagctctcttacaagaggctatgaacgatcgctatatttggtatcatctccaaac

SEQ ID NO: 44160 - DNA, 96 bp, Fusarium phaseoli
  misc_feature: 34
gtttgcagacacgggccacagaagcgcagcatgtgccgtggcgtaccggagtccagagccagcggttgttccgcaatgggccggccagcgggtggg

SEQ ID NO: 44161 - DNA, 96 bp, Fusarium phaseoli
  misc_feature: 34
gttggcgaggtgatattggcccgcactaataatgaatggcgagatcgcttagccatctacattaatcgcctaaataaccgtaatccattcccggtt

SEQ ID NO: 44162 - DNA, 96 bp, Fusarium phaseoli
  misc_feature: 34
gttggcagtgcgagtcgagagtactgtcatttgtattagtcaggtaagtacacgaatacgcatgctgctagtatggagcaagagtgtacacagtat

SEQ ID NO: 44163 - DNA, 96 bp, Fusarium phaseoli
  misc_feature: 34
cacttgtcttctgtgaatgagctccacagaaagaagtggccgttcttatgcaaaagcgggtgcagcgattctgtcttccagatcaaggaatagaac

SEQ ID NO: 44164 - DNA, 96 bp, Fusarium phaseoli
  misc_feature: 34
ccgcaacaactaaaaagaaaagcgcacttccgttgcgccaaatggccgtgtccacgactagagtaaaacaatatttgccttccgtgcaaaaggaac

SEQ ID NO: 44165 - DNA, 96 bp, Fusarium phaseoli
  misc_feature: 34
gcaacaactaaaaagaaaagcgcacttccgttgcgccaaatggccgtgtccacgactagagtaaaacaatatttgccttccgtgcaaaaggaacac

SEQ ID NO: 44166 - DNA, 96 bp, Fusarium phaseoli
  misc_feature: 34
ggaaaggaagcgagtgttgggaacaagtccgacgaggtatatatatagtgaaatcggcagtcattttaggacacttcacgatgaggcgaaactgac

SEQ ID NO: 44167 - DNA, 96 bp, Fusarium phaseoli
  misc_feature: 34
caacaactaaaaagaaaagcgcacttccgttgcgccaaatggccgtgtccacgactagagtaaaacaatatttgccttccgtgcaaaaggaacacc

SEQ ID NO: 44168 - DNA, 96 bp, Fusarium phaseoli
  misc_feature: 34
gggtgacggggaaccaaagagtaagtaaaggcctgaccctgactctgaccttgaccttgaccttgacccttaggccttagtataacctaggaagcg

SEQ ID NO: 44169 - DNA, 96 bp, Fusarium phaseoli
  misc_feature: 34
acgtcccgtcaatacgcagtcgcgtaacaaatactcgggctccaacctcgtaatgtgcctccgcacaaacagaagatgcaaaaccagcctcgaccc

SEQ ID NO: 44170 - DNA, 96 bp, Fusarium phaseoli
  misc_feature: 34
gggagtggttgtggtgaaggttagggggagtggttgagttgagggttagggggagtggttgagataaagtttagagtgaagggttagaaagagggg

SEQ ID NO: 44171 - DNA, 96 bp, Fusarium phaseoli
  misc_feature: 34
ctcatcaccacgatcatcgccaccgccgccaatgccgtcctggctgccccggctctccatttcggcctgcctcctctccctctgctccgtctcgcc

SEQ ID NO: 44172 - DNA, 96 bp, Fusarium phaseoli
  misc_feature: 34
accttcaccacaaccactccccctaaccttcaccacaaccacttaaccctaaccctcaactcaaccactccccctaaccctcaccacaaccactcc

SEQ ID NO: 44173 - DNA, 96 bp, Fusarium phaseoli
  misc_feature: 34
ggagtgaacaaaaaaaaaggaaaaacaaaaacaattaaaagaacagagtagaaaagaaaataaaagaaaaaggagctggtgcattaggacatattt

SEQ ID NO: 44174 - DNA, 96 bp, Fusarium phaseoli
  misc_feature: 34
ggaggttaatttacggttagggataaagtgaatattaaatatgaggaaggaggggtaagatacggcgaattttaaggtagagttagataagcggag

SEQ ID NO: 44175 - DNA, 96 bp, Fusarium phaseoli
  misc_feature: 34
ggaaagctcatgaagcaaatcctggcgactgcgagggtcatccatgtttttatggagttggtgaatccgatgtttgcgttcaatggcgacgtgaat

SEQ ID NO: 44176 - DNA, 96 bp, Fusarium phaseoli
  misc_feature: 34
aacagatcttatttgcaccggcccccgtgcaggtatgagctccccaagtgtagggcgccgtcgaggcgcacaggtcctgtgtgctcggggcacagc

SEQ ID NO: 44177 - DNA, 96 bp, Fusarium phaseoli
  misc_feature: 34
caaaaaaaaaaggcgctatcctagctgcgcggcggattcgctagcaaatccaatgggtttcccatacaaaaaaaaaaggcgctatcctagctgcgc

SEQ ID NO: 44178 - DNA, 96 bp, Fusarium phaseoli
  misc_feature: 34
ctaaccctcataaccacccgctccctccctcgcttcctaggttatactaaggcctaagggtcaaggtcaaggtcaaggtcagagtcagggtcaggc

SEQ ID NO: 44179 - DNA, 96 bp, Fusarium phaseoli
  misc_feature: 34
gccaacagaatgttactctcgataacgctctgtatgttccggaaggatgctcaaacctactgtccgtgtcagcactggagaagaagggggcagaag

SEQ ID NO: 44180 - DNA, 96 bp, Fusarium phaseoli
  misc_feature: 34
gcaggaggcccacggtcatcagccaaggcggggagaagaagaaaggcggcagccgcatcagacagggccaagtggccagcaaaggaagcagccggt

SEQ ID NO: 44181 - DNA, 96 bp, Fusarium phaseoli
  misc_feature: 34
aagaagatataagtctaagttctagaactatctaattaatctatccccattcagcccgagtcctctctatcactctcagcctcctcctcggctatc

SEQ ID NO: 44182 - DNA, 96 bp, Fusarium phaseoli
  misc_feature: 34
ctattctcccttctgctctgaccaccgtctctccaaccgcgtaataacctggcatccacggcttgcttatatgccaccgccggtccttccaccctc

SEQ ID NO: 44183 - DNA, 96 bp, Fusarium phaseoli
  misc_feature: 34
gagagacagataacagttatgatccatccgtggatactatgctgcgattctattatgaaatagttaccgaacacttcgaagatagaagggcaagct

SEQ ID NO: 44184 - DNA, 96 bp, Fusarium phaseoli
  misc_feature: 34
acaactcagccagcatcaaacgggagcggtctcggcaaccgaggacccatgcccggaaccaaagtttgcgcggctcgacgggctccttgtactgtc

SEQ ID NO: 44185 - DNA, 96 bp, Fusarium phaseoli
  misc_feature: 34
atttgatttgatttgatttagataaatttgatttgatttgaatagatttgaatttgatttatttgtttgcaagcctggttctcacagtcgtcgttc

SEQ ID NO: 44186 - DNA, 96 bp, Fusarium phaseoli
  misc_feature: 34
aggttctattccttgatctggaagacagaatcgctgcacccgcttttgcataagaacggccacttctttctgtggagctcattcacagaagacaag

SEQ ID NO: 44187 - DNA, 96 bp, Fusarium phaseoli
  misc_feature: 34
ccatttctacttgtatgaggttttcaaacaatctgcccgctaatatgctgggaagtagtgtgagtaaaagaggaacaaaggcaatcaattaatcag

SEQ ID NO: 44188 - DNA, 96 bp, Fusarium phaseoli
  misc_feature: 34
cccttaaactaaccctcataaccacccgctccctccctcgcttcctaggttatactaaggcctaagggtcaaggtcaaggtcaaggtcagagtcag

SEQ ID NO: 44189 - DNA, 96 bp, Fusarium phaseoli
  misc_feature: 34
agacgatatgccagtaaagaagcatgcgaccaagagagatgcgaccaagagagatgcgaccaagagagatgccaccaagagagatgccaccaagag

SEQ ID NO: 44190 - DNA, 96 bp, Fusarium phaseoli
  misc_feature: 34
aggaggaagcaggaggcccacggtcatcagccaaggcggggagaagaagaaaggcggcagccgcatcagacagggccaagtggccagcaaagggag

SEQ ID NO: 44191 - DNA, 96 bp, Fusarium phaseoli
  misc_feature: 34
ctaggctttcggattcttaccaacttccattctaactgaggcccagttggggaaggacagatcgttaaagatacatggtcaggaactcgtgcatag

SEQ ID NO: 44192 - DNA, 96 bp, Fusarium phaseoli
  misc_feature: 34
aaagggttagggtatagggtaattaattaaatagttagggttaataaagaattaaaggttagagttaataaagggtttaaaggttagagtttatag

SEQ ID NO: 44193 - DNA, 96 bp, Fusarium phaseoli
  misc_feature: 34
ccgaaacagatggctccaatcgctcagttggccttccaccagtcgccagtcaatattgaactcgtcgaatcgcttcgtgagatctcgttcgctacg

SEQ ID NO: 44194 - DNA, 96 bp, Fusarium phaseoli
  misc_feature: 34
aggttaagggtaaggttaagggtaaggttaagggtaaggttaaggatcagtgtggtcttcagggttggggttggggcggtcgtgaaagtgtcagcg

SEQ ID NO: 44195 - DNA, 96 bp, Fusarium phaseoli
  misc_feature: 34
cctagtagctattaatagcctcttcccattgactataaaggtcgattagtaataggcacctagggtagatagtatacttaagatctaggattatcg

SEQ ID NO: 44196 - DNA, 96 bp, Fusarium phaseoli
  misc_feature: 34
atccttttagcacgctcagtgcgacaaaacccctcgagacaaaggaattgccttcgtctttcgacgccgccaagctggccctcggcttggccaagg

SEQ ID NO: 44197 - DNA, 96 bp, Fusarium phaseoli
  misc_feature: 34
cacgaccatctcagccgttcttctcattaagtatcgaatcgactgttgagtcgttacgaaactgccaaccatcaaagcactacagttcagtgcagg

SEQ ID NO: 44198 - DNA, 96 bp, Fusarium phaseoli
  misc_feature: 34
agaagagacatgagaaaaacattgttcagtttcgctttggccctaattctctatgaggatagcttgtgacaatggtaatgtcagagacaggcgagg

SEQ ID NO: 44199 - DNA, 96 bp, Fusarium phaseoli
  misc_feature: 34
cagctgacgggcctcgcatggctcatggtggtgaggacgggagtgaacgatgccgcgaaatggagcatcgttgaaatctagtagggagaactgagg

SEQ ID NO: 44200 - DNA, 96 bp, Fusarium phaseoli
  misc_feature: 34
cctaaagagctagctgggtgggtttactcccgttaataaacctcctatggcgtctcctcaccaggtagggctaaaggctatatctacggctatcct

SEQ ID NO: 44201 - DNA, 96 bp, Fusarium phaseoli
  misc_feature: 34
aagggcgaagctcaaaggccggcatatgcggcagagtaggcgatggtttcttgctttttaggaatgcctcacacttgccatatatgtctgggaggg

SEQ ID NO: 44202 - DNA, 96 bp, Fusarium phaseoli
  misc_feature: 34
catcgtgacatcttgggagggctatgcgcactcaggagatagatgacacagtgcttgcgtcgaactgcgggattatgcacaagagtgccaggctat

SEQ ID NO: 44203 - DNA, 96 bp, Fusarium phaseoli
  misc_feature: 34
cactttcacgaccgccccaaccccaaccctgaagaccacactgatccttaaccttacccttaaccttacccttaaccttacccttaaccttaccct

SEQ ID NO: 44204 - DNA, 96 bp, Fusarium phaseoli
  misc_feature: 34
attggaagctaggttagaactgttagaactgttaatcctatacagtattgagcacttgcactttccgccccaaaaacaacatgctctttgtaaagt

SEQ ID NO: 44205 - DNA, 96 bp, Fusarium phaseoli
  misc_feature: 34
attgattgcctttgttcctcttttactcacactacttcccagcatattagcgggcagattgtttgaaaacctcatacaagtagaaatggcgctatt

SEQ ID NO: 44206 - DNA, 96 bp, Fusarium phaseoli
  misc_feature: 34
attgatcgcaagcttgaaaaagtatgtgctctctattaatccaatatatgtgacccatgccaagagagcagtcgagggcttcagatatgatggcgt

SEQ ID NO: 44207 - DNA, 96 bp, Fusarium phaseoli
  misc_feature: 34
attcgctagcaaatccaatgggtttcccatacaaaaaaaaaaggcgctatcctatcctagctgcgcggcggattcgctagcaaatccaatgggttt

SEQ ID NO: 44208 - DNA, 96 bp, Fusarium phaseoli
  misc_feature: 34
aaacgttttaaacggaacgaacgaacgaacgaacgaacgaaagtgcccatgtatgctcggccgtggattcctcgcaaagccgatatccctcgtaat

SEQ ID NO: 44209 - DNA, 96 bp, Fusarium phaseoli
  misc_feature: 34
aagttagatcggctgcgccgagaatataacacattacgttcgaactgggcttctaactttgtcaagcgacactcagagctcacaacgcgttttaat

SEQ ID NO: 44210 - DNA, 96 bp, Fusarium phaseoli
  misc_feature: 34
atggtgcctgatcaccatgctctggggtttgatcagggtgattgtgtaagtgatcgcggtaatcagaaaggtgatcaccgtgatcgttctggcgtt

SEQ ID NO: 44211 - DNA, 96 bp, Fusarium phaseoli
  misc_feature: 34
agtgatgcatttttctgtacacgtacgtacgtacgtactgtattttgggtagctgtacgtacgtacaacttttctgtacgtacaaaactgtaccat

SEQ ID NO: 44212 - DNA, 96 bp, Fusarium phaseoli
  misc_feature: 34
acaattgattgagacgagccaatcaaatcaaacaaatcgacttttacctcaaagttgatttgattgatttatgatgagcgctggtcgcgcgggcat

SEQ ID NO: 44213 - DNA, 96 bp, Fusarium phaseoli
  misc_feature: 34
atcgtgacatcttgggagggctatgcgcactcaggagatagatgacacagtgcttgcgtcgaactgcgggattatgcacaagagtgccaggctatt

SEQ ID NO: 44214 - DNA, 96 bp, Fusarium phaseoli
  misc_feature: 34
agggactagtaacctctggcgttaagagttagaaaagtgaaggtaaccgctactgtctaggagaggagagttgggaaagtgagactaaccgctgct

SEQ ID NO: 44215 - DNA, 96 bp, Fusarium phaseoli
  misc_feature: 34
accaatttaggccaaggtaacccaggcattagtcagcttcttagagggatctgcactttttgcccgccgacagtctggaaacttttctccaatctt

SEQ ID NO: 44216 - DNA, 96 bp, Fusarium phaseoli
  misc_feature: 34
aaaggcgctatcctagctgcgcggcggattcgctagcaaatccaatgggtttcccatacaaaaaaaaaaggcgctatcctagctgcgcggcggatt

SEQ ID NO: 44217 - DNA, 96 bp, Fusarium phaseoli
  misc_feature: 33
agcataccgagccaacggtcagatcgagaaggcaacagaactgctagagcatgtggttgcgattcaggagaagacattagcggagaatcacccaaa

SEQ ID NO: 44218 - DNA, 96 bp, Fusarium phaseoli
  misc_feature: 33
gctgcgcggcggattcgctagcaaatccaatgggtttcccatacaaaaaaaaaaggcgctatcctatcctagctgcgcggcggattcgctagcaaa

SEQ ID NO: 44219 - DNA, 96 bp, Fusarium phaseoli
  misc_feature: 33
agaacgtggaacctacttcctcctagtgcaagggcccaagggccaacagaatgttactctcgataacgctctgtatgttccggaaggatgctcaaa

SEQ ID NO: 44220 - DNA, 96 bp, Fusarium phaseoli
  misc_feature: 33
tttcccaactctcctcctctcctggacaatagcggttagcctcacttgtccaactcttctcccccggacagcagcggttagtctcactttcccaac

SEQ ID NO: 44221 - DNA, 96 bp, Fusarium phaseoli
  misc_feature: 33
catagggttgaaagggaagtttgaaaagggaagtttgaaaagggaagtttgaaaagggaagtttgaaaagggaagtttgaaaagggaagtttgaaa

SEQ ID NO: 44222 - DNA, 96 bp, Fusarium phaseoli
  misc_feature: 33
gcgagctagatttaaccttggaatgaatagaagcttcacattgcatcatattaacgtcacttgagaagccccattgtctttgacagcgtaactaaa

SEQ ID NO: 44223 - DNA, 96 bp, Fusarium phaseoli
  misc_feature: 33
attcaactcaatatattgaaatacattgacgtcaatcatttaccaactgttgaacatgtggggtgtcacgtgttggtcaaggatcttgagattaaa

SEQ ID NO: 44224 - DNA, 96 bp, Fusarium phaseoli
  misc_feature: 33
ttggcgaggtgatattggcccgcactaataatgaatggcgagatcgcttagccatctacattaatcgcctaaataaccgtaatccattcccggttt

SEQ ID NO: 44225 - DNA, 96 bp, Fusarium phaseoli
  misc_feature: 33
attatgtgcttggggactgcagacagtatgtattcgtcttgcaagttgttgacctcgagtgttgcagccaatcagaattttagcggtcaaactcaa

SEQ ID NO: 44226 - DNA, 96 bp, Fusarium phaseoli
  misc_feature: 33
gaaaagtccctccggaatcaattacggccaaaacaccatagaattcattccaaagagacttatgacttctcaatcaattcccggcgaagcactcaa

SEQ ID NO: 44227 - DNA, 96 bp, Fusarium phaseoli
  misc_feature: 33
gacagatttcgctgggtggagtgtcaattcaaagcactggccagttgtccgcagagcgaagaccttctcgaacaactgctcgattccctgcctcaa

SEQ ID NO: 44228 - DNA, 96 bp, Fusarium phaseoli
  misc_feature: 33
ttgaccttgacccttaggccttagtataacctaggaagcgagggagggagcgggtggttatgagggttagtttaaggggactaaggtgttatttac

SEQ ID NO: 44229 - DNA, 96 bp, Fusarium phaseoli
  misc_feature: 33
taagacaagaatcgaatcacataaagtcaatatcttcaatcaaactagtagagccaaacaagaaaaaagaaagataaaaaagaaaaagaaaaagaa

SEQ ID NO: 44230 - DNA, 96 bp, Fusarium phaseoli
  misc_feature: 33
atgactcacactgtctacgggcacgaattaggcatggacagaaatcaattgtaacaaggataaactgtcatcagaatatgagacaagaaaagagaa

SEQ ID NO: 44231 - DNA, 96 bp, Fusarium phaseoli
  misc_feature: 33
ggttagggggagtggttgtggtgaaggttagggggagtggttgagttgagggttagggggagtggttgagataaagtttagagtgaaggggtagaa

SEQ ID NO: 44232 - DNA, 96 bp, Fusarium phaseoli
  misc_feature: 33
ttcctcttttactcacactacttcccagcatattagcgggcagattgtttgaaaacctcatacaagtagaaatggcgctattaaagaccagggggc

SEQ ID NO: 44233 - DNA, 96 bp, Fusarium phaseoli
  misc_feature: 33
atacaaagccggatgatcttattatccttgcaatagttctcaaattcgatagagtagtgactttcgtagctattgaggatcaagagacgataggaa

SEQ ID NO: 44234 - DNA, 96 bp, Fusarium phaseoli
  misc_feature: 33
ggcggagaggttacggtcgagatatcgagaggccgaacgaacccgtatgcaatggtttcggtcggtggttattcggtcgagtggtggaggggggaa

SEQ ID NO: 44235 - DNA, 96 bp, Fusarium phaseoli
  misc_feature: 33
ttcatctggggactctgacgaggagatgcctaatgctatatcctctgggtcaaataattaattaactaagaccaaccccgtgagcatgggacctag

SEQ ID NO: 44236 - DNA, 96 bp, Fusarium phaseoli
  misc_feature: 33
ttcaaacaatctgcccgctaatatgctgggaagtagtgtgagtaaaagaggaacaaaggcaatcaattaatcagatcagtatagatgcgcacaaga

SEQ ID NO: 44237 - DNA, 96 bp, Fusarium phaseoli
  misc_feature: 33
ttatcctctactaagcagccccctggtctttaatagcgccatttctacttgtatgaggtttttaaataatctgcccgctaatatgctgggaagtag

SEQ ID NO: 44238 - DNA, 96 bp, Fusarium phaseoli
  misc_feature: 33
gataaagtgaatattaaatatgaggaaggaggggtaagatacggcgaattttaaggtagagttagataagcggagtgggtgtggtattatatataa

SEQ ID NO: 44239 - DNA, 96 bp, Fusarium phaseoli
  misc_feature: 33
tgcgagctagatttaaccttggaatgaatagaagcttcacattgcatcatattaacgtcacttgagaagccccattgtctttgacagcgtaactaa

SEQ ID NO: 44240 - DNA, 96 bp, Fusarium phaseoli
  misc_feature: 33
tataataccacacccactccgcttatctaactctaccttaaaattcgccgtatcttacccctccttcctcatatttaatattcactttatccctaa

SEQ ID NO: 44241 - DNA, 96 bp, Fusarium phaseoli
  misc_feature: 33
gttatgcgagctagatttaaccttggaatgaatagaagcttcacattgcatcatattaacgtcacttgagaagccccattgtctttgacagcgtaa

SEQ ID NO: 44242 - DNA, 96 bp, Fusarium phaseoli
  misc_feature: 33
aatataaatctttttataattattatctatatcttaagtaatattaaagcttaagcgatatattatatttattgaagataatatagtattatttaa

SEQ ID NO: 44243 - DNA, 96 bp, Fusarium phaseoli
  misc_feature: 33
ttaaagagatgtgttgattgaatcaattatgattgttcctagtgaggttgtcagtaatgggagatccctcaatgcattctatcgctaactgatctc

SEQ ID NO: 44244 - DNA, 96 bp, Fusarium phaseoli
  misc_feature: 33
ctatcctatcctatcctatcctatcctagctgcgcggcggattcgctagcaaatccaatgggtttcccatacaaaaaaaaaaggcgctaatgaaca

SEQ ID NO: 44245 - DNA, 96 bp, Fusarium phaseoli
  misc_feature: 33
tggtattatatataaggtgggaggagataataataataatgaggacgttaagtaaggaatagataggttagggtaagagggagtataagagggtta

SEQ ID NO: 44246 - DNA, 96 bp, Fusarium phaseoli
  misc_feature: 33
tggtagtcgatgacggtgagcgtggtatgatacagaagatcggaatatgtggacatgatggaatgtttctgttgaaagattgttgaaaaataatgt

SEQ ID NO: 44247 - DNA, 96 bp, Fusarium phaseoli
  misc_feature: 33
tgcttatggcaaagtattactttaaaagttattgaagctgctcttaaatgtatactgtgtctagaagcttgatagtgacactgtgtaggccctgcc

SEQ ID NO: 44248 - DNA, 96 bp, Fusarium phaseoli
  misc_feature: 33
aagggccaacagaatgttactctcgataacgctctgtatgttccggaaggatgctcaaacctactgtccgtgtcagcactggagaagaagggggca

SEQ ID NO: 44249 - DNA, 96 bp, Fusarium phaseoli
  misc_feature: 33
tgcaaataagatctgttatgtaagctcgatgtgtgtgagtgtaagagagatctctcttcaatccacagggtgtcgcactgagcgtgctaaaaggat

SEQ ID NO: 44250 - DNA, 96 bp, Fusarium phaseoli
  misc_feature: 33
tgatttgatttgatttagataaatttgatttgatttgaatagatttgaatttgatttatttgtttgcaagcctggttctcacagtcgtcgttcttt

SEQ ID NO: 44251 - DNA, 96 bp, Fusarium phaseoli
  misc_feature: 33
ccctaatattaccgtaatcctctttatatactttatcctcctcccccgttatctatctacctccctgctctatccataacctatctaatcgtatca

SEQ ID NO: 44252 - DNA, 96 bp, Fusarium phaseoli
  misc_feature: 33
tgagaacagaagatcaggagtttctgagaaggcttcattgtagatccaagatgctcacatatacttttgttcaagtctggccgagctaggcctgtg

SEQ ID NO: 44253 - DNA, 96 bp, Fusarium phaseoli
  misc_feature: 33
ccccttaaactaaccctcataaccacccgctccctccctcgcttcctaggttatactaaggcctaagggtcaaggtcaaggtcaaggtcagagtca

SEQ ID NO: 44254 - DNA, 96 bp, Fusarium phaseoli
  misc_feature: 33
tgacgctcagtataccttgcatgcgtgtctgccagggagctagcgtgtaaggctgaatcactcccatggtgccctttggtgtttccttgcaaacgt

SEQ ID NO: 44255 - DNA, 96 bp, Fusarium phaseoli
  misc_feature: 33
tgaccttgacccttaggccttagtataacctaggaagcgagggagggagcgggtggttatgagggttagtttaaggggactaaggtgttatttacc

SEQ ID NO: 44256 - DNA, 96 bp, Fusarium phaseoli
  misc_feature: 33
gtaaggttaagggtaaggttaagggtaaggttaagggtaaggttaaggatcagtgtggtcttcagggttggggttggggcggtcgtgaaagtgtca

SEQ ID NO: 44257 - DNA, 96 bp, Fusarium phaseoli
  misc_feature: 33
aatgactcacactgtctacgggcacgaattaggcatggacagaaatcaattgtaacaaggataaactgtcatcagaatatgagacaagaaaagaga

SEQ ID NO: 44258 - DNA, 96 bp, Fusarium phaseoli
  misc_feature: 33
tctctattaatccaatatatgtgacccatgccaagagagcagtcgagggcttcagatatgatggcgttgggggcaacttggctgtggaattgggtt

SEQ ID NO: 44259 - DNA, 96 bp, Fusarium phaseoli
  misc_feature: 33
tacttttcacgctcagctcagctcatcgcatcattcattcattcaaactttccgaccccaccgccagcctccttctcgatcccaatgcaacataga

SEQ ID NO: 44260 - DNA, 96 bp, Fusarium phaseoli
  misc_feature: 33
aggttagggggagtggttgtggtgaaggttagggggagtggttgagttgagggttagggggagtggttgagataaagtttagagtgaaggggtaga

SEQ ID NO: 44261 - DNA, 96 bp, Fusarium phaseoli
  misc_feature: 33
aggagaggagagttgggaaagtgagactaaccgctgctgtccgggggagaagagttggacaagtgaggctaaccgctattgtccaggagaggagga

SEQ ID NO: 44262 - DNA, 96 bp, Fusarium phaseoli
  misc_feature: 33
tcctagtgcaagggcccaagggccaacagaatgttactctcgataacgctctgtatgttccggaaggatgctcaaacctactgtccgtgtcagcac

SEQ ID NO: 44263 - DNA, 96 bp, Fusarium phaseoli
  misc_feature: 33
gaggaggaagcaggaggcccacggtcatcagccaaggcggggagaagaagaaaggcggcagccgcatcagacagggccaagtggccagcaaaggga

SEQ ID NO: 44264 - DNA, 96 bp, Fusarium phaseoli
  misc_feature: 33
aaccaaatacccagataactcttaggtgttatgcgagctagatttaaccttggaatgaatagaagcttcacattgcatcatattaacgtcacttga

SEQ ID NO: 44265 - DNA, 96 bp, Fusarium phaseoli
  misc_feature: 33
tcaactcaatatattgaaatacattgacgtcaatcatttaccaactgttgaacatgtggggtgtcacgtgttggtcaaggatcttgagattaaaag

SEQ ID NO: 44266 - DNA, 96 bp, Fusarium phaseoli
  misc_feature: 33
ggtacttttcacgctcagctcagctcatcgcatcattcattcattcaaactttccgaccccaccgccagcctccttctcgatcccaatgcaacata

SEQ ID NO: 44267 - DNA, 96 bp, Fusarium phaseoli
  misc_feature: 33
aatcgatcgtatagatcgattccgagccctgatcgatcgattcatatcgagcgtcaccttgtttgtttgtttgtttgtttgtttgtttgtttcata

SEQ ID NO: 44268 - DNA, 96 bp, Fusarium phaseoli
  misc_feature: 33
tatataataccacacccactccgcttatctaactctaccttaaaattcgccgtatcttacccctccttcctcatatttaatattcactttatccct

SEQ ID NO: 44269 - DNA, 96 bp, Fusarium phaseoli
  misc_feature: 33
aagttaaaggtaatacttttttcttctctttcttattatcttcttccttttttacctttatatctcgctagtttttccttaatagctcttactata

SEQ ID NO: 44270 - DNA, 96 bp, Fusarium phaseoli
  misc_feature: 33
tataacgaagtgacttctaaatcctaggaaattggcgcggttcagaagtaccgcatttttgcgaatcaagggccccttttgcgagtcattgaaccc

SEQ ID NO: 44271 - DNA, 96 bp, Fusarium phaseoli
  misc_feature: 33
agcgataatcctagatcttaagtatactatctaccctaggtgcctattactaatcgacctttatagtcaatgggaagaggctattaatagctacta

SEQ ID NO: 44272 - DNA, 96 bp, Fusarium phaseoli
  misc_feature: 33
agcaaccaacaagcaaccaacaagcaaccaacaagcaaccaacaagcaaccaacaagcaaccaacaagcaaccaacaagcgaccaacaaagtacta

SEQ ID NO: 44273 - DNA, 96 bp, Fusarium phaseoli
  misc_feature: 33
tagggttacaggtaaataacaccttagtccccttaaactaaccctcataaccacccgctccctccctcgcttcctaggttatactaaggcctaagg

SEQ ID NO: 44274 - DNA, 96 bp, Fusarium phaseoli
  misc_feature: 33
ggttagggttacaggtaaataacaccttagtccccttaaactaaccctcataaccacccgctccctccctcgcttcctaggttatactaaggccta

SEQ ID NO: 44275 - DNA, 96 bp, Fusarium phaseoli
  misc_feature: 33
taggagaggagagttgggaaagtgagactaaccgctgctgtccgggggagaagagttggacaagtgaggctaaccgctattgtccaggagaggagg

SEQ ID NO: 44276 - DNA, 96 bp, Fusarium phaseoli
  misc_feature: 33
tagcgataatcctagatcttaagtatactatctaccctaggtgcctattactaatcgacctttatagtcaatgggaagaggctattaatagctact

SEQ ID NO: 44277 - DNA, 96 bp, Fusarium phaseoli
  misc_feature: 33
cagatgtgaaaccggatagttacatccggtcacacgaatgttatgcgacagtcctcgagacccgtgaagccgactgcaaaactacaggaaaggcta

SEQ ID NO: 44278 - DNA, 96 bp, Fusarium phaseoli
  misc_feature: 33
gatacaaataacccaccgggcctccttcttgggccggcttgcttatttaacttgcaccttcactattcgtattttataaataacggccgggggcta

SEQ ID NO: 44279 - DNA, 96 bp, Fusarium phaseoli
  misc_feature: 33
tagatttaaccttggaatgaatagaagcttcacattgcatcatattaacgtcacttgagaagccccattgtctttgacagcgtaactaaagtgttt

SEQ ID NO: 44280 - DNA, 96 bp, Fusarium phaseoli
  misc_feature: 33
tagatcgcggtatacgctctctatggacctatgatctgttaagaagttgcggacttcacggagatgtggaacggccatcgcatccggccacagaag

SEQ ID NO: 44281 - DNA, 96 bp, Fusarium phaseoli
  misc_feature: 33
tagactttacaaagagcatgttgtttttggggcggaaagtgcaagtgctcaatactgtataggattaacagttctaacagttctaacctagcttcc

SEQ ID NO: 44282 - DNA, 96 bp, Fusarium phaseoli
  misc_feature: 33
cttatcctctactaagcagccccctggtctttaatagcgccatttctacttgtatgaggtttttaaataatctgcccgctaatatgctgggaagta

SEQ ID NO: 44283 - DNA, 96 bp, Fusarium phaseoli
  misc_feature: 33
ggttggcagtgcgagtcgagagtactgtcatttgtattagtcaggtaagtacacgaatacgcatgctgctagtatggagcaagagtgtacacagta

SEQ ID NO: 44284 - DNA, 96 bp, Fusarium phaseoli
  misc_feature: 33
tacccctccttcctcatatttaatattcactttatccctaaccgtaaattaacctcctacttctcttataatccgcctttatcttaactacctcat

SEQ ID NO: 44285 - DNA, 96 bp, Fusarium phaseoli
  misc_feature: 33
gttgtgacctccttggagccttgtgggcactcatgggattgacacaccttgtcaagagccacaatgttccaaggctgttgcgggcgctactgacat

SEQ ID NO: 44286 - DNA, 96 bp, Fusarium phaseoli
  misc_feature: 33
gttgagggttagggttaagtggttgtggtgaaggttagggggagtggttgtggtgaaggttagggggagtggttgagttgagggttaggggggggg

SEQ ID NO: 44287 - DNA, 96 bp, Fusarium phaseoli
  misc_feature: 33
aaaccgacgaagtatgaagacggagaagaagatatggcaatcgcacaaggtaaaggggactctattcataatgagaaagcttgagaaagattgaac

SEQ ID NO: 44288 - DNA, 96 bp, Fusarium phaseoli
  misc_feature: 33
gttagggactagtaacctctggcgttaagagttagaaaagtgaaggtaaccgctactgtctaggagaggagagttgggaaagtgagactaaccgct

SEQ ID NO: 44289 - DNA, 96 bp, Fusarium phaseoli
  misc_feature: 33
aaggacatatgttgagaatgctgttgctatgtccgaccagcacggcaacggcgccttgtcgacaacagctaagaaacgcatagacgcgtttctaac

SEQ ID NO: 44290 - DNA, 96 bp, Fusarium phaseoli
  misc_feature: 33
aaagggagggaaaatgagaaaaagaccatatatcaatacatcacgagcaagacacgttttttcatgtatctatagtaatacgaaattgattctcac

SEQ ID NO: 44291 - DNA, 96 bp, Fusarium phaseoli
  misc_feature: 33
acttttcacgctcagctcagctcatcgcatcattcattcattcaaactttccgaccccaccgccagcctccttctcgatcccaatgcaacatagac

SEQ ID NO: 44292 - DNA, 96 bp, Fusarium phaseoli
  misc_feature: 33
cactccccctaaccttcaccacaaccacttaaccctaaccctcaactcaaccactccccctaaccttcaccacaaccactccccctaaccctcacc

SEQ ID NO: 44293 - DNA, 96 bp, Fusarium phaseoli
  misc_feature: 33
gacgtcccgtcaatacgcagtcgcgtaacaaatactcgggctccaacctcgtaatgtgcctccgcacaaacagaagatgcaaaaccagcctcgacc

SEQ ID NO: 44294 - DNA, 96 bp, Fusarium phaseoli
  misc_feature: 33
ctcttatactccctcttaccctaacctatctattccttacttaacgtcctcattattattattatctcctcccaccttatatataataccacaccc

SEQ ID NO: 44295 - DNA, 96 bp, Fusarium phaseoli
  misc_feature: 33
aacgaagtgacttctaaatcctaggaaattggcgcggttcagaagtaccgcatttttgcgaatcaagggccccttttgcgagtcattgaacccccc

SEQ ID NO: 44296 - DNA, 96 bp, Fusarium phaseoli
  misc_feature: 33
gggcgtaagggtgacggggaaccaaagagtaagtaaaggcctgaccctgactctgaccttgaccttgaccttgacccttaggccttagtataacct

SEQ ID NO: 44297 - DNA, 96 bp, Fusarium phaseoli
  misc_feature: 33
ccttcaccacaaccactccccctaaccttcaccacaaccacttaaccctaaccctcaactcaaccactccccctaaccctcaccacaaccactccc

SEQ ID NO: 44298 - DNA, 96 bp, Fusarium phaseoli
  misc_feature: 33
ggcgaggtgatattggcccgcactaataatgaatggcgagatcgcttagccatctacattaatcgcctaaataaccgtaatccattcccggtttcc

SEQ ID NO: 44299 - DNA, 96 bp, Fusarium phaseoli
  misc_feature: 33
ggcattttggccgatgtttccagtaggcgttagcacccaccgagagcagtaaggaggatggaggtgaaataccgagttttgagagtggggtgggtt

SEQ ID NO: 44300 - DNA, 96 bp, Fusarium phaseoli
  misc_feature: 33
gccagaacgatcacggtgatcacctttctgattaccgcgatcacttacacaatcaccctgatcaaaccccagagcatggtgatcaggcaccatgcc

SEQ ID NO: 44301 - DNA, 96 bp, Fusarium phaseoli
  misc_feature: 33
atgccagtaaagaagcatgcgaccaagagagatgcgaccaagagagatgcgaccaagagagatgccaccaagagagatgccaccaagagagatgcc

SEQ ID NO: 44302 - DNA, 96 bp, Fusarium phaseoli
  misc_feature: 33
acgttttaaacggaacgaacgaacgaacgaacgaacgaaagtgcccatgtatgctcggccgtggattcctcgcaaagccgatatccctcgtaatcc

SEQ ID NO: 44303 - DNA, 96 bp, Fusarium phaseoli
  misc_feature: 33
gccgctgtggcaaactcttccctgacgtactggcgttgtttattgaattcaattactgacctgcgatttaaaccaggtgatttcgataacggatcc

SEQ ID NO: 44304 - DNA, 96 bp, Fusarium phaseoli
  misc_feature: 33
caacttgactcacttgaattgaagtcatcggaaaggcacctttcctatccgtagttccctctactgtaggtttcgctaaagcccgtcaatacaagc

SEQ ID NO: 44305 - DNA, 96 bp, Fusarium phaseoli
  misc_feature: 33
agggtcttactggagttgcgcccagagtttggtgatcgatgctgggcggaggttacagcatgtccagaggagagcaagaaccagctgctattacgc

SEQ ID NO: 44306 - DNA, 96 bp, Fusarium phaseoli
  misc_feature: 33
aatggatttgctgcacctgttcattagcgccttttttttttgtatgggaaacccattggatttgctagcgaatccgccgcgcagctaggatagggc

SEQ ID NO: 44307 - DNA, 96 bp, Fusarium phaseoli
  misc_feature: 33
ctttatcccccctattctcccttctgctctgaccaccgtctctccaaccgcgtaataacctggcatccacggcttgcttatatgccaccgccgggc

SEQ ID NO: 44308 - DNA, 96 bp, Fusarium phaseoli
  misc_feature: 33
gcccacggtcatcagccaaggcggggagaagaagaaaggcggcagccgcatcagacagggccaagtggccagcaaaggaagcagccgttgagcggg

SEQ ID NO: 44309 - DNA, 96 bp, Fusarium phaseoli
  misc_feature: 33
gcacaacacgacaacggacatgcagtggccctatgccagagtgtgggggcagagacgtgcgtgacgcgtgatgttcggggaatcccgacgatgaag

SEQ ID NO: 44310 - DNA, 96 bp, Fusarium phaseoli
  misc_feature: 33
gatggatgatttggcggatttggtcgaggtgcacgtcgatgatccggaggcacatccattagacgaggaccgagtggacgggttgacattgcaggg

SEQ ID NO: 44311 - DNA, 96 bp, Fusarium phaseoli
  misc_feature: 33
acccctccttcctcatatttaatattcactttatccctaaccgtaaattaacctcctacttctcttataatccgcctttatcttaactacctcatc

SEQ ID NO: 44312 - DNA, 96 bp, Fusarium phaseoli
  misc_feature: 33
gacgctcagtataccttgcatgcgtgtctgccagggagctagcgtgtaaggctgaatcactcccatggtgccctttggtgtttccttgcaaacgtc

SEQ ID NO: 44313 - DNA, 96 bp, Fusarium phaseoli
  misc_feature: 33
gacgctggacgagacatacgaacaaatgctcagcaatatcccgtcgacttctagggattatgcccggcaaatgctgacgttgctctgttgtgcaag

SEQ ID NO: 44314 - DNA, 96 bp, Fusarium phaseoli
  misc_feature: 33
gacgatgccgcctgtaaagtgcttctgtactctccacctttcgcgttaatgtctgcacctttgtccagcagaagctgaacaattttctcattgcct

SEQ ID NO: 44315 - DNA, 96 bp, Fusarium phaseoli
  misc_feature: 33
gacctcgtcagtgatgcaaggtgcctccaaatccagtggcgcatttttccaagagcgagagtaagacattaaccgaggacttgttaggcaactatt

SEQ ID NO: 44316 - DNA, 96 bp, Fusarium phaseoli
  misc_feature: 33
gaatgaaagttttgttgttcctggatctctggggccaccaaagcctgtaacgtactccacaagcgagtgaaccagacaagcgagtgaatcaaaaat

SEQ ID NO: 44317 - DNA, 96 bp, Fusarium phaseoli
  misc_feature: 33
aaggcgctatcctagctgcgcggcggattcgctagcaaatccaatgggtttcccatacaaaaaaaaaaggcgctatcctagctgcgcggcggattc

SEQ ID NO: 44318 - DNA, 96 bp, Fusarium phaseoli
  misc_feature: 33
ctcccaccttatatataataccacacccactccgcttatctaactctaccttaaaattcgccgtatcttacccctccttcctcatatttaatattc

SEQ ID NO: 44319 - DNA, 96 bp, Fusarium phaseoli
  misc_feature: 33
ccagagcctgagattgatgactggggttcttttgtcgtaaagcctcaggagaaaaagaagcacgcgacaaagcttcagatgttatggaatgacttc

SEQ ID NO: 44320 - DNA, 96 bp, Fusarium phaseoli
  misc_feature: 33
gaaccaaatacccagataactcttaggtgttatgcgagctagatttaaccttggaatgaatagaagcttcacattgcatcatattaacgtcacttg

SEQ ID NO: 44321 - DNA, 96 bp, Fusarium phaseoli
  misc_feature: 33
cgagctagatttaaccttggaatgaatagaagcttcacattgcatcatattaacgtcacttgagaagccccattgtctttgacagcgtaactaaag

SEQ ID NO: 44322 - DNA, 96 bp, Fusarium phaseoli
  misc_feature: 33
caatgacttgatattgttagcatgctcttttgccttttcagacggaaaattctaagcttacgatcaaagtgaaagttccaaaacttctggctcaag

SEQ ID NO: 44323 - DNA, 96 bp, Fusarium phaseoli
  misc_feature: 33
agggccaacagaatgttactctcgataacgctctgtatgttccggaaggatgctcaaacctactgtccgtgtcagcactggagaagaagggggcag

SEQ ID NO: 44324 - DNA, 96 bp, Fusarium phaseoli
  misc_feature: 33
agggggagtggttgtggtgaaggttagggggagtggttgagttgagggttagggggagtggttgagataaagtttagagtgaaggggtagaaagag

SEQ ID NO: 44325 - DNA, 96 bp, Fusarium phaseoli
  misc_feature: 33
ctctctattaatccaatatatgtgacccatgccaagagagcagtcgagggcttcagatatgatggcgttgggggcaacttggctgtggaattgggt

SEQ ID NO: 44326 - DNA, 96 bp, Fusarium phaseoli
  misc_feature: 33
agcggagtgggtgtggtattatatataaggtgggaggagataataataataatgaggacgttaagtaaggaatagataggttagggtaagagggag

SEQ ID NO: 44327 - DNA, 96 bp, Fusarium phaseoli
  misc_feature: 33
ctccctactagatttcaacgatgctccatttcgcggcatcgttcactcccgtcctcaccaccatgagccatgcgaggcccgtcagctggcacggtg

SEQ ID NO: 44328 - DNA, 96 bp, Fusarium phaseoli
  misc_feature: 33
ccagctgacgggcctcgcatggctcatggtggtgaggacgggagtgaacgatgccgcgaaatggagcatcgttgaaatctagtagggagaactgag

SEQ ID NO: 44329 - DNA, 96 bp, Fusarium phaseoli
  misc_feature: 33
ctagtcacgtcaggaattggtccttgttgtctccttggagtggcaagatctcgatctagtcgcagaagttggtaggggctgtacctggtatctttg

SEQ ID NO: 44330 - DNA, 96 bp, Fusarium phaseoli
  misc_feature: 33
caagggcagggcgtaagggtgacggggaaccaaagagtaagtaaaggcctgaccctgactctgaccttgaccttgaccttgacccttaggccttag

SEQ ID NO: 44331 - DNA, 96 bp, Fusarium phaseoli
  misc_feature: 33
ctaaagagctagctgggtgggtttactcccgttaataaacctcctatggcgtctcctcaccaggtagggctaaaggctatatctacggctatcctg

SEQ ID NO: 44332 - DNA, 96 bp, Fusarium phaseoli
  misc_feature: 33
atatagaaagttaaaggtttagcgataattaaaataaatataccttatttttagatattttatttagcgcttaagctccagttaatatcggtttag

SEQ ID NO: 44333 - DNA, 96 bp, Fusarium phaseoli
  misc_feature: 33
agatcgataccattcccaccggaaatctcccttgacgaggcgcagcatgcgaccctccacacaggaaacacctccccaggatcagacaacatcacg

SEQ ID NO: 44334 - DNA, 96 bp, Fusarium phaseoli
  misc_feature: 33
aaccccgttaacacacttctaaattaggcaattagtgcagcgtgtgttgatggcccaaggagactcaaggccgcttggcaagcattggattgaccg

SEQ ID NO: 44335 - DNA, 96 bp, Fusarium phaseoli
  misc_feature: 33
cccaccgagagcagtaaggaggatggaggtgaaataccgagttttgagagtggggtggttttaaacggaggggcgacggcggagaggttacgggcg

SEQ ID NO: 44336 - DNA, 96 bp, Fusarium phaseoli
  misc_feature: 33
cgatggttgatgaatggttgatgaatggttgatgaatggttgatgaatggttgatgaatggttgatgaatggttgatgaatggttgtgtcacattt

SEQ ID NO: 44337 - DNA, 96 bp, Fusarium phaseoli
  misc_feature: 33
caacacgacaacggacatgcagtggccctatgccagagtgtgggggcagagacgtgcgtgacgcgtgatgttcggggaatcccgacgatgaagagg

SEQ ID NO: 44338 - DNA, 96 bp, Fusarium phaseoli
  misc_feature: 33
ccgagccggatagagactatccgaaggatgaaacacatagcagtctcagcactttgtatcactcccgctgtctgggaatgggacgacgatctgttt

SEQ ID NO: 44339 - DNA, 96 bp, Fusarium phaseoli
  misc_feature: 33
agggttacaggtaaataacaccttagtccccttaaactaaccctcataaccacccgctccctccctcgcttcctaggttatactaaggcctaaggg

SEQ ID NO: 44340 - DNA, 96 bp, Fusarium phaseoli
  misc_feature: 33
ccctctggtctggattgtggctgtatcttggttgcatgcctctttggtggcatctctcttggtggcatctctcttggtggtatctctcttggtcgt

SEQ ID NO: 44341 - DNA, 96 bp, Fusarium phaseoli
  misc_feature: 33
ccctcagttctccctactagatttcaacgatgctccatttcgcggcatcgttcactcccgtcctcaccaccatgagccatgcgaggcccgtcagct

SEQ ID NO: 44342 - DNA, 96 bp, Fusarium phaseoli
  misc_feature: 33
ccatcttctcggacaatgcggaaccaacgggttgcacgaagacattgttagcgccgtggaagatgaaagaagaatcgcagctattctcgaagcgat

SEQ ID NO: 44343 - DNA, 96 bp, Fusarium phaseoli
  misc_feature: 33
ccacccgctccctccctcgcttcctaggttatactaaggcctaagggtcaaggtcaaggtcaaggtcagagtcagggtcaggcctttacttactct

SEQ ID NO: 44344 - DNA, 96 bp, Fusarium phaseoli
  misc_feature: 33
catatcggcgtaggaggtctgtgggatgttagggccaatcagtagaaacggtgtgttgtactgaccaagtgaaagagatctcatcattgtgtcgtt

SEQ ID NO: 44345 - DNA, 96 bp, Fusarium phaseoli
  misc_feature: 33
cacgcgcttgattacatgaaaacttttcattcacacaggtcgcacccgagtgagttttagtccagcggtgtgacctacaaatggcctaggaacaat

SEQ ID NO: 44346 - DNA, 96 bp, Fusarium phaseoli
  misc_feature: 33
aaatcaagtctaacacctgtaatgtgggggcgaaataaatcaattcagtagaattagtctcgaaacatcaccaccgctcatatcgataccacattg

SEQ ID NO: 44347 - DNA, 96 bp, Fusarium phaseoli
  misc_feature: 33
aggcacgtttacaataattggtagggttgtcgtccacaccatcgtcgtcttcttcgactccatccattgtcgactccttgaatgccttgtctaaat

SEQ ID NO: 44348 - DNA, 96 bp, Fusarium phaseoli
  misc_feature: 33
atattcccatataatatagcgtttacgtttatatagaaaagctattttttattaagttatagcggttatttcctgacttagtcttgattttttttt

SEQ ID NO: 44349 - DNA, 96 bp, Fusarium phaseoli
  misc_feature: 33
aagcaaccaacaagcaaccaacaagcaaccaacaagcaaccaacaagcaaccaacaagcaaccaacaagcaaccaacaagcgaccaacaaagtact

SEQ ID NO: 44350 - DNA, 96 bp, Fusarium phaseoli
  misc_feature: 33
aggtcaacaacttgcaagacgaatacatactgtctgcagtccccaagcacataatgccctcgataaacgagcccaaaatagaacaacgaaagtctt

SEQ ID NO: 44351 - DNA, 96 bp, Fusarium phaseoli
  misc_feature: 33
aggctttcttcctttcttttttttgttccttttagataaaatccataaatatagcggagagaaggcaagtgtcttgtagctcataggaaaggcttt

SEQ ID NO: 44352 - DNA, 96 bp, Fusarium phaseoli
  misc_feature: 33
agaacacaattatcacaatactccatttcttgctccataagaatggttgaattacgcgtcgtaatatattatgggtcgtcgcgcgctcactgtagt

SEQ ID NO: 44353 - DNA, 96 bp, Fusarium phaseoli
  misc_feature: 33
aatgacttgatattgttagcatgctcttttgccttttcagacggaaaattctaagcttacgatcaaagtgaaagttccaaaacttctggctcaagt

SEQ ID NO: 44354 - DNA, 96 bp, Fusarium phaseoli
  misc_feature: 33
acccgtttttcccctctcattaacgtaatatattgctggatctgactcggccgtagctcatgtttgagctgagtggaatgccatattgtgataagt

SEQ ID NO: 44355 - DNA, 96 bp, Fusarium phaseoli
  misc_feature: 33
aatttgatttgatttgatttagataaatttgatttgatttgaatagatttgaatttgatttatttgtttgcaagcctggttctcacagtcgtcgtt

SEQ ID NO: 44356 - DNA, 96 bp, Fusarium phaseoli
  misc_feature: 32
ttttcaaacttcccttttcaaacttcccttttcaaacttcccttttcaaacttcccttttcaaacttcccttttcaaacttccctttcaaccctat

SEQ ID NO: 44357 - DNA, 96 bp, Fusarium phaseoli
  misc_feature: 32
aacactggacaaaacatatgaacgaatgctcagcaatatcccctcgacttccagggattatgctcgacaaatgctgacggtgctctgctgtgcaaa

SEQ ID NO: 44358 - DNA, 96 bp, Fusarium phaseoli
  misc_feature: 32
tttattatcttcgaactagctatagagcttgacgtattattgcatgggtacttaggcattccgtactatattaagatagacggctagcgttatgcg

SEQ ID NO: 44359 - DNA, 96 bp, Fusarium phaseoli
  misc_feature: 32
tttaaccttggaatgaatagaagcttcacattgcatcatattaacgtcacttgagaagccccattgtctttgacagcgtaactaaagtgtttacaa

SEQ ID NO: 44360 - DNA, 96 bp, Fusarium phaseoli
  misc_feature: 32
taggttctattccttgatctggaagacagaatcgctgcacccgcttttgcataagaacggccacttctttctgtggagctcattcacagaagacaa

SEQ ID NO: 44361 - DNA, 96 bp, Fusarium phaseoli
  misc_feature: 32
gctcttttgccttttcagacggaaaattctaagcttacgatcaaagtgaaagttccaaaacttctggctcaagtgttggatatcgccaagtgacaa

SEQ ID NO: 44362 - DNA, 96 bp, Fusarium phaseoli
  misc_feature: 32
ttggcggatttggtcgaggtgcacgtcgatgatccggaggcacatccattagacgaggaccgagtggacggggtgacattgcaggtcgtcatggcg

SEQ ID NO: 44363 - DNA, 96 bp, Fusarium phaseoli
  misc_feature: 32
aaacactggacaaaacatatgaacgaatgctcagcaatatcccctcgacttccagggattatgctcgacaaatgctgacggtgctctgctgtgcaa

SEQ ID NO: 44364 - DNA, 96 bp, Fusarium phaseoli
  misc_feature: 32
ttgcacagacctcgcgctgctctgatgaactgacttgcgaaatgtgtataaacagacacaggacactgaaatggccaactgcacttttctgcaagc

SEQ ID NO: 44365 - DNA, 96 bp, Fusarium phaseoli
  misc_feature: 32
agacgctggacgagacatacgaacaaatgctcagcaatatcccgtcgacttctagggattatgcccggcaaatgctgacgttgctctgttgtgcaa

SEQ ID NO: 44366 - DNA, 96 bp, Fusarium phaseoli
  misc_feature: 32
ggccaacagaatgttactctcgataacgctctgtatgttccggaaggatgctcaaacctactgtccgtgtcagcactggagaagaagggggcagaa

SEQ ID NO: 44367 - DNA, 96 bp, Fusarium phaseoli
  misc_feature: 32
aacttcctgaatgcctcagtcggtagtacctttgtcaagccgtcagccagcatatcgccggtaggtgtgtatgcgaccttgatcgtcttttgagaa

SEQ ID NO: 44368 - DNA, 96 bp, Fusarium phaseoli
  misc_feature: 32
accgcaacaactaaaaagaaaagcgcacttccgttgcgccaaatggccgtgtccacgactagagtaaaacaatatttgccttccgtgcaaaaggaa

SEQ ID NO: 44369 - DNA, 96 bp, Fusarium phaseoli
  misc_feature: 32
acactgcagcaaaataccatcgaccggctgagacactcaattgactgaacctgacagaccccttttcacctttgttctgtcgcgtcatatcatgaa

SEQ ID NO: 44370 - DNA, 96 bp, Fusarium phaseoli
  misc_feature: 32
ttatcgcaagaaaagaaagcaaagaaacatagagaatagcgcaaatagcttcttgagttattagctctaaatgagaacgcctcgatacgagggcga

SEQ ID NO: 44371 - DNA, 96 bp, Fusarium phaseoli
  misc_feature: 32
ttatccggtaaaatgcattttaattacatgcaccgattcacgatataaagcattggccacatatttatatcgtgaatcggtgcatgagatcggaag

SEQ ID NO: 44372 - DNA, 96 bp, Fusarium phaseoli
  misc_feature: 32
ttatccggtaaaatgcattttaattacatgcaccgattcacgatataaagcattagatcggaagagcgtcgtgtagggaaagagtgtagatctcgg

SEQ ID NO: 44373 - DNA, 96 bp, Fusarium phaseoli
  misc_feature: 32
gttagggttacaggtaaataacaccttagtccccttaaactaaccctcataaccacccgctccctccctcgcttcctaggttatactaaggcctaa

SEQ ID NO: 44374 - DNA, 96 bp, Fusarium phaseoli
  misc_feature: 32
ttagcacacgttaggcttcaaacttcattaagcgacacctagagcttaagacgtatttttttcggaaatataactaccagagagctaagtgcgaag

SEQ ID NO: 44375 - DNA, 96 bp, Fusarium phaseoli
  misc_feature: 32
ttacgaggactttatagtctatatccttcagtcctttacagtcagcaagattactaatcagtaaatcaagctaaaaggcagggaaaagaacctgct

SEQ ID NO: 44376 - DNA, 96 bp, Fusarium phaseoli
  misc_feature: 32
ttaatgactcacactgtctacgggcacgaattaggcatggacagaaatcaattgtaacaaggataaactgtcatcagaatatgagacaagaaaaga

SEQ ID NO: 44377 - DNA, 96 bp, Fusarium phaseoli
  misc_feature: 32
tgttgcaaaacttaccgccgcgccttcctagatgtcgctgccagagctgcttagacgcatggccattggcactgagctggcacaatggacaggcgg

SEQ ID NO: 44378 - DNA, 96 bp, Fusarium phaseoli
  misc_feature: 32
gggttactggcaaccaggggccgcgcctgctggttgttactggtcaactccctaccacggaacgtcataaaaaaacaccaccaccagctcagaaca

SEQ ID NO: 44379 - DNA, 96 bp, Fusarium phaseoli
  misc_feature: 32
caggcctagctcggccagacttgaacaaaagtatatgtgagcatcttggatctacaatgaagccttctcagaaactcctgatcttctgttctcaca

SEQ ID NO: 44380 - DNA, 96 bp, Fusarium phaseoli
  misc_feature: 32
tgtgacctccttggagccttgtgggcactcatgggattgacacaccttgtcaagagccacaatgttccaaggctgttgcgggcgctactgacatgc

SEQ ID NO: 44381 - DNA, 96 bp, Fusarium phaseoli
  misc_feature: 32
tgtatggttgccctattgccctattggaccgtagaaacgaatgctgtggttttttgtctttattcttatcctctcgtttcattccgcttcatatgt

SEQ ID NO: 44382 - DNA, 96 bp, Fusarium phaseoli
  misc_feature: 32
gaagaggaggatgctatctccccaatgcgtgcggacctccactgtggtcgcgacaagggattatggccaattaaaatgcacgaaataaagtgtaca

SEQ ID NO: 44383 - DNA, 96 bp, Fusarium phaseoli
  misc_feature: 32
ggtaaccaacaagcaaccaacaagcaaccaacaagcaaccaacaagcaaccaacaagcaaccaacaagcaaccaacaagcaaccaacaagcgacca

SEQ ID NO: 44384 - DNA, 96 bp, Fusarium phaseoli
  misc_feature: 32
tggggcattttggccgatgtttccagtaggcgttagcacccaccgagagcagtaaggaggatggaggtgaaataccgagttttgagagtggggggg

SEQ ID NO: 44385 - DNA, 96 bp, Fusarium phaseoli
  misc_feature: 32
tggaggatccaacggatccaacgattggaagtagttggttgattacgcactctgaagcccgtcaactaggctcgagcagagcagtcctatcggtat

SEQ ID NO: 44386 - DNA, 96 bp, Fusarium phaseoli
  misc_feature: 32
tgctcggccgtggattcctcgcaaagccgatatccctcgtaatcctgctcccgggcaattcgcttgaactgttcactccgctgcggcgatgaacgg

SEQ ID NO: 44387 - DNA, 96 bp, Fusarium phaseoli
  misc_feature: 32
caaacactggacaaaacatatgaacgaatgctcagcaatatcccctcgacttccagggattatgctcgacaaatgctgacggtgctctgctgtgca

SEQ ID NO: 44388 - DNA, 96 bp, Fusarium phaseoli
  misc_feature: 32
tgaggcccagcttggagaatgacgtgcttagagtccataagagcccaatcaatgaagtaggtagccgggctgacctattctagatcggggtcttta

SEQ ID NO: 44389 - DNA, 96 bp, Fusarium phaseoli
  misc_feature: 32
tagcacacgttaggcttcaaacttcattaagcgacacctagagcttaagacgtatttttttcggaaatataactaccagagagctaagtgcgaaga

SEQ ID NO: 44390 - DNA, 96 bp, Fusarium phaseoli
  misc_feature: 32
ggagggaaagcgcaggtaatccgagggtaaagctcaggatataactaatcaatttccaccctatcacacttcgtcttaagcataagccttctaaga

SEQ ID NO: 44391 - DNA, 96 bp, Fusarium phaseoli
  misc_feature: 32
tcttaattaactataaactctaacctttaaaccctttattaactctaacctttaattctttattaaccctaactatttaattaattaccctatacc

SEQ ID NO: 44392 - DNA, 96 bp, Fusarium phaseoli
  misc_feature: 32
gggccaacagaatgttactctcgataacgctctgtatgttccggaaggatgctcaaacctactgtccgtgtcagcactggagaagaagggggcaga

SEQ ID NO: 44393 - DNA, 96 bp, Fusarium phaseoli
  misc_feature: 32
tctcggacaatgcggaaccaacgggttgcacgaagacattgttagcgccgtggaagatgaaagaagaatcgcagctattctcgaagcgatggacgt

SEQ ID NO: 44394 - DNA, 96 bp, Fusarium phaseoli
  misc_feature: 32
gaacttcctgaatgcctcagtcggtagtacctttgtcaagccgtcagccagcatatcgccggtaggtgtgtatgcgaccttgatcgtcttttgaga

SEQ ID NO: 44395 - DNA, 96 bp, Fusarium phaseoli
  misc_feature: 32
taactagcaaaagaaggcctgattcgcaaaaatgcagctagcccagacctatgcacttatctagcaacagttaggtaccctgcatgtctacataga

SEQ ID NO: 44396 - DNA, 96 bp, Fusarium phaseoli
  misc_feature: 32
aggtatgtgcgctacgggctgctggatggcaacggcagatgatgcctggcacaccccgaacacgaacggtcttccgtccacttgtgtcatgctaga

SEQ ID NO: 44397 - DNA, 96 bp, Fusarium phaseoli
  misc_feature: 32
acaatcaaaagcaggtactacttcagccgccgaaaataggaaactaaatacttagatgaattaggcttcaagttgacttactactaaccttcacga

SEQ ID NO: 44398 - DNA, 96 bp, Fusarium phaseoli
  misc_feature: 32
taccgagccaacggtcagatcgagaaggcaacagaactgctagagcatgtggttgcgattcaggagaagacattagcggagaatcacccaaatcga

SEQ ID NO: 44399 - DNA, 96 bp, Fusarium phaseoli
  misc_feature: 32
tccacgtctgtcgcggatggcaattgatctcttttcagttccggccatgtttgtttgtttgtttgtttgttttattcatagactgtcccagccgcc

SEQ ID NO: 44400 - DNA, 96 bp, Fusarium phaseoli
  misc_feature: 32
tcattacgccaccttgcgtactacttcttgctaacagggcttgctgacgggtctctgcgtatctttagactgttggctgcatcctcaatctctctc

SEQ ID NO: 44401 - DNA, 96 bp, Fusarium phaseoli
  misc_feature: 32
cgcacttaggagattggttgggaaaacacattcgttaggactgatttaatggcaaacatgctgaagcttgaatgctgacatgacctctttgattga

SEQ ID NO: 44402 - DNA, 96 bp, Fusarium phaseoli
  misc_feature: 32
cggaacagatctttcggatgcccgagctctccgtcctaggttagatcactatcaaggtaaactttattaggtcatacgttacttgatatgacttga

SEQ ID NO: 44403 - DNA, 96 bp, Fusarium phaseoli
  misc_feature: 32
tattattcggtcatttaacttgggtctcgatggtgttttgaccagccgcgggtagcagcaacgtcctcctctttcggctgaatgaatgaattttat

SEQ ID NO: 44404 - DNA, 96 bp, Fusarium phaseoli
  misc_feature: 32
cctaggctttcggattcttaccaacttccattctaactgaggcccagttggggaaggacagatcgttaaagatacatggtcaggaactcgtgcata

SEQ ID NO: 44405 - DNA, 96 bp, Fusarium phaseoli
  misc_feature: 32
aaaaggaagacagaagacactcagctttgggttggaggaagatggcgccctccgggctcataacctgatgaaacaatattgcaggagtggaagata

SEQ ID NO: 44406 - DNA, 96 bp, Fusarium phaseoli
  misc_feature: 32
tatatagaaagttaaaggtttagcgataattaaaataaatataccttatttttagatattttatttagcgcttaagctccagttaatatcggttta

SEQ ID NO: 44407 - DNA, 96 bp, Fusarium phaseoli
  misc_feature: 32
taggagagtaaagaggtagggggagtggttaaggtaataattagggggggaggtaatggttagggttaagagattatagtgaagattagggggggg

SEQ ID NO: 44408 - DNA, 96 bp, Fusarium phaseoli
  misc_feature: 32
taccaatttaggccaaggtaacccaggcattagtcagcttcttagagggatctgcactttttgcccgccgacagtctggaaacttttctccaatct

SEQ ID NO: 44409 - DNA, 96 bp, Fusarium phaseoli
  misc_feature: 32
tacaatcaaaagcaggtactacttcagccgccgaaaataggaaactaaatacttagatgaattaggcttcaagttgacttactactaaccttcacg

SEQ ID NO: 44410 - DNA, 96 bp, Fusarium phaseoli
  misc_feature: 32
catttaatcttttagttcgggactaggtcttggatccatagatagcaccacgggctagggaaccggctttcctacagaagagtgtcgataccctta

SEQ ID NO: 44411 - DNA, 96 bp, Fusarium phaseoli
  misc_feature: 32
gatcaaggcgttcaagcggttcatctccccactcaggcgtattgcggacgtttgcaaggaaacaccaaagggcaccatgggagtgattcagcctta

SEQ ID NO: 44412 - DNA, 96 bp, Fusarium phaseoli
  misc_feature: 32
gagaacatcaccgacctgatccggtcgccatggccctttagcactcgctcacaatcgcccgtctctgcgttccagatccggaccgtcctgtcgtta

SEQ ID NO: 44413 - DNA, 96 bp, Fusarium phaseoli
  misc_feature: 32
taacgaagtgacttctaaatcctaggaaattggcgcggttcagaagtaccgcatttttgcgaatcaagggccccttttgcgagtcattgaaccccc

SEQ ID NO: 44414 - DNA, 96 bp, Fusarium phaseoli
  misc_feature: 32
taaagagctagctgggtgggtttactcccgttaataaacctcctatggcgtctcctcaccaggtagggctaaaggctatatctacggctatcctgc

SEQ ID NO: 44415 - DNA, 96 bp, Fusarium phaseoli
  misc_feature: 32
ctattattcggtcatttaacttgggtctcgatggtgttttgaccagccgcgggtagcagcaacgtcctcctctttcggctgaatgaatgaatttta

SEQ ID NO: 44416 - DNA, 96 bp, Fusarium phaseoli
  misc_feature: 32
ccatgcccaaagggctttgaagctaaaagtacatatacctccttagttcttgccttaatctcgctaagcccttatggatctcgccttattctttta

SEQ ID NO: 44417 - DNA, 96 bp, Fusarium phaseoli
  misc_feature: 32
attcccatataatatagcgtttacgtttatatagaaaagctattttttattaagttatagcggttatttcctgacttagtcttgatttttttttta

SEQ ID NO: 44418 - DNA, 96 bp, Fusarium phaseoli
  misc_feature: 32
cggttaccttcacttttctaactcttaacgccagaggttactagtccctaactgcccccgcccttttgccccttgctctccggcaaccttcataac

SEQ ID NO: 44419 - DNA, 96 bp, Fusarium phaseoli
  misc_feature: 32
aggttatgaaggttgccggagagcaaggggcaaaagggcgggggcagttagggactagtaacctctggcgttaagagttagaaaagtgaaggtaac

SEQ ID NO: 44420 - DNA, 96 bp, Fusarium phaseoli
  misc_feature: 32
gttaaagagatgtgttgattgaatcaattatgattgttcctagtgaggttgtcagtaatgggagatccctcaatgcattctatcgctaactgatct

SEQ ID NO: 44421 - DNA, 96 bp, Fusarium phaseoli
  misc_feature: 32
gtgttgatgtgctgctgggcttagtgatgcatttttctgtacacgtacgtacgtacgtactgtattttgggtagctgtacgtacgtacaacttttc

SEQ ID NO: 44422 - DNA, 96 bp, Fusarium phaseoli
  misc_feature: 32
ccactccccctaaccttcaccacaaccacttaaccctaaccctcaactcaaccactccccctaaccttcaccacaaccactccccctaaccctcac

SEQ ID NO: 44423 - DNA, 96 bp, Fusarium phaseoli
  misc_feature: 32
gtccctaactgcccccgcccttttgccccttgctctccggcaaccttcataacctcccgcttacctcttgacttcccgggtcaaacgaaaacctag

SEQ ID NO: 44424 - DNA, 96 bp, Fusarium phaseoli
  misc_feature: 32
gtcattacgccaccttgcgtactacttcttgctaacagggcttgctgacgggtctctgcgtatctttagactgttggctgcatcctcaatctctct

SEQ ID NO: 44425 - DNA, 96 bp, Fusarium phaseoli
  misc_feature: 32
ctcttaattaactataaactctaacctttaaaccctttattaactctaacctttaattctttattaaccctaactatttaattaattaccctatac

SEQ ID NO: 44426 - DNA, 96 bp, Fusarium phaseoli
  misc_feature: 32
gtacttttcacgctcagctcagctcatcgcatcattcattcattcaaactttccgaccccaccgccagcctccttctcgatcccaatgcaacatag

SEQ ID NO: 44427 - DNA, 96 bp, Fusarium phaseoli
  misc_feature: 32
caagcaaccaacaagcaaccaacaagcaaccaacaagcaaccaacaagcaaccaacaagcaaccaacaagcaaccaacaagcgaccaacaaagtac

SEQ ID NO: 44428 - DNA, 96 bp, Fusarium phaseoli
  misc_feature: 32
ggttgggttgggttgggttgggttgggtttggcggtttgttggaataaatcacttacgacgtcttttttgggttccactgcgaatctcctcaggag

SEQ ID NO: 44429 - DNA, 96 bp, Fusarium phaseoli
  misc_feature: 32
ggtgcctgatcaccatgctctggggtttgatcagggtgattgtgtaagtgatcgcggtaatcagaaaggtgatcaccgtgatcgttctggcgttgg

SEQ ID NO: 44430 - DNA, 96 bp, Fusarium phaseoli
  misc_feature: 32
aagggagggaaaatgagaaaaagaccatatatcaatacatcacgagcaagacacgttttttcatgtatctatagtaatacgaaattgattctcacc

SEQ ID NO: 44431 - DNA, 96 bp, Fusarium phaseoli
  misc_feature: 32
ggtatatatatagtgaaatcggcagtcattttaggacacttcacgatgaggcgaaactgactgtgtaccttcttgtgggacggtgcaaatgggact

SEQ ID NO: 44432 - DNA, 96 bp, Fusarium phaseoli
  misc_feature: 32
gggtttcccatacaaaaaaaaaaggcgctatcctatcctagctgcgcggcggattcgctagcaaatccaatgggtttcccatacaaaaaaaaaagg

SEQ ID NO: 44433 - DNA, 96 bp, Fusarium phaseoli
  misc_feature: 32
gggtcttactggagttgcgcccagagtttggtgatcgatgctgggcggaggttacagcatgtccagaggagagcaagaaccagctgctattacgct

SEQ ID NO: 44434 - DNA, 96 bp, Fusarium phaseoli
  misc_feature: 32
ccaactgtcgaacctcgcattggaaccgggctcattggtaccatcctcatcaccacgatcatcgccaccgccgccaatgccgtcctggctgccccc

SEQ ID NO: 44435 - DNA, 96 bp, Fusarium phaseoli
  misc_feature: 32
gggggagtggttgtggtgaaggttagggggagtggttgagttgagggttagggggagtggttgagataaagtttagagtgaaggggtagaaagagg

SEQ ID NO: 44436 - DNA, 96 bp, Fusarium phaseoli
  misc_feature: 32
gggagggagcgggtggttatgagggttagtttaaggggactaaggtgttatttacctgtaaccctaaccctaaggcaatgcctaggttttcgtttg

SEQ ID NO: 44437 - DNA, 96 bp, Fusarium phaseoli
  misc_feature: 32
gggactagtaacctctggcgttaagagttagaaaagtgaaggtaaccgctactgtctaggagaggagagttgggaaagtgagactaaccgctgctg

SEQ ID NO: 44438 - DNA, 96 bp, Fusarium phaseoli
  misc_feature: 32
atattcaacatcaaccaatggaccgaatgcacgtactgtctgacacaaccccatcgggcactctataaagtcccatgacaagcttgaaacgtagcc

SEQ ID NO: 44439 - DNA, 96 bp, Fusarium phaseoli
  misc_feature: 32
ggagttcatctccagcatcgcccagtagtgccccgttgtctttgaggtcatcatattcaattccagcttctcgaagtgaggccatgttcttcagtg

SEQ ID NO: 44440 - DNA, 96 bp, Fusarium phaseoli
  misc_feature: 32
ggactagtaacctctggcgttaagagttagaaaagtgaaggtaaccgctactgtctaggagaggagagttgggaaagtgagactaaccgctgctgt

SEQ ID NO: 44441 - DNA, 96 bp, Fusarium phaseoli
  misc_feature: 32
caactcaatatattgaaatacattgacgtcaatcatttaccaactgttgaacatgtggggtgtcacgtgttggtcaaggatcttgagattaaaagc

SEQ ID NO: 44442 - DNA, 96 bp, Fusarium phaseoli
  misc_feature: 32
gctccctccctcgcttcctaggttatactaaggcctaagggtcaaggtcaaggtcaaggtcagagtcagggtcaggcctttacttactctttggtt

SEQ ID NO: 44443 - DNA, 96 bp, Fusarium phaseoli
  misc_feature: 32
actccctcttaccctaacctatctattccttacttaacgtcctcattattattattatctcctcccaccttatatataataccacacccactccgc

SEQ ID NO: 44444 - DNA, 96 bp, Fusarium phaseoli
  misc_feature: 32
acccaccgagagcagtaaggaggatggaggtgaaataccgagttttgagagtggggtggttttaaacggaggggcgacggcggagaggttacgggc

SEQ ID NO: 44445 - DNA, 96 bp, Fusarium phaseoli
  misc_feature: 32
catgcctctttggtggcatctctcttggtggcatctctcttggtggcatctctcttggtcgcatctctcttggtcgcatctctcttggtcgcatgc

SEQ ID NO: 44446 - DNA, 96 bp, Fusarium phaseoli
  misc_feature: 32
aatcaagtctaacacctgtaatgtgggggcgaaataaatcaattcagtagaattagtctcgaaacatcaccaccgctcatatcgataccacattgc

SEQ ID NO: 44447 - DNA, 96 bp, Fusarium phaseoli
  misc_feature: 32
cagacgatgccgcctgtaaagtgcttctgtactctccacctttcgcgttaatgtctgcacctttgtccagcagaagctgaacaattttctcattgc

SEQ ID NO: 44448 - DNA, 96 bp, Fusarium phaseoli
  misc_feature: 32
aaactactgtctttaatttcatacagaactgtcgcttccttaatacggcattttgtcatttgcgttgccgtgcctgatgatgtcgattgaccaatc

SEQ ID NO: 44449 - DNA, 96 bp, Fusarium phaseoli
  misc_feature: 32
gattggaagctaggttagaactgttagaactgttaatcctatacagtattgagcacttgcactttccgccccaaaaacaacatgctctttgtaaag

SEQ ID NO: 44450 - DNA, 96 bp, Fusarium phaseoli
  misc_feature: 32
aaagcgcaggtaatccgagggtaaagctcaggatataactaatcaatttccaccctatcacacttcgtcttaagcataagccttctaagaagcatc

SEQ ID NO: 44451 - DNA, 96 bp, Fusarium phaseoli
  misc_feature: 32
caattgattgagacgagccaatcaaatcaaacaaatcgacttttacctcaaagttgatttgattgatttatgatgagcgctggtcgcgcgggcatc

SEQ ID NO: 44452 - DNA, 96 bp, Fusarium phaseoli
  misc_feature: 32
gatcgataccattcccaccggaaatctcccttgacgaggcgcagcatgcgaccctccacacaggaaacacctccccaggatcagacaacatcacgg

SEQ ID NO: 44453 - DNA, 96 bp, Fusarium phaseoli
  misc_feature: 32
gataaaaggaataaaggaggactaagaataatatatttaatagcggttatatattaaaaccttatttatctataaggaaactatattataagagtt

SEQ ID NO: 44454 - DNA, 96 bp, Fusarium phaseoli
  misc_feature: 32
ccctaacctatctattccttacttaacgtcctcattattattattatctcctcccaccttatatataataccacacccactccgcttatctaactc

SEQ ID NO: 44455 - DNA, 96 bp, Fusarium phaseoli
  misc_feature: 32
gaggtcaacaacttgcaagacgaatacatactgtctgcagtccccaagcacataatgccctcgataaacgagcccaaaatagaacaacgaaagtct

SEQ ID NO: 44456 - DNA, 96 bp, Fusarium phaseoli
  misc_feature: 32
gagggttagggttaagtggttgtggtgaaggttagggggagtggttgtggtgaaggttagggggagtggttgagttgagggttagggggaggggtt

SEQ ID NO: 44457 - DNA, 96 bp, Fusarium phaseoli
  misc_feature: 32
acgatgccgcctgtaaagtgcttctgtactctccacctttcgcgttaatgtctgcacctttgtccagcagaagctgaacaattttctcattgcctc

SEQ ID NO: 44458 - DNA, 96 bp, Fusarium phaseoli
  misc_feature: 32
agagacagataacagttatgatccatccgtggatactatgctgcgattctattatgaaatagttaccgaacacttcgaagatagaagggcaagctc

SEQ ID NO: 44459 - DNA, 96 bp, Fusarium phaseoli
  misc_feature: 32
cttcctcctagtgcaagggcccaagggccaacagaatgttactctcgataacgctctgtatgttccggaaggatgctcaaacctactgtccgtgtc

SEQ ID NO: 44460 - DNA, 96 bp, Fusarium phaseoli
  misc_feature: 32
gaagtgatcatccgggaagcaatgcgccaagaccgccggttgaactcaattttgttcgaatttcgtgagttcttacggtattttggcggacgtctt

SEQ ID NO: 44461 - DNA, 96 bp, Fusarium phaseoli
  misc_feature: 32
caaatcgcaaactattgggaaagaggaagatatctgtgctctttactgtatacccgctggctccttgtctttttaacttagaaacgtccctgcttc

SEQ ID NO: 44462 - DNA, 96 bp, Fusarium phaseoli
  misc_feature: 32
aagtgatcatccgggaagcaatgcgccaagaccgccggttgaactcaattttgttcgaatttcgtgagttcttacggtattttggcggacgtcttc

SEQ ID NO: 44463 - DNA, 96 bp, Fusarium phaseoli
  misc_feature: 32
cctcgataataaccctctactttatcccccctattctcccttctgctctgaccaccgtctctccaaccgcgtaataacctggcatccacggctttc

SEQ ID NO: 44464 - DNA, 96 bp, Fusarium phaseoli
  misc_feature: 32
cttgggccggcttgcttatttaacttgcaccttcactattcgtattttataaataacggccggtgactatacttcattcacttctctaatcacttt

SEQ ID NO: 44465 - DNA, 96 bp, Fusarium phaseoli
  misc_feature: 32
acaccttagtccccttaaactaaccctcataaccacccgctccctccctcgcttcctaggttatactaaggcctaagggtcaaggtcaaggtcaag

SEQ ID NO: 44466 - DNA, 96 bp, Fusarium phaseoli
  misc_feature: 32
acgaaggtgataagggaggaagcacgaccactttttcagccggagaacgcattcagtggtggcgagagcgcaattcgtgcacgagcaccacataag

SEQ ID NO: 44467 - DNA, 96 bp, Fusarium phaseoli
  misc_feature: 32
acgtttggagaatccttcaggtctgtcgccaattggaaaccagacatctacgtctcgctcatcctggaatttacgaagcatttcactctgctccag

SEQ ID NO: 44468 - DNA, 96 bp, Fusarium phaseoli
  misc_feature: 32
agtccccttaaactaaccctcataaccacccgctccctccctcgcttcctaggttatactaaggcctaagggtcaaggtcaaggtcaaggtcagag

SEQ ID NO: 44469 - DNA, 96 bp, Fusarium phaseoli
  misc_feature: 32
atgacttccaacattcgtggagactcgatgacaaacctagcgaatccgaggaaaaaccaaaagaccgcacatatccaatcttgcatcacgctcgag

SEQ ID NO: 44470 - DNA, 96 bp, Fusarium phaseoli
  misc_feature: 32
ctatttttaaccctcttatactccctcttaccctaacctatctattccttacttaacgtcctcattattattattatctcctcccaccttatatat

SEQ ID NO: 44471 - DNA, 96 bp, Fusarium phaseoli
  misc_feature: 32
ctattaaataatactatattatcttcaataaatataatatatcgcttaagctttaatattacttaagatatagataataattataaaaagatttat

SEQ ID NO: 44472 - DNA, 96 bp, Fusarium phaseoli
  misc_feature: 32
ctatctagtcattcaaagcgctcgttgaaatccgattcaaggattcgacgatcgggtgtttggaggcagtatctttactaatgagaaaacctcgat

SEQ ID NO: 44473 - DNA, 96 bp, Fusarium phaseoli
  misc_feature: 32
cccatacaaaaaaaaaaggcgctatcctagctgcgcggcggattcgctagcaaatccaatgggtttcccatacaaaaaaaaaaggcgctatcctag

SEQ ID NO: 44474 - DNA, 96 bp, Fusarium phaseoli
  misc_feature: 32
ctaccaagcagccccctggtctttaatagcgccatttctacttgtatgaggttttcaaacaatctgcccgctaatatgctgggaagtagtgtgagt

SEQ ID NO: 44475 - DNA, 96 bp, Fusarium phaseoli
  misc_feature: 32
cgctccctccctcgcttcctaggttatactaaggcctaagggtcaaggtcaaggtcaaggtcagagtcagggtcaggcctttacttactctttggt

SEQ ID NO: 44476 - DNA, 96 bp, Fusarium phaseoli
  misc_feature: 32
acaaaaaaaaaaggcgctatcctagctgcgcggcggattcgctagcaaatccaatgggtttcccatacaaaaaaaaaaggcgctatcctagctgcg

SEQ ID NO: 44477 - DNA, 96 bp, Fusarium phaseoli
  misc_feature: 32
cgagaacatcaccgacctgatccggtcgccatggccctttagcactcgctcacaatcgcccgtctctgcgttccagatccggaccgtcctgtcgtt

SEQ ID NO: 44478 - DNA, 96 bp, Fusarium phaseoli
  misc_feature: 32
agttgagggttagggttaagtggttgtggtgaaggttagggggagtggttgtggtgaaggttagggggagtggttgagttgagggttagggggagg

SEQ ID NO: 44479 - DNA, 96 bp, Fusarium phaseoli
  misc_feature: 32
atgtgccagcaggaggaggaagcaggaggcccacggtcatcagccaaggcggggagaagaagaaaggcggcagccgcatcagacagggccaagggg

SEQ ID NO: 44480 - DNA, 96 bp, Fusarium phaseoli
  misc_feature: 32
agtaggagagtaaagaggtagggggagtggttaaggtaataattagggggggaggtaatggttagggttaagagattatagtgaagattagggggg

SEQ ID NO: 44481 - DNA, 96 bp, Fusarium phaseoli
  misc_feature: 32
catttcacagcataatctcgtccggcgagggaaacggggcccttgccttgcgtgtaagggcatcagatttgacgaagtgcggcaacaccgagggct

SEQ ID NO: 44482 - DNA, 96 bp, Fusarium phaseoli
  misc_feature: 32
atggtagtcgatgacggtgagcgtggtatgatacagaagatcggaatatgtggacatgatggaatgtttctgttgaaagattgttgaaaaataatg

SEQ ID NO: 44483 - DNA, 96 bp, Fusarium phaseoli
  misc_feature: 32
acgccagaacgatcacggtgatcacctttctgattaccgcgatcacttacacaatcaccctgatcaaaccccagagcatggtgatcaggcaccatg

SEQ ID NO: 44484 - DNA, 96 bp, Fusarium phaseoli
  misc_feature: 32
atgtatggttgccctattgccctattggaccgtagaaacgaatgctgtggttttttgtctttattcttatcctctcgtttcattccgcttcatatg

SEQ ID NO: 44485 - DNA, 96 bp, Fusarium phaseoli
  misc_feature: 32
cataaccacccgctccctccctcgcttcctaggttatactaaggcctaagggtcaaggtcaaggtcaaggtcagagtcagggtcaggcctttactt

SEQ ID NO: 44486 - DNA, 96 bp, Fusarium phaseoli
  misc_feature: 32
atgacttgatattgttagcatgctcttttgccttttcagacggaaaattctaagcttacgatcaaagtgaaagttccaaaacttctggctcaagtg

SEQ ID NO: 44487 - DNA, 96 bp, Fusarium phaseoli
  misc_feature: 32
atttgatttgatttatttgtttgcaagcctgtttcattctgctcggtgacctcggcattgttaggtgaaatattcccgaacaccattttcacagtg

SEQ ID NO: 44488 - DNA, 96 bp, Fusarium phaseoli
  misc_feature: 32
aatgactcgcaaaaggggcccttgattcgcaaaaatgcggtacttctgaaccgcgccaatttcctaggatttagaagtcacttcgttataagggtg

SEQ ID NO: 44489 - DNA, 96 bp, Fusarium phaseoli
  misc_feature: 32
acgcacttaggagattggttgggaaaacacattcgttaggactgatttaatggcaaacatgctgaagcttgaatgctgacatgacctctttgattg

SEQ ID NO: 44490 - DNA, 96 bp, Fusarium phaseoli
  misc_feature: 32
aaggttagggggagtggttgtggtgaaggttagggggagtggttgagttgagggttagggttaagtggttgtggtgaaggttagggggaggggttg

SEQ ID NO: 44491 - DNA, 96 bp, Fusarium phaseoli
  misc_feature: 32
aataacgtacatgataagcgagtgtcacagtcatgcgagtgtcacaaaaatcctaacctctaagctagagatcacaataaaaacaccataaaccat

SEQ ID NO: 44492 - DNA, 96 bp, Fusarium phaseoli
  misc_feature: 32
atcccgtaagcccatctactgagaagatatgagtctaagttccagaactatctgattaatctatccctattcagcccgagtcctctctatcactct

SEQ ID NO: 44493 - DNA, 96 bp, Fusarium phaseoli
  misc_feature: 32
aaaacacaggaagaattgcgacgaaccacgaaggagaccagctgagattcgaagagcagtcgccctggattgaaaggacaggttgggataagacct

SEQ ID NO: 44494 - DNA, 96 bp, Fusarium phaseoli
  misc_feature: 32
actaagaagatataagtctaagttctagaactatctaattaatctatccccattcagcccgagtcctctctatcactctcagcctcctcctcggct

SEQ ID NO: 44495 - DNA, 96 bp, Fusarium phaseoli
  misc_feature: 32
aaagagctagctgggtgggtttactcccgttaataaacctcctatggcgtctcctcaccaggtagggctaaaggctatatctacggctatcctgct

SEQ ID NO: 44496 - DNA, 96 bp, Fusarium phaseoli
  misc_feature: 32
agcagcggttagcctcactttcccaactctcctcctctcctggacaatagcggttagcctcacttgtccaactcttctcccccggacagcagcggt

SEQ ID NO: 44497 - DNA, 96 bp, Fusarium phaseoli
  misc_feature: 32
aaaatccaagaatctacgctgaggtacacgcagcaatgtactgcggtacggaggccgatagggaacactgttgcaaaacccccatgtcagttgtct

SEQ ID NO: 44498 - DNA, 96 bp, Fusarium phaseoli
  misc_feature: 32
aagtgacgttaatatgatgcaatgtgaagcttctattcattccaaggttaaatctagctcgcataacacctaagagttatctgggtatttggttct

SEQ ID NO: 44499 - DNA, 96 bp, Fusarium phaseoli
  misc_feature: 32
acgatggttgatgaatggttgatgaatggttgatgaatggttgatgaatggttgatgaatggttgatgaatggttgatgaatggttgtgtcacatt

SEQ ID NO: 44500 - DNA, 96 bp, Fusarium phaseoli
  misc_feature: 32
aaatccaagaatctacgctgaggtacacgcagcaatgtactgcggtacggaggccgatagggaacactgttgcaaaacccccatgtcagttgtctt

SEQ ID NO: 44501 - DNA, 96 bp, Fusarium phaseoli
  misc_feature: 31
aaagagtatattttcctaaaatataattaatatgcataagataataaaaagctaaaaaaggtataaaatcataaaagaggtatataaaggtaaaaa

SEQ ID NO: 44502 - DNA, 96 bp, Fusarium phaseoli
  misc_feature: 31
ttgtggctgtatcttggttgcatgcctctttggtggcatctctcttggtggcatctctcttggtggcatctctcttggtcgcatctctcttggtcg

SEQ ID NO: 44503 - DNA, 96 bp, Fusarium phaseoli
  misc_feature: 31
ttgtgacctccttggagccttgtgggcactcatgggattgacacaccttgtcaagagccacaatgttccaaggctgttgcgggcgctactgacatg

SEQ ID NO: 44504 - DNA, 96 bp, Fusarium phaseoli
  misc_feature: 31
ctttcccaactctcctcctctcctggacaatagcggttagcctcacttgtccaactcttctcccccggacagcagcggttagtctcactttcccaa

SEQ ID NO: 44505 - DNA, 96 bp, Fusarium phaseoli
  misc_feature: 31
ttggaggatccaacggatccaacgattggaagtagttggttgattacgcactctgaagcccgtcaactaggctcgagcagagcagtcctatcggta

SEQ ID NO: 44506 - DNA, 96 bp, Fusarium phaseoli
  misc_feature: 31
tgtaacgaagcctgatctcctactggagcaatagacgtgctgagctgaactatctacaatcgctgccgcattcgacctcgcttggaatacccgcaa

SEQ ID NO: 44507 - DNA, 96 bp, Fusarium phaseoli
  misc_feature: 31
ccagagagacagataacagttatgatccatccgtggatactatgctgcgattctattatgaaatagttaccgaacacttcgaagatagaagggcaa

SEQ ID NO: 44508 - DNA, 96 bp, Fusarium phaseoli
  misc_feature: 31
gagggaaagcgcaggtaatccgagggtaaagctcaggatataactaatcaatttccaccctatcacacttcgtcttaagcataagccttctaagaa

SEQ ID NO: 44509 - DNA, 96 bp, Fusarium phaseoli
  misc_feature: 31
gaactgggcttctaacttcgtcaagcgacaccaagagctcaagatgcgttttaatcataagtacgactatcagagagctaaatgcgaagatccgaa

SEQ ID NO: 44510 - DNA, 96 bp, Fusarium phaseoli
  misc_feature: 31
ggcggagaggttacggtcgagatatcgagaggccgaacgaacccgtatgcaatggtttcggtcggtggttattcggtcgagtggtgggggggggaa

SEQ ID NO: 44511 - DNA, 96 bp, Fusarium phaseoli
  misc_feature: 31
ttcagccgccgaaaataggaaactaaatacttagatgaattaggcttcaagttgacttactactaaccttcacgaggaccaagaagaagagcgata

SEQ ID NO: 44512 - DNA, 96 bp, Fusarium phaseoli
  misc_feature: 31
ttcaaatcgcaaactattgggaaagaggaagatatctgtgctctttactgtatacccgctggctccttgtctttttaacttagaaacgtccctgct

SEQ ID NO: 44513 - DNA, 96 bp, Fusarium phaseoli
  misc_feature: 31
ttatgcgagctagatttaaccttggaatgaatagaagcttcacattgcatcatattaacgtcacttgagaagccccattgtctttgacagcgtaac

SEQ ID NO: 44514 - DNA, 96 bp, Fusarium phaseoli
  misc_feature: 31
ttagggttacaggtaaataacaccttagtccccttaaactaaccctcataaccacccgctccctccctcgcttcctaggttatactaaggcctaag

SEQ ID NO: 44515 - DNA, 96 bp, Fusarium phaseoli
  misc_feature: 31
ttaccctaacctatctattccttacttaacgtcctcattattattattatctcctcccaccttatatataataccacacccactccgcttatctaa

SEQ ID NO: 44516 - DNA, 96 bp, Fusarium phaseoli
  misc_feature: 31
caagttagatcggctgcgccgagaatataacacattacgttcgaactgggcttctaactttgtcaagcgacactcagagctcacaacgcgttttaa

SEQ ID NO: 44517 - DNA, 96 bp, Fusarium phaseoli
  misc_feature: 31
ggtcgaatgcggcagcgattgtagatagttcagctcagcacgtctattgctccagtaggagatcaggcttcgttacagcctcccagacgaaaaaca

SEQ ID NO: 44518 - DNA, 96 bp, Fusarium phaseoli
  misc_feature: 31
tgttgatgtgctgctgggcttagtgatgcatttttctgtacacgtacgtacgtacgtactgtattttgggtagctgtacgtacgtacaacttttct

SEQ ID NO: 44519 - DNA, 96 bp, Fusarium phaseoli
  misc_feature: 31
agtcaagtggacggcagatttcgaactccaccagcagatggacttgctccaaagcacctgctttacgagtagcgttcggcaattccgccaggcaca

SEQ ID NO: 44520 - DNA, 96 bp, Fusarium phaseoli
  misc_feature: 31
aatgtcaagcataagtacacacgcatactgtgtacactcttgctccatactagcagcatgcgtattcgtgtacttacctgactaatacaaatgaca

SEQ ID NO: 44521 - DNA, 96 bp, Fusarium phaseoli
  misc_feature: 31
cggtgggagatcaataatgtgaggagtaaagatcgaagtagtaaggcccatagttgttgccagatatatcatttcagcactttattaatgtttaca

SEQ ID NO: 44522 - DNA, 96 bp, Fusarium phaseoli
  misc_feature: 31
tggttgggaaaacacattcgttaggactgatttaatggcaaacatgctgaagcttgaatgctgacatgacctctttgattgaccttgggtgacaat

SEQ ID NO: 44523 - DNA, 96 bp, Fusarium phaseoli
  misc_feature: 31
tattcaacatcaaccaatggaccgaatgcacgtactgtctgacacaaccccatcgggcactctataaagtcccatgacaagcttgaaacgtagcca

SEQ ID NO: 44524 - DNA, 96 bp, Fusarium phaseoli
  misc_feature: 31
aaaaatgtgttctgagctggtggtggtgtttttttatgacgttccgtggtagggagttgaccagtaacaaccagcaggcgcggcccctggttgcca

SEQ ID NO: 44525 - DNA, 96 bp, Fusarium phaseoli
  misc_feature: 31
cgcggcggattcgctagcaaatccaatgggtttcccatacaaaaaaaaaaggcgctatcctatcctagctgcgcggcggattcgctagcaaatcca

SEQ ID NO: 44526 - DNA, 96 bp, Fusarium phaseoli
  misc_feature: 31
tggagttcatctccagcatcgcccagtagtgccccgttgtctttgaggtcatcatattcaattccagcttctcgaagtgaggccatgttcttcagt

SEQ ID NO: 44527 - DNA, 96 bp, Fusarium phaseoli
  misc_feature: 31
ggaaagcgcaggtaatccgagggtaaagctcaggatataactaatcaatttccaccctatcacacttcgtcttaagcataagccttctaagaagca

SEQ ID NO: 44528 - DNA, 96 bp, Fusarium phaseoli
  misc_feature: 31
tgcgcatctatactgatctgattaattgattgcctttgttcctcttttactcacactacttcccagcatattagcgggcagattgtttgaaaacct

SEQ ID NO: 44529 - DNA, 96 bp, Fusarium phaseoli
  misc_feature: 31
tgcgaggaggtaccagttgagttgaattggttgattacgcactctgacgagataccgagcttgttacacagagatagtcgagggtaaacaaatccc

SEQ ID NO: 44530 - DNA, 96 bp, Fusarium phaseoli
  misc_feature: 31
tacaattgattgagacgagccaatcaaatcaaacaaatcgacttttacctcaaagttgatttgattgatttatgatgagcgctggtcgcgcgggca

SEQ ID NO: 44531 - DNA, 96 bp, Fusarium phaseoli
  misc_feature: 31
gtatcgcggctgatcaaggagattggcgtggagcttgattcagcacggctgaacctgtggtgcgataaccagcagacaattcgtctcgtcaatgca

SEQ ID NO: 44532 - DNA, 96 bp, Fusarium phaseoli
  misc_feature: 31
ctagatcgataccattcccaccggaaatctcccttgacgaggcgcagcatgcgaccctccacacaggaaacacctccccaggatcagacaacatca

SEQ ID NO: 44533 - DNA, 96 bp, Fusarium phaseoli
  misc_feature: 31
tgatctttatcttcccgacctatcaaaaatcctatctcgctccgccctcagaaactttcgttcctcaaggctctatgtgcaagccccggcttgcct

SEQ ID NO: 44534 - DNA, 96 bp, Fusarium phaseoli
  misc_feature: 31
caacgccatcatatctgaagccctcgactgctctcttggcatgggtcacatatattggattaatagagagcacatactttttcaagcttgcgatca

SEQ ID NO: 44535 - DNA, 96 bp, Fusarium phaseoli
  misc_feature: 31
tgagttgagggttagggttaagtggttgtggtgaaggttagggggagtggttgtggtgaaggttagggggagtggttgtggtgaaggttaggggga

SEQ ID NO: 44536 - DNA, 96 bp, Fusarium phaseoli
  misc_feature: 31
cgcatctatactgatctgattaattgattgcctttgttcctcttttactcacactacttcccagcatattagcgggcagattgtttgaaaacctca

SEQ ID NO: 44537 - DNA, 96 bp, Fusarium phaseoli
  misc_feature: 31
agacagatttcgctgggtggagtgtcaattcaaagcactggccagttgtccgcagagcgaagaccttctcgaacaactgctcgattccctgcctca

SEQ ID NO: 44538 - DNA, 96 bp, Fusarium phaseoli
  misc_feature: 31
tgagactatacacatgaatcgtgttgactgatcaaatcctctgaagccttgtcacttggcgatatccaacacttgagccagaagttttggaacttt

SEQ ID NO: 44539 - DNA, 96 bp, Fusarium phaseoli
  misc_feature: 31
tgacaactcagccagcatcaaacgggagcggtctcggcaaccgaggacccatgcccggaaccaaagtttgcgcggctcgacgggctccttgtactg

SEQ ID NO: 44540 - DNA, 96 bp, Fusarium phaseoli
  misc_feature: 31
tctgttggcccttgggcccttgcactaggaggaagtaggttccacgttctcctggcataactgttgcgttcgcaatgccattgattgggaatcctt

SEQ ID NO: 44541 - DNA, 96 bp, Fusarium phaseoli
  misc_feature: 31
tctggtctagtcacgtcaggaattggtccttgttgtctccttggagtggcaagatctcgatctagtcgcagaagttggtaggggctgtacctggta

SEQ ID NO: 44542 - DNA, 96 bp, Fusarium phaseoli
  misc_feature: 31
gatattcgggtgaacagtgttcgtctcaccataattccaccactaagagccatcttcgacgctgtcaatgaaagttcttttttgatggttcagaga

SEQ ID NO: 44543 - DNA, 96 bp, Fusarium phaseoli
  misc_feature: 31
tctaagatccgctctctaggagacgacgattcctactacgatatttcacttggcagctatttctttctttccaagccaagggccgctgtggcaaac

SEQ ID NO: 44544 - DNA, 96 bp, Fusarium phaseoli
  misc_feature: 31
cccatcttctcggacaatgcggaaccaacgggttgcacgaagacattgttagcgccgtggaagatgaaagaagaatcgcagctattctcgaagcga

SEQ ID NO: 44545 - DNA, 96 bp, Fusarium phaseoli
  misc_feature: 31
tcgccgtatcttacccctccttcctcatatttaatattcactttatccctaaccgtaaattaacctcctacttctcttataatccgcctttatctt

SEQ ID NO: 44546 - DNA, 96 bp, Fusarium phaseoli
  misc_feature: 31
tcgataatgagcagcagtagtgtgttgattgattgttatctgaggtttctcttgtgcggggtattccatcccgcagagttacttaaagcatacagc

SEQ ID NO: 44547 - DNA, 96 bp, Fusarium phaseoli
  misc_feature: 31
tcctcatcattaccttcatcctcatcatctccatctccatcttcatctccatcttcatcttcatcttcatcttcgtcttcactgtcatcctcgtcc

SEQ ID NO: 44548 - DNA, 96 bp, Fusarium phaseoli
  misc_feature: 31
catacaaagccggatgatcttattatccttgcaatagttctcaaattcgatagagtagtgactttcgtagctattgaggatcaagagacgatagga

SEQ ID NO: 44549 - DNA, 96 bp, Fusarium phaseoli
  misc_feature: 31
taaatgtcaagcataagtacacacgcatactgtgtacactcttgctccatactagcagcatgcgtattcgtgtacttacctgactaatacaaatga

SEQ ID NO: 44550 - DNA, 96 bp, Fusarium phaseoli
  misc_feature: 31
aacacgcacttaggagattggttgggaaaacacattcgttaggactgatttaatggcaaacatgctgaagcttgaatgctgacatgacctctttga

SEQ ID NO: 44551 - DNA, 96 bp, Fusarium phaseoli
  misc_feature: 31
tattccaacaataactaccctattgttggcgccctttcatttcccacccatttgagttcgtcggttgccaaacgacggtttggagtagagccttgt

SEQ ID NO: 44552 - DNA, 96 bp, Fusarium phaseoli
  misc_feature: 31
tatgtgcttggggactgcagacagtatgtattcgtcttgcaagttgttgacctcgagtgttgcagccaatcagaattttagcggtcaaactcaacc

SEQ ID NO: 44553 - DNA, 96 bp, Fusarium phaseoli
  misc_feature: 31
tatgcgagctagatttaaccttggaatgaatagaagcttcacattgcatcatattaacgtcacttgagaagccccattgtctttgacagcgtaact

SEQ ID NO: 44554 - DNA, 96 bp, Fusarium phaseoli
  misc_feature: 31
tatcttccttatttctcctctttttctctctttttctttatatttcttttattcttttcttacctcttacctcttttccctctttttattttcttt

SEQ ID NO: 44555 - DNA, 96 bp, Fusarium phaseoli
  misc_feature: 31
tatcctctactaagcagccccctggtctttaatagcgccatttctacttgtatgaggtttttaaataatctgcccgctaatatgctgggaagtagt

SEQ ID NO: 44556 - DNA, 96 bp, Fusarium phaseoli
  misc_feature: 31
tatattgaaatacattgacgtcaatcatttaccaactgttgaacatgtggggtgtcacgtgttggtcaaggatcttgagattaaaagcaggtcctt

SEQ ID NO: 44557 - DNA, 96 bp, Fusarium phaseoli
  misc_feature: 31
agtccctaactgcccccgcccttttgccccttgctctccggcaaccttcataacctcccgcttacctcttgacttcccgggtcaaacgaaaaccta

SEQ ID NO: 44558 - DNA, 96 bp, Fusarium phaseoli
  misc_feature: 31
cctaggcattgccttagggttagggttacaggtaaataacaccttagtccccttaaactaaccctcataaccacccgctccctccctcgcttccta

SEQ ID NO: 44559 - DNA, 96 bp, Fusarium phaseoli
  misc_feature: 31
catagcgataatcctagatcttaagtatactatctaccctaggtgcctattactaatcgacctttatagtcaatgggaagaggctattaatagcta

SEQ ID NO: 44560 - DNA, 96 bp, Fusarium phaseoli
  misc_feature: 31
tagccatcaacattccatatggtcacccaattttcgaacaagccctccttgcttttgaacagtcggaggatttgaacgtccgtccggggatcttgg

SEQ ID NO: 44561 - DNA, 96 bp, Fusarium phaseoli
  misc_feature: 31
tacgatggttgatgaatggttgatgaatggttgatgaatggttgatgaatggttgatgaatggttgatgaatggttgatgaatggttgtgtcacat

SEQ ID NO: 44562 - DNA, 96 bp, Fusarium phaseoli
  misc_feature: 31
tacgaggactttatagtctatatccttcagtcctttacagtcagcaagattactaatcagtaaatcaagctaaaaggcagggaaaagaacctgctt

SEQ ID NO: 44563 - DNA, 96 bp, Fusarium phaseoli
  misc_feature: 31
aagttgaccttgtccatcggagtggaatcggtcaacgaagcgaacccctccaactctcgtcgatatgcggctttggaagcattgaatactccatta

SEQ ID NO: 44564 - DNA, 96 bp, Fusarium phaseoli
  misc_feature: 31
taatgactcacactgtctacgggcacgaattaggcatggacagaaatcaattgtaacaaggataaactgtcatcagaatatgagacaagaaaagag

SEQ ID NO: 44565 - DNA, 96 bp, Fusarium phaseoli
  misc_feature: 31
taagcctttaacagttagcgccttatttggggtctcagcctcagaagttagaggtgtgcaacatgggtgtgggcagaagagattggatttttcgct

SEQ ID NO: 44566 - DNA, 96 bp, Fusarium phaseoli
  misc_feature: 31
acgaggactttatagtctatatccttcagtcctttacagtcagcaagattactaatcagtaaatcaagctaaaaggcagggaaaagaacctgctta

SEQ ID NO: 44567 - DNA, 96 bp, Fusarium phaseoli
  misc_feature: 31
aacgtcctcattattattattatctcctcccaccttatatataataccacacccactccgcttatctaactctaccttaaaattcgccgtatctta

SEQ ID NO: 44568 - DNA, 96 bp, Fusarium phaseoli
  misc_feature: 31
taactcctcgtgctcgctgtgccaccaagatccggaataccacccccttatactgacactcctttccgcttgctctccgaaataaccgtccgtcgt

SEQ ID NO: 44569 - DNA, 96 bp, Fusarium phaseoli
  misc_feature: 31
taaccttcaccacaaccactccccctaaccttcaccacaaccacttaaccctaaccctcaactcaaccactccccctaaccctcaccacaaccact

SEQ ID NO: 44570 - DNA, 96 bp, Fusarium phaseoli
  misc_feature: 31
agtgtaagcaaatggcagtcagaagccatcttaccaccgagtgaaaagtgccaagtttccggaccaagcttctgcttgtcctactgtacgaggtta

SEQ ID NO: 44571 - DNA, 96 bp, Fusarium phaseoli
  misc_feature: 31
taaccacccgctccctccctcgcttcctaggttatactaaggcctaagggtcaaggtcaaggtcaaggtcagagtcagggtcaggcctttacttac

SEQ ID NO: 44572 - DNA, 96 bp, Fusarium phaseoli
  misc_feature: 31
taacagatcttatttgcaccggcccccgtgcaggtatgagctccccaagtgtagggcgccgtcgaggcgcacaggtcctgtgtgctcggggcacag

SEQ ID NO: 44573 - DNA, 96 bp, Fusarium phaseoli
  misc_feature: 31
attaatatactctatactagcctatcttatatttataatcggcgcgaaggtagaaattaaggaagaaggggatcttaataggatactcgctattta

SEQ ID NO: 44574 - DNA, 96 bp, Fusarium phaseoli
  misc_feature: 31
gttgggttgggttgggttgggttgggtttggcggtttgttggaataaatcacttacgacgtcttttttgggttccactgcgaatctcctcaggagg

SEQ ID NO: 44575 - DNA, 96 bp, Fusarium phaseoli
  misc_feature: 31
gttgagggttagggttaagtggttgtggtgaaggttagggggagtggttgtggtgaaggttagggggagtggttgtggtgaaggttagggggaggg

SEQ ID NO: 44576 - DNA, 96 bp, Fusarium phaseoli
  misc_feature: 31
gaaaaattgcattttgtatggggaaattttttttttgcttaacgtactccacaagcgagtgaatcagacaagcgagtgaatcaaaaatccctcaac

SEQ ID NO: 44577 - DNA, 96 bp, Fusarium phaseoli
  misc_feature: 31
gttaagggtaaggttaagggtaaggttaagggtaaggttatcagtgtggtcttcagggttggggttggggcggtcgtgaaagtgtcagcgaaaatt

SEQ ID NO: 44578 - DNA, 96 bp, Fusarium phaseoli
  misc_feature: 31
gtgaatagcaatgagcccggaggttattgccgagcaagtgattagagaagtgaatgaagtatagtcaccggccgttatttataaaatacgaataat

SEQ ID NO: 44579 - DNA, 96 bp, Fusarium phaseoli
  misc_feature: 31
acaagggcggctgggacagtctatgaataaaacaaacaaacaaacaaacaaacatggccggaactgaaaagagatcaattgccatccgcgacagac

SEQ ID NO: 44580 - DNA, 96 bp, Fusarium phaseoli
  misc_feature: 31
aagcaaatcagaatagtatatagtattatcttctctagcgattatcttttaatgcatactacgatgggttaatttactatataaaatatctgcgac

SEQ ID NO: 44581 - DNA, 96 bp, Fusarium phaseoli
  misc_feature: 31
ggttacagctgtaaggcttgcatccacttgacgatcagtagggataatgtcaaaaagcactgctctcaacgtcatcctgagctgggcaagcctgac

SEQ ID NO: 44582 - DNA, 96 bp, Fusarium phaseoli
  misc_feature: 31
gtcaatgaataaatgttcgaaattagctatttagagaaattgaacacagattgacgacgaagccaagcatgcttcgaggacatctctaatcattgc

SEQ ID NO: 44583 - DNA, 96 bp, Fusarium phaseoli
  misc_feature: 31
gatttgatttgatttgaattcgttcggacttgatttgatttgatttgatttgatttgatttgatttggatttatttgaactcatttatttgttgac

SEQ ID NO: 44584 - DNA, 96 bp, Fusarium phaseoli
  misc_feature: 31
cgaatgcggcagcgattgtagatagttcagctcagcacgtctattgctccagtaggagatcaggcttcgttacagcctcccagacgaaaaacatac

SEQ ID NO: 44585 - DNA, 96 bp, Fusarium phaseoli
  misc_feature: 31
gtagtcaagcgttggtttgtcctgaccgaaggccagaaacggacggcgttagggtatgcagcgccgaggaccttgataagccatgtaacagcaatg

SEQ ID NO: 44586 - DNA, 96 bp, Fusarium phaseoli
  misc_feature: 31
gtaggagagtaaagaggtagggggagtggttaaggtaataattagggggggaggtaatggttagggttaagagattatagtgaagattaggggggg

SEQ ID NO: 44587 - DNA, 96 bp, Fusarium phaseoli
  misc_feature: 31
gtagcttttcccactaagactcgatccattagttagatatgcttaggccccagatataacaggagctcagtctcgctccctacccgtggactcgtt

SEQ ID NO: 44588 - DNA, 96 bp, Fusarium phaseoli
  misc_feature: 31
agatgtgaaaccggatagttacatccggtcacacgaatgttatgcgacagtcctcgagacccgtgaagccgactgcaaaactacaggaaaggctac

SEQ ID NO: 44589 - DNA, 96 bp, Fusarium phaseoli
  misc_feature: 31
aaataatactatattatcttcaataaatataatatatcgcttaagctttaatattacttaagatatagataataattataaaaagatttatattac

SEQ ID NO: 44590 - DNA, 96 bp, Fusarium phaseoli
  misc_feature: 31
gtaaatcaatcgttcatttacacgggcagcttttacctagaaacttcacataaatggccacgcttaaagctatcatgatggcttagatatgtaact

SEQ ID NO: 44591 - DNA, 96 bp, Fusarium phaseoli
  misc_feature: 31
ggttaagggtaaggttaagggtaaggttaagggtaaggttatcagtgtggtcttcagggttggggttggggcggtcgtgaaagtgtcagcgaaaat

SEQ ID NO: 44592 - DNA, 96 bp, Fusarium phaseoli
  misc_feature: 31
ggtgtggtattatatataaggtgggaggagataataataataatgaggacgttaagtaaggaatagataggttagggtaagagggagtataagagg

SEQ ID NO: 44593 - DNA, 96 bp, Fusarium phaseoli
  misc_feature: 31
ggtgggagatcaataatgtgaggagtaaagatcgaagtagtaaggcccatagttgttgccagatatatcatttcagcactttattaatgtttacat

SEQ ID NO: 44594 - DNA, 96 bp, Fusarium phaseoli
  misc_feature: 31
ccttttagcacgctcagtgcgacaccctgtggattgaagagagatctctcttacactcacacacatcgagcttacataacagatcttatttgcacc

SEQ ID NO: 44595 - DNA, 96 bp, Fusarium phaseoli
  misc_feature: 31
ggtgaaggttagggggagtggttgagttgagggttagggttaagtggttgtggtgaaggttagggggagtggttgtggtgaaggttaggggggggg

SEQ ID NO: 44596 - DNA, 96 bp, Fusarium phaseoli
  misc_feature: 31
ggtgaaggttagggggagtggttgagttgagggttagggttaagtggttgtggtgaaggttagggggagtggttgtggtgaaggttagggggaggg

SEQ ID NO: 44597 - DNA, 96 bp, Fusarium phaseoli
  misc_feature: 31
caagactttcgttgttctattttgggctcgtttatcgagggcattatgtgcttggggactgcagacagtatgtattcgtcttgcaagttgttgacc

SEQ ID NO: 44598 - DNA, 96 bp, Fusarium phaseoli
  misc_feature: 31
aacattatttttcaacaatctttcaacagaaacattccatcatgtccacatattccgatcttctgtatcataccacgctcaccgtcatcgactacc

SEQ ID NO: 44599 - DNA, 96 bp, Fusarium phaseoli
  misc_feature: 31
ggtaagaggacatttagatggccaaaagccaacgaactgttataccaaacgatgtttctaaaatggcatcatgtcggggatcacggcgccgacagt

SEQ ID NO: 44600 - DNA, 96 bp, Fusarium phaseoli
  misc_feature: 31
cctttttcaaacttcccttttcaaacttcccttttcaaacttcccttttcaaacttcccttttcaaacttcccttttcaaacttccctttcaaccc

SEQ ID NO: 44601 - DNA, 96 bp, Fusarium phaseoli
  misc_feature: 31
gggttacaggtaaataacaccttagtccccttaaactaaccctcataaccacccgctccctccctcgcttcctaggttatactaaggcctaagggt

SEQ ID NO: 44602 - DNA, 96 bp, Fusarium phaseoli
  misc_feature: 31
acactttcacgaccgccccaaccccaaccctgaagaccacactgatccttaaccttacccttaaccttacccttaaccttacccttaaccttaccc

SEQ ID NO: 44603 - DNA, 96 bp, Fusarium phaseoli
  misc_feature: 31
ataacgaagtgacttctaaatcctaggaaattggcgcggttcagaagtaccgcatttttgcgaatcaagggccccttttgcgagtcattgaacccc

SEQ ID NO: 44604 - DNA, 96 bp, Fusarium phaseoli
  misc_feature: 31
cttcaccacaaccactccccctaaccttcaccacaaccacttaaccctaaccctcaactcaaccactccccctaaccctcaccacaaccactcccc

SEQ ID NO: 44605 - DNA, 96 bp, Fusarium phaseoli
  misc_feature: 31
ccccctattctcccttctgctctgaccaccgtctctccaaccgcgtaataacctggcatccacggcttgcttatatgccaccgccggtccttcccc

SEQ ID NO: 44606 - DNA, 96 bp, Fusarium phaseoli
  misc_feature: 31
gggcccaagggccaacagaatgttactctcgataacgctctgtatgttccggaaggatgctcaaacctactgtccgtgtcagcactggagaagaag

SEQ ID NO: 44607 - DNA, 96 bp, Fusarium phaseoli
  misc_feature: 31
gggaaagcgcaggtaatccgagggtaaagctcaggatataactaatcaatttccaccctatcacacttcgtcttaagcataagccttctaagaagc

SEQ ID NO: 44608 - DNA, 96 bp, Fusarium phaseoli
  misc_feature: 31
gggaaacagaaccaactcggtgatcgtccatttcaacagctccttgtcatcgtatttgatttgaatctgaagagtgagataagcatcccgcaggag

SEQ ID NO: 44609 - DNA, 96 bp, Fusarium phaseoli
  misc_feature: 31
gaaagtttgaatgaatgaatgatgcgatgagctgagctgagcgtgaaaagtaccggtagaagcagggacgtttctaagttaaaaagacaaggagcc

SEQ ID NO: 44610 - DNA, 96 bp, Fusarium phaseoli
  misc_feature: 31
ggccttcacttctttcacggagtcgaatccctgaagggagcagatgagatgcgtctagacatacggcatcccaccattccgcaccagtcgtgtcat

SEQ ID NO: 44611 - DNA, 96 bp, Fusarium phaseoli
  misc_feature: 31
ggccgctcctcgttaacagtaggaaatatcagcttcattcttagaatttagagaatctatctgcatttctttgcatctatctatgtagacatgcag

SEQ ID NO: 44612 - DNA, 96 bp, Fusarium phaseoli
  misc_feature: 31
gcgcggcggattcgctagcaaatccaatgggtttcccatacaaaaaaaaaaggcgctatcctatcctagctgcgcggcggattcgctagcaaatcc

SEQ ID NO: 44613 - DNA, 96 bp, Fusarium phaseoli
  misc_feature: 31
ggatcaaggcgttcaagcggttcatctccccactcaggcgtattgcggacgtttgcaaggaaacaccaaagggcaccatgggagtgattcagcctt

SEQ ID NO: 44614 - DNA, 96 bp, Fusarium phaseoli
  misc_feature: 31
cgagaactatcaacaaccgcaagctgcggcatgacgatgctcatttgtttatcatgtcgcgattccgctcccatattgctatctcatccactttcc

SEQ ID NO: 44615 - DNA, 96 bp, Fusarium phaseoli
  misc_feature: 31
ctatcctatcctatcctatcctatcctagctgcgcggcggattcgctagcaaatccaatgggtttcccatacaaaaaaaaaaggcgctatcctagc

SEQ ID NO: 44616 - DNA, 96 bp, Fusarium phaseoli
  misc_feature: 31
gctactcgtaaagcaggtgctttggagcaagtccatctgctggtggagttcgaaatctgccgtccacttgactcagagtaagccgtccgagttatc

SEQ ID NO: 44617 - DNA, 96 bp, Fusarium phaseoli
  misc_feature: 31
gcgcatctatactgatctgattaattgattgcctttgttcctcttttactcacactacttcccagcatattagcgggcagattgtttgaaaacctc

SEQ ID NO: 44618 - DNA, 96 bp, Fusarium phaseoli
  misc_feature: 31
gcgaggaggtaccagttgagttgaattggttgattacgcactctgacgagataccgagcttgttacacagagatagtcgagggtaaacaaatccct

SEQ ID NO: 44619 - DNA, 96 bp, Fusarium phaseoli
  misc_feature: 31
gccttcacttctttcacggagtcgaatccctgaagggagcagatgagatgcgtctagacatacggcatcccaccattccgcaccagtcgtgtcatt

SEQ ID NO: 44620 - DNA, 96 bp, Fusarium phaseoli
  misc_feature: 31
acacggcagtgggcaagacgcagcgattgagggtgtggatcgatcagggtcgtttaatcgtggccacgaacgcgttagggttgggcgtcgacgggc

SEQ ID NO: 44621 - DNA, 96 bp, Fusarium phaseoli
  misc_feature: 31
agattgatcgcaagcttgaaaaagtatgtgctctctattaatccaatatatgtgacccatgccaagagagcagtcgagggcttcagatatgatggc

SEQ ID NO: 44622 - DNA, 96 bp, Fusarium phaseoli
  misc_feature: 31
cgccagaacgatcacggtgatcacctttctgattaccgcgatcacttacacaatcaccctgatcaaaccccagagcatggtgatcaggcaccatgc

SEQ ID NO: 44623 - DNA, 96 bp, Fusarium phaseoli
  misc_feature: 31
gcataccgagccaacggtcagatcgagaaggcaacagaactgctagagcatgtggttgcgattcaggagaagacattagcggagaatcacccaaat

SEQ ID NO: 44624 - DNA, 96 bp, Fusarium phaseoli
  misc_feature: 31
attttactaattagcttatttccaaaatttcagccattttaggctgagtttgaatttttaagaattattttaaaatcacgatttaaggtgaaaatc

SEQ ID NO: 44625 - DNA, 96 bp, Fusarium phaseoli
  misc_feature: 31
gattgaagagagatctctcttacactcacacacatcgagcttacataacagatcttatttgcaccggcccccgtgcaggtatgagctccccaagtg

SEQ ID NO: 44626 - DNA, 96 bp, Fusarium phaseoli
  misc_feature: 31
gatggttgatgaatggttgatgaatggttgatgaatggttgatgaatggttgatgaatggttgatgaatggttgatgaatggttgtgtcacatttg

SEQ ID NO: 44627 - DNA, 96 bp, Fusarium phaseoli
  misc_feature: 31
gagttcatctccagcatcgcccagtagtgccccgttgtctttgaggtcatcatattcaattccagcttctcgaagtgaggccatgttcttcagtgg

SEQ ID NO: 44628 - DNA, 96 bp, Fusarium phaseoli
  misc_feature: 31
gaggcccagcttggagaatgacgtgcttagagtccataagagcccaatcaatgaagtaggtagccgggctgacctattctagatcggggtctttag

SEQ ID NO: 44629 - DNA, 96 bp, Fusarium phaseoli
  misc_feature: 31
ctcatcctcatcattaccttcatcctcatcatctccatctccatcttcatctccatcttcatcttcatcttcatcttcgtcttcactgtcatcctc

SEQ ID NO: 44630 - DNA, 96 bp, Fusarium phaseoli
  misc_feature: 31
gaggagcaagggcagggcgtaagggtgacggggaaccaaagagtaagtaaaggcctgaccctgactctgaccttgaccttgaccttgacccttagg

SEQ ID NO: 44631 - DNA, 96 bp, Fusarium phaseoli
  misc_feature: 31
aggagaacgtggaacctacttcctcctagtgcaagggcccaagggccaacagaatgttactctcgataacgctctgtatgttccggaaggatgctc

SEQ ID NO: 44632 - DNA, 96 bp, Fusarium phaseoli
  misc_feature: 31
gagattgatcgcaagcttgaaaaagtatgtgctctctattaatccaatatatgtgacccatgccaagagagcagtcgagggcttcagatatgatgg

SEQ ID NO: 44633 - DNA, 96 bp, Fusarium phaseoli
  misc_feature: 31
atcctcatcattaccttcatcctcatcatctccatctccatcttcatctccatcttcatcttcatcttcatcttcgtcttcactgtcatcctcgtc

SEQ ID NO: 44634 - DNA, 96 bp, Fusarium phaseoli
  misc_feature: 31
gaatgacttccaacattcgtggagactcgatgacaaacctagcgaatccgaggaaaaaccaaaagaccgcacatatccaatcttgcatcacgctcg

SEQ ID NO: 44635 - DNA, 96 bp, Fusarium phaseoli
  misc_feature: 31
ctagactttacaaagagcatgttgtttttggggcggaaagtgcaagtgctcaatactgtataggattaacagttctaacagttctaacctagcttc

SEQ ID NO: 44636 - DNA, 96 bp, Fusarium phaseoli
  misc_feature: 31
cacattatcttccactcctgcaatattgtttcatcaggttatgagcccggagggcgccatcttcctccaacccaaagctgagtgtcttctgtcttc

SEQ ID NO: 44637 - DNA, 96 bp, Fusarium phaseoli
  misc_feature: 31
gaaaagtgattcactcacttgtttgattcactcgcttgtggagtacgttacgtgataagcgaatgtcgcagataagcgaatatcgcacgccgagat

SEQ ID NO: 44638 - DNA, 96 bp, Fusarium phaseoli
  misc_feature: 31
atacaaaaaaaaaaggcgctatcctagctgcgcggcggattcgctagcaaatccaatgggtttcccatacaaaaaaaaaaggcgctaatgaacaag

SEQ ID NO: 44639 - DNA, 96 bp, Fusarium phaseoli
  misc_feature: 31
cttatggcaaagtattactttaaaagttattgaagctgctcttaaatgtatactgtgtctagaagcttgatagtgacactgtgtaggccctgcctt

SEQ ID NO: 44640 - DNA, 96 bp, Fusarium phaseoli
  misc_feature: 31
ataaagtgaatattaaatatgaggaaggaggggtaagatacggcgaattttaaggtagagttagataagcggagtgggtgtggtattatatataag

SEQ ID NO: 44641 - DNA, 96 bp, Fusarium phaseoli
  misc_feature: 31
aagagagatacgaccaagagagataccaccaagagagatgccaccaagagagatgccaccaaagaggcatgcaaccaagatacagccacaatccag

SEQ ID NO: 44642 - DNA, 96 bp, Fusarium phaseoli
  misc_feature: 31
aatgtcagatgctgggtttccatcaggcggcaacgaagaaaacgatccgagtgatgcacaacacgacaacggacatgcagtggccctatgccagag

SEQ ID NO: 44643 - DNA, 96 bp, Fusarium phaseoli
  misc_feature: 31
ccgactttttccaccgaccagaattctctcacgcatcgctacatctgctgatgcagtccacaatctccagtaaccaagttgtagcccgtagtcgag

SEQ ID NO: 44644 - DNA, 96 bp, Fusarium phaseoli
  misc_feature: 31
ctattccaacaataactaccctattgttggcgccctttcatttcccacccatttgagttcgtcggttgccaaacgacggtttggagtagagccttg

SEQ ID NO: 44645 - DNA, 96 bp, Fusarium phaseoli
  misc_feature: 31
ctatatgtaaccctattgcataagaacgctagctggaagagacttatacgtctgtatggatgtaccgacagagagctgtttcataaaccattaagt

SEQ ID NO: 44646 - DNA, 96 bp, Fusarium phaseoli
  misc_feature: 31
atgctcggccgtggattcctcgcaaagccgatatccctcgtaatcctgctcccgggcaattcgcttgaactgttcactccgctgcggcgatgaacg

SEQ ID NO: 44647 - DNA, 96 bp, Fusarium phaseoli
  misc_feature: 31
aaccgacgaagtatgaagacggagaagaagatatggcaatcgcacaaggtaaaggggactctattcataatgagaaagcttgagaaagattgaacg

SEQ ID NO: 44648 - DNA, 96 bp, Fusarium phaseoli
  misc_feature: 31
cgggtcattaaaaacaaacgaaatgagaataaactgggcgatctctttgcacattatcggcggaacaatgtagcttagattggcaagccatccttt

SEQ ID NO: 44649 - DNA, 96 bp, Fusarium phaseoli
  misc_feature: 31
cgctcagtataccttgcatgcgtgtctgccagggagctagcgtgtaaggctgaatcactcccatggtgccctttggtgtttccttgcaaacgtccg

SEQ ID NO: 44650 - DNA, 96 bp, Fusarium phaseoli
  misc_feature: 31
atagaaagttaaaggtttagcgataattaaaataaatataccttatttttagatattttatttagcgcttaagctccagttaatatcggtttagcg

SEQ ID NO: 44651 - DNA, 96 bp, Fusarium phaseoli
  misc_feature: 31
atagccatctcgcgacttctcgtcctcaaggaggcccatctaatcagatgcaaggcaattaagcagaaggtggctagtggcctaagcgtcgctgcg

SEQ ID NO: 44652 - DNA, 96 bp, Fusarium phaseoli
  misc_feature: 31
ataccgagccaacggtcagatcgagaaggcaacagaactgctagagcatgtggttgcgattcaggagaagacattagcggagaatcacccaaatcg

SEQ ID NO: 44653 - DNA, 96 bp, Fusarium phaseoli
  misc_feature: 31
cgacgacgttgaaataagctcatcacgtgataagatttttctaggaggcactataccaatttaggccaaggtaacccaggcattagtcagcttctt

SEQ ID NO: 44654 - DNA, 96 bp, Fusarium phaseoli
  misc_feature: 31
caccttagtccccttaaactaaccctcataaccacccgctccctccctcgcttcctaggttatactaaggcctaagggtcaaggtcaaggtcaagg

SEQ ID NO: 44655 - DNA, 96 bp, Fusarium phaseoli
  misc_feature: 31
ccttacgaggactttatagtctatatccttcagtcctttacagtcagcaagattactaatcagtaaatcaagctaaaaggcagggaaaagaacctg

SEQ ID NO: 44656 - DNA, 96 bp, Fusarium phaseoli
  misc_feature: 31
agaagctgactaatgcctgggttaccttggcctaaattggtatagtgcctcctagaaaaatcttatcacgtgatgagcttatttcaacgtcgtcgg

SEQ ID NO: 44657 - DNA, 96 bp, Fusarium phaseoli
  misc_feature: 31
ccgacgaagtatgaagacggagaagaagatatggcaatcgcacaaggtaaaggggactctattcataatgagaaagcttgagaaagattgaacgat

SEQ ID NO: 44658 - DNA, 96 bp, Fusarium phaseoli
  misc_feature: 31
ccctaggctttcggattcttaccaacttccattctaactgaggcccagttggggaaggacagatcgttaaagatacatggtcaggaactcgtgcat

SEQ ID NO: 44659 - DNA, 96 bp, Fusarium phaseoli
  misc_feature: 31
agttgagggttagggttaagtggttgtggtgaaggttagggggagtggttgtggtgaaggttagggggagtggttgagttgagggttagggggggg

SEQ ID NO: 44660 - DNA, 96 bp, Fusarium phaseoli
  misc_feature: 31
cccagagcctgagattgatgactggggttcttttgtcgtaaagcctcaggagaaaaagaagcacgcgacaaagcttcagatgttatggaatgactt

SEQ ID NO: 44661 - DNA, 96 bp, Fusarium phaseoli
  misc_feature: 31
ataaccttggactgcgattcatttctcatggcggatgggacacattcagaaagacaggaaagaaccgaggtcgcgtttgtgacatcgcgtttctgg

SEQ ID NO: 44662 - DNA, 96 bp, Fusarium phaseoli
  misc_feature: 31
ccaatcggacccatcaaagcattcgggctcgtgacaagtagtagtagtagtagtagtagtagtaggttttattacgcccgggagaactaatctcat

SEQ ID NO: 44663 - DNA, 96 bp, Fusarium phaseoli
  misc_feature: 31
aaagtccctccggaatcaattacggccaaaacaccatagaattcattccaaagagacttatgacttctcaatcaattcccggcgaagcactcaatg

SEQ ID NO: 44664 - DNA, 96 bp, Fusarium phaseoli
  misc_feature: 31
cattattattattatctcctcccaccttatatataataccacacccactccgcttatctaactctaccttaaaattcgccgtatcttacccctcct

SEQ ID NO: 44665 - DNA, 96 bp, Fusarium phaseoli
  misc_feature: 31
caaggagtcgacaatggatggagtcgaagaagacgacgatggtgtggacgacaaccctaccaattattgtaaacgtgccttgaccaaggcacattt

SEQ ID NO: 44666 - DNA, 96 bp, Fusarium phaseoli
  misc_feature: 31
atttaatcttttagttcgggactaggtcttggatccatagatagcaccacgggctagggaaccggctttcctacagaagagtgtcgatacccttat

SEQ ID NO: 44667 - DNA, 96 bp, Fusarium phaseoli
  misc_feature: 31
aaaagtccctccggaatcaattacggccaaaacaccatagaattcattccaaagagacttatgacttctcaatcaattcccggcgaagcactcaat

SEQ ID NO: 44668 - DNA, 96 bp, Fusarium phaseoli
  misc_feature: 31
agcacacgttaggcttcaaacttcattaagcgacacctagagcttaagacgtatttttttcggaaatataactaccagagagctaagtgcgaagat

SEQ ID NO: 44669 - DNA, 96 bp, Fusarium phaseoli
  misc_feature: 31
atcctctcttaattactctatttttaaccctcttatactccctcttaccctaacctatctattccttacttaacgtcctcattattattattatct

SEQ ID NO: 44670 - DNA, 96 bp, Fusarium phaseoli
  misc_feature: 31
atattgatcggaatcgcacttaacctcatttcatcccatcacgtagagatcaagatcgttgtctttccatattgtgatgatgttctgatgtggggt

SEQ ID NO: 44671 - DNA, 96 bp, Fusarium phaseoli
  misc_feature: 31
atattacacgactaatcctttattattcttctatgcgctactctttatgtcttaactaaccaaatgatcagttaaccggccattccgaaacactat

SEQ ID NO: 44672 - DNA, 96 bp, Fusarium phaseoli
  misc_feature: 31
atatattgaaatacattgacgtcaatcatttaccaactgttgaacatgtggggtgtcacgtgttggtcaaggatcttgagattaaaagcaggtcct

SEQ ID NO: 44673 - DNA, 96 bp, Fusarium phaseoli
  misc_feature: 31
aaaccgatattaactggagcttaagcgctaaataaaatatctaaaaataaggtatatttattttaattatcgctaaacctttaactttctatatat

SEQ ID NO: 44674 - DNA, 96 bp, Fusarium phaseoli
  misc_feature: 31
aaaaattgcattttgtatggggaaattttttttttgcttaacgtactccacaagcgagtgaatcagacaagcgagtgaatcaaaaatccctcaact

SEQ ID NO: 44675 - DNA, 96 bp, Fusarium phaseoli
  misc_feature: 31
aagaataaagacaaaaaaccacagcattcgtttctacggtccaatagggcaatagggcaaccatacatacacacatgtagactatacatgtagact

SEQ ID NO: 44676 - DNA, 96 bp, Fusarium phaseoli
  misc_feature: 31
aacaactaaaaagaaaagcgcacttccgttgcgccaaatggccgtgtccacgactagagtaaaacaatatttgccttccgtgcaaaaggaacacct

SEQ ID NO: 44677 - DNA, 96 bp, Fusarium phaseoli
  misc_feature: 31
agattggtcaatcgacatcatcaggcacggcaacgcaaatgacaaaatgccgtattaaggaagcgacagttctgtatgaaattaaagacagtagtt

SEQ ID NO: 44678 - DNA, 96 bp, Fusarium phaseoli
  misc_feature: 31
aaatttcggcatttggtcacgtgctcagacttcgggagaatcgcttcgattgcttgatcctgacggatatattacgtatagacgtgcggggcatct

SEQ ID NO: 44679 - DNA, 96 bp, Fusarium phaseoli
  misc_feature: 31
agatatggtattttggttctctgcactgtcttggtactttggctttggccattgtggtatccaagttcgtaatgaagtagaaccttgtccctgctt

SEQ ID NO: 44680 - DNA, 96 bp, Fusarium phaseoli
  misc_feature: 31
aaaagacgatcaaggtcgcatacacacctaccggcgatatgctggctgacggcttgacaaaggtactaccgactgaggcattcaggaagttcaggt

SEQ ID NO: 44681 - DNA, 96 bp, Fusarium phaseoli
  misc_feature: 31
acacattatcttccactcctgcaatattgtttcatcaggttatgagcccggagggcgccatcttcctccaacccaaagctgagtgtcttctgtctt

SEQ ID NO: 44682 - DNA, 96 bp, Fusarium phaseoli
  misc_feature: 31
aatctctttaagataatcctcgaggtcctatgttatatttcgaactatatccttatatttattgagtacctaaagagtaataatgctagtttattt

SEQ ID NO: 44683 - DNA, 96 bp, Fusarium phaseoli
  misc_feature: 31
aaaaagaaaaaaagaaaaaaaagaaaaaagacgcaaaatcggaagtcaaaccgggctgaccgatctctactttctgctgacatcatcatcggcttt

SEQ ID NO: 44684 - DNA, 96 bp, Fusarium phaseoli
  misc_feature: 30
caagaaagcctcaaaaaccacaacaagagcaaaaagagccacaacaagagccaaaaggacagcgagagccaagagagtcacaacaagagccaaaaa

SEQ ID NO: 44685 - DNA, 96 bp, Fusarium phaseoli
  misc_feature: 30
cgcaaaaatgcggtacttctgaaccgcgccaatttcctaggatttagaagtcacttcgttataagggtgaacttgataattgcgaccgggacaaaa

SEQ ID NO: 44686 - DNA, 96 bp, Fusarium phaseoli
  misc_feature: 30
gaggaggatgctatctccccaatgcgtgcggacctccactgtggtcgcgacaagggattatggccaattaaaatgcacgaaataaagtgtacaaaa

SEQ ID NO: 44687 - DNA, 96 bp, Fusarium phaseoli
  misc_feature: 30
aaaagagtatattttcctaaaatataattaatatgcataagataataaaaagctaaaaaaggtataaaatcataaaagaggtatataaaggtaaaa

SEQ ID NO: 44688 - DNA, 96 bp, Fusarium phaseoli
  misc_feature: 30
tagctcagtaccgcataggcatcattcaacacaattagtcatcagctctcttacaagaggctatgaacgatcgctatatttggtatcatctccaaa

SEQ ID NO: 44689 - DNA, 96 bp, Fusarium phaseoli
  misc_feature: 30
gtaacgaagcctgatctcctactggagcaatagacgtgctgagctgaactatctacaatcgctgccgcattcgacctcgcttggaatacccgcaaa

SEQ ID NO: 44690 - DNA, 96 bp, Fusarium phaseoli
  misc_feature: 30
tttgccaaaggatggcttgccaatctaagctacattgttccgccgataatgtgcaaagagatcgcccagtttattctcatttcgtttgtttttaat

SEQ ID NO: 44691 - DNA, 96 bp, Fusarium phaseoli
  misc_feature: 30
tttcaaatcgcaaactattgggaaagaggaagatatctgtgctctttactgtatacccgctggctccttgtctttttaacttagaaacgtccctgc

SEQ ID NO: 44692 - DNA, 96 bp, Fusarium phaseoli
  misc_feature: 30
atagcctagcgtactagtccctatgaggttagtccttgtggccggaataaagtcggcatccagacgtggattgagacaggcgtgccctctaaacaa

SEQ ID NO: 44693 - DNA, 96 bp, Fusarium phaseoli
  misc_feature: 30
atttcaaacaacaaatctggctttgcaggcaatcaaatatttcaaatatgactctggatttgatttgtttgatttgagggcagcgctggctgacaa

SEQ ID NO: 44694 - DNA, 96 bp, Fusarium phaseoli
  misc_feature: 30
ttgtcaagccgtcagccagcatatcgccggtaggtgtgtatgcgaccttgatcgtcttttgagaaacagcttgtcttagccaatggttgtgaatat

SEQ ID NO: 44695 - DNA, 96 bp, Fusarium phaseoli
  misc_feature: 30
ttgggccggcttgcttatttaacttgcaccttcactattcgtattttataaataacggccggtgactatacttcattcacttctctaatcactttc

SEQ ID NO: 44696 - DNA, 96 bp, Fusarium phaseoli
  misc_feature: 30
cattatcgtttacctgacccttaatccttttagcacgctcagtgcgacaaaacccctcgagacaaaggaattgccttcgtctttcgacgccgccaa

SEQ ID NO: 44697 - DNA, 96 bp, Fusarium phaseoli
  misc_feature: 30
ttgatttgatttgatttagataaatttgatttgatttgaatagatttgaatttgatttatttgtttgcaagcctggttctcacagtcgtcgttctt

SEQ ID NO: 44698 - DNA, 96 bp, Fusarium phaseoli
  misc_feature: 30
gagaacgtggaacctacttcctcctagtgcaagggcccaagggccaacagaatgttactctcgataacgctctgtatgttccggaaggatgctcaa

SEQ ID NO: 44699 - DNA, 96 bp, Fusarium phaseoli
  misc_feature: 30
ttgactcacttgaattgaagtcatcggaaaggcacctttcctatccgtagttccctctactgtaggtttcgctaaagcccgtcaatacaagcatgc

SEQ ID NO: 44700 - DNA, 96 bp, Fusarium phaseoli
  misc_feature: 30
atactttctatctctttcactataaagcacaggggtgtcaggaaacggctctaagtctcatgacgtaagaccagttcacgtctccacataggtcaa

SEQ ID NO: 44701 - DNA, 96 bp, Fusarium phaseoli
  misc_feature: 30
ttctttcacggagtcgaatccctgaagggagcagatgagatgcgtctagacatacggcatcccaccattccgcaccagtcgtgtcattgaccagtc

SEQ ID NO: 44702 - DNA, 96 bp, Fusarium phaseoli
  misc_feature: 30
tatcgcccaccgtacgtgtgcgaccgtagacctggggaagaaacgcttttattttctcgatctcatcatttatttttatttttatatcttttggaa

SEQ ID NO: 44703 - DNA, 96 bp, Fusarium phaseoli
  misc_feature: 30
tgcacaacacgacaacggacatgcagtggccctatgccagagtgtgggggcagagacgtgcgtgacgcgtgatgttcggggaatcccgacgatgaa

SEQ ID NO: 44704 - DNA, 96 bp, Fusarium phaseoli
  misc_feature: 30
ttatgtgcttggggactgcagacagtatgtattcgtcttgcaagttgttgacctcgagtgttgcagccaatcagaattttagcggtcaaactcaac

SEQ ID NO: 44705 - DNA, 96 bp, Fusarium phaseoli
  misc_feature: 30
ttatggcaaagtattactttaaaagttattgaagctgctcttaaatgtatactgtgtctagaagcttgatagtgacactgtgtaggccctgccttt

SEQ ID NO: 44706 - DNA, 96 bp, Fusarium phaseoli
  misc_feature: 30
ttagaactgttaatcctatacagtattgagcacttgcactttccgccccaaaaacaacatgctctttgtaaagtctagggtggggttatctaagta

SEQ ID NO: 44707 - DNA, 96 bp, Fusarium phaseoli
  misc_feature: 30
acggcgaattttaaggtagagttagataagcggagtgggtgtggtattatatataaggtgggaggagataataataataatgaggacgttaagtaa

SEQ ID NO: 44708 - DNA, 96 bp, Fusarium phaseoli
  misc_feature: 30
ttaatccttttagcacgctcagtgcgacaaaacccctcgagacaaaggaattgccttcgtctttcgacgccgccaagctggccctcggcttggcca

SEQ ID NO: 44709 - DNA, 96 bp, Fusarium phaseoli
  misc_feature: 30
taatagtgagtataaagataaggataaggaagaagattaaaataaggaagaagataaagaggaggaagaggaaaaagataatcgcttctatattaa

SEQ ID NO: 44710 - DNA, 96 bp, Fusarium phaseoli
  misc_feature: 30
ttaagggtaaggttaagggtaaggttaagggtaaggttatcagtgtggtcttcagggttggggttggggcggtcgtgaaagtgtcagcgaaaattc

SEQ ID NO: 44711 - DNA, 96 bp, Fusarium phaseoli
  misc_feature: 30
cgcaacaactaaaaagaaaagcgcacttccgttgcgccaaatggccgtgtccacgactagagtaaaacaatatttgccttccgtgcaaaaggaaca

SEQ ID NO: 44712 - DNA, 96 bp, Fusarium phaseoli
  misc_feature: 30
tgtgtatgtatggttgccctattgccctattggaccgtagaaacgaatgctgtggttttttgtctttattcttatcctctcgtttcattccgcttc

SEQ ID NO: 44713 - DNA, 96 bp, Fusarium phaseoli
  misc_feature: 30
tgtggtgaaggttagggggagtggttgagttgagggttagggggagtggttgagataaagtttagagtgaagggttagaaagaggtggggttgaga

SEQ ID NO: 44714 - DNA, 96 bp, Fusarium phaseoli
  misc_feature: 30
tgtgggttgcggaggaaacggtcaaagttggcccaggaatgtttacattgtgactcataggtaatcggtttgtaacaggttgaccaacaatctata

SEQ ID NO: 44715 - DNA, 96 bp, Fusarium phaseoli
  misc_feature: 30
tgtggctgtatcttggttgcatgcctctttggtggcatctctcttggtggcatctctcttggtggcatctctcttggtcgcatctctcttggtcgc

SEQ ID NO: 44716 - DNA, 96 bp, Fusarium phaseoli
  misc_feature: 30
tgtagtcaagcgttggtttgtcctgaccgaaggccagaaacggacggcgttagggtatgcagcgccgaggaccttgataagccatgtaacagcaat

SEQ ID NO: 44717 - DNA, 96 bp, Fusarium phaseoli
  misc_feature: 30
tggttgctaaccagaaacgcgatgtcacaaacgcgacctcggttctttcctgtctttctgaatgtgtcccatccgccatgagaaatgaatcgcagt

SEQ ID NO: 44718 - DNA, 96 bp, Fusarium phaseoli
  misc_feature: 30
ctcccttctgctctgaccaccgtctctccaaccgcgtaataacctggcatccacggcttgcttatatgccaccgccggtccttccaccctaatcca

SEQ ID NO: 44719 - DNA, 96 bp, Fusarium phaseoli
  misc_feature: 30
ggcagattgttctgggcaagttgattgatgatctatatgatctagaacaacaattgcttagccagaagctaggctgtagctttggatgcagatcca

SEQ ID NO: 44720 - DNA, 96 bp, Fusarium phaseoli
  misc_feature: 30
aaacaaacaaacaaacaaacaaacaaacaaacaaggtgacgctcgatatgaatcgatcgatcagggctcggaatcgatctatacgatcgatttcca

SEQ ID NO: 44721 - DNA, 96 bp, Fusarium phaseoli
  misc_feature: 30
gagaactatcaacaaccgcaagctgcggcatgacgatgctcatttgtttatcatgtcgcgattccgctcccatattgctatctcatccactttcca

SEQ ID NO: 44722 - DNA, 96 bp, Fusarium phaseoli
  misc_feature: 30
tgcgaacgcaacagttatgccaggagaacgtggaacctacttcctcctagtgcaagggcccaagggccaacagaatgttactctcgataacgctct

SEQ ID NO: 44723 - DNA, 96 bp, Fusarium phaseoli
  misc_feature: 30
gggccgctcctcgttaacagtaggaaatatcagcttcattcttagaatttagagaatctatctgcatttctttgcatctatctatgtagacatgca

SEQ ID NO: 44724 - DNA, 96 bp, Fusarium phaseoli
  misc_feature: 30
cagacgctggacgagacatacgaacaaatgctcagcaatatcccgtcgacttctagggattatgcccggcaaatgctgacgttgctctgttgtgca

SEQ ID NO: 44725 - DNA, 96 bp, Fusarium phaseoli
  misc_feature: 30
tcccaccttatatataataccacacccactccgcttatctaactctaccttaaaattcgccgtatcttacccctccttcctcatatttaatattca

SEQ ID NO: 44726 - DNA, 96 bp, Fusarium phaseoli
  misc_feature: 30
caagatgcctcgtggattacctgccggcgatttccagggacctgggtgaaccccatggcgcggtgactccagaccagttagtgccatatcacttca

SEQ ID NO: 44727 - DNA, 96 bp, Fusarium phaseoli
  misc_feature: 30
tgaagaacatggcctcacttcgagaagctggaattgaatatgatgacctcaaagacaacggggcactactgggcgatgctggagatgaactccacc

SEQ ID NO: 44728 - DNA, 96 bp, Fusarium phaseoli
  misc_feature: 30
tgaacttcctgaatgcctcagtcggtagtacctttgtcaagccgtcagccagcatatcgccggtaggtgtgtatgcgaccttgatcgtcttttgag

SEQ ID NO: 44729 - DNA, 96 bp, Fusarium phaseoli
  misc_feature: 30
tcttccttatttctcctctttttctctctttttctttatatttcttttattcttttcttacctcttacctcttttccctctttttattttctttta

SEQ ID NO: 44730 - DNA, 96 bp, Fusarium phaseoli
  misc_feature: 30
cacaacacgacaacggacatgcagtggccctatgccagagtgtgggggcagagacgtgcgtgacgcgtgatgttcggggaatcccgacgatgaaga

SEQ ID NO: 44731 - DNA, 96 bp, Fusarium phaseoli
  misc_feature: 30
cctggcttatcttcgacaactgccggcaattcaatgacgagaattcgctgtatgtgaagtgtgcgaacaagttagagaagtacatgtggcagcaga

SEQ ID NO: 44732 - DNA, 96 bp, Fusarium phaseoli
  misc_feature: 30
tctatcctatcctatcctatcctatcctagctgcgcggcggattcgctagcaaatccaatgggtttcccatacaaaaaaaaaaggcgctatcctag

SEQ ID NO: 44733 - DNA, 96 bp, Fusarium phaseoli
  misc_feature: 30
tcgctagcaaatccaatgggtttcccatacaaaaaaaaaaggcgctatcctatcctagctgcgcggcggattcgctagcaaatccaatgggtttcc

SEQ ID NO: 44734 - DNA, 96 bp, Fusarium phaseoli
  misc_feature: 30
atttttagcgccgttttgatttatcccatgagtgcccacaagactgcaaccaggtcacgacggggggttgaggccaatcaaaactcccagtggcga

SEQ ID NO: 44735 - DNA, 96 bp, Fusarium phaseoli
  misc_feature: 30
aggagaggttcaaatggacctgccttccccgcccccaggagggtgacacacagctagtggaaactcagctccgtttcaacgacctcaagaactcga

SEQ ID NO: 44736 - DNA, 96 bp, Fusarium phaseoli
  misc_feature: 30
tcgaatgcggcagcgattgtagatagttcagctcagcacgtctattgctccagtaggagatcaggcttcgttacagcctcccagacgaaaaacata

SEQ ID NO: 44737 - DNA, 96 bp, Fusarium phaseoli
  misc_feature: 30
tccttttagcacgctcagtgcgacaaaacccctcgagacaaaggaattgccttcgtctttcgacgccgccaagctggccctcggcttggccaagga

SEQ ID NO: 44738 - DNA, 96 bp, Fusarium phaseoli
  misc_feature: 30
agaaggaaggaaagtgtaaaaagaaagagaaaagaataaaaagagggagaaagaaggtatagaggatagaagaggagaggtatgaaggataaagga

SEQ ID NO: 44739 - DNA, 96 bp, Fusarium phaseoli
  misc_feature: 30
gggtaatattaatttaaagaagagaaaaaaaaaaaaaagaaagaaataagtaataaaagaaaaggtttagggtagaagtaaataaaaaagagagga

SEQ ID NO: 44740 - DNA, 96 bp, Fusarium phaseoli
  misc_feature: 30
agatagataacgggggaggaggataaagtatataaagaggattacggtaatattagggtatattatatataagaagaaaagaggaagtacggagga

SEQ ID NO: 44741 - DNA, 96 bp, Fusarium phaseoli
  misc_feature: 30
tcctatcctagctgcgcggcggattcgctagcaaatccaatgggtttcccatacaaaaaaaaaaggcgctatcctatcctagctgcgcggcggatt

SEQ ID NO: 44742 - DNA, 96 bp, Fusarium phaseoli
  misc_feature: 30
tcccgtaagcccatctactgagaagatatgagtctaagttccagaactatctgattaatctatccctattcagcccgagtcctctctatcactctc

SEQ ID NO: 44743 - DNA, 96 bp, Fusarium phaseoli
  misc_feature: 30
tcatcctcatcattaccttcatcctcatcatctccatctccatcttcatctccatcttcatcttcatcttcatcttcgtcttcactgtcatcctcg

SEQ ID NO: 44744 - DNA, 96 bp, Fusarium phaseoli
  misc_feature: 30
gggatttttgatccgcatgcttgtctgatccgcatgcttgtctgatccgcatgcttatcatgcacgttagtcccattgtttaaaagtctcgtatga

SEQ ID NO: 44745 - DNA, 96 bp, Fusarium phaseoli
  misc_feature: 30
atcaacgtggcggagcttcgtttgtagagtcgcgatgtctgcattgacgagacgaattgtctgctggttatcgcaccacaggttcagccgtgctga

SEQ ID NO: 44746 - DNA, 96 bp, Fusarium phaseoli
  misc_feature: 30
tcacttttctaactcttaacgccagaggttactagtccctaactgcccccgcccttttgccccttgctctccggcaaccttcataacctcccgctt

SEQ ID NO: 44747 - DNA, 96 bp, Fusarium phaseoli
  misc_feature: 30
atgactcgcaaaaggggcccttgattcgcaaaaatgcggtacttctgaaccgcgccaatttcctaggatttagaagtcacttcgttataagggtga

SEQ ID NO: 44748 - DNA, 96 bp, Fusarium phaseoli
  misc_feature: 30
aatcaacttgcccagaacaatctgcctcctcctctcaatctgttctagttcagttagcccttgttttgcttaagaatcgagtcgagatgttggtga

SEQ ID NO: 44749 - DNA, 96 bp, Fusarium phaseoli
  misc_feature: 30
cgatttgatttgatttgaattcgttcggacttgatttgatttgatttgatttgatttgatttgatttggatttatttgaactcatttatttgttga

SEQ ID NO: 44750 - DNA, 96 bp, Fusarium phaseoli
  misc_feature: 30
tattaaataatactatattatcttcaataaatataatatatcgcttaagctttaatattacttaagatatagataataattataaaaagatttata

SEQ ID NO: 44751 - DNA, 96 bp, Fusarium phaseoli
  misc_feature: 30
ctaatggcgattgccgcacggtttgaccttgagcttatccaatgcgatgctgttaacgcgttcgtcaacgccaagctaccatacgatatgttcata

SEQ ID NO: 44752 - DNA, 96 bp, Fusarium phaseoli
  misc_feature: 30
gatttttgatccgcatgcttgtctgatccgcatgcttgtctgatccgcatgcttatcatgcacgttagtcccattgtttaaaagtctcgtatgata

SEQ ID NO: 44753 - DNA, 96 bp, Fusarium phaseoli
  misc_feature: 30
tatcaacgtggcggagcttcgtttgtagagtcgcgatgtctgcattgacgagacgaattgtctgctggttatcgcaccacaggttcagccgtgctg

SEQ ID NO: 44754 - DNA, 96 bp, Fusarium phaseoli
  misc_feature: 30
gcaatactcgcgaatcttccgcatatacctaagtactatctcccactcgcatttcttctagtgctagacacaattagcacacttaccattcatata

SEQ ID NO: 44755 - DNA, 96 bp, Fusarium phaseoli
  misc_feature: 30
tatataataaggaaagaataataaatagattataaaaataagagagataaataaaagtaggaattatagtaaaagattaaggataaaggtaaattt

SEQ ID NO: 44756 - DNA, 96 bp, Fusarium phaseoli
  misc_feature: 30
tagtcaagcgttggtttgtcctgaccgaaggccagaaacggacggcgttagggtatgcagcgccgaggaccttgataagccatgtaacagcaatgg

SEQ ID NO: 44757 - DNA, 96 bp, Fusarium phaseoli
  misc_feature: 30
aaacacaggaagaattgcgacgaaccacgaaggagaccagctgagattcgaagagcagtcgccctggattgaaaggacaggttgggataagaccta

SEQ ID NO: 44758 - DNA, 96 bp, Fusarium phaseoli
  misc_feature: 30
gttcatctggggactctgacgaggagatgcctaatgctatatcctctgggtcaaataattaattaactaagaccaaccccgtgagcatgggaccta

SEQ ID NO: 44759 - DNA, 96 bp, Fusarium phaseoli
  misc_feature: 30
atgaatcgtgttgactgatcaaatcctctgaagccttgtcacttggcgatatccaacacttgagccagaagttttggaactttcactttgatcgta

SEQ ID NO: 44760 - DNA, 96 bp, Fusarium phaseoli
  misc_feature: 30
tacacgactaatcctttattattcttctatgcgctactctttatgtcttaactaaccaaatgatcagttaaccggccattccgaaacactattgta

SEQ ID NO: 44761 - DNA, 96 bp, Fusarium phaseoli
  misc_feature: 30
taatctctttaagataatcctcgaggtcctatgttatatttcgaactatatccttatatttattgagtacctaaagagtaataatgctagtttatt

SEQ ID NO: 44762 - DNA, 96 bp, Fusarium phaseoli
  misc_feature: 30
taagtcatcgctatctttttcgtcatcgtcgtcgtctacctcattatcattattaataattaaagccagtacgactagccgctagatactgtagag

SEQ ID NO: 44763 - DNA, 96 bp, Fusarium phaseoli
  misc_feature: 30
catcgttaccacagtggaggtccgcacgcactcaggagatagggtctcagggagcgtgactgtgaacggtcgcattgtaagtctacttactcctta

SEQ ID NO: 44764 - DNA, 96 bp, Fusarium phaseoli
  misc_feature: 30
gacgacgttgaaataagctcatcacgtgataagatttttctaggaggcactataccaatttaggccaaggtaacccaggcattagtcagcttctta

SEQ ID NO: 44765 - DNA, 96 bp, Fusarium phaseoli
  misc_feature: 30
taactaagcgctaagagtagatcagcgcaatacgtcaccttcggacactccgctgtattataatcagatgatccatcttcaataaatgcgcaatag

SEQ ID NO: 44766 - DNA, 96 bp, Fusarium phaseoli
  misc_feature: 30
cccattctcctccgtacttcctcttttcttcttatatataatataccctaatattaccgtaatcctctttatatactttatcctcctcccccgtta

SEQ ID NO: 44767 - DNA, 96 bp, Fusarium phaseoli
  misc_feature: 30
atatcggcgtaggaggtctgtgggatgttagggccaatcagtagaaacggtgtgttgtactgaccaagtgaaagagatctcatcattgtgtcgtta

SEQ ID NO: 44768 - DNA, 96 bp, Fusarium phaseoli
  misc_feature: 30
taacccattctcctccgtacttcctcttttcttcttatatataatataccctaatattaccgtaatcctctttatatactttatcctcctcccccg

SEQ ID NO: 44769 - DNA, 96 bp, Fusarium phaseoli
  misc_feature: 30
taaagtgaatattaaatatgaggaaggaggggtaagatacggcgaattttaaggtagagttagataagcggagtgggtgtggtattatatataagg

SEQ ID NO: 44770 - DNA, 96 bp, Fusarium phaseoli
  misc_feature: 30
gtttttcctcggattcgctaggtttgtcatcgagtctccacgaatgttggaagtcattccataacatctgaagctttgtcgcgtgcttctttttct

SEQ ID NO: 44771 - DNA, 96 bp, Fusarium phaseoli
  misc_feature: 30
gttgtggtgaaggttagggggagtggttgagttgagggttagggttaagtggttgtggtgaaggttagggggagtggttgtggtgaagggtagggg

SEQ ID NO: 44772 - DNA, 96 bp, Fusarium phaseoli
  misc_feature: 30
gttgagggttagggttaagtggttgtggtgaaggttagggggagtggttgtggtgaaggttagggggagtggttgagttgagggttagggggaggg

SEQ ID NO: 44773 - DNA, 96 bp, Fusarium phaseoli
  misc_feature: 30
gttagtaaggtaatattagcccgtattaataatgaatagcgagatcgcttagctatccgcattaatcgcctaaataactgtaatctattcctagtt

SEQ ID NO: 44774 - DNA, 96 bp, Fusarium phaseoli
  misc_feature: 30
gttaatgactcacactgtctacgggcacgaattaggcatggacagaaatcaattgtaacaaggataaactgtcatcagaatatgagacaagaaaag

SEQ ID NO: 44775 - DNA, 96 bp, Fusarium phaseoli
  misc_feature: 30
atagtgaaaaggggcacgaagttggtcaccgatatcaacagctcccatttcctcgttatactctgctgcaaaggacgggatccacacgctcaacac

SEQ ID NO: 44776 - DNA, 96 bp, Fusarium phaseoli
  misc_feature: 30
gtgtggtattatatataaggtgggaggagataataataataatgaggacgttaagtaaggaatagataggttagggtaagagggagtataagaggg

SEQ ID NO: 44777 - DNA, 96 bp, Fusarium phaseoli
  misc_feature: 30
gtggtattatatataaggtgggaggagataataataataatgaggacgttaagtaaggaatagataggttagggtaagagggagtataagagggtt

SEQ ID NO: 44778 - DNA, 96 bp, Fusarium phaseoli
  misc_feature: 30
gtgaaggttagggggagtggttgagttgagggttagggttaagtggttgtggtgaaggttagggggagtggttgtggtgaaggttagggggggggg

SEQ ID NO: 44779 - DNA, 96 bp, Fusarium phaseoli
  misc_feature: 30
gtctatgaataaaacaaacaaacaaacaaacaaacaaacaaacgagggagcgagagtaccgatagcgtgtatatacccgtcaggatggactagtat

SEQ ID NO: 44780 - DNA, 96 bp, Fusarium phaseoli
  misc_feature: 30
gtcgaatgcggcagcgattgtagatagttcagctcagcacgtctattgctccagtaggagatcaggcttcgttacagcctcccagacgaaaaacat

SEQ ID NO: 44781 - DNA, 96 bp, Fusarium phaseoli
  misc_feature: 30
gtcaagtgcactcagcatccctgcgcgacataacaacagtatgcgccgctaccgtctgctattaagccttaaagccctttgctattacgttgtacc

SEQ ID NO: 44782 - DNA, 96 bp, Fusarium phaseoli
  misc_feature: 30
atctatactgatctgattaattgattgcctttgttcctcttttactcacactacttcccagcatattagcgggcagattgtttgaaaacctcatac

SEQ ID NO: 44783 - DNA, 96 bp, Fusarium phaseoli
  misc_feature: 30
gcaaccaacaagcaaccaacaagcaaccaacaagcaaccaacaagcaaccaacaagcaaccaacaagcaaccaacaagcgaccaacaaagtactac

SEQ ID NO: 44784 - DNA, 96 bp, Fusarium phaseoli
  misc_feature: 30
atagcgataatcctagatcttaagtatactatctaccctaggtgcctattactaatcgacctttatagtcaatgggaagaggctattaatagctac

SEQ ID NO: 44785 - DNA, 96 bp, Fusarium phaseoli
  misc_feature: 30
acgtcctcattattattattatctcctcccaccttatatataataccacacccactccgcttatctaactctaccttaaaattcgccgtatcttac

SEQ ID NO: 44786 - DNA, 96 bp, Fusarium phaseoli
  misc_feature: 30
acggtgggagatcaataatgtgaggagtaaagatcgaagtagtaaggcccatagttgttgccagatatatcatttcagcactttattaatgtttac

SEQ ID NO: 44787 - DNA, 96 bp, Fusarium phaseoli
  misc_feature: 30
ggttgctaaccagaaacgcgatgtcacaaacgcgacctcggttctttcctgtctttctgaatgtgtcccatccgccatgagaaatgaatcgcagtc

SEQ ID NO: 44788 - DNA, 96 bp, Fusarium phaseoli
  misc_feature: 30
ggttaagtggttgtggtgaaggttagggggagtggttgtggtgaaggttagggggagtggttgagttgagggttagggggaggggttgagataaag

SEQ ID NO: 44789 - DNA, 96 bp, Fusarium phaseoli
  misc_feature: 30
actttcacgaccgccccaaccccaaccctgaagaccacactgataaccttacccttaaccttacccttaaccttacccttaaccttacccttaacc

SEQ ID NO: 44790 - DNA, 96 bp, Fusarium phaseoli
  misc_feature: 30
agacatgcagggtacctaactgttgctagataagtgcataggtctgggctagctgcatttttgcgaatcaggccttcttttgctagttaatccacc

SEQ ID NO: 44791 - DNA, 96 bp, Fusarium phaseoli
  misc_feature: 30
ggtgaaggttagggggagtggttgtggtgaaggttagggggagtggttgagttgagggttagggttaagtggttgtggtgaaggttaggggggggg

SEQ ID NO: 44792 - DNA, 96 bp, Fusarium phaseoli
  misc_feature: 30
ggtaagcgggaggttatgaaggttgccggagagcaaggggcaaaagggcgggggcagttagggactagtaacctctggcgttaagagttagaaaag

SEQ ID NO: 44793 - DNA, 96 bp, Fusarium phaseoli
  misc_feature: 30
ggtaagatacggcgaattttaaggtagagttagataagcggagtgggtgtggtattatatataaggtgggaggagataataataataatgaggacg

SEQ ID NO: 44794 - DNA, 96 bp, Fusarium phaseoli
  misc_feature: 30
ggtaactaagcgctaagagtagatcagcgcaatacgtcaccttcggacactccgctgtattataatcagatgatccatcttcaataaatgcgcaat

SEQ ID NO: 44795 - DNA, 96 bp, Fusarium phaseoli
  misc_feature: 30
gggaagtttgaaaagggaagtttgaaaagggaagtttgaaaagggaagtttgaaaagggaagtttgaaaagggaagtttgaaaaaggagggcactc

SEQ ID NO: 44796 - DNA, 96 bp, Fusarium phaseoli
  misc_feature: 30
cactttcccaactctcctcctctcctggacaatagcggttagcctcacttgtccaactcttctcccccggacagcagcggttagtctcactttccc

SEQ ID NO: 44797 - DNA, 96 bp, Fusarium phaseoli
  misc_feature: 30
ggagcaagggcagggcgtaagggtgacggggaaccaaagagtaagtaaaggcctgaccctgactctgaccttgaccttgaccttgacccttaggcc

SEQ ID NO: 44798 - DNA, 96 bp, Fusarium phaseoli
  misc_feature: 30
ggattgaagagagatctctcttacactcacacacatcgagcttacataacagatcttatttgcaccggcccccgtgcaggtatgagctccccaagt

SEQ ID NO: 44799 - DNA, 96 bp, Fusarium phaseoli
  misc_feature: 30
ctacggtcgcacacgtacggtgggcgataggggtcactgttgcaaaaccctgtgtcaattccttttgggcttaggcgctctgctccttagtcatcc

SEQ ID NO: 44800 - DNA, 96 bp, Fusarium phaseoli
  misc_feature: 30
ataaccgcttaggctaactttaattaaaaaggagattaatctatagagagattaacctatagatagctaatttagattaaggattctataatctcc

SEQ ID NO: 44801 - DNA, 96 bp, Fusarium phaseoli
  misc_feature: 30
cctctcttaattactctatttttaaccctcttatactccctcttaccctaacctatctattccttacttaacgtcctcattattattattatctcc

SEQ ID NO: 44802 - DNA, 96 bp, Fusarium phaseoli
  misc_feature: 30
ggacgagttcgtccaagaagggatgtgaggaaagggggcgcaagggttgggaggcggcgaacggatttctatagagcgatgtaatgtctaaaacat

SEQ ID NO: 44803 - DNA, 96 bp, Fusarium phaseoli
  misc_feature: 30
ggaagtttgaaaagggaagtttgaaaagggaagtttgaaaagggaagtttgaaaagggaagtttgaaaagggaagtttgaaaaaggagggcactct

SEQ ID NO: 44804 - DNA, 96 bp, Fusarium phaseoli
  misc_feature: 30
gctcgatgtgtgtgagtgtaagagagatctctcttcaatccacagggtgtcgcactgagcgtgctaaaaggatcaagggtcaggtaatcgataatg

SEQ ID NO: 44805 - DNA, 96 bp, Fusarium phaseoli
  misc_feature: 30
gctagatttaaccttggaatgaatagaagcttcacattgcatcatattaacgtcacttgagaagccccattgtctttgacagcgtaactaaagtgt

SEQ ID NO: 44806 - DNA, 96 bp, Fusarium phaseoli
  misc_feature: 30
gctaacctcagggccaaattctttcggctgaaagacactctgcactcttgaatttctgtggctcaggctccgacccgtctgagaggggagagctgc

SEQ ID NO: 44807 - DNA, 96 bp, Fusarium phaseoli
  misc_feature: 30
agttagggactagtaacctctggcgttaagagttagaaaagtgaaggtaaccgctactgtctaggagaggagagttgggaaagtgagactaaccgc

SEQ ID NO: 44808 - DNA, 96 bp, Fusarium phaseoli
  misc_feature: 30
gcctttcctatgagctacaagacacttgccttctctccgctatatttatggattttatctaaaaggaacaaaaaaaagaaaggaagaaagcctttc

SEQ ID NO: 44809 - DNA, 96 bp, Fusarium phaseoli
  misc_feature: 30
gcataacgctagccgtctatcttaatatagtacggaatgcctaagtacccatgcaataatacgtcaagctctatagctagttcgaagataataaag

SEQ ID NO: 44810 - DNA, 96 bp, Fusarium phaseoli
  misc_feature: 30
cttacgaggactttatagtctatatccttcagtcctttacagtcagcaagattactaatcagtaaatcaagctaaaaggcagggaaaagaacctgc

SEQ ID NO: 44811 - DNA, 96 bp, Fusarium phaseoli
  misc_feature: 30
gcaagaacggattttagcagcgtaaactcttgaatagctaacgtactccacaagcgagtgaatcaaacaagtgagtgaatcacttttcctgaccat

SEQ ID NO: 44812 - DNA, 96 bp, Fusarium phaseoli
  misc_feature: 30
atttgatttggataacattacagccaatttgatttgatttgatttagataaatttgatttgatttgaatagatttgaatttgatttatttgtttgc

SEQ ID NO: 44813 - DNA, 96 bp, Fusarium phaseoli
  misc_feature: 30
gcaaaaatgcggtacttctgaaccgcgccaatttcctaggatttagaagtcacttcgttataagggtgaacttgataattgcgaccgggacaaaat

SEQ ID NO: 44814 - DNA, 96 bp, Fusarium phaseoli
  misc_feature: 30
cataccgagccaacggtcagatcgagaaggcaacagaactgctagagcatgtggttgcgattcaggagaagacattagcggagaatcacccaaatc

SEQ ID NO: 44815 - DNA, 96 bp, Fusarium phaseoli
  misc_feature: 30
gaacgaactttacaagcatagaggagtacaattatatagcgacgttgagttgtaccatgttgttggacgtggttaaagagatgtgttgattgaatc

SEQ ID NO: 44816 - DNA, 96 bp, Fusarium phaseoli
  misc_feature: 30
gataataaccctctactttatcccccctattctcccttctgctctgaccaccgtctctccaaccgcgtaataacctggcatccacggcttgctttt

SEQ ID NO: 44817 - DNA, 96 bp, Fusarium phaseoli
  misc_feature: 30
gaggttaatttacggttagggataaagtgaatattaaatatgaggaaggaggggtaagatacggcgaattttaaggtagagttagataagcggagt

SEQ ID NO: 44818 - DNA, 96 bp, Fusarium phaseoli
  misc_feature: 30
aattaatcagatgccgtgaaatggccctatgcccctccctgcgagggtagctttacgggagacgtattaacgggggtaaacccacctagctggctc

SEQ ID NO: 44819 - DNA, 96 bp, Fusarium phaseoli
  misc_feature: 30
atccaatcggacccatcaaagcattcgggctcgtgacaagtagtagtagtagtagtagtagtagtaggttttattacgcccgggagaactaatctc

SEQ ID NO: 44820 - DNA, 96 bp, Fusarium phaseoli
  misc_feature: 30
catatagatcatcaatcaacttgcccagaacaatctgcctcctcctctcaatctgttctagttcagttagcccttgttttgcttaagaatcgagtc

SEQ ID NO: 44821 - DNA, 96 bp, Fusarium phaseoli
  misc_feature: 30
gacaatggatggagtcgaagaagacgacgatggtgtggacgacaaccctaccaattattgtaaacgtgccttgaccaaggcacatttaatttgtat

SEQ ID NO: 44822 - DNA, 96 bp, Fusarium phaseoli
  misc_feature: 30
atcacaggatgcatgaacataactcctcgctccggtctccaatctctccgcatagagcaacaaacggccattcaatctatgcgtctctcaaaattc

SEQ ID NO: 44823 - DNA, 96 bp, Fusarium phaseoli
  misc_feature: 30
gaaaggaagcgagtgttgggaacaagtccgacgaggtatatatatagtgaaatcggcagtcattttaggacacttcacgatgaggcgaaactgact

SEQ ID NO: 44824 - DNA, 96 bp, Fusarium phaseoli
  misc_feature: 30
gaaagcgcaggtaatccgagggtaaagctcaggatataactaatcaatttccaccctatcacacttcgtcttaagcataagccttctaagaagcat

SEQ ID NO: 44825 - DNA, 96 bp, Fusarium phaseoli
  misc_feature: 30
atgccgtgttgagcgtgtggatcccgtcctttgcagcagagtataacgaggaaatgggagctgttgatatcggtgaccaacttcgtgccccttttc

SEQ ID NO: 44826 - DNA, 96 bp, Fusarium phaseoli
  misc_feature: 30
aataagatctgttatgtaagctcgatgtgtgtgagtgtaagagagatctctcttcaatccacagggtgtcgcactgagcgtgctaaaaggatcaag

SEQ ID NO: 44827 - DNA, 96 bp, Fusarium phaseoli
  misc_feature: 30
cttctttcacggagtcgaatccctgaagggagcagatgagatgcgtctagacatacggcatcccaccattccgcaccagtcgtgtcattgaccagt

SEQ ID NO: 44828 - DNA, 96 bp, Fusarium phaseoli
  misc_feature: 30
cttcgagaagctggaattgaatatgatgacctcaaagacaacggggcactactgggcgatgctggagatgaactccaccaggacctcaccgacatt

SEQ ID NO: 44829 - DNA, 96 bp, Fusarium phaseoli
  misc_feature: 30
aggcctagctcggccagacttgaacaaaagtatatgtgagcatcttggatctacaatgaagccttctcagaaactcctgatcttctgttctcacag

SEQ ID NO: 44830 - DNA, 96 bp, Fusarium phaseoli
  misc_feature: 30
atcgataatgagcagcagtagtgtgttgattgattgttatctgaggtttctcttgtgcggggtattccatcccgcagagttacttaaagcatacag

SEQ ID NO: 44831 - DNA, 96 bp, Fusarium phaseoli
  misc_feature: 30
agatacgaccaagagagataccaccaagagagatgccaccaagagagatgccaccaaagaggcatgcaaccaagatacagccacaatccagaccag

SEQ ID NO: 44832 - DNA, 96 bp, Fusarium phaseoli
  misc_feature: 30
ctggtctagtcacgtcaggaattggtccttgttgtctccttggagtggcaagatctcgatctagtcgcagaagttggtaggggctgtacctggtat

SEQ ID NO: 44833 - DNA, 96 bp, Fusarium phaseoli
  misc_feature: 30
ctgacgctcagtataccttgcatgcgtgtctgccagggagctagcgtgtaaggctgaatcactcccatggtgccctttggtgtttccttgcaaacg

SEQ ID NO: 44834 - DNA, 96 bp, Fusarium phaseoli
  misc_feature: 30
ctgacaactcagccagcatcaaacgggagcggtctcggcaaccgaggacccatgcccggaaccaaagtttgcgcggctcgacgggctccttgtact

SEQ ID NO: 44835 - DNA, 96 bp, Fusarium phaseoli
  misc_feature: 30
acaacacgacaacggacatgcagtggccctatgccagagtgtgggggcagagacgtgcgtgacgcgtgatgttcggggaatcccgacgatgaagag

SEQ ID NO: 44836 - DNA, 96 bp, Fusarium phaseoli
  misc_feature: 30
caatcaaaagcaggtactacttcagccgccgaaaataggaaactaaatacttagatgaattaggcttcaagttgacttactactaaccttcacgag

SEQ ID NO: 44837 - DNA, 96 bp, Fusarium phaseoli
  misc_feature: 30
aggaagaagccaatctctgacaaagggttccgaacatgtacggagcaaagcgcgaggaacgtgccagacaacttggaaacacgcacctccgccgag

SEQ ID NO: 44838 - DNA, 96 bp, Fusarium phaseoli
  misc_feature: 30
ctcggacaatgcggaaccaacgggttgcacgaagacattgttagcgccgtggaagatgaaagaagaatcgcagctattctcgaagcgatggacgtg

SEQ ID NO: 44839 - DNA, 96 bp, Fusarium phaseoli
  misc_feature: 30
cggaaagtttgaatgaatgaatgatgcgatgagctgagctgagcgtgaaaagtaccggtagaagcagggacgtttctaagttaaaaagacaaggag

SEQ ID NO: 44840 - DNA, 96 bp, Fusarium phaseoli
  misc_feature: 30
atcgatcgtatagatcgattccgagccctgatcgatcgattcatatcgagcgtcaccttgtttgtttgtttgtttgtttgtttgtttgtttcatag

SEQ ID NO: 44841 - DNA, 96 bp, Fusarium phaseoli
  misc_feature: 30
accatctcagccgttcttctcattaagtatcgaatcgactgttgagtcgttacgaaactgccaaccatcaaagcactacagttcagtgcaggatag

SEQ ID NO: 44842 - DNA, 96 bp, Fusarium phaseoli
  misc_feature: 30
cgaggagcaagggcagggcgtaagggtgacggggaaccaaagagtaagtaaaggcctgaccctgactctgaccttgaccttgaccttgacccttag

SEQ ID NO: 44843 - DNA, 96 bp, Fusarium phaseoli
  misc_feature: 30
cgttttaaacggaacgaacgaacgaacgaacgaacgaaagtgcccatgtatgctcggccgtggattcctcgcaaagccgatatccctcgtaatcct

SEQ ID NO: 44844 - DNA, 96 bp, Fusarium phaseoli
  misc_feature: 30
cgtttgtaggtgaagggcttcctataggaatgcaacagccgaatgagttcttcacatagctagctcatccagcagtgcatctttcagctggtttgt

SEQ ID NO: 44845 - DNA, 96 bp, Fusarium phaseoli
  misc_feature: 30
caagggcggctgggacagtctatgaataaaacaaacaaacaaacaaacaaacatggccggaactgaaaagagatcaattgccatccgcgacagacg

SEQ ID NO: 44846 - DNA, 96 bp, Fusarium phaseoli
  misc_feature: 30
catgtaactcctcgtgctcgctgtgccaccaagatccggaataccacccccttatactgacactcctttccgcttgctctccgaaataaccgtccg

SEQ ID NO: 44847 - DNA, 96 bp, Fusarium phaseoli
  misc_feature: 30
cgctactcgtaaagcaggtgctttggagcaagtccatctgctggtggagttcgaaatctgccgtccacttgactcagagtaagccgtccgagttat

SEQ ID NO: 44848 - DNA, 96 bp, Fusarium phaseoli
  misc_feature: 30
cactctgaggaaaggaagcgagtgttgggaacaagtccgacgaggtatatatatagtgaaatcggcagtcattttaggacacttcacgatgaggcg

SEQ ID NO: 44849 - DNA, 96 bp, Fusarium phaseoli
  misc_feature: 30
cgaggaggtaccagttgagttgaattggttgattacgcactctgacgagataccgagcttgttacacagagatagtcgagggtaaacaaatccctt

SEQ ID NO: 44850 - DNA, 96 bp, Fusarium phaseoli
  misc_feature: 30
cgacacatccataaaggagcaagaacgagctcggaacggcactggcggcacaccaaccctcaaaaacacaggaagaattgcgacgaaccacgaagg

SEQ ID NO: 44851 - DNA, 96 bp, Fusarium phaseoli
  misc_feature: 30
cgaaggtgataagggaggaagcacgaccactttttcagccggagaacgcattcagtggtggcgagagcgcaattcgtgcacgagcaccacataagg

SEQ ID NO: 44852 - DNA, 96 bp, Fusarium phaseoli
  misc_feature: 30
cccgctccctccctcgcttcctaggttatactaaggcctaagggtcaaggtcaaggtcaaggtcagagtcagggtcaggcctttacttactctttg

SEQ ID NO: 44853 - DNA, 96 bp, Fusarium phaseoli
  misc_feature: 30
aggtgcctccaaatccagtggcgcatttttccaagagcgagagtaagacattaaccgaggacttgttaggcaactattagtgggcgtggtaatggg

SEQ ID NO: 44854 - DNA, 96 bp, Fusarium phaseoli
  misc_feature: 30
ccagtgggcagaagatggggcattttggccgatgtttccagtaggcgttagcacccaccgagagcagtaaggaggatggaggtgaaataccgaggt

SEQ ID NO: 44855 - DNA, 96 bp, Fusarium phaseoli
  misc_feature: 30
cattctccccaaattcctggcatccgggcgaacctgaggttgacaagatacagacagtatctgtgaagacctagcacgggctgaataccgtcatct

SEQ ID NO: 44856 - DNA, 96 bp, Fusarium phaseoli
  misc_feature: 30
catccaatcggacccatcaaagcattcgggctcgtgacaagtagtagtagtagtagtagtagtagtaggttttattacgcccgggagaactaatct

SEQ ID NO: 44857 - DNA, 96 bp, Fusarium phaseoli
  misc_feature: 30
agggatttttgatccgcatgcttgtctgatccgcatgcttgtctgatccgcatgcttatcatgcacgttagtcccattgtttaaaagtctcgtatg

SEQ ID NO: 44858 - DNA, 96 bp, Fusarium phaseoli
  misc_feature: 30
cacgcacttaggagattggttgggaaaacacattcgttaggactgatttaatggcaaacatgctgaagcttgaatgctgacatgacctctttgatt

SEQ ID NO: 44859 - DNA, 96 bp, Fusarium phaseoli
  misc_feature: 30
caccttacgaggactttatagtctatatccttcagtcctttacacttctgagaccctttctagcttatataagctatctttacttagccccacttt

SEQ ID NO: 44860 - DNA, 96 bp, Fusarium phaseoli
  misc_feature: 30
acttcgagaagctggaattgaatatgatgacctcaaagacaacggggcactactgggcgatgctggagatgaactccaccaggacctcaccgacat

SEQ ID NO: 44861 - DNA, 96 bp, Fusarium phaseoli
  misc_feature: 30
atcttccttatttctcctctttttctctctttttctttatatttcttttattcttttcttacctcttacctcttttccctctttttattttctttt

SEQ ID NO: 44862 - DNA, 96 bp, Fusarium phaseoli
  misc_feature: 30
atcttactcagccagaaatgacaggagtaatgagtgttttccggaatttctgtaaagatgacggtatgatagtaatacaagtacgattaccaagct

SEQ ID NO: 44863 - DNA, 96 bp, Fusarium phaseoli
  misc_feature: 30
atcgataccattcccaccggaaatctcccttgacgaggcgcagcatgcgaccctccacacaggaaacacctccccaggatcagacaacatcacggt

SEQ ID NO: 44864 - DNA, 96 bp, Fusarium phaseoli
  misc_feature: 30
atcctatcctagctgcgcggcggattcgctagcaaatccaatgggtttcccatacaaaaaaaaaaggcgctatcctatcctagctgcgcggcggat

SEQ ID NO: 44865 - DNA, 96 bp, Fusarium phaseoli
  misc_feature: 30
acacgcacttaggagattggttgggaaaacacattcgttaggactgatttaatggcaaacatgctgaagcttgaatgctgacatgacctctttgat

SEQ ID NO: 44866 - DNA, 96 bp, Fusarium phaseoli
  misc_feature: 30
aaccacaagacctttctctttcttttaatcaagacgcattctctacctttaacatcagccatcccactgactgctttattcatccagctgcagtat

SEQ ID NO: 44867 - DNA, 96 bp, Fusarium phaseoli
  misc_feature: 30
ataaccacaagacctttctctttcttttaatcaagacgcattctctacctttaacatcagccatcccactgactgctttattcatccagctgcagt

SEQ ID NO: 44868 - DNA, 96 bp, Fusarium phaseoli
  misc_feature: 30
agttcatctggggactctgacgaggagatgcctaatgctatatcctctgggtcaaataattaattaactaagaccaaccccgtgagcatgggacct

SEQ ID NO: 44869 - DNA, 96 bp, Fusarium phaseoli
  misc_feature: 30
acggaaaagtccctccggaatcaattacggccaaaacaccatagaattcattccaaagagacttatgacttctcaatcaattcccggcgaagcact

SEQ ID NO: 44870 - DNA, 96 bp, Fusarium phaseoli
  misc_feature: 30
aaatggcgcacctggcttagcctacggggctgactcacccagcacacccagatgatctgagatctccgatctccagagagaagggcttgaactcct

SEQ ID NO: 44871 - DNA, 96 bp, Fusarium phaseoli
  misc_feature: 30
agaaagagtctcaaggggatctatctaatcaaccggttaccaagacgtttaatcagctcaaagaagccacgctcagcttctacatatctctactct

SEQ ID NO: 44872 - DNA, 96 bp, Fusarium phaseoli
  misc_feature: 30
aagtttggccaattcctcatcgagtcccaccgttgcttcatccatgctgtcgaggccttcccagtcgcgtaaccagcggagttgctcacgctttct

SEQ ID NO: 44873 - DNA, 96 bp, Fusarium phaseoli
  misc_feature: 30
acttcctcctagtgcaagggcccaagggccaacagaatgttactctcgataacgctctgtatgttccggaaggatgctcaaacctactgtccgtgt

SEQ ID NO: 44874 - DNA, 96 bp, Fusarium phaseoli
  misc_feature: 30
acgcgcttgattacatgaaaacttttcattcacacaggtcgcacccgagtgagttttagtccagcggtgtgacctacaaatggcctaggaacaatt

SEQ ID NO: 44875 - DNA, 96 bp, Fusarium phaseoli
  misc_feature: 30
acaccttacgaggactttatagtctatatccttcagtcctttacacttctgagaccctttctagcttatataagctatctttacttagccccactt

SEQ ID NO: 44876 - DNA, 96 bp, Fusarium phaseoli
  misc_feature: 29
ggaatgaaagttttgttgttcctggatctctggggccaccaaagcctgtaacgtactccacaagcgagtgaaccagacaagcgagtgaatcaaaaa

SEQ ID NO: 44877 - DNA, 96 bp, Fusarium phaseoli
  misc_feature: 29
aggtaagcgggaggttatgaaggttgccggagagcaaggggcaaaagggcgggggcagttagggactagtaacctctggcgttaagagttagaaaa

SEQ ID NO: 44878 - DNA, 96 bp, Fusarium phaseoli
  misc_feature: 29
agaggaggatgctatctccccaatgcgtgcggacctccactgtggtcgcgacaagggattatggccaattaaaatgcacgaaataaagtgtacaaa

SEQ ID NO: 44879 - DNA, 96 bp, Fusarium phaseoli
  misc_feature: 29
tttgcagacacgggccacagaagcgcagcatgtgccgtggcgtaccggagtccagagccagcggttgttccgcaatgggccggccagcgggtgggt

SEQ ID NO: 44880 - DNA, 96 bp, Fusarium phaseoli
  misc_feature: 29
gggttaagtggttgtggtgaaggttagggggagtggttgtggtgaaggttagggggagtggttgagttgagggttagggggaggggttgagataaa

SEQ ID NO: 44881 - DNA, 96 bp, Fusarium phaseoli
  misc_feature: 29
cgtattataccgtgccgtcaaggtaccggtattgtcacccaaggtcaatcaaagaggtcatgtcagcattcaagcttcagcatgtttgccattaaa

SEQ ID NO: 44882 - DNA, 96 bp, Fusarium phaseoli
  misc_feature: 29
accaacaagcaaccaacaagcaaccaacaagcaaccaacaagcaaccaacaagcaaccaacaagcaaccaacaagcaaccaacaagcgaccaacaa

SEQ ID NO: 44883 - DNA, 96 bp, Fusarium phaseoli
  misc_feature: 29
ttgttggacgtggttaaagagatgtgttgattgaatcaattatgattgttcctagtgaggttgtcagtaatgggagatccctcaatgcattctatc

SEQ ID NO: 44884 - DNA, 96 bp, Fusarium phaseoli
  misc_feature: 29
ttgggttgggttgggttgggttgggtttggcggtttgttggaataaatcacttacgacgtcttttttgggttccactgcgaatctcctcaggagga

SEQ ID NO: 44885 - DNA, 96 bp, Fusarium phaseoli
  misc_feature: 29
ttgcgaacgcaacagttatgccaggagaacgtggaacctacttcctcctagtgcaagggcccaagggccaacagaatgttactctcgataacgctc

SEQ ID NO: 44886 - DNA, 96 bp, Fusarium phaseoli
  misc_feature: 29
ttgatctttatcttcccgacctatcaaaaatcctatctcgctccgccctcagaaactttcgttcctcaaggctctatgtgcaagccccggcttgcc

SEQ ID NO: 44887 - DNA, 96 bp, Fusarium phaseoli
  misc_feature: 29
ttacaggtaaataacaccttagtccccttaaactaaccctcataaccacccgctccctccctcgcttcctaggttatactaaggcctaagggtcaa

SEQ ID NO: 44888 - DNA, 96 bp, Fusarium phaseoli
  misc_feature: 29
ttgaagagagatctctcttacactcacacacatcgagcttacataacagatcttatttgcaccggcccccgtgcaggtatgagctccccaagtgta

SEQ ID NO: 44889 - DNA, 96 bp, Fusarium phaseoli
  misc_feature: 29
gtgttttccaagggggctatcctgcactgaactgtagtgctttgatggttggcagtttcgtaacgactcaacagtcgattcgatacttaatgagaa

SEQ ID NO: 44890 - DNA, 96 bp, Fusarium phaseoli
  misc_feature: 29
ttcccatataatatagcgtttacgtttatatagaaaagctattttttattaagttatagcggttatttcctgacttagtcttgattttttttttac

SEQ ID NO: 44891 - DNA, 96 bp, Fusarium phaseoli
  misc_feature: 29
ttcatttacagagagagaaaggtaaccaactccagaaaacagaccaatttatttcccagcgggcatttcgaatctacccaaaatccagctccaggc

SEQ ID NO: 44892 - DNA, 96 bp, Fusarium phaseoli
  misc_feature: 29
agcgggaggttatgaaggttgccggagagcaaggggcaaaagggcgggggcagttagggactagtaacctctggcgttaagagttagaaaagtgaa

SEQ ID NO: 44893 - DNA, 96 bp, Fusarium phaseoli
  misc_feature: 29
ttcaatgactcgcaaaaggggcccttgattcgcaaaaatgcggtacttctgaaccgcgccaatttcctaggatttagaagtcacttcgttataagg

SEQ ID NO: 44894 - DNA, 96 bp, Fusarium phaseoli
  misc_feature: 29
tgactaagcagcctttctcggcagcttagataagagctcagtctcttacattattaaaggttaataattaaaagattagactaaaagaattaataa

SEQ ID NO: 44895 - DNA, 96 bp, Fusarium phaseoli
  misc_feature: 29
agcccctcgaccccttgggccttaaggaccctaaagactatgcttgaggcccaatctcaatctaaataccttaagagacggattaaaaggcactaa

SEQ ID NO: 44896 - DNA, 96 bp, Fusarium phaseoli
  misc_feature: 29
ggataaggtcgaggttgaccgattccggcagtatctagcaagatagctagcgtaggggtgtatctattattagctgcttaatgctagactatctaa

SEQ ID NO: 44897 - DNA, 96 bp, Fusarium phaseoli
  misc_feature: 29
taacacgctcatcgtcggcgccggtgaacacggttgacaagaataacacaagcttgttgtccttccaagcgatttggttgacctagggatacgtaa

SEQ ID NO: 44898 - DNA, 96 bp, Fusarium phaseoli
  misc_feature: 29
taaacgttttaaacggaacgaacgaacgaacgaacgaacgaaagtgcccatgtatgctcggccgtggattcctcgcaaagccgatatccctcgtaa

SEQ ID NO: 44899 - DNA, 96 bp, Fusarium phaseoli
  misc_feature: 29
ttaatcagatgccgtgaaatggccctatgcccctccctgcgagggtagctttacgggagacgtattaacgggggtaaacccacctagctggctctt

SEQ ID NO: 44900 - DNA, 96 bp, Fusarium phaseoli
  misc_feature: 29
ttaatatactctatactagcctatcttatatttataatcggcgcgaaggtagaaattaaggaagaaggggatcttaataggatactcgctatttaa

SEQ ID NO: 44901 - DNA, 96 bp, Fusarium phaseoli
  misc_feature: 29
ttaagatgaggtggtcaagataaggtagttaagatgaggtagttaagataaaggcggattataagagaagtaggaggttaatttacggttagggat

SEQ ID NO: 44902 - DNA, 96 bp, Fusarium phaseoli
  misc_feature: 29
ttaacgccagaggttactagtccctaactgcccccgcccttttgccccttgctctccggcaaccttcataacctcccgcttacctcttgacttccc

SEQ ID NO: 44903 - DNA, 96 bp, Fusarium phaseoli
  misc_feature: 29
aaaaaaaggagagagaaataaaggagagaaaaaaaagaattaagaaattaatagaaaaataaaaaaataaggtaaataatattaattaagggttaa

SEQ ID NO: 44904 - DNA, 96 bp, Fusarium phaseoli
  misc_feature: 29
tgtggtattatatataaggtgggaggagataataataataatgaggacgttaagtaaggaatagataggttagggtaagagggagtataagagggt

SEQ ID NO: 44905 - DNA, 96 bp, Fusarium phaseoli
  misc_feature: 29
tgtcaggaaacggctctaagtctcatgacgtaagaccagttcacgtctccacataggtcaaaggggtatggctccggatcccggtaatcgaaaaac

SEQ ID NO: 44906 - DNA, 96 bp, Fusarium phaseoli
  misc_feature: 29
tgtcaatgaggttgtaagccagagaaagtgtcgattgtttatttctctttgctctaaggacaaaatatggaaacagagtaatgtatgagagaagac

SEQ ID NO: 44907 - DNA, 96 bp, Fusarium phaseoli
  misc_feature: 29
tctatactgatctgattaattgattgcctttgttcctcttttactcacactacttcccagcatattagcgggcagattgtttgaaaacctcataca

SEQ ID NO: 44908 - DNA, 96 bp, Fusarium phaseoli
  misc_feature: 29
tgtaactcctcgtgctcgctgtgccaccaagatccggaataccacccccttatactgacactcctttccgcttgctctccgaaataaccgtccgtc

SEQ ID NO: 44909 - DNA, 96 bp, Fusarium phaseoli
  misc_feature: 29
tggtgaaggttagggggagtggttgagttgagggttagggttaagtggttgtggtgaaggttagggggagtggttgtggtgaaggttagggggggg

SEQ ID NO: 44910 - DNA, 96 bp, Fusarium phaseoli
  misc_feature: 29
cacttctttcacggagtcgaatccctgaagggagcagatgagatgcgtctagacatacggcatcccaccattccgcaccagtcgtgtcattgacca

SEQ ID NO: 44911 - DNA, 96 bp, Fusarium phaseoli
  misc_feature: 29
tgggccggcttgcttatttaacttgcaccttcactattcgtattttataaataacggccggtgactatacttcattcacttctctaatcactttct

SEQ ID NO: 44912 - DNA, 96 bp, Fusarium phaseoli
  misc_feature: 29
aaagtttgaatgaatgaatgatgcgatgagctgagctgagcgtgaaaagtaccggtagaagcagggacgtttctaagttaaaaagacaaggagcca

SEQ ID NO: 44913 - DNA, 96 bp, Fusarium phaseoli
  misc_feature: 29
tcattatcgtttacctgacccttaatccttttagcacgctcagtgcgacaaaacccctcgagacaaaggaattgccttcgtctttcgacgccgcca

SEQ ID NO: 44914 - DNA, 96 bp, Fusarium phaseoli
  misc_feature: 29
tgccagtaaagaagcatgcgaccaagagagatgcgaccaagagagatgcgaccaagagagatgccaccaagagagatgccaccaagagagatgcca

SEQ ID NO: 44915 - DNA, 96 bp, Fusarium phaseoli
  misc_feature: 29
ggtagctcagtaccgcataggcatcattcaacacaattagtcatcagctctcttacaagaggctatgaacgatcgctatatttggtatcatctcca

SEQ ID NO: 44916 - DNA, 96 bp, Fusarium phaseoli
  misc_feature: 29
tcatttacagagagagaaaggtaaccaactccagaaaacagaccaatttatttcccagcgggcatttcgaatctacccaaaatccagctccaggca

SEQ ID NO: 44917 - DNA, 96 bp, Fusarium phaseoli
  misc_feature: 29
gttttccaggatgattcgattgagaacctctgccaatctattttgatcgtgttgctccgttgctgtgtaagagagtttaattcctctgtcccggca

SEQ ID NO: 44918 - DNA, 96 bp, Fusarium phaseoli
  misc_feature: 29
tccagagagacagataacagttatgatccatccgtggatactatgctgcgattctattatgaaatagttaccgaacacttcgaagatagaagggca

SEQ ID NO: 44919 - DNA, 96 bp, Fusarium phaseoli
  misc_feature: 29
tgccccgagcacacaggacctgtgcgcctcgacggcgccctacacttggggagctcatacctgcacgggggccggtgcaaataagatctgttatgt

SEQ ID NO: 44920 - DNA, 96 bp, Fusarium phaseoli
  misc_feature: 29
gtcaagccgtcagccagcatatcgccggtaggtgtgtatgcgaccttgatcgtcttttgagaaacagcttgtcttagccaatggttgtgaatatca

SEQ ID NO: 44921 - DNA, 96 bp, Fusarium phaseoli
  misc_feature: 29
tccaatcggacccatcaaagcattcgggctcgtgacaagtagtagtagtagtagtagtagtagtaggttttattacgcccgggagaactaatctca

SEQ ID NO: 44922 - DNA, 96 bp, Fusarium phaseoli
  misc_feature: 29
gttacaggtaaataacaccttagtccccttaaactaaccctcataaccacccgctccctccctcgcttcctaggttatactaaggcctaagggtca

SEQ ID NO: 44923 - DNA, 96 bp, Fusarium phaseoli
  misc_feature: 29
tgaatagcaatgagcccggaggttattgccgagcaagtgattagagaagtgaatgaagtatagtcaccggccgttatttataaaatacgaataatg

SEQ ID NO: 44924 - DNA, 96 bp, Fusarium phaseoli
  misc_feature: 29
cgttaacacacttctaaattaggcaattagtgcagcgtgtgttgatggcccaaggagactcaaggccgcttggcaagcattggattgaccggttca

SEQ ID NO: 44925 - DNA, 96 bp, Fusarium phaseoli
  misc_feature: 29
tctttcacggagtcgaatccctgaagggagcagatgagatgcgtctagacatacggcatcccaccattccgcaccagtcgtgtcattgaccagtcc

SEQ ID NO: 44926 - DNA, 96 bp, Fusarium phaseoli
  misc_feature: 29
tctttattatcttcgaactagctatagagcttgacgtattattgcatgggtacttaggcattccgtactatattaagatagacggctagcgttatg

SEQ ID NO: 44927 - DNA, 96 bp, Fusarium phaseoli
  misc_feature: 29
tctttaacgatctgtccttccccaactgggcctcagttagaatggaagttggtaagaatccgaaagcctagggtggcaaagttcgacaacttgctc

SEQ ID NO: 44928 - DNA, 96 bp, Fusarium phaseoli
  misc_feature: 29
ggaggaaatttgtatggtacagttttgtacgtacagaaaagttgtacgtacgtacagctacccaaaatacagtacgtacgtacgtacgtgtacaga

SEQ ID NO: 44929 - DNA, 96 bp, Fusarium phaseoli
  misc_feature: 29
ggaaaagtgattcactcacttgtttgattcactcgcttgtggagtacgttacgtgataagcgaatgtcgcagataagcgaatatcgcacgccgaga

SEQ ID NO: 44930 - DNA, 96 bp, Fusarium phaseoli
  misc_feature: 29
ccaaatacccagataactcttaggtgttatgcgagctagatttaaccttggaatgaatagaagcttcacattgcatcatattaacgtcacttgaga

SEQ ID NO: 44931 - DNA, 96 bp, Fusarium phaseoli
  misc_feature: 29
aagaggtaagcgggaggttatgaaggttgccggagagcaaggggcaaaagggcgggggcagttagggactagtaacctctggcgttaagagttaga

SEQ ID NO: 44932 - DNA, 96 bp, Fusarium phaseoli
  misc_feature: 29
atgcggaaccaacgggttgcacgaagacattgttagcgccgtggaagatgaaagaagaatcgcagctattctcgaagcgatggacgtgcttttaga

SEQ ID NO: 44933 - DNA, 96 bp, Fusarium phaseoli
  misc_feature: 29
tattccaaaagatataaaaataaaaataaatgatgagatcgagaaaataaaagcgtttcttccccaggtctacggtcgcacacgtacggtgggcga

SEQ ID NO: 44934 - DNA, 96 bp, Fusarium phaseoli
  misc_feature: 29
atgacgtcccgtcaatacgcagtcgcgtaacaaatactcgggctccaacctcgtaatgtgcctccgcacaaacagaagatgcaaaaccagcctcga

SEQ ID NO: 44935 - DNA, 96 bp, Fusarium phaseoli
  misc_feature: 29
tccttttagcacgctcagtgcgacaccctgtggattgaagagagatctctcttacactcacacacatcgagcttacataacagatcttatttgcac

SEQ ID NO: 44936 - DNA, 96 bp, Fusarium phaseoli
  misc_feature: 29
gaacgaattaccagcacgactgcgtacagtagggtggggtcgtgatccatcggatctaggggccaaggtgtctagatctgggagattcaacgagga

SEQ ID NO: 44937 - DNA, 96 bp, Fusarium phaseoli
  misc_feature: 29
tcctaccagatcgagattacgtgggcgccctcactgatgcgctgtccttgaagtgcagtggagcacatgctcaaccaccggtcatgccgtattata

SEQ ID NO: 44938 - DNA, 96 bp, Fusarium phaseoli
  misc_feature: 29
gttaagatgaggtggtcaagataaggtagttaagatgaggtagttaagataaaggcggattataagagaagtaggaggttaatttacggttaggga

SEQ ID NO: 44939 - DNA, 96 bp, Fusarium phaseoli
  misc_feature: 29
agccatcaacattccatatggtcacccaattttcgaacaagccctccttgcttttgaacagtcggaggatttgaacgtccgtccggggatcttgga

SEQ ID NO: 44940 - DNA, 96 bp, Fusarium phaseoli
  misc_feature: 29
gacactgcagcaaaataccatcgaccggctgagacactcaattgactgaacctgacagaccccttttcacctttgttctgtcgcgtcatatcatga

SEQ ID NO: 44941 - DNA, 96 bp, Fusarium phaseoli
  misc_feature: 29
tcatcttgtgcgcatctatactgatctgattaattgattgcctttgttcctcttttactcacactacttcccagcatattagcgggcagattgttt

SEQ ID NO: 44942 - DNA, 96 bp, Fusarium phaseoli
  misc_feature: 29
tcatcgttaccacagtggaggtccgcacgcactcaggagatagggtctcagggagcgtgactgtgaacggtcgcattgtaagtctacttactcctt

SEQ ID NO: 44943 - DNA, 96 bp, Fusarium phaseoli
  misc_feature: 29
gatacactctgaggaaaggaagcgagtgttgggaacaagtccgacgaggtatatatatagtgaaatcggcagtcattttaggacacttcacgatga

SEQ ID NO: 44944 - DNA, 96 bp, Fusarium phaseoli
  misc_feature: 29
tcagttctaccggggccgaccgcctggtccctcacggggttataacacgggccgtgatactaagcgcgtctagtaaggaagagatgctcctctctt

SEQ ID NO: 44945 - DNA, 96 bp, Fusarium phaseoli
  misc_feature: 29
taaggaggaagataagtaccgcccaagttcatctggggactctaacgaggagatgcctaataccacatcctctgggtcaaataatcaattgactga

SEQ ID NO: 44946 - DNA, 96 bp, Fusarium phaseoli
  misc_feature: 29
tcaatgactcgcaaaaggggcccttgattcgcaaaaatgcggtacttctgaaccgcgccaatttcctaggatttagaagtcacttcgttataaggg

SEQ ID NO: 44947 - DNA, 96 bp, Fusarium phaseoli
  misc_feature: 29
tattccttgatctggaagacagaatcgctgcacccgcttttgcataagaacggccacttctttctgtggagctcattcacagaagacaagtgctgg

SEQ ID NO: 44948 - DNA, 96 bp, Fusarium phaseoli
  misc_feature: 29
tagcaaatccaatgggtttcccatacaaaaaaaaaaggcgctatcctatcctagctgcgcggcggattcgctagcaaatccaatgggtttcccata

SEQ ID NO: 44949 - DNA, 96 bp, Fusarium phaseoli
  misc_feature: 29
tatgctcggccgtggattcctcgcaaagccgatatccctcgtaatcctgctcccgggcaattcgcttgaactgttcactccgctgcggcgatgaac

SEQ ID NO: 44950 - DNA, 96 bp, Fusarium phaseoli
  misc_feature: 29
agacatcgcgactctacaaacgaagctccgccacgttgatattcacaaccattggctaagacaagctgtttctcaaaagacgatcaaggtcgcata

SEQ ID NO: 44951 - DNA, 96 bp, Fusarium phaseoli
  misc_feature: 29
acgaattaccagcacgactgcgtacagtagggtggggtcgtgatccatcggatctaggggccaaggtgtctagatctgggagattcaacgaggata

SEQ ID NO: 44952 - DNA, 96 bp, Fusarium phaseoli
  misc_feature: 29
gtttaattaataaattttagggaagtttaattaaaatatctaataatttatttctaaagttagtgattaattagtaattaataataacctcctata

SEQ ID NO: 44953 - DNA, 96 bp, Fusarium phaseoli
  misc_feature: 29
tataaccacaagacctttctctttcttttaatcaagacgcattctctacctttaacatcagccatcccactgactgctttattcatccagctgcag

SEQ ID NO: 44954 - DNA, 96 bp, Fusarium phaseoli
  misc_feature: 29
tagttagtaaggtaatattagcccgtattaataatgaatagcgagatcgcttagctatccgcattaatcgcctaaataactgtaatctattcctag

SEQ ID NO: 44955 - DNA, 96 bp, Fusarium phaseoli
  misc_feature: 29
agaataaagacaaaaaaccacagcattcgtttctacggtccaatagggcaatagggcaaccatacatacacacatgtagactatacatgtagacta

SEQ ID NO: 44956 - DNA, 96 bp, Fusarium phaseoli
  misc_feature: 29
taggcgttagcacccaccgagagcagtaaggaggatggaggtgaaataccgagttttgagagtggggtggttttaaacggaggggcgacggcgggg

SEQ ID NO: 44957 - DNA, 96 bp, Fusarium phaseoli
  misc_feature: 29
tagcgccatttctacttgtatgaggttttcaaacaatctgcccgctaatatgctgggaagtagtgtgagtaaaagaggaacaaaggcaatcaatta

SEQ ID NO: 44958 - DNA, 96 bp, Fusarium phaseoli
  misc_feature: 29
gttgtttagagggcacgcctgtctcaatccacgtctggatgccgactttattccggccacaaggactaacctcatagggactagtacgctaggcta

SEQ ID NO: 44959 - DNA, 96 bp, Fusarium phaseoli
  misc_feature: 29
catgacaggactgaaggaaaaggggaaaaaagatgggtaaaaaagagacagaatgcattttaaaaatgcaaaacagaatcagcaaagctcgctcta

SEQ ID NO: 44960 - DNA, 96 bp, Fusarium phaseoli
  misc_feature: 29
cgaatacatactgtctgcagtccccaagcacataatgccctcgataaacgagcccaaaatagaacaacgaaagtcttgataggccaaagcgttcta

SEQ ID NO: 44961 - DNA, 96 bp, Fusarium phaseoli
  misc_feature: 29
tagaaagagtctcaaggggatctatctaatcaaccggttaccaagacgtttaatcagctcaaagaagccacgctcagcttctacatatctctactc

SEQ ID NO: 44962 - DNA, 96 bp, Fusarium phaseoli
  misc_feature: 29
taccaagcagccccctggtctttaatagcgccatttctacttgtatgaggttttcaaacaatctgcccgctaatatgctgggaagtagtgtgagta

SEQ ID NO: 44963 - DNA, 96 bp, Fusarium phaseoli
  misc_feature: 29
cacatattcaacatcaaccaatggaccgaatgcacgtactgtctgacacaaccccatcgggcactctataaagtcccatgacaagcttgaaacgta

SEQ ID NO: 44964 - DNA, 96 bp, Fusarium phaseoli
  misc_feature: 29
cctctggtctggattgtggctgtatcttggttgcatgcctctttggtggcatctctcttggtggcatctctcttggtggtatctctcttggtcgta

SEQ ID NO: 44965 - DNA, 96 bp, Fusarium phaseoli
  misc_feature: 29
aagaggacgaggacgaggatgacagtgaagacgaagatgaagatgaagatgaagatggagatgaagatggagatggagatgatgaggatgaaggta

SEQ ID NO: 44966 - DNA, 96 bp, Fusarium phaseoli
  misc_feature: 29
tacctcatcttaactaccttatcttgaccacctcatcttaactaccttatcttaaccaccttatcttgaccaccttatcttaactacctcattatc

SEQ ID NO: 44967 - DNA, 96 bp, Fusarium phaseoli
  misc_feature: 29
taccctaacctatctattccttacttaacgtcctcattattattattatctcctcccaccttatatataataccacacccactccgcttatctaac

SEQ ID NO: 44968 - DNA, 96 bp, Fusarium phaseoli
  misc_feature: 29
gtatggttgccctattgccctattggaccgtagaaacgaatgctgtggttttttgtctttattcttatcctctcgtttcattccgcttcatatgta

SEQ ID NO: 44969 - DNA, 96 bp, Fusarium phaseoli
  misc_feature: 29
tacaggtaaataacaccttagtccccttaaactaaccctcataaccacccgctccctccctcgcttcctaggttatactaaggcctaagggtcaag

SEQ ID NO: 44970 - DNA, 96 bp, Fusarium phaseoli
  misc_feature: 29
tacaaaaaaaaaaggcgctatcctagctgcgcggcggattcgctagcaaatccaatgggtttcccatacaaaaaaaaaaggcgctatcctagctgc

SEQ ID NO: 44971 - DNA, 96 bp, Fusarium phaseoli
  misc_feature: 29
gatagaatagcactccttccctagatataataataaaagcgataatagatattaataagtcattaggcgatagattaatataccaatctagcatta

SEQ ID NO: 44972 - DNA, 96 bp, Fusarium phaseoli
  misc_feature: 29
taatcagatgccgtgaaatggccctatgcccctccctgcgagggtagctttacgggagacgtattaacgggggtaaacccacctagctggctcttt

SEQ ID NO: 44973 - DNA, 96 bp, Fusarium phaseoli
  misc_feature: 29
taagttgagggttagggttaagtggttgtggtgaaggttagggggagtggttgtggtgaaggttagggggagtggttgtggtgaaggttagggggg

SEQ ID NO: 44974 - DNA, 96 bp, Fusarium phaseoli
  misc_feature: 29
ataaccacccgctccctccctcgcttcctaggttatactaaggcctaagggtcaaggtcaaggtcaaggtcagagtcagggtcaggcctttactta

SEQ ID NO: 44975 - DNA, 96 bp, Fusarium phaseoli
  misc_feature: 29
taacgccagaggttactagtccctaactgcccccgcccttttgccccttgctctccggcaaccttcataacctcccgcttacctcttgacttcccg

SEQ ID NO: 44976 - DNA, 96 bp, Fusarium phaseoli
  misc_feature: 29
taacctatctattccttacttaacgtcctcattattattattatctcctcccaccttatatataataccacacccactccgcttatctaactctac

SEQ ID NO: 44977 - DNA, 96 bp, Fusarium phaseoli
  misc_feature: 29
taaccctcataaccacccgctccctccctcgcttcctaggttatactaaggcctaagggtcaaggtcaaggtcaaggtcagagtcagggtcaggcc

SEQ ID NO: 44978 - DNA, 96 bp, Fusarium phaseoli
  misc_feature: 29
caatgcggaaccaacgggttgcacgaagacattgttagcgccgtggaagatgaaagaagaatcgcagctattctcgaagcgatggacgtgctttta

SEQ ID NO: 44979 - DNA, 96 bp, Fusarium phaseoli
  misc_feature: 29
gcttctctcaaacagccaaactcgcggaaaaacgcccaggaaaaaaaaaactcaactttacgttaatttctcaacgattatatatcgtagcaaaac

SEQ ID NO: 44980 - DNA, 96 bp, Fusarium phaseoli
  misc_feature: 29
cagatttcgctgggtggagtgtcaattcaaagcactggccagttgtccgcagagcgaagaccttctcgaacaactgctcgattccctgcctcaaac

SEQ ID NO: 44981 - DNA, 96 bp, Fusarium phaseoli
  misc_feature: 29
gttgtggtgaaggttagggggagtggttgagttgagggttagggggagtggttgagataaagtttagagtgaagggttagaaagaggtggggttgg

SEQ ID NO: 44982 - DNA, 96 bp, Fusarium phaseoli
  misc_feature: 29
gttgctaaccagaaacgcgatgtcacaaacgcgacctcggttctttcctgtctttctgaatgtgtcccatccgccatgagaaatgaatcgcagtcc

SEQ ID NO: 44983 - DNA, 96 bp, Fusarium phaseoli
  misc_feature: 29
cagaaaagttgtacgtacgtacagctacccaaaatacagtacgtacgtacgtacgtgtacagaaaaatgcatcactaagcccagcagcacatcaac

SEQ ID NO: 44984 - DNA, 96 bp, Fusarium phaseoli
  misc_feature: 29
gttagggggagtggttgtggtgaaggttagggggagtggttgagttgagggttagggttaagtggttgtggtgaaggttagggggaggggttgtgg

SEQ ID NO: 44985 - DNA, 96 bp, Fusarium phaseoli
  misc_feature: 29
gttagatcggctgcgccgagaatataacacattacgttcgaactgggcttctaactttgtcaagcgacactcagagctcacaacgcgttttaatcg

SEQ ID NO: 44986 - DNA, 96 bp, Fusarium phaseoli
  misc_feature: 29
cactttcacgaccgccccaaccccaaccctgaagaccacactgataaccttacccttaaccttacccttaaccttacccttaaccttacccttaac

SEQ ID NO: 44987 - DNA, 96 bp, Fusarium phaseoli
  misc_feature: 29
ggttatcgaacaacacacaacaacaacaacacacaacaacaacaacacacaacaacaacaacacacaacaacaacaacacacaacaacaacaacac

SEQ ID NO: 44988 - DNA, 96 bp, Fusarium phaseoli
  misc_feature: 29
gtgtcaatgaataaatgttcgaaattagctatttagagaaattgaacacagattgacgacgaagccaagcatgcttcgaggacatctctaatcatt

SEQ ID NO: 44989 - DNA, 96 bp, Fusarium phaseoli
  misc_feature: 29
catcgcgactctacaaacgaagctccgccacgttgatattcacaaccattggctaagacaagctgtttctcaaaagacgatcaaggtcgcatacac

SEQ ID NO: 44990 - DNA, 96 bp, Fusarium phaseoli
  misc_feature: 29
ctaaccttcaccacaaccactccccctaaccttcaccacaaccacttaaccctaaccctcaactcaaccactccccctaaccctcaccacaaccac

SEQ ID NO: 44991 - DNA, 96 bp, Fusarium phaseoli
  misc_feature: 29
gagcttcgtttgtagagtcgcgatgtctgcattgacgagacgaattgtctgctggttatcgcaccacaggttcagccgtgctgaatcaagctccac

SEQ ID NO: 44992 - DNA, 96 bp, Fusarium phaseoli
  misc_feature: 29
cctccgtaaccttacacgggggatcaaggcgttcaagcggttcatctccccactcaggcgtattgcggacgtttgcaaggaaacaccaaagggcac

SEQ ID NO: 44993 - DNA, 96 bp, Fusarium phaseoli
  misc_feature: 29
gtgccccgagcacacaggacctgtgcgcctcgacggcgccctacacttggggagctcatacctgcacgggggccggtgcaaataagatctgttatg

SEQ ID NO: 44994 - DNA, 96 bp, Fusarium phaseoli
  misc_feature: 29
ctccagtgctgacacggacagtaggtttgagcatccttccggaacatacagagcgttatcgagagtaacattctgttggcccttgggcccttgcac

SEQ ID NO: 44995 - DNA, 96 bp, Fusarium phaseoli
  misc_feature: 29
aagatgcctcgtggattacctgccggcgatttccagggacctgggtgaaccccatggcgcggtgactccagaccagttagtgccatatcacttcac

SEQ ID NO: 44996 - DNA, 96 bp, Fusarium phaseoli
  misc_feature: 29
ggagaggttcaaatggacctgccttccccgcccccaggagggtgacacacagctagtggaaactcagctccgtttcaacgacctcaagaactcgac

SEQ ID NO: 44997 - DNA, 96 bp, Fusarium phaseoli
  misc_feature: 29
gccatcaacattccatatggtcacccaattttcgaacaagccctccttgcttttgaacagtcggaggatttgaacgtccgtccggggatcttggac

SEQ ID NO: 44998 - DNA, 96 bp, Fusarium phaseoli
  misc_feature: 29
gcaagtccggaaaaacaacgcgagattgatggcatgcgtaatgaggtcactacgttccgtgcggttgccgagtcgatggttgtagacccgcctgac

SEQ ID NO: 44999 - DNA, 96 bp, Fusarium phaseoli
  misc_feature: 29
gcacttaggagattggttgggaaaacacattcgttaggactgatttaatggcaaacatgctgaagcttgaatgctgacatgacctctttgattgac

SEQ ID NO: 45000 - DNA, 96 bp, Fusarium phaseoli
  misc_feature: 29
gtatatatatagtgaaatcggcagtcattttaggacacttcacgatgaggcgaaactgactgtgtaccttcttgtgggacggtgcaaatgggactt

SEQ ID NO: 45001 - DNA, 96 bp, Fusarium phaseoli
  misc_feature: 29
gtaggcgttagcacccaccgagagcagtaaggaggatggaggtgaaataccgagttttgagagtggggtggttttaaacggaggggcgacggcggg

SEQ ID NO: 45002 - DNA, 96 bp, Fusarium phaseoli
  misc_feature: 29
cttctctcaaacagccaaactcgcggaaaaacgcccaggaaaaaaaaaactcaactttacgttaatttctcaacgattatatatcgtagcaaaacc

SEQ ID NO: 45003 - DNA, 96 bp, Fusarium phaseoli
  misc_feature: 29
ggttgtggtgaaggttagggggagtggttgagttgagggttagggttaagtggttgtggtgaaggttagggggagtggttgtggtgaagggtaggg

SEQ ID NO: 45004 - DNA, 96 bp, Fusarium phaseoli
  misc_feature: 29
ggttattgacgtggccaaagccgccgcccacggccgacccgatcccatttattcaaccgccggcccccggcaagttaggttgcggggaggaagagg

SEQ ID NO: 45005 - DNA, 96 bp, Fusarium phaseoli
  misc_feature: 29
gccgatatgggaaagaaatctgatgcgcgtgctgctctggctagggctggctgacctggaagtggtcaaaaagtatgatcgttcttcaaagccacc

SEQ ID NO: 45006 - DNA, 96 bp, Fusarium phaseoli
  misc_feature: 29
ccaccatttagtcgttgaactgcacccgtatccgcgccccgggggggggctcggacttagagcttggctgcggattacccattgtcgcatctcacc

SEQ ID NO: 45007 - DNA, 96 bp, Fusarium phaseoli
  misc_feature: 29
ggtgaaggttagggggagtggttgtggtgaaggttagggggagtggttgagttgagggttagggttaagtggttgtggtgaaggttagggggaggg

SEQ ID NO: 45008 - DNA, 96 bp, Fusarium phaseoli
  misc_feature: 29
agatgccttgaggaacgaagtgacgaaaggttttatgccgccatctttttccggggcctcaaaatcacctgacttcttccaatcaaaagtttgacc

SEQ ID NO: 45009 - DNA, 96 bp, Fusarium phaseoli
  misc_feature: 29
ccatacgatatgttcataaggatgccgccgggttatcggaaacgtggcaagatcctgcatctactcaaagccctgtacggtctacgggaatcaccc

SEQ ID NO: 45010 - DNA, 96 bp, Fusarium phaseoli
  misc_feature: 29
ggggagcatagcaacgaaggaggaagcgatcctccgccatctcctcgctcctcctcaccaccaccaccacctgaagaggacaacaagttcaacatg

SEQ ID NO: 45011 - DNA, 96 bp, Fusarium phaseoli
  misc_feature: 29
cagttttgtacgtacagaaaagttgtacgtacgtacagctacccaaaatacagtacgtacgtacgtacgtgtacagaaaaatgcatcactaagccc

SEQ ID NO: 45012 - DNA, 96 bp, Fusarium phaseoli
  misc_feature: 29
gaggagggagtttgcagacacgggccacagaagcgcagcatgtgccgtggcgtaccggagtccagagccagcggttgttccgcaatgggccggccc

SEQ ID NO: 45013 - DNA, 96 bp, Fusarium phaseoli
  misc_feature: 29
ccggtattgtcacccaaggtcaatcaaagaggtcatgtcagcattcaagcttcagcatgtttgccattaaatcagtcctaacgaatgtgttttccc

SEQ ID NO: 45014 - DNA, 96 bp, Fusarium phaseoli
  misc_feature: 29
ctcattatcgtttacctgacccttaatccttttagcacgctcagtgcgacaaaacccctcgagacaaaggaattgccttcgtctttcgacgccgcc

SEQ ID NO: 45015 - DNA, 96 bp, Fusarium phaseoli
  misc_feature: 29
ggcccaagggccaacagaatgttactctcgataacgctctgtatgttccggaaggatgctcaaacctactgtccgtgtcagcactggagaagaagg

SEQ ID NO: 45016 - DNA, 96 bp, Fusarium phaseoli
  misc_feature: 29
ggcatctcggcgtgcgatattcgcttatctgcgacattcgcttatcacgtaacgtactccacaagcgagtgaatcaaacaagtgagtgaatcactt

SEQ ID NO: 45017 - DNA, 96 bp, Fusarium phaseoli
  misc_feature: 29
ggatttttgatccgcatgcttgtctgatccgcatgcttgtctgatccgcatgcttatcatgcacgttagtcccattgtttaaaagtctcgtatgat

SEQ ID NO: 45018 - DNA, 96 bp, Fusarium phaseoli
  misc_feature: 29
ggatacactctgaggaaaggaagcgagtgttgggaacaagtccgacgaggtatatatatagtgaaatcggcagtcattttaggacacttcacgatg

SEQ ID NO: 45019 - DNA, 96 bp, Fusarium phaseoli
  misc_feature: 29
ggaatgacttccaacattcgtggagactcgatgacaaacctagcgaatccgaggaaaaaccaaaagaccgcacatatccaatcttgcatcacgctc

SEQ ID NO: 45020 - DNA, 96 bp, Fusarium phaseoli
  misc_feature: 29
aattaagtatttatatttatttacgctttatttctaagctaatattcccttattcctttattcccttattcctatattcctatattcctatattcc

SEQ ID NO: 45021 - DNA, 96 bp, Fusarium phaseoli
  misc_feature: 29
cccccatcttctcggacaatgcggaaccaacgggttgcacgaagacattgttagcgccgtggaagatgaaagaagaatcgcagctattctcgaagc

SEQ ID NO: 45022 - DNA, 96 bp, Fusarium phaseoli
  misc_feature: 29
cccctcagttctccctactagatttcaacgatgctccatttcgcggcatcgttcactcccgtcctcaccaccatgagccatgcgaggcccgtcagc

SEQ ID NO: 45023 - DNA, 96 bp, Fusarium phaseoli
  misc_feature: 29
gcgttagcacccaccgagagcagtaaggaggatggaggtgaaataccgagttttgagagtggggtggttttaaacggaggggcgacggcggagggg

SEQ ID NO: 45024 - DNA, 96 bp, Fusarium phaseoli
  misc_feature: 29
gcggaaccaacgggttgcacgaagacattgttagcgccgtggaagatgaaagaagaatcgcagctattctcgaagcgatggacgtgcttttagatc

SEQ ID NO: 45025 - DNA, 96 bp, Fusarium phaseoli
  misc_feature: 29
gcgacacatccataaaggagcaagaacgagctcggaacggcactggcggcacaccaaccctcaaaaacacaggaagaattgcgacgaaccacgaag

SEQ ID NO: 45026 - DNA, 96 bp, Fusarium phaseoli
  misc_feature: 29
cagagcgttatcgagagtaacattctgttggcccttgggcccttgcactaggaggaagtaggttccacgttctcctggcataactgttgcgttcgc

SEQ ID NO: 45027 - DNA, 96 bp, Fusarium phaseoli
  misc_feature: 29
gccgctcctcgttaacagtaggaaatatcagcttcattcttagaatttagagaatctatctgcatttctttgcatctatctatgtagacatgcagg

SEQ ID NO: 45028 - DNA, 96 bp, Fusarium phaseoli
  misc_feature: 29
caagggccaacagaatgttactctcgataacgctctgtatgttccggaaggatgctcaaacctactgtccgtgtcagcactggagaagaagggggc

SEQ ID NO: 45029 - DNA, 96 bp, Fusarium phaseoli
  misc_feature: 29
aagtccctccggaatcaattacggccaaaacaccatagaattcattccaaagagacttatgacttctcaatcaattcccggcgaagcactcaatgc

SEQ ID NO: 45030 - DNA, 96 bp, Fusarium phaseoli
  misc_feature: 29
gcatggccttcacttctttcacggagtcgaatccctgaagggagcagatgagatgcgtctagacatacggcatcccaccattccgcaccagtcgtg

SEQ ID NO: 45031 - DNA, 96 bp, Fusarium phaseoli
  misc_feature: 29
gcatctcggcgtgcgatattcgcttatctgcgacattcgcttatcacgtaacgtactccacaagcgagtgaatcaaacaagtgagtgaatcacttt

SEQ ID NO: 45032 - DNA, 96 bp, Fusarium phaseoli
  misc_feature: 29
gatttgatttgatttatttgtttgcaagcctgtttcattctgctcggtgacctcggcattgttaggtgaaatattcccgaacaccattttcacagt

SEQ ID NO: 45033 - DNA, 96 bp, Fusarium phaseoli
  misc_feature: 29
gattcgctagcaaatccaatgggtttcccatacaaaaaaaaaaggcgctatcctatcctagctgcgcggcggattcgctagcaaatccaatgggtt

SEQ ID NO: 45034 - DNA, 96 bp, Fusarium phaseoli
  misc_feature: 29
acatccaatcggacccatcaaagcattcgggctcgtgacaagtagtagtagtagtagtagtagtagtaggttttattacgcccgggagaactaatc

SEQ ID NO: 45035 - DNA, 96 bp, Fusarium phaseoli
  misc_feature: 29
aatataccctaatattaccgtaatcctctttatatactttatcctcctcccccgttatctatctacctccctgctctatccataacctatctaatc

SEQ ID NO: 45036 - DNA, 96 bp, Fusarium phaseoli
  misc_feature: 29
acattctccccaaattcctggcatccgggcgaacctgaggttgacaagatacagacagtatctgtgaagacctagcacgggctgaataccgtcatc

SEQ ID NO: 45037 - DNA, 96 bp, Fusarium phaseoli
  misc_feature: 29
gatatgacgcgacagaacaaaggtgaaaaggggtctgtcaggttcagtcaattgagtgtctcagccggtcgatggtattttgctgcagtgtcagtc

SEQ ID NO: 45038 - DNA, 96 bp, Fusarium phaseoli
  misc_feature: 29
attattcggtcatttaacttgggtctcgatggtgttttgaccagccgcgggtagcagcaacgtcctcctctttcggctgaatgaatgaattttatc

SEQ ID NO: 45039 - DNA, 96 bp, Fusarium phaseoli
  misc_feature: 29
caaaagtgttgtaccagcctcggagggcgatgcccagtcccctcctgttatactaaaatgtcgtaccagcctcggagggctatgcccagtcccctc

SEQ ID NO: 45040 - DNA, 96 bp, Fusarium phaseoli
  misc_feature: 29
gagcaagggcagggcgtaagggtgacggggaaccaaagagtaagtaaaggcctgaccctgactctgaccttgaccttgaccttgacccttaggcct

SEQ ID NO: 45041 - DNA, 96 bp, Fusarium phaseoli
  misc_feature: 29
gagactatccgaaggatgaaacacatagcagtctcagcactttgtatcactcccgctgtctgggaatgggacgacgatctgttttcgaccatctgg

SEQ ID NO: 45042 - DNA, 96 bp, Fusarium phaseoli
  misc_feature: 29
aggctatgttcgtatcgcggctgatcaaggagattggcgtggagcttgattcagcacggctgaacctgtggtgcgataaccagcagacaattcgtc

SEQ ID NO: 45043 - DNA, 96 bp, Fusarium phaseoli
  misc_feature: 29
attccaacaataactaccctattgttggcgccctttcatttcccacccatttgagttcgtcggttgccaaacgacggtttggagtagagccttgtc

SEQ ID NO: 45044 - DNA, 96 bp, Fusarium phaseoli
  misc_feature: 29
atattgaaatacattgacgtcaatcatttaccaactgttgaacatgtggggtgtcacgtgttggtcaaggatcttgagattaaaagcaggtccttc

SEQ ID NO: 45045 - DNA, 96 bp, Fusarium phaseoli
  misc_feature: 29
cggtcttattatccgatttaggcgcctaatataaagtctaaggtatctaacgtacataataagcatatgcaccaagcaagtatatgcaccactttc

SEQ ID NO: 45046 - DNA, 96 bp, Fusarium phaseoli
  misc_feature: 29
caacaagcaaccaacaagcaaccaacaagcaaccaacaagcaaccaacaagcaaccaacaagcaaccaacaagcaaccaacaagcgaccaacaaag

SEQ ID NO: 45047 - DNA, 96 bp, Fusarium phaseoli
  misc_feature: 29
acactggacaaaacatatgaacgaatgctcagcaatatcccctcgacttccagggattatgctcgacaaatgctgacggtgctctgctgtgcaaag

SEQ ID NO: 45048 - DNA, 96 bp, Fusarium phaseoli
  misc_feature: 29
cttggttgcatgcctctttggtggcatctctcttggtggcatctctcttggtggcatctctcttggtcgcatctctcttggtcgcatctctcttgg

SEQ ID NO: 45049 - DNA, 96 bp, Fusarium phaseoli
  misc_feature: 29
cagagagacagataacagttatgatccatccgtggatactatgctgcgattctattatgaaatagttaccgaacacttcgaagatagaagggcaag

SEQ ID NO: 45050 - DNA, 96 bp, Fusarium phaseoli
  misc_feature: 29
aagacaagaatcgaatcacataaagtcaatatcttcaatcaaactagtagagccaaacaagaaaaaagaaagataaaaaagaaaaagaaaaagaag

SEQ ID NO: 45051 - DNA, 96 bp, Fusarium phaseoli
  misc_feature: 29
aaaaaaggagagagaaataaaggagagaaaaaaaagaattaagaaattaatagaaaaataaaaaaataaggtaaataatattaattaagggttaag

SEQ ID NO: 45052 - DNA, 96 bp, Fusarium phaseoli
  misc_feature: 29
ctggctactcagaccgaagctcatacgctcgcaccctgcgcacctcgctctagcgttactttccttccgaggttttactctgatcgttatgccaat

SEQ ID NO: 45053 - DNA, 96 bp, Fusarium phaseoli
  misc_feature: 29
ctgagatggtcgtggggagtgcaaagagcatgctttcatgttttggatcaatgccccaagcaacatggatctgcatccaaagctacagcctagctt

SEQ ID NO: 45054 - DNA, 96 bp, Fusarium phaseoli
  misc_feature: 29
attgaaatacattgacgtcaatcatttaccaactgttgaacatgtggggtgtcacgtgttggtcaaggatcttgagattaaaagcaggtccttcag

SEQ ID NO: 45055 - DNA, 96 bp, Fusarium phaseoli
  misc_feature: 29
aggaaaagtgattcactcacttgtttgattcactcgcttgtggagtacgttacgtgataagcgaatgtcgcagataagcgaatatcgcacgccgag

SEQ ID NO: 45056 - DNA, 96 bp, Fusarium phaseoli
  misc_feature: 29
aggagtaagtagacttacaatgcgaccgttcacagtcacgctccctgagaccctatctcctgagtgcgtgcggacctccactgtggtaacgatgag

SEQ ID NO: 45057 - DNA, 96 bp, Fusarium phaseoli
  misc_feature: 29
atacactctgaggaaaggaagcgagtgttgggaacaagtccgacgaggtatatatatagtgaaatcggcagtcattttaggacacttcacgatgag

SEQ ID NO: 45058 - DNA, 96 bp, Fusarium phaseoli
  misc_feature: 29
aaggaggaagataagtaccgcccaagttcatctggggactctaacgaggagatgcctaataccacatcctctgggtcaaataatcaattgactgag

SEQ ID NO: 45059 - DNA, 96 bp, Fusarium phaseoli
  misc_feature: 29
attttaaggtagagttagataagcggagtgggtgtggtattatatataaggtgggaggagataataataataatgaggacgttaagtaaggaatag

SEQ ID NO: 45060 - DNA, 96 bp, Fusarium phaseoli
  misc_feature: 29
aaatcaatcgttcatttacacgggcagcttttacctagaaacttcacataaatggccacgcttaaagctatcatgatggcttagatatgtaactag

SEQ ID NO: 45061 - DNA, 96 bp, Fusarium phaseoli
  misc_feature: 29
ctaggcattgccttagggttagggttacaggtaaataacaccttagtccccttaaactaaccctcataaccacccgctccctccctcgcttcctag

SEQ ID NO: 45062 - DNA, 96 bp, Fusarium phaseoli
  misc_feature: 29
atgggaaacccattggatttgctagcgaatccgccgcgcagctaggataggatagcgccttttttttttgtatgggaaacccattggatttgctag

SEQ ID NO: 45063 - DNA, 96 bp, Fusarium phaseoli
  misc_feature: 29
caagattggtcaatcgacatcatcaggcacggcaacgcaaatgacaaaatgccgtattaaggaagcgacagttctgtatgaaattaaagacagtag

SEQ ID NO: 45064 - DNA, 96 bp, Fusarium phaseoli
  misc_feature: 29
atcgttaccacagtggaggtccgcacgcactcaggagatagggtctcagggagcgtgactgtgaacggtcgcattgtaagtctacttactccttag

SEQ ID NO: 45065 - DNA, 96 bp, Fusarium phaseoli
  misc_feature: 29
ctaagatatatatcgattataaggctaaagttaatgcggctattaatcgataggattaatcctatttttctattagctttaactctaccttttagt

SEQ ID NO: 45066 - DNA, 96 bp, Fusarium phaseoli
  misc_feature: 29
agaacatcaccgacctgatccggtcgccatggccctttagcactcgctcacaatcgcccgtctctgcgttccagatccggaccgtcctgtcgttag

SEQ ID NO: 45067 - DNA, 96 bp, Fusarium phaseoli
  misc_feature: 29
aggttactagtccctaactgcccccgcccttttgccccttgctctccggcaaccttcataacctcccgcttacctcttgacttcccgggtcaaacg

SEQ ID NO: 45068 - DNA, 96 bp, Fusarium phaseoli
  misc_feature: 29
cgttccccaccaaagcggacgacctcgcccacagtgatcgcttgatggcctagtgttacgagtaggaagatcaaccaggatacgaacggaaaacgt

SEQ ID NO: 45069 - DNA, 96 bp, Fusarium phaseoli
  misc_feature: 29
cgtgtagccaaaatgtcatgcccgtatatcaattcccttaaagccttccatccgaaaagtcaatcaaggcagctttttcgagctggggacgaattt

SEQ ID NO: 45070 - DNA, 96 bp, Fusarium phaseoli
  misc_feature: 29
atggcatcgtcctgggcggctccttgaagaggggaaaagagacttttaaagtacgagcactacgcggcgtgcttctggccacaggggactttgacg

SEQ ID NO: 45071 - DNA, 96 bp, Fusarium phaseoli
  misc_feature: 29
aggagggagtttgcagacacgggccacagaagcgcagcatgtgccgtggcgtaccggagtccagagccagcggttgttccgcaatgggccggcccg

SEQ ID NO: 45072 - DNA, 96 bp, Fusarium phaseoli
  misc_feature: 29
cggatacactctgaggaaaggaagcgagtgttgggaacaagtccgacgaggtatatatatagtgaaatcggcagtcattttaggacacttcacgat

SEQ ID NO: 45073 - DNA, 96 bp, Fusarium phaseoli
  misc_feature: 29
cgcgcttgattacatgaaaacttttcattcacacaggtcgcacccgagtgagttttagtccagcggtgtgacctacaaatggcctaggaacaattt

SEQ ID NO: 45074 - DNA, 96 bp, Fusarium phaseoli
  misc_feature: 29
aaggagaggttcaaatggacctgccttccccgcccccaggagggtgacacacagctagtggaaactcagctccgtttcaacgacctcaagaactcg

SEQ ID NO: 45075 - DNA, 96 bp, Fusarium phaseoli
  misc_feature: 29
ccttttgtcaagtgcactcagcatccctgcgcgacacaacaacacctcatcgaaaatctcgtcaccttgaaaatctcgtatcccaacccatgactt

SEQ ID NO: 45076 - DNA, 96 bp, Fusarium phaseoli
  misc_feature: 29
aacgaagcctgatctcctactggagcaatagacgtgctgagctgaactatctacaatcgctgccgcattcgacctcgcttggaatacccgcaaagg

SEQ ID NO: 45077 - DNA, 96 bp, Fusarium phaseoli
  misc_feature: 29
acggcggagaggttacggtcgagatatcgagaggccgaacgaacccgtatgcaatggtttcggtcggtggttattcggtcgagtggtggagggagg

SEQ ID NO: 45078 - DNA, 96 bp, Fusarium phaseoli
  misc_feature: 29
agttgagggttagggttaagtggttgtggtgaaggttagggggagtggttgtggtgaaggttagggggagtggttgtggtgaaggttagggggagg

SEQ ID NO: 45079 - DNA, 96 bp, Fusarium phaseoli
  misc_feature: 29
cctcccaccttatatataataccacacccactccgcttatctaactctaccttaaaattcgccgtatcttacccctccttcctcatatttaatatt

SEQ ID NO: 45080 - DNA, 96 bp, Fusarium phaseoli
  misc_feature: 29
cctcatttggcatccatatttgctttttgaaaccttcctctaggaagcaccgggtcaattgcgcatccgttcaagcgcatattgcgtaatgtggat

SEQ ID NO: 45081 - DNA, 96 bp, Fusarium phaseoli
  misc_feature: 29
agtgaaaaggggcacgaagttggtcaccgatatcaacagctcccatttcctcgttatactctgctgcaaaggacgggatccacacgctcaacacgg

SEQ ID NO: 45082 - DNA, 96 bp, Fusarium phaseoli
  misc_feature: 29
ccgtgtagccaaaatgtcatgcccgtatatcaattcccttaaagccttccatccgaaaagtcaatcaaggcagctttttcgagctggggacgaatt

SEQ ID NO: 45083 - DNA, 96 bp, Fusarium phaseoli
  misc_feature: 29
aacgccagaggttactagtccctaactgcccccgcccttttgccccttgctctccggcaaccttcataacctcccgcttacctcttgacttcccgg

SEQ ID NO: 45084 - DNA, 96 bp, Fusarium phaseoli
  misc_feature: 29
agtggttgtggtgaaggttagggggagtggttgagttgagggttagggggagtggttgagataaagtttagagtgaagggttagaaagaggggggg

SEQ ID NO: 45085 - DNA, 96 bp, Fusarium phaseoli
  misc_feature: 29
aagttgagggttagggttaagtggttgtggtgaaggttagggggagtggttgtggtgaaggttagggggagtggttgtggtgaaggttaggggggg

SEQ ID NO: 45086 - DNA, 96 bp, Fusarium phaseoli
  misc_feature: 29
ccaacagaatgttactctcgataacgctctgtatgttccggaaggatgctcaaacctactgtccgtgtcagcactggagaagaagggggcagaagt

SEQ ID NO: 45087 - DNA, 96 bp, Fusarium phaseoli
  misc_feature: 29
catttggcatccatatttgctttttgaaaccttcctctaggaagcaccgggtcaattgcgcatccgttcaagcgcatattgcgtaatgtggatttg

SEQ ID NO: 45088 - DNA, 96 bp, Fusarium phaseoli
  misc_feature: 29
catcctcatcattaccttcatcctcatcatctccatctccatcttcatctccatcttcatcttcatcttcatcttcgtcttcactgtcatcctcgt

SEQ ID NO: 45089 - DNA, 96 bp, Fusarium phaseoli
  misc_feature: 29
aacctcgtacagtaggacaagcagaagcttggtccggaaacttggcacttttcactcggtggtaagatggcttctgactgccatttgcttacactg

SEQ ID NO: 45090 - DNA, 96 bp, Fusarium phaseoli
  misc_feature: 29
agactaaggccgactgaaacgtggtccaccagatggtcgaaaacagatcgtcgtcccattcccagacagcgggagtgatacaaagtgctgagactg

SEQ ID NO: 45091 - DNA, 96 bp, Fusarium phaseoli
  misc_feature: 29
caagtgcactcagcatccctgcgcgacataacaacagtatgcgccgctaccgtctgctattaagccttaaagccctttgctattacgttgtaccgt

SEQ ID NO: 45092 - DNA, 96 bp, Fusarium phaseoli
  misc_feature: 29
atttgatttgatttggataacattacagccaatttgatttgatttgatttagataaatttgatttgatttgaatagatttgaatttgatttatttg

SEQ ID NO: 45093 - DNA, 96 bp, Fusarium phaseoli
  misc_feature: 29
attcaaagcactggccagttgtccgcagagcgaagaccttctcgaacaactgctcgattccctgcctcaaacactggacaaaacatatgaacgaat

SEQ ID NO: 45094 - DNA, 96 bp, Fusarium phaseoli
  misc_feature: 29
attaatcagatgccgtgaaatggccctatgcccctccctgcgagggtagctttacgggagacgtattaacgggggtaaacccacctagctggctct

SEQ ID NO: 45095 - DNA, 96 bp, Fusarium phaseoli
  misc_feature: 29
atagattgttggtcaacctgttacaaaccgattacctatgagtcacaatgtaaacattcctgggccaactttgaccgtttcctccgcaacccacat

SEQ ID NO: 45096 - DNA, 96 bp, Fusarium phaseoli
  misc_feature: 29
actagctacttttttttaaataatactaaggttatataattgcaataataattaattacgtaataataagaagttatattaagctgatttttacat

SEQ ID NO: 45097 - DNA, 96 bp, Fusarium phaseoli
  misc_feature: 29
atattttatccggtaaaatgcattttaattacatgcaccgattcacgatataaagcattagatcggaagagcgtcgtgtagggaaagagtgtagat

SEQ ID NO: 45098 - DNA, 96 bp, Fusarium phaseoli
  misc_feature: 29
atccaagaatctacgctgaggtacacgcagcaatgtactgcggtacggaggccgatagggaacactgttgcaaaacccccatgtcagttgtctttt

SEQ ID NO: 45099 - DNA, 96 bp, Fusarium phaseoli
  misc_feature: 29
aaagttccgctttctccgtttttttcttcttctattaatcttaaatctgttggttatccccggatgaactcttggctgggttaatcgaggtttgat

SEQ ID NO: 45100 - DNA, 96 bp, Fusarium phaseoli
  misc_feature: 29
atatcaacgtggcggagcttcgtttgtagagtcgcgatgtctgcattgacgagacgaattgtctgctggttatcgcaccacaggttcagccgtgct

SEQ ID NO: 45101 - DNA, 96 bp, Fusarium phaseoli
  misc_feature: 29
aaaatacagtacgtacgtacgtacgtgtacagaaaaatgcatcactaagcccagcagcacatcaacacacctcgtatactatctgggatgttgtat

SEQ ID NO: 45102 - DNA, 96 bp, Fusarium phaseoli
  misc_feature: 29
aactctaccttaaaattcgccgtatcttacccctccttcctcatatttaatattcactttatccctaaccgtaaattaacctcctacttctcttat

SEQ ID NO: 45103 - DNA, 96 bp, Fusarium phaseoli
  misc_feature: 29
aaccctcataaccacccgctccctccctcgcttcctaggttatactaaggcctaagggtcaaggtcaaggtcaaggtcagagtcagggtcaggcct

SEQ ID NO: 45104 - DNA, 96 bp, Fusarium phaseoli
  misc_feature: 29
agagctaataaagccacgatgagcggtgcgcttccgtgctttccattcttgtctcaaatcatttaggtctgcatactgaaaattgatcgccatcct

SEQ ID NO: 45105 - DNA, 96 bp, Fusarium phaseoli
  misc_feature: 29
aggagagttgggaaagtgagactaaccgctgctgtccgggggagaagagttggacaagtgaggctaaccgctattgtccaggagaggaggagagtt

SEQ ID NO: 45106 - DNA, 96 bp, Fusarium phaseoli
  misc_feature: 29
acgaatacatactgtctgcagtccccaagcacataatgccctcgataaacgagcccaaaatagaacaacgaaagtcttgataggccaaagcgttct

SEQ ID NO: 45107 - DNA, 96 bp, Fusarium phaseoli
  misc_feature: 29
aacgatgggactctatcttactcagccagaaatgacaggagtaatgagtgttttccggaatttctgtaaagatgacggtatgatagtaatacaagt

SEQ ID NO: 45108 - DNA, 96 bp, Fusarium phaseoli
  misc_feature: 29
aacccattctcctccgtacttcctcttttcttcttatatataatataccctaatattaccgtaatcctctttatatactttatcctcctcccccgt

SEQ ID NO: 45109 - DNA, 96 bp, Fusarium phaseoli
  misc_feature: 29
acctcgtacagtaggacaagcagaagcttggtccggaaacttggcacttttcactcggtggtaagatggcttctgactgccatttgcttacactgt

SEQ ID NO: 45110 - DNA, 96 bp, Fusarium phaseoli
  misc_feature: 29
acccattctcctccgtacttcctcttttcttcttatatataatataccctaatattaccgtaatcctctttatatactttatcctcctcccccgtt

SEQ ID NO: 45111 - DNA, 96 bp, Fusarium phaseoli
  misc_feature: 29
aatccaagaatctacgctgaggtacacgcagcaatgtactgcggtacggaggccgatagggaacactgttgcaaaacccccatgtcagttgtcttt

SEQ ID NO: 45112 - DNA, 96 bp, Fusarium phaseoli
  misc_feature: 29
aaagacgatgccactttctgcatctcgatcgaggaggagagaatcgaagccacatcctgatcaggttctgccgggacagaggaattaaactctctt

SEQ ID NO: 45113 - DNA, 96 bp, Fusarium phaseoli
  misc_feature: 28
ttttgtacgtacagaaaagttgtacgtacgtacagctacccaaaatacagtacgtacgtacgtacgtgtacagaaaaatgcatcaccgacggtgac

SEQ ID NO: 45114 - DNA, 96 bp, Fusarium phaseoli
  misc_feature: 28
tttgttcctcttgacccagaaagggtggtctcgaagcttaatatgcggctatagacgctaatgcctaccgaggaggtagctaaactatcgacccct

SEQ ID NO: 45115 - DNA, 96 bp, Fusarium phaseoli
  misc_feature: 28
tttggccctattccaacaataactaccctattgttggcgccctttcatttcccacccatttgagttcgtcggttgccaaacgacggtttggagtag

SEQ ID NO: 45116 - DNA, 96 bp, Fusarium phaseoli
  misc_feature: 28
tttgatttgatttatttgtttgcaagcctgtttcattctgctcggtgacctcggcattgttaggtgaaatattcccgaacaccattttcacagtgt

SEQ ID NO: 45117 - DNA, 96 bp, Fusarium phaseoli
  misc_feature: 28
tactttctatctctttcactataaagcacaggggtgtcaggaaacggctctaagtctcatgacgtaagaccagttcacgtctccacataggtcaaa

SEQ ID NO: 45118 - DNA, 96 bp, Fusarium phaseoli
  misc_feature: 28
tttactagggccgaaagagcaggcgaatggtgcgcgatgagtgcagaatgtatggtaaactgtcagacaattggctccacagggatcattggtggc

SEQ ID NO: 45119 - DNA, 96 bp, Fusarium phaseoli
  misc_feature: 28
taaaagagtatattttcctaaaatataattaatatgcataagataataaaaagctaaaaaaggtataaaatcataaaagaggtatataaaggtaaa

SEQ ID NO: 45120 - DNA, 96 bp, Fusarium phaseoli
  misc_feature: 28
tttaatcttttagttcgggactaggtcttggatccatagatagcaccacgggctagggaaccggctttcctacagaagagtgtcgatacccttatc

SEQ ID NO: 45121 - DNA, 96 bp, Fusarium phaseoli
  misc_feature: 28
ttgtggtgaaggttagggggagtggttgagttgagggttagggggagtggttgagataaagtttagagtgaagggttagaaagaggtggggttggg

SEQ ID NO: 45122 - DNA, 96 bp, Fusarium phaseoli
  misc_feature: 28
aagaggaggatgctatctccccaatgcgtgcggacctccactgtggtcgcgacaagggattatggccaattaaaatgcacgaaataaagtgtacaa

SEQ ID NO: 45123 - DNA, 96 bp, Fusarium phaseoli
  misc_feature: 28
ttggttgcatgcctctttggtggcatctctcttggtggcatctctcttggtggcatctctcttggtcgcatctctcttggtcgcatctctcttggt

SEQ ID NO: 45124 - DNA, 96 bp, Fusarium phaseoli
  misc_feature: 28
gtaaccaacaagcaaccaacaagcaaccaacaagcaaccaacaagcaaccaacaagcaaccaacaagcaaccaacaagcaaccaacaagcgaccaa

SEQ ID NO: 45125 - DNA, 96 bp, Fusarium phaseoli
  misc_feature: 28
gtagctcagtaccgcataggcatcattcaacacaattagtcatcagctctcttacaagaggctatgaacgatcgctatatttggtatcatctccaa

SEQ ID NO: 45126 - DNA, 96 bp, Fusarium phaseoli
  misc_feature: 28
ttgcttatggcaaagtattactttaaaagttattgaagctgctcttaaatgtatactgtgtctagaagcttgatagtgacactgtgtaggccctgc

SEQ ID NO: 45127 - DNA, 96 bp, Fusarium phaseoli
  misc_feature: 28
atgtagtcaagcgttggtttgtcctgaccgaaggccagaaacggacggcgttagggtatgcagcgccgaggaccttgataagccatgtaacagcaa

SEQ ID NO: 45128 - DNA, 96 bp, Fusarium phaseoli
  misc_feature: 28
ttgccggagagcaaggggcaaaagggcgggggcagttagggactagtaacctctggcgttaagagttagaaaagtgaaggtaaccgctactgtcta

SEQ ID NO: 45129 - DNA, 96 bp, Fusarium phaseoli
  misc_feature: 28
ttgccaaaggatggcttgccaatctaagctacattgttccgccgataatgtgcaaagagatcgcccagtttattctcatttcgtttgtttttaatg

SEQ ID NO: 45130 - DNA, 96 bp, Fusarium phaseoli
  misc_feature: 28
gaaaaacgcacttaaatttccatctacttcatttgagctctctgctcactcactccctgctcactcgctccttgctccctcgctccgctccctcaa

SEQ ID NO: 45131 - DNA, 96 bp, Fusarium phaseoli
  misc_feature: 28
tatatatagtgaaatcggcagtcattttaggacacttcacgatgaggcgaaactgactgtgtaccttcttgtgggacggtgcaaatgggacttcaa

SEQ ID NO: 45132 - DNA, 96 bp, Fusarium phaseoli
  misc_feature: 28
ctagatcgcggtatacgctctctatggacctatgatctgttaagaagttgcggacttcacggagatgtggaacggccatcgcatccggccacagaa

SEQ ID NO: 45133 - DNA, 96 bp, Fusarium phaseoli
  misc_feature: 28
ttctatctcgataaagctaggtttctaactaagggatagctactctagcggtaagatcggcctcactaagtagataaagtactaaaagaagcttaa

SEQ ID NO: 45134 - DNA, 96 bp, Fusarium phaseoli
  misc_feature: 28
aaccaacaagcaaccaacaagcaaccaacaagcaaccaacaagcaaccaacaagcgaccaacaaagtactaccaaaataccaaaggttatgtagaa

SEQ ID NO: 45135 - DNA, 96 bp, Fusarium phaseoli
  misc_feature: 28
agaggtaagcgggaggttatgaaggttgccggagagcaaggggcaaaagggcgggggcagttagggactagtaacctctggcgttaagagttagaa

SEQ ID NO: 45136 - DNA, 96 bp, Fusarium phaseoli
  misc_feature: 28
ttcgagaagctggaattgaatatgatgacctcaaagacaacggggcactactgggcgatgctggagatgaactccaccaggacctcaccgacatta

SEQ ID NO: 45137 - DNA, 96 bp, Fusarium phaseoli
  misc_feature: 28
ttcccaatcaatggcattgcgaacgcaacagttatgccaggagaacgtggaacctacttcctcctagtgcaagggcccaagggccaacagaatgtt

SEQ ID NO: 45138 - DNA, 96 bp, Fusarium phaseoli
  misc_feature: 28
gtatgctcggccgtggattcctcgcaaagccgatatccctcgtaatcctgctcccgggcaattcgcttgaactgttcactccgctgcggcgatgaa

SEQ ID NO: 45139 - DNA, 96 bp, Fusarium phaseoli
  misc_feature: 28
ttcagttctaccggggccgaccgcctggtccctcacggggttataacacgggccgtgatactaagcgcgtctagtaaggaagagatgctcctctct

SEQ ID NO: 45140 - DNA, 96 bp, Fusarium phaseoli
  misc_feature: 28
atattagattcgcctatcgctcctcacacttctgtcataccgggctactcaaccggaaccctgccaagacctgccggcgaaggatctccggttgaa

SEQ ID NO: 45141 - DNA, 96 bp, Fusarium phaseoli
  misc_feature: 28
tcagccgccgaaaataggaaactaaatacttagatgaattaggcttcaagttgacttactactaaccttcacgaggaccaagaagaagagcgataa

SEQ ID NO: 45142 - DNA, 96 bp, Fusarium phaseoli
  misc_feature: 28
agttaaaggtaatacttttttcttctctttcttattatcttcttccttttttacctttatatctcgctagtttttccttaatagctcttactataa

SEQ ID NO: 45143 - DNA, 96 bp, Fusarium phaseoli
  misc_feature: 28
ttaccgtaatcctctttatatactttatcctcctcccccgttatctatctacctccctgctctatccataacctatctaatcgtatcactacctaa

SEQ ID NO: 45144 - DNA, 96 bp, Fusarium phaseoli
  misc_feature: 28
ttagaaagagtctcaaggggatctatctaatcaaccggttaccaagacgtttaatcagctcaaagaagccacgctcagcttctacatatctctact

SEQ ID NO: 45145 - DNA, 96 bp, Fusarium phaseoli
  misc_feature: 28
ttagaaacgcgtctatgcgtttcttagctgttgtcgacaaggcgccgttgccgtgctggtcggacatagcaacagcattctcaacatatgtccttg

SEQ ID NO: 45146 - DNA, 96 bp, Fusarium phaseoli
  misc_feature: 28
ttaagcctttaacagttagcgccttatttggggtctcagcctcagaagttagaggtgtgcaacatgggtgtgggcagaagagattggatttttcgc

SEQ ID NO: 45147 - DNA, 96 bp, Fusarium phaseoli
  misc_feature: 28
aaattaataaaccttactctctttctctaccttaaaaccccgccctttcgccttttaccctctattaacctttataatctctcgcttacctcttaa

SEQ ID NO: 45148 - DNA, 96 bp, Fusarium phaseoli
  misc_feature: 28
cgaacaacacacaacaacaacaacacacaacaacaacaacacacaacaacaacaacacacaacaacaacaacacacaacaacaacaacacacaaca

SEQ ID NO: 45149 - DNA, 96 bp, Fusarium phaseoli
  misc_feature: 28
tatcgaacaacacacaacaacaacaacacacaacaacaacaacacacaacaacaacaacacacaacaacaacaacacacaacaacaacaacacaca

SEQ ID NO: 45150 - DNA, 96 bp, Fusarium phaseoli
  misc_feature: 28
agatgcctcgtggattacctgccggcgatttccagggacctgggtgaaccccatggcgcggtgactccagaccagttagtgccatatcacttcaca

SEQ ID NO: 45151 - DNA, 96 bp, Fusarium phaseoli
  misc_feature: 28
tgtcgcggatggcaattgatctcttttcagttccggccatgtttgtttgtttgtttgtttgttttattcatagactgtcccagccgcccttgtggc

SEQ ID NO: 45152 - DNA, 96 bp, Fusarium phaseoli
  misc_feature: 28
tgtcaagccgtcagccagcatatcgccggtaggtgtgtatgcgaccttgatcgtcttttgagaaacagcttgtcttagccaatggttgtgaatatc

SEQ ID NO: 45153 - DNA, 96 bp, Fusarium phaseoli
  misc_feature: 28
gaacctgtggtgcgataaccagcagacaattcgtctcgtcaatgcagacatcgcgactctacaaacgaagctccgccacgttgatattcacaacca

SEQ ID NO: 45154 - DNA, 96 bp, Fusarium phaseoli
  misc_feature: 28
agcaagaacggattttagcagcgtaaactcttgaatagctaacgtactccacaagcgagtgaatcaaacaagtgagtgaatcacttttcctgacca

SEQ ID NO: 45155 - DNA, 96 bp, Fusarium phaseoli
  misc_feature: 28
actgggagttttgattggcctcaaccccccgtcgtgacctggttgcagtcttgtgggcactcatgggataaatcaaaacggcgctaaaaattccca

SEQ ID NO: 45156 - DNA, 96 bp, Fusarium phaseoli
  misc_feature: 28
cccttgatgaaggatgaagagaccgaatctgacaaaggcggcatcgttatgattgccgtcgctacatatctagtctggaggttctgtatcaagcca

SEQ ID NO: 45157 - DNA, 96 bp, Fusarium phaseoli
  misc_feature: 28
tggccttcacttctttcacggagtcgaatccctgaagggagcagatgagatgcgtctagacatacggcatcccaccattccgcaccagtcgtgtca

SEQ ID NO: 45158 - DNA, 96 bp, Fusarium phaseoli
  misc_feature: 28
tggattgaagagagatctctcttacactcacacacatcgagcttacataacagatcttatttgcaccggcccccgtgcaggtatgagctccccaag

SEQ ID NO: 45159 - DNA, 96 bp, Fusarium phaseoli
  misc_feature: 28
cagttcatttacagagagagaaaggtaaccaactccagaaaacagaccaatttatttcccagcgggcatttcgaatctacccaaaatccagctcca

SEQ ID NO: 45160 - DNA, 96 bp, Fusarium phaseoli
  misc_feature: 28
tggactcatttaattagctgccctccttcctctagaacccttttacctagtcatagaggccgggatcgactcttctaaagaccccgacctagaata

SEQ ID NO: 45161 - DNA, 96 bp, Fusarium phaseoli
  misc_feature: 28
tggaaagcctcgaggagacggcaatgaggggacggcaacggggagtgggatataagaaatggcaaggtataccaagcgctctgttcgctccctctc

SEQ ID NO: 45162 - DNA, 96 bp, Fusarium phaseoli
  misc_feature: 28
gatatctagtataatctatagtcgatatctgcaagaggcccactttaaaaccatataacgtcgtgatagcttccgagagcttagccaaaagtagca

SEQ ID NO: 45163 - DNA, 96 bp, Fusarium phaseoli
  misc_feature: 28
tgctaacctcagggccaaattctttcggctgaaagacactctgcactcttgaatttctgtggctcaggctccgacccgtctgagaggggagagctg

SEQ ID NO: 45164 - DNA, 96 bp, Fusarium phaseoli
  misc_feature: 28
tgcggaaccaacgggttgcacgaagacattgttagcgccgtggaagatgaaagaagaatcgcagctattctcgaagcgatggacgtgcttttagat

SEQ ID NO: 45165 - DNA, 96 bp, Fusarium phaseoli
  misc_feature: 28
tgccggagagcaaggggcaaaagggcgggggcagttagggactagtaacctctggcgttaagagttagaaaagtgaaggtaaccgctactgtctag

SEQ ID NO: 45166 - DNA, 96 bp, Fusarium phaseoli
  misc_feature: 28
tgatgtgaaacttgaatgaatggtttctgttagttcaatcgaaactttcttgaccgaaaagatgttcataaggagatgggacatatataggtcacc

SEQ ID NO: 45167 - DNA, 96 bp, Fusarium phaseoli
  misc_feature: 28
tgatgatgtgaaacttgaatgaatggtttctgttagttcaatcgaaactttcttgaccgaaaagatgttcataaggagatgggacatatataggtc

SEQ ID NO: 45168 - DNA, 96 bp, Fusarium phaseoli
  misc_feature: 28
cattatgtgcttggggactgcagacagtatgtattcgtcttgcaagttgttgacctcgagtgttgcagccaatcagaattttagcggtcaaactca

SEQ ID NO: 45169 - DNA, 96 bp, Fusarium phaseoli
  misc_feature: 28
tgagatggtcgtggggagtgcaaagagcatgctttcatgttttggatcaatgccccaagcaacatggatctgcatccaaagctacagcctagcttc

SEQ ID NO: 45170 - DNA, 96 bp, Fusarium phaseoli
  misc_feature: 28
cccgtaagcccatctactgagaagatatgagtctaagttccagaactatctgattaatctatccctattcagcccgagtcctctctatcactctca

SEQ ID NO: 45171 - DNA, 96 bp, Fusarium phaseoli
  misc_feature: 28
aatactttctatctctttcactataaagcacaggggtgtcaggaaacggctctaagtctcatgacgtaagaccagttcacgtctccacataggtca

SEQ ID NO: 45172 - DNA, 96 bp, Fusarium phaseoli
  misc_feature: 28
gtcctatcggtatagaagagacatgagaaaaacattgttcagtttcgctttggccctaattctctatgaggatagcttgtgacaatggtaatgtca

SEQ ID NO: 45173 - DNA, 96 bp, Fusarium phaseoli
  misc_feature: 28
tagctgttgggtcttcaaggcggactggtcaatgacacgactggtgcggaatggtgggatgccgtatgtctagacgcatctcatctgctcccttca

SEQ ID NO: 45174 - DNA, 96 bp, Fusarium phaseoli
  misc_feature: 28
tgaacgaattaccagcacgactgcgtacagtagggtggggtcgtgatccatcggatctaggggccaaggtgtctagatctgggagattcaacgagg

SEQ ID NO: 45175 - DNA, 96 bp, Fusarium phaseoli
  misc_feature: 28
tgaacctgtggtgcgataaccagcagacaattcgtctcgtcaatgcagacatcgcgactctacaaacgaagctccgccacgttgatattcacaacc

SEQ ID NO: 45176 - DNA, 96 bp, Fusarium phaseoli
  misc_feature: 28
tagggggagtggttgtggtgaaggttagggggagtggttgagttgagggttagggggagtggttgagataaagtttagagtgaaggggtagaaaga

SEQ ID NO: 45177 - DNA, 96 bp, Fusarium phaseoli
  misc_feature: 28
cacaagggcggctgggacagtctatgaataaaacaaacaaacaaacaaacaaacatggccggaactgaaaagagatcaattgccatccgcgacaga

SEQ ID NO: 45178 - DNA, 96 bp, Fusarium phaseoli
  misc_feature: 28
agagagatacgaccaagagagataccaccaagagagatgccaccaagagagatgccaccaaagaggcatgcaaccaagatacagccacaatccaga

SEQ ID NO: 45179 - DNA, 96 bp, Fusarium phaseoli
  misc_feature: 28
taatttttgaccggcaagcttgtttgaccggcatgcttatcatgcacgttattgagactgagggccatctctggcgactggacgaagagatccaga

SEQ ID NO: 45180 - DNA, 96 bp, Fusarium phaseoli
  misc_feature: 28
gttcagaaggccagcacttgtcttctgtgaatgagctccacagaaagaagtggccgttcttatgcaaaagcgggtgcagcgattctgtcttccaga

SEQ ID NO: 45181 - DNA, 96 bp, Fusarium phaseoli
  misc_feature: 28
acaagtcatcgctatctttttcgtcattatcgtcgtctacctcattattattatcaacaattaaagccagcacgactagccgctagacactgcaga

SEQ ID NO: 45182 - DNA, 96 bp, Fusarium phaseoli
  misc_feature: 28
cactatctctacctctcttatcctagatattatgggtagttaacccagctcagacttgtacgtaccaccctcgaagtgacacttctctaaaagaga

SEQ ID NO: 45183 - DNA, 96 bp, Fusarium phaseoli
  misc_feature: 28
aactaagcgctaagagtagatcagcgcaatacgtcaccttcggacactccgctgtattataatcagatgatccatcttcaataaatgcgcaataga

SEQ ID NO: 45184 - DNA, 96 bp, Fusarium phaseoli
  misc_feature: 28
tctataactaaggctaaatatatggcactttcttaatatactagagaattagcctagattaagaatctcttctctaaactataacttccgcttaat

SEQ ID NO: 45185 - DNA, 96 bp, Fusarium phaseoli
  misc_feature: 28
gtacagttttgtacgtacagaaaagttgtacgtacgtacagctacccaaaatacagtacgtacgtacgtacgtgtacagaaaaatgcatcactaga

SEQ ID NO: 45186 - DNA, 96 bp, Fusarium phaseoli
  misc_feature: 28
tctagacgcatctcatctgctcccttcagggattcgactccgtgaaagaagtgaaggccatgccaggtcgttggacgcttggaatgaaaatgaggc

SEQ ID NO: 45187 - DNA, 96 bp, Fusarium phaseoli
  misc_feature: 28
tctacggtcgcacacgtacggtgggcgataggggtcactgttgcaaaaccctgtgtcaattccttttgggcttaggcgctctgctccttagtcatc

SEQ ID NO: 45188 - DNA, 96 bp, Fusarium phaseoli
  misc_feature: 28
tcgttaccacagtggaggtccgcacgcactcaggagatagtatagcatacgtacctattgatacttatacggtggtcatgccaaatttcggcattt

SEQ ID NO: 45189 - DNA, 96 bp, Fusarium phaseoli
  misc_feature: 28
tcggattcttaccaacttccattctaactgaggcccagttggggaaggacagatcgttaaagatacatggtcaggaactcgtgcatagagacctag

SEQ ID NO: 45190 - DNA, 96 bp, Fusarium phaseoli
  misc_feature: 28
tcgatggtcccgccggccggcgtgttgaaccgaatatgcatcccgtacgtgcgtgcctcgtaaatccaatccatcggcgttggctcggcggggggg

SEQ ID NO: 45191 - DNA, 96 bp, Fusarium phaseoli
  misc_feature: 28
cctatctagtcattcaaagcgctcgttgaaatccgattcaaggattcgacgatcgggtgtttggaggcagtatctttactaatgagaaaacctcga

SEQ ID NO: 45192 - DNA, 96 bp, Fusarium phaseoli
  misc_feature: 28
tcgagaagctggaattgaatatgatgacctcaaagacaacggggcactactgggcgatgctggagatgaactccaccaggacctcaccgacattac

SEQ ID NO: 45193 - DNA, 96 bp, Fusarium phaseoli
  misc_feature: 28
taccgcaacaactaaaaagaaaagcgcacttccgttgcgccaaatggccgtgtccacgactagagtaaaacaatatttgccttccgtgcaaaagga

SEQ ID NO: 45194 - DNA, 96 bp, Fusarium phaseoli
  misc_feature: 28
gggttgggttgggttgggttgggttgggtttggcggtttgttggaataaatcacttacgacgtcttttttgggttccactgcgaatctcctcagga

SEQ ID NO: 45195 - DNA, 96 bp, Fusarium phaseoli
  misc_feature: 28
tccctactagatttcaacgatgctccatttcgcggcatcgttcactcccgtcctcaccaccatgagccatgcgaggcccgtcagctggcacggtgc

SEQ ID NO: 45196 - DNA, 96 bp, Fusarium phaseoli
  misc_feature: 28
ggaacacattattccggatcatatgggcgcagataggttggatatataaatggtttggagcattagttgattagggtggaaggaccggcggtggga

SEQ ID NO: 45197 - DNA, 96 bp, Fusarium phaseoli
  misc_feature: 28
tccattgctgttacatggcttatcaaggtcctcggcgctgcataccctaacgccgtccgtttctggccttcggtcaggacaaaccaacgcttgact

SEQ ID NO: 45198 - DNA, 96 bp, Fusarium phaseoli
  misc_feature: 28
agttcatctccagcatcgcccagtagtgccccgttgtctttgaggtcatcatattcaattccagcttctcgaagtgaggccatgttcttcagtgga

SEQ ID NO: 45199 - DNA, 96 bp, Fusarium phaseoli
  misc_feature: 28
gcctcatttggcatccatatttgctttttgaaaccttcctctaggaagcaccgggtcaattgcgcatccgttcaagcgcatattgcgtaatgtgga

SEQ ID NO: 45200 - DNA, 96 bp, Fusarium phaseoli
  misc_feature: 28
tcatttggcatccatatttgctttttgaaaccttcctctaggaagcaccgggtcaattgcgcatccgttcaagcgcatattgcgtaatgtggattt

SEQ ID NO: 45201 - DNA, 96 bp, Fusarium phaseoli
  misc_feature: 28
gtattatgttctgaaatcatctagtactaagtaaggagtttctcgtgctcttagcgccagcaactagcgtcattttgcaactacttgttcaaatga

SEQ ID NO: 45202 - DNA, 96 bp, Fusarium phaseoli
  misc_feature: 28
tcattcctccatcagttcggaggtagcacaaagagtggtccacaataatgctgcacaacaaaagctgtcaggacggaatgatcttccctccggacc

SEQ ID NO: 45203 - DNA, 96 bp, Fusarium phaseoli
  misc_feature: 28
tcattattattattatctcctcccaccttatatataataccacacccactccgcttatctaactctaccttaaaattcgccgtatcttacccctcc

SEQ ID NO: 45204 - DNA, 96 bp, Fusarium phaseoli
  misc_feature: 28
tcattatcgattacctgacccttgatccttttagcacgctcagtgcgacaccctgtggattgaagagagatctctcttacactcacacacatcgag

SEQ ID NO: 45205 - DNA, 96 bp, Fusarium phaseoli
  misc_feature: 28
acgtctttgctcagctacttatcacaatatggcattccactcagctcaaacatgagctacggccgagtcagatccagcaatatattacgttaatga

SEQ ID NO: 45206 - DNA, 96 bp, Fusarium phaseoli
  misc_feature: 28
ggcaagtccggaaaaacaacgcgagattgatggcatgcgtaatgaggtcactacgttccgtgcggttgccgagtcgatggttgtagacccgcctga

SEQ ID NO: 45207 - DNA, 96 bp, Fusarium phaseoli
  misc_feature: 28
gttttgtacgtacagaaaagttgtacgtacgtacagctacccaaaatacagtacgtacgtacgtacgtgtacagaaaaatgcatcaccgacggtga

SEQ ID NO: 45208 - DNA, 96 bp, Fusarium phaseoli
  misc_feature: 28
tcaatgaggttgtaagccagagaaagtgtcgattgtttatttctctttgctctaaggacaaaatatggaaacagagtaatgtatgagagaagacgt

SEQ ID NO: 45209 - DNA, 96 bp, Fusarium phaseoli
  misc_feature: 28
tcaagtgcactcagcatccctgcgcgacataacaacagtatgcgccgctaccgtctgctattaagccttaaagccctttgctattacgttgtaccg

SEQ ID NO: 45210 - DNA, 96 bp, Fusarium phaseoli
  misc_feature: 28
aaaagaattaaaaaggtaagattaaatactaaggtctaaaagagaaataaagtaatatctaaggtagagagggaggaaagagtaagctattaaata

SEQ ID NO: 45211 - DNA, 96 bp, Fusarium phaseoli
  misc_feature: 28
tattataccgtgccgtcaaggtaccggtattgtcacccaaggtcaatcaaagaggtcatgtcagcattcaagcttcagcatgtttgccattaaatc

SEQ ID NO: 45212 - DNA, 96 bp, Fusarium phaseoli
  misc_feature: 28
tatcttactcagccagaaatgacaggagtaatgagtgttttccggaatttctgtaaagatgacggtatgatagtaatacaagtacgattaccaagc

SEQ ID NO: 45213 - DNA, 96 bp, Fusarium phaseoli
  misc_feature: 28
tatctaagtacatggctctacttcatcagcagatgttttgtcagaattaggccttcttttaggtgcgtaagcagtttctggttgagcaaatgaggt

SEQ ID NO: 45214 - DNA, 96 bp, Fusarium phaseoli
  misc_feature: 28
tatcccgtaagcccatctactgagaagatatgagtctaagttccagaactatctgattaatctatccctattcagcccgagtcctctctatcactc

SEQ ID NO: 45215 - DNA, 96 bp, Fusarium phaseoli
  misc_feature: 28
atccgcaactagtttatacttatagcgaacataatcgcgaaatacggcatctaattagaagatatttataactttgacgagactggctttatgata

SEQ ID NO: 45216 - DNA, 96 bp, Fusarium phaseoli
  misc_feature: 28
taaatcaatcgttcatttacacgggcagcttttacctagaaacttcacataaatggccacgcttaaagctatcatgatggcttagatatgtaacta

SEQ ID NO: 45217 - DNA, 96 bp, Fusarium phaseoli
  misc_feature: 28
tagttaagatgaggtggtcaagataaggtagttaagatgaggtagttaagataaaggcggattataagagaagtaggaggttaatttacggttagg

SEQ ID NO: 45218 - DNA, 96 bp, Fusarium phaseoli
  misc_feature: 28
tagtcacgtcaggaattggtccttgttgtctccttggagtggcaagatctcgatctagtcgcagaagttggtaggggctgtacctggtatctttgg

SEQ ID NO: 45219 - DNA, 96 bp, Fusarium phaseoli
  misc_feature: 28
taggccatgcccaaagggctttgaagctaaaagtacatatacctccttagttcttgccttaatctcgctaagcccttatggatctcgccttattct

SEQ ID NO: 45220 - DNA, 96 bp, Fusarium phaseoli
  misc_feature: 28
cctaggaagcgagggagggagcgggtggttatgagggttagtttaaggggactaaggtgttatttacctgtaaccctaaccctaaggcaatgccta

SEQ ID NO: 45221 - DNA, 96 bp, Fusarium phaseoli
  misc_feature: 28
taggaggttaatttacggttagggataaagtgaatattaaatatgaggaaggaggggtaagatacggcgaattttaaggtagagttagataagcgg

SEQ ID NO: 45222 - DNA, 96 bp, Fusarium phaseoli
  misc_feature: 28
taaatgtgccttagtcaaggcacgtttacaataattggtagggagctactcttatgccttttaatttatcttttaaggtatttagattaagatcta

SEQ ID NO: 45223 - DNA, 96 bp, Fusarium phaseoli
  misc_feature: 28
aggataaggtcgaggttgaccgattccggcagtatctagcaagatagctagcgtaggggtgtatctattattagctgcttaatgctagactatcta

SEQ ID NO: 45224 - DNA, 96 bp, Fusarium phaseoli
  misc_feature: 28
cttaccctaacctatctattccttacttaacgtcctcattattattattatctcctcccaccttatatataataccacacccactccgcttatcta

SEQ ID NO: 45225 - DNA, 96 bp, Fusarium phaseoli
  misc_feature: 28
ctaacctatctattccttacttaacgtcctcattattattattatctcctcccaccttatatataataccacacccactccgcttatctaactcta

SEQ ID NO: 45226 - DNA, 96 bp, Fusarium phaseoli
  misc_feature: 28
tagaagagacatgagaaaaacattgttcagtttcgctttggccctaattctctatgaggatagcttgtgacaatggtaatgtcagagacaggcgag

SEQ ID NO: 45227 - DNA, 96 bp, Fusarium phaseoli
  misc_feature: 28
tagaaagttaaaggtttagcgataattaaaataaatataccttatttttagatattttatttagcgcttaagctccagttaatatcggtttagcgc

SEQ ID NO: 45228 - DNA, 96 bp, Fusarium phaseoli
  misc_feature: 28
tagaaacgcgtctatgcgtttcttagctgttgtcgacaaggcgccgttgccgtgctggtcggacatagcaacagcattctcaacatatgtccttgc

SEQ ID NO: 45229 - DNA, 96 bp, Fusarium phaseoli
  misc_feature: 28
taaccacaagacctttctctttcttttaatcaagacgcattctctacctttaacatcagccatcccactgactgctttattcatccagctgcagta

SEQ ID NO: 45230 - DNA, 96 bp, Fusarium phaseoli
  misc_feature: 28
agtctatgaataaaacaaacaaacaaacaaacaaacaaacaaacgagggagcgagagtaccgatagcgtgtatatacccgtcaggatggactagta

SEQ ID NO: 45231 - DNA, 96 bp, Fusarium phaseoli
  misc_feature: 28
ataacacgctcatcgtcggcgccggtgaacacggttgacaagaataacacaagcttgttgtccttccaagcgatttggttgacctagggatacgta

SEQ ID NO: 45232 - DNA, 96 bp, Fusarium phaseoli
  misc_feature: 28
taccatcctcatcaccacgatcatcgccaccgccgccaatgccgtcctggctgccccggctctccatttcggcctgcctcctctccctctgctccc

SEQ ID NO: 45233 - DNA, 96 bp, Fusarium phaseoli
  misc_feature: 28
gaacgcaacagttatgccaggagaacgtggaacctacttcctcctagtgcaagggcccaagggccaacagaatgttactctcgataacgctctgta

SEQ ID NO: 45234 - DNA, 96 bp, Fusarium phaseoli
  misc_feature: 28
taattatctgaatctagcgagctagtatcatctatagggagacgagagctattaccggatttactgttagatattagctgtagatgcttaaggggg

SEQ ID NO: 45235 - DNA, 96 bp, Fusarium phaseoli
  misc_feature: 28
taattaagtatttatatttatttacgctttatttctaagctaatattcccttattcctttattcccttattcctatattcctatattcctatattc

SEQ ID NO: 45236 - DNA, 96 bp, Fusarium phaseoli
  misc_feature: 28
taagtcaccaacatctcgactcgattcttaagcaaaacaagggctaactgaactagaacagattgagaggaggaggcagattgttctgggcaagtt

SEQ ID NO: 45237 - DNA, 96 bp, Fusarium phaseoli
  misc_feature: 28
taagtagcttttcccactaagactcgatccattagttagatatgcttaggccccagatataacaggagctcagtctcgctccctacccgtggactc

SEQ ID NO: 45238 - DNA, 96 bp, Fusarium phaseoli
  misc_feature: 28
aaaacatatgaacgaatgctcagcaatatcccctcgacttccagggattatgctcgacaaatgctgacggtgctctgctgtgcaaagaggccctta

SEQ ID NO: 45239 - DNA, 96 bp, Fusarium phaseoli
  misc_feature: 28
acgctactcgtaaagcaggtgctttggagcaagtccatctgctggtggagttcgaaatctgccgtccacttgactcagagtaagccgtccgagtta

SEQ ID NO: 45240 - DNA, 96 bp, Fusarium phaseoli
  misc_feature: 28
taaccttggactgcgattcatttctcatggcggatgggacacattcagaaagacaggaaagaaccgaggtcgcgtttgtgacatcgcgtttctggt

SEQ ID NO: 45241 - DNA, 96 bp, Fusarium phaseoli
  misc_feature: 28
taaccgtaaattaacctcctacttctcttataatccgcctttatcttaactacctcatcttaactaccttatcttgaccacctcatcttaactacc

SEQ ID NO: 45242 - DNA, 96 bp, Fusarium phaseoli
  misc_feature: 28
aaaaaaaaggagagagaaataaaggagagaaaaaaaagaattaagaaattaatagaaaaataaaaaaataaggtaaataatattaattaagggtta

SEQ ID NO: 45243 - DNA, 96 bp, Fusarium phaseoli
  misc_feature: 28
atgcccggcactcattggaaggttactgggagttgctgacctctgacaagaagacacaatactttttgatatgctcagtgtatatcttgatcttta

SEQ ID NO: 45244 - DNA, 96 bp, Fusarium phaseoli
  misc_feature: 28
gtttttacagacgatatgccagtaaagaagcatacgaccaagagagatgcgaccaagagagatacgaccaagagagataccaccaagagagatgcc

SEQ ID NO: 45245 - DNA, 96 bp, Fusarium phaseoli
  misc_feature: 28
gtttgtaggtgaagggcttcctataggaatgcaacagccgaatgagttcttcacatagctagctcatccagcagtgcatctttcagctggtttgtc

SEQ ID NO: 45246 - DNA, 96 bp, Fusarium phaseoli
  misc_feature: 28
cctgacgctcagtataccttgcatgcgtgtctgccagggagctagcgtgtaaggctgaatcactcccatggtgccctttggtgtttccttgcaaac

SEQ ID NO: 45247 - DNA, 96 bp, Fusarium phaseoli
  misc_feature: 28
gaacgtggaacctacttcctcctagtgcaagggcccaagggccaacagaatgttactctcgataacgctctgtatgttccggaaggatgctcaaac

SEQ ID NO: 45248 - DNA, 96 bp, Fusarium phaseoli
  misc_feature: 28
gtttcgcctcatcgtgaagtgtcctaaaatgactgccgatttcactatatatatacctcgtcggacttgttcccaacactcgcttcctttcctcag

SEQ ID NO: 45249 - DNA, 96 bp, Fusarium phaseoli
  misc_feature: 28
gttgttggacgtggttaaagagatgtgttgattgaatcaattatgattgttcctagtgaggttgtcagtaatgggagatccctcaatgcattctat

SEQ ID NO: 45250 - DNA, 96 bp, Fusarium phaseoli
  misc_feature: 28
gttggcttgatacagaacctccagactagatatgtagcgacggcaatcataacgatgccgcctttgtcagattcggtctcttcatccttcatcaag

SEQ ID NO: 45251 - DNA, 96 bp, Fusarium phaseoli
  misc_feature: 28
ctcctttttcaaacttcccttttcaaacttcccttttcaaacttcccttttcaaacttcccttttcaaacttcccttttcaaacttccctttcaac

SEQ ID NO: 45252 - DNA, 96 bp, Fusarium phaseoli
  misc_feature: 28
cactgcagcaaaataccatcgaccggctgagacactcaattgactgaacctgacagaccccttttcacctttgttctgtcgcgtcatatcatgaac

SEQ ID NO: 45253 - DNA, 96 bp, Fusarium phaseoli
  misc_feature: 28
gttagaactgttaatcctatacagtattgagcacttgcactttccgccccaaaaacaacatgctctttgtaaagtctagggtggggttatctaagt

SEQ ID NO: 45254 - DNA, 96 bp, Fusarium phaseoli
  misc_feature: 28
gttaagcctttaacagttagcgccttatttggggtctcagcctcagaagttagaggtgtgcaacatgggtgtgggcagaagagattggatttttcg

SEQ ID NO: 45255 - DNA, 96 bp, Fusarium phaseoli
  misc_feature: 28
aagggaggtttgacacccggtatctagttagattggacctgtcgggatgcgtgagagggagcaaactcccttactacaggtttgaagcggcttaac

SEQ ID NO: 45256 - DNA, 96 bp, Fusarium phaseoli
  misc_feature: 28
atgaaccggtcaatccaatgcttgccaagcggccttgagtctccttgggccatcaacacacgctgcactaattgcctaatttagaagtgtgttaac

SEQ ID NO: 45257 - DNA, 96 bp, Fusarium phaseoli
  misc_feature: 28
attcaacatcaaccaatggaccgaatgcacgtactgtctgacacaaccccatcgggcactctataaagtcccatgacaagcttgaaacgtagccac

SEQ ID NO: 45258 - DNA, 96 bp, Fusarium phaseoli
  misc_feature: 28
cattatatgaacacgcgtgtctgacacgatcacccccaacgccagaacgatcacggtgatcacctttctgattaccgcgatcacttacacaatcac

SEQ ID NO: 45259 - DNA, 96 bp, Fusarium phaseoli
  misc_feature: 28
gcgaagacgtccgccaaaataccgtaagaactcacgaaattcgaacaaaattgagttcaaccggcggtcttggcgcattgcttcccggatgatcac

SEQ ID NO: 45260 - DNA, 96 bp, Fusarium phaseoli
  misc_feature: 28
gtgaaggttagggggagtggttgagttgagggttagggttaagtggttgtggtgaaggttagggggagtggttgtggtgaaggttagggggagggg

SEQ ID NO: 45261 - DNA, 96 bp, Fusarium phaseoli
  misc_feature: 28
gtgaaaaggggcacgaagttggtcaccgatatcaacagctcccatttcctcgttatactctgctgcaaaggacgggatccacacgctcaacacggc

SEQ ID NO: 45262 - DNA, 96 bp, Fusarium phaseoli
  misc_feature: 28
gagagatacgaccaagagagataccaccaagagagatgccaccaagagagatgccaccaaagaggcatgcaaccaagatacagccacaatccagac

SEQ ID NO: 45263 - DNA, 96 bp, Fusarium phaseoli
  misc_feature: 28
gattggttgggaaaacacattcgttaggactgatttaatggcaaacatgctgaagcttgaatgctgacatgacctctttgattgaccttgggtgac

SEQ ID NO: 45264 - DNA, 96 bp, Fusarium phaseoli
  misc_feature: 28
gtcaccaacatctcgactcgattcttaagcaaaacaagggctaactgaactagaacagattgagaggaggaggcagattgttctgggcaagttgat

SEQ ID NO: 45265 - DNA, 96 bp, Fusarium phaseoli
  misc_feature: 28
gtcaatgaggttgtaagccagagaaagtgtcgattgtttatttctctttgctctaaggacaaaatatggaaacagagtaatgtatgagagaagacg

SEQ ID NO: 45266 - DNA, 96 bp, Fusarium phaseoli
  misc_feature: 28
gtattataccgtgccgtcaaggtaccggtattgtcacccaaggtcaatcaaagaggtcatgtcagcattcaagcttcagcatgtttgccattaaat

SEQ ID NO: 45267 - DNA, 96 bp, Fusarium phaseoli
  misc_feature: 28
gacatcgcgactctacaaacgaagctccgccacgttgatattcacaaccattggctaagacaagctgtttctcaaaagacgatcaaggtcgcatac

SEQ ID NO: 45268 - DNA, 96 bp, Fusarium phaseoli
  misc_feature: 28
atattaggtattcctcggtgcgggattaaggaagttttagatactactctagcaaataattaactactttccggaattggagtgcgtaatatatac

SEQ ID NO: 45269 - DNA, 96 bp, Fusarium phaseoli
  misc_feature: 28
ggaggtagatagataacgggggaggaggataaagtatataaagaggattacggtaatattagggtatattatatataagaagaaaagaggaagtac

SEQ ID NO: 45270 - DNA, 96 bp, Fusarium phaseoli
  misc_feature: 28
gtaagagaggtcgattccttccaagtgtgagaagaacccggcaagcgcgcacgggcgaaaagcgcgtattttgacgaagacgggcaagtccctccg

SEQ ID NO: 45271 - DNA, 96 bp, Fusarium phaseoli
  misc_feature: 28
ggtttttcctcggattcgctaggtttgtcatcgagtctccacgaatgttggaagtcattccataacatctgaagctttgtcgcgtgcttctttttc

SEQ ID NO: 45272 - DNA, 96 bp, Fusarium phaseoli
  misc_feature: 28
ggttttccaggatgattcgattgagaacctctgccaatctattttgatcgtgttgctccgttgctgtgtaagagagtttaattcctctgtcccggc

SEQ ID NO: 45273 - DNA, 96 bp, Fusarium phaseoli
  misc_feature: 28
aacgtggaacctacttcctcctagtgcaagggcccaagggccaacagaatgttactctcgataacgctctgtatgttccggaaggatgctcaaacc

SEQ ID NO: 45274 - DNA, 96 bp, Fusarium phaseoli
  misc_feature: 28
ggttgccctattgccctattggaccgtagaaacgaatgctgtggttttttgtctttattcttatcctctcgtttcattccgcttcatatgtacatc

SEQ ID NO: 45275 - DNA, 96 bp, Fusarium phaseoli
  misc_feature: 28
attatatgaacacgcgtgtctgacacgatcacccccaacgccagaacgatcacggtgatcacctttctgattaccgcgatcacttacacaatcacc

SEQ ID NO: 45276 - DNA, 96 bp, Fusarium phaseoli
  misc_feature: 28
cccccctattctcccttctgctctgaccaccgtctctccaaccgcgtaataacctggcatccacggcttgcttatatgccaccgccggtccttccc

SEQ ID NO: 45277 - DNA, 96 bp, Fusarium phaseoli
  misc_feature: 28
ggctttcttcctttcttttttttgttccttttagataaaatccataaatatagcggagagaaggcaagtgtcttgtagctcataggaaaggctttc

SEQ ID NO: 45278 - DNA, 96 bp, Fusarium phaseoli
  misc_feature: 28
acagatcttatttgcaccggcccccgtgcaggtatgagctccccaagtgtagggcgccgtcgaggcgcacaggtcctgtgtgctcggggcacagcc

SEQ ID NO: 45279 - DNA, 96 bp, Fusarium phaseoli
  misc_feature: 28
ggctatgttcgtatcgcggctgatcaaggagattggcgtggagcttgattcagcacggctgaacctgtggtgcgataaccagcagacaattcgtct

SEQ ID NO: 45280 - DNA, 96 bp, Fusarium phaseoli
  misc_feature: 28
ggctaatgaaacgaccgtacgtcggtcgaattgccagtcagggctgagtgcagggattcatgacgccacaaggatcactcggacgaagccaaattg

SEQ ID NO: 45281 - DNA, 96 bp, Fusarium phaseoli
  misc_feature: 28
ggcgttcgcaatacccgctatataggcatcgtttgcgtatgccagaatagggcccgactatatgttattcggggactattaagcttgtgagttagt

SEQ ID NO: 45282 - DNA, 96 bp, Fusarium phaseoli
  misc_feature: 28
ggcggattcgctagcaaatccaatgggtttcccatacaaaaaaaaaaggcgctatcctatcctagctgcgcggcggattcgctagcaaatccaatg

SEQ ID NO: 45283 - DNA, 96 bp, Fusarium phaseoli
  misc_feature: 28
cgaagcctgatctcctactggagcaatagacgtgctgagctgaactatctacaatcgctgccgcattcgacctcgcttggaatacccgcaaaggcc

SEQ ID NO: 45284 - DNA, 96 bp, Fusarium phaseoli
  misc_feature: 28
ggcctagctcggccagacttgaacaaaagtatatgtgagcatcttggatctacaatgaagccttctcagaaactcctgatcttctgttctcacagc

SEQ ID NO: 45285 - DNA, 96 bp, Fusarium phaseoli
  misc_feature: 28
ggatgatttggcggatttggtcgaggtgcacgtcgatgatccggaggcacatccattagacgaggaccgagtggacggggtgacattgcaggtcgt

SEQ ID NO: 45286 - DNA, 96 bp, Fusarium phaseoli
  misc_feature: 28
aggcagattgttctgggcaagttgattgatgatctatatgatctagaacaacaattgcttagccagaagctaggctgtagctttggatgcagatcc

SEQ ID NO: 45287 - DNA, 96 bp, Fusarium phaseoli
  misc_feature: 28
ggaggatgctatctccccaatgcgtgcggacctccactgtggtcgcgacaagggattatggccaattaaaatgcacgaaataaagtgtacaaaact

SEQ ID NO: 45288 - DNA, 96 bp, Fusarium phaseoli
  misc_feature: 28
ggaggaggaagcaggaggcccacggtcatcagccaaggcggggagaagaagaaaggcggcagccgcatcagacagggccaagtggccagcaaaggg

SEQ ID NO: 45289 - DNA, 96 bp, Fusarium phaseoli
  misc_feature: 28
ggaggagataataataataatgaggacgttaagtaaggaatagataggttagggtaagagggagtataagagggttaaaaatagagtaattaagag

SEQ ID NO: 45290 - DNA, 96 bp, Fusarium phaseoli
  misc_feature: 28
acagttcatttacagagagagaaaggtaaccaactccagaaaacagaccaatttatttcccagcgggcatttcgaatctacccaaaatccagctcc

SEQ ID NO: 45291 - DNA, 96 bp, Fusarium phaseoli
  misc_feature: 28
aatatattgaaatacattgacgtcaatcatttaccaactgttgaacatgtggggtgtcacgtgttggtcaaggatcttgagattaaaagcaggtcc

SEQ ID NO: 45292 - DNA, 96 bp, Fusarium phaseoli
  misc_feature: 28
ggacaatagcggttagcctcacttgtccaactcttctcccccggacagcagcggttagtctcactttcccaactctcctctcctagacagtagcgg

SEQ ID NO: 45293 - DNA, 96 bp, Fusarium phaseoli
  misc_feature: 28
ggaagtgatcatccgggaagcaatgcgccaagaccgccggttgaactcaattttgttcgaatttcgtgagttcttacggtattttggcggacgtct

SEQ ID NO: 45294 - DNA, 96 bp, Fusarium phaseoli
  misc_feature: 28
ggaagaagccaatctctgacaaagggttccgaacatgtacggagcaaagcgcgaggaacgtgccagacaacttggaaacacgcacctccgccgagt

SEQ ID NO: 45295 - DNA, 96 bp, Fusarium phaseoli
  misc_feature: 28
ggaactctgttgacgctagtactagaaggcagagacgccgtggcaagtataggcgtcgacgttatatctaactagtagatattattatatagtcgg

SEQ ID NO: 45296 - DNA, 96 bp, Fusarium phaseoli
  misc_feature: 28
aaagaattaattataaaaaaggataataacattataatacctagcgataaatttaataaacttttaaaaaactccaattactatctatagataagc

SEQ ID NO: 45297 - DNA, 96 bp, Fusarium phaseoli
  misc_feature: 28
attgagctcaaggccaatcctccgcttggatttagacccgttcaaactcggaagttacacttgcttgggccggtattcgccgttttccaatgcagc

SEQ ID NO: 45298 - DNA, 96 bp, Fusarium phaseoli
  misc_feature: 28
gctgagagtgcgagaataacaagatcgaagcaactacaacaacagcttgagaaaaaaaaggcctcactggaacgcgcgtctgcagcctatgataag

SEQ ID NO: 45299 - DNA, 96 bp, Fusarium phaseoli
  misc_feature: 28
ccatctcagccgttcttctcattaagtatcgaatcgactgttgagtcgttacgaaactgccaaccatcaaagcactacagttcagtgcaggatagc

SEQ ID NO: 45300 - DNA, 96 bp, Fusarium phaseoli
  misc_feature: 28
catattcaacatcaaccaatggaccgaatgcacgtactgtctgacacaaccccatcgggcactctataaagtcccatgacaagcttgaaacgtagc

SEQ ID NO: 45301 - DNA, 96 bp, Fusarium phaseoli
  misc_feature: 28
cctttacggccccaagtttgtacggtctatttggcccatatggtcatctcgattcagtttgtgatgccgctgccaattttgctgcaaatgctacgc

SEQ ID NO: 45302 - DNA, 96 bp, Fusarium phaseoli
  misc_feature: 28
atccacgtctgtcgcggatggcaattgatctcttttcagttccggccatgtttgtttgtttgtttgtttgttttattcatagactgtcccagccgc

SEQ ID NO: 45303 - DNA, 96 bp, Fusarium phaseoli
  misc_feature: 28
gcggattcgctagcaaatccaatgggtttcccatacaaaaaaaaaaggcgctatcctatcctagctgcgcggcggattcgctagcaaatccaatgg

SEQ ID NO: 45304 - DNA, 96 bp, Fusarium phaseoli
  misc_feature: 28
gcggagaggttacggtcgagatatcgagaggccgaacgaacccgtatgcaatggtttcggtcggtggttattcggtcgagtggtggaggggggaag

SEQ ID NO: 45305 - DNA, 96 bp, Fusarium phaseoli
  misc_feature: 28
gcgctaacacgccgtgtcttcaattaggcagtgtgatctagtttatcccttccattgttgctcatgagagccttgacacgtacttgctgcagctgc

SEQ ID NO: 45306 - DNA, 96 bp, Fusarium phaseoli
  misc_feature: 28
gcgatttgatttgatttgaattcgttcggacttgatttgatttgatttgatttgatttgatttgatttggatttatttgaactcatttatttgttg

SEQ ID NO: 45307 - DNA, 96 bp, Fusarium phaseoli
  misc_feature: 28
gcgagaactatcaacaaccgcaagctgcggcatgacgatgctcatttgtttatcatgtcgcgattccgctcccatattgctatctcatccactttc

SEQ ID NO: 45308 - DNA, 96 bp, Fusarium phaseoli
  misc_feature: 28
acgaagcctgatctcctactggagcaatagacgtgctgagctgaactatctacaatcgctgccgcattcgacctcgcttggaatacccgcaaaggc

SEQ ID NO: 45309 - DNA, 96 bp, Fusarium phaseoli
  misc_feature: 28
cctagacagtagcggttaccttcacttttctaactcttaacgccagaggttactagtccctaactgcccccgcccttttgccccttgctctccggc

SEQ ID NO: 45310 - DNA, 96 bp, Fusarium phaseoli
  misc_feature: 28
cactaagaagatataagtctaagttctagaactatctaattaatctatccccattcagcccgagtcctctctatcactctcagcctcctcctcggc

SEQ ID NO: 45311 - DNA, 96 bp, Fusarium phaseoli
  misc_feature: 28
atggatgatttggcggatttggtcgaggtgcacgtcgatgatccggaggcacatccattagacgaggaccgagtggacgggttgacattgcagggc

SEQ ID NO: 45312 - DNA, 96 bp, Fusarium phaseoli
  misc_feature: 28
gccaagggcgaagctcaaaggccggcatatgcggcagagtaggcgatggtttcttgctttttaggaatgcctcacacttgccatatatgtctgggg

SEQ ID NO: 45313 - DNA, 96 bp, Fusarium phaseoli
  misc_feature: 28
gcattatgtgcttggggactgcagacagtatgtattcgtcttgcaagttgttgacctcgagtgttgcagccaatcagaattttagcggtcaaactc

SEQ ID NO: 45314 - DNA, 96 bp, Fusarium phaseoli
  misc_feature: 28
gcatctatactgatctgattaattgattgcctttgttcctcttttactcacactacttcccagcatattagcgggcagattgtttgaaaacctcat

SEQ ID NO: 45315 - DNA, 96 bp, Fusarium phaseoli
  misc_feature: 28
aagggcggctgggacagtctatgaataaaacaaacaaacaaacaaacaaacaaacaaactccctaccacgaaccctgcttgaccagcaacatatgc

SEQ ID NO: 45316 - DNA, 96 bp, Fusarium phaseoli
  misc_feature: 28
gcagcggttagcctcactttcccaactctcctcctctcctggacaatagcggttagcctcacttgtccaactcttctcccccggacagcagcggtt

SEQ ID NO: 45317 - DNA, 96 bp, Fusarium phaseoli
  misc_feature: 28
gcagattgttctgggcaagttgattgatgatctatatgatctagaacaacaattgcttagccagaagctaggctgtagctttggatgcagatccat

SEQ ID NO: 45318 - DNA, 96 bp, Fusarium phaseoli
  misc_feature: 28
aatgaaagttttgttgttcctggatctctggggccaccaaagcctgtaacgtactccacaagcgagtgaaccagacaagcgagtgaatcaaaaatc

SEQ ID NO: 45319 - DNA, 96 bp, Fusarium phaseoli
  misc_feature: 28
caaaaatgcggtacttctgaaccgcgccaatttcctaggatttagaagtcacttcgttataagggtgaacttgataattgcgaccgggacaaaatc

SEQ ID NO: 45320 - DNA, 96 bp, Fusarium phaseoli
  misc_feature: 28
ataccaatttaggccaaggtaacccaggcattagtcagcttcttagagggatctgcactttttgcccgccgacagtctggaaacttttctccaatc

SEQ ID NO: 45321 - DNA, 96 bp, Fusarium phaseoli
  misc_feature: 28
gattaatttatatcttttacctttaaaggggaagagaagaagtatttttatactttaatcttttctttttttctttttttctttttctctctttct

SEQ ID NO: 45322 - DNA, 96 bp, Fusarium phaseoli
  misc_feature: 28
gatgtgaaacttgaatgaatggtttctgttagttcaatcgaaactttcttgaccgaaaagatgttcataaggagatgggacatatataggtcaccg

SEQ ID NO: 45323 - DNA, 96 bp, Fusarium phaseoli
  misc_feature: 28
caaatttcggcatttggtcacgtgctcagacttcgggagaatcgcttcgattgcttgatcctgacggatatattacgtatagacgtgcggggcatc

SEQ ID NO: 45324 - DNA, 96 bp, Fusarium phaseoli
  misc_feature: 28
gaggcaagccggggcttgcacatagagccttgaggaacgaaagtttctgagggcggagcgagataggatttttgataggtcgggaagataaagatc

SEQ ID NO: 45325 - DNA, 96 bp, Fusarium phaseoli
  misc_feature: 28
gatcatccgggaagcaatgcgccaagaccgccggttgaactcaattttgttcgaatttcgtgagttcttacggtattttggcggacgtcttcgctg

SEQ ID NO: 45326 - DNA, 96 bp, Fusarium phaseoli
  misc_feature: 28
accacaagacctttctctttcttttaatcaagacgcattctctacctttaacatcagccatcccactgactgctttattcatccagctgcagtatc

SEQ ID NO: 45327 - DNA, 96 bp, Fusarium phaseoli
  misc_feature: 28
gataatagtgagtataaagataaggataaggaagaagattaaaataaggaagaagataaagaggaggaagaggaaaaagataatcgcttctatatt

SEQ ID NO: 45328 - DNA, 96 bp, Fusarium phaseoli
  misc_feature: 28
gataaggtcgaggttgaccgattccggcagtatctagcaagatagctagcgtaggggtgtatctattattagctgcttaatgctagactatctaat

SEQ ID NO: 45329 - DNA, 96 bp, Fusarium phaseoli
  misc_feature: 28
acgaattgtctgctggttatcgcaccacaggttcagccgtgctgaatcaagctccacgccaatctccttgatcagccgcgatacgaacatagcctc

SEQ ID NO: 45330 - DNA, 96 bp, Fusarium phaseoli
  misc_feature: 28
aagacagatttcgctgggtggagtgtcaattcaaagcactggccagttgtccgcagagcgaagaccttctcgaacaactgctcgattccctgcctc

SEQ ID NO: 45331 - DNA, 96 bp, Fusarium phaseoli
  misc_feature: 28
actctcctcctctcctggacaatagcggttagcctcacttgtccaactcttctcccccggacagcagcggttagtctcactttcccaactctcctc

SEQ ID NO: 45332 - DNA, 96 bp, Fusarium phaseoli
  misc_feature: 28
gagcgagctttgctgattctgttttgcatttttaaaatgcattctgtctcttttttacccatcttttttccccttttccttcagtcctgtcatgtg

SEQ ID NO: 45333 - DNA, 96 bp, Fusarium phaseoli
  misc_feature: 28
gagcctcagccaagtccttgatcttgtcttcttcttcctcccccctgacgctcagtataccttgcatgcgtgtctgccagggagctagcgtgtaag

SEQ ID NO: 45334 - DNA, 96 bp, Fusarium phaseoli
  misc_feature: 28
gagatatggtattttggttctctgcactgtcttggtactttggctttggccattgtggtatccaagttcgtaatgaagtagaaccttgtccctgct

SEQ ID NO: 45335 - DNA, 96 bp, Fusarium phaseoli
  misc_feature: 28
gagaggccgcatgggatggtctgcgctaacacgccgtgtcttcaattaggcagtgtgatctagtttatcccttccattgttgctcatgagagcctt

SEQ ID NO: 45336 - DNA, 96 bp, Fusarium phaseoli
  misc_feature: 28
ctgaagcccgtcaactaggctcgagcagagcagtcctatcggtatagaagagacatgagaaaaacattgttcagtttcgctttggccctaattctc

SEQ ID NO: 45337 - DNA, 96 bp, Fusarium phaseoli
  misc_feature: 28
gactttgacgaataccgaggaatgtcagatgctgggtttccatcaggcggcaacgaagaaaacgatccgagtgatgcacaacacgacaacggacat

SEQ ID NO: 45338 - DNA, 96 bp, Fusarium phaseoli
  misc_feature: 28
gactttcaagactcgaactactcgggcctatctggctactcagaccgaagctcatacgctcgcaccctgcgcacctcgctctagcgttactttcct

SEQ ID NO: 45339 - DNA, 96 bp, Fusarium phaseoli
  misc_feature: 28
cccgtcaatacgcagtcgcgtaacaaatactcgggctccaacctcgtaatgtgcctccgcacaaacagaagatgcaaaaccagcctcgacccagtc

SEQ ID NO: 45340 - DNA, 96 bp, Fusarium phaseoli
  misc_feature: 28
gactacccaggcccaacacaacttctggacgtcttcgttgtcttcttgagaatacctgctccacaattagcccttgaccacaaggcgagcgcagtc

SEQ ID NO: 45341 - DNA, 96 bp, Fusarium phaseoli
  misc_feature: 28
gactaagcagcctttctcggcagcttagataagagctcagtctcttacattattaaaggttaataattaaaagattagactaaaagaattaataat

SEQ ID NO: 45342 - DNA, 96 bp, Fusarium phaseoli
  misc_feature: 28
aagtgcactcagcatccctgcgcgacataacaacagtatgcgccgctaccgtctgctattaagccttaaagccctttgctattacgttgtaccgtc

SEQ ID NO: 45343 - DNA, 96 bp, Fusarium phaseoli
  misc_feature: 28
gacgaatacatactgtctgcagtccccaagcacataatgccctcgataaacgagcccaaaatagaacaacgaaagtcttgataggccaaagcgttc

SEQ ID NO: 45344 - DNA, 96 bp, Fusarium phaseoli
  misc_feature: 28
gaattggtccttgttgtctccttggagtggcaagatctcgatctagtcgcagaagttggtaggggctgtacctggtatctttggcctacagtagct

SEQ ID NO: 45345 - DNA, 96 bp, Fusarium phaseoli
  misc_feature: 28
aattatttaatttaaggttagagttaattatttagtctaaggtttagggttaattatttagtctatcctatcctatcctagctgcgcggcggattc

SEQ ID NO: 45346 - DNA, 96 bp, Fusarium phaseoli
  misc_feature: 28
gaatacatactgtctgcagtccccaagcacataatgccctcgataaacgagcccaaaatagaacaacgaaagtcttgataggccaaagcgttctag

SEQ ID NO: 45347 - DNA, 96 bp, Fusarium phaseoli
  misc_feature: 28
acaagatgcctcgtggattacctgccggcgatttccagggacctgggtgaaccccatggcgcggtgactccagaccagttagtgccatatcacttc

SEQ ID NO: 45348 - DNA, 96 bp, Fusarium phaseoli
  misc_feature: 28
cttttgtcaagtgcactcagcatccctgcgcgacacaacaacacctcatcgaaaatctcgtcaccttgaaaatctcgtatcccaacccatgacttc

SEQ ID NO: 45349 - DNA, 96 bp, Fusarium phaseoli
  misc_feature: 28
atatattctatctctttttcttcctcttttaacttattccttctaccttatttcttttaccttatttcttttactttatttcttctaccttacttc

SEQ ID NO: 45350 - DNA, 96 bp, Fusarium phaseoli
  misc_feature: 28
gaaggttagggggagtggttgtggtgaaggttagggggagtggttgagttgagggttagggttaagtggttgtggtgaaggttagggggaggggtt

SEQ ID NO: 45351 - DNA, 96 bp, Fusarium phaseoli
  misc_feature: 28
gaacctcgcattggaaccgggctcattggtaccatcctcatcaccacgatcatcgccaccgccgccaatgccgtcctggctgccccggctctccct

SEQ ID NO: 45352 - DNA, 96 bp, Fusarium phaseoli
  misc_feature: 28
gaaaagaagctctgtgattggctaagggttcaagatgcccttggaaccccgttaacacacttctaaattaggcaattagtgcagcgtgtgttgatg

SEQ ID NO: 45353 - DNA, 96 bp, Fusarium phaseoli
  misc_feature: 28
cggtgcaaataagatctgttatgtaagctcgatgtgtgtgagtgtaagagagatctctcttcaatccacagggtgtcgcactgagcgtgctaaaag

SEQ ID NO: 45354 - DNA, 96 bp, Fusarium phaseoli
  misc_feature: 28
ctttcaaatcgcaaactattgggaaagaggaagatatctgtgctctttactgtatacccgctggctccttgtctttttaacttagaaacgtccctg

SEQ ID NO: 45355 - DNA, 96 bp, Fusarium phaseoli
  misc_feature: 28
cccctcgaccccttgggccttaaggaccctaaagactatgcttgaggcccaatctcaatctaaataccttaagagacggattaaaaggcactaaag

SEQ ID NO: 45356 - DNA, 96 bp, Fusarium phaseoli
  misc_feature: 28
caacacacgctgcactaattgcctaatttagaagtgtgttaacggggttccaagggcatcttgaacccttagccaatcacagagcttcttttcaag

SEQ ID NO: 45357 - DNA, 96 bp, Fusarium phaseoli
  misc_feature: 28
attaacgaaggggatatctacaatctagcctataagttagagagaagcaatagggaaacggtaaggcaaaaggctattattgcgaagctggagaag

SEQ ID NO: 45358 - DNA, 96 bp, Fusarium phaseoli
  misc_feature: 28
acccccatcttctcggacaatgcggaaccaacgggttgcacgaagacattgttagcgccgtggaagatgaaagaagaatcgcagctattctcgaag

SEQ ID NO: 45359 - DNA, 96 bp, Fusarium phaseoli
  misc_feature: 28
cagccgccgaaaataggaaactaaatacttagatgaattaggcttcaagttgacttactactaaccttcacgaggaccaagaagaagagcgataag

SEQ ID NO: 45360 - DNA, 96 bp, Fusarium phaseoli
  misc_feature: 28
ctggcttatcttcgacaactgccggcaattcaatgacgagaattcgctgtatgtgaagtgtgcgaacaagttagagaagtacatgtggcagcagat

SEQ ID NO: 45361 - DNA, 96 bp, Fusarium phaseoli
  misc_feature: 28
ataatttttgaccggcaagcttgtttgaccggcatgcttatcatgcacgttattgagactgagggccatctctggcgactggacgaagagatccag

SEQ ID NO: 45362 - DNA, 96 bp, Fusarium phaseoli
  misc_feature: 28
ctggactcatttaattagctgccctccttcctctagaacccttttacctagtcatagaggccgggatcgactcttctaaagaccccgacctagaat

SEQ ID NO: 45363 - DNA, 96 bp, Fusarium phaseoli
  misc_feature: 28
ctgagaacgacgagaccgaacctgagatttacgtgacttccggtctgtctgatgccgggctggggggtatggtcgtgcacgagagtcatgagtggt

SEQ ID NO: 45364 - DNA, 96 bp, Fusarium phaseoli
  misc_feature: 28
ctcttaacgccagaggttactagtccctaactgcccccgcccttttgccccttgctctccggcaaccttcataacctcccgcttacctcttgactt

SEQ ID NO: 45365 - DNA, 96 bp, Fusarium phaseoli
  misc_feature: 28
ctctgtcaatgcaaagttgtcctgctgcaacggggtcgacgcggacgttaccaatccaggttgaagcaggactgtaaggcaaatacaggccatctg

SEQ ID NO: 45366 - DNA, 96 bp, Fusarium phaseoli
  misc_feature: 28
ctcgccacctggaatccggattatgaaccgctgtaccttgcgccgcacgatccggaataaaccctcggcctgcttactcgcctcccgggcggatat

SEQ ID NO: 45367 - DNA, 96 bp, Fusarium phaseoli
  misc_feature: 28
ccttttagcacgctcagtgcgacaaaacccctcgagacaaaggaattgccttcgtctttcgacgccgccaagctggccctcggcttggccaaggag

SEQ ID NO: 45368 - DNA, 96 bp, Fusarium phaseoli
  misc_feature: 28
cgttgatgaatggcaaggcctttataaaccagtcctgtacttgaatgggcaggtgccaagggcgaagctcaaaggccggcatatgcggcagaggag

SEQ ID NO: 45369 - DNA, 96 bp, Fusarium phaseoli
  misc_feature: 28
ctcatgagcaacaatggaagggataaactagatcacactgcctaattgaagacacggcgtgttagcgcagaccatcccatgcggcctctcgcccgg

SEQ ID NO: 45370 - DNA, 96 bp, Fusarium phaseoli
  misc_feature: 28
aatacagtacgtacgtacgtacgtgtacagaaaaatgcatcactaagcccagcagcacatcaacacacctcgtatactatctgggatgttgtatag

SEQ ID NO: 45371 - DNA, 96 bp, Fusarium phaseoli
  misc_feature: 28
cagtgctgacacggacagtaggtttgagcatccttccggaacatacagagcgttatcgagagtaacattctgttggcccttgggcccttgcactag

SEQ ID NO: 45372 - DNA, 96 bp, Fusarium phaseoli
  misc_feature: 28
ctagctacttttttttaaataatactaaggttatataattgcaataataattaattacgtaataataagaagttatattaagctgatttttacatt

SEQ ID NO: 45373 - DNA, 96 bp, Fusarium phaseoli
  misc_feature: 28
aagaacacaattatcacaatactccatttcttgctccataagaatggttgaattacgcgtcgtaatatattatgggtcgtcgcgcgctcactgtag

SEQ ID NO: 45374 - DNA, 96 bp, Fusarium phaseoli
  misc_feature: 28
aatgcggaaccaacgggttgcacgaagacattgttagcgccgtggaagatgaaagaagaatcgcagctattctcgaagcgatggacgtgcttttag

SEQ ID NO: 45375 - DNA, 96 bp, Fusarium phaseoli
  misc_feature: 28
cgtttcaagcttgtcatgggactttatagagtgcccgatggggttgtgtcagacagtacgtgcattcggtccattggttgatgttgaatatgtggg

SEQ ID NO: 45376 - DNA, 96 bp, Fusarium phaseoli
  misc_feature: 28
aaggcataggaatttggggtgcactaacgtgctggacagactggacagccttgccgagactttccgcagtgtggtaagcagtgtagtgggacaacg

SEQ ID NO: 45377 - DNA, 96 bp, Fusarium phaseoli
  misc_feature: 28
atttgatttgatttgaattcgttcggacttgatttgatttgatttgatttgatttgatttgatttggatttatttgaactcatttatttgttgacg

SEQ ID NO: 45378 - DNA, 96 bp, Fusarium phaseoli
  misc_feature: 28
ccctttacggccccaagtttgtacggtctatttggcccatatggtcatctcgattcagtttgtgatgccgctgccaattttgctgcaaatgctacg

SEQ ID NO: 45379 - DNA, 96 bp, Fusarium phaseoli
  misc_feature: 28
cggtggtcagagcagaagggagaataggggggataaagtagagggttattatcgaggtagtatttatgagaagtgaatagcaatgagcccggaggg

SEQ ID NO: 45380 - DNA, 96 bp, Fusarium phaseoli
  misc_feature: 28
ccccatcttctcggacaatgcggaaccaacgggttgcacgaagacattgttagcgccgtggaagatgaaagaagaatcgcagctattctcgaagcg

SEQ ID NO: 45381 - DNA, 96 bp, Fusarium phaseoli
  misc_feature: 28
cgccttgtcatggaagaaagtttgttgtttgtctgatggaaacaagacctgaaattgactgtaagccacgcctacgaaggggaaacttagactcgg

SEQ ID NO: 45382 - DNA, 96 bp, Fusarium phaseoli
  misc_feature: 28
agaggcaatgagaaaattgttcagcttctgctggacaaaggtgcagacattaacgcgaaaggtggagagtacagaagcactttacaggcggcatcg

SEQ ID NO: 45383 - DNA, 96 bp, Fusarium phaseoli
  misc_feature: 28
aggaactctgttgacgctagtactagaaggcagagacgccgtggcaagtataggcgtcgacgttatatctaactagtagatattattatatagtcg

SEQ ID NO: 45384 - DNA, 96 bp, Fusarium phaseoli
  misc_feature: 28
accctctggtctggattgtggctgtatcttggttgcatgcctctttggtggcatctctcttggtggcatctctcttggtggtatctctcttggtcg

SEQ ID NO: 45385 - DNA, 96 bp, Fusarium phaseoli
  misc_feature: 28
attatttaatttaaggttagagttaattatttagtctaaggtttagggttaattatttagtctatcctatcctatcctagctgcgcggcggattcg

SEQ ID NO: 45386 - DNA, 96 bp, Fusarium phaseoli
  misc_feature: 28
agtgatcatccgggaagcaatgcgccaagaccgccggttgaactcaattttgttcgaatttcgtgagttcttacggtattttggcggacgtcttcg

SEQ ID NO: 45387 - DNA, 96 bp, Fusarium phaseoli
  misc_feature: 28
attgattcaatcaacacatctctttaaccacgtccaacaacatggtacaactcaacgtcgctatataattgtactcctctatgcttgtaaagttcg

SEQ ID NO: 45388 - DNA, 96 bp, Fusarium phaseoli
  misc_feature: 28
ccttttatatctacctcttatactctttttatttatttctctctctcttctttcctttatatctacctctttataccctttatatttaaccctttt

SEQ ID NO: 45389 - DNA, 96 bp, Fusarium phaseoli
  misc_feature: 28
ccttcacttctttcacggagtcgaatccctgaagggagcagatgagatgcgtctagacatacggcatcccaccattccgcaccagtcgtgtcattg

SEQ ID NO: 45390 - DNA, 96 bp, Fusarium phaseoli
  misc_feature: 28
cctattccaacaataactaccctattgttggcgccctttcatttcccacccatttgagttcgtcggttgccaaacgacggtttggagtagagcctt

SEQ ID NO: 45391 - DNA, 96 bp, Fusarium phaseoli
  misc_feature: 28
cctaacctatctattccttacttaacgtcctcattattattattatctcctcccaccttatatataataccacacccactccgcttatctaactct

SEQ ID NO: 45392 - DNA, 96 bp, Fusarium phaseoli
  misc_feature: 28
ccgtcaatacgcagtcgcgtaacaaatactcgggctccaacctcgtaatgtgcctccgcacaaacagaagatgcaaaaccagcctcgacccagtct

SEQ ID NO: 45393 - DNA, 96 bp, Fusarium phaseoli
  misc_feature: 28
aatcatttgcagaggttttcagggaatttctccttctttgctcttgcattctttgtttgtcgttgggttgacgcttcgccgctcacacgcagccgg

SEQ ID NO: 45394 - DNA, 96 bp, Fusarium phaseoli
  misc_feature: 28
agttaagatgaggtggtcaagataaggtagttaagatgaggtagttaagataaaggcggattataagagaagtaggaggttaatttacggttaggg

SEQ ID NO: 45395 - DNA, 96 bp, Fusarium phaseoli
  misc_feature: 28
aaccggtcaatccaatgcttgccaagcggccttgagtctccttgggccatcaacacacgctgcactaattgcctaatttagaagtgtgttaacggg

SEQ ID NO: 45396 - DNA, 96 bp, Fusarium phaseoli
  misc_feature: 28
acgaggccaaatatcgggtatagggtagtggttacgcgaccagccaagcgcggagatcaccacaaccagcagcagcagaataccagtcagaccggg

SEQ ID NO: 45397 - DNA, 96 bp, Fusarium phaseoli
  misc_feature: 28
actttatcccccctattctcccttctgctctgaccaccgtctctccaaccgcgtaataacctggcatccacggcttgcttatatgccaccgccggg

SEQ ID NO: 45398 - DNA, 96 bp, Fusarium phaseoli
  misc_feature: 28
aaaacgatccgagtgatgcacaacacgacaacggacatgcagtggccctatgccagagtgtgggggcagagacgtgcgtgacgcgtgatgttcggg

SEQ ID NO: 45399 - DNA, 96 bp, Fusarium phaseoli
  misc_feature: 28
agggcgaagctcaaaggccggcatatgcggcagagtaggcgatggtttcttgctttttaggaatgcctcacacttgccatatatgtctgggagggg

SEQ ID NO: 45400 - DNA, 96 bp, Fusarium phaseoli
  misc_feature: 28
ccagatgtgaaaccggatagttacatccggtcacacgaatgttatgcgacagtcctcgagacccgtgaagccgactgcaaaactacaggaaaggct

SEQ ID NO: 45401 - DNA, 96 bp, Fusarium phaseoli
  misc_feature: 28
ccaatcaaagaccttgttgttgtgtgttgttgttgttgtgtgttgttgttgttgtgtgttgttgttgttgtgtgttgttgttgttgtgtgttgttg

SEQ ID NO: 45402 - DNA, 96 bp, Fusarium phaseoli
  misc_feature: 28
agtattatgttctgaaatcatctagtactaagtaaggagtttctcgtgctcttagcgccagcaactagcgtcattttgcaactacttgttcaaatg

SEQ ID NO: 45403 - DNA, 96 bp, Fusarium phaseoli
  misc_feature: 28
catggccttcacttctttcacggagtcgaatccctgaagggagcagatgagatgcgtctagacatacggcatcccaccattccgcaccagtcgtgt

SEQ ID NO: 45404 - DNA, 96 bp, Fusarium phaseoli
  misc_feature: 28
acaatggatggagtcgaagaagacgacgatggtgtggacgacaaccctaccaattattgtaaacgtgccttgaccaaggcacatttaatttgtatg

SEQ ID NO: 45405 - DNA, 96 bp, Fusarium phaseoli
  misc_feature: 28
aaaggagaaatcaagtatgactttaaagcccatttgtaggcgaaaacacggccaaattggtttctcgttggtagtaatacgtccagctagattatg

SEQ ID NO: 45406 - DNA, 96 bp, Fusarium phaseoli
  misc_feature: 28
cagttctaccggggccgaccgcctggtccctcacggggttataacacgggccgtgatactaagcgcgtctagtaaggaagagatgctcctctcttt

SEQ ID NO: 45407 - DNA, 96 bp, Fusarium phaseoli
  misc_feature: 28
cagtgggcagaagatggggcattttggccgatgtttccagtaggcgttagcacccaccgagagcagtaaggaggatggaggtgaaataccgaggtt

SEQ ID NO: 45408 - DNA, 96 bp, Fusarium phaseoli
  misc_feature: 28
aaaggaagcgagtgttgggaacaagtccgacgaggtatatatatagtgaaatcggcagtcattttaggacacttcacgatgaggcgaaactgactg

SEQ ID NO: 45409 - DNA, 96 bp, Fusarium phaseoli
  misc_feature: 28
caggagaacgtggaacctacttcctcctagtgcaagggcccaagggccaacagaatgttactctcgataacgctctgtatgttccggaaggatgct

SEQ ID NO: 45410 - DNA, 96 bp, Fusarium phaseoli
  misc_feature: 28
aagagctagctgggtgggtttactcccgttaataaacctcctatggcgtctcctcaccaggtagggctaaaggctatatctacggctatcctgctg

SEQ ID NO: 45411 - DNA, 96 bp, Fusarium phaseoli
  misc_feature: 28
attctccccaaattcctggcatccgggcgaacctgaggttgacaagatacagacagtatctgtgaagacctagcacgggctgaataccgtcatctg

SEQ ID NO: 45412 - DNA, 96 bp, Fusarium phaseoli
  misc_feature: 28
cagactaaggccgactgaaacgtggtccaccagatggtcgaaaacagatcgtcgtcccattcccagacagcgggagtgatacaaagtgctgagact

SEQ ID NO: 45413 - DNA, 96 bp, Fusarium phaseoli
  misc_feature: 28
caatgactcgcaaaaggggcccttgattcgcaaaaatgcggtacttctgaaccgcgccaatttcctaggatttagaagtcacttcgttataagggt

SEQ ID NO: 45414 - DNA, 96 bp, Fusarium phaseoli
  misc_feature: 28
agaggccgcatgggatggtctgcgctaacacgccgtgtcttcaattaggcagtgtgatctagtttatcccttccattgttgctcatgagagccttg

SEQ ID NO: 45415 - DNA, 96 bp, Fusarium phaseoli
  misc_feature: 28
acttgatattgttagcatgctcttttgccttttcagacggaaaattctaagcttacgatcaaagtgaaagttccaaaacttctggctcaagtgttg

SEQ ID NO: 45416 - DNA, 96 bp, Fusarium phaseoli
  misc_feature: 28
aaaaggggccgaatccaaacttcagataaccttagcaacaccctgatggaagaactgagagtttccccttaacttcaggatcaagattaaagtttg

SEQ ID NO: 45417 - DNA, 96 bp, Fusarium phaseoli
  misc_feature: 28
actagaaaaggtccaaggtaaaaggaagacagaagacactcagctttgggttggaggaagatggcgccctccgggctcataacctgatgaaacaat

SEQ ID NO: 45418 - DNA, 96 bp, Fusarium phaseoli
  misc_feature: 28
attgaagagagatctctcttacactcacacacatcgagcttacataacagatcttatttgcaccggcccccgtgcaggtatgagctccccaagtgt

SEQ ID NO: 45419 - DNA, 96 bp, Fusarium phaseoli
  misc_feature: 28
atcgcccaccgtacgtgtgcgaccgtagacctggggaagaaacgcttttattttctcgatctcatcatttatttttatttttatatcttttggaat

SEQ ID NO: 45420 - DNA, 96 bp, Fusarium phaseoli
  misc_feature: 28
aatagtgagtataaagataaggataaggaagaagattaaaataaggaagaagataaagaggaggaagaggaaaaagataatcgcttctatattaat

SEQ ID NO: 45421 - DNA, 96 bp, Fusarium phaseoli
  misc_feature: 28
atgaatggtaagtgtgctaattgtgtctagcactagaagaaatgcgagtgggagatagtacttaggtatatgcggaagattcgcgagtattgcact

SEQ ID NO: 45422 - DNA, 96 bp, Fusarium phaseoli
  misc_feature: 28
aacgaattaccagcacgactgcgtacagtagggtggggtcgtgatccatcggatctaggggccaaggtgtctagatctgggagattcaacgaggat

SEQ ID NO: 45423 - DNA, 96 bp, Fusarium phaseoli
  misc_feature: 28
atatcttccttatttctcctctttttctctctttttctttatatttcttttattcttttcttacctcttacctcttttccctctttttattttctt

SEQ ID NO: 45424 - DNA, 96 bp, Fusarium phaseoli
  misc_feature: 28
aaagttaatgcggctattaatcgataggattaatcctatttttctattagctttaactctaccttttagtatattaaggaatctcgatagctatat

SEQ ID NO: 45425 - DNA, 96 bp, Fusarium phaseoli
  misc_feature: 28
aacacaggaagaattgcgacgaaccacgaaggagaccagctgagattcgaagagcagtcgccctggattgaaaggacaggttgggataagacctat

SEQ ID NO: 45426 - DNA, 96 bp, Fusarium phaseoli
  misc_feature: 28
atagaataggaatatatagataagcactagagatattcgccgatatatcgcatgaaaggctataataagcgtactctctatagcgatctgatttct

SEQ ID NO: 45427 - DNA, 96 bp, Fusarium phaseoli
  misc_feature: 28
agttagtaaggtaatattagcccgtattaataatgaatagcgagatcgcttagctatccgcattaatcgcctaaataactgtaatctattcctagt

SEQ ID NO: 45428 - DNA, 96 bp, Fusarium phaseoli
  misc_feature: 28
accctaacctatctattccttacttaacgtcctcattattattattatctcctcccaccttatatataataccacacccactccgcttatctaact

SEQ ID NO: 45429 - DNA, 96 bp, Fusarium phaseoli
  misc_feature: 28
agtagcttttcccactaagactcgatccattagttagatatgcttaggccccagatataacaggagctcagtctcgctccctacccgtggactcgt

SEQ ID NO: 45430 - DNA, 96 bp, Fusarium phaseoli
  misc_feature: 28
agccgtgttgtctatccccttcgtgcgccgagagaagcaatgttgcaccatctcagctacttgtccgtcgtcgcagatactcggtcctgcgttact

SEQ ID NO: 45431 - DNA, 96 bp, Fusarium phaseoli
  misc_feature: 28
agggagggaaaatgagaaaaagaccatatatcaatacatcacgagcaagacacgttttttcatgtatctatagtaatacgaaattgattctcacct

SEQ ID NO: 45432 - DNA, 96 bp, Fusarium phaseoli
  misc_feature: 28
aggaagggctcatgagggtcaatagcggctttctcatgcccttgaaaagaagctctgtgattggctaagggttcaagatgcccttggaaccccgtt

SEQ ID NO: 45433 - DNA, 96 bp, Fusarium phaseoli
  misc_feature: 28
aattgattgagacgagccaatcaaatcaaacaaatcgacttttacctcaaagttgatttgattgatttatgatgagcgctggtcgcgcgggcatct

SEQ ID NO: 45434 - DNA, 96 bp, Fusarium phaseoli
  misc_feature: 28
agatagaatagcactccttccctagatataataataaaagcgataatagatattaataagtcattaggcgatagattaatataccaatctagcatt

SEQ ID NO: 45435 - DNA, 96 bp, Fusarium phaseoli
  misc_feature: 28
acatgacaggactgaaggaaaaggggaaaaaagatgggtaaaaaagagacagaatgcattttaaaaatgcaaaacagaatcagcaaagctcgctct

SEQ ID NO: 45436 - DNA, 96 bp, Fusarium phaseoli
  misc_feature: 28
aatattgttgaggatagagcaagtcaagattggtcaatcgacatcatcaggcacggcaacgcaaatgacaaaatgccgtattaaggaagcgacagt

SEQ ID NO: 45437 - DNA, 96 bp, Fusarium phaseoli
  misc_feature: 28
acccgctccctccctcgcttcctaggttatactaaggcctaagggtcaaggtcaaggtcaaggtcagagtcagggtcaggcctttacttactcttt

SEQ ID NO: 45438 - DNA, 96 bp, Fusarium phaseoli
  misc_feature: 28
aacctcgcattggaaccgggctcattggtaccatcctcatcaccacgatcatcgccaccgccgccaatgccgtcctggctgccccggctctccctt

SEQ ID NO: 45439 - DNA, 96 bp, Fusarium phaseoli
  misc_feature: 28
aaggatgaaacacatagcagtctcagcactttgtatcactcccgctgtctgggaatgggacgacgatctgttttcgaccatctggtggaccacgtt

SEQ ID NO: 45440 - DNA, 96 bp, Fusarium phaseoli
  misc_feature: 28
aaccttggactgcgattcatttctcatggcggatgggacacattcagaaagacaggaaagaaccgaggtcgcgtttgtgacatcgcgtttctggtt

SEQ ID NO: 45441 - DNA, 96 bp, Fusarium phaseoli
  misc_feature: 27
tttttcgtctgggaggctgtaacgaagcctgatctcctactggagcaatagacgtgctgagctgaactatctacaatcgctgccgcattcgacctc

SEQ ID NO: 45442 - DNA, 96 bp, Fusarium phaseoli
  misc_feature: 27
ttttggccctattccaacaataactaccctattgttggcgccctttcatttcccacccatttgagttcgtcggttgccaaacgacggtttggagta

SEQ ID NO: 45443 - DNA, 96 bp, Fusarium phaseoli
  misc_feature: 27
ggttaatgactcacactgtctacgggcacgaattaggcatggacagaaatcaattgtaacaaggataaactgtcatcagaatatgagacaagaaaa

SEQ ID NO: 45444 - DNA, 96 bp, Fusarium phaseoli
  misc_feature: 27
ccaacaagcaaccaacaagcaaccaacaagcaaccaacaagcaaccaacaagcaaccaacaagcaaccaacaagcaaccaacaagcgaccaacaaa

SEQ ID NO: 45445 - DNA, 96 bp, Fusarium phaseoli
  misc_feature: 27
tcgcaaaaatgcggtacttctgaaccgcgccaatttcctaggatttagaagtcacttcgttataagggtgaacttgataattgcgaccgggacaaa

SEQ ID NO: 45446 - DNA, 96 bp, Fusarium phaseoli
  misc_feature: 27
tttgctttttgaaaccttcctctaggaagcaccgggtcaattgcgcatccgttcaagcgcatattgcgtaatgtggatttggggggtcgcgatgag

SEQ ID NO: 45447 - DNA, 96 bp, Fusarium phaseoli
  misc_feature: 27
ctgaataagacaagaatcgaatcacataaagtcaatatcttcaatcaaactagtagagccaaacaagaaaaaagaaagataaaaaagaaaaagaaa

SEQ ID NO: 45448 - DNA, 96 bp, Fusarium phaseoli
  misc_feature: 27
tttctatctcgataaagctaggtttctaactaagggatagctactctagcggtaagatcggcctcactaagtagataaagtactaaaagaagctta

SEQ ID NO: 45449 - DNA, 96 bp, Fusarium phaseoli
  misc_feature: 27
tttctagacataatatgttatcagttgatttgcaaactccacgaaataccaaaaggggaggtagctccaagtaagctgaatgtgcatgcgcagtgg

SEQ ID NO: 45450 - DNA, 96 bp, Fusarium phaseoli
  misc_feature: 27
tttcctcacatcccttcttggacgaactcgtccttcacaggccagggtggctttgaagaacgatcatactttttgaccacttccaggtcagccagc

SEQ ID NO: 45451 - DNA, 96 bp, Fusarium phaseoli
  misc_feature: 27
tttcacgaccgccccaaccccaaccctgaagaccacactgataaccttacccttaaccttacccttaaccttacccttaaccttacccttaacctt

SEQ ID NO: 45452 - DNA, 96 bp, Fusarium phaseoli
  misc_feature: 27
gcccctcgaccccttgggccttaaggaccctaaagactatgcttgaggcccaatctcaatctaaataccttaagagacggattaaaaggcactaaa

SEQ ID NO: 45453 - DNA, 96 bp, Fusarium phaseoli
  misc_feature: 27
aaggcacgtttacaataattggtagggttgtcgtccacaccatcgtcgtcttcttcgactccatccattgtcgactccttgaatgccttgtctaaa

SEQ ID NO: 45454 - DNA, 96 bp, Fusarium phaseoli
  misc_feature: 27
gtatatataataaggaaagaataataaatagattataaaaataagagagataaataaaagtaggaattatagtaaaagattaaggataaaggtaaa

SEQ ID NO: 45455 - DNA, 96 bp, Fusarium phaseoli
  misc_feature: 27
gcgatatccaacacttgagccagaagttttggaactttcactttgatcgtaagcttagaattttccgtctgaaaaggcaaaagagcatgctaacaa

SEQ ID NO: 45456 - DNA, 96 bp, Fusarium phaseoli
  misc_feature: 27
ttgtggtgaaggttagggggagtggttgagttgagggttagggttaagtggttgtggtgaaggttagggggagtggttgtggtgaagggtaggggg

SEQ ID NO: 45457 - DNA, 96 bp, Fusarium phaseoli
  misc_feature: 27
ttggttgggaaaacacattcgttaggactgatttaatggcaaacatgctgaagcttgaatgctgacatgacctctttgattgaccttgggtgacaa

SEQ ID NO: 45458 - DNA, 96 bp, Fusarium phaseoli
  misc_feature: 27
ctatactgatctgattaattgattgcctttgttcctcttttactcacactacttcccagcatattagcgggcagattgtttgaaaacctcatacaa

SEQ ID NO: 45459 - DNA, 96 bp, Fusarium phaseoli
  misc_feature: 27
aatgggagatccctcaatgcattctatcgctaactgatctctttccagggccttgaactgtcaacgcaggactttcaagctttaaacatcttacaa

SEQ ID NO: 45460 - DNA, 96 bp, Fusarium phaseoli
  misc_feature: 27
ttgggtccggagggaagatcattccgtcctgacagcttttgttgtgcagcattattgtggaccactctttgtgctacctccgaactgatggaggaa

SEQ ID NO: 45461 - DNA, 96 bp, Fusarium phaseoli
  misc_feature: 27
ggtattgtcacccaaggtcaatcaaagaggtcatgtcagcattcaagcttcagcatgtttgccattaaatcagtcctaacgaatgtgttttcccaa

SEQ ID NO: 45462 - DNA, 96 bp, Fusarium phaseoli
  misc_feature: 27
attaacgtcacttgagaagccccattgtctttgacagcgtaactaaagtgtttacaagcattgccgaaagagtcgtgtgctatgaatgaaatccaa

SEQ ID NO: 45463 - DNA, 96 bp, Fusarium phaseoli
  misc_feature: 27
actgcgagacatcggaggggcgtgattttgggtgtgatttcggcccaattcgatcttctaatgttcccctgccgtctaaagtcattattgaagcaa

SEQ ID NO: 45464 - DNA, 96 bp, Fusarium phaseoli
  misc_feature: 27
taacaaacaatttgggcgccataccaacgtttgaccttccgatacgtccgaagatccttagtaagtcaccaacatctcgactcgattcttaagcaa

SEQ ID NO: 45465 - DNA, 96 bp, Fusarium phaseoli
  misc_feature: 27
ttgcgacgacccaaaatagctagaccgataacgagactagtctcgagtggctaaagtattttgaccggcatatagctaagcgattaaatagtcgct

SEQ ID NO: 45466 - DNA, 96 bp, Fusarium phaseoli
  misc_feature: 27
agagtgcgagaataacaagatcgaagcaactacaacaacagcttgagaaaaaaaaggcctcactggaacgcgcgtctgcagcctatgataaggcaa

SEQ ID NO: 45467 - DNA, 96 bp, Fusarium phaseoli
  misc_feature: 27
acgaactttacaagcatagaggagtacaattatatagcgacgttgagttgtaccatgttgttggacgtggttaaagagatgtgttgattgaatcaa

SEQ ID NO: 45468 - DNA, 96 bp, Fusarium phaseoli
  misc_feature: 27
acgaccgtacgtcggtcgaattgccagtcagggctgagtgcagggattcatgacgccacaaggatcactcggacgaagccaaattgatggtatcaa

SEQ ID NO: 45469 - DNA, 96 bp, Fusarium phaseoli
  misc_feature: 27
gcaatgacttgatattgttagcatgctcttttgccttttcagacggaaaattctaagcttacgatcaaagtgaaagttccaaaacttctggctcaa

SEQ ID NO: 45470 - DNA, 96 bp, Fusarium phaseoli
  misc_feature: 27
tcaacacacgctgcactaattgcctaatttagaagtgtgttaacggggttccaagggcatcttgaacccttagccaatcacagagcttcttttcaa

SEQ ID NO: 45471 - DNA, 96 bp, Fusarium phaseoli
  misc_feature: 27
agtgtggtctgtgtgcctcttgacaaggtttcttcaatgcccagtctaaagttggccctgcacgtcttggaaggcgtccaaaaaggagaaacagaa

SEQ ID NO: 45472 - DNA, 96 bp, Fusarium phaseoli
  misc_feature: 27
ttctagacataatatgttatcagttgatttgcaaactccacgaaataccaaaaggggaggtagctccaagtaagctgaatgtgcatgcgcagtgga

SEQ ID NO: 45473 - DNA, 96 bp, Fusarium phaseoli
  misc_feature: 27
ttcgtcttgcaagttgttgacctcgagtgttgcagccaatcagaattttagcggtcaaactcaaccgctttcgtttttgcggtcaccgtatttgga

SEQ ID NO: 45474 - DNA, 96 bp, Fusarium phaseoli
  misc_feature: 27
ttccttaccgaacagctgagaaacttccgttgccagcgccgcaaggatactttctcccttccagttctccttacccgatgagccacctatcattat

SEQ ID NO: 45475 - DNA, 96 bp, Fusarium phaseoli
  misc_feature: 27
tcgtcttgcaagttgttgacctcgagtgttgcagccaatcagaattttagcggtcaaactcaaccgctttcgtttttgcggtcaccgtatttggaa

SEQ ID NO: 45476 - DNA, 96 bp, Fusarium phaseoli
  misc_feature: 27
ttcagaaggccagcacttgtcttctgtgaatgagctccacagaaagaagtggccgttcttatgcaaaagcgggtgcagcgattctgtcttccagat

SEQ ID NO: 45477 - DNA, 96 bp, Fusarium phaseoli
  misc_feature: 27
ttcaccacaaccactccccctaaccttcaccacaaccacttaaccctaaccctcaactcaaccactccccctaaccctcaccacaaccactccccc

SEQ ID NO: 45478 - DNA, 96 bp, Fusarium phaseoli
  misc_feature: 27
aaggggccgaatccaaacttcagataaccttagcaacaccctgatggaagaactgagagtttccccttaacttcaggatcaagattaaagtttgaa

SEQ ID NO: 45479 - DNA, 96 bp, Fusarium phaseoli
  misc_feature: 27
ttattattattatctcctcccaccttatatataataccacacccactccgcttatctaactctaccttaaaattcgccgtatcttacccctccttc

SEQ ID NO: 45480 - DNA, 96 bp, Fusarium phaseoli
  misc_feature: 27
tacgaaggtgataagggaggaagcacgaccactttttcagccggagaacgcattcagtggtggcgagagcgcaattcgtgcacgagcaccacataa

SEQ ID NO: 45481 - DNA, 96 bp, Fusarium phaseoli
  misc_feature: 27
caaggcacgtttacaataattggtagggttgtcgtccacaccatcgtcgtcttcttcgactccatccattgtcgactccttgaatgccttgtctaa

SEQ ID NO: 45482 - DNA, 96 bp, Fusarium phaseoli
  misc_feature: 27
ttacctttatatacctcttttatgattttataccttttttagctttttattatcttatgcatattaattatattttaggaaaatatactcttttag

SEQ ID NO: 45483 - DNA, 96 bp, Fusarium phaseoli
  misc_feature: 27
ttaattaacctaactaactaaggtaagtatattaagacagaaaggcactaagactagccgcggcgctaaaacggaaggaaatagctgaatatagta

SEQ ID NO: 45484 - DNA, 96 bp, Fusarium phaseoli
  misc_feature: 27
aattcaactcaatatattgaaatacattgacgtcaatcatttaccaactgttgaacatgtggggtgtcacgtgttggtcaaggatcttgagattaa

SEQ ID NO: 45485 - DNA, 96 bp, Fusarium phaseoli
  misc_feature: 27
ttaagataaaggcggattataagagaagtaggaggttaatttacggttagggataaagtgaatattaaatatgaggaaggaggggtaagatacggc

SEQ ID NO: 45486 - DNA, 96 bp, Fusarium phaseoli
  misc_feature: 27
ttaacgtcacttgagaagccccattgtctttgacagcgtaactaaagtgtttacaagcattgccgaaagagtcgtgtgctatgaatgaaatccaat

SEQ ID NO: 45487 - DNA, 96 bp, Fusarium phaseoli
  misc_feature: 27
aaccaacaagcaaccaacaagcaaccaacaagcaaccaacaagcaaccaacaagcaaccaacaagcaaccaacaagcaaccaacaagcgaccaaca

SEQ ID NO: 45488 - DNA, 96 bp, Fusarium phaseoli
  misc_feature: 27
gttatcgaacaacacacaacaacaacaacacacaacaacaacaacacacaacaacaacaacacacaacaacaacaacacacaacaacaacaacaca

SEQ ID NO: 45489 - DNA, 96 bp, Fusarium phaseoli
  misc_feature: 27
tgtgccccgagcacacaggacctgtgcgcctcgacggcgccctacacttggggagctcatacctgcacgggggccggtgcaaataagatctgttat

SEQ ID NO: 45490 - DNA, 96 bp, Fusarium phaseoli
  misc_feature: 27
ctacgatggttgatgaatggttgatgaatggttgatgaatggttgatgaatggttgatgaatggttgatgaatggttgatgaatggttgtgtcaca

SEQ ID NO: 45491 - DNA, 96 bp, Fusarium phaseoli
  misc_feature: 27
cacttcgagaagctggaattgaatatgatgacctcaaagacaacggggcactactgggcgatgctggagatgaactccaccaggacctcaccgaca

SEQ ID NO: 45492 - DNA, 96 bp, Fusarium phaseoli
  misc_feature: 27
gttacagctgtaaggcttgcatccacttgacgatcagtagggataatgtcaaaaagcactgctctcaacgtcatcctgagctgggcaagcctgaca

SEQ ID NO: 45493 - DNA, 96 bp, Fusarium phaseoli
  misc_feature: 27
tgtcaagtgcactcagcatccctgcgcgacataacaacagtatgcgccgctaccgtctgctattaagccttaaagccctttgctattacgttgtac

SEQ ID NO: 45494 - DNA, 96 bp, Fusarium phaseoli
  misc_feature: 27
tgtaagagaggtcgattccttccaagtgtgagaagaacccggcaagcgcgcacgggcgaaaagcgcgtattttgacgaagacgggcaagtccctcc

SEQ ID NO: 45495 - DNA, 96 bp, Fusarium phaseoli
  misc_feature: 27
cctaaccttcaccacaaccactccccctaaccttcaccacaaccacttaaccctaaccctcaactcaaccactccccctaaccctcaccacaacca

SEQ ID NO: 45496 - DNA, 96 bp, Fusarium phaseoli
  misc_feature: 27
tggttgccctattgccctattggaccgtagaaacgaatgctgtggttttttgtctttattcttatcctctcgtttcattccgcttcatatgtacat

SEQ ID NO: 45497 - DNA, 96 bp, Fusarium phaseoli
  misc_feature: 27
acgaagtgacttctaaatcctaggaaattggcgcggttcagaagtaccgcatttttgcgaatcaagggccccttttgcgagtcattgaacccccca

SEQ ID NO: 45498 - DNA, 96 bp, Fusarium phaseoli
  misc_feature: 27
tgggctctagtgatgcatttttctgtacacgtacgtacgtacgtactgtattttgggtagctgtacgtacgtacaacttttctgtacgtacaaaac

SEQ ID NO: 45499 - DNA, 96 bp, Fusarium phaseoli
  misc_feature: 27
actttcccaactctcctcctctcctggacaatagcggttagcctcacttgtccaactcttctcccccggacagcagcggttagtctcactttccca

SEQ ID NO: 45500 - DNA, 96 bp, Fusarium phaseoli
  misc_feature: 27
agcaggaggaggaagcaggaggcccacggtcatcagccaaggcggggagaagaagaaaggcggcagccgcatcagacagggccaagtggccagcca

SEQ ID NO: 45501 - DNA, 96 bp, Fusarium phaseoli
  misc_feature: 27
tggcgatatccaacacttgagccagaagttttggaactttcactttgatcgtaagcttagaattttccgtctgaaaaggcaaaagagcatgctaac

SEQ ID NO: 45502 - DNA, 96 bp, Fusarium phaseoli
  misc_feature: 27
tggcataaatcaagtctaacacctgtaatgtgggggcgaaataaatcaattcagtagaattagtctcgaaacatcaccaccgctcatatcgatacc

SEQ ID NO: 45503 - DNA, 96 bp, Fusarium phaseoli
  misc_feature: 27
caagagagatacgaccaagagagataccaccaagagagatgccaccaagagagatgccaccaaagaggcatgcaaccaagatacagccacaatcca

SEQ ID NO: 45504 - DNA, 96 bp, Fusarium phaseoli
  misc_feature: 27
tggaatgacttccaacattcgtggagactcgatgacaaacctagcgaatccgaggaaaaaccaaaagaccgcacatatccaatcttgcatcacgct

SEQ ID NO: 45505 - DNA, 96 bp, Fusarium phaseoli
  misc_feature: 27
tgcgcggcggattcgctagcaaatccaatgggtttcccatacaaaaaaaaaaggcgctatcctatcctagctgcgcggcggattcgctagcaaatc

SEQ ID NO: 45506 - DNA, 96 bp, Fusarium phaseoli
  misc_feature: 27
gcagacatcgcgactctacaaacgaagctccgccacgttgatattcacaaccattggctaagacaagctgtttctcaaaagacgatcaaggtcgca

SEQ ID NO: 45507 - DNA, 96 bp, Fusarium phaseoli
  misc_feature: 27
gagagtgcgagaataacaagatcgaagcaactacaacaacagcttgagaaaaaaaaggcctcactggaacgcgcgtctgcagcctatgataaggca

SEQ ID NO: 45508 - DNA, 96 bp, Fusarium phaseoli
  misc_feature: 27
gtgacctccttggagccttgtgggcactcatgggattgacacaccttgtcaagagccacaatgttccaaggctgttgcgggcgctactgacatgca

SEQ ID NO: 45509 - DNA, 96 bp, Fusarium phaseoli
  misc_feature: 27
cgctaacacgccgtgtcttcaattaggcagtgtgatctagtttatcccttccattgttgctcatgagagccttgacacgtacttgctgcagctgca

SEQ ID NO: 45510 - DNA, 96 bp, Fusarium phaseoli
  misc_feature: 27
tgcaagttttcacaactttgggatagcagctgaacgccattgtgacatcaatttcagctttagcttccaagaccaaagttgacgcgcgaagaacgc

SEQ ID NO: 45511 - DNA, 96 bp, Fusarium phaseoli
  misc_feature: 27
aacgaactttacaagcatagaggagtacaattatatagcgacgttgagttgtaccatgttgttggacgtggttaaagagatgtgttgattgaatca

SEQ ID NO: 45512 - DNA, 96 bp, Fusarium phaseoli
  misc_feature: 27
caaggccttcgtagcgagagaagacaatcgaagcaactcgaatcctgtgggatcgttaggctcgccaaagcaacgattttcatctcgacagcatca

SEQ ID NO: 45513 - DNA, 96 bp, Fusarium phaseoli
  misc_feature: 27
ggagaacgtggaacctacttcctcctagtgcaagggcccaagggccaacagaatgttactctcgataacgctctgtatgttccggaaggatgctca

SEQ ID NO: 45514 - DNA, 96 bp, Fusarium phaseoli
  misc_feature: 27
tgacttccaacattcgtggagactcgatgacaaacctagcgaatccgaggaaaaaccaaaagaccgcacatatccaatcttgcatcacgctcgagt

SEQ ID NO: 45515 - DNA, 96 bp, Fusarium phaseoli
  misc_feature: 27
tgacgtcccgtcaatacgcagtcgcgtaacaaatactcgggctccaacctcgtaatgtgcctccgcacaaacagaagatgcaaaaccagcctcgac

SEQ ID NO: 45516 - DNA, 96 bp, Fusarium phaseoli
  misc_feature: 27
tgacgaccgcgcccttctccagcagcagctgaacaatcttgttgtgtcctccacgcgacgctgcctgtagagcgcttccgtagtgtccaccttccg

SEQ ID NO: 45517 - DNA, 96 bp, Fusarium phaseoli
  misc_feature: 27
tattgaaatacattgacgtcaatcatttaccaactgttgaacatgtggggtgtcacgtgttggtcaaggatcttgagattaaaagcaggtccttca

SEQ ID NO: 45518 - DNA, 96 bp, Fusarium phaseoli
  misc_feature: 27
tgaagcccgtcaactaggctcgagcagagcagtcctatcggtatagaagagacatgagaaaaacattgttcagtttcgctttggccctaattctct

SEQ ID NO: 45519 - DNA, 96 bp, Fusarium phaseoli
  misc_feature: 27
cactggacaaaacatatgaacgaatgctcagcaatatcccctcgacttccagggattatgctcgacaaatgctgacggtgctctgctgtgcaaaga

SEQ ID NO: 45520 - DNA, 96 bp, Fusarium phaseoli
  misc_feature: 27
tcttaccctaacctatctattccttacttaacgtcctcattattattattatctcctcccaccttatatataataccacacccactccgcttatct

SEQ ID NO: 45521 - DNA, 96 bp, Fusarium phaseoli
  misc_feature: 27
tcttaattactctatttttaaccctcttatactccctcttaccctaacctatctattccttacttaacgtcctcattattattattatctcctccc

SEQ ID NO: 45522 - DNA, 96 bp, Fusarium phaseoli
  misc_feature: 27
actagatcgcggtatacgctctctatggacctatgatctgttaagaagttgcggacttcacggagatgtggaacggccatcgcatccggccacaga

SEQ ID NO: 45523 - DNA, 96 bp, Fusarium phaseoli
  misc_feature: 27
tctcttctttcttaaccggcctccgacgacgttgaaataagctcatcacgtgataagatttttctaggaggcactataccaatttaggccaaggta

SEQ ID NO: 45524 - DNA, 96 bp, Fusarium phaseoli
  misc_feature: 27
tataggcatcgtttgcgtatgccagaatagggcccgactatatgttattcggggactattaagcttgtgagttagtatccggtgggaagatagaga

SEQ ID NO: 45525 - DNA, 96 bp, Fusarium phaseoli
  misc_feature: 27
ggataagttaacttattaagaaagaaaaaggttttagttataaagataaaaaagttatagttattaagataagttaataatagtgttacagcgaga

SEQ ID NO: 45526 - DNA, 96 bp, Fusarium phaseoli
  misc_feature: 27
agtgttttccaagggggctatcctgcactgaactgtagtgctttgatggttggcagtttcgtaacgactcaacagtcgattcgatacttaatgaga

SEQ ID NO: 45527 - DNA, 96 bp, Fusarium phaseoli
  misc_feature: 27
tctatctcgataaagctaggtttctaactaagggatagctactctagcggtaagatcggcctcactaagtagataaagtactaaaagaagcttaag

SEQ ID NO: 45528 - DNA, 96 bp, Fusarium phaseoli
  misc_feature: 27
tcgtttgtaggtgaagggcttcctataggaatgcaacagccgaatgagttcttcacatagctagctcatccagcagtgcatctttcagctggtttg

SEQ ID NO: 45529 - DNA, 96 bp, Fusarium phaseoli
  misc_feature: 27
caggaagaagccaatctctgacaaagggttccgaacatgtacggagcaaagcgcgaggaacgtgccagacaacttggaaacacgcacctccgccga

SEQ ID NO: 45530 - DNA, 96 bp, Fusarium phaseoli
  misc_feature: 27
gagggtcatccatgtttttatggagttggtgaatccgatgtttgcgttcaatggcgacgtgaatatcctcgcaaatctgagccggatagattccga

SEQ ID NO: 45531 - DNA, 96 bp, Fusarium phaseoli
  misc_feature: 27
attacggttgtacgtttggtacgaccatgaggggtccctaatgctgggcattggggtataaagtgggcgtatgccccggcccgagagggtcagcga

SEQ ID NO: 45532 - DNA, 96 bp, Fusarium phaseoli
  misc_feature: 27
tcgcgacgaggacgagtaatttactaggaattttcatagtactaggagtagttatatatatagccacatagtttaatagatactccctatctctta

SEQ ID NO: 45533 - DNA, 96 bp, Fusarium phaseoli
  misc_feature: 27
atagaagagacatgagaaaaacattgttcagtttcgctttggccctaattctctatgaggatagcttgtgacaatggtaatgtcagagacaggcga

SEQ ID NO: 45534 - DNA, 96 bp, Fusarium phaseoli
  misc_feature: 27
aatgacttccaacattcgtggagactcgatgacaaacctagcgaatccgaggaaaaaccaaaagaccgcacatatccaatcttgcatcacgctcga

SEQ ID NO: 45535 - DNA, 96 bp, Fusarium phaseoli
  misc_feature: 27
catcaatagcactggcccaatacttttgaaatcgctatatcattttctcccaggtgacgtcctttgtgagaacctttaagttctttgcttgaagga

SEQ ID NO: 45536 - DNA, 96 bp, Fusarium phaseoli
  misc_feature: 27
tccttaccgaacagctgagaaacttccgttgccagcgccgcaaggatactttctcccttccagttctccttacccgatgagccacctatcattatc

SEQ ID NO: 45537 - DNA, 96 bp, Fusarium phaseoli
  misc_feature: 27
tcctcttttactcacactacttcccagcatattagcgggcagattgtttgaaaacctcatacaagtagaaatggcgctattaaagaccagggggct

SEQ ID NO: 45538 - DNA, 96 bp, Fusarium phaseoli
  misc_feature: 27
tccatacatacataaaactcatcgcgaccccccaaatccacattacgcaatatgcgcttgaacggatgcgcaattgacccggtgcttcctagagga

SEQ ID NO: 45539 - DNA, 96 bp, Fusarium phaseoli
  misc_feature: 27
attgggtccggagggaagatcattccgtcctgacagcttttgttgtgcagcattattgtggaccactctttgtgctacctccgaactgatggagga

SEQ ID NO: 45540 - DNA, 96 bp, Fusarium phaseoli
  misc_feature: 27
tcctcagtggtccaacaggcagctaggagagttgccgaggaaaacaggcagcttcgcaacctcctcaaccaatacggatttggtgatgattatatc

SEQ ID NO: 45541 - DNA, 96 bp, Fusarium phaseoli
  misc_feature: 27
tcctatcggtatagaagagacatgagaaaaacattgttcagtttcgctttggccctaattctctatgaggatagcttgtgacaatggtaatgtcag

SEQ ID NO: 45542 - DNA, 96 bp, Fusarium phaseoli
  misc_feature: 27
tcccatataatatagcgtttacgtttatatagaaaagctattttttattaagttatagcggttatttcctgacttagtcttgattttttttttact

SEQ ID NO: 45543 - DNA, 96 bp, Fusarium phaseoli
  misc_feature: 27
ggggaagtgattaagttgagggttagggttaagtggttgtggtgaaggttagggggagtggttgtggtgaaggttagggggagtggttgtggtgga

SEQ ID NO: 45544 - DNA, 96 bp, Fusarium phaseoli
  misc_feature: 27
ctatcgcccaccgtacgtgtgcgaccgtagacctggggaagaaacgcttttattttctcgatctcatcatttatttttatttttatatcttttgga

SEQ ID NO: 45545 - DNA, 96 bp, Fusarium phaseoli
  misc_feature: 27
atcctatcctatcctatcctatcctatcctagctgcgcggcggattcgctagcaaatccaatgggtttcccatacaaaaaaaaaaggcgctaatga

SEQ ID NO: 45546 - DNA, 96 bp, Fusarium phaseoli
  misc_feature: 27
tcatgagcaacaatggaagggataaactagatcacactgcctaattgaagacacggcgtgttagcgcagaccatcccatgcggcctctcgcccggc

SEQ ID NO: 45547 - DNA, 96 bp, Fusarium phaseoli
  misc_feature: 27
tcatcaccacgatcatcgccaccgccgccaatgccgtcctggctgccccggctctccatttcggcctgcctcctctccctctgctccgtctcgccg

SEQ ID NO: 45548 - DNA, 96 bp, Fusarium phaseoli
  misc_feature: 27
gatctggaagacagaatcgctgcacccgcttttgcataagaacggccacttctttctgtggagctcattcacagaagacaagtgctggccttctga

SEQ ID NO: 45549 - DNA, 96 bp, Fusarium phaseoli
  misc_feature: 27
tcactcgctcctcgctcactcgctccgctccctcaacatttccttcctctattggcttttgacaccgaagtgagagacagaaaaatctaattggcc

SEQ ID NO: 45550 - DNA, 96 bp, Fusarium phaseoli
  misc_feature: 27
tcaagttagatcggctgcgccgagaatataacacattacgttcgaactgggcttctaactttgtcaagcgacactcagagctcacaacgcgtttta

SEQ ID NO: 45551 - DNA, 96 bp, Fusarium phaseoli
  misc_feature: 27
tcaagattggtcaatcgacatcatcaggcacggcaacgcaaatgacaaaatgccgtattaaggaagcgacagttctgtatgaaattaaagacagta

SEQ ID NO: 45552 - DNA, 96 bp, Fusarium phaseoli
  misc_feature: 27
agtcaccaacatctcgactcgattcttaagcaaaacaagggctaactgaactagaacagattgagaggaggaggcagattgttctgggcaagttga

SEQ ID NO: 45553 - DNA, 96 bp, Fusarium phaseoli
  misc_feature: 27
tcaaacactggacaaaacatatgaacgaatgctcagcaatatcccctcgacttccagggattatgctcgacaaatgctgacggtgctctgctgtgc

SEQ ID NO: 45554 - DNA, 96 bp, Fusarium phaseoli
  misc_feature: 27
tcaaaatacgcgcttttcgcccgtgcgcgcttgccgggttcttctcacacttggaaggaatcgacctctcttacacaggccggaattacttgtggg

SEQ ID NO: 45555 - DNA, 96 bp, Fusarium phaseoli
  misc_feature: 27
ctgaacttcctgaatgcctcagtcggtagtacctttgtcaagccgtcagccagcatatcgccggtaggtgtgtatgcgaccttgatcgtcttttga

SEQ ID NO: 45556 - DNA, 96 bp, Fusarium phaseoli
  misc_feature: 27
gtaactaagcgctaagagtagatcagcgcaatacgtcaccttcggacactccgctgtattataatcagatgatccatcttcaataaatgcgcaata

SEQ ID NO: 45557 - DNA, 96 bp, Fusarium phaseoli
  misc_feature: 27
tattcgggtgaacagtgttcgtctcaccataattccaccactaagagccatcttcgacgctgtcaatgaaagttcttttttgatggttcagagagc

SEQ ID NO: 45558 - DNA, 96 bp, Fusarium phaseoli
  misc_feature: 27
ctcctcccaccttatatataataccacacccactccgcttatctaactctaccttaaaattcgccgtatcttacccctccttcctcatatttaata

SEQ ID NO: 45559 - DNA, 96 bp, Fusarium phaseoli
  misc_feature: 27
tatctttaacgatctgtccttccccaactgggcctcagttagaatggaagttggtaagaatccgaaagcctagggtggcaaagttcgacaacttgc

SEQ ID NO: 45560 - DNA, 96 bp, Fusarium phaseoli
  misc_feature: 27
tatcggcgtaggaggtctgtgggatgttagggccaatcagtagaaacggtgtgttgtactgaccaagtgaaagagatctcatcattgtgtcgttat

SEQ ID NO: 45561 - DNA, 96 bp, Fusarium phaseoli
  misc_feature: 27
taagctcgatgtgtgtgagtgtaagagagatctctcttcaatccacagggtgtcgcactgagcgtgctaaaaggatcaagggtcaggtaatcgata

SEQ ID NO: 45562 - DNA, 96 bp, Fusarium phaseoli
  misc_feature: 27
tatcaaatagagtcaagcgaggctagaataaaaagaatcagagagagaagttaggttttcttttatagtcaagatcaagatagcggaagtataaat

SEQ ID NO: 45563 - DNA, 96 bp, Fusarium phaseoli
  misc_feature: 27
tatattcccatataatatagcgtttacgtttatatagaaaagctattttttattaagttatagcggttatttcctgacttagtcttgatttttttt

SEQ ID NO: 45564 - DNA, 96 bp, Fusarium phaseoli
  misc_feature: 27
aaccgatattaactggagcttaagcgctaaataaaatatctaaaaataaggtatatttattttaattatcgctaaacctttaactttctatatata

SEQ ID NO: 45565 - DNA, 96 bp, Fusarium phaseoli
  misc_feature: 27
tatatataataaggaaagaataataaatagattataaaaataagagagataaataaaagtaggaattatagtaaaagattaaggataaaggtaaat

SEQ ID NO: 45566 - DNA, 96 bp, Fusarium phaseoli
  misc_feature: 27
taaagttaatgcggctattaatcgataggattaatcctatttttctattagctttaactctaccttttagtatattaaggaatctcgatagctata

SEQ ID NO: 45567 - DNA, 96 bp, Fusarium phaseoli
  misc_feature: 27
aagataatagtgagtataaagataaggataaggaagaagattaaaataaggaagaagataaagaggaggaagaggaaaaagataatcgcttctata

SEQ ID NO: 45568 - DNA, 96 bp, Fusarium phaseoli
  misc_feature: 27
ggtattttttcgatagctaggagcacggcgtcagtttcataggaaaggagggacgaatatacatacattatgggaggcgattatttaggaggtata

SEQ ID NO: 45569 - DNA, 96 bp, Fusarium phaseoli
  misc_feature: 27
aaatacagtacgtacgtacgtacgtgtacagaaaaatgcatcactaagcccagcagcacatcaacacacctcgtatactatctgggatgttgtata

SEQ ID NO: 45570 - DNA, 96 bp, Fusarium phaseoli
  misc_feature: 27
actctatttttaaccctcttatactccctcttaccctaacctatctattccttacttaacgtcctcattattattattatctcctcccaccttata

SEQ ID NO: 45571 - DNA, 96 bp, Fusarium phaseoli
  misc_feature: 27
cccatataatatagcgtttacgtttatatagaaaagctattttttattaagttatagcggttatttcctgacttagtcttgattttttttttacta

SEQ ID NO: 45572 - DNA, 96 bp, Fusarium phaseoli
  misc_feature: 27
acaactaaaaagaaaagcgcacttccgttgcgccaaatggccgtgtccacgactagagtaaaacaatatttgccttccgtgcaaaaggaacaccta

SEQ ID NO: 45573 - DNA, 96 bp, Fusarium phaseoli
  misc_feature: 27
taggtatgtgcgctacgggctgctggatggcaacggcagatgatgcctggcacaccccgaacacgaacggtcttccgtccacttgtgtcatgctag

SEQ ID NO: 45574 - DNA, 96 bp, Fusarium phaseoli
  misc_feature: 27
gactatataataatatctactagttagatataacgtcgacgcctatacttgccacggcgtctctgccttctagtactagcgtcaacagagttccta

SEQ ID NO: 45575 - DNA, 96 bp, Fusarium phaseoli
  misc_feature: 27
tagctacttttttttaaataatactaaggttatataattgcaataataattaattacgtaataataagaagttatattaagctgatttttacatta

SEQ ID NO: 45576 - DNA, 96 bp, Fusarium phaseoli
  misc_feature: 27
ctgagaagatatgagtctaagttccagaactatctgattaatctatccctattcagcccgagtcctctctatcactctcagcctcctcctcggcta

SEQ ID NO: 45577 - DNA, 96 bp, Fusarium phaseoli
  misc_feature: 27
ctaggtatgtgcgctacgggctgctggatggcaacggcagatgatgcctggcacaccccgaacacgaacggtcttccgtccacttgtgtcatgcta

SEQ ID NO: 45578 - DNA, 96 bp, Fusarium phaseoli
  misc_feature: 27
tagatataacgtcgacgcctatacttgccacggcgtctctgccttctagtactagcgtcaacagagttcctaatacctaaggcattcacccgaacc

SEQ ID NO: 45579 - DNA, 96 bp, Fusarium phaseoli
  misc_feature: 27
tagaaaaaccaaaggggccaggtcgcagatattttatatagtaaattaacccatcgtagtatgcattaaaagataatcgctagagaagataatact

SEQ ID NO: 45580 - DNA, 96 bp, Fusarium phaseoli
  misc_feature: 27
tactaactcacaagcttaatagtccccgaataacatatagtcgggccctattctggcatacgcaaacgatgcctatatagcgggtattgcgaacgc

SEQ ID NO: 45581 - DNA, 96 bp, Fusarium phaseoli
  misc_feature: 27
tacctaccgcgcctactttaattaacctaactaacgtaaagatagaagatacttctataacggaatcaggtggcatgccgattaagctaatagact

SEQ ID NO: 45582 - DNA, 96 bp, Fusarium phaseoli
  misc_feature: 27
tacaccttacgaggactttatagtctatatccttcagtcctttacacttctgagaccctttctagcttatataagctatctttacttagccccact

SEQ ID NO: 45583 - DNA, 96 bp, Fusarium phaseoli
  misc_feature: 27
gttccttaccgaacagctgagaaacttccgttgccagcgccgcaaggatactttctcccttccagttctccttacccgatgagccacctatcatta

SEQ ID NO: 45584 - DNA, 96 bp, Fusarium phaseoli
  misc_feature: 27
acctcgtcagtgatgcaaggtgcctccaaatccagtggcgcatttttccaagagcgagagtaagacattaaccgaggacttgttaggcaactatta

SEQ ID NO: 45585 - DNA, 96 bp, Fusarium phaseoli
  misc_feature: 27
taaggttaagggtaaggttaagggtaaggttaagggtaaggttaaggatcagtgtggtcttcagggttggggttggggcggtcgtgaaagtgtcag

SEQ ID NO: 45586 - DNA, 96 bp, Fusarium phaseoli
  misc_feature: 27
taagagaggtcgattccttccaagtgtgagaagaacccggcaagcgcgcacgggcgaaaagcgcgtattttgacgaagacgggcaagtccctccgg

SEQ ID NO: 45587 - DNA, 96 bp, Fusarium phaseoli
  misc_feature: 27
taagaataaagacaaaaaaccacagcattcgtttctacggtccaatagggcaatagggcaaccatacatacacacatgtagactatacatgtagac

SEQ ID NO: 45588 - DNA, 96 bp, Fusarium phaseoli
  misc_feature: 27
taacgaagcctgatctcctactggagcaatagacgtgctgagctgaactatctacaatcgctgccgcattcgacctcgcttggaatacccgcaaag

SEQ ID NO: 45589 - DNA, 96 bp, Fusarium phaseoli
  misc_feature: 27
atataataaggaaagaataataaatagattataaaaataagagagataaataaaagtaggaattatagtaaaagattaaggataaaggtaaattta

SEQ ID NO: 45590 - DNA, 96 bp, Fusarium phaseoli
  misc_feature: 27
atctctttaagataatcctcgaggtcctatgttatatttcgaactatatccttatatttattgagtacctaaagagtaataatgctagtttattta

SEQ ID NO: 45591 - DNA, 96 bp, Fusarium phaseoli
  misc_feature: 27
agttctaccggggccgaccgcctggtccctcacggggttataacacgggccgtgatactaagcgcgtctagtaaggaagagatgctcctctcttta

SEQ ID NO: 45592 - DNA, 96 bp, Fusarium phaseoli
  misc_feature: 27
aggtcgaatgcggcagcgattgtagatagttcagctcagcacgtctattgctccagtaggagatcaggcttcgttacagcctcccagacgaaaaac

SEQ ID NO: 45593 - DNA, 96 bp, Fusarium phaseoli
  misc_feature: 27
aagtggctgggtcgtccgtgcacgcgtcgcatcttgcatttcattgaattacctcgacacgccgcaaaaagatgctttaatatacggacacaaaac

SEQ ID NO: 45594 - DNA, 96 bp, Fusarium phaseoli
  misc_feature: 27
ctgggcttagtgatgcatttttctgtacacgtacgtacgtacgtactgtattttgggtagctgtacgtacgtacaacttttctgtacgtacaaaac

SEQ ID NO: 45595 - DNA, 96 bp, Fusarium phaseoli
  misc_feature: 27
gttgtcaagtgcactcagcatccctgcgcgacataacaacagtatgcgccgctaccgtctgctattaagccttaaagccctttgctattacgttgt

SEQ ID NO: 45596 - DNA, 96 bp, Fusarium phaseoli
  misc_feature: 27
gttcatttacagagagagaaaggtaaccaactccagaaaacagaccaatttatttcccagcgggcatttcgaatctacccaaaatccagctccagg

SEQ ID NO: 45597 - DNA, 96 bp, Fusarium phaseoli
  misc_feature: 27
ataataccacacccactccgcttatctaactctaccttaaaattcgccgtatcttacccctccttcctcatatttaatattcactttatccctaac

SEQ ID NO: 45598 - DNA, 96 bp, Fusarium phaseoli
  misc_feature: 27
gttaatttacggttagggataaagtgaatattaaatatgaggaaggaggggtaagatacggcgaattttaaggtagagttagataagcggagtggg

SEQ ID NO: 45599 - DNA, 96 bp, Fusarium phaseoli
  misc_feature: 27
gatttcgctgggtggagtgtcaattcaaagcactggccagttgtccgcagagcgaagaccttctcgaacaactgctcgattccctgcctcaaacac

SEQ ID NO: 45600 - DNA, 96 bp, Fusarium phaseoli
  misc_feature: 27
aagcggaatgaaacgagaggataagaataaagacaaaaaaccacagcattcgtttctacggtccaatagggcaatagggcaaccatacatacacac

SEQ ID NO: 45601 - DNA, 96 bp, Fusarium phaseoli
  misc_feature: 27
gtgtaagggcatcagatttgacgaagtgcggcaacaccgagggctgcgtgagctccaaagtgggaatagcctcagaaagcgcgtacggtcgctttg

SEQ ID NO: 45602 - DNA, 96 bp, Fusarium phaseoli
  misc_feature: 27
gtggtgcccgcaaacgaatctcaggcggattaccttcgtaaccaagctggccaagtgcgtccgatgagcaagaaatgaccctgcctgcactgattg

SEQ ID NO: 45603 - DNA, 96 bp, Fusarium phaseoli
  misc_feature: 27
ctacaccttacgaggactttatagtctatatccttcagtcctttacacttctgagaccctttctagcttatataagctatctttacttagccccac

SEQ ID NO: 45604 - DNA, 96 bp, Fusarium phaseoli
  misc_feature: 27
gtgcctccaaatccagtggcgcatttttccaagagcgagagtaagacattaaccgaggacttgttaggcaactattagtgggcgtggtaatgggac

SEQ ID NO: 45605 - DNA, 96 bp, Fusarium phaseoli
  misc_feature: 27
gtgaatattaaatatgaggaaggaggggtaagatacggcgaattttaaggtagagttagataagcggagtgggtgtggtattatatataaggtggg

SEQ ID NO: 45606 - DNA, 96 bp, Fusarium phaseoli
  misc_feature: 27
gtgaaggttagggggagtggttgtggtgaaggttagggggagtggttgagttgagggttagggttaagtggttgtggtgaaggttagggggagggg

SEQ ID NO: 45607 - DNA, 96 bp, Fusarium phaseoli
  misc_feature: 27
gtcgtcatgtgccagcaggaggaggaagcaggaggcccacggtcatcagccaaggcggggagaagaagaaaggcggcagccgcatcagacaggggc

SEQ ID NO: 45608 - DNA, 96 bp, Fusarium phaseoli
  misc_feature: 27
atccattgctgttacatggcttatcaaggtcctcggcgctgcataccctaacgccgtccgtttctggccttcggtcaggacaaaccaacgcttgac

SEQ ID NO: 45609 - DNA, 96 bp, Fusarium phaseoli
  misc_feature: 27
gtcaagattggtcaatcgacatcatcaggcacggcaacgcaaatgacaaaatgccgtattaaggaagcgacagttctgtatgaaattaaagacagt

SEQ ID NO: 45610 - DNA, 96 bp, Fusarium phaseoli
  misc_feature: 27
ggaaatttaagtgcgtttttcaggttacattgaccttatgaattcctcgatgtctgtctgccagcctaggaaattgtccgccgggttattgaatac

SEQ ID NO: 45611 - DNA, 96 bp, Fusarium phaseoli
  misc_feature: 27
gtagctgttgggtcttcaaggcggactggtcaatgacacgactggtgcggaatggtgggatgccgtatgtctagacgcatctcatctgctcccttc

SEQ ID NO: 45612 - DNA, 96 bp, Fusarium phaseoli
  misc_feature: 27
aggagattggcgtggagcttgattcagcacggctgaacctgtggtgcgataaccagcagacaattcgtctcgtcaatgcagacatcgcgactctac

SEQ ID NO: 45613 - DNA, 96 bp, Fusarium phaseoli
  misc_feature: 27
atgacaggactgaaggaaaaggggaaaaaagatgggtaaaaaagagacagaatgcattttaaaaatgcaaaacagaatcagcaaagctcgctctac

SEQ ID NO: 45614 - DNA, 96 bp, Fusarium phaseoli
  misc_feature: 27
acacgactaatcctttattattcttctatgcgctactctttatgtcttaactaaccaaatgatcagttaaccggccattccgaaacactattgtac

SEQ ID NO: 45615 - DNA, 96 bp, Fusarium phaseoli
  misc_feature: 27
gtaactcctcgtgctcgctgtgccaccaagatccggaataccacccccttatactgacactcctttccgcttgctctccgaaataaccgtccgtcg

SEQ ID NO: 45616 - DNA, 96 bp, Fusarium phaseoli
  misc_feature: 27
ggtttaattaataaattttagggaagtttaattaaaatatctaataatttatttctaaagttagtgattaattagtaattaataataacctcctat

SEQ ID NO: 45617 - DNA, 96 bp, Fusarium phaseoli
  misc_feature: 27
ggttgattacgcactctgaagcccgtcaactaggctcgagcagagcagtcctatcggtatagaagagacatgagaaaaacattgttcagtttcgct

SEQ ID NO: 45618 - DNA, 96 bp, Fusarium phaseoli
  misc_feature: 27
gctttaggaggttgtatataatgccccaggttgtcgactcgactgacactgcagcaaaataccatcgaccggctgagacactcaattgactgaacc

SEQ ID NO: 45619 - DNA, 96 bp, Fusarium phaseoli
  misc_feature: 27
ggttagggggagtggttgtggtgaaggttagggggagtggttgagttgagggttagggttaagtggttgtggtgaaggttagggggaggggttgtg

SEQ ID NO: 45620 - DNA, 96 bp, Fusarium phaseoli
  misc_feature: 27
ggtggtcagagcagaagggagaataggggggataaagtagagggttattatcgaggtagtatttatgagaagtgaatagcaatgagcccggagggt

SEQ ID NO: 45621 - DNA, 96 bp, Fusarium phaseoli
  misc_feature: 27
ggtggagtctgataagtagtgagcgggcttcgaaggaggtgagggttacatccctagttagccaatacccagtcgacatgactccgtagtgccgct

SEQ ID NO: 45622 - DNA, 96 bp, Fusarium phaseoli
  misc_feature: 27
agagatacgaccaagagagataccaccaagagagatgccaccaagagagatgccaccaaagaggcatgcaaccaagatacagccacaatccagacc

SEQ ID NO: 45623 - DNA, 96 bp, Fusarium phaseoli
  misc_feature: 27
ggtcgtgattgggcgaatgctgatctgccgagaaagcgtgagcaactccgctggttacgcgactgggaaggcctcgacagcatggatgaagcaacg

SEQ ID NO: 45624 - DNA, 96 bp, Fusarium phaseoli
  misc_feature: 27
aagcaaccaacaagcaaccaacaagcaaccaacaagcaaccaacaagcaaccaacaagcaaccaacaagcgaccaacaaagtactaccaaaatacc

SEQ ID NO: 45625 - DNA, 96 bp, Fusarium phaseoli
  misc_feature: 27
ggtatgctggatggactagatggagtagcagttgcatgggaactctgcttgggcagcctgtattgacgtcctagacgatgtgcttgaaaccactgt

SEQ ID NO: 45626 - DNA, 96 bp, Fusarium phaseoli
  misc_feature: 27
ggtagttaagataaaggcggattataagagaagtaggaggttaatttacggttagggataaagtgaatattaaatatgaggaaggaggggtaagat

SEQ ID NO: 45627 - DNA, 96 bp, Fusarium phaseoli
  misc_feature: 27
ggtaccgaccacgaatatgcactcttcctccccgcaacctaacttgccgggggccggcggttgaataaatgggatcgggtcggccgtgggcggggg

SEQ ID NO: 45628 - DNA, 96 bp, Fusarium phaseoli
  misc_feature: 27
cgagaagctggaattgaatatgatgacctcaaagacaacggggcactactgggcgatgctggagatgaactccaccaggacctcaccgacattacc

SEQ ID NO: 45629 - DNA, 96 bp, Fusarium phaseoli
  misc_feature: 27
cagatcttatttgcaccggcccccgtgcaggtatgagctccccaagtgtagggcgccgtcgaggcgcacaggtcctgtgtgctcggggcacagccc

SEQ ID NO: 45630 - DNA, 96 bp, Fusarium phaseoli
  misc_feature: 27
gggcgaagctcaaaggccggcatatgcggcagagtaggcgatggtttcttgctttttaggaatgcctcacacttgccatatatgtctgggaggggt

SEQ ID NO: 45631 - DNA, 96 bp, Fusarium phaseoli
  misc_feature: 27
ccttcaccacaaccactccccctaaccttcaccacaaccacttaaccctaaccctcaactcaaccactccccctaaccctcacctcaaccactccc

SEQ ID NO: 45632 - DNA, 96 bp, Fusarium phaseoli
  misc_feature: 27
ctctacctctcttatcctagatattatgggtagttaacccagctcagacttgtacgtaccaccctcgaagtgacacttctctaaaagagacctccc

SEQ ID NO: 45633 - DNA, 96 bp, Fusarium phaseoli
  misc_feature: 27
gggaagtgattaagttgagggttagggttaagtggttgtggtgaaggttagggggagtggttgtggtgaaggttagggggagtggttgtggtggag

SEQ ID NO: 45634 - DNA, 96 bp, Fusarium phaseoli
  misc_feature: 27
gcgagaggccgcatgggatggtctgcgctaacacgccgtgtcttcaattaggcagtgtgatctagtttatcccttccattgttgctcatgagagcc

SEQ ID NO: 45635 - DNA, 96 bp, Fusarium phaseoli
  misc_feature: 27
catctcagccgttcttctcattaagtatcgaatcgactgttgagtcgttacgaaactgccaaccatcaaagcactacagttcagtgcaggatagcc

SEQ ID NO: 45636 - DNA, 96 bp, Fusarium phaseoli
  misc_feature: 27
ggcgaaagagtggttgtgcatggtagtgatttcacgtatttaagttggtatcgggatggaaaagtggatcgggaagcgaacgtgggactgaacgag

SEQ ID NO: 45637 - DNA, 96 bp, Fusarium phaseoli
  misc_feature: 27
catgagcaacaatggaagggataaactagatcacactgcctaattgaagacacggcgtgttagcgcagaccatcccatgcggcctctcgcccggcc

SEQ ID NO: 45638 - DNA, 96 bp, Fusarium phaseoli
  misc_feature: 27
ggcattatgtgcttggggactgcagacagtatgtattcgtcttgcaagttgttgacctcgagtgttgcagccaatcagaattttagcggtcaaact

SEQ ID NO: 45639 - DNA, 96 bp, Fusarium phaseoli
  misc_feature: 27
ggattcgctagcaaatccaatgggtttcccatacaaaaaaaaaaggcgctatcctatcctagctgcgcggcggattcgctagcaaatccaatgggt

SEQ ID NO: 45640 - DNA, 96 bp, Fusarium phaseoli
  misc_feature: 27
ggattaatttatatcttttacctttaaaggggaagagaagaagtatttttatactttaatcttttctttttttctttttttctttttctctctttc

SEQ ID NO: 45641 - DNA, 96 bp, Fusarium phaseoli
  misc_feature: 27
accttcaccacaaccactccccctaaccttcaccacaaccacttaaccctaaccctcaactcaaccactccccctaaccctcacctcaaccactcc

SEQ ID NO: 45642 - DNA, 96 bp, Fusarium phaseoli
  misc_feature: 27
ggagggagtttgcagacacgggccacagaagcgcagcatgtgccgtggcgtaccggagtccagagccagcggttgttccgcaatgggccggcccgc

SEQ ID NO: 45643 - DNA, 96 bp, Fusarium phaseoli
  misc_feature: 27
cttaacgccagaggttactagtccctaactgcccccgcccttttgccccttgctctccggcaaccttcataacctcccgcttacctcttgacttcc

SEQ ID NO: 45644 - DNA, 96 bp, Fusarium virguliforme
  misc_feature: 103
gatcggaagagcacacgtctgaactccagtcactgaccaatctcgtatgccgtcttctgcttgagatcggaagagcacacgtctgaactccagtca

SEQ ID NO: 45645 - DNA, 96 bp, Fusarium virguliforme
  misc_feature: 101
atcggaagagcacacgtctgaactccagtcactgaccaatctcgtatgccgtcttctgcttgagatcggaagagcacacgtctgaactccagtcac

SEQ ID NO: 45646 - DNA, 96 bp, Fusarium virguliforme
  misc_feature: 98
agatataattctcttaatttaatcttttaattattaacccttaatattataggtccttataataatataatagcctaactcactattagcctagac

SEQ ID NO: 45647 - DNA, 96 bp, Fusarium virguliforme
  misc_feature: 96
tcggaagagcacacgtctgaactccagtcactgaccaatctcgtatgccgtcttctgcttgagatcggaagagcacacgtctgaactccagtcact

SEQ ID NO: 45648 - DNA, 96 bp, Fusarium virguliforme
  misc_feature: 96
cggaagagcacacgtctgaactccagtcactgaccaatctcgtatgccgtcttctgcttgagatcggaagagcacacgtctgaactccagtcactg

SEQ ID NO: 45649 - DNA, 96 bp, Fusarium virguliforme
  misc_feature: 95
gagatataattctcttaatttaatcttttaattattaacccttaatattataggtccttataataatataatagcctaactcactattagcctaga

SEQ ID NO: 45650 - DNA, 96 bp, Fusarium virguliforme
  misc_feature: 92
agagatataattctcttaatttaatcttttaattattaacccttaatattataggtccttataataatataatagcctaactcactattagcctag

SEQ ID NO: 45651 - DNA, 96 bp, Fusarium virguliforme
  misc_feature: 91
atataattctcttaatttaatcttttaattattaacccttaatattataggtccttataataatataatagcctaactcactattagcctagacta

SEQ ID NO: 45652 - DNA, 96 bp, Fusarium virguliforme
  misc_feature: 87
gatataattctcttaatttaatcttttaattattaacccttaatattataggtccttataataatataatagcctaactcactattagcctagact

SEQ ID NO: 45653 - DNA, 96 bp, Fusarium virguliforme
  misc_feature: 86
gaagagcacacgtctgaactccagtcactgaccaatctcgtatgccgtcttctgcttgagatcggaagagcacacgtctgaactccagtcactgac

SEQ ID NO: 45654 - DNA, 96 bp, Fusarium virguliforme
  misc_feature: 86
agagagatataattctcttaatttaatcttttaattattaacccttaatattataggtccttataataatataatagcctaactcactattagcct

SEQ ID NO: 45655 - DNA, 96 bp, Fusarium virguliforme
  misc_feature: 85
ggaagagcacacgtctgaactccagtcactgaccaatctcgtatgccgtcttctgcttgagatcggaagagcacacgtctgaactccagtcactga

SEQ ID NO: 45656 - DNA, 96 bp, Fusarium virguliforme
  misc_feature: 84
gagagatataattctcttaatttaatcttttaattattaacccttaatattataggtccttataataatataatagcctaactcactattagccta

SEQ ID NO: 45657 - DNA, 96 bp, Fusarium virguliforme
  misc_feature: 83
gtaatagttaataaggtaaatagtaatataaaccggggatcttaatataatatagaatacctaaatacctatataataatatattaagcttagtta

SEQ ID NO: 45658 - DNA, 96 bp, Fusarium virguliforme
  misc_feature: 83
gtgagttaggctattatattattataaggacctataatattaagggttaataattaaaagattaaattaagagaattatatctctctttagggttt

SEQ ID NO: 45659 - DNA, 96 bp, Fusarium virguliforme
  misc_feature: 82
tataattctcttaatttaatcttttaattattaacccttaatattataggtccttataataatataatagcctaactcactattagcctagactag

SEQ ID NO: 45660 - DNA, 96 bp, Fusarium virguliforme
  misc_feature: 82
agtaatagttaataaggtaaatagtaatataaaccggggatcttaatataatatagaatacctaaatacctatataataatatattaagcttagtt

SEQ ID NO: 45661 - DNA, 96 bp, Fusarium virguliforme
  misc_feature: 81
tgagttaggctattatattattataaggacctataatattaagggttaataattaaaagattaaattaagagaattatatctctctttagggtttt

SEQ ID NO: 45662 - DNA, 96 bp, Fusarium virguliforme
  misc_feature: 81
agtgagttaggctattatattattataaggacctataatattaagggttaataattaaaagattaaattaagagaattatatctctctttagggtt

SEQ ID NO: 45663 - DNA, 96 bp, Fusarium virguliforme
  misc_feature: 79
tagtgagttaggctattatattattataaggacctataatattaagggttaataattaaaagattaaattaagagaattatatctctctttagggt

SEQ ID NO: 45664 - DNA, 96 bp, Fusarium virguliforme
  misc_feature: 79
agagcacacgtctgaactccaagcagaagacggcatacgagattggtcagtgactggagttcagacgtgtgctctagatcggaagagcgtcgtgta

SEQ ID NO: 45665 - DNA, 96 bp, Fusarium virguliforme
  misc_feature: 79
gagcacacgtctgaactccaagcagaagacggcatacgagattggtcagtgactggagttcagacgtgtgctctagatcggaagagcgtcgtgtag

SEQ ID NO: 45666 - DNA, 96 bp, Fusarium virguliforme
  misc_feature: 79
agcacacgtctgaactccaagcagaagacggcatacgagattggtcagtgactggagttcagacgtgtgctctagatcggaagagcgtcgtgtagg

SEQ ID NO: 45667 - DNA, 96 bp, Fusarium virguliforme
  misc_feature: 78
tctattagcctatatattaagagtaataaataatacgctctatatattatacctactatagatatctactatagcctttagctaaattattaacct

SEQ ID NO: 45668 - DNA, 96 bp, Fusarium virguliforme
  misc_feature: 78
gcacacgtctgaactccaagcagaagacggcatacgagattggtcagtgactggagttcagacgtgtgctctagatcggaagagcgtcgtgtaggg

SEQ ID NO: 45669 - DNA, 96 bp, Fusarium virguliforme
  misc_feature: 77
cctaaagagagatataattctcttaatttaatcttttaattattaacccttaatattataggtccttataataatataatagcctaactcactatt

SEQ ID NO: 45670 - DNA, 96 bp, Fusarium virguliforme
  misc_feature: 77
atagtgagttaggctattatattattataaggacctataatattaagggttaataattaaaagattaaattaagagaattatatctctctttaggg

SEQ ID NO: 45671 - DNA, 96 bp, Fusarium virguliforme
  misc_feature: 76
aagagagatataattctcttaatttaatcttttaattattaacccttaatattataggtccttataataatataatagcctaactcactattagcc

SEQ ID NO: 45672 - DNA, 96 bp, Fusarium virguliforme
  misc_feature: 76
aagtaatagttaataaggtaaatagtaatataaaccggggatcttaatataatatagaatacctaaatacctatataataatatattaagcttagt

SEQ ID NO: 45673 - DNA, 96 bp, Fusarium virguliforme
  misc_feature: 75
gatcggaagagcacacgtctgaactccagtcactgaccaatctcgtatgccgtcttctgcttagatcggaagagcacacgtctgaactccagtcac

SEQ ID NO: 45674 - DNA, 96 bp, Fusarium virguliforme
  misc_feature: 75
atcggaagagcacacgtctgaactccagtcactgaccaatctcgtatgccgtcttctgcttagatcggaagagcacacgtctgaactccagtcact

SEQ ID NO: 45675 - DNA, 96 bp, Fusarium virguliforme
  misc_feature: 74
tcggaagagcacacgtctgaactccagtcactgaccaatctcgtatgccgtcttctgcttagatcggaagagcacacgtctgaactccagtcactg

SEQ ID NO: 45676 - DNA, 96 bp, Fusarium virguliforme
  misc_feature: 74
ggagacgcaataagtaatagttaataaggtaaatagtaatataaaccggggatcttaatataatatagaatacctaaatacctatataataatata

SEQ ID NO: 45677 - DNA, 96 bp, Fusarium virguliforme
  misc_feature: 74
aataataatatttagtattaaaaggggcttttaaaattaaatcttaaaggctcttataaaggtaataataataattacttttctaaaataatatct

SEQ ID NO: 45678 - DNA, 96 bp, Fusarium virguliforme
  misc_feature: 73
agttaggctattatattattataaggacctataatattaagggttaataattaaaagattaaattaagagaattatatctctctttagggttttta

SEQ ID NO: 45679 - DNA, 96 bp, Fusarium virguliforme
  misc_feature: 73
aagagcacacgtctgaactccagtcactgaccaatctcgtatgccgtcttctgcttgagatcggaagagcacacgtctgaactccagtcactgacc

SEQ ID NO: 45680 - DNA, 96 bp, Fusarium virguliforme
  misc_feature: 73
aaagaataataattaaaaaaataggtaaaggtaaagagaaggtaaagtaaattaaagttttaataaattaaaaggttaagggtaaagtagtaaggg

SEQ ID NO: 45681 - DNA, 96 bp, Fusarium virguliforme
  misc_feature: 73
cccaccctttgggttagcgttagagttacggctaaacaacacctttgtcccctcacttcccgggttaaatacaaacctagcggttaggttacgggg

SEQ ID NO: 45682 - DNA, 96 bp, Fusarium virguliforme
  misc_feature: 72
gaaataaatttatttagggatctttatataactatctataatatatagcgcctaaggctagctatatatcttaatataatataaaatacctaaata

SEQ ID NO: 45683 - DNA, 96 bp, Fusarium virguliforme
  misc_feature: 72
ctaaagagagatataattctcttaatttaatcttttaattattaacccttaatattataggtccttataataatataatagcctaactcactatta

SEQ ID NO: 45684 - DNA, 96 bp, Fusarium virguliforme
  misc_feature: 72
aactaatagccccttactaaagctcctatttaagtaaataatataaaaaataaagctatctctaaattattaataatacctcccttaatattatta

SEQ ID NO: 45685 - DNA, 96 bp, Fusarium virguliforme
  misc_feature: 72
ctctattagcctatatattaagagtaataaataatacgctctatatattatacctactatagatatctactatagcctttagctaaattattaacc

SEQ ID NO: 45686 - DNA, 96 bp, Fusarium virguliforme
  misc_feature: 72
gagttaggctattatattattataaggacctataatattaagggttaataattaaaagattaaattaagagaattatatctctctttagggttttt

SEQ ID NO: 45687 - DNA, 96 bp, Fusarium virguliforme
  misc_feature: 71
ccaccctttgggttagcgttagagttacggctaaacaacacctttgtcccctcacttcccgggttaaatacaaacctagcggttaggttacgggga

SEQ ID NO: 45688 - DNA, 96 bp, Fusarium virguliforme
  misc_feature: 71
cggaagagcacacgtctgaactccagtcactgaccaatctcgtatgccgtcttctgcttagatcggaagagcacacgtctgaactccagtcactga

SEQ ID NO: 45689 - DNA, 96 bp, Fusarium virguliforme
  misc_feature: 71
gttaggctattatattattataaggacctataatattaagggttaataattaaaagattaaattaagagaattatatctctctttagggtttttat

SEQ ID NO: 45690 - DNA, 96 bp, Fusarium virguliforme
  misc_feature: 71
gaagagcacacgtctgaactccagtcactgaccaatctcgtatgccgtcttctgcttagatcggaagagcacacgtctgaactccagtcactgacc

SEQ ID NO: 45691 - DNA, 96 bp, Fusarium virguliforme
  misc_feature: 71
aaaaagaataataattaaaaaaataggtaaaggtaaagagaaggtaaagtaaattaaagttttaataaattaaaaggttaagggtaaagtagtaag

SEQ ID NO: 45692 - DNA, 96 bp, Fusarium virguliforme
  misc_feature: 70
caccctttgggttagcgttagagttacggctaaacaacacctttgtcccctcacttcccgggttaaatacaaacctagcggttaggttacggggaa

SEQ ID NO: 45693 - DNA, 96 bp, Fusarium virguliforme
  misc_feature: 70
aaaaaagaataataattaaaaaaataggtaaaggtaaagagaaggtaaagtaaattaaagttttaataaattaaaaggttaagggtaaagtagtaa

SEQ ID NO: 45694 - DNA, 96 bp, Fusarium virguliforme
  misc_feature: 70
tagaaactaatagccccttactaaagctcctatttaagtaaataatataaaaaataaagctatctctaaattattaataatacctcccttaatatt

SEQ ID NO: 45695 - DNA, 96 bp, Fusarium virguliforme
  misc_feature: 70
ggaagagcacacgtctgaactccagtcactgaccaatctcgtatgccgtcttctgcttagatcggaagagcacacgtctgaactccagtcactgac

SEQ ID NO: 45696 - DNA, 96 bp, Fusarium virguliforme
  misc_feature: 69
ttagtcttaaataaatgcagcgtcagctatattatatccttataatataagcttaaattaagcctaagagtttttaaaaaataaataataatctta

SEQ ID NO: 45697 - DNA, 96 bp, Fusarium virguliforme
  misc_feature: 69
tattttatccttaattttaggctttagtaataatttctaagataatttaatattatcctaacggttctaaatatgaataataatattaataaatag

SEQ ID NO: 45698 - DNA, 96 bp, Fusarium virguliforme
  misc_feature: 69
aaagagagatataattctcttaatttaatcttttaattattaacccttaatattataggtccttataataatataatagcctaactcactattagc

SEQ ID NO: 45699 - DNA, 96 bp, Fusarium virguliforme
  misc_feature: 69
agaaataaatttatttagggatctttatataactatctataatatatagcgcctaaggctagctatatatcttaatataatataaaatacctaaat

SEQ ID NO: 45700 - DNA, 96 bp, Fusarium virguliforme
  misc_feature: 68
tccatttattttaattaaatatataaccctatttcttatataaagtaaaagactattaagtaaaataataatatcaagggcttaaagttatatatc

SEQ ID NO: 45701 - DNA, 96 bp, Fusarium virguliforme
  misc_feature: 68
taaagagagatataattctcttaatttaatcttttaattattaacccttaatattataggtccttataataatataatagcctaactcactattag

SEQ ID NO: 45702 - DNA, 96 bp, Fusarium virguliforme
  misc_feature: 68
gatcggaagagcacacgtctgaactccagtcactgaccaatctcgtatgccgtcttctgcttggatcggaagagcacacgtctgaactccagtcac

SEQ ID NO: 45703 - DNA, 96 bp, Fusarium virguliforme
  misc_feature: 68
atccatttattttaattaaatatataaccctatttcttatataaagtaaaagactattaagtaaaataataatatcaagggcttaaagttatatat

SEQ ID NO: 45704 - DNA, 96 bp, Fusarium virguliforme
  misc_feature: 68
atagaaactaatagccccttactaaagctcctatttaagtaaataatataaaaaataaagctatctctaaattattaataatacctcccttaatat

SEQ ID NO: 45705 - DNA, 96 bp, Fusarium virguliforme
  misc_feature: 68
aagaataataattaaaaaaataggtaaaggtaaagagaaggtaaagtaaattaaagttttaataaattaaaaggttaagggtaaagtagtaagggt

SEQ ID NO: 45706 - DNA, 96 bp, Fusarium virguliforme
  misc_feature: 67
aagaaataaatttatttagggatctttatataactatctataatatatagcgcctaaggctagctatatatcttaatataatataaaatacctaaa

SEQ ID NO: 45707 - DNA, 96 bp, Fusarium virguliforme
  misc_feature: 67
taataatatttagtattaaaaggggcttttaaaattaaatcttaaaggctcttataaaggtaataataataattacttttctaaaataatatctaa

SEQ ID NO: 45708 - DNA, 96 bp, Fusarium virguliforme
  misc_feature: 67
tctagtattagtataaaaaaatccatcttttttattttatattccgcatccatatcctcctacggaggatatggatgctatttcataaagctaaga

SEQ ID NO: 45709 - DNA, 96 bp, Fusarium virguliforme
  misc_feature: 67
tagggatctttatataactatctataatatatagcgcctaaggctagctatatatcttaatataatataaaatacctaaatacctatagaataata

SEQ ID NO: 45710 - DNA, 96 bp, Fusarium virguliforme
  misc_feature: 67
aatttattaatacccttacttaaataagaggaataaaactagaaataaagtataataataaggaataataggctacccttaatagaattattaata

SEQ ID NO: 45711 - DNA, 96 bp, Fusarium virguliforme
  misc_feature: 67
tatagaaactaatagccccttactaaagctcctatttaagtaaataatataaaaaataaagctatctctaaattattaataatacctcccttaata

SEQ ID NO: 45712 - DNA, 96 bp, Fusarium virguliforme
  misc_feature: 67
gatatagctttagtatatagttaaatacctttacagcttaaagtatataatatatatacccttatagctatttatattagagatattataggagta

SEQ ID NO: 45713 - DNA, 96 bp, Fusarium virguliforme
  misc_feature: 67
taaaaaagaataataattaaaaaaataggtaaaggtaaagagaaggtaaagtaaattaaagttttaataaattaaaaggttaagggtaaagtagta

SEQ ID NO: 45714 - DNA, 96 bp, Fusarium virguliforme
  misc_feature: 67
aataaatttatttagggatctttatataactatctataatatatagcgcctaaggctagctatatatcttaatataatataaaatacctaaatacc

SEQ ID NO: 45715 - DNA, 96 bp, Fusarium virguliforme
  misc_feature: 67
ctcctatagaaactaatagccccttactaaagctcctatttaagtaaataatataaaaaataaagctatctctaaattattaataatacctccctt

SEQ ID NO: 45716 - DNA, 96 bp, Fusarium virguliforme
  misc_feature: 67
ctattagcctatatattaagagtaataaataatacgctctatatattatacctactatagatatctactatagcctttagctaaattattaacctt

SEQ ID NO: 45717 - DNA, 96 bp, Fusarium virguliforme
  misc_feature: 67
aagaaaaaaggtatttacttaattacttaagtaagtaatattattaattataaatatattaggccttaaaggtataattaaggtaaaactataaat

SEQ ID NO: 45718 - DNA, 96 bp, Fusarium virguliforme
  misc_feature: 67
aaagttaagaatattaatattaataattattttatcagaagtaatactttagtaagttaatcttattaattattaatagttaatagttagaagatt

SEQ ID NO: 45719 - DNA, 96 bp, Fusarium virguliforme
  misc_feature: 66
taattaagattatagtttaattattattaaagttaaaccttaggttatagcctttattaataatattactttaggctcttttatattataagtaaa

SEQ ID NO: 45720 - DNA, 96 bp, Fusarium virguliforme
  misc_feature: 66
cctctattagcctatatattaagagtaataaataatacgctctatatattatacctactatagatatctactatagcctttagctaaattattaac

SEQ ID NO: 45721 - DNA, 96 bp, Fusarium virguliforme
  misc_feature: 66
aaggaaaaaaaataaagtataaagaaaaaggaatataataaaaagagctaattatagaaaatatagagagtaattaacgataaggcggagaagatc

SEQ ID NO: 45722 - DNA, 96 bp, Fusarium virguliforme
  misc_feature: 66
gagagtgattataatttcctatagggcttatagtattatacctttattttcgcgtataagttatattatagtttatctaggatttattatttattt

SEQ ID NO: 45723 - DNA, 96 bp, Fusarium virguliforme
  misc_feature: 66
gagacgcaataagtaatagttaataaggtaaatagtaatataaaccggggatcttaatataatatagaatacctaaatacctatataataatatat

SEQ ID NO: 45724 - DNA, 96 bp, Fusarium virguliforme
  misc_feature: 66
aattaagattatagtttaattattattaaagttaaaccttaggttatagcctttattaataatattactttaggctcttttatattataagtaaag

SEQ ID NO: 45725 - DNA, 96 bp, Fusarium virguliforme
  misc_feature: 66
aaaagaataataattaaaaaaataggtaaaggtaaagagaaggtaaagtaaattaaagttttaataaattaaaaggttaagggtaaagtagtaagg

SEQ ID NO: 45726 - DNA, 96 bp, Fusarium virguliforme
  misc_feature: 66
cctaagaagttattataaggaagctatatagaataaaagataagcctataaggatataaggtaattagaaatatatatagaagggaggttttaatt

SEQ ID NO: 45727 - DNA, 96 bp, Fusarium virguliforme
  misc_feature: 66
ccaaaacccaccctttgggttagcgttagagttacggctaaacaacacctttgtcccctcacttcccgggttaaatacaaacctagcggttagggt

SEQ ID NO: 45728 - DNA, 96 bp, Fusarium virguliforme
  misc_feature: 66
agatatagctttagtatatagttaaatacctttacagcttaaagtatataatatatatacccttatagctatttatattagagatattataggagt

SEQ ID NO: 45729 - DNA, 96 bp, Fusarium virguliforme
  misc_feature: 66
agaggttagagaagaaggagtaagagttacttaagttattatattatattaataccgaaagacgctagaaatattattaatatttatttaattctt

SEQ ID NO: 45730 - DNA, 96 bp, Fusarium virguliforme
  misc_feature: 65
aaagaaaaaaggtatttacttaattacttaagtaagtaatattattaattataaatatattaggccttaaaggtataattaaggtaaaactataaa

SEQ ID NO: 45731 - DNA, 96 bp, Fusarium virguliforme
  misc_feature: 65
tataaaaaccctaaagagagatataattctcttaatttaatcttttaattattaacccttaatattataggtccttataataatataatagcctaa

SEQ ID NO: 45732 - DNA, 96 bp, Fusarium virguliforme
  misc_feature: 65
gtaatttattaatatgcttagttaagaaagaggagtaaagctaaaaacaaaatataataataaagaataataagctatatttaataggattattaa

SEQ ID NO: 45733 - DNA, 96 bp, Fusarium virguliforme
  misc_feature: 65
ttaagaaagaggagtaaagctaaaaacaaaatataataataaagaataataagctatatttaataggattattaagataatagaaagaggctttta

SEQ ID NO: 45734 - DNA, 96 bp, Fusarium virguliforme
  misc_feature: 65
tcttaataatcctattaaatatagcttattattctttattattatattttgtttttagctttactcctctttcttaactaagcatattaataaatt

SEQ ID NO: 45735 - DNA, 96 bp, Fusarium virguliforme
  misc_feature: 65
tataattacttaagaaactatttattaatattattattcatatttagaaccgttaggataatattaaattatcttagaaattattactaaagccta

SEQ ID NO: 45736 - DNA, 96 bp, Fusarium virguliforme
  misc_feature: 65
caaaacccaccctttgggttagcgttagagttacggctaaacaacacctttgtcccctcacttcccgggttaaatacaaacctagcggttagggta

SEQ ID NO: 45737 - DNA, 96 bp, Fusarium virguliforme
  misc_feature: 65
taatttattaatacccttacttaaataagaggaataaaactagaaataaagtataataataaggaataataggctacccttaatagaattattaat

SEQ ID NO: 45738 - DNA, 96 bp, Fusarium virguliforme
  misc_feature: 65
taagtaatagttaataaggtaaatagtaatataaaccggggatcttaatataatatagaatacctaaatacctatataataatatattaagcttag

SEQ ID NO: 45739 - DNA, 96 bp, Fusarium virguliforme
  misc_feature: 65
gaataaatagtattttataaattaattaataataaccaaaattatatctacttcttaatcccttaatataattaatagtagacctataataaagtc

SEQ ID NO: 45740 - DNA, 96 bp, Fusarium virguliforme
  misc_feature: 65
ccatttattttaattaaatatataaccctatttcttatataaagtaaaagactattaagtaaaataataatatcaagggcttaaagttatatatct

SEQ ID NO: 45741 - DNA, 96 bp, Fusarium virguliforme
  misc_feature: 65
aaaaaggtataagatattactaaaagaaggtattaaataaaaagaaataagagtaatagatagtctaagaaaataagaaataaataaactttacct

SEQ ID NO: 45742 - DNA, 96 bp, Fusarium virguliforme
  misc_feature: 65
agaattaaataaatattaataatatttctagcgtctttcggtattaatataatataataacttaagtaactcttactccttcttctctaacctctt

SEQ ID NO: 45743 - DNA, 96 bp, Fusarium virguliforme
  misc_feature: 65
aaactaatagccccttactaaagctcctatttaagtaaataatataaaaaataaagctatctctaaattattaataatacctcccttaatattatt

SEQ ID NO: 45744 - DNA, 96 bp, Fusarium virguliforme
  misc_feature: 64
tttcttattatattatatagctcctaatactatatatccggctttagtattatataaggtattataatatctcttcctaccctagtttaagttaaa

SEQ ID NO: 45745 - DNA, 96 bp, Fusarium virguliforme
  misc_feature: 64
ttaggttttcctagggttttataatttttattatcgctttatttatatttatttaagggtaatataattacttataggtttattaaaaggaataaa

SEQ ID NO: 45746 - DNA, 96 bp, Fusarium virguliforme
  misc_feature: 64
gaaaaaaggtatttacttaattacttaagtaagtaatattattaattataaatatattaggccttaaaggtataattaaggtaaaactataaataa

SEQ ID NO: 45747 - DNA, 96 bp, Fusarium virguliforme
  misc_feature: 64
ttatatcttaataacctttatttattacttaatatagattttttaagatagattaaattaatagcttaatctttattaagccttttttactttcct

SEQ ID NO: 45748 - DNA, 96 bp, Fusarium virguliforme
  misc_feature: 64
atactcctagaaggtaagaaataaataaactttacctatctataaaataacccttaaataataataaggataataaagactattacgatagtataa

SEQ ID NO: 45749 - DNA, 96 bp, Fusarium virguliforme
  misc_feature: 64
ttataaagtcccttttatattataaggtcttttataaatataaagagagagagtcccctatataatactttatataatagagagccttctatatct

SEQ ID NO: 45750 - DNA, 96 bp, Fusarium virguliforme
  misc_feature: 64
ttaccctattaaaccttacttaatttccctcctttaacctaaataatttaccttttcccctttattacctttttaaccctcttttttcttttttat

SEQ ID NO: 45751 - DNA, 96 bp, Fusarium virguliforme
  misc_feature: 64
ttaagattatagtttaattattattaaagttaaaccttaggttatagcctttattaataatattactttaggctcttttatattataagtaaagct

SEQ ID NO: 45752 - DNA, 96 bp, Fusarium virguliforme
  misc_feature: 64
tcccttagtaataatactatatagattatatagcggctaaataataataaagctacttagtataattataagcctaataaagtttataccttctta

SEQ ID NO: 45753 - DNA, 96 bp, Fusarium virguliforme
  misc_feature: 64
ataataatatttagtattaaaaggggcttttaaaattaaatcttaaaggctcttataaaggtaataataataattacttttctaaaataatatcta

SEQ ID NO: 45754 - DNA, 96 bp, Fusarium virguliforme
  misc_feature: 64
taagcttaatatattattatataggtatttaggtattctatattatattaagatccccggtttatattactatttaccttattaactattacttat

SEQ ID NO: 45755 - DNA, 96 bp, Fusarium virguliforme
  misc_feature: 64
aaataaatttatttagggatctttatataactatctataatatatagcgcctaaggctagctatatatcttaatataatataaaatacctaaatac

SEQ ID NO: 45756 - DNA, 96 bp, Fusarium virguliforme
  misc_feature: 64
gaatataaaaaccctaaagagagatataattctcttaatttaatcttttaattattaacccttaatattataggtccttataataatataatagcc

SEQ ID NO: 45757 - DNA, 96 bp, Fusarium virguliforme
  misc_feature: 64
attaagattatagtttaattattattaaagttaaaccttaggttatagcctttattaataatattactttaggctcttttatattataagtaaagc

SEQ ID NO: 45758 - DNA, 96 bp, Fusarium virguliforme
  misc_feature: 64
cttaaggaactctatttatttttaataaaaggtatattttaatagcttaatataaaatttagcgttttatatcctcttaaatacctcttaaatagc

SEQ ID NO: 45759 - DNA, 96 bp, Fusarium virguliforme
  misc_feature: 64
aaatagtattttataaattaattaataataaccaaaattatatctacttcttaatcccttaatataattaatagtagacctataataaagtctatc

SEQ ID NO: 45760 - DNA, 96 bp, Fusarium virguliforme
  misc_feature: 64
catttattttaattaaatatataaccctatttcttatataaagtaaaagactattaagtaaaataataatatcaagggcttaaagttatatatctc

SEQ ID NO: 45761 - DNA, 96 bp, Fusarium virguliforme
  misc_feature: 64
gaaactaatagccccttactaaagctcctatttaagtaaataatataaaaaataaagctatctctaaattattaataatacctcccttaatattat

SEQ ID NO: 45762 - DNA, 96 bp, Fusarium virguliforme
  misc_feature: 64
accaaaacccaccctttgggttagcgttagagttacggctaaacaacacctttgtcccctcacttcccgggttaaatacaaacctagcggttaggg

SEQ ID NO: 45763 - DNA, 96 bp, Fusarium virguliforme
  misc_feature: 64
atttattttaattaaatatataaccctatttcttatataaagtaaaagactattaagtaaaataataatatcaagggcttaaagttatatatctct

SEQ ID NO: 45764 - DNA, 96 bp, Fusarium virguliforme
  misc_feature: 64
atcttaataatcctattaaatatagcttattattctttattattatattttgtttttagctttactcctctttcttaactaagcatattaataaat

SEQ ID NO: 45765 - DNA, 96 bp, Fusarium virguliforme
  misc_feature: 64
attaaggtataaaagcctctttctattatcttaataatcctattaaatatagcttattattctttattattatattttgtttttagctttactcct

SEQ ID NO: 45766 - DNA, 96 bp, Fusarium virguliforme
  misc_feature: 64
attaaaacctcccttctatatatatttctaattaccttatatccttataggcttatcttttattctatatagcttccttataataacttcttaggt

SEQ ID NO: 45767 - DNA, 96 bp, Fusarium virguliforme
  misc_feature: 64
agggatctttatataactatctataatatatagcgcctaaggctagctatatatcttaatataatataaaatacctaaatacctatagaataatat

SEQ ID NO: 45768 - DNA, 96 bp, Fusarium virguliforme
  misc_feature: 64
atacttaccaatatatatataacggcacgttttataaataataaatagaaacttaggtaatttaataaataactctatcttagctactattattct

SEQ ID NO: 45769 - DNA, 96 bp, Fusarium virguliforme
  misc_feature: 64
aatataaaaaccctaaagagagatataattctcttaatttaatcttttaattattaacccttaatattataggtccttataataatataatagcct

SEQ ID NO: 45770 - DNA, 96 bp, Fusarium virguliforme
  misc_feature: 64
aaggtataaaagcctctttctattatcttaataatcctattaaatatagcttattattctttattattatattttgtttttagctttactcctctt

SEQ ID NO: 45771 - DNA, 96 bp, Fusarium virguliforme
  misc_feature: 63
tttattttaattaaatatataaccctatttcttatataaagtaaaagactattaagtaaaataataatatcaagggcttaaagttatatatctcta

SEQ ID NO: 45772 - DNA, 96 bp, Fusarium virguliforme
  misc_feature: 63
ttagggatctttatataactatctataatatatagcgcctaaggctagctatatatcttaatataatataaaatacctaaatacctatagaataat

SEQ ID NO: 45773 - DNA, 96 bp, Fusarium virguliforme
  misc_feature: 63
tcctctattagcctatatattaagagtaataaataatacgctctatatattatacctactatagatatctactatagcctttagctaaattattaa

SEQ ID NO: 45774 - DNA, 96 bp, Fusarium virguliforme
  misc_feature: 63
cctatagaaactaatagccccttactaaagctcctatttaagtaaataatataaaaaataaagctatctctaaattattaataatacctcccttaa

SEQ ID NO: 45775 - DNA, 96 bp, Fusarium virguliforme
  misc_feature: 63
atttcttattatattatatagctcctaatactatatatccggctttagtattatataaggtattataatatctcttcctaccctagtttaagttaa

SEQ ID NO: 45776 - DNA, 96 bp, Fusarium virguliforme
  misc_feature: 63
ttaaaacctcccttctatatatatttctaattaccttatatccttataggcttatcttttattctatatagcttccttataataacttcttaggta

SEQ ID NO: 45777 - DNA, 96 bp, Fusarium virguliforme
  misc_feature: 63
gggatctttatataactatctataatatatagcgcctaaggctagctatatatcttaatataatataaaatacctaaatacctatagaataatata

SEQ ID NO: 45778 - DNA, 96 bp, Fusarium virguliforme
  misc_feature: 63
taggggtcactataatactatatatactaaaactagaggtattaatactcttaataataaattactataaagagaagcttatagatcttatcctct

SEQ ID NO: 45779 - DNA, 96 bp, Fusarium virguliforme
  misc_feature: 63
taagattatagtttaattattattaaagttaaaccttaggttatagcctttattaataatattactttaggctcttttatattataagtaaagcta

SEQ ID NO: 45780 - DNA, 96 bp, Fusarium virguliforme
  misc_feature: 63
agaataataattaaaaaaataggtaaaggtaaagagaaggtaaagtaaattaaagttttaataaattaaaaggttaagggtaaagtagtaagggta

SEQ ID NO: 45781 - DNA, 96 bp, Fusarium virguliforme
  misc_feature: 63
agaaactaatagccccttactaaagctcctatttaagtaaataatataaaaaataaagctatctctaaattattaataatacctcccttaatatta

SEQ ID NO: 45782 - DNA, 96 bp, Fusarium virguliforme
  misc_feature: 63
ggaaaaaggtataagatattactaaaagaaggtattaaataaaaagaaataagagtaatagatagtctaagaaaataagaaataaataaactttac

SEQ ID NO: 45783 - DNA, 96 bp, Fusarium virguliforme
  misc_feature: 63
ctttagatattattttagaaaagtaattattattattacctttataagagcctttaagatttaattttaaaagccccttttaatactaaatattat

SEQ ID NO: 45784 - DNA, 96 bp, Fusarium virguliforme
  misc_feature: 63
ctatagttaggtaagataaataaagaaataactaaagaaaacctaagatatataataataacttctcctagaactaataaaataagaaaaccctat

SEQ ID NO: 45785 - DNA, 96 bp, Fusarium virguliforme
  misc_feature: 63
ctacctaatcctcatggctaactgctaccttcctgacttcccgggttaaatgaaaaattcgccttttggcttagcgttagggttacggttacgggg

SEQ ID NO: 45786 - DNA, 96 bp, Fusarium virguliforme
  misc_feature: 63
aatcctattaaatatagcttattattctttattattatattttgtttttagctttactcctctttcttaactaagcatattaataaattactttag

SEQ ID NO: 45787 - DNA, 96 bp, Fusarium virguliforme
  misc_feature: 63
atcttattccttaattaaggttataaagaggttaatataaaatatagaacctaattataagtaatatagcctaataataagcggtataaaccctat

SEQ ID NO: 45788 - DNA, 96 bp, Fusarium virguliforme
  misc_feature: 63
atcggaagagcacacgtctgaactccagtcactgaccaatctcgtatgccgtcttctgcttggatcggaagagcacacgtctgaactccagtcact

SEQ ID NO: 45789 - DNA, 96 bp, Fusarium virguliforme
  misc_feature: 63
actatctattactcttatttctttttatttaataccttcttttagtaatatcttatacctttttcctatatatatctgccttataattaagcttat

SEQ ID NO: 45790 - DNA, 96 bp, Fusarium virguliforme
  misc_feature: 63
ataaatttatttagggatctttatataactatctataatatatagcgcctaaggctagctatatatcttaatataatataaaatacctaaatacct

SEQ ID NO: 45791 - DNA, 96 bp, Fusarium virguliforme
  misc_feature: 63
ataaattaaattaataaacctaggttattttttaggttactaaattaactcttttttatattaatagccttagagttttaatttaaatctatttat

SEQ ID NO: 45792 - DNA, 96 bp, Fusarium virguliforme
  misc_feature: 63
aagaggttagaggagagggagcaagagttacttaagttattatattatattaataccgaaagacgctagaaatattattaatatttatttaattct

SEQ ID NO: 45793 - DNA, 96 bp, Fusarium virguliforme
  misc_feature: 63
aataactaatcgttttattaatagtattatctaagagctcgccctatgggatcttaggtaagctaagcttagttagagattaatctaaaaactctt

SEQ ID NO: 45794 - DNA, 96 bp, Fusarium virguliforme
  misc_feature: 62
tttatagtaataaccgcgaggttattaattatttaagtattatttaggtattatttattttaaatgcactaagaattagctatttattctatagtt

SEQ ID NO: 45795 - DNA, 96 bp, Fusarium virguliforme
  misc_feature: 62
ttaatttattattatttttagttttaatagaaacccttttttaagaccttattaatagcttatttaattagctatagctatattagccctattata

SEQ ID NO: 45796 - DNA, 96 bp, Fusarium virguliforme
  misc_feature: 62
ttaaggtataaaagcctctttctattatcttaataatcctattaaatatagcttattattctttattattatattttgtttttagctttactcctc

SEQ ID NO: 45797 - DNA, 96 bp, Fusarium virguliforme
  misc_feature: 62
tattattttaaacccccctactatagatcttatatcttagtatcttattgcttattatagcttttatatattaattctttcctcttaaatattata

SEQ ID NO: 45798 - DNA, 96 bp, Fusarium virguliforme
  misc_feature: 62
attatatatattacttctagttctttattatatagtactcctttaattactttatactttatattattattattctcttatcctagcgctctaata

SEQ ID NO: 45799 - DNA, 96 bp, Fusarium virguliforme
  misc_feature: 62
tattaaggtataaaagcctctttctattatcttaataatcctattaaatatagcttattattctttattattatattttgtttttagctttactcc

SEQ ID NO: 45800 - DNA, 96 bp, Fusarium virguliforme
  misc_feature: 62
tatacttaccaatatatatataacggcacgttttataaataataaatagaaacttaggtaatttaataaataactctatcttagctactattattc

SEQ ID NO: 45801 - DNA, 96 bp, Fusarium virguliforme
  misc_feature: 62
ctatctattactcttatttctttttatttaataccttcttttagtaatatcttatacctttttcctatatatatctgccttataattaagcttata

SEQ ID NO: 45802 - DNA, 96 bp, Fusarium virguliforme
  misc_feature: 62
taaataaataattaagggcggctattatctaggttagcttatatttatcctcttaattatttattaaagccttatccttataattagtaagttata

SEQ ID NO: 45803 - DNA, 96 bp, Fusarium virguliforme
  misc_feature: 62
tataaattaaattaataaacctaggttattttttaggttactaaattaactcttttttatattaatagccttagagttttaatttaaatctattta

SEQ ID NO: 45804 - DNA, 96 bp, Fusarium virguliforme
  misc_feature: 62
atataaaaaccctaaagagagatataattctcttaatttaatcttttaattattaacccttaatattataggtccttataataatataatagccta

SEQ ID NO: 45805 - DNA, 96 bp, Fusarium virguliforme
  misc_feature: 62
aggggtcactataatactatatatactaaaactagaggtattaatactcttaataataaattactataaagagaagcttatagatcttatcctcta

SEQ ID NO: 45806 - DNA, 96 bp, Fusarium virguliforme
  misc_feature: 62
cttaataatcctattaaatatagcttattattctttattattatattttgtttttagctttactcctctttcttaactaagcatattaataaatta

SEQ ID NO: 45807 - DNA, 96 bp, Fusarium virguliforme
  misc_feature: 62
atctttaaatcgaccttaaaactagctaatttttaaattaacctaaaaactagctaattattaaattaaccttaaaactagtggatctttaaatta

SEQ ID NO: 45808 - DNA, 96 bp, Fusarium virguliforme
  misc_feature: 62
agtaatttattaatatgcttagttaagaaagaggagtaaagctaaaaacaaaatataataataaagaataataagctatatttaataggattatta

SEQ ID NO: 45809 - DNA, 96 bp, Fusarium virguliforme
  misc_feature: 62
cttataataacttaaaaaaagctaggtttatatttagttatatagatattattaaggttaggtaagttattattaaagttaagtaagttattatta

SEQ ID NO: 45810 - DNA, 96 bp, Fusarium virguliforme
  misc_feature: 62
taactatagttaccttacttaggtaattaatagctaatagctagaataataagctcttattactattaataggtataataataataattaagcccc

SEQ ID NO: 45811 - DNA, 96 bp, Fusarium virguliforme
  misc_feature: 62
atagctttagtatatagttaaatacctttacagcttaaagtatataatatatatacccttatagctatttatattagagatattataggagtatac

SEQ ID NO: 45812 - DNA, 96 bp, Fusarium virguliforme
  misc_feature: 62
ggtataaaagcctctttctattatcttaataatcctattaaatatagcttattattctttattattatattttgtttttagctttactcctctttc

SEQ ID NO: 45813 - DNA, 96 bp, Fusarium virguliforme
  misc_feature: 62
gatattaaggtataaaagcctctttctattatcttaataatcctattaaatatagcttattattctttattattatattttgtttttagctttact

SEQ ID NO: 45814 - DNA, 96 bp, Fusarium virguliforme
  misc_feature: 62
aaaagagctattaatatatattattatagccaggtcttttttattatatataacgctaattctattgcctatagctatattattagtattaataag

SEQ ID NO: 45815 - DNA, 96 bp, Fusarium virguliforme
  misc_feature: 62
aggaaaaaaaataaagtataaagaaaaaggaatataataaaaagagctaattatagaaaatatagagagtaattaacgataaggcggagaagatcg

SEQ ID NO: 45816 - DNA, 96 bp, Fusarium virguliforme
  misc_feature: 62
attattttaaacccccctactatagatcttatatcttagtatcttattgcttattatagcttttatatattaattctttcctcttaaatattatat

SEQ ID NO: 45817 - DNA, 96 bp, Fusarium virguliforme
  misc_feature: 62
atcccttagtaataatactatatagattatatagcggctaaataataataaagctacttagtataattataagcctaataaagtttataccttctt

SEQ ID NO: 45818 - DNA, 96 bp, Fusarium virguliforme
  misc_feature: 62
atataaagaaaataattaacgaaagggtttttttattctatagttatatttagctatatatagactcgctatatttctatataatacccttattct

SEQ ID NO: 45819 - DNA, 96 bp, Fusarium virguliforme
  misc_feature: 62
aagtaatttattaatatgcttagttaagaaagaggagtaaagctaaaaacaaaatataataataaagaataataagctatatttaataggattatt

SEQ ID NO: 45820 - DNA, 96 bp, Fusarium virguliforme
  misc_feature: 61
tagtattagtataaaaaaatccatcttttttattttatattccgcatccatatcctcctacggaggatatggatgctatttcataaagctaagaaa

SEQ ID NO: 45821 - DNA, 96 bp, Fusarium virguliforme
  misc_feature: 61
tttctctttatttaatagcttactctttcctccctccctgccctaaatattactttacttctctcctagaccttagtgcttagtcttacctttcta

SEQ ID NO: 45822 - DNA, 96 bp, Fusarium virguliforme
  misc_feature: 61
tttatactatcgtaatagtctttattatccttattattatttaagggttattttatagataggtaaagtttatttatttcttaccttctaggagta

SEQ ID NO: 45823 - DNA, 96 bp, Fusarium virguliforme
  misc_feature: 61
tttagatattattttagaaaagtaattattattattacctttataagagcctttaagatttaattttaaaagccccttttaatactaaatattatt

SEQ ID NO: 45824 - DNA, 96 bp, Fusarium virguliforme
  misc_feature: 61
tttaccctattaaaccttacttaatttccctcctttaacctaaataatttaccttttcccctttattacctttttaaccctcttttttctttttta

SEQ ID NO: 45825 - DNA, 96 bp, Fusarium virguliforme
  misc_feature: 61
ttcttattatattatatagctcctaatactatatatccggctttagtattatataaggtattataatatctcttcctaccctagtttaagttaaag

SEQ ID NO: 45826 - DNA, 96 bp, Fusarium virguliforme
  misc_feature: 61
ctagtattagtataaaaaaatccatcttttttattttatattccgcatccatatcctcctacggaggatatggatgctatttcataaagctaagaa

SEQ ID NO: 45827 - DNA, 96 bp, Fusarium virguliforme
  misc_feature: 61
ttatttatttatttttaggcttattacctttctctttttctttttaaaccttcccttcttaaatctcttattaaaattaagtagagaagtttaata

SEQ ID NO: 45828 - DNA, 96 bp, Fusarium virguliforme
  misc_feature: 61
aaaagaaaaaaggtatttacttaattacttaagtaagtaatattattaattataaatatattaggccttaaaggtataattaaggtaaaactataa

SEQ ID NO: 45829 - DNA, 96 bp, Fusarium virguliforme
  misc_feature: 61
ttaataataacttacttaactttaataataacttacctaaccttaataatatctatataactaaatataaacctagctttttttaagttattataa

SEQ ID NO: 45830 - DNA, 96 bp, Fusarium virguliforme
  misc_feature: 61
ttaccctttagaaatttataaaagaccttataaagataaagatacctaaagaaggcttagatatagaagataaataaagatataattatattacct

SEQ ID NO: 45831 - DNA, 96 bp, Fusarium virguliforme
  misc_feature: 61
tctactctttttaatttattttattatttaaggtatcctttagtaccttaaaataccctttttaagcttatttcctttatagattattatctatac

SEQ ID NO: 45832 - DNA, 96 bp, Fusarium virguliforme
  misc_feature: 61
tcggaagagcacacgtctgaactccagtcactgaccaatctcgtatgccgtcttctgcttggatcggaagagcacacgtctgaactccagtcactg

SEQ ID NO: 45833 - DNA, 96 bp, Fusarium virguliforme
  misc_feature: 61
tcctatagaaactaatagccccttactaaagctcctatttaagtaaataatataaaaaataaagctatctctaaattattaataatacctccctta

SEQ ID NO: 45834 - DNA, 96 bp, Fusarium virguliforme
  misc_feature: 61
tattagcctatatattaagagtaataaataatacgctctatatattatacctactatagatatctactatagcctttagctaaattattaaccttc

SEQ ID NO: 45835 - DNA, 96 bp, Fusarium virguliforme
  misc_feature: 61
tattagataattaatgcttttttaatatccgcattttccctcttttatatctttttctttatatatattaagtttaatgctgctcggtcgcggaag

SEQ ID NO: 45836 - DNA, 96 bp, Fusarium virguliforme
  misc_feature: 61
ctttctattatcttaataatcctattaaatatagcttattattctttattattatattttgtttttagctttactcctctttcttaactaagcata

SEQ ID NO: 45837 - DNA, 96 bp, Fusarium virguliforme
  misc_feature: 61
tatccatttattttaattaaatatataaccctatttcttatataaagtaaaagactattaagtaaaataataatatcaagggcttaaagttatata

SEQ ID NO: 45838 - DNA, 96 bp, Fusarium virguliforme
  misc_feature: 61
tatagctttagtatatagttaaatacctttacagcttaaagtatataatatatatacccttatagctatttatattagagatattataggagtata

SEQ ID NO: 45839 - DNA, 96 bp, Fusarium virguliforme
  misc_feature: 61
ataaggctagggtggcttctttttataggtatatatttaggtattattattaggtagctaattttttagtaatatcgaaaaatatttaagagtata

SEQ ID NO: 45840 - DNA, 96 bp, Fusarium virguliforme
  misc_feature: 61
taggtttctttctaacttatagagttattttataatatatgcgattatttactagctttattatttttatctattatagtatttatattatattcc

SEQ ID NO: 45841 - DNA, 96 bp, Fusarium virguliforme
  misc_feature: 61
taaatttatttagggatctttatataactatctataatatatagcgcctaaggctagctatatatcttaatataatataaaatacctaaataccta

SEQ ID NO: 45842 - DNA, 96 bp, Fusarium virguliforme
  misc_feature: 61
tacttaccaatatatatataacggcacgttttataaataataaatagaaacttaggtaatttaataaataactctatcttagctactattattcta

SEQ ID NO: 45843 - DNA, 96 bp, Fusarium virguliforme
  misc_feature: 61
tactttattatttaccttacttaaggccttttctatattattacctttttattattacgcctcttattatcttcttaagactttattatagcctat

SEQ ID NO: 45844 - DNA, 96 bp, Fusarium virguliforme
  misc_feature: 61
taaagtaatttattaatatgcttagttaagaaagaggagtaaagctaaaaacaaaatataataataaagaataataagctatatttaataggatta

SEQ ID NO: 45845 - DNA, 96 bp, Fusarium virguliforme
  misc_feature: 61
taaggtataaaagcctctttctattatcttaataatcctattaaatatagcttattattctttattattatattttgtttttagctttactcctct

SEQ ID NO: 45846 - DNA, 96 bp, Fusarium virguliforme
  misc_feature: 61
taaatagtattttataaattaattaataataaccaaaattatatctacttcttaatcccttaatataattaatagtagacctataataaagtctat

SEQ ID NO: 45847 - DNA, 96 bp, Fusarium virguliforme
  misc_feature: 61
taaagttaagaatattaatattaataattattttatcagaagtaatactttagtaagttaatcttattaattattaatagttaatagttagaagat

SEQ ID NO: 45848 - DNA, 96 bp, Fusarium virguliforme
  misc_feature: 61
cgatattaaggtataaaagcctctttctattatcttaataatcctattaaatatagcttattattctttattattatattttgtttttagctttac

SEQ ID NO: 45849 - DNA, 96 bp, Fusarium virguliforme
  misc_feature: 61
attaccctttagaaatttataaaagaccttataaagataaagatacctaaagaaggcttagatatagaagataaataaagatataattatattacc

SEQ ID NO: 45850 - DNA, 96 bp, Fusarium virguliforme
  misc_feature: 61
gaaaaaggtataagatattactaaaagaaggtattaaataaaaagaaataagagtaatagatagtctaagaaaataagaaataaataaactttacc

SEQ ID NO: 45851 - DNA, 96 bp, Fusarium virguliforme
  misc_feature: 61
ggatctttatataactatctataatatatagcgcctaaggctagctatatatcttaatataatataaaatacctaaatacctatagaataatatat

SEQ ID NO: 45852 - DNA, 96 bp, Fusarium virguliforme
  misc_feature: 61
gctttatactatcgtaatagtctttattatccttattattatttaagggttattttatagataggtaaagtttatttatttcttaccttctaggag

SEQ ID NO: 45853 - DNA, 96 bp, Fusarium virguliforme
  misc_feature: 61
aataaataattaagggcggctattatctaggttagcttatatttatcctcttaattatttattaaagccttatccttataattagtaagttatagc

SEQ ID NO: 45854 - DNA, 96 bp, Fusarium virguliforme
  misc_feature: 61
gataaggctagggtggcttctttttataggtatatatttaggtattattattaggtagctaattttttagtaatatcgaaaaatatttaagagtat

SEQ ID NO: 45855 - DNA, 96 bp, Fusarium virguliforme
  misc_feature: 61
gaatactattaaggcgactataaagaataatataatagatattataaatctttatagcgggttatatatatagttttaggttattgtaaagagctt

SEQ ID NO: 45856 - DNA, 96 bp, Fusarium virguliforme
  misc_feature: 61
acttaaggaactctatttatttttaataaaaggtatattttaatagcttaatataaaatttagcgttttatatcctcttaaatacctcttaaatag

SEQ ID NO: 45857 - DNA, 96 bp, Fusarium virguliforme
  misc_feature: 61
acttaccaatatatatataacggcacgttttataaataataaatagaaacttaggtaatttaataaataactctatcttagctactattattctag

SEQ ID NO: 45858 - DNA, 96 bp, Fusarium virguliforme
  misc_feature: 61
attaatagcttctaagaagtataataaagcctatatatataatagtaataaaagaaataggaataaaagcgagaaagagagataatatagcaaagg

SEQ ID NO: 45859 - DNA, 96 bp, Fusarium virguliforme
  misc_feature: 61
attttatccttaattttaggctttagtaataatttctaagataatttaatattatcctaacggttctaaatatgaataataatattaataaatagt

SEQ ID NO: 45860 - DNA, 96 bp, Fusarium virguliforme
  misc_feature: 61
attatttatttatttttaggcttattacctttctctttttctttttaaaccttcccttcttaaatctcttattaaaattaagtagagaagtttaat

SEQ ID NO: 45861 - DNA, 96 bp, Fusarium virguliforme
  misc_feature: 61
atattattttaaacccccctactatagatcttatatcttagtatcttattgcttattatagcttttatatattaattctttcctcttaaatattat

SEQ ID NO: 45862 - DNA, 96 bp, Fusarium virguliforme
  misc_feature: 61
ataattaataaagctagtctataattataaagcttataagctaagataatataatctatatacttaatagccttatacctaaagaataagctatat

SEQ ID NO: 45863 - DNA, 96 bp, Fusarium virguliforme
  misc_feature: 61
atatacttaccaatatatatataacggcacgttttataaataataaatagaaacttaggtaatttaataaataactctatcttagctactattatt

SEQ ID NO: 45864 - DNA, 96 bp, Fusarium virguliforme
  misc_feature: 61
aggtataaaagcctctttctattatcttaataatcctattaaatatagcttattattctttattattatattttgtttttagctttactcctcttt

SEQ ID NO: 45865 - DNA, 96 bp, Fusarium virguliforme
  misc_feature: 61
aactatagttaccttacttaggtaattaatagctaatagctagaataataagctcttattactattaataggtataataataataattaagcccct

SEQ ID NO: 45866 - DNA, 96 bp, Fusarium virguliforme
  misc_feature: 61
aataaatagtattttataaattaattaataataaccaaaattatatctacttcttaatcccttaatataattaatagtagacctataataaagtct

SEQ ID NO: 45867 - DNA, 96 bp, Fusarium virguliforme
  misc_feature: 61
aagcttaatatattattatataggtatttaggtattctatattatattaagatccccggtttatattactatttaccttattaactattacttatt

SEQ ID NO: 45868 - DNA, 96 bp, Fusarium virguliforme
  misc_feature: 60
taggttttcctagggttttataatttttattatcgctttatttatatttatttaagggtaatataattacttataggtttattaaaaggaataaaa

SEQ ID NO: 45869 - DNA, 96 bp, Fusarium virguliforme
  misc_feature: 60
ggctagacctataataatctatagatataagagtatagctatatatatttaacgtatataataagcaagtgggatagataagtaagcgggataaaa

SEQ ID NO: 45870 - DNA, 96 bp, Fusarium virguliforme
  misc_feature: 60
tatcttaataatcctattaaatatagcttattattctttattattatattttgtttttagctttactcctctttcttaactaagcatattaataaa

SEQ ID NO: 45871 - DNA, 96 bp, Fusarium virguliforme
  misc_feature: 60
taattacttaagaaactatttattaatattattattcatatttagaaccgttaggataatattaaattatcttagaaattattactaaagcctaaa

SEQ ID NO: 45872 - DNA, 96 bp, Fusarium virguliforme
  misc_feature: 60
ttatagtaataaccgcgaggttattaattatttaagtattatttaggtattatttattttaaatgcactaagaattagctatttattctatagtta

SEQ ID NO: 45873 - DNA, 96 bp, Fusarium virguliforme
  misc_feature: 60
ttataattacttaagaaactatttattaatattattattcatatttagaaccgttaggataatattaaattatcttagaaattattactaaagcct

SEQ ID NO: 45874 - DNA, 96 bp, Fusarium virguliforme
  misc_feature: 60
attctcgtctatatctatcttattaggtcttcttctatatctccctatctctatatctctataattatctaaaactttaaaaaaaataaaaactaa

SEQ ID NO: 45875 - DNA, 96 bp, Fusarium virguliforme
  misc_feature: 60
agaagaagataaagctagtaatagtaatagcgatagcggggtaaaggaagttaataaccttaataagcctagtgggcctattattaatagaggtaa

SEQ ID NO: 45876 - DNA, 96 bp, Fusarium virguliforme
  misc_feature: 60
agttaagaatattaatattaataattattttatcagaagtaatactttagtaagttaatcttattaattattaatagttaatagttagaagattaa

SEQ ID NO: 45877 - DNA, 96 bp, Fusarium virguliforme
  misc_feature: 60
cccttagtaataatactatatagattatatagcggctaaataataataaagctacttagtataattataagcctaataaagtttataccttcttaa

SEQ ID NO: 45878 - DNA, 96 bp, Fusarium virguliforme
  misc_feature: 60
tctttctattatcttaataatcctattaaatatagcttattattctttattattatattttgtttttagctttactcctctttcttaactaagcat

SEQ ID NO: 45879 - DNA, 96 bp, Fusarium virguliforme
  misc_feature: 60
aaaaggaaaaaaaataaagtataaagaaaaaggaatataataaaaagagctaattatagaaaatatagagagtaattaacgataaggcggagaaga

SEQ ID NO: 45880 - DNA, 96 bp, Fusarium virguliforme
  misc_feature: 60
ataaagttaagaatattaatattaataattattttatcagaagtaatactttagtaagttaatcttattaattattaatagttaatagttagaaga

SEQ ID NO: 45881 - DNA, 96 bp, Fusarium virguliforme
  misc_feature: 60
attagataattaatgcttttttaatatccgcattttccctcttttatatctttttctttatatatattaagtttaatgctgctcggtcgcggaaga

SEQ ID NO: 45882 - DNA, 96 bp, Fusarium virguliforme
  misc_feature: 60
tcctatttaaggggttatagagtaataaatataatattacttaaccttaataataatagactaaatataatagggattaataagatcctcctaaac

SEQ ID NO: 45883 - DNA, 96 bp, Fusarium virguliforme
  misc_feature: 60
tatattaatagctaaagtagctattatataggaaagtactaataattatatactatatatttataatatccctttagagcgctaggagcgctagga

SEQ ID NO: 45884 - DNA, 96 bp, Fusarium virguliforme
  misc_feature: 60
cggaagagcacacgtctgaactccagtcactgaccaatctcgtatgccgtcttctgcttggatcggaagagcacacgtctgaactccagtcactga

SEQ ID NO: 45885 - DNA, 96 bp, Fusarium virguliforme
  misc_feature: 60
aaagtattatttaatttattatatcgataggtattaataatatattatagagagctatagattatataattaagctatatatagagggggtagata

SEQ ID NO: 45886 - DNA, 96 bp, Fusarium virguliforme
  misc_feature: 60
tatatcttaataacctttatttattacttaatatagattttttaagatagattaaattaatagcttaatctttattaagccttttttactttcctt

SEQ ID NO: 45887 - DNA, 96 bp, Fusarium virguliforme
  misc_feature: 60
tatagggttttcttattttattagttctaggagaagttattattatatatcttaggttttctttagttatttctttatttatcttacctaactata

SEQ ID NO: 45888 - DNA, 96 bp, Fusarium virguliforme
  misc_feature: 60
aagaagttattataaggaagctatatagaataaaagataagcctataaggatataaggtaattagaaatatatatagaagggaggttttaattata

SEQ ID NO: 45889 - DNA, 96 bp, Fusarium virguliforme
  misc_feature: 60
agaaggtaagaaataaataaactttacctatctataaaataacccttaaataataataaggataataaagactattacgatagtataaagcggcta

SEQ ID NO: 45890 - DNA, 96 bp, Fusarium virguliforme
  misc_feature: 60
agccgctttatactatcgtaatagtctttattatccttattattatttaagggttattttatagataggtaaagtttatttatttcttaccttcta

SEQ ID NO: 45891 - DNA, 96 bp, Fusarium virguliforme
  misc_feature: 60
gataagaaaaaggagtaaaagaaagagaagtaagaagagagagagaaagaggaaagggagaaagataagagaaagtaatatattctaatataggta

SEQ ID NO: 45892 - DNA, 96 bp, Fusarium virguliforme
  misc_feature: 60
aagttaagaatattaatattaataattattttatcagaagtaatactttagtaagttaatcttattaattattaatagttaatagttagaagatta

SEQ ID NO: 45893 - DNA, 96 bp, Fusarium virguliforme
  misc_feature: 60
taataatttagctaaaggctatagtagatatctatagtaggtataatatatagagcgtattatttattactcttaatatataggctaatagaggag

SEQ ID NO: 45894 - DNA, 96 bp, Fusarium virguliforme
  misc_feature: 60
gactatctattactcttatttctttttatttaataccttcttttagtaatatcttatacctttttcctatatatatctgccttataattaagctta

SEQ ID NO: 45895 - DNA, 96 bp, Fusarium virguliforme
  misc_feature: 60
ataaaagcctctttctattatcttaataatcctattaaatatagcttattattctttattattatattttgtttttagctttactcctctttctta

SEQ ID NO: 45896 - DNA, 96 bp, Fusarium virguliforme
  misc_feature: 60
taaagctcccttttattacttatttatttttaggcttattgcctttcctttttccttcttaaaccttcccttcttaaatctcttatcggaattagg

SEQ ID NO: 45897 - DNA, 96 bp, Fusarium virguliforme
  misc_feature: 60
ggggtcactataatactatatatactaaaactagaggtattaatactcttaataataaattactataaagagaagcttatagatcttatcctctac

SEQ ID NO: 45898 - DNA, 96 bp, Fusarium virguliforme
  misc_feature: 60
ggaataaatagtattttataaattaattaataataaccaaaattatatctacttcttaatcccttaatataattaatagtagacctataataaagt

SEQ ID NO: 45899 - DNA, 96 bp, Fusarium virguliforme
  misc_feature: 60
gccgctttatactatcgtaatagtctttattatccttattattatttaagggttattttatagataggtaaagtttatttatttcttaccttctag

SEQ ID NO: 45900 - DNA, 96 bp, Fusarium virguliforme
  misc_feature: 60
gaggttagagaagaaggagtaagagttacttaagttattatattatattaataccgaaagacgctagaaatattattaatatttatttaattcttc

SEQ ID NO: 45901 - DNA, 96 bp, Fusarium virguliforme
  misc_feature: 60
cttactaaagctcctatttaagtaaataatataaaaaataaagctatctctaaattattaataatacctcccttaatattattatcttaaatacct

SEQ ID NO: 45902 - DNA, 96 bp, Fusarium virguliforme
  misc_feature: 60
ctatttactagaaaaataatctattttagctatttatagctataaccttaatatatataaagggtattatatactaacgcatataatatatatatt

SEQ ID NO: 45903 - DNA, 96 bp, Fusarium virguliforme
  misc_feature: 60
agcgattaatatttaggcttaagatatttaataataccttattattaataatattaccgcttaaagtaaataatagataattagactttaaaatcg

SEQ ID NO: 45904 - DNA, 96 bp, Fusarium virguliforme
  misc_feature: 60
atttattaatacccttacttaaataagaggaataaaactagaaataaagtataataataaggaataataggctacccttaatagaattattaatat

SEQ ID NO: 45905 - DNA, 96 bp, Fusarium virguliforme
  misc_feature: 60
aaaggaaaaaaaataaagtataaagaaaaaggaatataataaaaagagctaattatagaaaatatagagagtaattaacgataaggcggagaagat

SEQ ID NO: 45906 - DNA, 96 bp, Fusarium virguliforme
  misc_feature: 60
atatcttaataacctttatttattacttaatatagattttttaagatagattaaattaatagcttaatctttattaagccttttttactttccttt

SEQ ID NO: 45907 - DNA, 96 bp, Fusarium virguliforme
  misc_feature: 60
agagacgcaataagtaataattaataaggtaaatagtaatataaactaaggctaaaaaactaatataatttaataacgctagaataaaagctatat

SEQ ID NO: 45908 - DNA, 96 bp, Fusarium virguliforme
  misc_feature: 60
aaaggtataagatattactaaaagaaggtattaaataaaaagaaataagagtaatagatagtctaagaaaataagaaataaataaactttacctat

SEQ ID NO: 45909 - DNA, 96 bp, Fusarium virguliforme
  misc_feature: 60
aatacctaaagagtatatatataggtaagaccttaataatagataatagctattattataggtaaaggctatattaagtaattaaattacttccct

SEQ ID NO: 45910 - DNA, 96 bp, Fusarium virguliforme
  misc_feature: 60
agcgaggataagctagcccctattatatagtatattataggtatataaggctcttaccctcctattatatattttatttcttcttcttcctctttt

SEQ ID NO: 45911 - DNA, 96 bp, Fusarium virguliforme
  misc_feature: 60
aaataactaatcgttttattaatagtattatctaagagctcgccctatgggatcttaggtaagctaagcttagttagagattaatctaaaaactct

SEQ ID NO: 45912 - DNA, 96 bp, Fusarium virguliforme
  misc_feature: 60
agactatctattactcttatttctttttatttaataccttcttttagtaatatcttatacctttttcctatatatatctgccttataattaagctt

SEQ ID NO: 45913 - DNA, 96 bp, Fusarium virguliforme
  misc_feature: 60
acttataataacttaaaaaaagctaggtttatatttagttatatagatattattaaggttaggtaagttattattaaagttaagtaagttattatt

SEQ ID NO: 45914 - DNA, 96 bp, Fusarium virguliforme
  misc_feature: 60
aaagctcccttttattacttatttatttttaggcttattgcctttcctttttccttcttaaaccttcccttcttaaatctcttatcggaattaggt

SEQ ID NO: 45915 - DNA, 96 bp, Fusarium virguliforme
  misc_feature: 60
aagctcccgctaagtgcttaattatagcttaattaagttagtagctatttaattaatttattaataaggcttaagtaataattaaagacttatatt

SEQ ID NO: 45916 - DNA, 96 bp, Fusarium virguliforme
  misc_feature: 59
tttctattatcttaataatcctattaaatatagcttattattctttattattatattttgtttttagctttactcctctttcttaactaagcatat

SEQ ID NO: 45917 - DNA, 96 bp, Fusarium virguliforme
  misc_feature: 59
atcctatttaaggggttatagagtaataaatataatattacttaaccttaataataatagactaaatataatagggattaataagatcctcctaaa

SEQ ID NO: 45918 - DNA, 96 bp, Fusarium virguliforme
  misc_feature: 59
tttaagtatttactaattattaataattacaaaagctattattattatataagctctaaagaatatttaataggtaatcaatagagtaataaaggc

SEQ ID NO: 45919 - DNA, 96 bp, Fusarium virguliforme
  misc_feature: 59
atattagataattaatgcttttttaatatccgcattttccctcttttatatctttttctttatatatattaagtttaatgctgctcggtcgcggaa

SEQ ID NO: 45920 - DNA, 96 bp, Fusarium virguliforme
  misc_feature: 59
ttattttaattaaatatataaccctatttcttatataaagtaaaagactattaagtaaaataataatatcaagggcttaaagttatatatctctaa

SEQ ID NO: 45921 - DNA, 96 bp, Fusarium virguliforme
  misc_feature: 59
taaggaataaatagtattttataaattaattaataataaccaaaattatatctacttcttaatcccttaatataattaatagtagacctataataa

SEQ ID NO: 45922 - DNA, 96 bp, Fusarium virguliforme
  misc_feature: 59
agaagttattataaggaagctatatagaataaaagataagcctataaggatataaggtaattagaaatatatatagaagggaggttttaattataa

SEQ ID NO: 45923 - DNA, 96 bp, Fusarium virguliforme
  misc_feature: 59
taaggtagggtaataattattaattaatctaccgctagattaagtaattagctatttatttaatattaacctattatatttaattaccgcttataa

SEQ ID NO: 45924 - DNA, 96 bp, Fusarium virguliforme
  misc_feature: 59
tatcctatttaaggggttatagagtaataaatataatattacttaaccttaataataatagactaaatataatagggattaataagatcctcctaa

SEQ ID NO: 45925 - DNA, 96 bp, Fusarium virguliforme
  misc_feature: 59
tctttaaatcgaccttaaaactagctaatttttaaattaacctaaaaactagctaattattaaattaaccttaaaactagtggatctttaaattaa

SEQ ID NO: 45926 - DNA, 96 bp, Fusarium virguliforme
  misc_feature: 59
ctattatcttaataatcctattaaatatagcttattattctttattattatattttgtttttagctttactcctctttcttaactaagcatattaa

SEQ ID NO: 45927 - DNA, 96 bp, Fusarium virguliforme
  misc_feature: 59
ttaagtatttactaattattaataattacaaaagctattattattatataagctctaaagaatatttaataggtaatcaatagagtaataaaggct

SEQ ID NO: 45928 - DNA, 96 bp, Fusarium virguliforme
  misc_feature: 59
tctttctttctttttttttctttcttttctttcttttctttctttcttttcttttttttctttctttcttttcttttttccttacttttacccttt

SEQ ID NO: 45929 - DNA, 96 bp, Fusarium virguliforme
  misc_feature: 59
tctattatcttaataatcctattaaatatagcttattattctttattattatattttgtttttagctttactcctctttcttaactaagcatatta

SEQ ID NO: 45930 - DNA, 96 bp, Fusarium virguliforme
  misc_feature: 59
tacctaatcctcatggctaactgctaccttcctgacttcccgggttaaatgaaaaattcgccttttggcttagcgttagggttacggttacgggga

SEQ ID NO: 45931 - DNA, 96 bp, Fusarium virguliforme
  misc_feature: 59
agaaaaaaggtatttacttaattacttaagtaagtaatattattaattataaatatattaggccttaaaggtataattaaggtaaaactataaata

SEQ ID NO: 45932 - DNA, 96 bp, Fusarium virguliforme
  misc_feature: 59
tattatatatattacttctagttctttattatatagtactcctttaattactttatactttatattattattattctcttatcctagcgctctaat

SEQ ID NO: 45933 - DNA, 96 bp, Fusarium virguliforme
  misc_feature: 59
tattactcttatttctttttatttaataccttcttttagtaatatcttatacctttttcctatatatatctgccttataattaagcttatacccct

SEQ ID NO: 45934 - DNA, 96 bp, Fusarium virguliforme
  misc_feature: 59
taatatttaagaggaaagaattaatatataaaagctataataagcaataagatactaagatataagatctatagtaggggggtttaaaataatata

SEQ ID NO: 45935 - DNA, 96 bp, Fusarium virguliforme
  misc_feature: 59
ggtctatagtattatacctttatttttatatataagttatccccagtctatattactatttaccttactaactattacttattatatctttatata

SEQ ID NO: 45936 - DNA, 96 bp, Fusarium virguliforme
  misc_feature: 59
tatagtaataaccgcgaggttattaattatttaagtattatttaggtattatttattttaaatgcactaagaattagctatttattctatagttat

SEQ ID NO: 45937 - DNA, 96 bp, Fusarium virguliforme
  misc_feature: 59
tagagacgcaataagtaataattaataaggtaaatagtaatataaactaaggctaaaaaactaatataatttaataacgctagaataaaagctata

SEQ ID NO: 45938 - DNA, 96 bp, Fusarium virguliforme
  misc_feature: 59
tataactatagttaccttacttaggtaattaatagctaatagctagaataataagctcttattactattaataggtataataataataattaagcc

SEQ ID NO: 45939 - DNA, 96 bp, Fusarium virguliforme
  misc_feature: 59
tataaagaaaataattaacgaaagggtttttttattctatagttatatttagctatatatagactcgctatatttctatataatacccttattcta

SEQ ID NO: 45940 - DNA, 96 bp, Fusarium virguliforme
  misc_feature: 59
tactaattataaaataattaaatattagagctagaaagctttaaagaaagagaaagaaagtaaagagaagcgcataattaggatctaaaataccta

SEQ ID NO: 45941 - DNA, 96 bp, Fusarium virguliforme
  misc_feature: 59
taccctttagaaatttataaaagaccttataaagataaagatacctaaagaaggcttagatatagaagataaataaagatataattatattaccta

SEQ ID NO: 45942 - DNA, 96 bp, Fusarium virguliforme
  misc_feature: 59
aaaaggtataagatattactaaaagaaggtattaaataaaaagaaataagagtaatagatagtctaagaaaataagaaataaataaactttaccta

SEQ ID NO: 45943 - DNA, 96 bp, Fusarium virguliforme
  misc_feature: 59
ataataataaattcttaattaatagagcctttagccttatagtaatagactatatagataatatagccttaatagatatagagacctcttaatcta

SEQ ID NO: 45944 - DNA, 96 bp, Fusarium virguliforme
  misc_feature: 59
tagatatagctttagtatatagttaaatacctttacagcttaaagtatataatatatatacccttatagctatttatattagagatattataggag

SEQ ID NO: 45945 - DNA, 96 bp, Fusarium virguliforme
  misc_feature: 59
cgataaggctagggtggcttctttttataggtatatatttaggtattattattaggtagctaattttttagtaatatcgaaaaatatttaagagta

SEQ ID NO: 45946 - DNA, 96 bp, Fusarium virguliforme
  misc_feature: 59
agctcccgctaagtgcttaattatagcttaattaagttagtagctatttaattaatttattaataaggcttaagtaataattaaagacttatatta

SEQ ID NO: 45947 - DNA, 96 bp, Fusarium virguliforme
  misc_feature: 59
agagtgattataatttcctatagggcttatagtattatacctttattttcgcgtataagttatattatagtttatctaggatttattatttattta

SEQ ID NO: 45948 - DNA, 96 bp, Fusarium virguliforme
  misc_feature: 59
taaaacctcccttctatatatatttctaattaccttatatccttataggcttatcttttattctatatagcttccttataataacttcttaggtag

SEQ ID NO: 45949 - DNA, 96 bp, Fusarium virguliforme
  misc_feature: 59
cctcttttttaagattaatataattagcttatatattaagctattaaaaaggaaaaattaaacctattaaagagggcgtaataaattaaggttaac

SEQ ID NO: 45950 - DNA, 96 bp, Fusarium virguliforme
  misc_feature: 59
ggaagagcacacgtctgaactccagtcactgaccaatctcgtatgccgtcttctgcttggatcggaagagcacacgtctgaactccagtcactgac

SEQ ID NO: 45951 - DNA, 96 bp, Fusarium virguliforme
  misc_feature: 59
ataaggaaatctaaagtaatactctacttatttaatatacttactgagctatatataatagttattatagcgatagcgctatatatagtttactac

SEQ ID NO: 45952 - DNA, 96 bp, Fusarium virguliforme
  misc_feature: 59
gataatatatcgctataaggagtatataatatataatatagctagctagcagtattaagataaattaataatattatagggtaataaggctcctac

SEQ ID NO: 45953 - DNA, 96 bp, Fusarium virguliforme
  misc_feature: 59
gctcccgctaagtgcttaattatagcttaattaagttagtagctatttaattaatttattaataaggcttaagtaataattaaagacttatattac

SEQ ID NO: 45954 - DNA, 96 bp, Fusarium virguliforme
  misc_feature: 59
gaagagcacacgtctgaactccagtcactgaccaatctcgtatgccgtcttctgcttggatcggaagagcacacgtctgaactccagtcactgacc

SEQ ID NO: 45955 - DNA, 96 bp, Fusarium virguliforme
  misc_feature: 59
cttatatcttaataacctttatttattacttaatatagattttttaagatagattaaattaatagcttaatctttattaagccttttttactttcc

SEQ ID NO: 45956 - DNA, 96 bp, Fusarium virguliforme
  misc_feature: 59
aaagagctattaatatatattattatagccaggtcttttttattatatataacgctaattctattgcctatagctatattattagtattaataagc

SEQ ID NO: 45957 - DNA, 96 bp, Fusarium virguliforme
  misc_feature: 59
gcgattaatatttaggcttaagatatttaataataccttattattaataatattaccgcttaaagtaaataatagataattagactttaaaatcgc

SEQ ID NO: 45958 - DNA, 96 bp, Fusarium virguliforme
  misc_feature: 59
cttaaatcaatattaatttaattaatagctaagaagtatattattttatattatgcctttagttattattaagagggcggtaataatactcgtgat

SEQ ID NO: 45959 - DNA, 96 bp, Fusarium virguliforme
  misc_feature: 59
ctaattaattatttaccttccttcctttattattattacctcctttttctatagcttaatcctttttaccttttaccgccggcttaatatcttctt

SEQ ID NO: 45960 - DNA, 96 bp, Fusarium virguliforme
  misc_feature: 59
aaaggggcttttaaaattaaatcttaaaggctcttataaaggtaataataataattacttttctaaaataatatctaaagtttaatattaccttag

SEQ ID NO: 45961 - DNA, 96 bp, Fusarium virguliforme
  misc_feature: 59
aatagtattttataaattaattaataataaccaaaattatatctacttcttaatcccttaatataattaatagtagacctataataaagtctatcg

SEQ ID NO: 45962 - DNA, 96 bp, Fusarium virguliforme
  misc_feature: 59
aaaaaataataatatttagtattaaaaggggcttttaaaattaaatcttaaaggctcttataaaggtaataataataattacttttctaaaataat

SEQ ID NO: 45963 - DNA, 96 bp, Fusarium virguliforme
  misc_feature: 59
atctttctttctttttttttctttcttttctttcttttctttctttcttttcttttttttctttctttcttttcttttttccttacttttaccctt

SEQ ID NO: 45964 - DNA, 96 bp, Fusarium virguliforme
  misc_feature: 59
atatagctttagtatatagttaaatacctttacagcttaaagtatataatatatatacccttatagctatttatattagagatattataggagtat

SEQ ID NO: 45965 - DNA, 96 bp, Fusarium virguliforme
  misc_feature: 59
aaaaaagagttgctagatatatataagtctagaaaggtaaggtatataggaatatatattatagaagctattaattacttccgagaatataagtat

SEQ ID NO: 45966 - DNA, 96 bp, Fusarium virguliforme
  misc_feature: 59
agaataaataaaatataatatcgcttatagactatactataaagaacgtatatataaggttatattacccctaataagaggatatattaatattat

SEQ ID NO: 45967 - DNA, 96 bp, Fusarium virguliforme
  misc_feature: 59
aaacctcccttctatatatatttctaattaccttatatccttataggcttatcttttattctatatagcttccttataataacttcttaggtagct

SEQ ID NO: 45968 - DNA, 96 bp, Fusarium virguliforme
  misc_feature: 58
tttttctcttttttttcttttttttcttttttttctttctttaattttatttacctctattatctacttttacctttatattactctttctttttt

SEQ ID NO: 45969 - DNA, 96 bp, Fusarium virguliforme
  misc_feature: 58
tttttctcttttttttcttttttttctttctttaattttatctacctctattatctacttttgcctttatattactctttcttctttattcctctc

SEQ ID NO: 45970 - DNA, 96 bp, Fusarium virguliforme
  misc_feature: 58
tttctcttttttttcttttttttcttttttttctttctttaattttatttacctctattatctacttttacctttatattactctttcttttttat

SEQ ID NO: 45971 - DNA, 96 bp, Fusarium virguliforme
  misc_feature: 58
aaaaaaggtatttacttaattacttaagtaagtaatattattaattataaatatattaggccttaaaggtataattaaggtaaaactataaataaa

SEQ ID NO: 45972 - DNA, 96 bp, Fusarium virguliforme
  misc_feature: 58
tcaaataatagtgagcgacatatagtaattattatacaagtaattatagagtgtataatagtagcttgaatataaatatataaatagtatcataaa

SEQ ID NO: 45973 - DNA, 96 bp, Fusarium virguliforme
  misc_feature: 58
gtcccctataattaaagccctaaggcctataatatattaattaaggctaagaatattatatcctaagaatattataagggtaatagctaatctaaa

SEQ ID NO: 45974 - DNA, 96 bp, Fusarium virguliforme
  misc_feature: 58
gaaaaaataataatatttagtattaaaaggggcttttaaaattaaatcttaaaggctcttataaaggtaataataataattacttttctaaaataa

SEQ ID NO: 45975 - DNA, 96 bp, Fusarium virguliforme
  misc_feature: 58
ttattttaaacccccctactatagatcttatatcttagtatcttattgcttattatagcttttatatattaattctttcctcttaaatattatatt

SEQ ID NO: 45976 - DNA, 96 bp, Fusarium virguliforme
  misc_feature: 58
taacctaaaattaagcctctaacgcactatatatatatataaggttaattaaataaccttatcccgctaatagtataatatctaatcttaatataa

SEQ ID NO: 45977 - DNA, 96 bp, Fusarium virguliforme
  misc_feature: 58
cctaaatagcgattaagagtatctagctaatatatatataacttataagagacccttatatctatttaattatactatatattcttaaggctataa

SEQ ID NO: 45978 - DNA, 96 bp, Fusarium virguliforme
  misc_feature: 58
ttataaattaaattaataaacctaggttattttttaggttactaaattaactcttttttatattaatagccttagagttttaatttaaatctattt

SEQ ID NO: 45979 - DNA, 96 bp, Fusarium virguliforme
  misc_feature: 58
ataattacttaagaaactatttattaatattattattcatatttagaaccgttaggataatattaaattatcttagaaattattactaaagcctaa

SEQ ID NO: 45980 - DNA, 96 bp, Fusarium virguliforme
  misc_feature: 58
ttagattaagaggtctctatatctattaaggctatattatctatatagtctattactataaggctaaaggctctattaattaagaatttattatta

SEQ ID NO: 45981 - DNA, 96 bp, Fusarium virguliforme
  misc_feature: 58
tataaaaaaacttccttaatattagataattaatgcttttttaatatccgcattttccctcttttatatctttttctttatatatattaagtttaa

SEQ ID NO: 45982 - DNA, 96 bp, Fusarium virguliforme
  misc_feature: 58
aagctcttacagttctatattaatcttttagttaaagtaaaagttaaagaattataagagtattaagccttaataataataattaaggtaaaacca

SEQ ID NO: 45983 - DNA, 96 bp, Fusarium virguliforme
  misc_feature: 58
tcttctagtattaatattaactctttcttagatatatttattagtagttagatttagagtagcttaggtttaataattaatattttaattaattat

SEQ ID NO: 45984 - DNA, 96 bp, Fusarium virguliforme
  misc_feature: 58
cttaccaatatatatataacggcacgttttataaataataaatagaaacttaggtaatttaataaataactctatcttagctactattattctaga

SEQ ID NO: 45985 - DNA, 96 bp, Fusarium virguliforme
  misc_feature: 58
tatttaggttttcctagggttttataatttttattatcgctttatttatatttatttaagggtaatataattacttataggtttattaaaaggaat

SEQ ID NO: 45986 - DNA, 96 bp, Fusarium virguliforme
  misc_feature: 58
aggagccctttaataggcctttaaaattattaacgaaaaagtataagctaaataaaagattaaggcacttaaataaaactaatctaccttcgaata

SEQ ID NO: 45987 - DNA, 96 bp, Fusarium virguliforme
  misc_feature: 58
tatcttattccttaattaaggttataaagaggttaatataaaatatagaacctaattataagtaatatagcctaataataagcggtataaacccta

SEQ ID NO: 45988 - DNA, 96 bp, Fusarium virguliforme
  misc_feature: 58
tatcttaataacctttatttattacttaatatagattttttaagatagattaaattaatagcttaatctttattaagccttttttactttcctttt

SEQ ID NO: 45989 - DNA, 96 bp, Fusarium virguliforme
  misc_feature: 58
cttttaatatttatatacttagtctttaatttattatagtatcgtaatatattccgcgatatattataccttaattagcttagtagttaggatata

SEQ ID NO: 45990 - DNA, 96 bp, Fusarium virguliforme
  misc_feature: 58
tatagaattaatattcttctctagctcttaaattaattttaatagctttttaataatctttataggctttaatatatctttaacttttaagaaagt

SEQ ID NO: 45991 - DNA, 96 bp, Fusarium virguliforme
  misc_feature: 58
aatactcctagaaggtaagaaataaataaactttacctatctataaaataacccttaaataataataaggataataaagactattacgatagtata

SEQ ID NO: 45992 - DNA, 96 bp, Fusarium virguliforme
  misc_feature: 58
tagtcttaaataaatgcagcgtcagctatattatatccttataatataagcttaaattaagcctaagagtttttaaaaaataaataataatcttat

SEQ ID NO: 45993 - DNA, 96 bp, Fusarium virguliforme
  misc_feature: 58
tagggttttcttattttattagttctaggagaagttattattatatatcttaggttttctttagttatttctttatttatcttacctaactatagg

SEQ ID NO: 45994 - DNA, 96 bp, Fusarium virguliforme
  misc_feature: 58
agtattttaattatttttcccttaatatcttcttttcttttttcttttatctatatattaactcctttaatatctttaaaatagaatttaatccta

SEQ ID NO: 45995 - DNA, 96 bp, Fusarium virguliforme
  misc_feature: 58
gatacctataatattataaggttatctagatcttatatatagactataggggtaaaatatatctatataagaaaaagaagtaagattactttccta

SEQ ID NO: 45996 - DNA, 96 bp, Fusarium virguliforme
  misc_feature: 58
aacctcccttctatatatatttctaattaccttatatccttataggcttatcttttattctatatagcttccttataataacttcttaggtagcta

SEQ ID NO: 45997 - DNA, 96 bp, Fusarium virguliforme
  misc_feature: 58
agttctaagcgatgtaattggctaattagcgatatctagagtaacgtacatgacaagcgagtggatcagacaagtgaatggattagttttactgta

SEQ ID NO: 45998 - DNA, 96 bp, Fusarium virguliforme
  misc_feature: 58
ctaagaagttattataaggaagctatatagaataaaagataagcctataaggatataaggtaattagaaatatatatagaagggaggttttaatta

SEQ ID NO: 45999 - DNA, 96 bp, Fusarium virguliforme
  misc_feature: 58
taatatattattatataggtatttaggtattctatattatattaagatccccggtttatattactatttaccttattaactattacttattgcgtc

SEQ ID NO: 46000 - DNA, 96 bp, Fusarium virguliforme
  misc_feature: 58
taagaagttattataaggaagctatatagaataaaagataagcctataaggatataaggtaattagaaatatatatagaagggaggttttaattat

SEQ ID NO: 46001 - DNA, 96 bp, Fusarium virguliforme
  misc_feature: 58
aatttcttattatattatatagctcctaatactatatatccggctttagtattatataaggtattataatatctcttcctaccctagtttaagtta

SEQ ID NO: 46002 - DNA, 96 bp, Fusarium virguliforme
  misc_feature: 58
taaaaaaacttccttaatattagataattaatgcttttttaatatccgcattttccctcttttatatctttttctttatatatattaagtttaatg

SEQ ID NO: 46003 - DNA, 96 bp, Fusarium virguliforme
  misc_feature: 58
gtacagtaaaactaatccattcacttgtctgatccactcgcttgtcatgtacgttactctagatatcgctaattagccaattacatcgcttagaac

SEQ ID NO: 46004 - DNA, 96 bp, Fusarium virguliforme
  misc_feature: 58
gtataaaagcctctttctattatcttaataatcctattaaatatagcttattattctttattattatattttgtttttagctttactcctctttct

SEQ ID NO: 46005 - DNA, 96 bp, Fusarium virguliforme
  misc_feature: 58
ggaatactattaaggcgactataaagaataatataatagatattataaatctttatagcgggttatatatatagttttaggttattgtaaagagct

SEQ ID NO: 46006 - DNA, 96 bp, Fusarium virguliforme
  misc_feature: 58
aaaacctcccttctatatatatttctaattaccttatatccttataggcttatcttttattctatatagcttccttataataacttcttaggtagc

SEQ ID NO: 46007 - DNA, 96 bp, Fusarium virguliforme
  misc_feature: 58
gatctttatataactatctataatatatagcgcctaaggctagctatatatcttaatataatataaaatacctaaatacctatagaataatatatt

SEQ ID NO: 46008 - DNA, 96 bp, Fusarium virguliforme
  misc_feature: 58
atattaaggtataaaagcctctttctattatcttaataatcctattaaatatagcttattattctttattattatattttgtttttagctttactc

SEQ ID NO: 46009 - DNA, 96 bp, Fusarium virguliforme
  misc_feature: 58
gaataaataaaatataatatcgcttatagactatactataaagaacgtatatataaggttatattacccctaataagaggatatattaatattatt

SEQ ID NO: 46010 - DNA, 96 bp, Fusarium virguliforme
  misc_feature: 58
gaagttattataaggaagctatatagaataaaagataagcctataaggatataaggtaattagaaatatatatagaagggaggttttaattataag

SEQ ID NO: 46011 - DNA, 96 bp, Fusarium virguliforme
  misc_feature: 58
cttattccttaattaaggttataaagaggttaatataaaatatagaacctaattataagtaatatagcctaataataagcggtataaaccctattt

SEQ ID NO: 46012 - DNA, 96 bp, Fusarium virguliforme
  misc_feature: 58
cttattattaaaataataactaattattccttaataatataaggggatataataaatttaattagctaaatttatccttaatgaattatcctatag

SEQ ID NO: 46013 - DNA, 96 bp, Fusarium virguliforme
  misc_feature: 58
ataaatataaaaaaacttccttaatattagataattaatgcttttttaatatccgcattttccctcttttatatctttttctttatatatattaag

SEQ ID NO: 46014 - DNA, 96 bp, Fusarium virguliforme
  misc_feature: 58
cttaatagctagataattaactatataggaacctagctatatatagaataggtattatagctagttatattagagttttattaagtatattctctt

SEQ ID NO: 46015 - DNA, 96 bp, Fusarium virguliforme
  misc_feature: 58
aaccttaagctcttaatttaataaattataactaaggcctaaagaattaatatccttaattaataaaataccttactaaggaagttttatagcgag

SEQ ID NO: 46016 - DNA, 96 bp, Fusarium virguliforme
  misc_feature: 58
ccttaataataacttacttaactttaataataacttacctaaccttaataatatctatataactaaatataaacctagctttttttaagttattat

SEQ ID NO: 46017 - DNA, 96 bp, Fusarium virguliforme
  misc_feature: 58
aaaaaaaataaagtataaagaaaaaggaatataataaaaagagctaattatagaaaatatagagagtaattaacgataaggcggagaagatcgcgg

SEQ ID NO: 46018 - DNA, 96 bp, Fusarium virguliforme
  misc_feature: 58
accttaaatcaatattaatttaattaatagctaagaagtatattattttatattatgcctttagttattattaagagggcggtaataatactcgtg

SEQ ID NO: 46019 - DNA, 96 bp, Fusarium virguliforme
  misc_feature: 58
atttttatttttattatttataggttttattatattctcgtaatactttagtttagtattataggtataggttacagttatattatatagggttat

SEQ ID NO: 46020 - DNA, 96 bp, Fusarium virguliforme
  misc_feature: 58
atttaaaggagccctttaataggcctttaaaattattaacgaaaaagtataagctaaataaaagattaaggcacttaaataaaactaatctacctt

SEQ ID NO: 46021 - DNA, 96 bp, Fusarium virguliforme
  misc_feature: 58
aacctaaaattaagcctctaacgcactatatatatatataaggttaattaaataaccttatcccgctaatagtataatatctaatcttaatataat

SEQ ID NO: 46022 - DNA, 96 bp, Fusarium virguliforme
  misc_feature: 58
ataaaaaaacttccttaatattagataattaatgcttttttaatatccgcattttccctcttttatatctttttctttatatatattaagtttaat

SEQ ID NO: 46023 - DNA, 96 bp, Fusarium virguliforme
  misc_feature: 58
aggaataaagaagaaagagtaatataaaggcaaaagtagataatagaggtagataaaattaaagaaagaaaaaaaagaaaaaaaagagaaaaagat

SEQ ID NO: 46024 - DNA, 96 bp, Fusarium virguliforme
  misc_feature: 58
atagatatataccctataatcgcgagctaataaaataatattaatactatattttaattaggtagcgaaaaagataaagataataataagctctct

SEQ ID NO: 46025 - DNA, 96 bp, Fusarium virguliforme
  misc_feature: 58
ataatatatcgcgaattactttatataattaacttacttatagcttatataaccttaatttaaggtcctatatatttatcttattgttatagactt

SEQ ID NO: 46026 - DNA, 96 bp, Fusarium virguliforme
  misc_feature: 58
actaatagccccttactaaagctcctatttaagtaaataatataaaaaataaagctatctctaaattattaataatacctcccttaatattattat

SEQ ID NO: 46027 - DNA, 96 bp, Fusarium virguliforme
  misc_feature: 58
ataactaatcgttttattaatagtattatctaagagctcgccctatgggatcttaggtaagctaagcttagttagagattaatctaaaaactcttt

SEQ ID NO: 46028 - DNA, 96 bp, Fusarium virguliforme
  misc_feature: 58
ataaaaaagaataataattaaaaaaataggtaaaggtaaagagaaggtaaagtaaattaaagttttaataaattaaaaggttaagggtaaagtagt

SEQ ID NO: 46029 - DNA, 96 bp, Fusarium virguliforme
  misc_feature: 58
aggtttctttctaacttatagagttattttataatatatgcgattatttactagctttattatttttatctattatagtatttatattatattcct

SEQ ID NO: 46030 - DNA, 96 bp, Fusarium virguliforme
  misc_feature: 58
aataataataaattcttaattaatagagcctttagccttatagtaatagactatatagataatatagccttaatagatatagagacctcttaatct

SEQ ID NO: 46031 - DNA, 96 bp, Fusarium virguliforme
  misc_feature: 58
agataagaaaaaggagtaaaagaaagagaagtaagaagagagagagaaagaggaaagggagaaagataagagaaagtaatatattctaatataggt

SEQ ID NO: 46032 - DNA, 96 bp, Fusarium virguliforme
  misc_feature: 58
agaaggtataaactttattaggcttataattatactaagtagctttattattatttagccgctatataatctatatagtattattactaagggatt

SEQ ID NO: 46033 - DNA, 96 bp, Fusarium virguliforme
  misc_feature: 58
actttccttaatatataacctatatctataattatcctgccgtctaatataatattaaaatctaaagctatatataattataaagtataggccctt

SEQ ID NO: 46034 - DNA, 96 bp, Fusarium virguliforme
  misc_feature: 58
aatataaaaaaacttccttaatattagataattaatgcttttttaatatccgcattttccctcttttatatctttttctttatatatattaagttt

SEQ ID NO: 46035 - DNA, 96 bp, Fusarium virguliforme
  misc_feature: 58
aaggtataagatattactaaaagaaggtattaaataaaaagaaataagagtaatagatagtctaagaaaataagaaataaataaactttacctatt

SEQ ID NO: 46036 - DNA, 96 bp, Fusarium virguliforme
  misc_feature: 57
tttttattttttattattcctaggctagttagatatatatattagtgctattattctagtagtatattccttattcgtcggtctaaatattatagt

SEQ ID NO: 46037 - DNA, 96 bp, Fusarium virguliforme
  misc_feature: 57
ttttaatatttatatacttagtctttaatttattatagtatcgtaatatattccgcgatatattataccttaattagcttagtagttaggatataa

SEQ ID NO: 46038 - DNA, 96 bp, Fusarium virguliforme
  misc_feature: 57
aaaataaccctatataatataactgtaacctatacctataatactaaactaaagtattacgagaatataataaaacctataaataataaaaataaa

SEQ ID NO: 46039 - DNA, 96 bp, Fusarium virguliforme
  misc_feature: 57
aggctagacctataataatctatagatataagagtatagctatatatatttaacgtatataataagcaagtgggatagataagtaagcgggataaa

SEQ ID NO: 46040 - DNA, 96 bp, Fusarium virguliforme
  misc_feature: 57
ttcttttagctatattaattaataatcgtaatctatctgccttatatcttattaatttagggttattatattaccgataaaccctttcttaaaatt

SEQ ID NO: 46041 - DNA, 96 bp, Fusarium virguliforme
  misc_feature: 57
ttctattatcttaataatcctattaaatatagcttattattctttattattatattttgtttttagctttactcctctttcttaactaagcatatt

SEQ ID NO: 46042 - DNA, 96 bp, Fusarium virguliforme
  misc_feature: 57
taaatagggtttataccgcttattattaggctatattacttataattaggttctatattttatattaacctctttataaccttaattaaggaataa

SEQ ID NO: 46043 - DNA, 96 bp, Fusarium virguliforme
  misc_feature: 57
ttatatatattacttctagttctttattatatagtactcctttaattactttatactttatattattattattctcttatcctagcgctctaataa

SEQ ID NO: 46044 - DNA, 96 bp, Fusarium virguliforme
  misc_feature: 57
ttatagaattaatattcttctctagctcttaaattaattttaatagctttttaataatctttataggctttaatatatctttaacttttaagaaag

SEQ ID NO: 46045 - DNA, 96 bp, Fusarium virguliforme
  misc_feature: 57
ttatactcttaaatatttttcgatattactaaaaaattagctacctaataataatacctaaatatatacctataaaaagaagccaccctagcctta

SEQ ID NO: 46046 - DNA, 96 bp, Fusarium virguliforme
  misc_feature: 57
taatttattattatttttagttttaatagaaacccttttttaagaccttattaatagcttatttaattagctatagctatattagccctattataa

SEQ ID NO: 46047 - DNA, 96 bp, Fusarium virguliforme
  misc_feature: 57
gtattttaattatttttcccttaatatcttcttttcttttttcttttatctatatattaactcctttaatatctttaaaatagaatttaatcctaa

SEQ ID NO: 46048 - DNA, 96 bp, Fusarium virguliforme
  misc_feature: 57
ttaattaaattatttttctttttattatattatttcttttagtttacttaagcttttataagaagctatttagttattactttactttattttatt

SEQ ID NO: 46049 - DNA, 96 bp, Fusarium virguliforme
  misc_feature: 57
ttaataaagatattaaatataataaataaggcattatagctatattaaagcttatttaagatattattatatagcttatctattaactcttatata

SEQ ID NO: 46050 - DNA, 96 bp, Fusarium virguliforme
  misc_feature: 57
ataacttactaattataaggataaggctttaataaataattaagaggataaatataagctaacctagataatagccgcccttaattatttatttaa

SEQ ID NO: 46051 - DNA, 96 bp, Fusarium virguliforme
  misc_feature: 57
aggttaagggtaaagtagtaagggtatatatataggtaaaagtaaaataagtaattataaaagggtaaaataaaagagtaagtaataaaaaaaaga

SEQ ID NO: 46052 - DNA, 96 bp, Fusarium virguliforme
  misc_feature: 57
agagaatatacttaataaaactctaatataactagctataatacctattctatatatagctaggttcctatatagttaattatctagctattaaga

SEQ ID NO: 46053 - DNA, 96 bp, Fusarium virguliforme
  misc_feature: 57
tctatttactagaaaaataatctattttagctatttatagctataaccttaatatatataaagggtattatatactaacgcatataatatatatat

SEQ ID NO: 46054 - DNA, 96 bp, Fusarium virguliforme
  misc_feature: 57
gatatttaggttttcctagggttttataatttttattatcgctttatttatatttatttaagggtaatataattacttataggtttattaaaagga

SEQ ID NO: 46055 - DNA, 96 bp, Fusarium virguliforme
  misc_feature: 57
tcctttatattaaagtaccccctagccttattataagctatattatataagtgggtaatttaagtaagcttattattatagctcttattcctatat

SEQ ID NO: 46056 - DNA, 96 bp, Fusarium virguliforme
  misc_feature: 57
aatattagataattaatgcttttttaatatccgcattttccctcttttatatctttttctttatatatattaagtttaatgctgctcggtcgcgga

SEQ ID NO: 46057 - DNA, 96 bp, Fusarium virguliforme
  misc_feature: 57
aagggtctattctcgtctatatctatcttattaggtcttcttctatatctccctatctctatatctctataattatctaaaactttaaaaaaaata

SEQ ID NO: 46058 - DNA, 96 bp, Fusarium virguliforme
  misc_feature: 57
aaatatatatattatatgcgttagtatataataccctttatatatattaaggttatagctataaatagctaaaatagattatttttctagtaaata

SEQ ID NO: 46059 - DNA, 96 bp, Fusarium virguliforme
  misc_feature: 57
atttaggttttcctagggttttataatttttattatcgctttatttatatttatttaagggtaatataattacttataggtttattaaaaggaata

SEQ ID NO: 46060 - DNA, 96 bp, Fusarium virguliforme
  misc_feature: 57
tatattaggcttttagcgagcgatttactttattattatagctttattattatctatataagctcttttattggttataaaaggctattacctttc

SEQ ID NO: 46061 - DNA, 96 bp, Fusarium virguliforme
  misc_feature: 57
aaaaagaaaaaaggtatttacttaattacttaagtaagtaatattattaattataaatatattaggccttaaaggtataattaaggtaaaactata

SEQ ID NO: 46062 - DNA, 96 bp, Fusarium virguliforme
  misc_feature: 57
taattcaccctttaataataaataagctaggtaactaataaaagaaattaaattaagaagagaataaaataggtaataaaatcttctttctctata

SEQ ID NO: 46063 - DNA, 96 bp, Fusarium virguliforme
  misc_feature: 57
tataattaattaaaatattaattattaaacctaagctactctaaatctaactactaataaatatatctaagaaagagttaatattaatactagaag

SEQ ID NO: 46064 - DNA, 96 bp, Fusarium virguliforme
  misc_feature: 57
agtcttaaataaatgcagcgtcagctatattatatccttataatataagcttaaattaagcctaagagtttttaaaaaataaataataatcttata

SEQ ID NO: 46065 - DNA, 96 bp, Fusarium virguliforme
  misc_feature: 57
tataactatattaagggagagagcgaaaataaaaatagtaaatataataaagattaagagggggagagctatagataaaaaaaaagcttagcccct

SEQ ID NO: 46066 - DNA, 96 bp, Fusarium virguliforme
  misc_feature: 57
agggtctatagtattatacctttatttttatatataagttatccccagtctatattactatttaccttactaactattacttattatatctttata

SEQ ID NO: 46067 - DNA, 96 bp, Fusarium virguliforme
  misc_feature: 57
tagtgattttaataatgatcccttatttattagtctagatattatagtccttactctatatctattagtaatatttagtattttattatatctctc

SEQ ID NO: 46068 - DNA, 96 bp, Fusarium virguliforme
  misc_feature: 57
ataaatagtattttataaattaattaataataaccaaaattatatctacttcttaatcccttaatataattaatagtagacctataataaagtcta

SEQ ID NO: 46069 - DNA, 96 bp, Fusarium virguliforme
  misc_feature: 57
atttatcttttatttttattacctgccttatagtctttaaagactatatttattttatcctttagtcttttatagttatataagaaaattaaatta

SEQ ID NO: 46070 - DNA, 96 bp, Fusarium virguliforme
  misc_feature: 57
aataaataaaatataatatcgcttatagactatactataaagaacgtatatataaggttatattacccctaataagaggatatattaatattatta

SEQ ID NO: 46071 - DNA, 96 bp, Fusarium virguliforme
  misc_feature: 57
aggaaaaaggtataagatattactaaaagaaggtattaaataaaaagaaataagagtaatagatagtctaagaaaataagaaataaataaacttta

SEQ ID NO: 46072 - DNA, 96 bp, Fusarium virguliforme
  misc_feature: 57
agtaataaagctaggatattaatagaattatccggtattactataatattcttataccttaatttattaatactataatctataagatcggcttta

SEQ ID NO: 46073 - DNA, 96 bp, Fusarium virguliforme
  misc_feature: 57
ggtttgggttatctatagctctaatttatttaaaagagagcataaatttaaaaataaaatagcggtaattaaggtaattaattaatatttctatat

SEQ ID NO: 46074 - DNA, 96 bp, Fusarium virguliforme
  misc_feature: 57
aaaactaggtataaaataccaatattttaaggccggctttaatagcgttattaggcttatgataaagtcctaagtccgaggttacgtgacttaccc

SEQ ID NO: 46075 - DNA, 96 bp, Fusarium virguliforme
  misc_feature: 57
ataactatagttaccttacttaggtaattaatagctaatagctagaataataagctcttattactattaataggtataataataataattaagccc

SEQ ID NO: 46076 - DNA, 96 bp, Fusarium virguliforme
  misc_feature: 57
ggctatatatagtgtattactcagctgtaaaggggtaacataaaaaatggaaaaagtataatcatgtaaaaaaagggatgcaaataaaactccttt

SEQ ID NO: 46077 - DNA, 96 bp, Fusarium virguliforme
  misc_feature: 57
aggaatactattaaggcgactataaagaataatataatagatattataaatctttatagcgggttatatatatagttttaggttattgtaaagagc

SEQ ID NO: 46078 - DNA, 96 bp, Fusarium virguliforme
  misc_feature: 57
gagaatatacttaataaaactctaatataactagctataatacctattctatatatagctaggttcctatatagttaattatctagctattaagag

SEQ ID NO: 46079 - DNA, 96 bp, Fusarium virguliforme
  misc_feature: 57
cttcaaaagaagtatatatattaattagaatctcttagtctattatatagtatattagagggggttattatattatagaagcttaaggctttagtc

SEQ ID NO: 46080 - DNA, 96 bp, Fusarium virguliforme
  misc_feature: 57
gaccttaaatcaatattaatttaattaatagctaagaagtatattattttatattatgcctttagttattattaagagggcggtaataatactcgt

SEQ ID NO: 46081 - DNA, 96 bp, Fusarium virguliforme
  misc_feature: 57
gaagatataactttcttctttctttaaagaagatatattcttctttcttcaaagaggatatctctcttctactttaaagaagatataaccttcttt

SEQ ID NO: 46082 - DNA, 96 bp, Fusarium virguliforme
  misc_feature: 57
gaaaaaaaataaagtataaagaaaaaggaatataataaaaagagctaattatagaaaatatagagagtaattaacgataaggcggagaagatcgcg

SEQ ID NO: 46083 - DNA, 96 bp, Fusarium virguliforme
  misc_feature: 57
cttaccttttaagagtatttattattcctattattcctttagttagtattttcctttagcgatattatataccttcttcttaaatatatttacctt

SEQ ID NO: 46084 - DNA, 96 bp, Fusarium virguliforme
  misc_feature: 57
ctctacctaattccgataagagatttaagaagggaaggtttaagaaggaaaaaggaaaggcaataagcctaaaaataaataagtaataaaagggag

SEQ ID NO: 46085 - DNA, 96 bp, Fusarium virguliforme
  misc_feature: 57
ctatagaaactaatagccccttactaaagctcctatttaagtaaataatataaaaaataaagctatctctaaattattaataatacctcccttaat

SEQ ID NO: 46086 - DNA, 96 bp, Fusarium virguliforme
  misc_feature: 57
aaataaataattaagggcggctattatctaggttagcttatatttatcctcttaattatttattaaagccttatccttataattagtaagttatag

SEQ ID NO: 46087 - DNA, 96 bp, Fusarium virguliforme
  misc_feature: 57
ctactctttttaatttattttattatttaaggtatcctttagtaccttaaaataccctttttaagcttatttcctttatagattattatctatact

SEQ ID NO: 46088 - DNA, 96 bp, Fusarium virguliforme
  misc_feature: 57
agcgattttaaagtctaattatctattatttactttaagcggtaatattattaataataaggtattattaaatatcttaagcctaaatattaatcg

SEQ ID NO: 46089 - DNA, 96 bp, Fusarium virguliforme
  misc_feature: 57
ccgctttatactatcgtaatagtctttattatccttattattatttaagggttattttatagataggtaaagtttatttatttcttaccttctagg

SEQ ID NO: 46090 - DNA, 96 bp, Fusarium virguliforme
  misc_feature: 57
agcttaatatattattatataggtatttaggtattctatattatattaagatccccggtttatattactatttaccttattaactattacttattg

SEQ ID NO: 46091 - DNA, 96 bp, Fusarium virguliforme
  misc_feature: 57
agagcgattaatatttaggcttaagatatttaataataccttattattaataatattaccgcttaaagtaaataatagataattagactttaaaat

SEQ ID NO: 46092 - DNA, 96 bp, Fusarium virguliforme
  misc_feature: 57
aataataatttagattccctttaattttaactctaatatagaatataaagataataataagggttaagacctcaataacttataatcttatataat

SEQ ID NO: 46093 - DNA, 96 bp, Fusarium virguliforme
  misc_feature: 57
attataaattaaattaataaacctaggttattttttaggttactaaattaactcttttttatattaatagccttagagttttaatttaaatctatt

SEQ ID NO: 46094 - DNA, 96 bp, Fusarium virguliforme
  misc_feature: 57
atagagacgcaataagtaataattaataaggtaaatagtaatataaactaaggctaaaaaactaatataatttaataacgctagaataaaagctat

SEQ ID NO: 46095 - DNA, 96 bp, Fusarium virguliforme
  misc_feature: 57
acttctagttctttattatatagtactcctttaattactttatactttatattattattattctcttatcctagcgctctaataatcgaaaggtat

SEQ ID NO: 46096 - DNA, 96 bp, Fusarium virguliforme
  misc_feature: 57
agataagcggtattagataacgtaagaatagtatcttatatattatttctactattagcgtaagtatatttaaagctaatatataaatataattat

SEQ ID NO: 46097 - DNA, 96 bp, Fusarium virguliforme
  misc_feature: 57
aaagtaatttattaatatgcttagttaagaaagaggagtaaagctaaaaacaaaatataataataaagaataataagctatatttaataggattat

SEQ ID NO: 46098 - DNA, 96 bp, Fusarium virguliforme
  misc_feature: 57
aatatacttaccaatatatatataacggcacgttttataaataataaatagaaacttaggtaatttaataaataactctatcttagctactattat

SEQ ID NO: 46099 - DNA, 96 bp, Fusarium virguliforme
  misc_feature: 57
ataaatatataattatatgccctatattaaaagatagtgagtataataagtatatataaggtgatataattagttaattaggagtcctagagttat

SEQ ID NO: 46100 - DNA, 96 bp, Fusarium virguliforme
  misc_feature: 57
aaactaggtataaaataccaatattttaaggccggctttaatagcgttattaggcttatgataaagtcctaagtccgaggttacgtgacttaccct

SEQ ID NO: 46101 - DNA, 96 bp, Fusarium virguliforme
  misc_feature: 57
agaaggttatatcttctttaaagtagaagagagatatcctctttgaagaaagaagaatatatcttctttaaagaaagaagaaagttatatcttctt

SEQ ID NO: 46102 - DNA, 96 bp, Fusarium virguliforme
  misc_feature: 57
aagttattataaggaagctatatagaataaaagataagcctataaggatataaggtaattagaaatatatatagaagggaggttttaattataagt

SEQ ID NO: 46103 - DNA, 96 bp, Fusarium virguliforme
  misc_feature: 57
acttaggtcattagatatagtattattattattaattatactctaaggggggttaatattatctttagcgatatataaggggtagatctatatagt

SEQ ID NO: 46104 - DNA, 96 bp, Fusarium virguliforme
  misc_feature: 56
tttttttaaatcctatatatctagctctagagttattataataataataaaggacctttaattttaatactttttattttaggataataaattatc

SEQ ID NO: 46105 - DNA, 96 bp, Fusarium virguliforme
  misc_feature: 56
ttttctctttatttaatagcttactctttcctccctccctgccctaaatattactttacttctctcctagaccttagtgcttagtcttacctttct

SEQ ID NO: 46106 - DNA, 96 bp, Fusarium virguliforme
  misc_feature: 56
aatttatttaatacttattatatttagcttactttatacctctattatttaccttaactcttttagttaggtcaagaaggtattattaagtataaa

SEQ ID NO: 46107 - DNA, 96 bp, Fusarium virguliforme
  misc_feature: 56
tttaggttttcctagggttttataatttttattatcgctttatttatatttatttaagggtaatataattacttataggtttattaaaaggaataa

SEQ ID NO: 46108 - DNA, 96 bp, Fusarium virguliforme
  misc_feature: 56
tttagggatctttatataactatctataatatatagcgcctaaggctagctatatatcttaatataatataaaatacctaaatacctatagaataa

SEQ ID NO: 46109 - DNA, 96 bp, Fusarium virguliforme
  misc_feature: 56
ttctttttttttctttcttttctttcttttctttctttcttttcttttttttctttctttcttttcttttttccttacttttaccctttactactc

SEQ ID NO: 46110 - DNA, 96 bp, Fusarium virguliforme
  misc_feature: 56
atatagtattagataatataaagaagagtgagatatatcaaatagaaagattaatataaagagataaagttaggaataactttattagataaagaa

SEQ ID NO: 46111 - DNA, 96 bp, Fusarium virguliforme
  misc_feature: 56
ttctcttttttttcttttttttcttttttttctttctttaattttatttacctctattatctacttttacctttatattactctttcttttttatt

SEQ ID NO: 46112 - DNA, 96 bp, Fusarium virguliforme
  misc_feature: 56
atatttaggttttcctagggttttataatttttattatcgctttatttatatttatttaagggtaatataattacttataggtttattaaaaggaa

SEQ ID NO: 46113 - DNA, 96 bp, Fusarium virguliforme
  misc_feature: 56
ttattaaggtaatattaatatatagatataataggcctttagcgcctaataatagcggcctaaaggaataaataataatatctattttaattatat

SEQ ID NO: 46114 - DNA, 96 bp, Fusarium virguliforme
  misc_feature: 56
ttatatttttttaagtttatattttaatcttttaattcttaattcttatttcttttccctttctttcctttcctttctttttctttttactagcct

SEQ ID NO: 46115 - DNA, 96 bp, Fusarium virguliforme
  misc_feature: 56
ttatatcctaagggtaagatttatatattaatataaagaagtaacgctacctactatataagccgttattaataataataatatactttaatatat

SEQ ID NO: 46116 - DNA, 96 bp, Fusarium virguliforme
  misc_feature: 56
ttatatagcttttattctagcgttattaaattatattagttttttagccttagtttatattactatttaccttattaattattacttattgcgtct

SEQ ID NO: 46117 - DNA, 96 bp, Fusarium virguliforme
  misc_feature: 56
aattcaccctttaataataaataagctaggtaactaataaaagaaattaaattaagaagagaataaaataggtaataaaatcttctttctctataa

SEQ ID NO: 46118 - DNA, 96 bp, Fusarium virguliforme
  misc_feature: 56
atttcctatagctactttccttaatatataacctatatctataattatcctgccgtctaatataatattaaaatctaaagctatatataattataa

SEQ ID NO: 46119 - DNA, 96 bp, Fusarium virguliforme
  misc_feature: 56
ttataagttaatataaccttagtatcttaatacctagcttatataaatctaataagctagtaaactaaagcctatataataataagaataatatac

SEQ ID NO: 46120 - DNA, 96 bp, Fusarium virguliforme
  misc_feature: 56
tagcttattattattaattttaattactattttacttacttttattaaagctaatagcttaataataatagaaagtcctaatgaacctataagtaa

SEQ ID NO: 46121 - DNA, 96 bp, Fusarium virguliforme
  misc_feature: 56
ataagaaaaaggagtaaaagaaagagaagtaagaagagagagagaaagaggaaagggagaaagataagagaaagtaatatattctaatataggtaa

SEQ ID NO: 46122 - DNA, 96 bp, Fusarium virguliforme
  misc_feature: 56
ttaatagcttctaagaagtataataaagcctatatatataatagtaataaaagaaataggaataaaagcgagaaagagagataatatagcaaaggt

SEQ ID NO: 46123 - DNA, 96 bp, Fusarium virguliforme
  misc_feature: 56
acctcttttttaagattaatataattagcttatatattaagctattaaaaaggaaaaattaaacctattaaagagggcgtaataaattaaggttaa

SEQ ID NO: 46124 - DNA, 96 bp, Fusarium virguliforme
  misc_feature: 56
tcttattccttaattaaggttataaagaggttaatataaaatatagaacctaattataagtaatatagcctaataataagcggtataaaccctatt

SEQ ID NO: 46125 - DNA, 96 bp, Fusarium virguliforme
  misc_feature: 56
tctattactcttatttctttttatttaataccttcttttagtaatatcttatacctttttcctatatatatctgccttataattaagcttataccc

SEQ ID NO: 46126 - DNA, 96 bp, Fusarium virguliforme
  misc_feature: 56
tctatattacttaattcccgactatatatctataagaataattatatgccggagttataaagtaattatatctatagctatattagataaagtcct

SEQ ID NO: 46127 - DNA, 96 bp, Fusarium virguliforme
  misc_feature: 56
cgctttatactatcgtaatagtctttattatccttattattatttaagggttattttatagataggtaaagtttatttatttcttaccttctagga

SEQ ID NO: 46128 - DNA, 96 bp, Fusarium virguliforme
  misc_feature: 56
tattttaaacccccctactatagatcttatatcttagtatcttattgcttattatagcttttatatattaattctttcctcttaaatattatattt

SEQ ID NO: 46129 - DNA, 96 bp, Fusarium virguliforme
  misc_feature: 56
gtaaggaataaatagtattttataaattaattaataataaccaaaattatatctacttcttaatcccttaatataattaatagtagacctataata

SEQ ID NO: 46130 - DNA, 96 bp, Fusarium virguliforme
  misc_feature: 56
atatatagttagatttatgcctaaaactataatattaatatatagctccgcgaaataattaataaacctaataaatacttaaagtctctattaata

SEQ ID NO: 46131 - DNA, 96 bp, Fusarium virguliforme
  misc_feature: 56
tatatttttttaaatcctatatatctagctctagagttattataataataataaaggacctttaattttaatactttttattttaggataataaat

SEQ ID NO: 46132 - DNA, 96 bp, Fusarium virguliforme
  misc_feature: 56
tatatcttattaaagaggctaatcgcctatataataatttaatatttaggcttaaacttaatattaacttacttaagattaaagataatatagcta

SEQ ID NO: 46133 - DNA, 96 bp, Fusarium virguliforme
  misc_feature: 56
tatatctagtattttctcggtataatatatataatatactaacttagtctatatagccgtataatatatctatatattatctttaacctaattatc

SEQ ID NO: 46134 - DNA, 96 bp, Fusarium virguliforme
  misc_feature: 56
ctctatttactagaaaaataatctattttagctatttatagctataaccttaatatatataaagggtattatatactaacgcatataatatatata

SEQ ID NO: 46135 - DNA, 96 bp, Fusarium virguliforme
  misc_feature: 56
tatatagcttttattctagcgttattaaattatattagttttttagccttagtttatattactatttaccttattaattattacttattgcgtctc

SEQ ID NO: 46136 - DNA, 96 bp, Fusarium virguliforme
  misc_feature: 56
taaataataatttagattccctttaattttaactctaatatagaatataaagataataataagggttaagacctcaataacttataatcttatata

SEQ ID NO: 46137 - DNA, 96 bp, Fusarium virguliforme
  misc_feature: 56
taaataaaatataatatcgcttatagactatactataaagaacgtatatataaggttatattacccctaataagaggatatattaatattattata

SEQ ID NO: 46138 - DNA, 96 bp, Fusarium virguliforme
  misc_feature: 56
tataactatagaataaatagctaattcttagtgcatttaaaataaataatacctaaataatacttaaataattaataacctcgcggttattactat

SEQ ID NO: 46139 - DNA, 96 bp, Fusarium virguliforme
  misc_feature: 56
atacctaaagagtatatatataggtaagaccttaataatagataatagctattattataggtaaaggctatattaagtaattaaattacttcccta

SEQ ID NO: 46140 - DNA, 96 bp, Fusarium virguliforme
  misc_feature: 56
taggaaaaaggtataagatattactaaaagaaggtattaaataaaaagaaataagagtaatagatagtctaagaaaataagaaataaataaacttt

SEQ ID NO: 46141 - DNA, 96 bp, Fusarium virguliforme
  misc_feature: 56
agttattataaggaagctatatagaataaaagataagcctataaggatataaggtaattagaaatatatatagaagggaggttttaattataagta

SEQ ID NO: 46142 - DNA, 96 bp, Fusarium virguliforme
  misc_feature: 56
tacttaggtcattagatatagtattattattattaattatactctaaggggggttaatattatctttagcgatatataaggggtagatctatatag

SEQ ID NO: 46143 - DNA, 96 bp, Fusarium virguliforme
  misc_feature: 56
actatttcctatagctactttccttaatatataacctatatctataattatcctgccgtctaatataatattaaaatctaaagctatatataatta

SEQ ID NO: 46144 - DNA, 96 bp, Fusarium virguliforme
  misc_feature: 56
actataacttattatattttaactctaggtatttaatattactagtatatttattaagctattagtatttatagtcaaggtatttaatttatatta

SEQ ID NO: 46145 - DNA, 96 bp, Fusarium virguliforme
  misc_feature: 56
aaaaggggcttttaaaattaaatcttaaaggctcttataaaggtaataataataattacttttctaaaataatatctaaagtttaatattacctta

SEQ ID NO: 46146 - DNA, 96 bp, Fusarium virguliforme
  misc_feature: 56
atataagtctttaattattacttaagccttattaataaattaattaaatagctactaacttaattaagctataattaagcacttagcgggagctta

SEQ ID NO: 46147 - DNA, 96 bp, Fusarium virguliforme
  misc_feature: 56
taactaatcgttttattaatagtattatctaagagctcgccctatgggatcttaggtaagctaagcttagttagagattaatctaaaaactcttta

SEQ ID NO: 46148 - DNA, 96 bp, Fusarium virguliforme
  misc_feature: 56
aataaatagatttaaattaaaactctaaggctattaatataaaaaagagttaatttagtaacctaaaaaataacctaggtttattaatttaattta

SEQ ID NO: 46149 - DNA, 96 bp, Fusarium virguliforme
  misc_feature: 56
taaataactaatcgttttattaatagtattatctaagagctcgccctatgggatcttaggtaagctaagcttagttagagattaatctaaaaactc

SEQ ID NO: 46150 - DNA, 96 bp, Fusarium virguliforme
  misc_feature: 56
gaactattaggatattactttattattaatatataggctatacctaatatatctatctatagtagccctattaatatttattagggaggatcttta

SEQ ID NO: 46151 - DNA, 96 bp, Fusarium virguliforme
  misc_feature: 56
atattaggcttttaataggcgatttactttattattatagctttatgattatctatataagctttattattaattataaaaggctattacctttta

SEQ ID NO: 46152 - DNA, 96 bp, Fusarium virguliforme
  misc_feature: 56
gcgaggataagctagcccctattatatagtatattataggtatataaggctcttaccctcctattatatattttatttcttcttcttcctctttta

SEQ ID NO: 46153 - DNA, 96 bp, Fusarium virguliforme
  misc_feature: 56
aacttactaattataaggataaggctttaataaataattaagaggataaatataagctaacctagataatagccgcccttaattatttatttaaac

SEQ ID NO: 46154 - DNA, 96 bp, Fusarium virguliforme
  misc_feature: 56
gattaagagaatagtaatactaaagaattaatactttaagctataataataaattacctaaaaaatagaaatagttttattatttaattttataac

SEQ ID NO: 46155 - DNA, 96 bp, Fusarium virguliforme
  misc_feature: 56
gttaagaaagaggagtaaagctaaaaacaaaatataataataaagaataataagctatatttaataggattattaagataatagaaagaggctttt

SEQ ID NO: 46156 - DNA, 96 bp, Fusarium virguliforme
  misc_feature: 56
ggtttctttctaacttatagagttattttataatatatgcgattatttactagctttattatttttatctattatagtatttatattatattcctt

SEQ ID NO: 46157 - DNA, 96 bp, Fusarium virguliforme
  misc_feature: 56
attaagagaatagtaatactaaagaattaatactttaagctataataataaattacctaaaaaatagaaatagttttattatttaattttataacc

SEQ ID NO: 46158 - DNA, 96 bp, Fusarium virguliforme
  misc_feature: 56
atctattactcttatttctttttatttaataccttcttttagtaatatcttatacctttttcctatatatatctgccttataattaagcttatacc

SEQ ID NO: 46159 - DNA, 96 bp, Fusarium virguliforme
  misc_feature: 56
gggtctatagtattatacctttatttttatatataagttatccccagtctatattactatttaccttactaactattacttattatatctttatat

SEQ ID NO: 46160 - DNA, 96 bp, Fusarium virguliforme
  misc_feature: 56
ctctatattacttaattcccgactatatatctataagaataattatatgccggagttataaagtaattatatctatagctatattagataaagtcc

SEQ ID NO: 46161 - DNA, 96 bp, Fusarium virguliforme
  misc_feature: 56
ggaaaaaaaataaagtataaagaaaaaggaatataataaaaagagctaattatagaaaatatagagagtaattaacgataaggcggagaagatcgc

SEQ ID NO: 46162 - DNA, 96 bp, Fusarium virguliforme
  misc_feature: 56
attactcttaaggacctaatagttaatttaaattaattagctttataactttaattagaaattaagggctaataataaataaaggtattattaagc

SEQ ID NO: 46163 - DNA, 96 bp, Fusarium virguliforme
  misc_feature: 56
aaaacgattagttatttatttatcaataaactcttctaatataatagaggcgtaagtaaaggctaggtcattcaaaagatattataggacgatagc

SEQ ID NO: 46164 - DNA, 96 bp, Fusarium virguliforme
  misc_feature: 56
cttaaccgcggaatagcataagactttctattatatatctataaacgctataagattatattatagggcagtagctataagtatatttattaattc

SEQ ID NO: 46165 - DNA, 96 bp, Fusarium virguliforme
  misc_feature: 56
aaaaagctttatatctttttctcttttttttcttttttttctttctttaattttatctacctctattatctacttttgcctttatattactctttc

SEQ ID NO: 46166 - DNA, 96 bp, Fusarium virguliforme
  misc_feature: 56
aagatataactttcttctttctttaaagaagatatattcttctttcttcaaagaggatatctctcttctactttaaagaagatataaccttctttc

SEQ ID NO: 46167 - DNA, 96 bp, Fusarium virguliforme
  misc_feature: 56
aataaagttaagaatattaatattaataattattttatcagaagtaatactttagtaagttaatcttattaattattaatagttaatagttagaag

SEQ ID NO: 46168 - DNA, 96 bp, Fusarium virguliforme
  misc_feature: 56
cttaattataaggcagatatatataggaaaaaggtataagatattactaaaagaaggtattaaataaaaagaaataagagtaatagatagtctaag

SEQ ID NO: 46169 - DNA, 96 bp, Fusarium virguliforme
  misc_feature: 56
cttacttataataacttaaaaaaagctaggtttatatttagttatatagatattattaaggttaggtaagttattattaaagttaagtaagttatt

SEQ ID NO: 46170 - DNA, 96 bp, Fusarium virguliforme
  misc_feature: 56
cttaataaagatattaaatataataaataaggcattatagctatattaaagcttatttaagatattattatatagcttatctattaactcttatat

SEQ ID NO: 46171 - DNA, 96 bp, Fusarium virguliforme
  misc_feature: 56
ctatttcctatagctactttccttaatatataacctatatctataattatcctgccgtctaatataatattaaaatctaaagctatatataattat

SEQ ID NO: 46172 - DNA, 96 bp, Fusarium virguliforme
  misc_feature: 56
atagcttattctttaggtataaggctattaagtatatagattatattatcttagcttataagctttataattatagactagctttattaattatcg

SEQ ID NO: 46173 - DNA, 96 bp, Fusarium virguliforme
  misc_feature: 56
ccttacttataataacttaaaaaaagctaggtttatatttagttatatagatattattaaggttaggtaagttattattaaagttaagtaagttat

SEQ ID NO: 46174 - DNA, 96 bp, Fusarium virguliforme
  misc_feature: 56
cctcctatagaaactaatagccccttactaaagctcctatttaagtaaataatataaaaaataaagctatctctaaattattaataatacctccct

SEQ ID NO: 46175 - DNA, 96 bp, Fusarium virguliforme
  misc_feature: 56
ccctaatgccttcccctctctatctttctttctttttttttctttcttttctttcttttctttctttcttttcttttttttctttctttcttttct

SEQ ID NO: 46176 - DNA, 96 bp, Fusarium virguliforme
  misc_feature: 56
atttattaaaaaaaggattattttaattatatttacttatatacgcttattaggctaatataaatattcttcttataaagagtatatatatccctt

SEQ ID NO: 46177 - DNA, 96 bp, Fusarium virguliforme
  misc_feature: 56
attaatttattattatttttagttttaatagaaacccttttttaagaccttattaatagcttatttaattagctatagctatattagccctattat

SEQ ID NO: 46178 - DNA, 96 bp, Fusarium virguliforme
  misc_feature: 56
atatatcgcgaattactttatataattaacttacttatagcttatataaccttaatttaaggtcctatatatttatcttattgttatagacttaat

SEQ ID NO: 46179 - DNA, 96 bp, Fusarium virguliforme
  misc_feature: 56
atatattaagctggaatcctatatagtaagctcttaagacttattaagatacttaaggttaattttaagctaattaaatatttaattaattaattt

SEQ ID NO: 46180 - DNA, 96 bp, Fusarium virguliforme
  misc_feature: 56
atagtgattttaataatgatcccttatttattagtctagatattatagtccttactctatatctattagtaatatttagtattttattatatctct

SEQ ID NO: 46181 - DNA, 96 bp, Fusarium virguliforme
  misc_feature: 56
ataatattaaaattaagagaattaagctatacttctttatctaccttattattttattctttctctcttactttttataccttttatactttctat

SEQ ID NO: 46182 - DNA, 96 bp, Fusarium virguliforme
  misc_feature: 56
ataagagatttaagaagggaaggtttaagaagggaaagggaaaggtaataagcctaagaataaataagtaataaaagggagctttagattagcctt

SEQ ID NO: 46183 - DNA, 96 bp, Fusarium virguliforme
  misc_feature: 56
agtgactatctaatagaattatagcttaggtattataatatccctactaatttctacggactaatataataaagccttaggtattatagtatccct

SEQ ID NO: 46184 - DNA, 96 bp, Fusarium virguliforme
  misc_feature: 56
aacctttctagtgatttatattattatattaatataggctaataaggcacttatatcgggttatctatatctattattatagtaagtaaaaagact

SEQ ID NO: 46185 - DNA, 96 bp, Fusarium virguliforme
  misc_feature: 56
aatagtattatttttgactattaataataatagtaggaataacatatataataagtaagtaagatagttaagtaagcgggatagaaatcttaacct

SEQ ID NO: 46186 - DNA, 96 bp, Fusarium virguliforme
  misc_feature: 56
agatacctataatattataaggttatctagatcttatatatagactataggggtaaaatatatctatataagaaaaagaagtaagattactttcct

SEQ ID NO: 46187 - DNA, 96 bp, Fusarium virguliforme
  misc_feature: 56
agaagatataactttcttctttctttaaagaagatatattcttctttcttcaaagaggatatctctcttctactttaaagaagatataaccttctt

SEQ ID NO: 46188 - DNA, 96 bp, Fusarium virguliforme
  misc_feature: 56
aataaagttattcctaactttatctctttatattaatctttctatttgatatatctcactcttctttatattatctaatactatatcgacttactt

SEQ ID NO: 46189 - DNA, 96 bp, Fusarium virguliforme
  misc_feature: 56
aaaataagataatatagcgattaaatagctttttataagagctaaagtaaactaaaagaaataatataataaaaaaaaggataacttaattaagtt

SEQ ID NO: 46190 - DNA, 96 bp, Fusarium virguliforme
  misc_feature: 55
ttttttattttttattattcctaggctagttagatatatatattagtgctattattctagtagtatattccttattcgtcggtctaaatattatag

SEQ ID NO: 46191 - DNA, 96 bp, Fusarium virguliforme
  misc_feature: 55
tttttatttttattatttataggttttattatattctcgtaatactttagtttagtattataggtataggttacagttatattatatagggttatt

SEQ ID NO: 46192 - DNA, 96 bp, Fusarium virguliforme
  misc_feature: 55
ttttctcttttttttcttttttttcttttttttctttctttaattttatttacctctattatctacttttacctttatattactctttctttttta

SEQ ID NO: 46193 - DNA, 96 bp, Fusarium virguliforme
  misc_feature: 55
ttttattttttattattcctaggctagttagatatatatattagtgctattattctagtagtatattccttattcgtcggtctaaatattatagtc

SEQ ID NO: 46194 - DNA, 96 bp, Fusarium virguliforme
  misc_feature: 55
tttcttttagctatattaattaataatcgtaatctatctgccttatatcttattaatttagggttattatattaccgataaaccctttcttaaaat

SEQ ID NO: 46195 - DNA, 96 bp, Fusarium virguliforme
  misc_feature: 55
tatattatctttaaccttatattatacttatttacgaactatatatattatatatattaaccgtaaatttagcttataatattttaattaaataaa

SEQ ID NO: 46196 - DNA, 96 bp, Fusarium virguliforme
  misc_feature: 55
tttattatttataaaacgtgccgttatatatatattggtaagtatattaagtagcatataaagtaatattataggtctatttagataataaaaaga

SEQ ID NO: 46197 - DNA, 96 bp, Fusarium virguliforme
  misc_feature: 55
atatagttagatttatgcctaaaactataatattaatatatagctccgcgaaataattaataaacctaataaatacttaaagtctctattaataaa

SEQ ID NO: 46198 - DNA, 96 bp, Fusarium virguliforme
  misc_feature: 55
tataattaaaatagatattattatttattcctttaggccgctattattaggcgctaaaggcctattatatctatatattaatattaccttaataaa

SEQ ID NO: 46199 - DNA, 96 bp, Fusarium virguliforme
  misc_feature: 55
tttataaagtcccttttatattataaggtcttttataaatataaagagagagagtcccctatataatactttatataatagagagccttctatatc

SEQ ID NO: 46200 - DNA, 96 bp, Fusarium virguliforme
  misc_feature: 55
ttctcgtctatatctatcttattaggtcttcttctatatctccctatctctatatctctataattatctaaaactttaaaaaaaataaaaactaaa

SEQ ID NO: 46201 - DNA, 96 bp, Fusarium virguliforme
  misc_feature: 55
ttctcttaactctattgatattatatagtgctaggatatctatttatagtctaggtattacttatagctctatttattatacctaagtgggagccc

SEQ ID NO: 46202 - DNA, 96 bp, Fusarium virguliforme
  misc_feature: 55
tgtacagtaaaactaatccattcacttgtctgatccactcgcttgtcatgtacgttactctagatatcgctaattagccaattacatcgcttagaa

SEQ ID NO: 46203 - DNA, 96 bp, Fusarium virguliforme
  misc_feature: 55
taataaagttaagaatattaatattaataattattttatcagaagtaatactttagtaagttaatcttattaattattaatagttaatagttagaa

SEQ ID NO: 46204 - DNA, 96 bp, Fusarium virguliforme
  misc_feature: 55
tatttatttatttttaggcttattacctttctctttttctttttaaaccttcccttcttaaatctcttattaaaattaagtagagaagtttaataa

SEQ ID NO: 46205 - DNA, 96 bp, Fusarium virguliforme
  misc_feature: 55
ttatcttattccttaattaaggttataaagaggttaatataaaatatagaacctaattataagtaatatagcctaataataagcggtataaaccct

SEQ ID NO: 46206 - DNA, 96 bp, Fusarium virguliforme
  misc_feature: 55
tatagttattattatattattaaattcgccgggaaaaataattattcatcctattacttaagttatttattaaagaatcccctatagggggtataa

SEQ ID NO: 46207 - DNA, 96 bp, Fusarium virguliforme
  misc_feature: 55
aagagttcggtataattaagagctatatagcttattctttaggtataaggctattaagtatatagattatattatcttagcttataagctttataa

SEQ ID NO: 46208 - DNA, 96 bp, Fusarium virguliforme
  misc_feature: 55
ttagttaagaaagaggagtaaagctaaaaacaaaatataataataaagaataataagctatatttaataggattattaagataatagaaagaggct

SEQ ID NO: 46209 - DNA, 96 bp, Fusarium virguliforme
  misc_feature: 55
actaattataaaataattaaatattagagctagaaagctttaaagaaagagaaagaaagtaaagagaagcgcataattaggatctaaaatacctaa

SEQ ID NO: 46210 - DNA, 96 bp, Fusarium virguliforme
  misc_feature: 55
atattatatatattacttctagttctttattatatagtactcctttaattactttatactttatattattattattctcttatcctagcgctctaa

SEQ ID NO: 46211 - DNA, 96 bp, Fusarium virguliforme
  misc_feature: 55
taaagtatattattatcattaataatggcttatatagtaggtagcgttatttccttatattaatatataaatcttacccttaggatataagtctaa

SEQ ID NO: 46212 - DNA, 96 bp, Fusarium virguliforme
  misc_feature: 55
gcttaattataaggcagatatatataggaaaaaggtataagatattactaaaagaaggtattaaataaaaagaaataagagtaatagatagtctaa

SEQ ID NO: 46213 - DNA, 96 bp, Fusarium virguliforme
  misc_feature: 55
ttacttataataacttaaaaaaagctaggtttatatttagttatatagatattattaaggttaggtaagttattattaaagttaagtaagttatta

SEQ ID NO: 46214 - DNA, 96 bp, Fusarium virguliforme
  misc_feature: 55
ttactcttaaggacctaatagttaatttaaattaattagctttataactttaattagaaattaagggctaataataaataaaggtattattaagcc

SEQ ID NO: 46215 - DNA, 96 bp, Fusarium virguliforme
  misc_feature: 55
attaaagctaaaaaggtaagataaataatatagaagtaaaagagagaaataaagaaaaaagagtaatataaaggtaaaaatagataataaaggtaa

SEQ ID NO: 46216 - DNA, 96 bp, Fusarium virguliforme
  misc_feature: 55
ttaatatattattatataggtatttaggtattctatattatattaagatccccggtttatattactatttaccttattaactattacttattgcgt

SEQ ID NO: 46217 - DNA, 96 bp, Fusarium virguliforme
  misc_feature: 55
ttaagtcttttctattattatattactcttaagataagggattattattttatttttaagatatagcttataattaaggataaaagatagttttat

SEQ ID NO: 46218 - DNA, 96 bp, Fusarium virguliforme
  misc_feature: 55
tataagtctttaattattacttaagccttattaataaattaattaaatagctactaacttaattaagctataattaagcacttagcgggagcttaa

SEQ ID NO: 46219 - DNA, 96 bp, Fusarium virguliforme
  misc_feature: 55
agaaataagataagcttataatataaattaaataccttgactataaatactaatagcttaataaatatactagtaatattaaatacctagagttaa

SEQ ID NO: 46220 - DNA, 96 bp, Fusarium virguliforme
  misc_feature: 55
ttaaccgcggaatagcataagactttctattatatatctataaacgctataagattatattatagggcagtagctataagtatatttattaattct

SEQ ID NO: 46221 - DNA, 96 bp, Fusarium virguliforme
  misc_feature: 55
tattaggcttttaataggcgatttactttattattatagctttatgattatctatataagctttattattaattataaaaggctattaccttttaa

SEQ ID NO: 46222 - DNA, 96 bp, Fusarium virguliforme
  misc_feature: 55
tatataagattattatttattttttaaaaactcttaggcttaatttaagcttatattataaggatataatatagctgacgctgcatttatttaaga

SEQ ID NO: 46223 - DNA, 96 bp, Fusarium virguliforme
  misc_feature: 55
cctataatataatattatatcgtttatatatatagaggataaagtcctatattattttatatttaagattttagtgcgaggttatcgcgagataga

SEQ ID NO: 46224 - DNA, 96 bp, Fusarium virguliforme
  misc_feature: 55
aataaaataccttaaagttaagggctttaataaagaggtaggcttaaattaaaataggggctttaataaaaagaaagggtaattaaataatataga

SEQ ID NO: 46225 - DNA, 96 bp, Fusarium virguliforme
  misc_feature: 55
tctatagtattatacctttatttttatatataagttatccccagtctatattactatttaccttactaactattacttattatatctttatataat

SEQ ID NO: 46226 - DNA, 96 bp, Fusarium virguliforme
  misc_feature: 55
taaccttaagctcttaatttaataaattataactaaggcctaaagaattaatatccttaattaataaaataccttactaaggaagttttatagcga

SEQ ID NO: 46227 - DNA, 96 bp, Fusarium virguliforme
  misc_feature: 55
cctttagcttatattattattctttagtatatttatttaggtattaatcctattttaattatcccttataatctatataatctaaggtaaaaagga

SEQ ID NO: 46228 - DNA, 96 bp, Fusarium virguliforme
  misc_feature: 55
ccttaaatcaatattaatttaattaatagctaagaagtatattattttatattatgcctttagttattattaagagggcggtaataatactcgtga

SEQ ID NO: 46229 - DNA, 96 bp, Fusarium virguliforme
  misc_feature: 55
taagtttatatatttataaacattatataggtctagggctaataatataaatattatagctatattatatactttctccgcgatattaataaaata

SEQ ID NO: 46230 - DNA, 96 bp, Fusarium virguliforme
  misc_feature: 55
agggtttaggaggatcttattaatccctattatatttagtctattattattaaggttaagtaatattatatttattactctataaccccttaaata

SEQ ID NO: 46231 - DNA, 96 bp, Fusarium virguliforme
  misc_feature: 55
tattcgataattaggttaaagataatatatagatatattatacggctatatagactaagttagtatattatatatattataccgagaaaatactag

SEQ ID NO: 46232 - DNA, 96 bp, Fusarium virguliforme
  misc_feature: 55
ataataataataacgataataataataataataacgataataataaggcgatagataataagggcataatagctctataatataaagcgcttaata

SEQ ID NO: 46233 - DNA, 96 bp, Fusarium virguliforme
  misc_feature: 55
tatctattactcttatttctttttatttaataccttcttttagtaatatcttatacctttttcctatatatatctgccttataattaagcttatac

SEQ ID NO: 46234 - DNA, 96 bp, Fusarium virguliforme
  misc_feature: 55
tatattattatttaggggttattttaccaataggtaaagtttatttatttcttattttcttagactatctattactcttatttctttttatttaat

SEQ ID NO: 46235 - DNA, 96 bp, Fusarium virguliforme
  misc_feature: 55
atatagggtgagggatttttatcccgcttatttatttatcccacttgtttattatatacgttataatttattatttatcctagacttaataatata

SEQ ID NO: 46236 - DNA, 96 bp, Fusarium virguliforme
  misc_feature: 55
tatattacttaattcccgactatatatctataagaataattatatgccggagttataaagtaattatatctatagctatattagataaagtcctct

SEQ ID NO: 46237 - DNA, 96 bp, Fusarium virguliforme
  misc_feature: 55
tatatatagttagatttatgcctaaaactataatattaatatatagctccgcgaaataattaataaacctaataaatacttaaagtctctattaat

SEQ ID NO: 46238 - DNA, 96 bp, Fusarium virguliforme
  misc_feature: 55
aaaaagtatttttataaacccaactcttaataaaatctaaaaataaattttttagatttttaaaaaattccctttatagcgaaatagctaattata

SEQ ID NO: 46239 - DNA, 96 bp, Fusarium virguliforme
  misc_feature: 55
gtctacctacccctcttagtagtctttttttattttagagctctgcctttatttagtttagaattattgattttgcttttattaatatttattata

SEQ ID NO: 46240 - DNA, 96 bp, Fusarium virguliforme
  misc_feature: 55
ggtatattattcttattattatataggctttagtttactagcttattagatttatataagctaggtattaagatactaaggttatattaacttata

SEQ ID NO: 46241 - DNA, 96 bp, Fusarium virguliforme
  misc_feature: 55
tataaaagcctctttctattatcttaataatcctattaaatatagcttattattctttattattatattttgtttttagctttactcctctttctt

SEQ ID NO: 46242 - DNA, 96 bp, Fusarium virguliforme
  misc_feature: 55
taccctattaaaccttacttaatttccctcctttaacctaaataatttaccttttcccctttattacctttttaaccctcttttttcttttttata

SEQ ID NO: 46243 - DNA, 96 bp, Fusarium virguliforme
  misc_feature: 55
tactctttttaatttattttattatttaaggtatcctttagtaccttaaaataccctttttaagcttatttcctttatagattattatctatacta

SEQ ID NO: 46244 - DNA, 96 bp, Fusarium virguliforme
  misc_feature: 55
tagtaaaaatatagtatatcttattataagtgactatagttaattaaaggttaactagatatagtatatatagtagcgtgaagagattaaaattag

SEQ ID NO: 46245 - DNA, 96 bp, Fusarium virguliforme
  misc_feature: 55
taggtgcttatatctccttttatatagtatatattactttagtatttctcgagattaatatagatattttatagagtcctctcttaattcctatat

SEQ ID NO: 46246 - DNA, 96 bp, Fusarium virguliforme
  misc_feature: 55
actatagttaccttacttaggtaattaatagctaatagctagaataataagctcttattactattaataggtataataataataattaagccccta

SEQ ID NO: 46247 - DNA, 96 bp, Fusarium virguliforme
  misc_feature: 55
gtgactatctaatagaattatagcttaggtattataatatccctactaatttctacggactaatataataaagccttaggtattatagtatcccta

SEQ ID NO: 46248 - DNA, 96 bp, Fusarium virguliforme
  misc_feature: 55
agataatatatcgctataaggagtatataatatataatatagctagctagcagtattaagataaattaataatattatagggtaataaggctccta

SEQ ID NO: 46249 - DNA, 96 bp, Fusarium virguliforme
  misc_feature: 55
aattttaaaattataataaagtaagttaatttatataattaggcgagggtaaaggtaataatatattaatcttaaggctaaatcttataatttcta

SEQ ID NO: 46250 - DNA, 96 bp, Fusarium virguliforme
  misc_feature: 55
atagaattaatattcttctctagctcttaaattaattttaatagctttttaataatctttataggctttaatatatctttaacttttaagaaagta

SEQ ID NO: 46251 - DNA, 96 bp, Fusarium virguliforme
  misc_feature: 55
taataatgagctactatagtcctatcgttaatataaataagcaggatatatatatctttatttaatccctttcttaatataattatatctaaagta

SEQ ID NO: 46252 - DNA, 96 bp, Fusarium virguliforme
  misc_feature: 55
tacttataataacttaaaaaaagctaggtttatatttagttatatagatattattaaggttaggtaagttattattaaagttaagtaagttattat

SEQ ID NO: 46253 - DNA, 96 bp, Fusarium virguliforme
  misc_feature: 55
tactaaaaataaatagctaaaggctaagttaaagctagataaagctaaaacttaaaggttttaaataaagatatttaaaactagataggaaatacc

SEQ ID NO: 46254 - DNA, 96 bp, Fusarium virguliforme
  misc_feature: 55
gtagtaaaaatatagtatatcttattataagtgactatagttaattaaaggttaactagatatagtatatatagtagcgtgaagagattaaaatta

SEQ ID NO: 46255 - DNA, 96 bp, Fusarium virguliforme
  misc_feature: 55
taatttcttattatattatatagctcctaatactatatatccggctttagtattatataaggtattataatatctcttcctaccctagtttaagtt

SEQ ID NO: 46256 - DNA, 96 bp, Fusarium virguliforme
  misc_feature: 55
taattaattatttaccttccttcctttattattattacctcctttttctatagcttaatcctttttaccttttaccgccggcttaatatcttcttt

SEQ ID NO: 46257 - DNA, 96 bp, Fusarium virguliforme
  misc_feature: 55
taataagggaaaaataatctagcttagttagtatttttatatagcttataattaactttaattacttttagttactttttaaatcttaaagtaatt

SEQ ID NO: 46258 - DNA, 96 bp, Fusarium virguliforme
  misc_feature: 55
taataaagttattcctaactttatctctttatattaatctttctatttgatatatctcactcttctttatattatctaatactatatcgacttact

SEQ ID NO: 46259 - DNA, 96 bp, Fusarium virguliforme
  misc_feature: 55
taataaaataccttaaagttaagggctttaataaagaggtaggcttaaattaaaataggggctttaataaaaagaaagggtaattaaataatatag

SEQ ID NO: 46260 - DNA, 96 bp, Fusarium virguliforme
  misc_feature: 55
taagggtctattctcgtctatatctatcttattaggtcttcttctatatctccctatctctatatctctataattatctaaaactttaaaaaaaat

SEQ ID NO: 46261 - DNA, 96 bp, Fusarium virguliforme
  misc_feature: 55
taagaaaaaggagtaaaagaaagagaagtaagaagagagagagaaagaggaaagggagaaagataagagaaagtaatatattctaatataggtaat

SEQ ID NO: 46262 - DNA, 96 bp, Fusarium virguliforme
  misc_feature: 55
aaggattaataaacctaatggttaaattaattaatgtacgataagataattaagcttaggtctaataaataataatattagagtagaataaggtta

SEQ ID NO: 46263 - DNA, 96 bp, Fusarium virguliforme
  misc_feature: 55
ctctttatctattaataaagactctaaatatttattaggtttattaattatttcgtggagctatatattaatattatagttttaagcataaattta

SEQ ID NO: 46264 - DNA, 96 bp, Fusarium virguliforme
  misc_feature: 55
taaattaaagttttaataaattaaaaggttaagggtaaagtagtaagggtatatatataggtaaaagtaaaataagtaattataaaagggtaaaat

SEQ ID NO: 46265 - DNA, 96 bp, Fusarium virguliforme
  misc_feature: 55
aatatatataaagaaaaagatataaaagagggaaaatgcggatattaaaaaagcattaattatctaatattaaggaagtttttttatatttattta

SEQ ID NO: 46266 - DNA, 96 bp, Fusarium virguliforme
  misc_feature: 55
atataaaaaaacttccttaatattagataattaatgcttttttaatatccgcattttccctcttttatatctttttctttatatatattaagttta

SEQ ID NO: 46267 - DNA, 96 bp, Fusarium virguliforme
  misc_feature: 55
taaaataagataatatagcgattaaatagctttttataagagctaaagtaaactaaaagaaataatataataaaaaaaaggataacttaattaagt

SEQ ID NO: 46268 - DNA, 96 bp, Fusarium virguliforme
  misc_feature: 55
gtttctttctaacttatagagttattttataatatatgcgattatttactagctttattatttttatctattatagtatttatattatattccttt

SEQ ID NO: 46269 - DNA, 96 bp, Fusarium virguliforme
  misc_feature: 55
aattaccctttagaaatttataaaagaccttataaagataaagatacctaaagaaggcttagatatagaagataaataaagatataattatattac

SEQ ID NO: 46270 - DNA, 96 bp, Fusarium virguliforme
  misc_feature: 55
gggtttaggaggatcttattaatccctattatatttagtctattattattaaggttaagtaatattatatttattactctataaccccttaaatag

SEQ ID NO: 46271 - DNA, 96 bp, Fusarium virguliforme
  misc_feature: 55
atataactatattaagggagagagcgaaaataaaaatagtaaatataataaagattaagagggggagagctatagataaaaaaaaagcttagcccc

SEQ ID NO: 46272 - DNA, 96 bp, Fusarium virguliforme
  misc_feature: 55
gggaggttatttataaaaaagaaaaaagagggttaaaaaggtaataaaggggaaaaggtaaattatttaggttaaaggagggaaattaagtaaggt

SEQ ID NO: 46273 - DNA, 96 bp, Fusarium virguliforme
  misc_feature: 55
ctcttttttttcttttttttcttttttttctttctttaattttatttacctctattatctacttttacctttatattactctttcttttttattcc

SEQ ID NO: 46274 - DNA, 96 bp, Fusarium virguliforme
  misc_feature: 55
ggaaataaagtaatctatctaattaaataattatagtattaaatattacctcttaatattaaaatacttactatagggcccccccttaaagaggct

SEQ ID NO: 46275 - DNA, 96 bp, Fusarium virguliforme
  misc_feature: 55
gccttattattaaaataataactaattattccttaataatataaggggatataataaatttaattagctaaatttatccttaatgaattatcctat

SEQ ID NO: 46276 - DNA, 96 bp, Fusarium virguliforme
  misc_feature: 55
gcattaaacttaatatatataaagaaaaagatataaaagagggaaaatgcggatattaaaaaagcattaattatctaatattaaggaagttttttt

SEQ ID NO: 46277 - DNA, 96 bp, Fusarium virguliforme
  misc_feature: 55
gagcgattaatatttaggcttaagatatttaataataccttattattaataatattaccgcttaaagtaaataatagataattagactttaaaatc

SEQ ID NO: 46278 - DNA, 96 bp, Fusarium virguliforme
  misc_feature: 55
gattcttttcctatccatttattttaattaaatatataaccctatttcttatataaagtaaaagactattaagtaaaataataatatcaagggctt

SEQ ID NO: 46279 - DNA, 96 bp, Fusarium virguliforme
  misc_feature: 55
gataatctctatataattatagaataaataactaactttaagagagtttaaaataaataagatcttaataatatctagaataacgtatatgataag

SEQ ID NO: 46280 - DNA, 96 bp, Fusarium virguliforme
  misc_feature: 55
cttttttttattacttactcttttattttacccttttataattacttattttacttttacctatatatatacccttactactttacccttaacctt

SEQ ID NO: 46281 - DNA, 96 bp, Fusarium virguliforme
  misc_feature: 55
aaaaaggtatttacttaattacttaagtaagtaatattattaattataaatatattaggccttaaaggtataattaaggtaaaactataaataaag

SEQ ID NO: 46282 - DNA, 96 bp, Fusarium virguliforme
  misc_feature: 55
aggaataaatagtattttataaattaattaataataaccaaaattatatctacttcttaatcccttaatataattaatagtagacctataataaag

SEQ ID NO: 46283 - DNA, 96 bp, Fusarium virguliforme
  misc_feature: 55
caaataatagtgagcgacatatagtaattattatacaagtaattatagagtgtataatagtagcttgaatataaatatataaatagtatcataaag

SEQ ID NO: 46284 - DNA, 96 bp, Fusarium virguliforme
  misc_feature: 55
ctttaagtatttactaattattaataattacaaaagctattattattatataagctctaaagaatatttaataggtaatcaatagagtaataaagg

SEQ ID NO: 46285 - DNA, 96 bp, Fusarium virguliforme
  misc_feature: 55
cttcctttctttattattataacctctcttttttataataaggtcctttttatactttaatatttattaaatattttatttagctcctaaaggtct

SEQ ID NO: 46286 - DNA, 96 bp, Fusarium virguliforme
  misc_feature: 55
aatttattattatttttagttttaatagaaacccttttttaagaccttattaatagcttatttaattagctatagctatattagccctattataag

SEQ ID NO: 46287 - DNA, 96 bp, Fusarium virguliforme
  misc_feature: 55
attaaatagatatattagattatatagctatatattccgccgttattaaagtcgcctatactatagttatatattaattatcctaagagaggtaag

SEQ ID NO: 46288 - DNA, 96 bp, Fusarium virguliforme
  misc_feature: 55
ctctttatttaatagcttactctttcctccctccctgccctaaatattactttacttctctcctagaccttagtgcttagtcttacctttctaatt

SEQ ID NO: 46289 - DNA, 96 bp, Fusarium virguliforme
  misc_feature: 55
aaatataataagaaacttttacttagataaatataatctaatatatttatagctatctttttatttaagtagctatatattagtattaaaggcgag

SEQ ID NO: 46290 - DNA, 96 bp, Fusarium virguliforme
  misc_feature: 55
ctagggagtactaaatatcaccgcgcttaatatatattatctaaaggcttaatattataatatataagtagaagcttaatattaatagctaaaggt

SEQ ID NO: 46291 - DNA, 96 bp, Fusarium virguliforme
  misc_feature: 55
atatttttttaagtttatattttaatcttttaattcttaattcttatttcttttccctttctttcctttcctttctttttctttttactagcctag

SEQ ID NO: 46292 - DNA, 96 bp, Fusarium virguliforme
  misc_feature: 55
ctaaagctcctatttaagtaaataatataaaaaataaagctatctctaaattattaataatacctcccttaatattattatcttaaatacctttat

SEQ ID NO: 46293 - DNA, 96 bp, Fusarium virguliforme
  misc_feature: 55
agggaggttatttataaaaaagaaaaaagagggttaaaaaggtaataaaggggaaaaggtaaattatttaggttaaaggagggaaattaagtaagg

SEQ ID NO: 46294 - DNA, 96 bp, Fusarium virguliforme
  misc_feature: 55
aaggggcttttaaaattaaatcttaaaggctcttataaaggtaataataataattacttttctaaaataatatctaaagtttaatattaccttagg

SEQ ID NO: 46295 - DNA, 96 bp, Fusarium virguliforme
  misc_feature: 55
attaatactatatatataataaggtaaagaggcattattattatacttactatatactatatagctatattaatagaataggaggctaaaaaaaat

SEQ ID NO: 46296 - DNA, 96 bp, Fusarium virguliforme
  misc_feature: 55
attgagcttattaataaataccttataggtattcttattagcgactagcttataataagtattattattattatttaagttcttagggttatagct

SEQ ID NO: 46297 - DNA, 96 bp, Fusarium virguliforme
  misc_feature: 55
actttaaatatattaagctcccgctaagtgcttaattatagcttaattaagttagtagctatttaattaatttattaataaggcttaagtaataat

SEQ ID NO: 46298 - DNA, 96 bp, Fusarium virguliforme
  misc_feature: 55
agattaaatctttcttattactttaagattatattatcttttacttattagagattcttaatataagagataggactattatatttattatataat

SEQ ID NO: 46299 - DNA, 96 bp, Fusarium virguliforme
  misc_feature: 55
actatataattttattatttagcactagaaggggaagataaacccggctaatatactattaagactattaagttatatcctcaatttagacctaat

SEQ ID NO: 46300 - DNA, 96 bp, Fusarium virguliforme
  misc_feature: 55
attagcctatatattaagagtaataaataatacgctctatatattatacctactatagatatctactatagcctttagctaaattattaaccttct

SEQ ID NO: 46301 - DNA, 96 bp, Fusarium virguliforme
  misc_feature: 55
aaattcaagtggtgtatatacttgcttagtgcatatgcttattatatacgttataaggttatattatagtttatctaggacttattatttatccat

SEQ ID NO: 46302 - DNA, 96 bp, Fusarium virguliforme
  misc_feature: 55
atctttttctcttttttttcttttttttcttttttttctttctttaattttatttacctctattatctacttttacctttatattactctttcttt

SEQ ID NO: 46303 - DNA, 96 bp, Fusarium virguliforme
  misc_feature: 55
atagtctttattatccttattattatttaagggttattttatagataggtaaagtttatttatttcttaccttctaggagtatttattatttttat

SEQ ID NO: 46304 - DNA, 96 bp, Fusarium virguliforme
  misc_feature: 55
aaatactcctagaaggtaagaaataaataaactttacctatctataaaataacccttaaataataataaggataataaagactattacgatagtat

SEQ ID NO: 46305 - DNA, 96 bp, Fusarium virguliforme
  misc_feature: 55
aggtattttagatcctaattatgcgcttctctttactttctttctctttctttaaagctttctagctctaatatttaattattttataattagtat

SEQ ID NO: 46306 - DNA, 96 bp, Fusarium virguliforme
  misc_feature: 55
aatagcttctaagaagtataataaagcctatatatataatagtaataaaagaaataggaataaaagcgagaaagagagataatatagcaaaggtat

SEQ ID NO: 46307 - DNA, 96 bp, Fusarium virguliforme
  misc_feature: 55
ataatatatcgctataaggagtatataatatataatatagctagctagcagtattaagataaattaataatattatagggtaataaggctcctact

SEQ ID NO: 46308 - DNA, 96 bp, Fusarium virguliforme
  misc_feature: 55
ataataaatagatttaaattaaaactctaaggctattaatataaaaaagagttaatttagtaacctaaaaaataacctaggtttattaatttaatt

SEQ ID NO: 46309 - DNA, 96 bp, Fusarium virguliforme
  misc_feature: 55
aaagatatataataatatacttattatcgttattaggtttactaaatatacttaatatatccctataataaagcgccttattagcgagggccttat

SEQ ID NO: 46310 - DNA, 96 bp, Fusarium virguliforme
  misc_feature: 55
aactaatcgttttattaatagtattatctaagagctcgccctatgggatcttaggtaagctaagcttagttagagattaatctaaaaactctttat

SEQ ID NO: 46311 - DNA, 96 bp, Fusarium virguliforme
  misc_feature: 55
agttaagaaagaggagtaaagctaaaaacaaaatataataataaagaataataagctatatttaataggattattaagataatagaaagaggcttt

SEQ ID NO: 46312 - DNA, 96 bp, Fusarium virguliforme
  misc_feature: 55
aagagctattaatatatattattatagccaggtcttttttattatatataacgctaattctattgcctatagctatattattagtattaataagct

SEQ ID NO: 46313 - DNA, 96 bp, Fusarium virguliforme
  misc_feature: 55
aatccctagctatacccttttatataattattatagattttattatagggatattagaaattttattagctaaatagccttagctatcttatagct

SEQ ID NO: 46314 - DNA, 96 bp, Fusarium virguliforme
  misc_feature: 55
agacgcaataagtaatagttaataaggtaaatagtaatataaaccggggatcttaatataatatagaatacctaaatacctatataataatatatt

SEQ ID NO: 46315 - DNA, 96 bp, Fusarium virguliforme
  misc_feature: 55
actttattatttaccttacttaaggccttttctatattattacctttttattattacgcctcttattatcttcttaagactttattatagcctatt

SEQ ID NO: 46316 - DNA, 96 bp, Fusarium virguliforme
  misc_feature: 55
aattatatctttatttatcttctatatctaagccttctttaggtatctttatctttataaggtcttttataaatttctaaagggtaatttcttctt

SEQ ID NO: 46317 - DNA, 96 bp, Fusarium virguliforme
  misc_feature: 55
aaacttaattaagttatccttttttttattatattatttcttttagtttactttagctcttataaaaagctatttaatcgctatattatcttattt

SEQ ID NO: 46318 - DNA, 96 bp, Fusarium virguliforme
  misc_feature: 54
tttttatagtaataaccgcgaggttattaattatttaagtattatttaggtattatttattttaaatgcactaagaattagctatttattctatag

SEQ ID NO: 46319 - DNA, 96 bp, Fusarium virguliforme
  misc_feature: 54
ttttctcttttttttcttttttttctttctttaattttatctacctctattatctacttttgcctttatattactctttcttctttattcctctct

SEQ ID NO: 46320 - DNA, 96 bp, Fusarium virguliforme
  misc_feature: 54
ttttatagtaataaccgcgaggttattaattatttaagtattatttaggtattatttattttaaatgcactaagaattagctatttattctatagt

SEQ ID NO: 46321 - DNA, 96 bp, Fusarium virguliforme
  misc_feature: 54
gatagtatatatatgataggataatatatataggagtataataatatatatctctatataaggaagagtaaataatcccttaagtatatagtaaaa

SEQ ID NO: 46322 - DNA, 96 bp, Fusarium virguliforme
  misc_feature: 54
aagagcgattaatatttaggcttaagatatttaataataccttattattaataatattaccgcttaaagtaaataatagataattagactttaaaa

SEQ ID NO: 46323 - DNA, 96 bp, Fusarium virguliforme
  misc_feature: 54
tttgggttatctatagctctaatttatttaaaagagagcataaatttaaaaataaaatagcggtaattaaggtaattaattaatatttctatatta

SEQ ID NO: 46324 - DNA, 96 bp, Fusarium virguliforme
  misc_feature: 54
tttcttttcttttctttcttttttccttatttttaccttttattactccctttttacccttcctataacttactatttactctcctacctttcctt

SEQ ID NO: 46325 - DNA, 96 bp, Fusarium virguliforme
  misc_feature: 54
tttctatttattatttataaaacgtgccgttatatatatattggtaagtatattaagtagcatataaagtaatattataggtctatttagataata

SEQ ID NO: 46326 - DNA, 96 bp, Fusarium virguliforme
  misc_feature: 54
tttattataaatagcttaacttaatggattatggtattattatagctatatgctatatagtaataacccttattaatatagtatattaagatcctt

SEQ ID NO: 46327 - DNA, 96 bp, Fusarium virguliforme
  misc_feature: 54
acttaagtttatatatttataaacattatataggtctagggctaataatataaatattatagctatattatatactttctccgcgatattaataaa

SEQ ID NO: 46328 - DNA, 96 bp, Fusarium virguliforme
  misc_feature: 54
tttatcttttatttttattacctgccttatagtctttaaagactatatttattttatcctttagtcttttatagttatataagaaaattaaattaa

SEQ ID NO: 46329 - DNA, 96 bp, Fusarium virguliforme
  misc_feature: 54
taagaatagtatcttatatattatttctactattagcgtaagtatatttaaagctaatatataaatataattatcgagctaagatatagggataaa

SEQ ID NO: 46330 - DNA, 96 bp, Fusarium virguliforme
  misc_feature: 54
tttataattacttaagaaactatttattaatattattattcatatttagaaccgttaggataatattaaattatcttagaaattattactaaagcc

SEQ ID NO: 46331 - DNA, 96 bp, Fusarium virguliforme
  misc_feature: 54
gttaagaatattaatattaataattattttatcagaagtaatactttagtaagttaatcttattaattattaatagttaatagttagaagattaaa

SEQ ID NO: 46332 - DNA, 96 bp, Fusarium virguliforme
  misc_feature: 54
tcttttttaagattaatataattagcttatatattaagctattaaaaaggaaaaattaaacctattaaagagggcgtaataaattaaggttaacaa

SEQ ID NO: 46333 - DNA, 96 bp, Fusarium virguliforme
  misc_feature: 54
ttgcgcttacctatattaactttaatataataagtaaataagtattatagtatctaccctaataagtaccttaagtatatagaatatatttattat

SEQ ID NO: 46334 - DNA, 96 bp, Fusarium virguliforme
  misc_feature: 54
ttcttttcttttctttcttttttccttatttttaccttttattactccctttttacccttcctataacttactatttactctcctacctttccttt

SEQ ID NO: 46335 - DNA, 96 bp, Fusarium virguliforme
  misc_feature: 54
agtaaagggtaaaagtaaggaaaaaagaaaagaaagaaagaaaaaaaagaaaagaaagaaagaaaagaaagaaaagaaagaaaaaaaaagaaagaa

SEQ ID NO: 46336 - DNA, 96 bp, Fusarium virguliforme
  misc_feature: 54
ttcttagactatctattactcttatttctttttatttaataccttcttttagtaatatcttatacctttttcctatatatatctgccttataatta

SEQ ID NO: 46337 - DNA, 96 bp, Fusarium virguliforme
  misc_feature: 54
acctaatcctcatggctaactgctaccttcctgacttcccgggttaaatgaaaaattcgccttttggcttagcgttagggttacggttacggggaa

SEQ ID NO: 46338 - DNA, 96 bp, Fusarium virguliforme
  misc_feature: 54
ttattattaaaataataactaattattccttaataatataaggggatataataaatttaattagctaaatttatccttaatgaattatcctataga

SEQ ID NO: 46339 - DNA, 96 bp, Fusarium virguliforme
  misc_feature: 54
ttacctagctctttttatacctttttatttttagctttattaataaataggaattaccctttaattattagatctaggagaccttttaatatataa

SEQ ID NO: 46340 - DNA, 96 bp, Fusarium virguliforme
  misc_feature: 54
accctattaaaccttacttaatttccctcctttaacctaaataatttaccttttcccctttattacctttttaaccctcttttttcttttttataa

SEQ ID NO: 46341 - DNA, 96 bp, Fusarium virguliforme
  misc_feature: 54
taagaaataaatttatttagggatctttatataactatctataatatatagcgcctaaggctagctatatatcttaatataatataaaatacctaa

SEQ ID NO: 46342 - DNA, 96 bp, Fusarium virguliforme
  misc_feature: 54
cttttattacctctcttctatattttatcgctattattctagatatttttaatatctaagatatataggtttagttatatagacctcggtccctaa

SEQ ID NO: 46343 - DNA, 96 bp, Fusarium virguliforme
  misc_feature: 54
ttagatatagctttagtatatagttaaatacctttacagcttaaagtatataatatatatacccttatagctatttatattagagatattatagga

SEQ ID NO: 46344 - DNA, 96 bp, Fusarium virguliforme
  misc_feature: 54
agctaggagacctaatagctaaaaaataaccctaaatagatagatactaaagtaagctaaataatagatataaactaaagaatatatcgatattaa

SEQ ID NO: 46345 - DNA, 96 bp, Fusarium virguliforme
  misc_feature: 54
ttaatatatataaagaaaaagatataaaagagggaaaatgcggatattaaaaaagcattaattatctaatattaaggaagtttttttatatttatt

SEQ ID NO: 46346 - DNA, 96 bp, Fusarium virguliforme
  misc_feature: 54
ctaatttattaatacccttacttaaataagaggaataaaactagaaataaagtataataataaggaataataggctacccttaatagaattattaa

SEQ ID NO: 46347 - DNA, 96 bp, Fusarium virguliforme
  misc_feature: 54
gggaagaataataggtaaataattatatatacttataatcgattttattatcctcttaatatattaataaagcgctaataaaagatagctacttaa

SEQ ID NO: 46348 - DNA, 96 bp, Fusarium virguliforme
  misc_feature: 54
ttaagagaatagtaatactaaagaattaatactttaagctataataataaattacctaaaaaatagaaatagttttattatttaattttataacct

SEQ ID NO: 46349 - DNA, 96 bp, Fusarium virguliforme
  misc_feature: 54
ttaaatttatgcttaaaactataatattaatatatagctccacgaaataattaataaacctaataaatatttagagtctttattaatagataaaga

SEQ ID NO: 46350 - DNA, 96 bp, Fusarium virguliforme
  misc_feature: 54
tatataggctaatatctagctattaagctctatcgcaatattaacttaaatgactcctatagtatatacttagtgatataactataaaataaatca

SEQ ID NO: 46351 - DNA, 96 bp, Fusarium virguliforme
  misc_feature: 54
tcttttaatatttatatacttagtctttaatttattatagtatcgtaatatattccgcgatatattataccttaattagcttagtagttaggatat

SEQ ID NO: 46352 - DNA, 96 bp, Fusarium virguliforme
  misc_feature: 54
gatatagtattagataatataaagaagagtgagatatatcaaatagaaagattaatataaagagataaagttaggaataactttattagataaaga

SEQ ID NO: 46353 - DNA, 96 bp, Fusarium virguliforme
  misc_feature: 54
tctttacaataacctaaaactatatatataacccgctataaagatttataatatctattatattattctttatagtcgccttaatagtattcctac

SEQ ID NO: 46354 - DNA, 96 bp, Fusarium virguliforme
  misc_feature: 54
tcttaaggtagggtaataattattaattaatctaccgctagattaagtaattagctatttatttaatattaacctattatatttaattaccgctta

SEQ ID NO: 46355 - DNA, 96 bp, Fusarium virguliforme
  misc_feature: 54
tctcttaactctattgatattatatagtgctaggatatctatttatagtctaggtattacttatagctctatttattatacctaagtgggagccct

SEQ ID NO: 46356 - DNA, 96 bp, Fusarium virguliforme
  misc_feature: 54
gagtttattgataaataaataactaatcgttttattaatagtattatctaagagctcgccctatgggatcttaggtaagctaagcttagttagaga

SEQ ID NO: 46357 - DNA, 96 bp, Fusarium virguliforme
  misc_feature: 54
tctaattaattatttaccttccttcctttattattattacctcctttttctatagcttaatcctttttaccttttaccgccggcttaatatcttct

SEQ ID NO: 46358 - DNA, 96 bp, Fusarium virguliforme
  misc_feature: 54
tattttttattttttattattcctaggctagttagatatatatattagtgctattattctagtagtatattccttattcgtcggtctaaatattat

SEQ ID NO: 46359 - DNA, 96 bp, Fusarium virguliforme
  misc_feature: 54
tatttcctatagctactttccttaatatataacctatatctataattatcctgccgtctaatataatattaaaatctaaagctatatataattata

SEQ ID NO: 46360 - DNA, 96 bp, Fusarium virguliforme
  misc_feature: 54
tattgagcttattaataaataccttataggtattcttattagcgactagcttataataagtattattattattatttaagttcttagggttatagc

SEQ ID NO: 46361 - DNA, 96 bp, Fusarium virguliforme
  misc_feature: 54
acggagacgcaataagtaatagttaataaggtaaatagtaatataaaccggggatcttaatataatatagaatacctaaatacctatataataata

SEQ ID NO: 46362 - DNA, 96 bp, Fusarium virguliforme
  misc_feature: 54
tattatgtctcttttttagttatttcccttttatttcttatatttctttttatctctccttaaaaaaaatctcccctcctatcttaatactatatc

SEQ ID NO: 46363 - DNA, 96 bp, Fusarium virguliforme
  misc_feature: 54
tattaatagcttctaagaagtataataaagcctatatatataatagtaataaaagaaataggaataaaagcgagaaagagagataatatagcaaag

SEQ ID NO: 46364 - DNA, 96 bp, Fusarium virguliforme
  misc_feature: 54
tatctttctttctttttttttctttcttttctttcttttctttctttcttttcttttttttctttctttcttttcttttttccttacttttaccct

SEQ ID NO: 46365 - DNA, 96 bp, Fusarium virguliforme
  misc_feature: 54
cttatatcctaagggtaagatttatatattaatataaagaagtaacgctacctactatataagccgttattaataataataatatactttaatata

SEQ ID NO: 46366 - DNA, 96 bp, Fusarium virguliforme
  misc_feature: 54
atattacctagctctttttatacctttttatttttagctttattaataaataggaattaccctttaattattagatctaggagaccttttaatata

SEQ ID NO: 46367 - DNA, 96 bp, Fusarium virguliforme
  misc_feature: 54
tatatattaagctggaatcctatatagtaagctcttaagacttattaagatacttaaggttaattttaagctaattaaatatttaattaattaatt

SEQ ID NO: 46368 - DNA, 96 bp, Fusarium virguliforme
  misc_feature: 54
tatatatattacttctagttctttattatatagtactcctttaattactttatactttatattattattattctcttatcctagcgctctaataat

SEQ ID NO: 46369 - DNA, 96 bp, Fusarium virguliforme
  misc_feature: 54
taattaataaagctagtctataattataaagcttataagctaagataatataatctatatacttaatagccttatacctaaagaataagctatata

SEQ ID NO: 46370 - DNA, 96 bp, Fusarium virguliforme
  misc_feature: 54
tatatacccttactactttacccttaaccttttaatttattaaaactttaatttactttaccttctctttacctttacctatttttttaattatta

SEQ ID NO: 46371 - DNA, 96 bp, Fusarium virguliforme
  misc_feature: 54
tatactatatttttactactttaggtcttttaggctatctattaatttctactttagatttattatatttatagttatatacccggaaatactact

SEQ ID NO: 46372 - DNA, 96 bp, Fusarium virguliforme
  misc_feature: 54
tataatatatcgcgaattactttatataattaacttacttatagcttatataaccttaatttaaggtcctatatatttatcttattgttatagact

SEQ ID NO: 46373 - DNA, 96 bp, Fusarium virguliforme
  misc_feature: 54
tataataattaaggttaaaataaatataagatcgcataatagatccttaaggtaatctattaaataataatataccgcataataataagatagtat

SEQ ID NO: 46374 - DNA, 96 bp, Fusarium virguliforme
  misc_feature: 54
ggctctagagcttaactcccctatagaaggaagaatatattatatattaagaatattattaaagtatagctatacctaaagcccatattctaccta

SEQ ID NO: 46375 - DNA, 96 bp, Fusarium virguliforme
  misc_feature: 54
aactaggtataaaataccaatattttaaggccggctttaatagcgttattaggcttatgataaagtcctaagtccgaggttacgtgacttacccta

SEQ ID NO: 46376 - DNA, 96 bp, Fusarium virguliforme
  misc_feature: 54
ctctttacaataacctaaaactatatatataacccgctataaagatttataatatctattatattattctttatagtcgccttaatagtattccta

SEQ ID NO: 46377 - DNA, 96 bp, Fusarium virguliforme
  misc_feature: 54
tagctttagtatatagttaaatacctttacagcttaaagtatataatatatatacccttatagctatttatattagagatattataggagtatact

SEQ ID NO: 46378 - DNA, 96 bp, Fusarium virguliforme
  misc_feature: 54
aaaaattcgcaataaattaactatataaatttaggtaataaaatttcgactaataaatagctataattatattgcattagagataaaagagatcta

SEQ ID NO: 46379 - DNA, 96 bp, Fusarium virguliforme
  misc_feature: 54
tacttttattacctctcttctatattttatcgctattattctagatatttttaatatctaagatatataggtttagttatatagacctcggtccct

SEQ ID NO: 46380 - DNA, 96 bp, Fusarium virguliforme
  misc_feature: 54
tactataatatttatttattaatttagattttataatctttggtctatagttattattctcgctttatttattattagatttccttaagcttttat

SEQ ID NO: 46381 - DNA, 96 bp, Fusarium virguliforme
  misc_feature: 54
tactataacttattatattttaactctaggtatttaatattactagtatatttattaagctattagtatttatagtcaaggtatttaatttatatt

SEQ ID NO: 46382 - DNA, 96 bp, Fusarium virguliforme
  misc_feature: 54
taattaaattatttttctttttattatattatttcttttagtttacttaagcttttataagaagctatttagttattactttactttattttatta

SEQ ID NO: 46383 - DNA, 96 bp, Fusarium virguliforme
  misc_feature: 54
taatatatataaagaaaaagatataaaagagggaaaatgcggatattaaaaaagcattaattatctaatattaaggaagtttttttatatttattt

SEQ ID NO: 46384 - DNA, 96 bp, Fusarium virguliforme
  misc_feature: 54
ggactctataaaatatctatattagtctcgagaaatactaaagtaatatatattatataaaaggagatataagtacttaaactcctctttatatta

SEQ ID NO: 46385 - DNA, 96 bp, Fusarium virguliforme
  misc_feature: 54
taaggaaggagaaagtaaaatataatattacctatagttaatattatccctagtttatattattatttaccttattaactattacttattgcgtct

SEQ ID NO: 46386 - DNA, 96 bp, Fusarium virguliforme
  misc_feature: 54
taaggaaatctaaagtaatactctacttatttaatatacttactgagctatatataatagttattatagcgatagcgctatatatagtttactact

SEQ ID NO: 46387 - DNA, 96 bp, Fusarium virguliforme
  misc_feature: 54
taagagatttaagaagggaaggtttaagaagggaaagggaaaggtaataagcctaagaataaataagtaataaaagggagctttagattagccttt

SEQ ID NO: 46388 - DNA, 96 bp, Fusarium virguliforme
  misc_feature: 54
aggaggagtttaggtatttatatctccttttatatagtatatattactttagtatttcttgagattaatatagatattttatggagtcctctctta

SEQ ID NO: 46389 - DNA, 96 bp, Fusarium virguliforme
  misc_feature: 54
aactctaggtatttaatattactagtatatttattaagctattagtatttatagtcaaggtatttaatttatattataagcttatcttatttctta

SEQ ID NO: 46390 - DNA, 96 bp, Fusarium virguliforme
  misc_feature: 54
taaatataaaaaaacttccttaatattagataattaatgcttttttaatatccgcattttccctcttttatatctttttctttatatatattaagt

SEQ ID NO: 46391 - DNA, 96 bp, Fusarium virguliforme
  misc_feature: 54
aattaattacctaccttcctttctttattattataacctctcttttttataataaggtcctttttatactttaatatttattaaatattttattta

SEQ ID NO: 46392 - DNA, 96 bp, Fusarium virguliforme
  misc_feature: 54
actaaagctcctatttaagtaaataatataaaaaataaagctatctctaaattattaataatacctcccttaatattattatcttaaataccttta

SEQ ID NO: 46393 - DNA, 96 bp, Fusarium virguliforme
  misc_feature: 54
aagggaaaatatatatataataaataaagcaagaattaaggctattataacttattacctacctatatatagctatatagtagcttaacctcttta

SEQ ID NO: 46394 - DNA, 96 bp, Fusarium virguliforme
  misc_feature: 54
cttaagtcttttctattattatattactcttaagataagggattattattttatttttaagatatagcttataattaaggataaaagatagtttta

SEQ ID NO: 46395 - DNA, 96 bp, Fusarium virguliforme
  misc_feature: 54
gtttttagattaatctctaactaagcttagcttacctaagatcccatagggcgagctcttagataatactattaataaaacgattagttatttatt

SEQ ID NO: 46396 - DNA, 96 bp, Fusarium virguliforme
  misc_feature: 54
gttatttataaaaggcttatttacactgtgattttttagttgtttatttctttaaagttaattaggttttttaaaaacttaaaaaaattactatat

SEQ ID NO: 46397 - DNA, 96 bp, Fusarium virguliforme
  misc_feature: 54
ctttaaatcgaccttaaaactagctaatttttaaattaacctaaaaactagctaattattaaattaaccttaaaactagtggatctttaaattaac

SEQ ID NO: 46398 - DNA, 96 bp, Fusarium virguliforme
  misc_feature: 54
gttaaatttatgcttaaaactataatattaatatatagctccacgaaataattaataaacctaataaatatttagagtctttattaatagataaag

SEQ ID NO: 46399 - DNA, 96 bp, Fusarium virguliforme
  misc_feature: 54
atataagattattatttattttttaaaaactcttaggcttaatttaagcttatattataaggatataatatagctgacgctgcatttatttaagac

SEQ ID NO: 46400 - DNA, 96 bp, Fusarium virguliforme
  misc_feature: 54
ggtaaggaataaatagtattttataaattaattaataataaccaaaattatatctacttcttaatcccttaatataattaatagtagacctataat

SEQ ID NO: 46401 - DNA, 96 bp, Fusarium virguliforme
  misc_feature: 54
ggtaaagtatcccctattaagggattaatattaaataataatatagcttcactatacttagcctatacctctatataaatactataaattatctag

SEQ ID NO: 46402 - DNA, 96 bp, Fusarium virguliforme
  misc_feature: 54
aagctttataatttatatcgccttttcctaattaataatctactctttttaatttattttattatttaaggtatcctttagtaccttaaaataccc

SEQ ID NO: 46403 - DNA, 96 bp, Fusarium virguliforme
  misc_feature: 54
aagtgactatctaatagaattatagcttaggtattataatatccctactaatttctacggactaatataataaagccttaggtattatagtatccc

SEQ ID NO: 46404 - DNA, 96 bp, Fusarium virguliforme
  misc_feature: 54
ggatatttataataaagcttaaagaagctatagaataataaattagctatatagctatctaattatataacttataagaggttaagaaaaacttag

SEQ ID NO: 46405 - DNA, 96 bp, Fusarium virguliforme
  misc_feature: 54
gaagtgactatctaatagaattatagcttaggtattataatatccctactaatttctacggactaatataataaagccttaggtattatagtatcc

SEQ ID NO: 46406 - DNA, 96 bp, Fusarium virguliforme
  misc_feature: 54
atttattacttaatatagattttttaagatagattaaattaatagcttaatctttattaagccttttttactttccttttattcttaatattatcc

SEQ ID NO: 46407 - DNA, 96 bp, Fusarium virguliforme
  misc_feature: 54
ctataactatagttaccttacttaggtaattaatagctaatagctagaataataagctcttattactattaataggtataataataataattaagc

SEQ ID NO: 46408 - DNA, 96 bp, Fusarium virguliforme
  misc_feature: 54
gcgaagtttacctacctcttaccttttaagagtatttattattcctattattcctttagttagtattttcctttagcgatattatataccttcttc

SEQ ID NO: 46409 - DNA, 96 bp, Fusarium virguliforme
  misc_feature: 54
agggttttcttattttattagttctaggagaagttattattatatatcttaggttttctttagttatttctttatttatcttacctaactataggc

SEQ ID NO: 46410 - DNA, 96 bp, Fusarium virguliforme
  misc_feature: 54
atagcgggtttcccttaagggtatataagcttcttatgatttaatatcgtaatatagctaatagaggaatctagaatattttaattaattaggggc

SEQ ID NO: 46411 - DNA, 96 bp, Fusarium virguliforme
  misc_feature: 54
atatatattacttctagttctttattatatagtactcctttaattactttatactttatattattattattctcttatcctagcgctctaataatc

SEQ ID NO: 46412 - DNA, 96 bp, Fusarium virguliforme
  misc_feature: 54
gataataataataacgataataataataataataacgataataataaggcgatagataataagggcataatagctctataatataaagcgcttaat

SEQ ID NO: 46413 - DNA, 96 bp, Fusarium virguliforme
  misc_feature: 54
gagtgattataatttcctatagggcttatagtattatacctttattttcgcgtataagttatattatagtttatctaggatttattatttatttat

SEQ ID NO: 46414 - DNA, 96 bp, Fusarium virguliforme
  misc_feature: 54
ctatattacttaattcccgactatatatctataagaataattatatgccggagttataaagtaattatatctatagctatattagataaagtcctc

SEQ ID NO: 46415 - DNA, 96 bp, Fusarium virguliforme
  misc_feature: 54
aatagtgattttaataatgatcccttatttattagtctagatattatagtccttactctatatctattagtaatatttagtattttattatatctc

SEQ ID NO: 46416 - DNA, 96 bp, Fusarium virguliforme
  misc_feature: 54
gagataactctttagcgataaattattatatgttatatttattagcttctagactatattttctataatatctcgcttattattataaagtctaat

SEQ ID NO: 46417 - DNA, 96 bp, Fusarium virguliforme
  misc_feature: 54
gaataataattaaaaaaataggtaaaggtaaagagaaggtaaagtaaattaaagttttaataaattaaaaggttaagggtaaagtagtaagggtat

SEQ ID NO: 46418 - DNA, 96 bp, Fusarium virguliforme
  misc_feature: 54
gaaattttaaaattataataaagtaagttaatttatataattaggcgagggtaaaggtaataatatattaatcttaaggctaaatcttataatttc

SEQ ID NO: 46419 - DNA, 96 bp, Fusarium virguliforme
  misc_feature: 54
gaaaggattaataaacctaatggttaaattaattaatgtacgataagataattaagcttaggtctaataaataataatattagagtagaataaggt

SEQ ID NO: 46420 - DNA, 96 bp, Fusarium virguliforme
  misc_feature: 54
gaaaatacttattattatcctaatacttagtattaataccctatttagtatatatataaggagtattatattagactggaaatttaagttaaaggt

SEQ ID NO: 46421 - DNA, 96 bp, Fusarium virguliforme
  misc_feature: 54
agtaataaaaccatacgctacgctataataaatattaataaaagcaaaatcaataattctaaactaaataaaggcagagctctaaaataaaaaaag

SEQ ID NO: 46422 - DNA, 96 bp, Fusarium virguliforme
  misc_feature: 54
atttattatttataaaacgtgccgttatatatatattggtaagtatattaagtagcatataaagtaatattataggtctatttagataataaaaag

SEQ ID NO: 46423 - DNA, 96 bp, Fusarium virguliforme
  misc_feature: 54
cttttcctatccatttattttaattaaatatataaccctatttcttatataaagtaaaagactattaagtaaaataataatatcaagggcttaaag

SEQ ID NO: 46424 - DNA, 96 bp, Fusarium virguliforme
  misc_feature: 54
aggttttcctagggttttataatttttattatcgctttatttatatttatttaagggtaatataattacttataggtttattaaaaggaataaaag

SEQ ID NO: 46425 - DNA, 96 bp, Fusarium virguliforme
  misc_feature: 54
ctttcttttcttttctttcttttttccttatttttaccttttattactccctttttacccttcctataacttactatttactctcctacctttcct

SEQ ID NO: 46426 - DNA, 96 bp, Fusarium virguliforme
  misc_feature: 54
ctttatactatcgtaatagtctttattatccttattattatttaagggttattttatagataggtaaagtttatttatttcttaccttctaggagt

SEQ ID NO: 46427 - DNA, 96 bp, Fusarium virguliforme
  misc_feature: 54
ctttaccctattaaaccttacttaatttccctcctttaacctaaataatttaccttttcccctttattacctttttaaccctcttttttctttttt

SEQ ID NO: 46428 - DNA, 96 bp, Fusarium virguliforme
  misc_feature: 54
ctaataaattaaataaggctagattcctaatataataagttaaaggttaagaattataggttaattaaatcgataattaagttatttaagttaaag

SEQ ID NO: 46429 - DNA, 96 bp, Fusarium virguliforme
  misc_feature: 54
cttatcggtctagatattatagtctttattctatatttattagtgctacttagtattttattatatctccttaagttcctattatatttattatat

SEQ ID NO: 46430 - DNA, 96 bp, Fusarium virguliforme
  misc_feature: 54
cttagattaagaggtctctatatctattaaggctatattatctatatagtctattactataaggctaaaggctctattaattaagaatttattatt

SEQ ID NO: 46431 - DNA, 96 bp, Fusarium virguliforme
  misc_feature: 54
aagggctataaggctaataaatactataagaagtaataagatattaaggaaggatattattaatagaagctataataaaacctcctagaaggtaag

SEQ ID NO: 46432 - DNA, 96 bp, Fusarium virguliforme
  misc_feature: 54
ataaaataagataatatagcgattaaatagctttttataagagctaaagtaaactaaaagaaataatataataaaaaaaaggataacttaattaag

SEQ ID NO: 46433 - DNA, 96 bp, Fusarium virguliforme
  misc_feature: 54
cttaagccttttctttactttttagctctttttgctctttttgctctttttctttgttatcgctattttccttctttaattacttaattaggctat

SEQ ID NO: 46434 - DNA, 96 bp, Fusarium virguliforme
  misc_feature: 54
ccttagtaataatactatatagattatatagcggctaaataataataaagctacttagtataattataagcctaataaagtttataccttcttaag

SEQ ID NO: 46435 - DNA, 96 bp, Fusarium virguliforme
  misc_feature: 54
ccctataatataatattatatcgtttatatatatagaggataaagtcctatattattttatatttaagattttagtgcgaggttatcgcgagatag

SEQ ID NO: 46436 - DNA, 96 bp, Fusarium virguliforme
  misc_feature: 54
ctatccatttattttaattaaatatataaccctatttcttatataaagtaaaagactattaagtaaaataataatatcaagggcttaaagttatat

SEQ ID NO: 46437 - DNA, 96 bp, Fusarium virguliforme
  misc_feature: 54
ctatatatatctactccttattataactactaacttctatattatctagctttatattatccttatactatagactagggttaaatttctaatctt

SEQ ID NO: 46438 - DNA, 96 bp, Fusarium virguliforme
  misc_feature: 54
aattaggtctaaattgaggatataacttaatagtcttaatagtatattagccgggtttatcttccccttctagtgctaaataataaaattatatag

SEQ ID NO: 46439 - DNA, 96 bp, Fusarium virguliforme
  misc_feature: 54
cgctatttatttttatactttagtctatttattatagcttattgcggcatttttatttttattatttataggttttattatattctcgtaatactt

SEQ ID NO: 46440 - DNA, 96 bp, Fusarium virguliforme
  misc_feature: 54
ataaataattaagggcggctattatctaggttagcttatatttatcctcttaattatttattaaagccttatccttataattagtaagttatagcg

SEQ ID NO: 46441 - DNA, 96 bp, Fusarium virguliforme
  misc_feature: 54
cctagggagtactaaatatcaccgcgcttaatatatattatctaaaggcttaatattataatatataagtagaagcttaatattaatagctaaagg

SEQ ID NO: 46442 - DNA, 96 bp, Fusarium virguliforme
  misc_feature: 54
agaaaatacttattattatcctaatacttagtattaataccctatttagtatatatataaggagtattatattagactggaaatttaagttaaagg

SEQ ID NO: 46443 - DNA, 96 bp, Fusarium virguliforme
  misc_feature: 54
ccttcaaaagaagtatatatattaattagaatctcttagtctattatatagtatattagagggggttattatattatagaagcttaaggctttagt

SEQ ID NO: 46444 - DNA, 96 bp, Fusarium virguliforme
  misc_feature: 54
caataggtaaagtttatttatttcttattttcttagactatctattactcttatttctttttatttaataccttcttttagtaatatcttatacct

SEQ ID NO: 46445 - DNA, 96 bp, Fusarium virguliforme
  misc_feature: 54
atttttttaaatcctatatatctagctctagagttattataataataataaaggacctttaattttaatactttttattttaggataataaattat

SEQ ID NO: 46446 - DNA, 96 bp, Fusarium virguliforme
  misc_feature: 54
aaaatataatatttaagaggaaagaattaatatataaaagctataataagcaataagatactaagatataagatctatagtaggggggtttaaaat

SEQ ID NO: 46447 - DNA, 96 bp, Fusarium virguliforme
  misc_feature: 54
atttataaagtcccttttatattataaggtcttttataaatataaagagagagagtcccctatataatactttatataatagagagccttctatat

SEQ ID NO: 46448 - DNA, 96 bp, Fusarium virguliforme
  misc_feature: 54
aagttaagggctttaataaagaggtaggcttaaattaaaataggggctttaataaaaagaaagggtaattaaataatatagacttttagcttaaat

SEQ ID NO: 46449 - DNA, 96 bp, Fusarium virguliforme
  misc_feature: 54
aaggagccctttaataggcctttaaaattattaacgaaaaagtataagctaaataaaagattaaggcacttaaataaaactaatctaccttcgaat

SEQ ID NO: 46450 - DNA, 96 bp, Fusarium virguliforme
  misc_feature: 54
ataatatagggtgagggatttttatcccgcttatttatttatcccacttgtttattatatacgttataatttattatttatcctagacttaataat

SEQ ID NO: 46451 - DNA, 96 bp, Fusarium virguliforme
  misc_feature: 54
agattaaactatctctaatatataaattaataataacttacgactaaagccttaagcttctataatataataaccccctctaatatactatataat

SEQ ID NO: 46452 - DNA, 96 bp, Fusarium virguliforme
  misc_feature: 54
atagttattattatattattaaattcgccgggaaaaataattattcatcctattacttaagttatttattaaagaatcccctatagggggtataat

SEQ ID NO: 46453 - DNA, 96 bp, Fusarium virguliforme
  misc_feature: 54
attagatatccctaaggataaattagatatccctaaggataaattaaatatccctaataataaattaaataccttaatagaagataatacctctat

SEQ ID NO: 46454 - DNA, 96 bp, Fusarium virguliforme
  misc_feature: 54
actattaggatattactttattattaatatataggctatacctaatatatctatctatagtagccctattaatatttattagggaggatctttaat

SEQ ID NO: 46455 - DNA, 96 bp, Fusarium virguliforme
  misc_feature: 54
aatatagggtgagggatttttatcccgcttatttatttatcccacttgtttattatatacgttataatttattatttatcctagacttaataatat

SEQ ID NO: 46456 - DNA, 96 bp, Fusarium virguliforme
  misc_feature: 54
accgcgaatataaagacctaccttctaaataaacctaataattaaaattcctttaaataaacctatatcttaaagataataatagaataaatatat

SEQ ID NO: 46457 - DNA, 96 bp, Fusarium virguliforme
  misc_feature: 54
atataattatatctttatttatcttctatatctaagccttctttaggtatctttatctttataaggtcttttataaatttctaaagggtaatttct

SEQ ID NO: 46458 - DNA, 96 bp, Fusarium virguliforme
  misc_feature: 54
aggaaatctaaagtaatactctacttatttaatatacttactgagctatatataatagttattatagcgatagcgctatatatagtttactactat

SEQ ID NO: 46459 - DNA, 96 bp, Fusarium virguliforme
  misc_feature: 54
accctaaatagcgattaagagtatctagctaatatatatataacttataagagacccttatatctatttaattatactatatattcttaaggctat

SEQ ID NO: 46460 - DNA, 96 bp, Fusarium virguliforme
  misc_feature: 54
ataaataaaatataatatcgcttatagactatactataaagaacgtatatataaggttatattacccctaataagaggatatattaatattattat

SEQ ID NO: 46461 - DNA, 96 bp, Fusarium virguliforme
  misc_feature: 54
aataaaaccatacgctacgctataataaatattaataaaagcaaaatcaataattctaaactaaataaaggcagagctctaaaataaaaaaagact

SEQ ID NO: 46462 - DNA, 96 bp, Fusarium virguliforme
  misc_feature: 54
aggctctagagcttaactcccctatagaaggaagaatatattatatattaagaatattattaaagtatagctatacctaaagcccatattctacct

SEQ ID NO: 46463 - DNA, 96 bp, Fusarium virguliforme
  misc_feature: 54
agcgtataactactacgccacgggggtaagtatataataatataagacttataatataagagtttacttcgcgaaaggtatatataatattagcct

SEQ ID NO: 46464 - DNA, 96 bp, Fusarium virguliforme
  misc_feature: 54
agcttattatacttaatataagcattatatatttcctagcttagctagactactataagatagcgccttattaataatatttaatattaatacttt

SEQ ID NO: 46465 - DNA, 96 bp, Fusarium virguliforme
  misc_feature: 54
agaatatcgggatatatctataataggatataatcgggtatatctatatataagataaggttagttatataatcttataataaatagacctaagct

SEQ ID NO: 46466 - DNA, 96 bp, Fusarium virguliforme
  misc_feature: 54
agaggttagaggagagggagcaagagttacttaagttattatattatattaataccgaaagacgctagaaatattattaatatttatttaattctt

SEQ ID NO: 46467 - DNA, 96 bp, Fusarium virguliforme
  misc_feature: 54
agaggcttagatatagctttagtatatagttaaatacctttacagcttaaagtatataatatatatacccttatagctatttatattagagatatt

SEQ ID NO: 46468 - DNA, 96 bp, Fusarium virguliforme
  misc_feature: 54
aatagataattccaataataataataataataacgcttctatttataaatctatctctataaccgctatatataccgtagctatagagcctattct

SEQ ID NO: 46469 - DNA, 96 bp, Fusarium virguliforme
  misc_feature: 54
aataatttagctaaaggctatagtagatatctatagtaggtataatatatagagcgtattatttattactcttaatatataggctaatagaggagt

SEQ ID NO: 46470 - DNA, 96 bp, Fusarium virguliforme
  misc_feature: 54
actataatatttatttattaatttagattttataatctttggtctatagttattattctcgctttatttattattagatttccttaagcttttatt

SEQ ID NO: 46471 - DNA, 96 bp, Fusarium virguliforme
  misc_feature: 54
aaaaaaataaagtataaagaaaaaggaatataataaaaagagctaattatagaaaatatagagagtaattaacgataaggcggagaagatcgcggt

SEQ ID NO: 46472 - DNA, 96 bp, Fusarium virguliforme
  misc_feature: 54
aagtttttcttaacctcttataagttatataattagatagctatatagctaatttattattctatagcttctttaagctttattataaatatcctt

SEQ ID NO: 46473 - DNA, 96 bp, Fusarium virguliforme
  misc_feature: 53
ttttaggctttagtaataatttctaagataatttaatattatcctaacggttctaaatatgaataataatattaataaatagtttcttaagtaatt

SEQ ID NO: 46474 - DNA, 96 bp, Fusarium virguliforme
  misc_feature: 53
atagataagtaataggttaattaaaatataaaggcgaaaatagaaaataaaaatagaggtataagatagcttagaattaaagagtaaaaagtaaaa

SEQ ID NO: 46475 - DNA, 96 bp, Fusarium virguliforme
  misc_feature: 53
atttcttttagctatattaattaataatcgtaatctatctgccttatatcttattaatttagggttattatattaccgataaaccctttcttaaaa

SEQ ID NO: 46476 - DNA, 96 bp, Fusarium virguliforme
  misc_feature: 53
ttattaatagcttctaagaagtataataaagcctatatatataatagtaataaaagaaataggaataaaagcgagaaagagagataatatagcaaa

SEQ ID NO: 46477 - DNA, 96 bp, Fusarium virguliforme
  misc_feature: 53
tttctttctaacttatagagttattttataatatatgcgattatttactagctttattatttttatctattatagtatttatattatattccttta

SEQ ID NO: 46478 - DNA, 96 bp, Fusarium virguliforme
  misc_feature: 53
tttctttaattttatttacctctattatctacttttacctttatattactctttcttttttattcctctcttttacttctatattatctatcttac

SEQ ID NO: 46479 - DNA, 96 bp, Fusarium virguliforme
  misc_feature: 53
tttctttaaagaagatatatccttcttctttctttaaagaagatatatccttcttctttaaagaagatatatactctcttcttcttttaaagaaga

SEQ ID NO: 46480 - DNA, 96 bp, Fusarium virguliforme
  misc_feature: 53
ctattctctatagatattataaagacggtaaagatagtaatagtaatgataatgataataataatgataataataatagaagtagggaagaagaaa

SEQ ID NO: 46481 - DNA, 96 bp, Fusarium virguliforme
  misc_feature: 53
tttataattatatatagctttagattttaatattatattagacggcaggataattatagatataggttatatattaaggaaagtagctataggaaa

SEQ ID NO: 46482 - DNA, 96 bp, Fusarium virguliforme
  misc_feature: 53
aaggaataaatagtattttataaattaattaataataaccaaaattatatctacttcttaatcccttaatataattaatagtagacctataataaa

SEQ ID NO: 46483 - DNA, 96 bp, Fusarium virguliforme
  misc_feature: 53
aagagggttaaaaaggtaataaaggggaaaaggtaaattatttaggttaaaggagggaaattaagtaaggtttaatagggtaaagaagtaattaaa

SEQ ID NO: 46484 - DNA, 96 bp, Fusarium virguliforme
  misc_feature: 53
tttaaaggagccctttaataggcctttaaaattattaacgaaaaagtataagctaaataaaagattaaggcacttaaataaaactaatctaccttc

SEQ ID NO: 46485 - DNA, 96 bp, Fusarium virguliforme
  misc_feature: 53
ttctttctaacttatagagttattttataatatatgcgattatttactagctttattatttttatctattatagtatttatattatattcctttag

SEQ ID NO: 46486 - DNA, 96 bp, Fusarium virguliforme
  misc_feature: 53
ttctatttattatttataaaacgtgccgttatatatatattggtaagtatattaagtagcatataaagtaatattataggtctatttagataataa

SEQ ID NO: 46487 - DNA, 96 bp, Fusarium virguliforme
  misc_feature: 53
cttactatagatccctagactattatacgctttagctattatactatatatagtatctcggtatatagtatcttactatagtatcttattatagaa

SEQ ID NO: 46488 - DNA, 96 bp, Fusarium virguliforme
  misc_feature: 53
aaaggagccctttaataggcctttaaaattattaacgaaaaagtataagctaaataaaagattaaggcacttaaataaaactaatctaccttcgaa

SEQ ID NO: 46489 - DNA, 96 bp, Fusarium virguliforme
  misc_feature: 53
ttcctttctttattattataacctctcttttttataataaggtcctttttatactttaatatttattaaatattttatttagctcctaaaggtctt

SEQ ID NO: 46490 - DNA, 96 bp, Fusarium virguliforme
  misc_feature: 53
atactataagattatattataaggtagcggctataaatatatttattagttctagtagctatatataatagtaaatagttagtatatagaccggaa

SEQ ID NO: 46491 - DNA, 96 bp, Fusarium virguliforme
  misc_feature: 53
ttattatttatttatttttaggcttattacctttctctttttctttttaaaccttcccttcttaaatctcttattaaaattaagtagagaagttta

SEQ ID NO: 46492 - DNA, 96 bp, Fusarium virguliforme
  misc_feature: 53
ttatcttagaccttatattatatttctttatttatgaacctatatattatatataactatgaatttagctaaaattattttaattaaatatatctt

SEQ ID NO: 46493 - DNA, 96 bp, Fusarium virguliforme
  misc_feature: 53
ttatcctatttaaggggttatagagtaataaatataatattacttaaccttaataataatagactaaatataatagggattaataagatcctccta

SEQ ID NO: 46494 - DNA, 96 bp, Fusarium virguliforme
  misc_feature: 53
aaggctagacctataataatctatagatataagagtatagctatatatatttaacgtatataataagcaagtgggatagataagtaagcgggataa

SEQ ID NO: 46495 - DNA, 96 bp, Fusarium virguliforme
  misc_feature: 53
agataatctctatataattatagaataaataactaactttaagagagtttaaaataaataagatcttaataatatctagaataacgtatatgataa

SEQ ID NO: 46496 - DNA, 96 bp, Fusarium virguliforme
  misc_feature: 53
ttatattaggcttttagcgagcgatttactttattattatagctttattattatctatataagctcttttattggttataaaaggctattaccttt

SEQ ID NO: 46497 - DNA, 96 bp, Fusarium virguliforme
  misc_feature: 53
aagggggcattataagatagctatatagaataaggaaggtacctataaggatataaagtaataggaagtatatatagaagaaggtttcaactataa

SEQ ID NO: 46498 - DNA, 96 bp, Fusarium virguliforme
  misc_feature: 53
tatagtaatagataaagtaaagaataggtaattctatataaagcaagagtatttaatataaggagtaaggtaatagtattatataatatattataa

SEQ ID NO: 46499 - DNA, 96 bp, Fusarium virguliforme
  misc_feature: 53
ttaggatattactttattattaatatataggctatacctaatatatctatctatagtagccctattaatatttattagggaggatctttaatatta

SEQ ID NO: 46500 - DNA, 96 bp, Fusarium virguliforme
  misc_feature: 53
gtcctttgttatggccgtgataaaaagtagagataaaattaaagaaaaattaaagagcctaaaatataaggtagctatataattatagctagctaa

SEQ ID NO: 46501 - DNA, 96 bp, Fusarium virguliforme
  misc_feature: 53
ttagcctatatattaagagtaataaataatacgctctatatattatacctactatagatatctactatagcctttagctaaattattaaccttcta

SEQ ID NO: 46502 - DNA, 96 bp, Fusarium virguliforme
  misc_feature: 53
tagtattatattataattaaaagacttaacaaagtattccttataatatatatattaagtaagctagataaataagtaagctagataaataagtaa

SEQ ID NO: 46503 - DNA, 96 bp, Fusarium virguliforme
  misc_feature: 53
ttactaactctagtatataagcctttagattaacttaagcctctttttaataagcttattttacgccttttaagttaccttttattaattagctta

SEQ ID NO: 46504 - DNA, 96 bp, Fusarium virguliforme
  misc_feature: 53
ttactaaagctcctatttaagtaaataatataaaaaataaagctatctctaaattattaataatacctcccttaatattattatcttaaatacctt

SEQ ID NO: 46505 - DNA, 96 bp, Fusarium virguliforme
  misc_feature: 53
aattaaatagatatattagattatatagctatatattccgccgttattaaagtcgcctatactatagttatatattaattatcctaagagaggtaa

SEQ ID NO: 46506 - DNA, 96 bp, Fusarium virguliforme
  misc_feature: 53
tatccctttacgctttattattattatcctatttacttccctcggcctatttattataaggtaagaaggtatatattatctaattaaaagtattaa

SEQ ID NO: 46507 - DNA, 96 bp, Fusarium virguliforme
  misc_feature: 53
ggctatttaagaggtatttaagaggatataaaacgctaaattttatattaagctattaaaatataccttttattaaaaataaatagagttccttaa

SEQ ID NO: 46508 - DNA, 96 bp, Fusarium virguliforme
  misc_feature: 53
ttaagatatatttaattaaaataattttagctaaattcatagttatatataatatataggttcataaataaagaaatataatataaggtctaagat

SEQ ID NO: 46509 - DNA, 96 bp, Fusarium virguliforme
  misc_feature: 53
actctaggtatttaatattactagtatatttattaagctattagtatttatagtcaaggtatttaatttatattataagcttatcttatttcttaa

SEQ ID NO: 46510 - DNA, 96 bp, Fusarium virguliforme
  misc_feature: 53
agaattattaaatatattccttaatactgccctataatataatattatatcgtttatatatatagaggataaagtcctatattattttatatttaa

SEQ ID NO: 46511 - DNA, 96 bp, Fusarium virguliforme
  misc_feature: 53
ttaaatagggtttataccgcttattattaggctatattacttataattaggttctatattttatattaacctctttataaccttaattaaggaata

SEQ ID NO: 46512 - DNA, 96 bp, Fusarium virguliforme
  misc_feature: 53
ttaaagttttaaattatatcaataataattaccacttaaggaggaaatttaatataatttaattatacttaatacccttaaatatattactagata

SEQ ID NO: 46513 - DNA, 96 bp, Fusarium virguliforme
  misc_feature: 53
ttaaaggagccctttaataggcctttaaaattattaacgaaaaagtataagctaaataaaagattaaggcacttaaataaaactaatctaccttcg

SEQ ID NO: 46514 - DNA, 96 bp, Fusarium virguliforme
  misc_feature: 53
aactattaggatattactttattattaatatataggctatacctaatatatctatctatagtagccctattaatatttattagggaggatctttaa

SEQ ID NO: 46515 - DNA, 96 bp, Fusarium virguliforme
  misc_feature: 53
cgaggataagctagcccctattatatagtatattataggtatataaggctcttaccctcctattatatattttatttcttcttcttcctcttttaa

SEQ ID NO: 46516 - DNA, 96 bp, Fusarium virguliforme
  misc_feature: 53
ctcttttttaagattaatataattagcttatatattaagctattaaaaaggaaaaattaaacctattaaagagggcgtaataaattaaggttaaca

SEQ ID NO: 46517 - DNA, 96 bp, Fusarium virguliforme
  misc_feature: 53
gaaattcaagtggtgtatatacttgcttagtgcatatgcttattatatacgttataaggttatattatagtttatctaggacttattatttatcca

SEQ ID NO: 46518 - DNA, 96 bp, Fusarium virguliforme
  misc_feature: 53
gaggaataaagaagaaagagtaatataaaggcaaaagtagataatagaggtagataaaattaaagaaagaaaaaaaagaaaaaaaagagaaaaaga

SEQ ID NO: 46519 - DNA, 96 bp, Fusarium virguliforme
  misc_feature: 53
tagtaaagggtaaaagtaaggaaaaaagaaaagaaagaaagaaaaaaaagaaaagaaagaaagaaaagaaagaaaagaaagaaaaaaaaagaaaga

SEQ ID NO: 46520 - DNA, 96 bp, Fusarium virguliforme
  misc_feature: 53
tctctatttactagaaaaataatctattttagctatttatagctataaccttaatatatataaagggtattatatactaacgcatataatatatat

SEQ ID NO: 46521 - DNA, 96 bp, Fusarium virguliforme
  misc_feature: 53
attagctaaaagtagtttaagtgggggtaaggatagataagaagataaaggaaggaaagggggtaaaaaggataaaagggagttattaaggggaga

SEQ ID NO: 46522 - DNA, 96 bp, Fusarium virguliforme
  misc_feature: 53
gtttttattttttttaaagttttagataattatagagatatagagatagggagatatagaagaagacctaataagatagatatagacgagaataga

SEQ ID NO: 46523 - DNA, 96 bp, Fusarium virguliforme
  misc_feature: 53
attcgataattaggttaaagataatatatagatatattatacggctatatagactaagttagtatattatatatattataccgagaaaatactaga

SEQ ID NO: 46524 - DNA, 96 bp, Fusarium virguliforme
  misc_feature: 53
atagtattttataaattaattaataataaccaaaattatatctacttcttaatcccttaatataattaatagtagacctataataaagtctatcga

SEQ ID NO: 46525 - DNA, 96 bp, Fusarium virguliforme
  misc_feature: 53
aatactataagattatattataaggtagcggctataaatatatttattagttctagtagctatatataatagtaaatagttagtatatagaccgga

SEQ ID NO: 46526 - DNA, 96 bp, Fusarium virguliforme
  misc_feature: 53
atttaacctatatagcccttaagctatcgtcctataatatcttttgaatgacctagcctttacttacgcctctattatattagaagagtttattga

SEQ ID NO: 46527 - DNA, 96 bp, Fusarium virguliforme
  misc_feature: 53
tatttttttaagtttatattttaatcttttaattcttaattcttatttcttttccctttctttcctttcctttctttttctttttactagcctagc

SEQ ID NO: 46528 - DNA, 96 bp, Fusarium virguliforme
  misc_feature: 53
aaattaaagttttaataaattaaaaggttaagggtaaagtagtaagggtatatatataggtaaaagtaaaataagtaattataaaagggtaaaata

SEQ ID NO: 46529 - DNA, 96 bp, Fusarium virguliforme
  misc_feature: 53
tatttattacttaatatagattttttaagatagattaaattaatagcttaatctttattaagccttttttactttccttttattcttaatattatc

SEQ ID NO: 46530 - DNA, 96 bp, Fusarium virguliforme
  misc_feature: 53
tatttattaaaaaaaggattattttaattatatttacttatatacgcttattaggctaatataaatattcttcttataaagagtatatatatccct

SEQ ID NO: 46531 - DNA, 96 bp, Fusarium virguliforme
  misc_feature: 53
taaactttagatattattttagaaaagtaattattattattacctttataagagcctttaagatttaattttaaaagccccttttaatactaaata

SEQ ID NO: 46532 - DNA, 96 bp, Fusarium virguliforme
  misc_feature: 53
agttaagggctttaataaagaggtaggcttaaattaaaataggggctttaataaaaagaaagggtaattaaataatatagacttttagcttaaata

SEQ ID NO: 46533 - DNA, 96 bp, Fusarium virguliforme
  misc_feature: 53
aaagttaatagaaagaggtaaaagagctagaggtaggtataatagagataaggaagagagtattaagagagaagtatcttaatatactaatgaata

SEQ ID NO: 46534 - DNA, 96 bp, Fusarium virguliforme
  misc_feature: 53
tattatttaagtaatatataataaatatatcgaggtaatgtatataataagcaagtgggaagttatgtgagtgggatagttttccatttcctagta

SEQ ID NO: 46535 - DNA, 96 bp, Fusarium virguliforme
  misc_feature: 53
cctaattatagagttaacttaattaataactattaactatattactatatatacctattttatagtaataagactaagactaaaagtataataata

SEQ ID NO: 46536 - DNA, 96 bp, Fusarium virguliforme
  misc_feature: 53
aacactaaactattatctagatatagagaactactatagtaataatagctatacccttaatatataatatccgctaatatactatagaagataata

SEQ ID NO: 46537 - DNA, 96 bp, Fusarium virguliforme
  misc_feature: 53
tattatcttaataatcctattaaatatagcttattattctttattattatattttgtttttagctttactcctctttcttaactaagcatattaat

SEQ ID NO: 46538 - DNA, 96 bp, Fusarium virguliforme
  misc_feature: 53
ataaataacttaaatacctcattatatattactactatatatttatgcttaaattatataagagtgatataataaggtagagaattataattaata

SEQ ID NO: 46539 - DNA, 96 bp, Fusarium virguliforme
  misc_feature: 53
agtaatcttacttctttttcttatatagatatattttacccctatagtctatatataagatctagataaccttataatattataggtatcttaata

SEQ ID NO: 46540 - DNA, 96 bp, Fusarium virguliforme
  misc_feature: 53
tattaaagatataattaaattaaaatataggaataagagctataataataagcttacttaaattacttacttatataatatagcttataataaagc

SEQ ID NO: 46541 - DNA, 96 bp, Fusarium virguliforme
  misc_feature: 53
tagtagtcttactaaaaataaatagctaaaggctaagttaaagctagataaagctaaaacttaaaggttttaaataaagatatttaaaactagata

SEQ ID NO: 46542 - DNA, 96 bp, Fusarium virguliforme
  misc_feature: 53
tatatttttttaagtttatattttaatcttttaattcttaattcttatttcttttccctttctttcctttcctttctttttctttttactagccta

SEQ ID NO: 46543 - DNA, 96 bp, Fusarium virguliforme
  misc_feature: 53
agtttatatatttataaacattatataggtctagggctaataatataaatattatagctatattatatactttctccgcgatattaataaaatata

SEQ ID NO: 46544 - DNA, 96 bp, Fusarium virguliforme
  misc_feature: 53
tatatgctttttattctcgtaattatcgttattatattataggacctagttcgacctagtgcgctgaatgcgtaaaggcttattagagatataagc

SEQ ID NO: 46545 - DNA, 96 bp, Fusarium virguliforme
  misc_feature: 53
tatatctagtaatatatttaagggtattaagtataattaaattatattaaatttcctccttaagtggtaattattattgatataatttaaaacttt

SEQ ID NO: 46546 - DNA, 96 bp, Fusarium virguliforme
  misc_feature: 53
aattaagtctataacaataagataaatatataggaccttaaattaaggttatataagctataagtaagttaattatataaagtaattcgcgatata

SEQ ID NO: 46547 - DNA, 96 bp, Fusarium virguliforme
  misc_feature: 53
gcatacgggggagagagtaaggagataagataataggaggcggcatagatataataatagcgataaataagatgctaagatatttattaatatata

SEQ ID NO: 46548 - DNA, 96 bp, Fusarium virguliforme
  misc_feature: 53
aggtgcttatatctccttttatatagtatatattactttagtatttctcgagattaatatagatattttatagagtcctctcttaattcctatata

SEQ ID NO: 46549 - DNA, 96 bp, Fusarium virguliforme
  misc_feature: 53
agatatccctaaggataaattagatatccctaaggataaattaaatatccctaataataaattaaataccttaatagaagataatacctctatata

SEQ ID NO: 46550 - DNA, 96 bp, Fusarium virguliforme
  misc_feature: 53
tatagttagatttatgcctaaaactataatattaatatatagctccgcgaaataattaataaacctaataaatacttaaagtctctattaataaat

SEQ ID NO: 46551 - DNA, 96 bp, Fusarium virguliforme
  misc_feature: 53
tatagtctagatttattatagctactttatattatagcgatagtatttattatttatatcgctatttaggagttattttataaagagatgaagttt

SEQ ID NO: 46552 - DNA, 96 bp, Fusarium virguliforme
  misc_feature: 53
tatagcttattgcggcatttttatttttattatttataggttttattatattctcgtaatactttagtttagtattataggtataggttacagtta

SEQ ID NO: 46553 - DNA, 96 bp, Fusarium virguliforme
  misc_feature: 53
tatagcttattctttaggtataaggctattaagtatatagattatattatcttagcttataagctttataattatagactagctttattaattatc

SEQ ID NO: 46554 - DNA, 96 bp, Fusarium virguliforme
  misc_feature: 53
tatagaggactttatctaatatagctatagatataattactttataactccggcatataattattcttatagatatatagtcgggaattaagtaat

SEQ ID NO: 46555 - DNA, 96 bp, Fusarium virguliforme
  misc_feature: 53
ggtattttagatcctaattatgcgcttctctttactttctttctctttctttaaagctttctagctctaatatttaattattttataattagtata

SEQ ID NO: 46556 - DNA, 96 bp, Fusarium virguliforme
  misc_feature: 53
aagatatataataatatacttattatcgttattaggtttactaaatatacttaatatatccctataataaagcgccttattagcgagggccttata

SEQ ID NO: 46557 - DNA, 96 bp, Fusarium virguliforme
  misc_feature: 53
tataaccctaagaacttaaataataataataatacttattataagctagtcgctaataagaatacctataaggtatttattaataagctcaataag

SEQ ID NO: 46558 - DNA, 96 bp, Fusarium virguliforme
  misc_feature: 53
tagttctaagcgatgtaattggctaattagcgatatctagagtaacgtacatgacaagcgagtggatcagacaagtgaatggattagttttactgt

SEQ ID NO: 46559 - DNA, 96 bp, Fusarium virguliforme
  misc_feature: 53
tagtctttttacttactataataatagatatagataacccgatataagtgccttattagcctatattaatataataatataaatcactagaaaggt

SEQ ID NO: 46560 - DNA, 96 bp, Fusarium virguliforme
  misc_feature: 53
acttttattacctctcttctatattttatcgctattattctagatatttttaatatctaagatatataggtttagttatatagacctcggtcccta

SEQ ID NO: 46561 - DNA, 96 bp, Fusarium virguliforme
  misc_feature: 53
tagcgattttaaagtctaattatctattatttactttaagcggtaatattattaataataaggtattattaaatatcttaagcctaaatattaatc

SEQ ID NO: 46562 - DNA, 96 bp, Fusarium virguliforme
  misc_feature: 53
tagcgaggataagctagcccctattatatagtatattataggtatataaggctcttaccctcctattatatattttatttcttcttcttcctcttt

SEQ ID NO: 46563 - DNA, 96 bp, Fusarium virguliforme
  misc_feature: 53
tagatatataccctataatcgcgagctaataaaataatattaatactatattttaattaggtagcgaaaaagataaagataataataagctctcta

SEQ ID NO: 46564 - DNA, 96 bp, Fusarium virguliforme
  misc_feature: 53
gggtaaagtatcccctattaagggattaatattaaataataatatagcttcactatacttagcctatacctctatataaatactataaattatcta

SEQ ID NO: 46565 - DNA, 96 bp, Fusarium virguliforme
  misc_feature: 53
tagactatctattactcttatttctttttatttaataccttcttttagtaatatcttatacctttttcctatatatatctgccttataattaagct

SEQ ID NO: 46566 - DNA, 96 bp, Fusarium virguliforme
  misc_feature: 53
tagaagaagataaagctagtaatagtaatagcgatagcggggtaaaggaagttaataaccttaataagcctagtgggcctattattaatagaggta

SEQ ID NO: 46567 - DNA, 96 bp, Fusarium virguliforme
  misc_feature: 53
aagtatagctcttaatctcgattaattcctagactttatatcttaagggagtagaagtcgataataagggttagtaatacctagggaggataagta

SEQ ID NO: 46568 - DNA, 96 bp, Fusarium virguliforme
  misc_feature: 53
aagctcctttttattatttatttatttttaggcttattacctttctctttttctttttaaaccttcccttcttaaatctcttattaaaattaagta

SEQ ID NO: 46569 - DNA, 96 bp, Fusarium virguliforme
  misc_feature: 53
tactaaagctcctatttaagtaaataatataaaaaataaagctatctctaaattattaataatacctcccttaatattattatcttaaataccttt

SEQ ID NO: 46570 - DNA, 96 bp, Fusarium virguliforme
  misc_feature: 53
aaaatacttattattatcctaatacttagtattaataccctatttagtatatatataaggagtattatattagactggaaatttaagttaaaggta

SEQ ID NO: 46571 - DNA, 96 bp, Fusarium virguliforme
  misc_feature: 53
agaaaggtaagatagataatatagaagtaaaagagaggaataaaaaagaaagagtaatataaaggtaaaagtagataatagaggtaaataaaatta

SEQ ID NO: 46572 - DNA, 96 bp, Fusarium virguliforme
  misc_feature: 53
attcccgactatatatctataagaataattatatgccggagttataaagtaattatatctatagctatattagataaagtcctctatataaaatta

SEQ ID NO: 46573 - DNA, 96 bp, Fusarium virguliforme
  misc_feature: 53
taataaaataagataatatagcgattaaatagctttttataagagctaaagtaaactaaaagaaataatataataaaaaaaaggataacttaatta

SEQ ID NO: 46574 - DNA, 96 bp, Fusarium virguliforme
  misc_feature: 53
taataaataaaataatattattaaaatcctcacctaaccctaataataattaatttaccttatttaaaatccttaatgcctagagatcctatatta

SEQ ID NO: 46575 - DNA, 96 bp, Fusarium virguliforme
  misc_feature: 53
aaattaccctttagaaatttataaaagaccttataaagataaagatacctaaagaaggcttagatatagaagataaataaagatataattatatta

SEQ ID NO: 46576 - DNA, 96 bp, Fusarium virguliforme
  misc_feature: 53
accttaataataacttacttaactttaataataacttacctaaccttaataatatctatataactaaatataaacctagctttttttaagttatta

SEQ ID NO: 46577 - DNA, 96 bp, Fusarium virguliforme
  misc_feature: 53
aaagctcctatttaagtaaataatataaaaaataaagctatctctaaattattaataatacctcccttaatattattatcttaaatacctttatta

SEQ ID NO: 46578 - DNA, 96 bp, Fusarium virguliforme
  misc_feature: 53
taaggccctcgctaataaggcgctttattatagggatatattaagtatatttagtaaacctaataacgataataagtatattattatatatctttc

SEQ ID NO: 46579 - DNA, 96 bp, Fusarium virguliforme
  misc_feature: 53
aggctatttaagaggtatttaagaggatataaaacgctaaattttatattaagctattaaaatataccttttattaaaaataaatagagttcctta

SEQ ID NO: 46580 - DNA, 96 bp, Fusarium virguliforme
  misc_feature: 53
agagatataagagagagtctaataaaattaagattaattaaggataattataagataaaggaaaatatttaagagaggtttaagcttattagctta

SEQ ID NO: 46581 - DNA, 96 bp, Fusarium virguliforme
  misc_feature: 53
taagagctcgataaatagataattaagaatcaaaagggggtaatatataattaattaaaggggtaatataaagctatagctaaggaaattagctat

SEQ ID NO: 46582 - DNA, 96 bp, Fusarium virguliforme
  misc_feature: 53
taagaatattaatattaataattattttatcagaagtaatactttagtaagttaatcttattaattattaatagttaatagttagaagattaaact

SEQ ID NO: 46583 - DNA, 96 bp, Fusarium virguliforme
  misc_feature: 53
aaatacctaataatataaataatataagccttagtaataaacttaatatttaagtaaaaagaaaggtaaggcgataatctataattaagatattta

SEQ ID NO: 46584 - DNA, 96 bp, Fusarium virguliforme
  misc_feature: 53
taaatatatatattatatgcgttagtatataataccctttatatatattaaggttatagctataaatagctaaaatagattatttttctagtaaat

SEQ ID NO: 46585 - DNA, 96 bp, Fusarium virguliforme
  misc_feature: 53
taaataataataaattcttaattaatagagcctttagccttatagtaatagactatatagataatatagccttaatagatatagagacctcttaat

SEQ ID NO: 46586 - DNA, 96 bp, Fusarium virguliforme
  misc_feature: 53
atatctagtaatatatttaagggtattaagtataattaaattatattaaatttcctccttaagtggtaattattattgatataatttaaaacttta

SEQ ID NO: 46587 - DNA, 96 bp, Fusarium virguliforme
  misc_feature: 53
ggtatagctaatatagctatttagatctaataagctagctaagcttactaagatagatagatataataaataactaaatatatactcttaccttta

SEQ ID NO: 46588 - DNA, 96 bp, Fusarium virguliforme
  misc_feature: 53
taaagggtaaaagtaaggaaaaaagaaaagaaagaaagaaaaaaaagaaaagaaagaaagaaaagaaagaaaagaaagaaaaaaaaagaaagaaag

SEQ ID NO: 46589 - DNA, 96 bp, Fusarium virguliforme
  misc_feature: 53
cctttctttattattataacctctcttttttataataaggtcctttttatactttaatatttattaaatattttatttagctcctaaaggtcttta

SEQ ID NO: 46590 - DNA, 96 bp, Fusarium virguliforme
  misc_feature: 53
taaaaggggcttttaaaattaaatcttaaaggctcttataaaggtaataataataattacttttctaaaataatatctaaagtttaatattacctt

SEQ ID NO: 46591 - DNA, 96 bp, Fusarium virguliforme
  misc_feature: 53
aatagtctttattatccttattattatttaagggttattttatagataggtaaagtttatttatttcttaccttctaggagtatttattattttta

SEQ ID NO: 46592 - DNA, 96 bp, Fusarium virguliforme
  misc_feature: 53
taaaaagctttatatctttttctcttttttttcttttttttctttctttaattttatctacctctattatctacttttgcctttatattactcttt

SEQ ID NO: 46593 - DNA, 96 bp, Fusarium virguliforme
  misc_feature: 53
ataagctcggtcataaggtaaatatatataagaaaaagatataaaatatcgcaaaaggaaaatattaacctaaaaggtactaagaataatagtcac

SEQ ID NO: 46594 - DNA, 96 bp, Fusarium virguliforme
  misc_feature: 53
ataaaataccttaaagttaagggctttaataaagaggtaggcttaaattaaaataggggctttaataaaaagaaagggtaattaaataatatagac

SEQ ID NO: 46595 - DNA, 96 bp, Fusarium virguliforme
  misc_feature: 53
gtctaaatgttatagtctttatcctatatctattagtatcgcttaatattttattatatctatcgtttatgatgatcgtattaaagttagattgac

SEQ ID NO: 46596 - DNA, 96 bp, Fusarium virguliforme
  misc_feature: 53
acactaaactattatctagatatagagaactactatagtaataatagctatacccttaatatataatatccgctaatatactatagaagataatac

SEQ ID NO: 46597 - DNA, 96 bp, Fusarium virguliforme
  misc_feature: 53
ctatagtctaatgaaggataaaataaggggggaaataataggtaagtaaaatataaataaataaggaaggaattagataaaggagagttagtctac

SEQ ID NO: 46598 - DNA, 96 bp, Fusarium virguliforme
  misc_feature: 53
gaatgcgagtttaactatattagctatataatagtaaaaaactagataccttatttaatatagggtaatagatagataaatataaaaagatattac

SEQ ID NO: 46599 - DNA, 96 bp, Fusarium virguliforme
  misc_feature: 53
aagattaaagatatatatcggcataaggatataattatatctatattttatctaggcgtcgataatataatcggtcattagtctctcgctatttac

SEQ ID NO: 46600 - DNA, 96 bp, Fusarium virguliforme
  misc_feature: 53
ggtttaggaggatcttattaatccctattatatttagtctattattattaaggttaagtaatattatatttattactctataaccccttaaatagg

SEQ ID NO: 46601 - DNA, 96 bp, Fusarium virguliforme
  misc_feature: 53
ccttactaaagctcctatttaagtaaataatataaaaaataaagctatctctaaattattaataatacctcccttaatattattatcttaaatacc

SEQ ID NO: 46602 - DNA, 96 bp, Fusarium virguliforme
  misc_feature: 53
ggtataagatattactaaaagaaggtattaaataaaaagaaataagagtaatagatagtctaagaaaataagaaataaataaactttacctattgg

SEQ ID NO: 46603 - DNA, 96 bp, Fusarium virguliforme
  misc_feature: 53
aatgcgagtttaactatattagctatataatagtaaaaaactagataccttatttaatatagggtaatagatagataaatataaaaagatattacc

SEQ ID NO: 46604 - DNA, 96 bp, Fusarium virguliforme
  misc_feature: 53
agatatttatataatctatataaaggcgctatagtattactataataataagagtctatataggagttatatctactagagagcttataataaccc

SEQ ID NO: 46605 - DNA, 96 bp, Fusarium virguliforme
  misc_feature: 53
attcctataaggaatatcggtctcttcttctcttcctcctatagcctcttcttcttttcctcctttagccttctcctctcttcctttaatatcccc

SEQ ID NO: 46606 - DNA, 96 bp, Fusarium virguliforme
  misc_feature: 53
attctcttaactctattgatattatatagtgctaggatatctatttatagtctaggtattacttatagctctatttattatacctaagtgggagcc

SEQ ID NO: 46607 - DNA, 96 bp, Fusarium virguliforme
  misc_feature: 53
ggagccctttaataggcctttaaaattattaacgaaaaagtataagctaaataaaagattaaggcacttaaataaaactaatctaccttcgaatat

SEQ ID NO: 46608 - DNA, 96 bp, Fusarium virguliforme
  misc_feature: 53
gctttaagtatttactaattattaataattacaaaagctattattattatataagctctaaagaatatttaataggtaatcaatagagtaataaag

SEQ ID NO: 46609 - DNA, 96 bp, Fusarium virguliforme
  misc_feature: 53
gcttagttaagaaagaggagtaaagctaaaaacaaaatataataataaagaataataagctatatttaataggattattaagataatagaaagagg

SEQ ID NO: 46610 - DNA, 96 bp, Fusarium virguliforme
  misc_feature: 53
gctctatattacttaattcccgactatatatctataagaataattatatgccggagttataaagtaattatatctatagctatattagataaagtc

SEQ ID NO: 46611 - DNA, 96 bp, Fusarium virguliforme
  misc_feature: 53
gcgctatttatttttatactttagtctatttattatagcttattgcggcatttttatttttattatttataggttttattatattctcgtaatact

SEQ ID NO: 46612 - DNA, 96 bp, Fusarium virguliforme
  misc_feature: 53
aggaaataaagtaatctatctaattaaataattatagtattaaatattacctcttaatattaaaatacttactatagggcccccccttaaagaggc

SEQ ID NO: 46613 - DNA, 96 bp, Fusarium virguliforme
  misc_feature: 53
gatttaacctatatagcccttaagctatcgtcctataatatcttttgaatgacctagcctttacttacgcctctattatattagaagagtttattg

SEQ ID NO: 46614 - DNA, 96 bp, Fusarium virguliforme
  misc_feature: 53
aagaaaaaggagtaaaagaaagagaagtaagaagagagagagaaagaggaaagggagaaagataagagaaagtaatatattctaatataggtaatc

SEQ ID NO: 46615 - DNA, 96 bp, Fusarium virguliforme
  misc_feature: 53
aggtgaactattaggatattactttattattaatatataggctatacctaatatatctatctatagtagccctattaatatttattagggaggatc

SEQ ID NO: 46616 - DNA, 96 bp, Fusarium virguliforme
  misc_feature: 53
gatatttataataaagcttaaagaagctatagaataataaattagctatatagctatctaattatataacttataagaggttaagaaaaacttagt

SEQ ID NO: 46617 - DNA, 96 bp, Fusarium virguliforme
  misc_feature: 53
gatagggctcccacttaggtataataaatagagctataagtaatacctagactataaatagatatcctagcactatataatatcaatagagttaag

SEQ ID NO: 46618 - DNA, 96 bp, Fusarium virguliforme
  misc_feature: 53
gaattattaaatatattccttaatactgccctataatataatattatatcgtttatatatatagaggataaagtcctatattattttatatttaag

SEQ ID NO: 46619 - DNA, 96 bp, Fusarium virguliforme
  misc_feature: 53
ataaagttattcctaactttatctctttatattaatctttctatttgatatatctcactcttctttatattatctaatactatatcgacttacttc

SEQ ID NO: 46620 - DNA, 96 bp, Fusarium virguliforme
  misc_feature: 53
aaagaagatataactttcttctttctttaaagaagatatattcttctttcttcaaagaggatatctctcttctactttaaagaagatataaccttc

SEQ ID NO: 46621 - DNA, 96 bp, Fusarium virguliforme
  misc_feature: 53
aagcctctttaagggggggccctatagtaagtattttaatattaagaggtaatatttaatactataattatttaattagatagattactttatttc

SEQ ID NO: 46622 - DNA, 96 bp, Fusarium virguliforme
  misc_feature: 53
ctttttctcttttttttcttttttttcttttttttctttctttaattttatttacctctattatctacttttacctttatattactctttcttttt

SEQ ID NO: 46623 - DNA, 96 bp, Fusarium virguliforme
  misc_feature: 53
ctttagcttatattattattctttagtatatttatttaggtattaatcctattttaattatcccttataatctatataatctaaggtaaaaaggat

SEQ ID NO: 46624 - DNA, 96 bp, Fusarium virguliforme
  misc_feature: 53
ctttaaagaagatatatccttcttctttctttaaagaagatatatccttcttctttaaagaagatatatactctcttcttcttttaaagaagatat

SEQ ID NO: 46625 - DNA, 96 bp, Fusarium virguliforme
  misc_feature: 53
aaaaaggaaaaaaaataaagtataaagaaaaaggaatataataaaaagagctaattatagaaaatatagagagtaattaacgataaggcggagaag

SEQ ID NO: 46626 - DNA, 96 bp, Fusarium virguliforme
  misc_feature: 53
ataatgagctactatagtcctatcgttaatataaataagcaggatatatatatctttatttaatccctttcttaatataattatatctaaagtaag

SEQ ID NO: 46627 - DNA, 96 bp, Fusarium virguliforme
  misc_feature: 53
agctacttagcgagaagcttttaatatatattttttaatggctgaaatactcctatatctattagctataatatatatatagagtaaggaggtaag

SEQ ID NO: 46628 - DNA, 96 bp, Fusarium virguliforme
  misc_feature: 53
aatagcggtagggtcctagatactatagattaaggaacttattcctctcgcattatatatcataaataatagctccctatatactcttagcttaag

SEQ ID NO: 46629 - DNA, 96 bp, Fusarium virguliforme
  misc_feature: 53
cttaaaaggtaatagccttttataattaataataaagcttatatagataatcataaagctataataataaagtaaatcgcctattaaaagcctaat

SEQ ID NO: 46630 - DNA, 96 bp, Fusarium virguliforme
  misc_feature: 53
aaagataagaaaaaggagtaaaagaaagagaagtaagaagagagagagaaagaggaaagggagaaagataagagaaagtaatatattctaatatag

SEQ ID NO: 46631 - DNA, 96 bp, Fusarium virguliforme
  misc_feature: 53
ctatatatagtgtattactcagctgtaaaggggtaacataaaaaatggaaaaagtataatcatgtaaaaaaagggatgcaaataaaactcctttag

SEQ ID NO: 46632 - DNA, 96 bp, Fusarium virguliforme
  misc_feature: 53
ctaataaggtattctatatattcttatagtatagtttcttcttatataagtgcggttttaatatattattaaaggtattcttcttagtcctctatt

SEQ ID NO: 46633 - DNA, 96 bp, Fusarium virguliforme
  misc_feature: 53
acataagagctcagtctcttacacttataaagaggatcgacttaattactcttccgtattaattaacgatacttctagtcgctattcccttattcg

SEQ ID NO: 46634 - DNA, 96 bp, Fusarium virguliforme
  misc_feature: 53
cgaaaggtaatagccttttataaccaataaaagagcttatatagataataataaagctataataataaagtaaatcgctcgctaaaagcctaatat

SEQ ID NO: 46635 - DNA, 96 bp, Fusarium virguliforme
  misc_feature: 53
cctttatattaaagtaccccctagccttattataagctatattatataagtgggtaatttaagtaagcttattattatagctcttattcctatatt

SEQ ID NO: 46636 - DNA, 96 bp, Fusarium virguliforme
  misc_feature: 53
cctaatgccttcccctctctatctttctttctttttttttctttcttttctttcttttctttctttcttttcttttttttctttctttcttttctt

SEQ ID NO: 46637 - DNA, 96 bp, Fusarium virguliforme
  misc_feature: 53
atttttatgttatctttaatttcgactaataattaataattaagatataagctcttataagatataaagctataatactttctattgacttaaact

SEQ ID NO: 46638 - DNA, 96 bp, Fusarium virguliforme
  misc_feature: 53
attatcttagaccttatattatatttctttatttatgaacctatatattatatataactatgaatttagctaaaattattttaattaaatatatct

SEQ ID NO: 46639 - DNA, 96 bp, Fusarium virguliforme
  misc_feature: 53
attatatctagtaatatatttaagggtattaagtataattaaattatattaaatttcctccttaagtggtaattattattgatataatttaaaact

SEQ ID NO: 46640 - DNA, 96 bp, Fusarium virguliforme
  misc_feature: 53
attatatattaataaatatcttagcatcttatttatcgctattattatatctatgccgcctcctattatcttatctccttactctctcccccgtat

SEQ ID NO: 46641 - DNA, 96 bp, Fusarium virguliforme
  misc_feature: 53
aagaggtcctttaggtgccttaataggtagctatagaaataaattatattaattaattaataattaagcttatagtaataaaagtatttaattaat

SEQ ID NO: 46642 - DNA, 96 bp, Fusarium virguliforme
  misc_feature: 53
agtttattgataaataaataactaatcgttttattaatagtattatctaagagctcgccctatgggatcttaggtaagctaagcttagttagagat

SEQ ID NO: 46643 - DNA, 96 bp, Fusarium virguliforme
  misc_feature: 53
aaaagtattatttaatttattatatcgataggtattaataatatattatagagagctatagattatataattaagctatatatagagggggtagat

SEQ ID NO: 46644 - DNA, 96 bp, Fusarium virguliforme
  misc_feature: 53
atattaatttattattatttttagttttaatagaaacccttttttaagaccttattaatagcttatttaattagctatagctatattagccctatt

SEQ ID NO: 46645 - DNA, 96 bp, Fusarium virguliforme
  misc_feature: 53
atagcttattgcggcatttttatttttattatttataggttttattatattctcgtaatactttagtttagtattataggtataggttacagttat

SEQ ID NO: 46646 - DNA, 96 bp, Fusarium virguliforme
  misc_feature: 53
aaatacttattattatcctaatacttagtattaataccctatttagtatatatataaggagtattatattagactggaaatttaagttaaaggtat

SEQ ID NO: 46647 - DNA, 96 bp, Fusarium virguliforme
  misc_feature: 53
aataaataaaataatattattaaaatcctcacctaaccctaataataattaatttaccttatttaaaatccttaatgcctagagatcctatattat

SEQ ID NO: 46648 - DNA, 96 bp, Fusarium virguliforme
  misc_feature: 53
aaggctaatttaaagctcccttttgctatttatttattcttaggcttattacctttccctttccctttttaaactttcccttcttaaatctcttat

SEQ ID NO: 46649 - DNA, 96 bp, Fusarium virguliforme
  misc_feature: 53
agtttttagattaatctctaactaagcttagcttacctaagatcccatagggcgagctcttagataatactattaataaaacgattagttatttat

SEQ ID NO: 46650 - DNA, 96 bp, Fusarium virguliforme
  misc_feature: 53
agcttaggttattaagctaattaagcttatatatttattctattattatctttaagatataggtttatttaaaggaattttaattattaggtttat

SEQ ID NO: 46651 - DNA, 96 bp, Fusarium virguliforme
  misc_feature: 53
acttctttttcttatatagatatattttacccctatagtctatatataagatctagataaccttataatattataggtatcttaatagggttttat

SEQ ID NO: 46652 - DNA, 96 bp, Fusarium virguliforme
  misc_feature: 53
aaagggaagaataataggtaaataattatatatacttataatcgattttattatcctcttaatatattaataaagcgctaataaaagatagctact

SEQ ID NO: 46653 - DNA, 96 bp, Fusarium virguliforme
  misc_feature: 53
aggttagagaagaaggagtaagagttacttaagttattatattatattaataccgaaagacgctagaaatattattaatatttatttaattcttct

SEQ ID NO: 46654 - DNA, 96 bp, Fusarium virguliforme
  misc_feature: 53
agatccttttatttattagattttccgcgatatatatatatagggctttatattatatttagaaggtagattaagctatataataggtttttacct

SEQ ID NO: 46655 - DNA, 96 bp, Fusarium virguliforme
  misc_feature: 53
aataagagatttaagaagggaaggtttaagaagggaaagggaaaggtaataagcctaagaataaataagtaataaaagggagctttagattagcct

SEQ ID NO: 46656 - DNA, 96 bp, Fusarium virguliforme
  misc_feature: 53
aagtattttaattatttttcccttaatatcttcttttcttttttcttttatctatatattaactcctttaatatctttaaaatagaatttaatcct

SEQ ID NO: 46657 - DNA, 96 bp, Fusarium virguliforme
  misc_feature: 53
agctctatattacttaattcccgactatatatctataagaataattatatgccggagttataaagtaattatatctatagctatattagataaagt

SEQ ID NO: 46658 - DNA, 96 bp, Fusarium virguliforme
  misc_feature: 53
agaggtcctttaggtgccttaataggtagctatagaaataaattatattaattaattaataattaagcttatagtaataaaagtatttaattaatt

SEQ ID NO: 46659 - DNA, 96 bp, Fusarium virguliforme
  misc_feature: 53
actcgattttatttatcccttattcctatcaattatataatataatcctcctttattaattacctattaattaaggagctatttaagcggagctct

SEQ ID NO: 46660 - DNA, 96 bp, Fusarium virguliforme
  misc_feature: 53
aaggcgaaaaaggcttaatagagactaagctattaatttaattaattctaaataatctatattaggtaataaataaaggttattaagatatagggt

SEQ ID NO: 46661 - DNA, 96 bp, Fusarium virguliforme
  misc_feature: 53
aatttaggttagctagaatagataatataaacttaataataaatattaattaatagctaaatactattaaagctacctttttttattttttttatt

SEQ ID NO: 46662 - DNA, 96 bp, Fusarium virguliforme
  misc_feature: 53
aataatactcctattattatctttaagtataattagcttataataaatagcctatatctatattatctattttataaacttaatccccctttactt

SEQ ID NO: 46663 - DNA, 96 bp, Fusarium virguliforme
  misc_feature: 53
aaggctatttaagaggtatttaagaggatataaaacgctaaattttatattaagctattaaaatataccttttattaaaaataaatagagttcctt

SEQ ID NO: 46664 - DNA, 96 bp, Fusarium virguliforme
  misc_feature: 52
ttttttttattacttactcttttattttacccttttataattacttattttacttttacctatatatatacccttactactttacccttaaccttt

SEQ ID NO: 46665 - DNA, 96 bp, Fusarium virguliforme
  misc_feature: 52
tttttattatttataaatttacctttcttttacttcttattaaagttataatttagttaataattaatctactaattaaataactaagtttagtta

SEQ ID NO: 46666 - DNA, 96 bp, Fusarium virguliforme
  misc_feature: 52
tttttatgttatctttaatttcgactaataattaataattaagatataagctcttataagatataaagctataatactttctattgacttaaactt

SEQ ID NO: 46667 - DNA, 96 bp, Fusarium virguliforme
  misc_feature: 52
tttttagattaatctctaactaagcttagcttacctaagatcccatagggcgagctcttagataatactattaataaaacgattagttatttattt

SEQ ID NO: 46668 - DNA, 96 bp, Fusarium virguliforme
  misc_feature: 52
attatttataaaacgtgccgttatatatatattggtaagtatattaagtagcatataaagtaatattataggtctatttagataataaaaagaaaa

SEQ ID NO: 46669 - DNA, 96 bp, Fusarium virguliforme
  misc_feature: 52
catattaataaagagtataatattatatataatatccctacataatatgccgctaatactatataattatcgactattcctcttctagtaagaaaa

SEQ ID NO: 46670 - DNA, 96 bp, Fusarium virguliforme
  misc_feature: 52
aaataaccctatataatataactgtaacctatacctataatactaaactaaagtattacgagaatataataaaacctataaataataaaaataaaa

SEQ ID NO: 46671 - DNA, 96 bp, Fusarium virguliforme
  misc_feature: 52
cttaagtttatatatttataaacattatataggtctagggctaataatataaatattatagctatattatatactttctccgcgatattaataaaa

SEQ ID NO: 46672 - DNA, 96 bp, Fusarium virguliforme
  misc_feature: 52
ttttatccttaattttaggctttagtaataatttctaagataatttaatattatcctaacggttctaaatatgaataataatattaataaatagtt

SEQ ID NO: 46673 - DNA, 96 bp, Fusarium virguliforme
  misc_feature: 52
ttttataaaaagctttatatctttttctcttttttttcttttttttcttttttttctttctttaattttatttacctctattatctacttttacct

SEQ ID NO: 46674 - DNA, 96 bp, Fusarium virguliforme
  misc_feature: 52
tttctcttttttttcttttttttctttctttaattttatctacctctattatctacttttgcctttatattactctttcttctttattcctctctt

SEQ ID NO: 46675 - DNA, 96 bp, Fusarium virguliforme
  misc_feature: 52
tttattatttatttatttttaggcttattacctttctctttttctttttaaaccttcccttcttaaatctcttattaaaattaagtagagaagttt

SEQ ID NO: 46676 - DNA, 96 bp, Fusarium virguliforme
  misc_feature: 52
tttatcttattccttaattaaggttataaagaggttaatataaaatatagaacctaattataagtaatatagcctaataataagcggtataaaccc

SEQ ID NO: 46677 - DNA, 96 bp, Fusarium virguliforme
  misc_feature: 52
tttatccttaattttaggctttagtaataatttctaagataatttaatattatcctaacggttctaaatatgaataataatattaataaatagttt

SEQ ID NO: 46678 - DNA, 96 bp, Fusarium virguliforme
  misc_feature: 52
agggggcattataagatagctatatagaataaggaaggtacctataaggatataaagtaataggaagtatatatagaagaaggtttcaactataaa

SEQ ID NO: 46679 - DNA, 96 bp, Fusarium virguliforme
  misc_feature: 52
gctagaagtaataataatattaatttaaccttaaaaaactagctagtaataaagaagataataataaaaaagagtaagaccttttaaaaatctaaa

SEQ ID NO: 46680 - DNA, 96 bp, Fusarium virguliforme
  misc_feature: 52
ggaggaaaaaataataatatttagtattaaaaggggcttttaaaattaaatcttaaaggctcttataaaggtaataataataattacttttctaaa

SEQ ID NO: 46681 - DNA, 96 bp, Fusarium virguliforme
  misc_feature: 52
aaagttaagggctttaataaagaggtaggcttaaattaaaataggggctttaataaaaagaaagggtaattaaataatatagacttttagcttaaa

SEQ ID NO: 46682 - DNA, 96 bp, Fusarium virguliforme
  misc_feature: 52
taacttactaattataaggataaggctttaataaataattaagaggataaatataagctaacctagataatagccgcccttaattatttatttaaa

SEQ ID NO: 46683 - DNA, 96 bp, Fusarium virguliforme
  misc_feature: 52
taagagcgattaatatttaggcttaagatatttaataataccttattattaataatattaccgcttaaagtaaataatagataattagactttaaa

SEQ ID NO: 46684 - DNA, 96 bp, Fusarium virguliforme
  misc_feature: 52
agggctagcattatatattacgctataataatactatatataataactaaaataaaccctaaccctaatttattaagcaacttatattagaaagaa

SEQ ID NO: 46685 - DNA, 96 bp, Fusarium virguliforme
  misc_feature: 52
ttctttaaagaagatatatccttcttctttctttaaagaagatatatccttcttctttaaagaagatatatactctcttcttcttttaaagaagat

SEQ ID NO: 46686 - DNA, 96 bp, Fusarium virguliforme
  misc_feature: 52
ttatacctatttatcttaataggcttaattagcttattaaatctagatagctatattaattataccttaatttatattaatatcttattctaagaa

SEQ ID NO: 46687 - DNA, 96 bp, Fusarium virguliforme
  misc_feature: 52
ttcttaaaggcgaaataataatcaaatataattaaagctaaattattttaataatacctcctttaattaaaaatcctatagaggccttatttttag

SEQ ID NO: 46688 - DNA, 96 bp, Fusarium virguliforme
  misc_feature: 52
ttctctttatttaatagcttactctttcctccctccctgccctaaatattactttacttctctcctagaccttagtgcttagtcttacctttctaa

SEQ ID NO: 46689 - DNA, 96 bp, Fusarium virguliforme
  misc_feature: 52
ttctattattaagctagctctataatataaaatataaaatattataggctctagctatagataatacgatattttatttagcttattaaattacta

SEQ ID NO: 46690 - DNA, 96 bp, Fusarium virguliforme
  misc_feature: 52
ataaagatattaaatataataaataaggcattatagctatattaaagcttatttaagatattattatatagcttatctattaactcttatatagaa

SEQ ID NO: 46691 - DNA, 96 bp, Fusarium virguliforme
  misc_feature: 52
ctaaataaactatttaagttatataagttattataagttaagattattattaacctaaccattataagatttaaagcgacggtctaagcattagaa

SEQ ID NO: 46692 - DNA, 96 bp, Fusarium virguliforme
  misc_feature: 52
aaaaagggcctatactttataattatatatagctttagattttaatattatattagacggcaggataattatagatataggttatatattaaggaa

SEQ ID NO: 46693 - DNA, 96 bp, Fusarium virguliforme
  misc_feature: 52
ctttataattatatatagctttagattttaatattatattagacggcaggataattatagatataggttatatattaaggaaagtagctataggaa

SEQ ID NO: 46694 - DNA, 96 bp, Fusarium virguliforme
  misc_feature: 52
ttcccgactatatatctataagaataattatatgccggagttataaagtaattatatctatagctatattagataaagtcctctatataaaattat

SEQ ID NO: 46695 - DNA, 96 bp, Fusarium virguliforme
  misc_feature: 52
agggtctattctcgtctatatctatcttattaggtcttcttctatatctccctatctctatatctctataattatctaaaactttaaaaaaaataa

SEQ ID NO: 46696 - DNA, 96 bp, Fusarium virguliforme
  misc_feature: 52
atatattatctttaaccttatattatacttatttacgaactatatatattatatatattaaccgtaaatttagcttataatattttaattaaataa

SEQ ID NO: 46697 - DNA, 96 bp, Fusarium virguliforme
  misc_feature: 52
atacggagacgcaataagtaatagttaataaggtaaatagtaatataaaccggggatcttaatataatatagaatacctaaatacctatataataa

SEQ ID NO: 46698 - DNA, 96 bp, Fusarium virguliforme
  misc_feature: 52
ttattataaatagcttaacttaatggattatggtattattatagctatatgctatatagtaataacccttattaatatagtatattaagatcctta

SEQ ID NO: 46699 - DNA, 96 bp, Fusarium virguliforme
  misc_feature: 52
tactttaaatatattaagctcccgctaagtgcttaattatagcttaattaagttagtagctatttaattaatttattaataaggcttaagtaataa

SEQ ID NO: 46700 - DNA, 96 bp, Fusarium virguliforme
  misc_feature: 52
tatatagttagatttatgcctaaaactataatattaatatatagctccgcgaaataattaataaacctaataaatacttaaagtctctattaataa

SEQ ID NO: 46701 - DNA, 96 bp, Fusarium virguliforme
  misc_feature: 52
atagtattaagataggaggggagattttttttaaggagagataaaaagaaatataagaaataaaagggaaataactaaaaaagagacataatataa

SEQ ID NO: 46702 - DNA, 96 bp, Fusarium virguliforme
  misc_feature: 52
ttatattaccgaactctcactaaaaccctatttagtctcattagtctatttagcttatttatctagtttatctagtatatcttatttatctctagc

SEQ ID NO: 46703 - DNA, 96 bp, Fusarium virguliforme
  misc_feature: 52
ttatatctagtaatatatttaagggtattaagtataattaaattatattaaatttcctccttaagtggtaattattattgatataatttaaaactt

SEQ ID NO: 46704 - DNA, 96 bp, Fusarium virguliforme
  misc_feature: 52
tagattaaactatctctaatatataaattaataataacttacgactaaagccttaagcttctataatataataaccccctctaatatactatataa

SEQ ID NO: 46705 - DNA, 96 bp, Fusarium virguliforme
  misc_feature: 52
ttatataccctttatccctatatcttagctcgataattatatttatatattagctttaaatatacttacgctaatagtagaaataatatataagat

SEQ ID NO: 46706 - DNA, 96 bp, Fusarium virguliforme
  misc_feature: 52
taataggtaaataattatatatacttataatcgattttattatcctcttaatatattaataaagcgctaataaaagatagctacttaaggaactaa

SEQ ID NO: 46707 - DNA, 96 bp, Fusarium virguliforme
  misc_feature: 52
ttagtctaaatattatagtcctcgttctatatttattagtatcgcttaatattttattatatttattattcgcgataatcgcattaaagttagatt

SEQ ID NO: 46708 - DNA, 96 bp, Fusarium virguliforme
  misc_feature: 52
ttagataattaatgcttttttaatatccgcattttccctcttttatatctttttctttatatatattaagtttaatgctgctcggtcgcggaagag

SEQ ID NO: 46709 - DNA, 96 bp, Fusarium virguliforme
  misc_feature: 52
aagactattgcgggaagtagacttagataatagcgatagtaatagtaataataatagagatagtctatataatctataagctagttataggtctaa

SEQ ID NO: 46710 - DNA, 96 bp, Fusarium virguliforme
  misc_feature: 52
aataatgagctactatagtcctatcgttaatataaataagcaggatatatatatctttatttaatccctttcttaatataattatatctaaagtaa

SEQ ID NO: 46711 - DNA, 96 bp, Fusarium virguliforme
  misc_feature: 52
ttactttaagatataaaaagtaactaaaagtaattaaagttaattatacgctatataaaaatactaactaagctagattatttttcccttattaag

SEQ ID NO: 46712 - DNA, 96 bp, Fusarium virguliforme
  misc_feature: 52
gaagggctataaggctaataaatactataagaagtaataagatattaaggaaggatattattaatagaagctataataaaacctcctagaaggtaa

SEQ ID NO: 46713 - DNA, 96 bp, Fusarium virguliforme
  misc_feature: 52
tcttagactatctattactcttatttctttttatttaataccttcttttagtaatatcttatacctttttcctatatatatctgccttataattaa

SEQ ID NO: 46714 - DNA, 96 bp, Fusarium virguliforme
  misc_feature: 52
aaagaggtcctttaggtgccttaataggtagctatagaaataaattatattaattaattaataattaagcttatagtaataaaagtatttaattaa

SEQ ID NO: 46715 - DNA, 96 bp, Fusarium virguliforme
  misc_feature: 52
ttaatagctagataattaactatataggaacctagctatatatagaataggtattatagctagttatattagagttttattaagtatattctcttc

SEQ ID NO: 46716 - DNA, 96 bp, Fusarium virguliforme
  misc_feature: 52
cttaatttagattacctttattaataataagcgataataatattaagggaatataagtaataagttattaagagctaatattaattccgctattaa

SEQ ID NO: 46717 - DNA, 96 bp, Fusarium virguliforme
  misc_feature: 52
ttaataaaccgccctttagttttataattataaggtaattattattatagattaaaactcttaataccttaattaagggtttaattattaatctct

SEQ ID NO: 46718 - DNA, 96 bp, Fusarium virguliforme
  misc_feature: 52
ttaaggtagggtaataattattaattaatctaccgctagattaagtaattagctatttatttaatattaacctattatatttaattaccgcttata

SEQ ID NO: 46719 - DNA, 96 bp, Fusarium virguliforme
  misc_feature: 52
gagggtttaaaataaataatatataaatagtactaagataattaataacctcgcgactattattataaaaagtaaagatataggagaaatccttaa

SEQ ID NO: 46720 - DNA, 96 bp, Fusarium virguliforme
  misc_feature: 52
cgataataataataacgataataataataataataacgataataataaggcgatagataataagggcataatagctctataatataaagcgcttaa

SEQ ID NO: 46721 - DNA, 96 bp, Fusarium virguliforme
  misc_feature: 52
ggaggagtttaggtatttatatctccttttatatagtatatattactttagtatttcttgagattaatatagatattttatggagtcctctcttaa

SEQ ID NO: 46722 - DNA, 96 bp, Fusarium virguliforme
  misc_feature: 52
tagtgccggccgggagtaggttatagcgatagaggttatatatagcgaatatataacttaacctatagtatatagtaatctcgagtaccttcttaa

SEQ ID NO: 46723 - DNA, 96 bp, Fusarium virguliforme
  misc_feature: 52
ttaactataccttaattccttccttatatatttaattattacttaatacttattaggcttataattatatagtctagtattaagtagctaataata

SEQ ID NO: 46724 - DNA, 96 bp, Fusarium virguliforme
  misc_feature: 52
ttaaagaggcttagatatagctttagtatatagttaaatacctttacagcttaaagtatataatatatatacccttatagctatttatattagaga

SEQ ID NO: 46725 - DNA, 96 bp, Fusarium virguliforme
  misc_feature: 52
ttaaacttctctacttaattttaataagagatttaagaagggaaggtttaaaaagaaaaagagaaaggtaataagcctaaaaataaataaataata

SEQ ID NO: 46726 - DNA, 96 bp, Fusarium virguliforme
  misc_feature: 52
tctttttttttctttcttttctttcttttctttctttcttttcttttttttctttctttcttttcttttttccttacttttaccctttactactcc

SEQ ID NO: 46727 - DNA, 96 bp, Fusarium virguliforme
  misc_feature: 52
tcttttctttctttcttttcttttttttctttctttcttttcttttttccttacttttaccctttactactccctttttacccttcctataactta

SEQ ID NO: 46728 - DNA, 96 bp, Fusarium virguliforme
  misc_feature: 52
ggttttcctagggttttataatttttattatcgctttatttatatttatttaagggtaatataattacttataggtttattaaaaggaataaaaga

SEQ ID NO: 46729 - DNA, 96 bp, Fusarium virguliforme
  misc_feature: 52
taataaattaaataaggctagattcctaatataataagttaaaggttaagaattataggttaattaaatcgataattaagttatttaagttaaaga

SEQ ID NO: 46730 - DNA, 96 bp, Fusarium virguliforme
  misc_feature: 52
tcttaccttttaagagtatttattattcctattattcctttagttagtattttcctttagcgatattatataccttcttcttaaatatatttacct

SEQ ID NO: 46731 - DNA, 96 bp, Fusarium virguliforme
  misc_feature: 52
tctcttttttttcttttttttcttttttttctttctttaattttatttacctctattatctacttttacctttatattactctttcttttttattc

SEQ ID NO: 46732 - DNA, 96 bp, Fusarium virguliforme
  misc_feature: 52
tctctttatttaatagcttactctttcctccctccctgccctaaatattactttacttctctcctagaccttagtgcttagtcttacctttctaat

SEQ ID NO: 46733 - DNA, 96 bp, Fusarium virguliforme
  misc_feature: 52
tctcttaatagctagataattaactatataggaacctagctatatatagaataggtattatagctagttatattagagttttattaagtatattct

SEQ ID NO: 46734 - DNA, 96 bp, Fusarium virguliforme
  misc_feature: 52
tctattatttatgccttctctttaacttaaataacttaattatcgatttaattaacctataattcttaacctttaacttattatattaggaatcta

SEQ ID NO: 46735 - DNA, 96 bp, Fusarium virguliforme
  misc_feature: 52
aataaagatattaaatataataaataaggcattatagctatattaaagcttatttaagatattattatatagcttatctattaactcttatataga

SEQ ID NO: 46736 - DNA, 96 bp, Fusarium virguliforme
  misc_feature: 52
taagtaataggaggtatagagatagatagggagatagattaattagggtaggttataagtatagaatatatatagggtatttatatatatagtaga

SEQ ID NO: 46737 - DNA, 96 bp, Fusarium virguliforme
  misc_feature: 52
taaaagtattatttaatttattatatcgataggtattaataatatattatagagagctatagattatataattaagctatatatagagggggtaga

SEQ ID NO: 46738 - DNA, 96 bp, Fusarium virguliforme
  misc_feature: 52
tctaagttatttatatcttatatttaggcttaagcttacctttaatatatttattccttattacctttaaaactaatatattttccttccttatta

SEQ ID NO: 46739 - DNA, 96 bp, Fusarium virguliforme
  misc_feature: 52
tctaaataagcttcttctctttctcactataatctaattaatatattaatactctttagttattttaattatacccttaattattaatattaaggc

SEQ ID NO: 46740 - DNA, 96 bp, Fusarium virguliforme
  misc_feature: 52
taatattagagaagaaacttaatatattattatactcaattaacttatttatagctaataagtatatctcgatataatatagattaatcttctcga

SEQ ID NO: 46741 - DNA, 96 bp, Fusarium virguliforme
  misc_feature: 52
tcctttagcttatattattattctttagtatatttatttaggtattaatcctattttaattatcccttataatctatataatctaaggtaaaaagg

SEQ ID NO: 46742 - DNA, 96 bp, Fusarium virguliforme
  misc_feature: 52
tcccctataattaaagccctaaggcctataatatattaattaaggctaagaatattatatcctaagaatattataagggtaatagctaatctaaag

SEQ ID NO: 46743 - DNA, 96 bp, Fusarium virguliforme
  misc_feature: 52
tatttatataatctatataaaggcgctatagtattactataataataagagtctatataggagttatatctactagagagcttataataacccgct

SEQ ID NO: 46744 - DNA, 96 bp, Fusarium virguliforme
  misc_feature: 52
tatttaggctaaaagcctatattatttaataagccctcttttttactaaagcccctattttaatttaatcttacctttttattataatctctatct

SEQ ID NO: 46745 - DNA, 96 bp, Fusarium virguliforme
  misc_feature: 52
tatttaaaggagccctttaataggcctttaaaattattaacgaaaaagtataagctaaataaaagattaaggcacttaaataaaactaatctacct

SEQ ID NO: 46746 - DNA, 96 bp, Fusarium virguliforme
  misc_feature: 52
gatatatttaattaaaataattttagctaaattcatagttatatataatatataggttcataaataaagaaatataatataaggtctaagataata

SEQ ID NO: 46747 - DNA, 96 bp, Fusarium virguliforme
  misc_feature: 52
tattatagagctataggcggaaaaaaaaagaaaataattcctataaaaagctctatatataaccgcaaataattaatagctaaaatactttaaatt

SEQ ID NO: 46748 - DNA, 96 bp, Fusarium virguliforme
  misc_feature: 52
tacccctaatactataaggttatatagctcttatgccgatactatatatataagatatatctcgctaagaaataggaatatagatatttcctaata

SEQ ID NO: 46749 - DNA, 96 bp, Fusarium virguliforme
  misc_feature: 52
tattactcttaaggacctaatagttaatttaaattaattagctttataactttaattagaaattaagggctaataataaataaaggtattattaag

SEQ ID NO: 46750 - DNA, 96 bp, Fusarium virguliforme
  misc_feature: 52
tattaatttattattatttttagttttaatagaaacccttttttaagaccttattaatagcttatttaattagctatagctatattagccctatta

SEQ ID NO: 46751 - DNA, 96 bp, Fusarium virguliforme
  misc_feature: 52
tattaaggtaatattaatatatagatataataggcctttagcgcctaataatagcggcctaaaggaataaataataatatctattttaattatatt

SEQ ID NO: 46752 - DNA, 96 bp, Fusarium virguliforme
  misc_feature: 52
tatcttattaaagaggctaatcgcctatataataatttaatatttaggcttaaacttaatattaacttacttaagattaaagataatatagctaat

SEQ ID NO: 46753 - DNA, 96 bp, Fusarium virguliforme
  misc_feature: 52
taagatatatttaattaaaataattttagctaaattcatagttatatataatatataggttcataaataaagaaatataatataaggtctaagata

SEQ ID NO: 46754 - DNA, 96 bp, Fusarium virguliforme
  misc_feature: 52
tatctagctctctcggtccttatattattagggtattattattagggctaaaaagcttaatattagcctatagaggtatattataataagacttag

SEQ ID NO: 46755 - DNA, 96 bp, Fusarium virguliforme
  misc_feature: 52
tatctaatatctatatatactaaataatactcctattattatctttaagtataattagcttataataaatagcctatatctatattatctatttta

SEQ ID NO: 46756 - DNA, 96 bp, Fusarium virguliforme
  misc_feature: 52
tatcggtctagatattatagtctttattctatatttattagtgctacttagtattttattatatctccttaagttcctattatatttattatatta

SEQ ID NO: 46757 - DNA, 96 bp, Fusarium virguliforme
  misc_feature: 52
tatcgggatatatctataataggatataatcgggtatatctatatataagataaggttagttatataatcttataataaatagacctaagcttact

SEQ ID NO: 46758 - DNA, 96 bp, Fusarium virguliforme
  misc_feature: 52
taccgcgaatataaagacctaccttctaaataaacctaataattaaaattcctttaaataaacctatatcttaaagataataatagaataaatata

SEQ ID NO: 46759 - DNA, 96 bp, Fusarium virguliforme
  misc_feature: 52
tatatccgctagatctcccgtattatatataggtatttattataacctaaaatattatattgcggtagcttaatatataggttcgcgctaatagtc

SEQ ID NO: 46760 - DNA, 96 bp, Fusarium virguliforme
  misc_feature: 52
ccgcgaatataaagacctaccttctaaataaacctaataattaaaattcctttaaataaacctatatcttaaagataataatagaataaatatata

SEQ ID NO: 46761 - DNA, 96 bp, Fusarium virguliforme
  misc_feature: 52
tatagttaatttaaagatccactagttttaaggttaatttaataattagctagtttttaggttaatttaaaaattagctagttttaaggtcgattt

SEQ ID NO: 46762 - DNA, 96 bp, Fusarium virguliforme
  misc_feature: 52
aactataaatataataaatctaaagtagaaattaatagatagcctaaaagacctaaagtagtaaaaatatagtatatcttattataagtgactata

SEQ ID NO: 46763 - DNA, 96 bp, Fusarium virguliforme
  misc_feature: 52
agttatttataaaaggcttatttacactgtgattttttagttgtttatttctttaaagttaattaggttttttaaaaacttaaaaaaattactata

SEQ ID NO: 46764 - DNA, 96 bp, Fusarium virguliforme
  misc_feature: 52
tataggtaatataattatatctttatttatcttctatatctaagccttctttaggtatctttatctttataaggtcttttataaatttctaaaggg

SEQ ID NO: 46765 - DNA, 96 bp, Fusarium virguliforme
  misc_feature: 52
aagagctcgataaatagataattaagaatcaaaagggggtaatatataattaattaaaggggtaatataaagctatagctaaggaaattagctata

SEQ ID NO: 46766 - DNA, 96 bp, Fusarium virguliforme
  misc_feature: 52
ccctaaatagcgattaagagtatctagctaatatatatataacttataagagacccttatatctatttaattatactatatattcttaaggctata

SEQ ID NO: 46767 - DNA, 96 bp, Fusarium virguliforme
  misc_feature: 52
aaattcgcaataaattaactatataaatttaggtaataaaatttcgactaataaatagctataattatattgcattagagataaaagagatctata

SEQ ID NO: 46768 - DNA, 96 bp, Fusarium virguliforme
  misc_feature: 52
aggtttgggttatctatagctctaatttatttaaaagagagcataaatttaaaaataaaatagcggtaattaaggtaattaattaatatttctata

SEQ ID NO: 46769 - DNA, 96 bp, Fusarium virguliforme
  misc_feature: 52
tatacttacttaagatacttttattattactatatctatatatactaccttctatatataatctctctcttttctctcaagtatttatataaaagc

SEQ ID NO: 46770 - DNA, 96 bp, Fusarium virguliforme
  misc_feature: 52
tataattcaccctttaataataaataagctaggtaactaataaaagaaattaaattaagaagagaataaaataggtaataaaatcttctttctcta

SEQ ID NO: 46771 - DNA, 96 bp, Fusarium virguliforme
  misc_feature: 52
attttttattttttattattcctaggctagttagatatatatattagtgctattattctagtagtatattccttattcgtcggtctaaatattata

SEQ ID NO: 46772 - DNA, 96 bp, Fusarium virguliforme
  misc_feature: 52
tataactataaatataataaatctaaagtagaaattaatagatagcctaaaagacctaaagtagtaaaaatatagtatatcttattataagtgact

SEQ ID NO: 46773 - DNA, 96 bp, Fusarium virguliforme
  misc_feature: 52
tataaatatataattatatgccctatattaaaagatagtgagtataataagtatatataaggtgatataattagttaattaggagtcctagagtta

SEQ ID NO: 46774 - DNA, 96 bp, Fusarium virguliforme
  misc_feature: 52
tagtattttataaattaattaataataaccaaaattatatctacttcttaatcccttaatataattaatagtagacctataataaagtctatcgat

SEQ ID NO: 46775 - DNA, 96 bp, Fusarium virguliforme
  misc_feature: 52
tagtaatagaagcacttaattagcttctatatatattatatagaccctaatactataagcctagctttaattctatataaggtattataatacctc

SEQ ID NO: 46776 - DNA, 96 bp, Fusarium virguliforme
  misc_feature: 52
taggtttgggttatctatagctctaatttatttaaaagagagcataaatttaaaaataaaatagcggtaattaaggtaattaattaatatttctat

SEQ ID NO: 46777 - DNA, 96 bp, Fusarium virguliforme
  misc_feature: 52
taggtcctttaataataataataatactaaaaagagtaatatatagctaaaaagcggctaataatatatatatcgcggataactaaatttaagccc

SEQ ID NO: 46778 - DNA, 96 bp, Fusarium virguliforme
  misc_feature: 52
atctcgaaaggtaatagccttttataaccaataaaagagcttatatagataataataaagctataataataaagtaaatcgctcgctaaaagccta

SEQ ID NO: 46779 - DNA, 96 bp, Fusarium virguliforme
  misc_feature: 52
atctaaaagaaatatcgactaaagtaaataaaggaggtaataaaattaaaattaattactttatagtaataggtaaataagcgattaagtcgccta

SEQ ID NO: 46780 - DNA, 96 bp, Fusarium virguliforme
  misc_feature: 52
taggcaccttcgatcgcctttataggctataataaagttaagaatattaatactttaatttctattagtattttattacccgaccttatataggta

SEQ ID NO: 46781 - DNA, 96 bp, Fusarium virguliforme
  misc_feature: 52
ggccttattattaaaataataactaattattccttaataatataaggggatataataaatttaattagctaaatttatccttaatgaattatccta

SEQ ID NO: 46782 - DNA, 96 bp, Fusarium virguliforme
  misc_feature: 52
taggagacctaatagctaaaaaataaccctaaatagatagatactaaagtaagctaaataatagatataaactaaagaatatatcgatattaatat

SEQ ID NO: 46783 - DNA, 96 bp, Fusarium virguliforme
  misc_feature: 52
agatacccctaatactataaggttatatagctcttatgccgatactatatatataagatatatctcgctaagaaataggaatatagatatttccta

SEQ ID NO: 46784 - DNA, 96 bp, Fusarium virguliforme
  misc_feature: 52
tagctctatattacttaattcccgactatatatctataagaataattatatgccggagttataaagtaattatatctatagctatattagataaag

SEQ ID NO: 46785 - DNA, 96 bp, Fusarium virguliforme
  misc_feature: 52
tacttatattattattaatagtatcgctataagcgtatatattataatataagttatttttctttagtttatagcgcttttctagcggggtagcta

SEQ ID NO: 46786 - DNA, 96 bp, Fusarium virguliforme
  misc_feature: 52
gaccctaaatagcgattaagagtatctagctaatatatatataacttataagagacccttatatctatttaattatactatatattcttaaggcta

SEQ ID NO: 46787 - DNA, 96 bp, Fusarium virguliforme
  misc_feature: 52
aattagatatccctaaggataaattagatatccctaaggataaattaaatatccctaataataaattaaataccttaatagaagataatacctcta

SEQ ID NO: 46788 - DNA, 96 bp, Fusarium virguliforme
  misc_feature: 52
tagagatataagagagagtctaataaaattaagattaattaaggataattataagataaaggaaaatatttaagagaggtttaagcttattagctt

SEQ ID NO: 46789 - DNA, 96 bp, Fusarium virguliforme
  misc_feature: 52
tagaattattaaatatattccttaatactgccctataatataatattatatcgtttatatatatagaggataaagtcctatattattttatattta

SEQ ID NO: 46790 - DNA, 96 bp, Fusarium virguliforme
  misc_feature: 52
atagataattccaataataataataataataacgcttctatttataaatctatctctataaccgctatatataccgtagctatagagcctattcta

SEQ ID NO: 46791 - DNA, 96 bp, Fusarium virguliforme
  misc_feature: 52
gaaaaaagagttgctagatatatataagtctagaaaggtaaggtatataggaatatatattatagaagctattaattacttccgagaatataagta

SEQ ID NO: 46792 - DNA, 96 bp, Fusarium virguliforme
  misc_feature: 52
tactcttagatatttttcgatattattaaaaaattagccttttactaaaaaatacctaaatatatacttataaaaagaagctactttagccctatt

SEQ ID NO: 46793 - DNA, 96 bp, Fusarium virguliforme
  misc_feature: 52
tactcttaaggacctaatagttaatttaaattaattagctttataactttaattagaaattaagggctaataataaataaaggtattattaagcct

SEQ ID NO: 46794 - DNA, 96 bp, Fusarium virguliforme
  misc_feature: 52
tacggagacgcaataagtaatagttaataaggtaaatagtaatataaaccggggatcttaatataatatagaatacctaaatacctatataataat

SEQ ID NO: 46795 - DNA, 96 bp, Fusarium virguliforme
  misc_feature: 52
tacctcttttttaagattaatataattagcttatatattaagctattaaaaaggaaaaattaaacctattaaagagggcgtaataaattaaggtta

SEQ ID NO: 46796 - DNA, 96 bp, Fusarium virguliforme
  misc_feature: 52
taatttaggttagctagaatagataatataaacttaataataaatattaattaatagctaaatactattaaagctacctttttttattttttttat

SEQ ID NO: 46797 - DNA, 96 bp, Fusarium virguliforme
  misc_feature: 52
taattaaccttttatattaattatttagattattatgatttattcttccctaatttatattactatttaccttactaattattgcttattatgtct

SEQ ID NO: 46798 - DNA, 96 bp, Fusarium virguliforme
  misc_feature: 52
taattaaagggtaattcctatttattaataaagctaaaaataaaaaggtataaaaagagctaggtaatatagagagatataaggaaaaaggtaccc

SEQ ID NO: 46799 - DNA, 96 bp, Fusarium virguliforme
  misc_feature: 52
taatgagctactatagtcctatcgttaatataaataagcaggatatatatatctttatttaatccctttcttaatataattatatctaaagtaagt

SEQ ID NO: 46800 - DNA, 96 bp, Fusarium virguliforme
  misc_feature: 52
actttagatattattttagaaaagtaattattattattacctttataagagcctttaagatttaattttaaaagccccttttaatactaaatatta

SEQ ID NO: 46801 - DNA, 96 bp, Fusarium virguliforme
  misc_feature: 52
taatatcgcttaatattttattatatctctttaagttcctattatacttattatatctatcgtctataacggttatattaaagttagattaactta

SEQ ID NO: 46802 - DNA, 96 bp, Fusarium virguliforme
  misc_feature: 52
taatatattattctataggtatttaggtattttatattatattaagatatatagctagccttaggcgctatatattatagatagttatataaagat

SEQ ID NO: 46803 - DNA, 96 bp, Fusarium virguliforme
  misc_feature: 52
taatatatcgctataaggagtatataatatataatatagctagctagcagtattaagataaattaataatattatagggtaataaggctcctactt

SEQ ID NO: 46804 - DNA, 96 bp, Fusarium virguliforme
  misc_feature: 52
taataaggtattctatatattcttatagtatagtttcttcttatataagtgcggttttaatatattattaaaggtattcttcttagtcctctatta

SEQ ID NO: 46805 - DNA, 96 bp, Fusarium virguliforme
  misc_feature: 52
ctatccctttacgctttattattattatcctatttacttccctcggcctatttattataaggtaagaaggtatatattatctaattaaaagtatta

SEQ ID NO: 46806 - DNA, 96 bp, Fusarium virguliforme
  misc_feature: 52
taatactcctattattatctttaagtataattagcttataataaatagcctatatctatattatctattttataaacttaatccccctttacttta

SEQ ID NO: 46807 - DNA, 96 bp, Fusarium virguliforme
  misc_feature: 52
taataataataacgataataataataataataacgataataataaggcgatagataataagggcataatagctctataatataaagcgcttaatag

SEQ ID NO: 46808 - DNA, 96 bp, Fusarium virguliforme
  misc_feature: 52
taataaatagatttaaattaaaactctaaggctattaatataaaaaagagttaatttagtaacctaaaaaataacctaggtttattaatttaattt

SEQ ID NO: 46809 - DNA, 96 bp, Fusarium virguliforme
  misc_feature: 52
taataaagatattaaatataataaataaggcattatagctatattaaagcttatttaagatattattatatagcttatctattaactcttatatag

SEQ ID NO: 46810 - DNA, 96 bp, Fusarium virguliforme
  misc_feature: 52
cctctcttaactaactatcttctaaataaataatatatctcttaatagaataaattatagctaataataaggattaaaagcgcttaatattcctta

SEQ ID NO: 46811 - DNA, 96 bp, Fusarium virguliforme
  misc_feature: 52
taagctttataatttatatcgccttttcctaattaataatctactctttttaatttattttattatttaaggtatcctttagtaccttaaaatacc

SEQ ID NO: 46812 - DNA, 96 bp, Fusarium virguliforme
  misc_feature: 52
aatactattaaggcgactataaagaataatataatagatattataaatctttatagcgggttatatatatagttttaggttattgtaaagagctta

SEQ ID NO: 46813 - DNA, 96 bp, Fusarium virguliforme
  misc_feature: 52
aagaaataagataagcttataatataaattaaataccttgactataaatactaatagcttaataaatatactagtaatattaaatacctagagtta

SEQ ID NO: 46814 - DNA, 96 bp, Fusarium virguliforme
  misc_feature: 52
taacctttctagtgatttatattattatattaatataggctaataaggcacttatatcgggttatctatatctattattatagtaagtaaaaagac

SEQ ID NO: 46815 - DNA, 96 bp, Fusarium virguliforme
  misc_feature: 52
catttttatttttattatttataggttttattatattctcgtaatactttagtttagtattataggtataggttacagttatattatatagggtta

SEQ ID NO: 46816 - DNA, 96 bp, Fusarium virguliforme
  misc_feature: 52
taacactaaactattatctagatatagagaactactatagtaataatagctatacccttaatatataatatccgctaatatactatagaagataat

SEQ ID NO: 46817 - DNA, 96 bp, Fusarium virguliforme
  misc_feature: 52
taaatttccagtctaatataatactccttatatatatactaaatagggtattaatactaagtattaggataataataagtattttctaaagtttag

SEQ ID NO: 46818 - DNA, 96 bp, Fusarium virguliforme
  misc_feature: 52
attatgtacgttattaataataataatagcggtatattaataaagacaattaatagcttaataagagcttataaggagtataatatagcctattta

SEQ ID NO: 46819 - DNA, 96 bp, Fusarium virguliforme
  misc_feature: 52
aattaattatttaccttccttcctttattattattacctcctttttctatagcttaatcctttttaccttttaccgccggcttaatatcttcttta

SEQ ID NO: 46820 - DNA, 96 bp, Fusarium virguliforme
  misc_feature: 52
gttttcctagggttttataatttttattatcgctttatttatatttatttaagggtaatataattacttataggtttattaaaaggaataaaagat

SEQ ID NO: 46821 - DNA, 96 bp, Fusarium virguliforme
  misc_feature: 52
aatatagaaatattaattaattaccttaattaccgctattttatttttaaatttatgctctcttttaaataaattagagctatagataacccaaac

SEQ ID NO: 46822 - DNA, 96 bp, Fusarium virguliforme
  misc_feature: 52
gttaagggctttaataaagaggtaggcttaaattaaaataggggctttaataaaaagaaagggtaattaaataatatagacttttagcttaaatag

SEQ ID NO: 46823 - DNA, 96 bp, Fusarium virguliforme
  misc_feature: 52
ggatatagtaagactattctgaatataataattcttaataatcttctataaatagatacctatactatatttatattcttctttaactttaatgac

SEQ ID NO: 46824 - DNA, 96 bp, Fusarium virguliforme
  misc_feature: 52
gtagtattaggttttaagagtaataaagataggcaaaaagtaaaaagtaagcagctaagtaagaaagaaagaaagagatagtaaatataacggtat

SEQ ID NO: 46825 - DNA, 96 bp, Fusarium virguliforme
  misc_feature: 52
agggaaaatatatatataataaataaagcaagaattaaggctattataacttattacctacctatatatagctatatagtagcttaacctctttac

SEQ ID NO: 46826 - DNA, 96 bp, Fusarium virguliforme
  misc_feature: 52
agctataatagcctaatatatataataaggtaagagctactatatatataaagaggccttagctatatatactatatattactaggaattaaaacc

SEQ ID NO: 46827 - DNA, 96 bp, Fusarium virguliforme
  misc_feature: 52
ctatataggaattaagagaggactctataaaatatctatattaatctcgagaaatactaaagtaatatatactatataaaaggagatataagcacc

SEQ ID NO: 46828 - DNA, 96 bp, Fusarium virguliforme
  misc_feature: 52
gatatagtaagactattctgaatataataattcttaataatcttctataaatagatacctatactatatttatattcttctttaactttaatgacc

SEQ ID NO: 46829 - DNA, 96 bp, Fusarium virguliforme
  misc_feature: 52
aaccttctaagttaaataaaaaccttaagtttaagtttaggttagggttataggtaacggttagtaatataggttaagggttaggttaaggttacc

SEQ ID NO: 46830 - DNA, 96 bp, Fusarium virguliforme
  misc_feature: 52
actaaaaataaatagctaaaggctaagttaaagctagataaagctaaaacttaaaggttttaaataaagatatttaaaactagataggaaataccc

SEQ ID NO: 46831 - DNA, 96 bp, Fusarium virguliforme
  misc_feature: 52
gggctagcattatatattacgctataataatactatatataataactaaaataaaccctaaccctaatttattaagcaacttatattagaaagaag

SEQ ID NO: 46832 - DNA, 96 bp, Fusarium virguliforme
  misc_feature: 52
aatataactatattaagggagagagcgaaaataaaaatagtaaatataataaagattaagagggggagagctatagataaaaaaaaagcttagccc

SEQ ID NO: 46833 - DNA, 96 bp, Fusarium virguliforme
  misc_feature: 52
ctttttttttctttcttttctttcttttctttctttcttttcttttttttctttctttcttttcttttttccttacttttaccctttactactccc

SEQ ID NO: 46834 - DNA, 96 bp, Fusarium virguliforme
  misc_feature: 52
atttttttaagtttatattttaatcttttaattcttaattcttatttcttttccctttctttcctttcctttctttttctttttactagcctagcc

SEQ ID NO: 46835 - DNA, 96 bp, Fusarium virguliforme
  misc_feature: 52
accctatataatataactgtaacctatacctataatactaaactaaagtattacgagaatataataaaacctataaataataaaaataaaaatgcc

SEQ ID NO: 46836 - DNA, 96 bp, Fusarium virguliforme
  misc_feature: 52
ggagagtatctaaaggataatatatctaattattactatcctatcctataataaggatataataatattatctaccgctaagtcctatactaccct

SEQ ID NO: 46837 - DNA, 96 bp, Fusarium virguliforme
  misc_feature: 52
aagatacctataatattataaggttatctagatcttatatatagactataggggtaaaatatatctatataagaaaaagaagtaagattactttcc

SEQ ID NO: 46838 - DNA, 96 bp, Fusarium virguliforme
  misc_feature: 52
gcttaaatttagttatccgcgatatatatattattagccgctttttagctatatattactctttttagtattattattattattaaaggacctagc

SEQ ID NO: 46839 - DNA, 96 bp, Fusarium virguliforme
  misc_feature: 52
gctatttatttttatactttagtctatttattatagcttattgcggcatttttatttttattatttataggttttattatattctcgtaatacttt

SEQ ID NO: 46840 - DNA, 96 bp, Fusarium virguliforme
  misc_feature: 52
gctacttagcgagaagcttttaatatatattttttaatggctgaaatactcctatatctattagctataatatatatatagagtaaggaggtaagg

SEQ ID NO: 46841 - DNA, 96 bp, Fusarium virguliforme
  misc_feature: 52
gcgataaggctagggtggcttctttttataggtatatatttaggtattattattaggtagctaattttttagtaatatcgaaaaatatttaagagt

SEQ ID NO: 46842 - DNA, 96 bp, Fusarium virguliforme
  misc_feature: 52
gccggtattaactatattatatatctaactattatatacttaattagcttagggataaattatattaccttataagcgttatcgcggattaccttt

SEQ ID NO: 46843 - DNA, 96 bp, Fusarium virguliforme
  misc_feature: 52
ataattagtgtaatataaagggaatttatagggaatataataatacataataggggactatttaggctataataccttaattattaataagagggc

SEQ ID NO: 46844 - DNA, 96 bp, Fusarium virguliforme
  misc_feature: 52
aaccctatataatataactgtaacctatacctataatactaaactaaagtattacgagaatataataaaacctataaataataaaaataaaaatgc

SEQ ID NO: 46845 - DNA, 96 bp, Fusarium virguliforme
  misc_feature: 52
gatctttaaatcgaccttaaaactagctaatttttaaattaacctaaaaactagctaattattaaattaaccttaaaactagtggatctttaaatt

SEQ ID NO: 46846 - DNA, 96 bp, Fusarium virguliforme
  misc_feature: 52
gatatccctaaggataaattagatatccctaaggataaattaaatatccctaataataaattaaataccttaatagaagataatacctctatatag

SEQ ID NO: 46847 - DNA, 96 bp, Fusarium virguliforme
  misc_feature: 52
ctaatagccccttactaaagctcctatttaagtaaataatataaaaaataaagctatctctaaattattaataatacctcccttaatattattatc

SEQ ID NO: 46848 - DNA, 96 bp, Fusarium virguliforme
  misc_feature: 52
cttctcctctctatcctttttattataatccttattataatcctcgctattattattgctattatcgtcgctatagttattatcgtcgttattatc

SEQ ID NO: 46849 - DNA, 96 bp, Fusarium virguliforme
  misc_feature: 52
agagaataatagatttataaattattttacctttaccttaattaagtaatacttaatttacgcctaataattataagccctagactatttatcctc

SEQ ID NO: 46850 - DNA, 96 bp, Fusarium virguliforme
  misc_feature: 52
gactatttcctatagctactttccttaatatataacctatatctataattatcctgccgtctaatataatattaaaatctaaagctatatataatt

SEQ ID NO: 46851 - DNA, 96 bp, Fusarium virguliforme
  misc_feature: 52
gaattatatattaataaatatcttagcatcttatttatcgctattattatatctatgccgcctcctattatcttatctccttactctctcccccgt

SEQ ID NO: 46852 - DNA, 96 bp, Fusarium virguliforme
  misc_feature: 52
atctcttaatagctagataattaactatataggaacctagctatatatagaataggtattatagctagttatattagagttttattaagtatattc

SEQ ID NO: 46853 - DNA, 96 bp, Fusarium virguliforme
  misc_feature: 52
gaaataaataataataaattcttaattaatagagcctttagccttatagtaatagactatatagataatatagccttaatagatatagagacctct

SEQ ID NO: 46854 - DNA, 96 bp, Fusarium virguliforme
  misc_feature: 52
aaagggcctatactttataattatatatagctttagattttaatattatattagacggcaggataattatagatataggttatatattaaggaaag

SEQ ID NO: 46855 - DNA, 96 bp, Fusarium virguliforme
  misc_feature: 52
ctaaatagcgattaagagtatctagctaatatatatataacttataagagacccttatatctatttaattatactatatattcttaaggctataag

SEQ ID NO: 46856 - DNA, 96 bp, Fusarium virguliforme
  misc_feature: 52
agactattgcgggaagtagacttagataatagcgatagtaatagtaataataatagagatagtctatataatctataagctagttataggtctaag

SEQ ID NO: 46857 - DNA, 96 bp, Fusarium virguliforme
  misc_feature: 52
agcttattattattaattttaattactattttacttacttttattaaagctaatagcttaataataatagaaagtcctaatgaacctataagtaag

SEQ ID NO: 46858 - DNA, 96 bp, Fusarium virguliforme
  misc_feature: 52
ctctttatttataatttatagttatttcctctttatttatgatactttatttataaaaggagttttttagtttaagagaaaaaggtaattaattat

SEQ ID NO: 46859 - DNA, 96 bp, Fusarium virguliforme
  misc_feature: 52
ctcctatttaagtaaataatataaaaaataaagctatctctaaattattaataatacctcccttaatattattatcttaaatacctttattacctt

SEQ ID NO: 46860 - DNA, 96 bp, Fusarium virguliforme
  misc_feature: 52
ctataacttattatattttaactctaggtatttaatattactagtatatttattaagctattagtatttatagtcaaggtatttaatttatattat

SEQ ID NO: 46861 - DNA, 96 bp, Fusarium virguliforme
  misc_feature: 52
ctactttagatttattatatttatagttatatacccggaaatactactgcggtataatataatataatataaagactcacctatctatttagctag

SEQ ID NO: 46862 - DNA, 96 bp, Fusarium virguliforme
  misc_feature: 52
ataaagaaaataattaacgaaagggtttttttattctatagttatatttagctatatatagactcgctatatttctatataatacccttattctag

SEQ ID NO: 46863 - DNA, 96 bp, Fusarium virguliforme
  misc_feature: 52
ctacttagcgagaagcttttaatatatattttttaatggctgaaatactcctatatctattagctataatatatatatagagtaaggaggtaaggg

SEQ ID NO: 46864 - DNA, 96 bp, Fusarium virguliforme
  misc_feature: 52
ctaatgccttcccctctctatctttctttctttttttttctttcttttctttcttttctttctttcttttcttttttttctttctttcttttcttt

SEQ ID NO: 46865 - DNA, 96 bp, Fusarium virguliforme
  misc_feature: 52
aagctaattaccctttaatatattaaataagtagaaaaataagatataatcgatatattagtctatatagacctatagataggagacctctattag

SEQ ID NO: 46866 - DNA, 96 bp, Fusarium virguliforme
  misc_feature: 52
cggagacgcaataagtaatagttaataaggtaaatagtaatataaaccggggatcttaatataatatagaatacctaaatacctatataataatat

SEQ ID NO: 46867 - DNA, 96 bp, Fusarium virguliforme
  misc_feature: 52
ataaccttaagctcttaatttaataaattataactaaggcctaaagaattaatatccttaattaataaaataccttactaaggaagttttatagcg

SEQ ID NO: 46868 - DNA, 96 bp, Fusarium virguliforme
  misc_feature: 52
aagataagaaaaaggagtaaaagaaagagaagtaagaagagagagagaaagaggaaagggagaaagataagagaaagtaatatattctaatatagg

SEQ ID NO: 46869 - DNA, 96 bp, Fusarium virguliforme
  misc_feature: 52
attacttaagaaactatttattaatattattattcatatttagaaccgttaggataatattaaattatcttagaaattattactaaagcctaaaat

SEQ ID NO: 46870 - DNA, 96 bp, Fusarium virguliforme
  misc_feature: 52
atttatttatttttaggcttattacctttctctttttctttttaaaccttcccttcttaaatctcttattaaaattaagtagagaagtttaataat

SEQ ID NO: 46871 - DNA, 96 bp, Fusarium virguliforme
  misc_feature: 52
atattatctttaaccttatattatacttatttacgaactatatatattatatatattaaccgtaaatttagcttataatattttaattaaataaat

SEQ ID NO: 46872 - DNA, 96 bp, Fusarium virguliforme
  misc_feature: 52
agagttcggtataattaagagctatatagcttattctttaggtataaggctattaagtatatagattatattatcttagcttataagctttataat

SEQ ID NO: 46873 - DNA, 96 bp, Fusarium virguliforme
  misc_feature: 52
attactaactctagtatataagcctttagattaacttaagcctctttttaataagcttattttacgccttttaagttaccttttattaattagctt

SEQ ID NO: 46874 - DNA, 96 bp, Fusarium virguliforme
  misc_feature: 52
atcttattaaagaggctaatcgcctatataataatttaatatttaggcttaaacttaatattaacttacttaagattaaagataatatagctaatt

SEQ ID NO: 46875 - DNA, 96 bp, Fusarium virguliforme
  misc_feature: 52
atagtagtcttactaaaaataaatagctaaaggctaagttaaagctagataaagctaaaacttaaaggttttaaataaagatatttaaaactagat

SEQ ID NO: 46876 - DNA, 96 bp, Fusarium virguliforme
  misc_feature: 52
atctaataaagttattcctaactttatctctttatattaatctttctatttgatatatctcactcttctttatattatctaatactatatcgactt

SEQ ID NO: 46877 - DNA, 96 bp, Fusarium virguliforme
  misc_feature: 52
aagaaactatttattaatattattattcatatttagaaccgttaggataatattaaattatcttagaaattattactaaagcctaaaattaaggat

SEQ ID NO: 46878 - DNA, 96 bp, Fusarium virguliforme
  misc_feature: 52
atatcgactaaatataataacttctcctttatatagtcttattttattatagctactttatgctatagttatagtctttaatatttatattgctat

SEQ ID NO: 46879 - DNA, 96 bp, Fusarium virguliforme
  misc_feature: 52
atataaatatataattatatgccctatattaaaagatagtgagtataataagtatatataaggtgatataattagttaattaggagtcctagagtt

SEQ ID NO: 46880 - DNA, 96 bp, Fusarium virguliforme
  misc_feature: 52
agagtatctaaaggataatatatctaattattactatcctatcctataataaggatataataatattatctaccgctaagtcctatactaccctat

SEQ ID NO: 46881 - DNA, 96 bp, Fusarium virguliforme
  misc_feature: 52
atactcttagatatttttcgatattattaaaaaattagccttttactaaaaaatacctaaatatatacttataaaaagaagctactttagccctat

SEQ ID NO: 46882 - DNA, 96 bp, Fusarium virguliforme
  misc_feature: 52
atacctataatattataaggttatctagatcttatatatagactataggggtaaaatatatctatataagaaaaagaagtaagattactttcctat

SEQ ID NO: 46883 - DNA, 96 bp, Fusarium virguliforme
  misc_feature: 52
acttatattattattaatagtatcgctataagcgtatatattataatataagttatttttctttagtttatagcgcttttctagcggggtagctat

SEQ ID NO: 46884 - DNA, 96 bp, Fusarium virguliforme
  misc_feature: 52
aggcagaggcaatacttatattttaggattaatatactatatagatatatattagcacttatactatcgttagtataattattaagtagatagtat

SEQ ID NO: 46885 - DNA, 96 bp, Fusarium virguliforme
  misc_feature: 52
agagagatataataaaatactaaatattactaatagatatagagtaaggactataatatctagactaataaataagggatcattattaaaatcact

SEQ ID NO: 46886 - DNA, 96 bp, Fusarium virguliforme
  misc_feature: 52
agtgattataatttcctatagggcttatagtattatacctttattttcgcgtataagttatattatagtttatctaggatttattatttatttatt

SEQ ID NO: 46887 - DNA, 96 bp, Fusarium virguliforme
  misc_feature: 52
actactataagtattaaaatagataacctctatataactatagaataaatagctacctcctaataggtataaaataaataatacctaaataatact

SEQ ID NO: 46888 - DNA, 96 bp, Fusarium virguliforme
  misc_feature: 52
agggataagctaagaaaaaagataagctatattattatgcggttatataagagcttaagtattaataagcttagatatttaattaattaagttact

SEQ ID NO: 46889 - DNA, 96 bp, Fusarium virguliforme
  misc_feature: 52
aattaaagggtaattcctatttattaataaagctaaaaataaaaaggtataaaaagagctaggtaatatagagagatataaggaaaaaggtaccct

SEQ ID NO: 46890 - DNA, 96 bp, Fusarium virguliforme
  misc_feature: 52
aggcgtttaattctaaaattataccttatatttactatttccgctaaagcttattttataaggttattcctaattattttaattattattctaatt

SEQ ID NO: 46891 - DNA, 96 bp, Fusarium virguliforme
  misc_feature: 52
aggccctcttattaataattaaggtattatagcctaaatagtcccctattatgtattattatattccctataaattccctttatattacactaatt

SEQ ID NO: 46892 - DNA, 96 bp, Fusarium virguliforme
  misc_feature: 52
aagagaataatagatttataaattattttacctttaccttaattaagtaatacttaatttacgcctaataattataagccctagactatttatcct

SEQ ID NO: 46893 - DNA, 96 bp, Fusarium virguliforme
  misc_feature: 52
aataaagagcctaaaagaggtatttcttattacttcctccccttagctataattttctttcttttctttctttattattattattactagcttcct

SEQ ID NO: 46894 - DNA, 96 bp, Fusarium virguliforme
  misc_feature: 52
aggaaatatctatattcctatttcttagcgagatatatcttatatatatagtatcggcataagagctatataaccttatagtattaggggtatctt

SEQ ID NO: 46895 - DNA, 96 bp, Fusarium virguliforme
  misc_feature: 52
agatataactttcttctttctttaaagaagatatattcttctttcttcaaagaggatatctctcttctactttaaagaagatataaccttctttct

SEQ ID NO: 46896 - DNA, 96 bp, Fusarium virguliforme
  misc_feature: 52
aaaagctttatatctttttctcttttttttcttttttttctttctttaattttatctacctctattatctacttttgcctttatattactctttct

SEQ ID NO: 46897 - DNA, 96 bp, Fusarium virguliforme
  misc_feature: 52
acaagtagtagcttctttagctaaatttaactgctctttattttattattataaggggctttaatttaccttaatttatagctttataattacttt

SEQ ID NO: 46898 - DNA, 96 bp, Fusarium virguliforme
  misc_feature: 52
aagctcggtcataaggtaaatatatataagaaaaagatataaaatatcgcaaaaggaaaatattaacctaaaaggtactaagaataatagtcactt

SEQ ID NO: 46899 - DNA, 96 bp, Fusarium virguliforme
  misc_feature: 52
aagcttattatacttaatataagcattatatatttcctagcttagctagactactataagatagcgccttattaataatatttaatattaatactt

SEQ ID NO: 46900 - DNA, 96 bp, Fusarium virguliforme
  misc_feature: 52
aaatataaaaaaacttccttaatattagataattaatgcttttttaatatccgcattttccctcttttatatctttttctttatatatattaagtt

SEQ ID NO: 46901 - DNA, 96 bp, Fusarium virguliforme
  misc_feature: 52
aaaggattaataaacctaatggttaaattaattaatgtacgataagataattaagcttaggtctaataaataataatattagagtagaataaggtt

SEQ ID NO: 46902 - DNA, 96 bp, Fusarium virguliforme
  misc_feature: 51
tttttttttctttcttttctttcttttctttctttcttttcttttttttctttctttcttttcttttttccttacttttaccctttactactccct

SEQ ID NO: 46903 - DNA, 96 bp, Fusarium virguliforme
  misc_feature: 51
ttttctaagttaatattaggtatactatctatctaaaataagctataataatagctatttctatagccctattatttatatctattttaataatta

SEQ ID NO: 46904 - DNA, 96 bp, Fusarium virguliforme
  misc_feature: 51
atactatatatataataaggtaaagaggcattattattatacttactatatactatatagctatattaatagaataggaggctaaaaaaaataaaa

SEQ ID NO: 46905 - DNA, 96 bp, Fusarium virguliforme
  misc_feature: 51
ctatttattatttataaaacgtgccgttatatatatattggtaagtatattaagtagcatataaagtaatattataggtctatttagataataaaa

SEQ ID NO: 46906 - DNA, 96 bp, Fusarium virguliforme
  misc_feature: 51
ttttatcttattccttaattaaggttataaagaggttaatataaaatatagaacctaattataagtaatatagcctaataataagcggtataaacc

SEQ ID NO: 46907 - DNA, 96 bp, Fusarium virguliforme
  misc_feature: 51
tctcgtctatatctatcttattaggtcttcttctatatctccctatctctatatctctataattatctaaaactttaaaaaaaataaaaactaaaa

SEQ ID NO: 46908 - DNA, 96 bp, Fusarium virguliforme
  misc_feature: 51
ttttagctatattaattaataatcgtaatctatctgccttatatcttattaatttagggttattatattaccgataaaccctttcttaaaattatt

SEQ ID NO: 46909 - DNA, 96 bp, Fusarium virguliforme
  misc_feature: 51
ttattatatctagtaatatatttaagggtattaagtataattaaattatattaaatttcctccttaagtggtaattattattgatataatttaaaa

SEQ ID NO: 46910 - DNA, 96 bp, Fusarium virguliforme
  misc_feature: 51
agtagtaaagggtaaaagtaaggaaaaaagaaaagaaagaaagaaaaaaaagaaaagaaagaaagaaaagaaagaaaagaaagaaaaaaaaagaaa

SEQ ID NO: 46911 - DNA, 96 bp, Fusarium virguliforme
  misc_feature: 51
tttcttttttccttatttttaccttttattactccctttttacccttcctataacttactatttactctcctacctttccttttaccccttaactc

SEQ ID NO: 46912 - DNA, 96 bp, Fusarium virguliforme
  misc_feature: 51
gtaaagggtaaaagtaaggaaaaaagaaaagaaagaaagaaaaaaaagaaaagaaagaaagaaaagaaagaaaagaaagaaaaaaaaagaaagaaa

SEQ ID NO: 46913 - DNA, 96 bp, Fusarium virguliforme
  misc_feature: 51
ctttaagatataaaaagtaactaaaagtaattaaagttaattatacgctatataaaaatactaactaagctagattatttttcccttattaagaaa

SEQ ID NO: 46914 - DNA, 96 bp, Fusarium virguliforme
  misc_feature: 51
tttcctttttcttaaggtagggtaataattattaattaatctaccgctagattaagtaattagctatttatttaatattaacctattatatttaat

SEQ ID NO: 46915 - DNA, 96 bp, Fusarium virguliforme
  misc_feature: 51
tttattttttattattcctaggctagttagatatatatattagtgctattattctagtagtatattccttattcgtcggtctaaatattatagtcc

SEQ ID NO: 46916 - DNA, 96 bp, Fusarium virguliforme
  misc_feature: 51
taaataggctataataaagtcttaagaagataataagaggcgtaataataaaaaggtaataatatagaaaaggccttaagtaaggtaaataataaa

SEQ ID NO: 46917 - DNA, 96 bp, Fusarium virguliforme
  misc_feature: 51
ttatatttttttaaatcctatatatctagctctagagttattataataataataaaggacctttaattttaatactttttattttaggataataaa

SEQ ID NO: 46918 - DNA, 96 bp, Fusarium virguliforme
  misc_feature: 51
tttattaaaaaaaggattattttaattatatttacttatatacgcttattaggctaatataaatattcttcttataaagagtatatatatcccttt

SEQ ID NO: 46919 - DNA, 96 bp, Fusarium virguliforme
  misc_feature: 51
tttatatttttttaagtttatattttaatcttttaattcttaattcttatttcttttccctttctttcctttcctttctttttctttttactagcc

SEQ ID NO: 46920 - DNA, 96 bp, Fusarium virguliforme
  misc_feature: 51
tttatatttagttatatagatattattaaggttaggtaagttattattaaagttaagtaagttattattaaggtcggataatattagcgcctaaat

SEQ ID NO: 46921 - DNA, 96 bp, Fusarium virguliforme
  misc_feature: 51
tacctagctctttttatacctttttatttttagctttattaataaataggaattaccctttaattattagatctaggagaccttttaatatataaa

SEQ ID NO: 46922 - DNA, 96 bp, Fusarium virguliforme
  misc_feature: 51
aataactttagtattttagattatctataattataaggagcttttattagtctatagcctatttttatttttagtctttaagcttttaagactaaa

SEQ ID NO: 46923 - DNA, 96 bp, Fusarium virguliforme
  misc_feature: 51
tttacttttacctatatatatacccttactactttacccttaaccttttaatttattaaaactttaatttactttaccttctctttacctttacct

SEQ ID NO: 46924 - DNA, 96 bp, Fusarium virguliforme
  misc_feature: 51
tttaataattaaactacctatttatatagcttatcttatatataggcttatagatattttattacggtctaatatattcttttagtttagctatct

SEQ ID NO: 46925 - DNA, 96 bp, Fusarium virguliforme
  misc_feature: 51
tcttttcctatccatttattttaattaaatatataaccctatttcttatataaagtaaaagactattaagtaaaataataatatcaagggcttaaa

SEQ ID NO: 46926 - DNA, 96 bp, Fusarium virguliforme
  misc_feature: 51
tttaaattatatatttcttttagctatattaattaataatcgtaatctatctgccttatatcttattaatttagggttattatattaccgataaac

SEQ ID NO: 46927 - DNA, 96 bp, Fusarium virguliforme
  misc_feature: 51
tttaaatatattaagctcccgctaagtgcttaattatagcttaattaagttagtagctatttaattaatttattaataaggcttaagtaataatta

SEQ ID NO: 46928 - DNA, 96 bp, Fusarium virguliforme
  misc_feature: 51
tttaaatactagcttatatttatattatttgtcttttttaagatctttattagctcttttatcttattaaaataatatcttttattataagctttt

SEQ ID NO: 46929 - DNA, 96 bp, Fusarium virguliforme
  misc_feature: 51
cttattaatagcttctaagaagtataataaagcctatatatataatagtaataaaagaaataggaataaaagcgagaaagagagataatatagcaa

SEQ ID NO: 46930 - DNA, 96 bp, Fusarium virguliforme
  misc_feature: 51
ggttaagggtaaagtagtaagggtatatatataggtaaaagtaaaataagtaattataaaagggtaaaataaaagagtaagtaataaaaaaaagaa

SEQ ID NO: 46931 - DNA, 96 bp, Fusarium virguliforme
  misc_feature: 51
ttattatttataaaacgtgccgttatatatatattggtaagtatattaagtagcatataaagtaatattataggtctatttagataataaaaagaa

SEQ ID NO: 46932 - DNA, 96 bp, Fusarium virguliforme
  misc_feature: 51
ttctttaattttatttacctctattatctacttttacctttatattactctttcttttttattcctctcttttacttctatattatctatcttacc

SEQ ID NO: 46933 - DNA, 96 bp, Fusarium virguliforme
  misc_feature: 51
tctattctctatagatattataaagacggtaaagatagtaatagtaatgataatgataataataatgataataataatagaagtagggaagaagaa

SEQ ID NO: 46934 - DNA, 96 bp, Fusarium virguliforme
  misc_feature: 51
ttctctttaacttaaataacttaattatcgatttaattaacctataattcttaacctttaacttattatattaggaatctagccttatttaattta

SEQ ID NO: 46935 - DNA, 96 bp, Fusarium virguliforme
  misc_feature: 51
ttataattaattaaaatattaattattaaacctaagctactctaaatctaactactaataaatatatctaagaaagagttaatattaatactagaa

SEQ ID NO: 46936 - DNA, 96 bp, Fusarium virguliforme
  misc_feature: 51
ttctaagttaatattaggtatactatctatctaaaataagctataataatagctatttctatagccctattatttatatctattttaataattagt

SEQ ID NO: 46937 - DNA, 96 bp, Fusarium virguliforme
  misc_feature: 51
ttcgggtagttattaataacttatataatagcttaattaattattatagagttataatatcgcttagctatattaagggtcctatctatatctatt

SEQ ID NO: 46938 - DNA, 96 bp, Fusarium virguliforme
  misc_feature: 51
tattaaatagggtttataccgcttattattaggctatattacttataattaggttctatattttatattaacctctttataaccttaattaaggaa

SEQ ID NO: 46939 - DNA, 96 bp, Fusarium virguliforme
  misc_feature: 51
ttatttcttttcttacttttattatacctttaagccctttttaacctttacttccttaccttacctatttttctaaaactaaccttagcattaccc

SEQ ID NO: 46940 - DNA, 96 bp, Fusarium virguliforme
  misc_feature: 51
ttatttattacttaatatagattttttaagatagattaaattaatagcttaatctttattaagccttttttactttccttttattcttaatattat

SEQ ID NO: 46941 - DNA, 96 bp, Fusarium virguliforme
  misc_feature: 51
ttaagccctaaagggaataataggctataataagctactattctatattattaataaggtatactatataaataaggtaagtaaagagataaataa

SEQ ID NO: 46942 - DNA, 96 bp, Fusarium virguliforme
  misc_feature: 51
ttatttataaaaggcttatttacactgtgattttttagttgtttatttctttaaagttaattaggttttttaaaaacttaaaaaaattactatata

SEQ ID NO: 46943 - DNA, 96 bp, Fusarium virguliforme
  misc_feature: 51
ttaaataggctataataaagtcttaagaagataataagaggcgtaataataaaaaggtaataatatagaaaaggccttaagtaaggtaaataataa

SEQ ID NO: 46944 - DNA, 96 bp, Fusarium virguliforme
  misc_feature: 51
ttattacttaatatagattttttaagatagattaaattaatagcttaatctttattaagccttttttactttccttttattcttaatattatcctc

SEQ ID NO: 46945 - DNA, 96 bp, Fusarium virguliforme
  misc_feature: 51
ttattaaaataataactaattattccttaataatataaggggatataataaatttaattagctaaatttatccttaatgaattatcctatagacta

SEQ ID NO: 46946 - DNA, 96 bp, Fusarium virguliforme
  misc_feature: 51
ttatgtacgttattaataataataatagcggtatattaataaagacaattaatagcttaataagagcttataaggagtataatatagcctatttat

SEQ ID NO: 46947 - DNA, 96 bp, Fusarium virguliforme
  misc_feature: 51
ttatgcccttaaggcctaatagccttataaataatatataatcgatatacctatagtagtttatatagacctataagtaggagacctctgctagat

SEQ ID NO: 46948 - DNA, 96 bp, Fusarium virguliforme
  misc_feature: 51
ctcaaataatagtgagcgacatatagtaattattatacaagtaattatagagtgtataatagtagcttgaatataaatatataaatagtatcataa

SEQ ID NO: 46949 - DNA, 96 bp, Fusarium virguliforme
  misc_feature: 51
ttatatcttctatctataatactttaatatagactaatataatactaaataccgcgctaccttaataattactaaatatagcggcatataatttat

SEQ ID NO: 46950 - DNA, 96 bp, Fusarium virguliforme
  misc_feature: 51
aaataataatttagattccctttaattttaactctaatatagaatataaagataataataagggttaagacctcaataacttataatcttatataa

SEQ ID NO: 46951 - DNA, 96 bp, Fusarium virguliforme
  misc_feature: 51
aaaatactataagactctatattttattatttaattaaattattcctacccctaaccctatattattttacctattatagaatacttgacctataa

SEQ ID NO: 46952 - DNA, 96 bp, Fusarium virguliforme
  misc_feature: 51
gaaggtctattaaataatagtaggttctatttattattagcaatatatctatcgcggttattgctataataatattaatatattatccttctataa

SEQ ID NO: 46953 - DNA, 96 bp, Fusarium virguliforme
  misc_feature: 51
agggtaagtcttcttatttattatcttcccctctatctatatattcttctttattattacccctatccttacttttatatttattattaagtataa

SEQ ID NO: 46954 - DNA, 96 bp, Fusarium virguliforme
  misc_feature: 51
agatatataataatatacttattatcgttattaggtttactaaatatacttaatatatccctataataaagcgccttattagcgagggccttataa

SEQ ID NO: 46955 - DNA, 96 bp, Fusarium virguliforme
  misc_feature: 51
ttataagatcacgacttaatagactagataaagtattattgcattatattatatatagtaatagtaatatccttatattctaaagctcgcttatct

SEQ ID NO: 46956 - DNA, 96 bp, Fusarium virguliforme
  misc_feature: 51
ttagttatattttatatcttttaaattatcttctttatactctttatttatttatagagtatttatagccctttatactataatctcttattctat

SEQ ID NO: 46957 - DNA, 96 bp, Fusarium virguliforme
  misc_feature: 51
ttaggtcattagatatagtattattattattaattatactctaaggggggttaatattatctttagcgatatataaggggtagatctatatagtaa

SEQ ID NO: 46958 - DNA, 96 bp, Fusarium virguliforme
  misc_feature: 51
ttagcttattattattaattttaattactattttacttacttttattaaagctaatagcttaataataatagaaagtcctaatgaacctataagta

SEQ ID NO: 46959 - DNA, 96 bp, Fusarium virguliforme
  misc_feature: 51
ttagcttatattattattctttagtatatttatttaggtattaatcctattttaattatcccttataatctatataatctaaggtaaaaaggatct

SEQ ID NO: 46960 - DNA, 96 bp, Fusarium virguliforme
  misc_feature: 51
ctatttccgctaaagcttattttataaggttattcctaattattttaattattattctaattatattaacgtaaaggttatttataatagggctaa

SEQ ID NO: 46961 - DNA, 96 bp, Fusarium virguliforme
  misc_feature: 51
ttagaattattaaatatattccttaatactgccctataatataatattatatcgtttatatatatagaggataaagtcctatattattttatattt

SEQ ID NO: 46962 - DNA, 96 bp, Fusarium virguliforme
  misc_feature: 51
taggtaaaggtaaagagaaggtaaagtaaattaaagttttaataaattaaaaggttaagggtaaagtagtaagggtatatatataggtaaaagtaa

SEQ ID NO: 46963 - DNA, 96 bp, Fusarium virguliforme
  misc_feature: 51
ttactttattatttaccttacttaaggccttttctatattattacctttttattattacgcctcttattatcttcttaagactttattatagccta

SEQ ID NO: 46964 - DNA, 96 bp, Fusarium virguliforme
  misc_feature: 51
taatatagcttatattagataatttataagtatatatataacgtaaaaggttatattgcttatctttaattatacgattctataaacccttagtaa

SEQ ID NO: 46965 - DNA, 96 bp, Fusarium virguliforme
  misc_feature: 51
ttaccttttaagagtatttattattcctattattcctttagttagtattttcctttagcgatattatataccttcttcttaaatatatttacctta

SEQ ID NO: 46966 - DNA, 96 bp, Fusarium virguliforme
  misc_feature: 51
tatatacctttactatatattcttagtaatattaatcttagctctataatttcttaattaataccttaaataactttaataattataggagtgtaa

SEQ ID NO: 46967 - DNA, 96 bp, Fusarium virguliforme
  misc_feature: 51
ttaatttcttattatattatatagctcctaatactatatatccggctttagtattatataaggtattataatatctcttcctaccctagtttaagt

SEQ ID NO: 46968 - DNA, 96 bp, Fusarium virguliforme
  misc_feature: 51
aataaaataagataatatagcgattaaatagctttttataagagctaaagtaaactaaaagaaataatataataaaaaaaaggataacttaattaa

SEQ ID NO: 46969 - DNA, 96 bp, Fusarium virguliforme
  misc_feature: 51
ttaatattatcgcctaatatatcgcttaattagccttttataactcgctctactatataattaattaagactctaatgccggttagtaccttatgc

SEQ ID NO: 46970 - DNA, 96 bp, Fusarium virguliforme
  misc_feature: 51
ttaatatattattctataggtatttaggtattttatattatattaagatatatagctagccttaggcgctatatattatagatagttatataaaga

SEQ ID NO: 46971 - DNA, 96 bp, Fusarium virguliforme
  misc_feature: 51
aattaactattatatagcgatctatctatatatataagtacctaaaataaaaagtaaggatatataagataatatcttctactagaggtatcttaa

SEQ ID NO: 46972 - DNA, 96 bp, Fusarium virguliforme
  misc_feature: 51
ttaaatcgaccttaaaactagctaatttttaaattaacctaaaaactagctaattattaaattaaccttaaaactagtggatctttaaattaacta

SEQ ID NO: 46973 - DNA, 96 bp, Fusarium virguliforme
  misc_feature: 51
ggaaagagggatttcctaaaatataaatatagagataatctcgcgaaaggtagataaaataatataattatatagcttagcctaataattatttaa

SEQ ID NO: 46974 - DNA, 96 bp, Fusarium virguliforme
  misc_feature: 51
ttaaaggtaaaaacctattatatagcttaatctaccttctaaatataatataaagccctatatatatatatcgcggaaaatctaataaataaaagg

SEQ ID NO: 46975 - DNA, 96 bp, Fusarium virguliforme
  misc_feature: 51
ctaccccctctatatatagcttaattatataatctatagctctctataatatattattaatacctatcgatataataaattaaataatacttttaa

SEQ ID NO: 46976 - DNA, 96 bp, Fusarium virguliforme
  misc_feature: 51
tggctatatatagtgtattactcagctgtaaaggggtaacataaaaaatggaaaaagtataatcatgtaaaaaaagggatgcaaataaaactcctt

SEQ ID NO: 46977 - DNA, 96 bp, Fusarium virguliforme
  misc_feature: 51
tgcgataaggctagggtggcttctttttataggtatatatttaggtattattattaggtagctaattttttagtaatatcgaaaaatatttaagag

SEQ ID NO: 46978 - DNA, 96 bp, Fusarium virguliforme
  misc_feature: 51
tgaagtaagtcgatatagtattagataatataaagaagagtgagatatatcaaatagaaagattaatataaagagataaagttaggaataacttta

SEQ ID NO: 46979 - DNA, 96 bp, Fusarium virguliforme
  misc_feature: 51
gtaataaaaccatacgctacgctataataaatattaataaaagcaaaatcaataattctaaactaaataaaggcagagctctaaaataaaaaaaga

SEQ ID NO: 46980 - DNA, 96 bp, Fusarium virguliforme
  misc_feature: 51
tctttttctcttttttttcttttttttcttttttttctttctttaattttatttacctctattatctacttttacctttatattactctttctttt

SEQ ID NO: 46981 - DNA, 96 bp, Fusarium virguliforme
  misc_feature: 51
tcttttcttttctttcttttttccttatttttaccttttattactccctttttacccttcctataacttactatttactctcctacctttcctttt

SEQ ID NO: 46982 - DNA, 96 bp, Fusarium virguliforme
  misc_feature: 51
tcttttagctatattaattaataatcgtaatctatctgccttatatcttattaatttagggttattatattaccgataaaccctttcttaaaatta

SEQ ID NO: 46983 - DNA, 96 bp, Fusarium virguliforme
  misc_feature: 51
tctttatttaatagcttactctttcctccctccctgccctaaatattactttacttctctcctagaccttagtgcttagtcttacctttctaattc

SEQ ID NO: 46984 - DNA, 96 bp, Fusarium virguliforme
  misc_feature: 51
aggcgctaaagaggaataataatactaaaaattactctataatcgagataataagtataactataaggcctataataatagtaaatataataaaga

SEQ ID NO: 46985 - DNA, 96 bp, Fusarium virguliforme
  misc_feature: 51
accctctaaggcaataagtctattaataatatttaaatatctacttaatataaccttaagctcttaatttaataagctataactaaagcctaaaga

SEQ ID NO: 46986 - DNA, 96 bp, Fusarium virguliforme
  misc_feature: 51
tctttaccctattaaaccttacttaatttccctcctttaacctaaataatttaccttttcccctttattacctttttaaccctcttttttcttttt

SEQ ID NO: 46987 - DNA, 96 bp, Fusarium virguliforme
  misc_feature: 51
tctttaaagaagatatatccttcttctttctttaaagaagatatatccttcttctttaaagaagatatatactctcttcttcttttaaagaagata

SEQ ID NO: 46988 - DNA, 96 bp, Fusarium virguliforme
  misc_feature: 51
gtctattctctatagatattataaagacggtaaagatagtaatagtaatgataatgataataataatgataataataatagaagtagggaagaaga

SEQ ID NO: 46989 - DNA, 96 bp, Fusarium virguliforme
  misc_feature: 51
acgataaatctttttagtttttattttttttaaagttttagataattatagagatatagagatagggagatatagaagaagacctaataagataga

SEQ ID NO: 46990 - DNA, 96 bp, Fusarium virguliforme
  misc_feature: 51
atatttaagaggaaagaattaatatataaaagctataataagcaataagatactaagatataagatctatagtaggggggtttaaaataatataga

SEQ ID NO: 46991 - DNA, 96 bp, Fusarium virguliforme
  misc_feature: 51
tctatactatagagctattatgcccttattatctatcgccttattattattatcgtcgttatcgtcgtcgttatcgtcgttattattattatcgct

SEQ ID NO: 46992 - DNA, 96 bp, Fusarium virguliforme
  misc_feature: 51
tcgataattaggttaaagataatatatagatatattatacggctatatagactaagttagtatattatatatattataccgagaaaatactagata

SEQ ID NO: 46993 - DNA, 96 bp, Fusarium virguliforme
  misc_feature: 51
tcctttctttattattataacctctcttttttataataaggtcctttttatactttaatatttattaaatattttatttagctcctaaaggtcttt

SEQ ID NO: 46994 - DNA, 96 bp, Fusarium virguliforme
  misc_feature: 51
ctaaagccttaagcttctataatataataaccccctctaatatactatataatagactaagagattctaattaatatatatacttcttttgaagga

SEQ ID NO: 46995 - DNA, 96 bp, Fusarium virguliforme
  misc_feature: 51
tatagctacttaaataagggataaggaaaagtagagtaagtaagtataagagagagtgaagtaaataaagtataggtggatagaacgttataagga

SEQ ID NO: 46996 - DNA, 96 bp, Fusarium virguliforme
  misc_feature: 51
tatatactaattataaaataattaaatattagagctagaaagctttaaagaaagagaaagaaagtaaagagaagcgcataattaggatctaaaata

SEQ ID NO: 46997 - DNA, 96 bp, Fusarium virguliforme
  misc_feature: 51
tattttaattatttttcccttaatatcttcttttcttttttcttttatctatatattaactcctttaatatctttaaaatagaatttaatcctaag

SEQ ID NO: 46998 - DNA, 96 bp, Fusarium virguliforme
  misc_feature: 51
agggtaatgctaaggttagttttagaaaaataggtaaggtaaggaagtaaaggttaaaaagggcttaaaggtataataaaagtaagaaaagaaata

SEQ ID NO: 46999 - DNA, 96 bp, Fusarium virguliforme
  misc_feature: 51
tattctcgtctatatctatcttattaggtcttcttctatatctccctatctctatatctctataattatctaaaactttaaaaaaaataaaaacta

SEQ ID NO: 47000 - DNA, 96 bp, Fusarium virguliforme
  misc_feature: 51
acctaaaattaagcctctaacgcactatatatatatataaggttaattaaataaccttatcccgctaatagtataatatctaatcttaatataata

SEQ ID NO: 47001 - DNA, 96 bp, Fusarium virguliforme
  misc_feature: 51
gattaaactatctctaatatataaattaataataacttacgactaaagccttaagcttctataatataataaccccctctaatatactatataata

SEQ ID NO: 47002 - DNA, 96 bp, Fusarium virguliforme
  misc_feature: 51
tattagctaaaagtagtttaagtgggggtaaggatagataagaagataaaggaaggaaagggggtaaaaaggataaaagggagttattaaggggag

SEQ ID NO: 47003 - DNA, 96 bp, Fusarium virguliforme
  misc_feature: 51
atatattaaaaggtctcctagatctaataattaaagggtaattcctatttattaataaagctaaaaataaaaaggtataaaaagagctaggtaata

SEQ ID NO: 47004 - DNA, 96 bp, Fusarium virguliforme
  misc_feature: 51
tattaaaaaaaagagattaataattaaacccttaattaaggtattaagagttttaatctataataataattaccttataattataaaactaaaggg

SEQ ID NO: 47005 - DNA, 96 bp, Fusarium virguliforme
  misc_feature: 51
tataaataggctatattatactccttataagctcttattaagctattaattgtctttattaatataccgctattattattattaataacgtacata

SEQ ID NO: 47006 - DNA, 96 bp, Fusarium virguliforme
  misc_feature: 51
ggaataaagaagaaagagtaatataaaggcaaaagtagataatagaggtagataaaattaaagaaagaaaaaaaagaaaaaaaagagaaaaagata

SEQ ID NO: 47007 - DNA, 96 bp, Fusarium virguliforme
  misc_feature: 51
tatcttcaacctaataaggtattctatatattcttatagtatagtttcttcttatataagtgcggttttaatatattattaaaggtattcttctta

SEQ ID NO: 47008 - DNA, 96 bp, Fusarium virguliforme
  misc_feature: 51
tatctaataaagttattcctaactttatctctttatattaatctttctatttgatatatctcactcttctttatattatctaatactatatcgact

SEQ ID NO: 47009 - DNA, 96 bp, Fusarium virguliforme
  misc_feature: 51
tatctaaaagaaatatcgactaaagtaaataaaggaggtaataaaattaaaattaattactttatagtaataggtaaataagcgattaagtcgcct

SEQ ID NO: 47010 - DNA, 96 bp, Fusarium virguliforme
  misc_feature: 51
ctaagattaatattactaagaatatatagtaaaggtatataaagtagctaaaaagtataataggtataaacttaatagcctaggattattacgata

SEQ ID NO: 47011 - DNA, 96 bp, Fusarium virguliforme
  misc_feature: 51
tatcgcttaatattttattatatctctttaagttcctattatacttattatatctatcgtctataacggttatattaaagttagattaacttaagt

SEQ ID NO: 47012 - DNA, 96 bp, Fusarium virguliforme
  misc_feature: 51
tatcgcctaaatatatatcttattctattatcttcttactctcgctatttcttaatatctataattattagataattcttaatctcgctataagac

SEQ ID NO: 47013 - DNA, 96 bp, Fusarium virguliforme
  misc_feature: 51
agaaactatttattaatattattattcatatttagaaccgttaggataatattaaattatcttagaaattattactaaagcctaaaattaaggata

SEQ ID NO: 47014 - DNA, 96 bp, Fusarium virguliforme
  misc_feature: 51
tatatttcctcttaccttacttaacctttcttactaccttttcgctttctcctttctctttttacctctatctctctgccttctatcgttttctta

SEQ ID NO: 47015 - DNA, 96 bp, Fusarium virguliforme
  misc_feature: 51
gagccctttaataggcctttaaaattattaacgaaaaagtataagctaaataaaagattaaggcacttaaataaaactaatctaccttcgaatata

SEQ ID NO: 47016 - DNA, 96 bp, Fusarium virguliforme
  misc_feature: 51
tatatcgactaaatataataacttctcctttatatagtcttattttattatagctactttatgctatagttatagtctttaatatttatattgcta

SEQ ID NO: 47017 - DNA, 96 bp, Fusarium virguliforme
  misc_feature: 51
tatatatatctactccttattataactactaacttctatattatctagctttatattatccttatactatagactagggttaaatttctaatcttt

SEQ ID NO: 47018 - DNA, 96 bp, Fusarium virguliforme
  misc_feature: 51
tatagttaactcttattctataaggtctataggtattatttagatattactttagttatataataggttatagtagtttataaatatcctttaaag

SEQ ID NO: 47019 - DNA, 96 bp, Fusarium virguliforme
  misc_feature: 51
taaagtactttacgtaaatacttaatacgatatataatattaagctctaaactattaaaataaataataagctacaaaaggctaatttaatctata

SEQ ID NO: 47020 - DNA, 96 bp, Fusarium virguliforme
  misc_feature: 51
gatatataccctataatcgcgagctaataaaataatattaatactatattttaattaggtagcgaaaaagataaagataataataagctctctata

SEQ ID NO: 47021 - DNA, 96 bp, Fusarium virguliforme
  misc_feature: 51
taatattaaaattaagagaattaagctatacttctttatctaccttattattttattctttctctcttactttttataccttttatactttctata

SEQ ID NO: 47022 - DNA, 96 bp, Fusarium virguliforme
  misc_feature: 51
tagggctaaagtagcttctttttataagtatatatttaggtattttttagtaaaaggctaattttttaataatatcgaaaaatatctaagagtata

SEQ ID NO: 47023 - DNA, 96 bp, Fusarium virguliforme
  misc_feature: 51
cttaataataacttacttaactttaataataacttacctaaccttaataatatctatataactaaatataaacctagctttttttaagttattata

SEQ ID NO: 47024 - DNA, 96 bp, Fusarium virguliforme
  misc_feature: 51
ataagctaagaaaaaagataagctatattattatgcggttatataagagcttaagtattaataagcttagatatttaattaattaagttacttata

SEQ ID NO: 47025 - DNA, 96 bp, Fusarium virguliforme
  misc_feature: 51
cctatccatttattttaattaaatatataaccctatttcttatataaagtaaaagactattaagtaaaataataatatcaagggcttaaagttata

SEQ ID NO: 47026 - DNA, 96 bp, Fusarium virguliforme
  misc_feature: 51
tataaattaaagaggaataacttatattataatatatacgcttatagcgatactattaacgataatataagtaagctattatttcctattacgcgc

SEQ ID NO: 47027 - DNA, 96 bp, Fusarium virguliforme
  misc_feature: 51
attagtttctatatatattatatagcttctagtactataggtctagcttttatattatataaagtattatagtgcctcttcctaccttagtttata

SEQ ID NO: 47028 - DNA, 96 bp, Fusarium virguliforme
  misc_feature: 51
tagttaagaaagaggagtaaagctaaaaacaaaatataataataaagaataataagctatatttaataggattattaagataatagaaagaggctt

SEQ ID NO: 47029 - DNA, 96 bp, Fusarium virguliforme
  misc_feature: 51
aactttaaaggatatttataaactactataacctattatataactaaagtaatatctaaataatacctatagaccttatagaataagagttaacta

SEQ ID NO: 47030 - DNA, 96 bp, Fusarium virguliforme
  misc_feature: 51
taatacctaaattagactccctatatatattatttttattaagttaggctaactattaactagcttattatattcttccttagttaatatagacta

SEQ ID NO: 47031 - DNA, 96 bp, Fusarium virguliforme
  misc_feature: 51
ataactataaatataataaatctaaagtagaaattaatagatagcctaaaagacctaaagtagtaaaaatatagtatatcttattataagtgacta

SEQ ID NO: 47032 - DNA, 96 bp, Fusarium virguliforme
  misc_feature: 51
tagtaataaagctaggatattaatagaattatccggtattactataatattcttataccttaatttattaatactataatctataagatcggcttt

SEQ ID NO: 47033 - DNA, 96 bp, Fusarium virguliforme
  misc_feature: 51
taatggtaaggaataggcaatattttataaatcggttaataataattaaaattatatctacttctcgatcccttaatataattaataatagaccta

SEQ ID NO: 47034 - DNA, 96 bp, Fusarium virguliforme
  misc_feature: 51
tagggtttaggaggatcttattaatccctattatatttagtctattattattaaggttaagtaatattatatttattactctataaccccttaaat

SEQ ID NO: 47035 - DNA, 96 bp, Fusarium virguliforme
  misc_feature: 51
tagggctcccacttaggtataataaatagagctataagtaatacctagactataaatagatatcctagcactatataatatcaatagagttaagag

SEQ ID NO: 47036 - DNA, 96 bp, Fusarium virguliforme
  misc_feature: 51
agccttatagcctagacctagtatatatatattatattactatcggtatttttattactattaatatctacttctctatcttaatattcttcccta

SEQ ID NO: 47037 - DNA, 96 bp, Fusarium virguliforme
  misc_feature: 51
aaggtagaaaggctagcgagaggtaattatagtttatattaaaataaataaataaataaggaagaaataagaattaataatagcggtagggtccta

SEQ ID NO: 47038 - DNA, 96 bp, Fusarium virguliforme
  misc_feature: 51
tagcctatataataaagattaataaggcctttagagaaaaaataaagaaatacttatttattaataataaaagaaagtaaataacccttaattagc

SEQ ID NO: 47039 - DNA, 96 bp, Fusarium virguliforme
  misc_feature: 51
tagaggactttatctaatatagctatagatataattactttataactccggcatataattattcttatagatatatagtcgggaattaagtaatat

SEQ ID NO: 47040 - DNA, 96 bp, Fusarium virguliforme
  misc_feature: 51
tagaattaataaatatacttatagctactgccctataatataatcttatagcgtttatagatatataatagaaagtcttatgctattccgcggtta

SEQ ID NO: 47041 - DNA, 96 bp, Fusarium virguliforme
  misc_feature: 51
tagaaaggtaagatagataatatagaagtaaaagagaggaataaaaaagaaagagtaatataaaggtaaaagtagataatagaggtaaataaaatt

SEQ ID NO: 47042 - DNA, 96 bp, Fusarium virguliforme
  misc_feature: 51
tactttccttaatatataacctatatctataattatcctgccgtctaatataatattaaaatctaaagctatatataattataaagtataggccct

SEQ ID NO: 47043 - DNA, 96 bp, Fusarium virguliforme
  misc_feature: 51
gctagcattatatattacgctataataatactatatataataactaaaataaaccctaaccctaatttattaagcaacttatattagaaagaagta

SEQ ID NO: 47044 - DNA, 96 bp, Fusarium virguliforme
  misc_feature: 51
tactatatatataataaggtaaagaggcattattattatacttactatatactatatagctatattaatagaataggaggctaaaaaaaataaaat

SEQ ID NO: 47045 - DNA, 96 bp, Fusarium virguliforme
  misc_feature: 51
tactataagattatattataaggtagcggctataaatatatttattagttctagtagctatatataatagtaaatagttagtatatagaccggaat

SEQ ID NO: 47046 - DNA, 96 bp, Fusarium virguliforme
  misc_feature: 51
taatagcttctaagaagtataataaagcctatatatataatagtaataaaagaaataggaataaaagcgagaaagagagataatatagcaaaggta

SEQ ID NO: 47047 - DNA, 96 bp, Fusarium virguliforme
  misc_feature: 51
taattaaatagatatattagattatatagctatatattccgccgttattaaagtcgcctatactatagttatatattaattatcctaagagaggta

SEQ ID NO: 47048 - DNA, 96 bp, Fusarium virguliforme
  misc_feature: 51
aagctcccttttattacttatttatttttaggcttattgcctttcctttttccttcttaaaccttcccttcttaaatctcttatcggaattaggta

SEQ ID NO: 47049 - DNA, 96 bp, Fusarium virguliforme
  misc_feature: 51
taccctttatccctatatcttagctcgataattatatttatatattagctttaaatatacttacgctaatagtagaaataatatataagatactat

SEQ ID NO: 47050 - DNA, 96 bp, Fusarium virguliforme
  misc_feature: 51
tacataagagctcagtctcttacacttataaagaggatcgacttaattactcttccgtattaattaacgatacttctagtcgctattcccttattc

SEQ ID NO: 47051 - DNA, 96 bp, Fusarium virguliforme
  misc_feature: 51
taatgccttcccctctctatctttctttctttttttttctttcttttctttcttttctttctttcttttcttttttttctttctttcttttctttt

SEQ ID NO: 47052 - DNA, 96 bp, Fusarium virguliforme
  misc_feature: 51
gaaggtataaactttattaggcttataattatactaagtagctttattattatttagccgctatataatctatatagtattattactaagggatta

SEQ ID NO: 47053 - DNA, 96 bp, Fusarium virguliforme
  misc_feature: 51
atatattcagtactatagattatataatactatagctatacctattaatatacttttaactatattaaagcttcgcgatttatatataatatatta

SEQ ID NO: 47054 - DNA, 96 bp, Fusarium virguliforme
  misc_feature: 51
aataatagctttatattacttctttagctatataatctttctttcttacctttattcctatttcttttattactactatataagtaagctatatta

SEQ ID NO: 47055 - DNA, 96 bp, Fusarium virguliforme
  misc_feature: 51
taatatacttaccaatatatatataacggcacgttttataaataataaatagaaacttaggtaatttaataaataactctatcttagctactatta

SEQ ID NO: 47056 - DNA, 96 bp, Fusarium virguliforme
  misc_feature: 51
atttatatttctagtatattactataataataatagaggtataactattattattatgccgctaatagtattataagataatatataccgctatta

SEQ ID NO: 47057 - DNA, 96 bp, Fusarium virguliforme
  misc_feature: 51
attaagaattatattaagttctataaaattatatctattattacttactctttaatcgagttatattataagttacctcttattacctttctatta

SEQ ID NO: 47058 - DNA, 96 bp, Fusarium virguliforme
  misc_feature: 51
taataattaaaagttctcccctagtaataaagctaggatattaatagaattatccggtattactataatattcttataccttaatttattaatact

SEQ ID NO: 47059 - DNA, 96 bp, Fusarium virguliforme
  misc_feature: 51
taataatcatctttattatttatattattatttaggggttattttaccaataggtaaagtttatttatttcttattttcttagactatctattact

SEQ ID NO: 47060 - DNA, 96 bp, Fusarium virguliforme
  misc_feature: 51
attgcgcttacctatattaactttaatataataagtaaataagtattatagtatctaccctaataagtaccttaagtatatagaatatatttatta

SEQ ID NO: 47061 - DNA, 96 bp, Fusarium virguliforme
  misc_feature: 51
taataaaaccatacgctacgctataataaatattaataaaagcaaaatcaataattctaaactaaataaaggcagagctctaaaataaaaaaagac

SEQ ID NO: 47062 - DNA, 96 bp, Fusarium virguliforme
  misc_feature: 51
gcgataataataataacgataataataataataataacgataataataaggcgatagataataagggcataatagctctataatataaagcgctta

SEQ ID NO: 47063 - DNA, 96 bp, Fusarium virguliforme
  misc_feature: 51
attcttttcctatccatttattttaattaaatatataaccctatttcttatataaagtaaaagactattaagtaaaataataatatcaagggctta

SEQ ID NO: 47064 - DNA, 96 bp, Fusarium virguliforme
  misc_feature: 51
ctttctttaattttatttacctctattatctacttttacctttatattactctttcttttttattcctctcttttacttctatattatctatctta

SEQ ID NO: 47065 - DNA, 96 bp, Fusarium virguliforme
  misc_feature: 51
taagatacctctagtagaagatattatcttatatatccttactttttattttaggtacttatatatatagatagatcgctatataatagttaattt

SEQ ID NO: 47066 - DNA, 96 bp, Fusarium virguliforme
  misc_feature: 51
taagaaggtactcgagattactatatactataggttaagttatatattcgctatatataacctctatcgctataacctactcccggccggcactat

SEQ ID NO: 47067 - DNA, 96 bp, Fusarium virguliforme
  misc_feature: 51
taactatctattaccgagatataattaattattaagatagaagtaaataaaaagatagaggtaaatatataaaagggaaatatagctctatatctt

SEQ ID NO: 47068 - DNA, 96 bp, Fusarium virguliforme
  misc_feature: 51
taactataccttaattccttccttatatatttaattattacttaatacttattaggcttataattatatagtctagtattaagtagctaataatag

SEQ ID NO: 47069 - DNA, 96 bp, Fusarium virguliforme
  misc_feature: 51
taactaacttctagtaataactatatatttattattaagctattacccctatagtatagtagttatatattctaaaagacctatcttatataaagg

SEQ ID NO: 47070 - DNA, 96 bp, Fusarium virguliforme
  misc_feature: 51
taaagttaatagaaagaggtaaaagagctagaggtaggtataatagagataaggaagagagtattaagagagaagtatcttaatatactaatgaat

SEQ ID NO: 47071 - DNA, 96 bp, Fusarium virguliforme
  misc_feature: 51
cctatttaagtaaataatataaaaaataaagctatctctaaattattaataatacctcccttaatattattatcttaaatacctttattaccttta

SEQ ID NO: 47072 - DNA, 96 bp, Fusarium virguliforme
  misc_feature: 51
taaagatattaaatataataaataaggcattatagctatattaaagcttatttaagatattattatatagcttatctattaactcttatatagaat

SEQ ID NO: 47073 - DNA, 96 bp, Fusarium virguliforme
  misc_feature: 51
gatcttttttatttttaataatagctttatttagtaaagacctttacttagcctccttctaaaggtaattaagcgctatattagctactatcttta

SEQ ID NO: 47074 - DNA, 96 bp, Fusarium virguliforme
  misc_feature: 51
atctctaatataaatagctataagggtatatatattatatactttaagctgtaaaggtatttaactatatactaaagctatatctaagcctcttta

SEQ ID NO: 47075 - DNA, 96 bp, Fusarium virguliforme
  misc_feature: 51
atagtctagatttattatagctactttatattatagcgatagtatttattatttatatcgctatttaggagttattttataaagagatgaagttta

SEQ ID NO: 47076 - DNA, 96 bp, Fusarium virguliforme
  misc_feature: 51
taaaataccttaaagttaagggctttaataaagaggtaggcttaaattaaaataggggctttaataaaaagaaagggtaattaaataatatagact

SEQ ID NO: 47077 - DNA, 96 bp, Fusarium virguliforme
  misc_feature: 51
taaaaatactaatattaagaggctatataaagtataataaataaaggggtaaataaaattagctatatatagtagaaataggcttagaattaaaat

SEQ ID NO: 47078 - DNA, 96 bp, Fusarium virguliforme
  misc_feature: 51
gttatcctatttaaggggttatagagtaataaatataatattacttaaccttaataataatagactaaatataatagggattaataagatcctcct

SEQ ID NO: 47079 - DNA, 96 bp, Fusarium virguliforme
  misc_feature: 51
atatacctttactatatattcttagtaatattaatcttagctctataatttcttaattaataccttaaataactttaataattataggagtgtaac

SEQ ID NO: 47080 - DNA, 96 bp, Fusarium virguliforme
  misc_feature: 51
atgacctctatatactttaattatctaataaatttaaatcttttacctttatataactaacttttattaataaggctgaatcgcctaagggaatac

SEQ ID NO: 47081 - DNA, 96 bp, Fusarium virguliforme
  misc_feature: 51
gtatataagattattatttattttttaaaaactcttaggcttaatttaagcttatattataaggatataatatagctgacgctgcatttatttaag

SEQ ID NO: 47082 - DNA, 96 bp, Fusarium virguliforme
  misc_feature: 51
atatactatatttttactactttaggtcttttaggctatctattaatttctactttagatttattatatttatagttatatacccggaaatactac

SEQ ID NO: 47083 - DNA, 96 bp, Fusarium virguliforme
  misc_feature: 51
gtagtaaagggtaaaagtaaggaaaaaagaaaagaaagaaagaaaaaaaagaaaagaaagaaagaaaagaaagaaaagaaagaaaaaaaaagaaag

SEQ ID NO: 47084 - DNA, 96 bp, Fusarium virguliforme
  misc_feature: 51
gtaagtcttcttatttattatcttcccctctatctatatattcttctttattattacccctatccttacttttatatttattattaagtataactc

SEQ ID NO: 47085 - DNA, 96 bp, Fusarium virguliforme
  misc_feature: 51
ctaataaagttattcctaactttatctctttatattaatctttctatttgatatatctcactcttctttatattatctaatactatatcgacttac

SEQ ID NO: 47086 - DNA, 96 bp, Fusarium virguliforme
  misc_feature: 51
ggtgaactattaggatattactttattattaatatataggctatacctaatatatctatctatagtagccctattaatatttattagggaggatct

SEQ ID NO: 47087 - DNA, 96 bp, Fusarium virguliforme
  misc_feature: 51
ggtaatatataaatatataattatatgccctatattaaaagatagtgagtataataagtatatataaggtgatataattagttaattaggagtcct

SEQ ID NO: 47088 - DNA, 96 bp, Fusarium virguliforme
  misc_feature: 51
atgcgagtttaactatattagctatataatagtaaaaaactagataccttatttaatatagggtaatagatagataaatataaaaagatattaccc

SEQ ID NO: 47089 - DNA, 96 bp, Fusarium virguliforme
  misc_feature: 51
ctattactcttatttctttttatttaataccttcttttagtaatatcttatacctttttcctatatatatctgccttataattaagcttatacccc

SEQ ID NO: 47090 - DNA, 96 bp, Fusarium virguliforme
  misc_feature: 51
gggatatactagctagctagataattctatccttatactatcctcttatatattatctataatctatattatctacttattaagtagagttcttag

SEQ ID NO: 47091 - DNA, 96 bp, Fusarium virguliforme
  misc_feature: 51
gggagcttaaaagctacttataatatataaaaagaaggaaatattatagggacctaggctaagagatatatatatagaaaagaggtattaagggat

SEQ ID NO: 47092 - DNA, 96 bp, Fusarium virguliforme
  misc_feature: 51
gggaaaatatatatataataaataaagcaagaattaaggctattataacttattacctacctatatatagctatatagtagcttaacctctttact

SEQ ID NO: 47093 - DNA, 96 bp, Fusarium virguliforme
  misc_feature: 51
ggctagcattatatattacgctataataatactatatataataactaaaataaaccctaaccctaatttattaagcaacttatattagaaagaagt

SEQ ID NO: 47094 - DNA, 96 bp, Fusarium virguliforme
  misc_feature: 51
attatttatgccttctctttaacttaaataacttaattatcgatttaattaacctataattcttaacctttaacttattatattaggaatctagcc

SEQ ID NO: 47095 - DNA, 96 bp, Fusarium virguliforme
  misc_feature: 51
agcctatataataaagattaataaggcctttagagaaaaaataaagaaatacttatttattaataataaaagaaagtaaataacccttaattagcc

SEQ ID NO: 47096 - DNA, 96 bp, Fusarium virguliforme
  misc_feature: 51
ggcgaagtttacctacctcttaccttttaagagtatttattattcctattattcctttagttagtattttcctttagcgatattatataccttctt

SEQ ID NO: 47097 - DNA, 96 bp, Fusarium virguliforme
  misc_feature: 51
ggatctttaaatcgaccttaaaactagctaatttttaaattaacctaaaaactagctaattattaaattaaccttaaaactagtggatctttaaat

SEQ ID NO: 47098 - DNA, 96 bp, Fusarium virguliforme
  misc_feature: 51
ggatagagagctttcccctatatatctatagtctatcttttctttattaatacccttatatataattaataaagtctatagattattatctatatt

SEQ ID NO: 47099 - DNA, 96 bp, Fusarium virguliforme
  misc_feature: 51
ggaggtctttaatattaaagatcctctttaataaatattaataaggctactataaatagatatattaggtatagcctatatattaataataaagag

SEQ ID NO: 47100 - DNA, 96 bp, Fusarium virguliforme
  misc_feature: 51
cagtagtaaatattataatttagcttagtcataagagtattaattactataactatattatagtatataattatctttgctggctatagatattcc

SEQ ID NO: 47101 - DNA, 96 bp, Fusarium virguliforme
  misc_feature: 51
gcttttggaataattaataaaagaaaataagctaaaagagagattaagactcttaaataaacttaattagcctctaagtatagaataaaatacctc

SEQ ID NO: 47102 - DNA, 96 bp, Fusarium virguliforme
  misc_feature: 51
atatttatataatctatataaaggcgctatagtattactataataataagagtctatataggagttatatctactagagagcttataataacccgc

SEQ ID NO: 47103 - DNA, 96 bp, Fusarium virguliforme
  misc_feature: 51
gcctttaagtaagtattatataaataggtaatagagctatttagcaaaatatatagtaatatatagcttaaatttaagaaggtagaggttatagag

SEQ ID NO: 47104 - DNA, 96 bp, Fusarium virguliforme
  misc_feature: 51
cttagttaagaaagaggagtaaagctaaaaacaaaatataataataaagaataataagctatatttaataggattattaagataatagaaagaggc

SEQ ID NO: 47105 - DNA, 96 bp, Fusarium virguliforme
  misc_feature: 51
gattaataaacctaatggttaaattaattaatgtacgataagataattaagcttaggtctaataaataataatattagagtagaataaggttaaat

SEQ ID NO: 47106 - DNA, 96 bp, Fusarium virguliforme
  misc_feature: 51
aaataataataaattcttaattaatagagcctttagccttatagtaatagactatatagataatatagccttaatagatatagagacctcttaatc

SEQ ID NO: 47107 - DNA, 96 bp, Fusarium virguliforme
  misc_feature: 51
gattaaatctttcttattactttaagattatattatcttttacttattagagattcttaatataagagataggactattatatttattatataatt

SEQ ID NO: 47108 - DNA, 96 bp, Fusarium virguliforme
  misc_feature: 51
gataagcggtattagataacgtaagaatagtatcttatatattatttctactattagcgtaagtatatttaaagctaatatataaatataattatc

SEQ ID NO: 47109 - DNA, 96 bp, Fusarium virguliforme
  misc_feature: 51
acttactataataatagatatagataacccgatataagtgccttattagcctatattaatataataatataaatcactagaaaggttactattatc

SEQ ID NO: 47110 - DNA, 96 bp, Fusarium virguliforme
  misc_feature: 51
cgcctttctattatagccttagcttattattattaattttaattactattttacttacttttattaaagctaatagcttaataataatagaaagtc

SEQ ID NO: 47111 - DNA, 96 bp, Fusarium virguliforme
  misc_feature: 51
aaatagataattccaataataataataataataacgcttctatttataaatctatctctataaccgctatatataccgtagctatagagcctattc

SEQ ID NO: 47112 - DNA, 96 bp, Fusarium virguliforme
  misc_feature: 51
gaaattaccctttagaaatttataaaagaccttataaagataaagatacctaaagaaggcttagatatagaagataaataaagatataattatatt

SEQ ID NO: 47113 - DNA, 96 bp, Fusarium virguliforme
  misc_feature: 51
aaataggctataataaagtcttaagaagataataagaggcgtaataataaaaaggtaataatatagaaaaggccttaagtaaggtaaataataaag

SEQ ID NO: 47114 - DNA, 96 bp, Fusarium virguliforme
  misc_feature: 51
ctattaaagatataattaaattaaaatataggaataagagctataataataagcttacttaaattacttacttatataatatagcttataataaag

SEQ ID NO: 47115 - DNA, 96 bp, Fusarium virguliforme
  misc_feature: 51
aagaatagtatcttatatattatttctactattagcgtaagtatatttaaagctaatatataaatataattatcgagctaagatatagggataaag

SEQ ID NO: 47116 - DNA, 96 bp, Fusarium virguliforme
  misc_feature: 51
ataactaacttctagtaataactatatatttattattaagctattacccctatagtatagtagttatatattctaaaagacctatcttatataaag

SEQ ID NO: 47117 - DNA, 96 bp, Fusarium virguliforme
  misc_feature: 51
agagggttaaaaaggtaataaaggggaaaaggtaaattatttaggttaaaggagggaaattaagtaaggtttaatagggtaaagaagtaattaaag

SEQ ID NO: 47118 - DNA, 96 bp, Fusarium virguliforme
  misc_feature: 51
cttattagccctaggtttataggtagtttaggcttattataattatagcttatagggcctcttatagctttttattttattaagtattttaatatt

SEQ ID NO: 47119 - DNA, 96 bp, Fusarium virguliforme
  misc_feature: 51
cttagatatagctttagtatatagttaaatacctttacagcttaaagtatataatatatatacccttatagctatttatattagagatattatagg

SEQ ID NO: 47120 - DNA, 96 bp, Fusarium virguliforme
  misc_feature: 51
cttaatattatcgcctaatatatcgcttaattagccttttataactcgctctactatataattaattaagactctaatgccggttagtaccttatg

SEQ ID NO: 47121 - DNA, 96 bp, Fusarium virguliforme
  misc_feature: 51
cttaataaagtagcctaaagttaaggattataataaagaggtaaagttaaattaagatagagattataataaaaaggtaagattaaattaaaatag

SEQ ID NO: 47122 - DNA, 96 bp, Fusarium virguliforme
  misc_feature: 51
cttaaggtagggtaataattattaattaatctaccgctagattaagtaattagctatttatttaatattaacctattatatttaattaccgcttat

SEQ ID NO: 47123 - DNA, 96 bp, Fusarium virguliforme
  misc_feature: 51
aaactttagaaaatatttattatcgtcttaatacttaatattaataccttatccggtatatatataaggagtattatattaaattagaaatttaag

SEQ ID NO: 47124 - DNA, 96 bp, Fusarium virguliforme
  misc_feature: 51
cttaaatttccagtctaatataatactccttatatatatactaaatagggtattaatactaagtattaggataataataagtattttctaaagttt

SEQ ID NO: 47125 - DNA, 96 bp, Fusarium virguliforme
  misc_feature: 51
ctctatgctaattaaagggtataatatagcttattattagcctacttaatcttttatatatctatagcgctaatatatagctaattattaatatct

SEQ ID NO: 47126 - DNA, 96 bp, Fusarium virguliforme
  misc_feature: 51
agagtttattgataaataaataactaatcgttttattaatagtattatctaagagctcgccctatgggatcttaggtaagctaagcttagttagag

SEQ ID NO: 47127 - DNA, 96 bp, Fusarium virguliforme
  misc_feature: 51
ctcccgctaagtgcttaattatagcttaattaagttagtagctatttaattaatttattaataaggcttaagtaataattaaagacttatattacg

SEQ ID NO: 47128 - DNA, 96 bp, Fusarium virguliforme
  misc_feature: 51
ctatctagttttaaatatctttatttaaaacctttaagttttagctttatctagctttaacttagcctttagctatttatttttagtaagactact

SEQ ID NO: 47129 - DNA, 96 bp, Fusarium virguliforme
  misc_feature: 51
ctatctaagttaatatatatttatattatattcgagatagcgagattattaataggtatctttatagaattaggaatattatatataatccactcg

SEQ ID NO: 47130 - DNA, 96 bp, Fusarium virguliforme
  misc_feature: 51
aatatttaagaggaaagaattaatatataaaagctataataagcaataagatactaagatataagatctatagtaggggggtttaaaataatatag

SEQ ID NO: 47131 - DNA, 96 bp, Fusarium virguliforme
  misc_feature: 51
agtattaggttttaagagtaataaagataggcaaaaagtaaaaagtaagcagctaagtaagaaagaaagaaagagatagtaaatataacggtatag

SEQ ID NO: 47132 - DNA, 96 bp, Fusarium virguliforme
  misc_feature: 51
aataaaaaagaataataattaaaaaaataggtaaaggtaaagagaaggtaaagtaaattaaagttttaataaattaaaaggttaagggtaaagtag

SEQ ID NO: 47133 - DNA, 96 bp, Fusarium virguliforme
  misc_feature: 51
agctcccttttattacttatttatttttaggcttattgcctttcctttttccttcttaaaccttcccttcttaaatctcttatcggaattaggtag

SEQ ID NO: 47134 - DNA, 96 bp, Fusarium virguliforme
  misc_feature: 51
ctaccgcgaatataaagacctaccttctaaataaacctaataattaaaattcctttaaataaacctatatcttaaagataataatagaataaatat

SEQ ID NO: 47135 - DNA, 96 bp, Fusarium virguliforme
  misc_feature: 51
cctaatataataagttaaaggttaagaattataggttaattaaatcgataattaagttatttaagttaaagagaaggcataaataatagatattag

SEQ ID NO: 47136 - DNA, 96 bp, Fusarium virguliforme
  misc_feature: 51
cggccttattattaaaataataactaattattccttaataatataaggggatataataaatttaattagctaaatttatccttaatgaattatcct

SEQ ID NO: 47137 - DNA, 96 bp, Fusarium virguliforme
  misc_feature: 51
cgaagtttacctacctcttaccttttaagagtatttattattcctattattcctttagttagtattttcctttagcgatattatataccttcttct

SEQ ID NO: 47138 - DNA, 96 bp, Fusarium virguliforme
  misc_feature: 51
aaaaggtatttacttaattacttaagtaagtaatattattaattataaatatattaggccttaaaggtataattaaggtaaaactataaataaagg

SEQ ID NO: 47139 - DNA, 96 bp, Fusarium virguliforme
  misc_feature: 51
attctttaggctttagttatagcttattaaattaagagcttaaggttatattaagtagatatttaaatattattaatagacttattgccttagagg

SEQ ID NO: 47140 - DNA, 96 bp, Fusarium virguliforme
  misc_feature: 51
cctacttttaggctaaagaataactaaagctcgagattaataaatagctaacctaaataataaaaggctactatatattatagggcgtaaatatat

SEQ ID NO: 47141 - DNA, 96 bp, Fusarium virguliforme
  misc_feature: 51
ccaataggtataaaataaataatacttaaataatacctagataattaataatcttataattaccgctatatagggaagagatataggagaaattct

SEQ ID NO: 47142 - DNA, 96 bp, Fusarium virguliforme
  misc_feature: 51
aattattaaaatagatataaataatagggctatagaaatagctattattatagcttattttagatagatagtatacctaatattaacttagaaaat

SEQ ID NO: 47143 - DNA, 96 bp, Fusarium virguliforme
  misc_feature: 51
atagtatatatatgataggataatatatataggagtataataatatatatctctatataaggaagagtaaataatcccttaagtatatagtaaaat

SEQ ID NO: 47144 - DNA, 96 bp, Fusarium virguliforme
  misc_feature: 51
agatatttaataataccttattattaataatattaccgcttaaagtaaataatagataattagactttaaaatcgctatttaaaatactaaagaat

SEQ ID NO: 47145 - DNA, 96 bp, Fusarium virguliforme
  misc_feature: 51
attaaatagggtttataccgcttattattaggctatattacttataattaggttctatattttatattaacctctttataaccttaattaaggaat

SEQ ID NO: 47146 - DNA, 96 bp, Fusarium virguliforme
  misc_feature: 51
attatatctttatttatcttctatatctaagccttctttaggtatctttatctttataaggtcttttataaatttctaaagggtaatttcttcttt

SEQ ID NO: 47147 - DNA, 96 bp, Fusarium virguliforme
  misc_feature: 51
attagaattattaaatatattccttaatactgccctataatataatattatatcgtttatatatatagaggataaagtcctatattattttatatt

SEQ ID NO: 47148 - DNA, 96 bp, Fusarium virguliforme
  misc_feature: 51
attaatatagataggtatagctataatatatacttaatttattactcgcactaaattattatagattagctataatatatactccttctcgccgat

SEQ ID NO: 47149 - DNA, 96 bp, Fusarium virguliforme
  misc_feature: 51
aagtaatcttacttctttttcttatatagatatattttacccctatagtctatatataagatctagataaccttataatattataggtatcttaat

SEQ ID NO: 47150 - DNA, 96 bp, Fusarium virguliforme
  misc_feature: 51
agtgccggccgggagtaggttatagcgatagaggttatatatagcgaatatataacttaacctatagtatatagtaatctcgagtaccttcttaat

SEQ ID NO: 47151 - DNA, 96 bp, Fusarium virguliforme
  misc_feature: 51
attaaagatataattaaattaaaatataggaataagagctataataataagcttacttaaattacttacttatataatatagcttataataaagct

SEQ ID NO: 47152 - DNA, 96 bp, Fusarium virguliforme
  misc_feature: 51
agctcttacagttctatattaatcttttagttaaagtaaaagttaaagaattataagagtattaagccttaataataataattaaggtaaaaccat

SEQ ID NO: 47153 - DNA, 96 bp, Fusarium virguliforme
  misc_feature: 51
aataaggaaggaaaatatattagttttaaaggtaataaggaataaatatattaaaggtaagcttaagcctaaatataagatataaataacttagat

SEQ ID NO: 47154 - DNA, 96 bp, Fusarium virguliforme
  misc_feature: 51
atcgcctaaatatatatcttattctattatcttcttactctcgctatttcttaatatctataattattagataattcttaatctcgctataagact

SEQ ID NO: 47155 - DNA, 96 bp, Fusarium virguliforme
  misc_feature: 51
atccctaatgccttcccctctctatctttctttctttttttttctttcttttctttcttttctttctttcttttcttttttttctttctttctttt

SEQ ID NO: 47156 - DNA, 96 bp, Fusarium virguliforme
  misc_feature: 51
atattatgtctcttttttagttatttcccttttatttcttatatttctttttatctctccttaaaaaaaatctcccctcctatcttaatactatat

SEQ ID NO: 47157 - DNA, 96 bp, Fusarium virguliforme
  misc_feature: 51
atattatgtacgttattaataataataatagcggtatattaataaagacaattaatagcttaataagagcttataaggagtataatatagcctatt

SEQ ID NO: 47158 - DNA, 96 bp, Fusarium virguliforme
  misc_feature: 51
atattaaagtatattattattattaataacggcttatatagtaggtagcgttacttctttatattaatatataaatcttacccttaggatataagt

SEQ ID NO: 47159 - DNA, 96 bp, Fusarium virguliforme
  misc_feature: 51
agcatacgggggagagagtaaggagataagataataggaggcggcatagatataataatagcgataaataagatgctaagatatttattaatatat

SEQ ID NO: 47160 - DNA, 96 bp, Fusarium virguliforme
  misc_feature: 51
aattcgcaataaattaactatataaatttaggtaataaaatttcgactaataaatagctataattatattgcattagagataaaagagatctatat

SEQ ID NO: 47161 - DNA, 96 bp, Fusarium virguliforme
  misc_feature: 51
aaaaaagaaaaaaggtatttacttaattacttaagtaagtaatattattaattataaatatattaggccttaaaggtataattaaggtaaaactat

SEQ ID NO: 47162 - DNA, 96 bp, Fusarium virguliforme
  misc_feature: 51
actttaaaggatatttataaactactataacctattatataactaaagtaatatctaaataatacctatagaccttatagaataagagttaactat

SEQ ID NO: 47163 - DNA, 96 bp, Fusarium virguliforme
  misc_feature: 51
ataggtaatataattatatctttatttatcttctatatctaagccttctttaggtatctttatctttataaggtcttttataaatttctaaagggt

SEQ ID NO: 47164 - DNA, 96 bp, Fusarium virguliforme
  misc_feature: 51
ataggcgaagtttacctacctcttaccttttaagagtatttattattcctattattcctttagttagtattttcctttagcgatattatatacctt

SEQ ID NO: 47165 - DNA, 96 bp, Fusarium virguliforme
  misc_feature: 51
aaaattcgcaataaattaactatataaatttaggtaataaaatttcgactaataaatagctataattatattgcattagagataaaagagatctat

SEQ ID NO: 47166 - DNA, 96 bp, Fusarium virguliforme
  misc_feature: 51
ataattcaccctttaataataaataagctaggtaactaataaaagaaattaaattaagaagagaataaaataggtaataaaatcttctttctctat

SEQ ID NO: 47167 - DNA, 96 bp, Fusarium virguliforme
  misc_feature: 51
agtaattataaagctataaattaaggtaaattaaagccccttataataataaaataaagagcagttaaatttagctaaagaagctactacttgtat

SEQ ID NO: 47168 - DNA, 96 bp, Fusarium virguliforme
  misc_feature: 51
aataaggtattctatatattcttatagtatagtttcttcttatataagtgcggttttaatatattattaaaggtattcttcttagtcctctattat

SEQ ID NO: 47169 - DNA, 96 bp, Fusarium virguliforme
  misc_feature: 51
acttagattaagaggtctctatatctattaaggctatattatctatatagtctattactataaggctaaaggctctattaattaagaatttattat

SEQ ID NO: 47170 - DNA, 96 bp, Fusarium virguliforme
  misc_feature: 51
ataataaaataagataatatagcgattaaatagctttttataagagctaaagtaaactaaaagaaataatataataaaaaaaaggataacttaatt

SEQ ID NO: 47171 - DNA, 96 bp, Fusarium virguliforme
  misc_feature: 51
aattaaattatttttctttttattatattatttcttttagtttacttaagcttttataagaagctatttagttattactttactttattttattat

SEQ ID NO: 47172 - DNA, 96 bp, Fusarium virguliforme
  misc_feature: 51
agtatatatatgataggataatatatataggagtataataatatatatctctatataaggaagagtaaataatcccttaagtatatagtaaaattt

SEQ ID NO: 47173 - DNA, 96 bp, Fusarium virguliforme
  misc_feature: 51
agtagtaaaaatatagtatatcttattataagtgactatagttaattaaaggttaactagatatagtatatatagtagcgtgaagagattaaaatt

SEQ ID NO: 47174 - DNA, 96 bp, Fusarium virguliforme
  misc_feature: 51
agattaaagatatatatcggcataaggatataattatatctatattttatctaggcgtcgataatataatcggtcattagtctctcgctatttact

SEQ ID NO: 47175 - DNA, 96 bp, Fusarium virguliforme
  misc_feature: 51
actaattttaatctcttcacgctactatatatactatatctagttaacctttaattaactatagtcacttataataagatatactatatttttact

SEQ ID NO: 47176 - DNA, 96 bp, Fusarium virguliforme
  misc_feature: 51
aggaaataaataataataaattcttaattaatagagcctttagccttatagtaatagactatatagataatatagccttaatagatatagagacct

SEQ ID NO: 47177 - DNA, 96 bp, Fusarium virguliforme
  misc_feature: 51
agaaattttaaaattataataaagtaagttaatttatataattaggcgagggtaaaggtaataatatattaatcttaaggctaaatcttataattt

SEQ ID NO: 47178 - DNA, 96 bp, Fusarium virguliforme
  misc_feature: 51
aaggccctcgctaataaggcgctttattatagggatatattaagtatatttagtaaacctaataacgataataagtatattattatatatctttct

SEQ ID NO: 47179 - DNA, 96 bp, Fusarium virguliforme
  misc_feature: 51
actagctataactaaaaaccttttactttattagctttataaccttaaaatttataaattacttactataacttataacttaatctcttaaggttt

SEQ ID NO: 47180 - DNA, 96 bp, Fusarium virguliforme
  misc_feature: 51
aattcaagtggtgtatatacttgcttagtgcatatgcttattatatacgttataaggttatattatagtttatctaggacttattatttatccatt

SEQ ID NO: 47181 - DNA, 96 bp, Fusarium virguliforme
  misc_feature: 51
aattaatcatagatataacctataaaaggataagatattaatactattataagaagagcaataataaatatactcttagtaataggtagaactttt

SEQ ID NO: 47182 - DNA, 96 bp, Fusarium virguliforme
  misc_feature: 51
aatgaagtaagtcgatatagtattagataatataaagaagagtgagatatatcaaatagaaagattaatataaagagataaagttaggaataactt

SEQ ID NO: 47183 - DNA, 96 bp, Fusarium virguliforme
  misc_feature: 51
aataaggagtagatatatatagcgtatgataaggactatctttatctatattatgactagctaatattatatatagattatatagtaattatagtt

SEQ ID NO: 47184 - DNA, 96 bp, Fusarium virguliforme
  misc_feature: 51
aaaatagttacttttacctttctacctcctaccttataccctttatccttttcccttcgttcttaaactagaacttattagctattacctttactt

SEQ ID NO: 47185 - DNA, 96 bp, Fusarium virguliforme
  misc_feature: 51
aaggctattttaaagtagccttttaattttattaatatagactaattataatagctataggtaataatttaattaatccctaataaccttaatctt

SEQ ID NO: 47186 - DNA, 96 bp, Fusarium virguliforme
  misc_feature: 51
aaggaaagagggatttcctaaaatataaatatagagataatctcgcgaaaggtagataaaataatataattatatagcttagcctaataattattt

SEQ ID NO: 47187 - DNA, 96 bp, Fusarium virguliforme
  misc_feature: 51
aaagctttatatctttttctcttttttttcttttttttctttctttaattttatctacctctattatctacttttgcctttatattactctttctt

SEQ ID NO: 47188 - DNA, 96 bp, Fusarium virguliforme
  misc_feature: 51
aaattaatcatagatataacctataaaaggataagatattaatactattataagaagagcaataataaatatactcttagtaataggtagaacttt

SEQ ID NO: 47189 - DNA, 96 bp, Fusarium virguliforme
  misc_feature: 50
ttaagggtctattctcgtctatatctatcttattaggtcttcttctatatctccctatctctatatctctataattatctaaaactttaaaaaaaa

SEQ ID NO: 47190 - DNA, 96 bp, Fusarium virguliforme
  misc_feature: 50
tttttccttatttttaccttttattactccctttttacccttcctataacttactatttactctcctacctttccttttaccccttaactctactt

SEQ ID NO: 47191 - DNA, 96 bp, Fusarium virguliforme
  misc_feature: 50
gctagacctataataatctatagatataagagtatagctatatatatttaacgtatataataagcaagtgggatagataagtaagcgggataaaaa

SEQ ID NO: 47192 - DNA, 96 bp, Fusarium virguliforme
  misc_feature: 50
ttttatttatttaaggaaataaggctaaaggatatctttttattaattttatttaattaagatataagaggtttaatattactttaagggcctttt

SEQ ID NO: 47193 - DNA, 96 bp, Fusarium virguliforme
  misc_feature: 50
ttttattatttatttatttttaggcttattacctttctctttttctttttaaaccttcccttcttaaatctcttattaaaattaagtagagaagtt

SEQ ID NO: 47194 - DNA, 96 bp, Fusarium virguliforme
  misc_feature: 50
taatattattatagctcccttacctccttactctatatatatattatagctaatagatataggagtatttcagccattaaaaaatatatattaaaa

SEQ ID NO: 47195 - DNA, 96 bp, Fusarium virguliforme
  misc_feature: 50
ttttaagagctccgcttaaatagctccttaattaataggtaattaataaaggaggattatattatataattgataggaataagggataaataaaat

SEQ ID NO: 47196 - DNA, 96 bp, Fusarium virguliforme
  misc_feature: 50
tattatttataaaacgtgccgttatatatatattggtaagtatattaagtagcatataaagtaatattataggtctatttagataataaaaagaaa

SEQ ID NO: 47197 - DNA, 96 bp, Fusarium virguliforme
  misc_feature: 50
aagtagtgctagataatataaagaggtaaagtataaataactttactaaattataaaaagagatagagtaaaataagattaaagaaataatagaaa

SEQ ID NO: 47198 - DNA, 96 bp, Fusarium virguliforme
  misc_feature: 50
taaataaactatttaagttatataagttattataagttaagattattattaacctaaccattataagatttaaagcgacggtctaagcattagaaa

SEQ ID NO: 47199 - DNA, 96 bp, Fusarium virguliforme
  misc_feature: 50
aaaagggcctatactttataattatatatagctttagattttaatattatattagacggcaggataattatagatataggttatatattaaggaaa

SEQ ID NO: 47200 - DNA, 96 bp, Fusarium virguliforme
  misc_feature: 50
tttccgctaaagcttattttataaggttattcctaattattttaattattattctaattatattaacgtaaaggttatttataatagggctaatat

SEQ ID NO: 47201 - DNA, 96 bp, Fusarium virguliforme
  misc_feature: 50
tttatttcttattttcttagactatctattactcttatttctttttatttaataccttcttttagtaatatcttatacctttttcctatatatatc

SEQ ID NO: 47202 - DNA, 96 bp, Fusarium virguliforme
  misc_feature: 50
tttatgaacctatatattatatataactatgaatttagctaaaattattttaattaaatatatcttaatttatctgcctattaaggcctctgactt

SEQ ID NO: 47203 - DNA, 96 bp, Fusarium virguliforme
  misc_feature: 50
ctattaagccctaaagggaataataggctataataagctactattctatattattaataaggtatactatataaataaggtaagtaaagagataaa

SEQ ID NO: 47204 - DNA, 96 bp, Fusarium virguliforme
  misc_feature: 50
aataatataggttttagggatatattaaagtatattattattattaataacggcttatatagcgggtagtattacttccttatattaatatataaa

SEQ ID NO: 47205 - DNA, 96 bp, Fusarium virguliforme
  misc_feature: 50
aactataaaataaatagttaacttttagtaagtttagaataaataatatctaaataataccaaaatagttaataatctcgcgattattactataaa

SEQ ID NO: 47206 - DNA, 96 bp, Fusarium virguliforme
  misc_feature: 50
taataaagtaataaatctaaatatagaaatataaggaagagagaagaaaaaggaggggaaaggagaagagattaaggttagagatatataactaaa

SEQ ID NO: 47207 - DNA, 96 bp, Fusarium virguliforme
  misc_feature: 50
tttagagggtagaaaaagaagttagcgatatattttattaatatcgcggagaaagtatataatatagctataatatttatattattagccctagac

SEQ ID NO: 47208 - DNA, 96 bp, Fusarium virguliforme
  misc_feature: 50
tatagataagtaataggttaattaaaatataaaggcgaaaatagaaaataaaaatagaggtataagatagcttagaattaaagagtaaaaagtaaa

SEQ ID NO: 47209 - DNA, 96 bp, Fusarium virguliforme
  misc_feature: 50
agatagtatatatatgataggataatatatataggagtataataatatatatctctatataaggaagagtaaataatcccttaagtatatagtaaa

SEQ ID NO: 47210 - DNA, 96 bp, Fusarium virguliforme
  misc_feature: 50
tttacaataacctaaaactatatatataacccgctataaagatttataatatctattatattattctttatagtcgccttaatagtattcctactt

SEQ ID NO: 47211 - DNA, 96 bp, Fusarium virguliforme
  misc_feature: 50
tttaattttatttacctctattatctacttttacctttatattactctttcttttttattcctctcttttacttctatattatctatcttaccttt

SEQ ID NO: 47212 - DNA, 96 bp, Fusarium virguliforme
  misc_feature: 50
tatctatagattaaattaattaatataaaggaatattaaggatttattaataggaatatagctatatataaccctatatcacactatataattaaa

SEQ ID NO: 47213 - DNA, 96 bp, Fusarium virguliforme
  misc_feature: 50
tttaattactttcttttaatatttatatacttagtctttaatttattatagtatcgtaatatattccgcgatatattataccttaattagcttagt

SEQ ID NO: 47214 - DNA, 96 bp, Fusarium virguliforme
  misc_feature: 50
cttattcgtcggtctaaatattatagtccttatcctatatctattaatatcactcggtattttattatatctattatttatgacgatcgcattaaa

SEQ ID NO: 47215 - DNA, 96 bp, Fusarium virguliforme
  misc_feature: 50
atccctttacgctttattattattatcctatttacttccctcggcctatttattataaggtaagaaggtatatattatctaattaaaagtattaaa

SEQ ID NO: 47216 - DNA, 96 bp, Fusarium virguliforme
  misc_feature: 50
attaactattatatagcgatctatctatatatataagtacctaaaataaaaagtaaggatatataagataatatcttctactagaggtatcttaaa

SEQ ID NO: 47217 - DNA, 96 bp, Fusarium virguliforme
  misc_feature: 50
gaaataagataagcttataatataaattaaataccttgactataaatactaatagcttaataaatatactagtaatattaaatacctagagttaaa

SEQ ID NO: 47218 - DNA, 96 bp, Fusarium virguliforme
  misc_feature: 50
tttaaagaagatatatccttcttctttctttaaagaagatatatccttcttctttaaagaagatatatactctcttcttcttttaaagaagatata

SEQ ID NO: 47219 - DNA, 96 bp, Fusarium virguliforme
  misc_feature: 50
aaaaataataaaatgctattaaaaataaataaaactactataataattacttaaagctaatataagataataagctaatttataactatgtaacaa

SEQ ID NO: 47220 - DNA, 96 bp, Fusarium virguliforme
  misc_feature: 50
ttgggttatctatagctctaatttatttaaaagagagcataaatttaaaaataaaatagcggtaattaaggtaattaattaatatttctatattat

SEQ ID NO: 47221 - DNA, 96 bp, Fusarium virguliforme
  misc_feature: 50
ttcttttaatatttatatacttagtctttaatttattatagtatcgtaatatattccgcgatatattataccttaattagcttagtagttaggata

SEQ ID NO: 47222 - DNA, 96 bp, Fusarium virguliforme
  misc_feature: 50
actttaagatataaaaagtaactaaaagtaattaaagttaattatacgctatataaaaatactaactaagctagattatttttcccttattaagaa

SEQ ID NO: 47223 - DNA, 96 bp, Fusarium virguliforme
  misc_feature: 50
ttctctattttaactctaattatatttaacttacttttattactttataatttcttactttacaaattagcttgttataaggattaattccaatac

SEQ ID NO: 47224 - DNA, 96 bp, Fusarium virguliforme
  misc_feature: 50
gcaatatagctaatagaggaatctagaatattttaattaattaggggcttattataattattataggtatatataaaggcttcttaatatctagaa

SEQ ID NO: 47225 - DNA, 96 bp, Fusarium virguliforme
  misc_feature: 50
ttcctttttcttaaggtagggtaataattattaattaatctaccgctagattaagtaattagctatttatttaatattaacctattatatttaatt

SEQ ID NO: 47226 - DNA, 96 bp, Fusarium virguliforme
  misc_feature: 50
ttcctaatataataagttaaaggttaagaattataggttaattaaatcgataattaagttatttaagttaaagagaaggcataaataatagatatt

SEQ ID NO: 47227 - DNA, 96 bp, Fusarium virguliforme
  misc_feature: 50
ggtctcctacttataggtctatataaactactataggtatatcgattatatattatttataaggctattaggccttaagggcataattagggtgaa

SEQ ID NO: 47228 - DNA, 96 bp, Fusarium virguliforme
  misc_feature: 50
ttatttcttattttcttagactatctattactcttatttctttttatttaataccttcttttagtaatatcttatacctttttcctatatatatct

SEQ ID NO: 47229 - DNA, 96 bp, Fusarium virguliforme
  misc_feature: 50
ttattgagcttattaataaataccttataggtattcttattagcgactagcttataataagtattattattattatttaagttcttagggttatag

SEQ ID NO: 47230 - DNA, 96 bp, Fusarium virguliforme
  misc_feature: 50
ctatataattataagcctaataagtattaagtaataattaaatatataaggaaggaattaaggtatagttaagcctaggctcttataatataataa

SEQ ID NO: 47231 - DNA, 96 bp, Fusarium virguliforme
  misc_feature: 50
acccctaatactataaggttatatagctcttatgccgatactatatatataagatatatctcgctaagaaataggaatatagatatttcctaataa

SEQ ID NO: 47232 - DNA, 96 bp, Fusarium virguliforme
  misc_feature: 50
atagttattaagttataatcctacttatagtagctaatatattaataatataggacctatatagtgtatagaattattaatagagtagggtaataa

SEQ ID NO: 47233 - DNA, 96 bp, Fusarium virguliforme
  misc_feature: 50
ttatcttttatttttattacctgccttatagtctttaaagactatatttattttatcctttagtcttttatagttatataagaaaattaaattaag

SEQ ID NO: 47234 - DNA, 96 bp, Fusarium virguliforme
  misc_feature: 50
atagtaaagctatattagataatatcgattattattattattatttagaataaggtatagaaggtattatacttaatgagttaccttattagataa

SEQ ID NO: 47235 - DNA, 96 bp, Fusarium virguliforme
  misc_feature: 50
ttatctaataaagttattcctaactttatctctttatattaatctttctatttgatatatctcactcttctttatattatctaatactatatcgac

SEQ ID NO: 47236 - DNA, 96 bp, Fusarium virguliforme
  misc_feature: 50
ttatatttatcgtgagttattatattaattaaatatagaaagcttaataaaagctaaatatacttaataaaaataaagaatagcttaataagagct

SEQ ID NO: 47237 - DNA, 96 bp, Fusarium virguliforme
  misc_feature: 50
ttatatttagttatatagatattattaaggttaggtaagttattattaaagttaagtaagttattattaaggtcggataatattagcgcctaaata

SEQ ID NO: 47238 - DNA, 96 bp, Fusarium virguliforme
  misc_feature: 50
gtctatagtattatacctttatttttatatataagttatccccagtctatattactatttaccttactaactattacttattatatctttatataa

SEQ ID NO: 47239 - DNA, 96 bp, Fusarium virguliforme
  misc_feature: 50
ttatagcttattgcggcatttttatttttattatttataggttttattatattctcgtaatactttagtttagtattataggtataggttacagtt

SEQ ID NO: 47240 - DNA, 96 bp, Fusarium virguliforme
  misc_feature: 50
acttatacatttaattcctaacctattatagtattataatatattctgcgataccttatattttaattagcttaataattaaaatataatctataa

SEQ ID NO: 47241 - DNA, 96 bp, Fusarium virguliforme
  misc_feature: 50
ctagtatatatatattatattactatcggtatttttattactattaatatctacttctctatcttaatattcttccctaatagagctagtttataa

SEQ ID NO: 47242 - DNA, 96 bp, Fusarium virguliforme
  misc_feature: 50
ataataaagtaataaatctaaatatagaaatataaggaagagagaagaaaaaggaggggaaaggagaagagattaaggttagagatatataactaa

SEQ ID NO: 47243 - DNA, 96 bp, Fusarium virguliforme
  misc_feature: 50
ttaggtgcttatatctccttttatatagtatatattactttagtatttctcgagattaatatagatattttatagagtcctctcttaattcctata

SEQ ID NO: 47244 - DNA, 96 bp, Fusarium virguliforme
  misc_feature: 50
ttaggtataataaatagagctataagtaatacctagactataaatagatatcctagcactatataatatcaatagagttaagagaatagataaaag

SEQ ID NO: 47245 - DNA, 96 bp, Fusarium virguliforme
  misc_feature: 50
gatacccctaatactataaggttatatagctcttatgccgatactatatatataagatatatctcgctaagaaataggaatatagatatttcctaa

SEQ ID NO: 47246 - DNA, 96 bp, Fusarium virguliforme
  misc_feature: 50
atatcttattaaagaggctaatcgcctatataataatttaatatttaggcttaaacttaatattaacttacttaagattaaagataatatagctaa

SEQ ID NO: 47247 - DNA, 96 bp, Fusarium virguliforme
  misc_feature: 50
ttacttataattaaaacctcccttctatatatatttctaattaccttatatccttataggcttatcttttattctatatagcttccttataataac

SEQ ID NO: 47248 - DNA, 96 bp, Fusarium virguliforme
  misc_feature: 50
attatttaagtaatatataataaatatatcgaggtaatgtatataataagcaagtgggaagttatgtgagtgggatagttttccatttcctagtaa

SEQ ID NO: 47249 - DNA, 96 bp, Fusarium virguliforme
  misc_feature: 50
gaataacttatattataatatatacgcttatagcgatactattaacgataatataagtaagctattatttcctattacgcgccgactaaatcgtaa

SEQ ID NO: 47250 - DNA, 96 bp, Fusarium virguliforme
  misc_feature: 50
ataagatattactaaaagaaggtattaaataaaaagaaataagagtaatagatagtctaagaaaataagaaataaataaactttacctattggtaa

SEQ ID NO: 47251 - DNA, 96 bp, Fusarium virguliforme
  misc_feature: 50
ttaatgagggggctattatagctatagatagttaaataagctattaataaggtatttaataatagtttatattaaaactaaaaataataatagatt

SEQ ID NO: 47252 - DNA, 96 bp, Fusarium virguliforme
  misc_feature: 50
ttaatatagcttatattagataatttataagtatatatataacgtaaaaggttatattgcttatctttaattatacgattctataaacccttagta

SEQ ID NO: 47253 - DNA, 96 bp, Fusarium virguliforme
  misc_feature: 50
tatatctaattatctattatatttatttatcttaataggcttaattagcttattagatctagatagctatattagctataccttaacttatattaa

SEQ ID NO: 47254 - DNA, 96 bp, Fusarium virguliforme
  misc_feature: 50
gactctataaaatatctatattagtctcgagaaatactaaagtaatatatattatataaaaggagatataagtacttaaactcctctttatattaa

SEQ ID NO: 47255 - DNA, 96 bp, Fusarium virguliforme
  misc_feature: 50
ttaatagctatatattttactattagctagatttagttaataataatatagactatactataataaactataagatagtatagactaatagagggt

SEQ ID NO: 47256 - DNA, 96 bp, Fusarium virguliforme
  misc_feature: 50
ttaatagcctttaatagtccttaatagttactaaataataataaatataccctacgttaataaaataaaggtagtattattttatttactattatt

SEQ ID NO: 47257 - DNA, 96 bp, Fusarium virguliforme
  misc_feature: 50
taagttattatataatttaagtaataataatagctaataagagcgaaagatatagtaatagtaatatacttataaggaggcttaatagcttattaa

SEQ ID NO: 47258 - DNA, 96 bp, Fusarium virguliforme
  misc_feature: 50
ttaagggctttaataaagaggtaggcttaaattaaaataggggctttaataaaaagaaagggtaattaaataatatagacttttagcttaaatagc

SEQ ID NO: 47259 - DNA, 96 bp, Fusarium virguliforme
  misc_feature: 50
ttaaggcctaatatacttatatctttatcttttaggcgcttatacttataaatattctttattattacttaagataacgtatatatatagtgagtg

SEQ ID NO: 47260 - DNA, 96 bp, Fusarium virguliforme
  misc_feature: 50
ttaagctctttacaataacctaaaactatatatataacccgctataaagatttataatatctattatattattctttatagtcgccttaatagtat

SEQ ID NO: 47261 - DNA, 96 bp, Fusarium virguliforme
  misc_feature: 50
ataaataataataaattcttaattaatagagcctttagccttatagtaatagactatatagataatatagccttaatagatatagagacctcttaa

SEQ ID NO: 47262 - DNA, 96 bp, Fusarium virguliforme
  misc_feature: 50
ttaagaattatattaagttctataaaattatatctattattacttactctttaatcgagttatattataagttacctcttattacctttctattat

SEQ ID NO: 47263 - DNA, 96 bp, Fusarium virguliforme
  misc_feature: 50
ttaaatttccagtctaatataatactccttatatatatactaaatagggtattaatactaagtattaggataataataagtattttctaaagttta

SEQ ID NO: 47264 - DNA, 96 bp, Fusarium virguliforme
  misc_feature: 50
ttaaattatatatttcttttagctatattaattaataatcgtaatctatctgccttatatcttattaatttagggttattatattaccgataaacc

SEQ ID NO: 47265 - DNA, 96 bp, Fusarium virguliforme
  misc_feature: 50
ccttcttataaagaatattaaattagcttaggttattaagctaattaagcttatatatttattctattattatctttaagatataggtttatttaa

SEQ ID NO: 47266 - DNA, 96 bp, Fusarium virguliforme
  misc_feature: 50
ttaaaaaaaaggttattttaattatatttacttatatacgcttattaagctcatataaatattcttcttataaagagtatatatatccctttatat

SEQ ID NO: 47267 - DNA, 96 bp, Fusarium virguliforme
  misc_feature: 50
taaaaataataaaatgctattaaaaataaataaaactactataataattacttaaagctaatataagataataagctaatttataactatgtaaca

SEQ ID NO: 47268 - DNA, 96 bp, Fusarium virguliforme
  misc_feature: 50
ctctttctattatcttaataatcctattaaatatagcttattattctttattattatattttgtttttagctttactcctctttcttaactaagca

SEQ ID NO: 47269 - DNA, 96 bp, Fusarium virguliforme
  misc_feature: 50
tgaactattaggatattactttattattaatatataggctatacctaatatatctatctatagtagccctattaatatttattagggaggatcttt

SEQ ID NO: 47270 - DNA, 96 bp, Fusarium virguliforme
  misc_feature: 50
tctttagataaagaagaattaaataaatattaataatatttctagcgtctttcggtattaatataatataataacttaagtaactcttactccttc

SEQ ID NO: 47271 - DNA, 96 bp, Fusarium virguliforme
  misc_feature: 50
tctttaattttatttacctctattatctacttttacctttatattactctttcttttttattcctctcttttacttctatattatctatcttacct

SEQ ID NO: 47272 - DNA, 96 bp, Fusarium virguliforme
  misc_feature: 50
tcttctctattttaactctaattatatttaacttacttttattactttataatttcttactttacaaattagcttgttataaggattaattccaat

SEQ ID NO: 47273 - DNA, 96 bp, Fusarium virguliforme
  misc_feature: 50
tcttattagccctaggtttataggtagtttaggcttattataattatagcttatagggcctcttatagctttttattttattaagtattttaatat

SEQ ID NO: 47274 - DNA, 96 bp, Fusarium virguliforme
  misc_feature: 50
ataaattaaataccttgactataaatactaatagcttaataaatatactagtaatattaaatacctagagttaaaatataataagttatagtaaga

SEQ ID NO: 47275 - DNA, 96 bp, Fusarium virguliforme
  misc_feature: 50
aagattaataatatctatttttagctatactttaagttataataaaggtctagtactatatactttatatataagatctataaatatatcgtaaga

SEQ ID NO: 47276 - DNA, 96 bp, Fusarium virguliforme
  misc_feature: 50
tcttaataagggaaaaataatctagcttagttagtatttttatatagcgtataattaactttaattacttttagttactttttatatcttaaagta

SEQ ID NO: 47277 - DNA, 96 bp, Fusarium virguliforme
  misc_feature: 50
tcttaagccttttctttactttttagctctttttgctctttttgctctttttctttgttatcgctattttccttctttaattacttaattaggcta

SEQ ID NO: 47278 - DNA, 96 bp, Fusarium virguliforme
  misc_feature: 50
gaggtctttaatattaaagatcctctttaataaatattaataaggctactataaatagatatattaggtatagcctatatattaataataaagaga

SEQ ID NO: 47279 - DNA, 96 bp, Fusarium virguliforme
  misc_feature: 50
tctctacctaattccgataagagatttaagaagggaaggtttaagaaggaaaaaggaaaggcaataagcctaaaaataaataagtaataaaaggga

SEQ ID NO: 47280 - DNA, 96 bp, Fusarium virguliforme
  misc_feature: 50
aagtatatattttagattttctaaaatgggctatatagccctaggatttttagggaattaatcttagccttttttttttaaaaaaaagtcatgaga

SEQ ID NO: 47281 - DNA, 96 bp, Fusarium virguliforme
  misc_feature: 50
aactataccttaattccttccttatatatttaattattacttaatacttattaggcttataattatatagtctagtattaagtagctaataataga

SEQ ID NO: 47282 - DNA, 96 bp, Fusarium virguliforme
  misc_feature: 50
atatagttaaatttatgcttaaaactataatattaatatatagctccacgaaataattaataaacctaataaatatttagagtctttattaataga

SEQ ID NO: 47283 - DNA, 96 bp, Fusarium virguliforme
  misc_feature: 50
acttactatagatccctagactattatacgctttagctattatactatatatagtatctcggtatatagtatcttactatagtatcttattataga

SEQ ID NO: 47284 - DNA, 96 bp, Fusarium virguliforme
  misc_feature: 50
attatgcccttaaggcctaatagccttataaataatatataatcgatatacctatagtagtttatatagacctataagtaggagacctctgctaga

SEQ ID NO: 47285 - DNA, 96 bp, Fusarium virguliforme
  misc_feature: 50
tctagagatatagctctaagtagaggctaataactggatctattattaataatataataggtaggtaaggttaataataatatataaactccacct

SEQ ID NO: 47286 - DNA, 96 bp, Fusarium virguliforme
  misc_feature: 50
aaaaaaattctaaaaattctactactttttaaccttaaaaaactaaaaaaaaactaaaaaaagatataaaaagacccacattttaaggtttctaga

SEQ ID NO: 47287 - DNA, 96 bp, Fusarium virguliforme
  misc_feature: 50
tctacctaattccgataagagatttaagaagggaaggtttaagaaggaaaaaggaaaggcaataagcctaaaaataaataagtaataaaagggagc

SEQ ID NO: 47288 - DNA, 96 bp, Fusarium virguliforme
  misc_feature: 50
tctaaatgttatagtctttatcctatatctattagtatcgcttaatattttattatatctatcgtttatgatgatcgtattaaagttagattgact

SEQ ID NO: 47289 - DNA, 96 bp, Fusarium virguliforme
  misc_feature: 50
tcgggtagttattaataacttatataatagcttaattaattattatagagttataatatcgcttagctatattaagggtcctatctatatctattt

SEQ ID NO: 47290 - DNA, 96 bp, Fusarium virguliforme
  misc_feature: 50
aaattaaagaggaataacttatattataatatatacgcttatagcgatactattaacgataatataagtaagctattatttcctattacgcgccga

SEQ ID NO: 47291 - DNA, 96 bp, Fusarium virguliforme
  misc_feature: 50
tcggccttattattaaaataataactaattattccttaataatataaggggatataataaatttaattagctaaatttatccttaatgaattatcc

SEQ ID NO: 47292 - DNA, 96 bp, Fusarium virguliforme
  misc_feature: 50
tcgattttatttatcccttattcctatcaattatataatataatcctcctttattaattacctattaattaaggagctatttaagcggagctctta

SEQ ID NO: 47293 - DNA, 96 bp, Fusarium virguliforme
  misc_feature: 50
tagcttattctttaggtataaggctattaagtatatagattatattatcttagcttataagctttataattatagactagctttattaattatcga

SEQ ID NO: 47294 - DNA, 96 bp, Fusarium virguliforme
  misc_feature: 50
tcgaaaggtaatagccttttataaccaataaaagagcttatatagataataataaagctataataataaagtaaatcgctcgctaaaagcctaata

SEQ ID NO: 47295 - DNA, 96 bp, Fusarium virguliforme
  misc_feature: 50
tcctagtggaacattattctgaaagatagtattatttccctatatagaataactatataactatatctattagttagatataatattgattccttt

SEQ ID NO: 47296 - DNA, 96 bp, Fusarium virguliforme
  misc_feature: 50
tcctagatttaaacttttttatagatcttattaaaagtaatactttcttaaaagttaaagatatattaaagcctataaagattattaaaaagctat

SEQ ID NO: 47297 - DNA, 96 bp, Fusarium virguliforme
  misc_feature: 50
tccgaccttaataataacttacttaactttaataataacttacctaaccttaataatatctatataactaaatataaacctagctttttttaagtt

SEQ ID NO: 47298 - DNA, 96 bp, Fusarium virguliforme
  misc_feature: 50
tccctcttctaattctaaggctcatatagtcgaaatatattatagactgccctatatactcttatatatatataaccgctatagtttaatataccc

SEQ ID NO: 47299 - DNA, 96 bp, Fusarium virguliforme
  misc_feature: 50
tcccgctaagtgcttaattatagcttaattaagttagtagctatttaattaatttattaataaggcttaagtaataattaaagacttatattacgg

SEQ ID NO: 47300 - DNA, 96 bp, Fusarium virguliforme
  misc_feature: 50
gaagattaatctatattatatcgagatatacttattagctataaataagttaattgagtataataatatattaagtttcttctctaatattatgga

SEQ ID NO: 47301 - DNA, 96 bp, Fusarium virguliforme
  misc_feature: 50
ctaatttaaagctcccttttgctatttatttattcttaggcttattacctttccctttccctttttaaactttcccttcttaaatctcttattgga

SEQ ID NO: 47302 - DNA, 96 bp, Fusarium virguliforme
  misc_feature: 50
tcattagtatattaagatacttctctcttaatactctcttccttatctctattatacctacctctagctcttttacctctttctattaactttagt

SEQ ID NO: 47303 - DNA, 96 bp, Fusarium virguliforme
  misc_feature: 50
tcagtagtaaatattataatttagcttagtcataagagtattaattactataactatattatagtatataattatctttgctggctatagatattc

SEQ ID NO: 47304 - DNA, 96 bp, Fusarium virguliforme
  misc_feature: 50
ataaaataaccctatataatataactgtaacctatacctataatactaaactaaagtattacgagaatataataaaacctataaataataaaaata

SEQ ID NO: 47305 - DNA, 96 bp, Fusarium virguliforme
  misc_feature: 50
gcttaataaagtagcctaaagttaaggattataataaagaggtaaagttaaattaagatagagattataataaaaaggtaagattaaattaaaata

SEQ ID NO: 47306 - DNA, 96 bp, Fusarium virguliforme
  misc_feature: 50
tatatataggaaaaaggtataagatattactaaaagaaggtattaaataaaaagaaataagagtaatagatagtctaagaaaataagaaataaata

SEQ ID NO: 47307 - DNA, 96 bp, Fusarium virguliforme
  misc_feature: 50
atagttagatttatgcctaaaactataatattaatatatagctccgcgaaataattaataaacctaataaatacttaaagtctctattaataaata

SEQ ID NO: 47308 - DNA, 96 bp, Fusarium virguliforme
  misc_feature: 50
attaagccctaaagggaataataggctataataagctactattctatattattaataaggtatactatataaataaggtaagtaaagagataaata

SEQ ID NO: 47309 - DNA, 96 bp, Fusarium virguliforme
  misc_feature: 50
tatttataaagtcccttttatattataaggtcttttataaatataaagagagagagtcccctatataatactttatataatagagagccttctata

SEQ ID NO: 47310 - DNA, 96 bp, Fusarium virguliforme
  misc_feature: 50
cttctctattttaactctaattatatttaacttacttttattactttataatttcttactttacaaattagcttgttataaggattaattccaata

SEQ ID NO: 47311 - DNA, 96 bp, Fusarium virguliforme
  misc_feature: 50
atacctatttatcttaataggcttaattagcttattaaatctagatagctatattaattataccttaatttatattaatatcttattctaagaata

SEQ ID NO: 47312 - DNA, 96 bp, Fusarium virguliforme
  misc_feature: 50
atttagggatctttatataactatctataatatatagcgcctaaggctagctatatatcttaatataatataaaatacctaaatacctatagaata

SEQ ID NO: 47313 - DNA, 96 bp, Fusarium virguliforme
  misc_feature: 50
tattcctataaggaatatcggtctcttcttctcttcctcctatagcctcttcttcttttcctcctttagccttctcctctcttcctttaatatccc

SEQ ID NO: 47314 - DNA, 96 bp, Fusarium virguliforme
  misc_feature: 50
tattatttatgccttctctttaacttaaataacttaattatcgatttaattaacctataattcttaacctttaacttattatattaggaatctagc

SEQ ID NO: 47315 - DNA, 96 bp, Fusarium virguliforme
  misc_feature: 50
taatatagggtgagggatttttatcccgcttatttatttatcccacttgtttattatatacgttataatttattatttatcctagacttaataata

SEQ ID NO: 47316 - DNA, 96 bp, Fusarium virguliforme
  misc_feature: 50
tattattaaaataataactaattattccttaataatataaggggatataataaatttaattagctaaatttatccttaatgaattatcctatagac

SEQ ID NO: 47317 - DNA, 96 bp, Fusarium virguliforme
  misc_feature: 50
tatacggagacgcaataagtaatagttaataaggtaaatagtaatataaaccggggatcttaatataatatagaatacctaaatacctatataata

SEQ ID NO: 47318 - DNA, 96 bp, Fusarium virguliforme
  misc_feature: 50
agagatttatctactattaataataataccttaatcgtattataaggtaaataataagaggtataataacctaggaccaagaaaggttccttaata

SEQ ID NO: 47319 - DNA, 96 bp, Fusarium virguliforme
  misc_feature: 50
tattaagccctaaagggaataataggctataataagctactattctatattattaataaggtatactatataaataaggtaagtaaagagataaat

SEQ ID NO: 47320 - DNA, 96 bp, Fusarium virguliforme
  misc_feature: 50
tatcttttatttttattacctgccttatagtctttaaagactatatttattttatcctttagtcttttatagttatataagaaaattaaattaagg

SEQ ID NO: 47321 - DNA, 96 bp, Fusarium virguliforme
  misc_feature: 50
tatctcgaaaggtaatagccttttataaccaataaaagagcttatatagataataataaagctataataataaagtaaatcgctcgctaaaagcct

SEQ ID NO: 47322 - DNA, 96 bp, Fusarium virguliforme
  misc_feature: 50
tatctaattaattatttaccttccttcctttattattattacctcctttttctatagcttaatcctttttaccttttaccgccggcttaatatctt

SEQ ID NO: 47323 - DNA, 96 bp, Fusarium virguliforme
  misc_feature: 50
tatctaaatagacctataatattactttatatgctacttaatatacttaccaatatatatataacggcacgttttataaataataaatagaaactt

SEQ ID NO: 47324 - DNA, 96 bp, Fusarium virguliforme
  misc_feature: 50
taaggctagacctataataatctatagatataagagtatagctatatatatttaacgtatataataagcaagtgggatagataagtaagcgggata

SEQ ID NO: 47325 - DNA, 96 bp, Fusarium virguliforme
  misc_feature: 50
tatatttagttatatagatattattaaggttaggtaagttattattaaagttaagtaagttattattaaggtcggataatattagcgcctaaatac

SEQ ID NO: 47326 - DNA, 96 bp, Fusarium virguliforme
  misc_feature: 50
aaagagtatttttagagacctaattatatataaaacgcaaaaatatttttattagagttttaaaaaatttcctttatagagaaatagctaaatata

SEQ ID NO: 47327 - DNA, 96 bp, Fusarium virguliforme
  misc_feature: 50
aataaattatatgccgctatatttagtaattattaaggtagcgcggtatttagtattatattagtctatattaaagtattatagatagaagatata

SEQ ID NO: 47328 - DNA, 96 bp, Fusarium virguliforme
  misc_feature: 50
tatatctaagttatttatatcttatatttaggcttaagcttacctttaatatatttattccttattacctttaaaactaatatattttccttcctt

SEQ ID NO: 47329 - DNA, 96 bp, Fusarium virguliforme
  misc_feature: 50
atttaggatattatatagaggctatattattacgatattattatttagactattaggcgaagggatttctatattaagatagatattatcgatata

SEQ ID NO: 47330 - DNA, 96 bp, Fusarium virguliforme
  misc_feature: 50
cgattattagagcgctaggataagagaataataataatataaagtataaagtaattaaaggagtactatataataaagaactagaagtaatatata

SEQ ID NO: 47331 - DNA, 96 bp, Fusarium virguliforme
  misc_feature: 50
tatataggtttgggttatctatagctctaatttatttaaaagagagcataaatttaaaaataaaatagcggtaattaaggtaattaattaatattt

SEQ ID NO: 47332 - DNA, 96 bp, Fusarium virguliforme
  misc_feature: 50
ctatttaattaaggtagtattattaggaaatatctatattcctatttcttagcgagatatatcttatatatatagtatcggcataagagctatata

SEQ ID NO: 47333 - DNA, 96 bp, Fusarium virguliforme
  misc_feature: 50
tatataatctaggcgtagtcttatatctaataaagcttattataattaataaagaggcggataaaagaaaggatattaataaataataaatctcta

SEQ ID NO: 47334 - DNA, 96 bp, Fusarium virguliforme
  misc_feature: 50
tatataaatatataattatatgccctatattaaaagatagtgagtataataagtatatataaggtgatataattagttaattaggagtcctagagt

SEQ ID NO: 47335 - DNA, 96 bp, Fusarium virguliforme
  misc_feature: 50
tatagggtgagggatttttatcccgcttatttatttatcccacttgtttattatatacgttataatttattatttatcctagacttaataatatac

SEQ ID NO: 47336 - DNA, 96 bp, Fusarium virguliforme
  misc_feature: 50
ccttattattaaaataataactaattattccttaataatataaggggatataataaatttaattagctaaatttatccttaatgaattatcctata

SEQ ID NO: 47337 - DNA, 96 bp, Fusarium virguliforme
  misc_feature: 50
tatagctaatatagctatttagatctaataagctagctaagcttactaagatagatagatataataaataactaaatatatactcttacctttaat

SEQ ID NO: 47338 - DNA, 96 bp, Fusarium virguliforme
  misc_feature: 50
taggctattataaaggctaaagagatatttaataaaattagcggaattaataatattaaagcctatatataataggtatataagaaattatctata

SEQ ID NO: 47339 - DNA, 96 bp, Fusarium virguliforme
  misc_feature: 50
ggcagaggcaatacttatattttaggattaatatactatatagatatatattagcacttatactatcgttagtataattattaagtagatagtata

SEQ ID NO: 47340 - DNA, 96 bp, Fusarium virguliforme
  misc_feature: 50
tatacctttactatatattcttagtaatattaatcttagctctataatttcttaattaataccttaaataactttaataattataggagtgtaacg

SEQ ID NO: 47341 - DNA, 96 bp, Fusarium virguliforme
  misc_feature: 50
gaattattatattataagagcctaggcttaactataccttaattccttccttatatatttaattattacttaatacttattaggcttataattata

SEQ ID NO: 47342 - DNA, 96 bp, Fusarium virguliforme
  misc_feature: 50
taatagctttatattacttctttagctatataatctttctttcttacctttattcctatttcttttattactactatataagtaagctatattata

SEQ ID NO: 47343 - DNA, 96 bp, Fusarium virguliforme
  misc_feature: 50
aaccttattactcttttacttttttattacctcttattcttctttctctactttattactcttttacctttactttaaggagatctatctattata

SEQ ID NO: 47344 - DNA, 96 bp, Fusarium virguliforme
  misc_feature: 50
aatataataagcttagctattattagtttatttaggatcttcctatagataaagatatatatctataggtatatattattatcctaaattattata

SEQ ID NO: 47345 - DNA, 96 bp, Fusarium virguliforme
  misc_feature: 50
tataagatattactaaaagaaggtattaaataaaaagaaataagagtaatagatagtctaagaaaataagaaataaataaactttacctattggta

SEQ ID NO: 47346 - DNA, 96 bp, Fusarium virguliforme
  misc_feature: 50
tagcttattgcggcatttttatttttattatttataggttttattatattctcgtaatactttagtttagtattataggtataggttacagttata

SEQ ID NO: 47347 - DNA, 96 bp, Fusarium virguliforme
  misc_feature: 50
tataaaattaaataataaaactatttctattttttaggtaatttattattatagcttaaagtattaattctttagtattactattctcttaatcgc

SEQ ID NO: 47348 - DNA, 96 bp, Fusarium virguliforme
  misc_feature: 50
tagtttaatcttctaactattaactattaataattaataagattaacttactaaagtattacttctgataaaataattattaatattaatattctt

SEQ ID NO: 47349 - DNA, 96 bp, Fusarium virguliforme
  misc_feature: 50
tagtctaaatattatagtcctcgttctatatttattagtatcgcttaatattttattatatttattattcgcgataatcgcattaaagttagatta

SEQ ID NO: 47350 - DNA, 96 bp, Fusarium virguliforme
  misc_feature: 50
tagtatatatatgataggataatatatataggagtataataatatatatctctatataaggaagagtaaataatcccttaagtatatagtaaaatt

SEQ ID NO: 47351 - DNA, 96 bp, Fusarium virguliforme
  misc_feature: 50
tagtactaaatttttaagatatatagataggttactatatataggcttattatagtaaatatttatcgataagtattatatagttattatagatat

SEQ ID NO: 47352 - DNA, 96 bp, Fusarium virguliforme
  misc_feature: 50
tagtaatagataaagtaaagaataggtaattctatataaagcaagagtatttaatataaggagtaaggtaatagtattatataatatattataagg

SEQ ID NO: 47353 - DNA, 96 bp, Fusarium virguliforme
  misc_feature: 50
taggttttctaatgcttagaccgtcgctttaaatcttataatggttaggttaataataatcttaacttataataacttatataacttaaatagttt

SEQ ID NO: 47354 - DNA, 96 bp, Fusarium virguliforme
  misc_feature: 50
tagggtgagggatttttatcccgcttatttatttatcccacttgtttattatatacgttataatttattatttatcctagacttaataatatacct

SEQ ID NO: 47355 - DNA, 96 bp, Fusarium virguliforme
  misc_feature: 50
gagagtatctaaaggataatatatctaattattactatcctatcctataataaggatataataatattatctaccgctaagtcctatactacccta

SEQ ID NO: 47356 - DNA, 96 bp, Fusarium virguliforme
  misc_feature: 50
ctatattaatttattattatttttagttttaatagaaacccttttttaagaccttattaatagcttatttaattagctatagctatattagcccta

SEQ ID NO: 47357 - DNA, 96 bp, Fusarium virguliforme
  misc_feature: 50
agagctattaatatatattattatagccaggtcttttttattatatataacgctaattctattgcctatagctatattattagtattaataagcta

SEQ ID NO: 47358 - DNA, 96 bp, Fusarium virguliforme
  misc_feature: 50
tagcttaggttattaagctaattaagcttatatatttattctattattatctttaagatataggtttatttaaaggaattttaattattaggttta

SEQ ID NO: 47359 - DNA, 96 bp, Fusarium virguliforme
  misc_feature: 50
agtaagtactatagatataactaaaagtataaaattaattaatagccctaacttactcctaactaatataaatactaataataagtcttctagcta

SEQ ID NO: 47360 - DNA, 96 bp, Fusarium virguliforme
  misc_feature: 50
tagatatccctaaggataaattagatatccctaaggataaattaaatatccctaataataaattaaataccttaatagaagataatacctctatat

SEQ ID NO: 47361 - DNA, 96 bp, Fusarium virguliforme
  misc_feature: 50
ctagaagacttattattagtatttatattagttaggagtaagttagggctattaattaattttatacttttagttatatctatagtacttactcta

SEQ ID NO: 47362 - DNA, 96 bp, Fusarium virguliforme
  misc_feature: 50
tagaagagtttattgataaataaataactaatcgttttattaatagtattatctaagagctcgccctatgggatcttaggtaagctaagcttagtt

SEQ ID NO: 47363 - DNA, 96 bp, Fusarium virguliforme
  misc_feature: 50
tagaagacttattattagtatttatattagttaggagtaagttagggctattaattaattttatacttttagttatatctatagtacttactctag

SEQ ID NO: 47364 - DNA, 96 bp, Fusarium virguliforme
  misc_feature: 50
ataggtttgggttatctatagctctaatttatttaaaagagagcataaatttaaaaataaaatagcggtaattaaggtaattaattaatatttcta

SEQ ID NO: 47365 - DNA, 96 bp, Fusarium virguliforme
  misc_feature: 50
tacttctagttctttattatatagtactcctttaattactttatactttatattattattattctcttatcctagcgctctaataatcgaaaggta

SEQ ID NO: 47366 - DNA, 96 bp, Fusarium virguliforme
  misc_feature: 50
tacttaatttagattacctttattaataataagcgataataatattaagggaatataagtaataagttattaagagctaatattaattccgctatt

SEQ ID NO: 47367 - DNA, 96 bp, Fusarium virguliforme
  misc_feature: 50
cttaggtcattagatatagtattattattattaattatactctaaggggggttaatattatctttagcgatatataaggggtagatctatatagta

SEQ ID NO: 47368 - DNA, 96 bp, Fusarium virguliforme
  misc_feature: 50
tactatagatccctagactattatacgctttagctattatactatatatagtatctcggtatatagtatcttactatagtatcttattatagaaat

SEQ ID NO: 47369 - DNA, 96 bp, Fusarium virguliforme
  misc_feature: 50
acgtataattatataccttatactaaaagatactaagtataataagtatatataaggagatataattaattaattagaagtcccggagttatagta

SEQ ID NO: 47370 - DNA, 96 bp, Fusarium virguliforme
  misc_feature: 50
tactaactctagtatataagcctttagattaacttaagcctctttttaataagcttattttacgccttttaagttaccttttattaattagcttat

SEQ ID NO: 47371 - DNA, 96 bp, Fusarium virguliforme
  misc_feature: 50
aattatatattaataaatatcttagcatcttatttatcgctattattatatctatgccgcctcctattatcttatctccttactctctcccccgta

SEQ ID NO: 47372 - DNA, 96 bp, Fusarium virguliforme
  misc_feature: 50
tacctttattatctatttttacctttatattactcttttttctttatttctctcttttacttctatattatttatcttacctttttagctttaatt

SEQ ID NO: 47373 - DNA, 96 bp, Fusarium virguliforme
  misc_feature: 50
taaagtattttagctattaattatttgcggttatatatagagctttttataggaattattttctttttttttccgcctatagctctataataggta

SEQ ID NO: 47374 - DNA, 96 bp, Fusarium virguliforme
  misc_feature: 50
tacccttaaccttttaatttattaaaactttaatttactttaccttctctttacctttacctatttttttaattattattcttttttattattaat

SEQ ID NO: 47375 - DNA, 96 bp, Fusarium virguliforme
  misc_feature: 50
aggcgaaaaaggcttaatagagactaagctattaatttaattaattctaaataatctatattaggtaataaataaaggttattaagatatagggta

SEQ ID NO: 47376 - DNA, 96 bp, Fusarium virguliforme
  misc_feature: 50
gaggtagatagattatattatattaagtatatagtaagaggcttaatttattaatagatatagaattatttattagattaaggcgagagtgtggta

SEQ ID NO: 47377 - DNA, 96 bp, Fusarium virguliforme
  misc_feature: 50
taattatatctttatttatcttctatatctaagccttctttaggtatctttatctttataaggtcttttataaatttctaaagggtaatttcttct

SEQ ID NO: 47378 - DNA, 96 bp, Fusarium virguliforme
  misc_feature: 50
taattagtttctatatatattatatagcttctagtactataggtctagcttttatattatataaagtattatagtgcctcttcctaccttagttta

SEQ ID NO: 47379 - DNA, 96 bp, Fusarium virguliforme
  misc_feature: 50
ggcgtttaattctaaaattataccttatatttactatttccgctaaagcttattttataaggttattcctaattattttaattattattctaatta

SEQ ID NO: 47380 - DNA, 96 bp, Fusarium virguliforme
  misc_feature: 50
taaagaggtcctttaggtgccttaataggtagctatagaaataaattatattaattaattaataattaagcttatagtaataaaagtatttaatta

SEQ ID NO: 47381 - DNA, 96 bp, Fusarium virguliforme
  misc_feature: 50
taatataataagcttagctattattagtttatttaggatcttcctatagataaagatatatatctataggtatatattattatcctaaattattat

SEQ ID NO: 47382 - DNA, 96 bp, Fusarium virguliforme
  misc_feature: 50
actcttagatatttttcgatattattaaaaaattagccttttactaaaaaatacctaaatatatacttataaaaagaagctactttagccctatta

SEQ ID NO: 47383 - DNA, 96 bp, Fusarium virguliforme
  misc_feature: 50
ctagatttaaacttttttatagatcttattaaaagtaatactttcttaaaagttaaagatatattaaagcctataaagattattaaaaagctatta

SEQ ID NO: 47384 - DNA, 96 bp, Fusarium virguliforme
  misc_feature: 50
taatagctagataattaactatataggaacctagctatatatagaataggtattatagctagttatattagagttttattaagtatattctcttct

SEQ ID NO: 47385 - DNA, 96 bp, Fusarium virguliforme
  misc_feature: 50
aaaaccttattactcttttacttttttattacctcttattcttctttctctactttattactcttttacctttactttaaggagatctatctatta

SEQ ID NO: 47386 - DNA, 96 bp, Fusarium virguliforme
  misc_feature: 50
taatagaggtctcctatctataggtctatatagactaatatatcgattatatcttatttttctacttatttaatatattaaagggtaattagcttc

SEQ ID NO: 47387 - DNA, 96 bp, Fusarium virguliforme
  misc_feature: 50
taatagaatacctattacctagggaactatattattataagtggattaatctatatagctatattaatagccgaaatatagggcttatataggcct

SEQ ID NO: 47388 - DNA, 96 bp, Fusarium virguliforme
  misc_feature: 50
taatactattaataaaacgattagttatttatttatcaataaactcttctaatataatagaggcgtaagtaaaggctaggtcattcaaaagatatt

SEQ ID NO: 47389 - DNA, 96 bp, Fusarium virguliforme
  misc_feature: 50
taatactataatctattaaattaagctatttataataaatagctaaataattaacgataaggcttcctaccttaatatactctttaaaaaaaagag

SEQ ID NO: 47390 - DNA, 96 bp, Fusarium virguliforme
  misc_feature: 50
taataaagtagcctaaagttaaggattataataaagaggtaaagttaaattaagatagagattataataaaaaggtaagattaaattaaaataggg

SEQ ID NO: 47391 - DNA, 96 bp, Fusarium virguliforme
  misc_feature: 50
taataaaccgccctttagttttataattataaggtaattattattatagattaaaactcttaataccttaattaagggtttaattattaatctctt

SEQ ID NO: 47392 - DNA, 96 bp, Fusarium virguliforme
  misc_feature: 50
agggaagaataataggtaaataattatatatacttataatcgattttattatcctcttaatatattaataaagcgctaataaaagatagctactta

SEQ ID NO: 47393 - DNA, 96 bp, Fusarium virguliforme
  misc_feature: 50
taaggaagtaaggtctcccataattaatataatataaagcaaaattatagggaataaaataatatataataggggaatatttagggtataatatct

SEQ ID NO: 47394 - DNA, 96 bp, Fusarium virguliforme
  misc_feature: 50
agctagtattattaattatattattctataggtaaataggctatttacttccttatgcgcttatatattatactttaagttaatacttatagctta

SEQ ID NO: 47395 - DNA, 96 bp, Fusarium virguliforme
  misc_feature: 50
taactctctaatatcttacttatataagaagatattacttatataaagatatcgctataaagcgctagctttatactatattatagtagattctta

SEQ ID NO: 47396 - DNA, 96 bp, Fusarium virguliforme
  misc_feature: 50
taagaagggctataaggctaataaatactataagaagtaataagatattaaggaaggatattattaatagaagctataataaaacctcctagaagg

SEQ ID NO: 47397 - DNA, 96 bp, Fusarium virguliforme
  misc_feature: 50
taaatataataggttaatattaaataaatagctaattacttaatctagcggtagattaattaataattattaccctaccttaagaaaaaggaaagc

SEQ ID NO: 47398 - DNA, 96 bp, Fusarium virguliforme
  misc_feature: 50
aggaaagagggatttcctaaaatataaatatagagataatctcgcgaaaggtagataaaataatataattatatagcttagcctaataattattta

SEQ ID NO: 47399 - DNA, 96 bp, Fusarium virguliforme
  misc_feature: 50
ctatttatttttatactttagtctatttattatagcttattgcggcatttttatttttattatttataggttttattatattctcgtaatacttta

SEQ ID NO: 47400 - DNA, 96 bp, Fusarium virguliforme
  misc_feature: 50
taaagctcctatttaagtaaataatataaaaaataaagctatctctaaattattaataatacctcccttaatattattatcttaaatacctttatt

SEQ ID NO: 47401 - DNA, 96 bp, Fusarium virguliforme
  misc_feature: 50
gccttaattttaagaatataatccctagtaatattatctatatccctattaatcttaatattagcgatatattattaaatagcgggagtaagttta

SEQ ID NO: 47402 - DNA, 96 bp, Fusarium virguliforme
  misc_feature: 50
cttttcttttctttcttttttccttatttttaccttttattactccctttttacccttcctataacttactatttactctcctacctttcctttta

SEQ ID NO: 47403 - DNA, 96 bp, Fusarium virguliforme
  misc_feature: 50
gtttatatatttataaacattatataggtctagggctaataatataaatattatagctatattatatactttctccgcgatattaataaaatatat

SEQ ID NO: 47404 - DNA, 96 bp, Fusarium virguliforme
  misc_feature: 50
gttgttttatttataattgatatagtattaaaggtattactttagtatttagtttatcctttctatttatttattagttttcttataatatactat

SEQ ID NO: 47405 - DNA, 96 bp, Fusarium virguliforme
  misc_feature: 50
gttattatattataggacctagttcgacctagtgcgctgaatgcgtaaaggcttattagagatataagcgtttagggttagaggtctttgcttatg

SEQ ID NO: 47406 - DNA, 96 bp, Fusarium virguliforme
  misc_feature: 50
ataaaaataataaaatgctattaaaaataaataaaactactataataattacttaaagctaatataagataataagctaatttataactatgtaac

SEQ ID NO: 47407 - DNA, 96 bp, Fusarium virguliforme
  misc_feature: 50
aagccttccttggttttattaattattactataagttccttaaaaaatttaggaagatcgcaatattattaaccgatctaataaaaaaggacgcac

SEQ ID NO: 47408 - DNA, 96 bp, Fusarium virguliforme
  misc_feature: 50
ctataatataatattatatcgtttatatatatagaggataaagtcctatattattttatatttaagattttagtgcgaggttatcgcgagatagac

SEQ ID NO: 47409 - DNA, 96 bp, Fusarium virguliforme
  misc_feature: 50
gtattgattttctctatatatagggcgatatatataattatatattttaggtattctttagctataaatataactataagctaatcgtcctacctt

SEQ ID NO: 47410 - DNA, 96 bp, Fusarium virguliforme
  misc_feature: 50
gtattaggttttaagagtaataaagataggcaaaaagtaaaaagtaagcagctaagtaagaaagaaagaaagagatagtaaatataacggtatagt

SEQ ID NO: 47411 - DNA, 96 bp, Fusarium virguliforme
  misc_feature: 50
gtataagatattactaaaagaaggtattaaataaaaagaaataagagtaatagatagtctaagaaaataagaaataaataaactttacctattggt

SEQ ID NO: 47412 - DNA, 96 bp, Fusarium virguliforme
  misc_feature: 50
gtaataggttatattattcttattacttaattctattaatttaaggaaataaagctaagggatattcttttattaattttattatttaattaagat

SEQ ID NO: 47413 - DNA, 96 bp, Fusarium virguliforme
  misc_feature: 50
aatacctaataatataaataatataagccttagtaataaacttaatatttaagtaaaaagaaaggtaaggcgataatctataattaagatatttac

SEQ ID NO: 47414 - DNA, 96 bp, Fusarium virguliforme
  misc_feature: 50
attaaaaggggcttttaaaattaaatcttaaaggctcttataaaggtaataataataattacttttctaaaataatatctaaagtttaatattacc

SEQ ID NO: 47415 - DNA, 96 bp, Fusarium virguliforme
  misc_feature: 50
agctcctatttaagtaaataatataaaaaataaagctatctctaaattattaataatacctcccttaatattattatcttaaatacctttattacc

SEQ ID NO: 47416 - DNA, 96 bp, Fusarium virguliforme
  misc_feature: 50
ggtaagtcttcttatttattatcttcccctctatctatatattcttctttattattacccctatccttacttttatatttattattaagtataact

SEQ ID NO: 47417 - DNA, 96 bp, Fusarium virguliforme
  misc_feature: 50
gggttttcttattttattagttctaggagaagttattattatatatcttaggttttctttagttatttctttatttatcttacctaactataggct

SEQ ID NO: 47418 - DNA, 96 bp, Fusarium virguliforme
  misc_feature: 50
aggagagtatctaaaggataatatatctaattattactatcctatcctataataaggatataataatattatctaccgctaagtcctatactaccc

SEQ ID NO: 47419 - DNA, 96 bp, Fusarium virguliforme
  misc_feature: 50
ctatctttctttctttttttttctttcttttctttcttttctttctttcttttcttttttttctttctttcttttcttttttccttacttttaccc

SEQ ID NO: 47420 - DNA, 96 bp, Fusarium virguliforme
  misc_feature: 50
gggaggaaaagatactataataccttatataatactaaagctagacctatagtcttacgagctatataatatatatagaaattaattaaatacttc

SEQ ID NO: 47421 - DNA, 96 bp, Fusarium virguliforme
  misc_feature: 50
ataaattaaagaggaataacttatattataatatatacgcttatagcgatactattaacgataatataagtaagctattatttcctattacgcgcc

SEQ ID NO: 47422 - DNA, 96 bp, Fusarium virguliforme
  misc_feature: 50
cttatttattaaaaaaaggattattttaattatatttacttatatacgcttattaggctaatataaatattcttcttataaagagtatatatatcc

SEQ ID NO: 47423 - DNA, 96 bp, Fusarium virguliforme
  misc_feature: 50
agggccttcttatattatatattaatatccttacttaaggctataatataacactctatctttattaattttatccttaaggctatatctatatcc

SEQ ID NO: 47424 - DNA, 96 bp, Fusarium virguliforme
  misc_feature: 50
ggaagaataataggtaaataattatatatacttataatcgattttattatcctcttaatatattaataaagcgctaataaaagatagctacttaag

SEQ ID NO: 47425 - DNA, 96 bp, Fusarium virguliforme
  misc_feature: 50
ggaaataaataataataaattcttaattaatagagcctttagccttatagtaatagactatatagataatatagccttaatagatatagagacctc

SEQ ID NO: 47426 - DNA, 96 bp, Fusarium virguliforme
  misc_feature: 50
gcttagatatagctttagtatatagttaaatacctttacagcttaaagtatataatatatatacccttatagctatttatattagagatattatag

SEQ ID NO: 47427 - DNA, 96 bp, Fusarium virguliforme
  misc_feature: 50
gcttaatatattattatataggtatttaggtattctatattatattaagatccccggtttatattactatttaccttattaactattacttattgc

SEQ ID NO: 47428 - DNA, 96 bp, Fusarium virguliforme
  misc_feature: 50
ataactcgattttatttatcccttattcctatcaattatataatataatcctcctttattaattacctattaattaaggagctatttaagcggagc

SEQ ID NO: 47429 - DNA, 96 bp, Fusarium virguliforme
  misc_feature: 50
agcttattaatagcttctaagaagtataataaagcctatatatataatagtaataaaagaaataggaataaaagcgagaaagagagataatatagc

SEQ ID NO: 47430 - DNA, 96 bp, Fusarium virguliforme
  misc_feature: 50
gctatatatattattatattaccttaatcgacctaagtattatcttaataagcttaatactataatatattataatacgaaaagggagagaagatt

SEQ ID NO: 47431 - DNA, 96 bp, Fusarium virguliforme
  misc_feature: 50
gctaggagacctaatagctaaaaaataaccctaaatagatagatactaaagtaagctaaataatagatataaactaaagaatatatcgatattaat

SEQ ID NO: 47432 - DNA, 96 bp, Fusarium virguliforme
  misc_feature: 50
gctacctctcttaactaactatcttctaaataaataatatatctcttaatagaataaattatagctaataataaggattaaaagcgcttaatattc

SEQ ID NO: 47433 - DNA, 96 bp, Fusarium virguliforme
  misc_feature: 50
gctaatttaaagctcccttttgctatttatttattcttaggcttattacctttccctttccctttttaaactttcccttcttaaatctcttattgg

SEQ ID NO: 47434 - DNA, 96 bp, Fusarium virguliforme
  misc_feature: 50
cctttccttctctactcacctaccctatacctattaactactctctctataccttactatactatctttacctcccctatttatatcttaattagc

SEQ ID NO: 47435 - DNA, 96 bp, Fusarium virguliforme
  misc_feature: 50
gcgctaggataatataggttaggtagttttagaagcttaattatatttagcttattaattagattattttattagtattcctaaataattaaatag

SEQ ID NO: 47436 - DNA, 96 bp, Fusarium virguliforme
  misc_feature: 50
ataaaaattcgcaataaattaactatataaatttaggtaataaaatttcgactaataaatagctataattatattgcattagagataaaagagatc

SEQ ID NO: 47437 - DNA, 96 bp, Fusarium virguliforme
  misc_feature: 50
atttaagaggaaagaattaatatataaaagctataataagcaataagatactaagatataagatctatagtaggggggtttaaaataatatagatc

SEQ ID NO: 47438 - DNA, 96 bp, Fusarium virguliforme
  misc_feature: 50
gatctaggcgctaaagaggaataataatactaaaaattactctataatcgagataataagtataactataaggcctataataatagtaaatataat

SEQ ID NO: 47439 - DNA, 96 bp, Fusarium virguliforme
  misc_feature: 50
gatatattcagtactatagattatataatactatagctatacctattaatatacttttaactatattaaagcttcgcgatttatatataatatatt

SEQ ID NO: 47440 - DNA, 96 bp, Fusarium virguliforme
  misc_feature: 50
ctatttaggctaaaagcctatattatttaataagccctcttttttactaaagcccctattttaatttaatcttacctttttattataatctctatc

SEQ ID NO: 47441 - DNA, 96 bp, Fusarium virguliforme
  misc_feature: 50
gaggttagaggagagggagcaagagttacttaagttattatattatattaataccgaaagacgctagaaatattattaatatttatttaattcttc

SEQ ID NO: 47442 - DNA, 96 bp, Fusarium virguliforme
  misc_feature: 50
ctaaggaaggagaaagtaaaatataatattacctatagttaatattatccctagtttatattattatttaccttattaactattacttattgcgtc

SEQ ID NO: 47443 - DNA, 96 bp, Fusarium virguliforme
  misc_feature: 50
acctattatttatctattttctatctatatacttattcctcttattactctattacttctacttcctattttaattatctactttatattactgtc

SEQ ID NO: 47444 - DNA, 96 bp, Fusarium virguliforme
  misc_feature: 50
cccaataggtataaaataaataatacttaaataatacctagataattaataatcttataattaccgctatatagggaagagatataggagaaattc

SEQ ID NO: 47445 - DNA, 96 bp, Fusarium virguliforme
  misc_feature: 50
gaatatcgggatatatctataataggatataatcgggtatatctatatataagataaggttagttatataatcttataataaatagacctaagctt

SEQ ID NO: 47446 - DNA, 96 bp, Fusarium virguliforme
  misc_feature: 50
aagaagaaggtatataatatcgctaaaggaaaatactaactaaaggaataataggaataataaatactcttaaaaggtaagaggtaggtaaacttc

SEQ ID NO: 47447 - DNA, 96 bp, Fusarium virguliforme
  misc_feature: 50
agctcggtcataaggtaaatatatataagaaaaagatataaaatatcgcaaaaggaaaatattaacctaaaaggtactaagaataatagtcacttc

SEQ ID NO: 47448 - DNA, 96 bp, Fusarium virguliforme
  misc_feature: 50
gaagatattaagccggcggtaaaaggtaaaaaggattaagctatagaaaaaggaggtaataataataaaggaaggaaggtaaataattaattagat

SEQ ID NO: 47449 - DNA, 96 bp, Fusarium virguliforme
  misc_feature: 50
ctatacttacttaagatacttttattattactatatctatatatactaccttctatatataatctctctcttttctctcaagtatttatataaaag

SEQ ID NO: 47450 - DNA, 96 bp, Fusarium virguliforme
  misc_feature: 50
cttttagctatattaattaataatcgtaatctatctgccttatatcttattaatttagggttattatattaccgataaaccctttcttaaaattat

SEQ ID NO: 47451 - DNA, 96 bp, Fusarium virguliforme
  misc_feature: 50
ctttatctttttcgctacctaattaaaatatagtattaatattattttattagctcgcgattatagggtatatatctatattacttttagaccctt

SEQ ID NO: 47452 - DNA, 96 bp, Fusarium virguliforme
  misc_feature: 50
ctttatatagcttttattctagcgttattaaattatattagttttttagccttagtttatattactatttaccttattaattattacttattgcgt

SEQ ID NO: 47453 - DNA, 96 bp, Fusarium virguliforme
  misc_feature: 50
ctttacaataacctaaaactatatatataacccgctataaagatttataatatctattatattattctttatagtcgccttaatagtattcctact

SEQ ID NO: 47454 - DNA, 96 bp, Fusarium virguliforme
  misc_feature: 50
ctttaattttatttacctctattatctacttttacctttatattactctttcttttttattcctctcttttacttctatattatctatcttacctt

SEQ ID NO: 47455 - DNA, 96 bp, Fusarium virguliforme
  misc_feature: 50
atagcttatattagataatttataagtatatatataacgtaaaaggttatattgcttatctttaattatacgattctataaacccttagtaataag

SEQ ID NO: 47456 - DNA, 96 bp, Fusarium virguliforme
  misc_feature: 50
cttattaaagaggctaatcgcctatataataatttaatatttaggcttaaacttaatattaacttacttaagattaaagataatatagctaattat

SEQ ID NO: 47457 - DNA, 96 bp, Fusarium virguliforme
  misc_feature: 50
aaggtaatagccttttataaccaataaaagagcttatatagataataataaagctataataataaagtaaatcgctcgctaaaagcctaatataag

SEQ ID NO: 47458 - DNA, 96 bp, Fusarium virguliforme
  misc_feature: 50
aataaaatataatatcgcttatagactatactataaagaacgtatatataaggttatattacccctaataagaggatatattaatattattataag

SEQ ID NO: 47459 - DNA, 96 bp, Fusarium virguliforme
  misc_feature: 50
aagggaggttatttataaaaaagaaaaaagagggttaaaaaggtaataaaggggaaaaggtaaattatttaggttaaaggagggaaattaagtaag

SEQ ID NO: 47460 - DNA, 96 bp, Fusarium virguliforme
  misc_feature: 50
agtggattatatataatattcctaattctataaagatacctattaataatctcgctatctcgaatataatataaatatatattaacttagatagag

SEQ ID NO: 47461 - DNA, 96 bp, Fusarium virguliforme
  misc_feature: 50
aagtaataggaggtatagagatagatagggagatagattaattagggtaggttataagtatagaatatatatagggtatttatatatatagtagag

SEQ ID NO: 47462 - DNA, 96 bp, Fusarium virguliforme
  misc_feature: 50
agttattattatattattaaattcgccgggaaaaataattattcatcctattacttaagttatttattaaagaatcccctatagggggtataatag

SEQ ID NO: 47463 - DNA, 96 bp, Fusarium virguliforme
  misc_feature: 50
ctatagttaccttacttaggtaattaatagctaatagctagaataataagctcttattactattaataggtataataataataattaagcccctat

SEQ ID NO: 47464 - DNA, 96 bp, Fusarium virguliforme
  misc_feature: 50
ctataaataggctatattatactccttataagctcttattaagctattaattgtctttattaatataccgctattattattattaataacgtacat

SEQ ID NO: 47465 - DNA, 96 bp, Fusarium virguliforme
  misc_feature: 50
ctactataagtattaaaatagataacctctatataactatagaataaatagctacctcctaataggtataaaataaataatacctaaataatactt

SEQ ID NO: 47466 - DNA, 96 bp, Fusarium virguliforme
  misc_feature: 50
ctactataaccttcctatagttaattaaaataaaacggaagataatataatataattagcacttaaattaatatagcactaatttacttatagtat

SEQ ID NO: 47467 - DNA, 96 bp, Fusarium virguliforme
  misc_feature: 50
ctaaagctcccttttattacttatttatttttaggcttattgcctttcctttttccttcttaaaccttcccttcttaaatctcttatcggaattag

SEQ ID NO: 47468 - DNA, 96 bp, Fusarium virguliforme
  misc_feature: 50
aggtctattattaattatattaagggatcgagaagtagatataattttaattattattaaccgatttataaaatattgcctattccttaccattag

SEQ ID NO: 47469 - DNA, 96 bp, Fusarium virguliforme
  misc_feature: 50
aaaaactatattaatttattattatttttagttttaatagaaacccttttttaagaccttattaatagcttatttaattagctatagctatattag

SEQ ID NO: 47470 - DNA, 96 bp, Fusarium virguliforme
  misc_feature: 50
aagtatagtaaagctatattagataatatcgattattattattattatttagaataaggtatagaaggtattatacttaatgagttaccttattag

SEQ ID NO: 47471 - DNA, 96 bp, Fusarium virguliforme
  misc_feature: 50
cgataaatctttttagtttttattttttttaaagttttagataattatagagatatagagatagggagatatagaagaagacctaataagatagat

SEQ ID NO: 47472 - DNA, 96 bp, Fusarium virguliforme
  misc_feature: 50
agaaaggattaataaacctaatggttaaattaattaatgtacgataagataattaagcttaggtctaataaataataatattagagtagaataagg

SEQ ID NO: 47473 - DNA, 96 bp, Fusarium virguliforme
  misc_feature: 50
accttaagctcttaatttaataaattataactaaggcctaaagaattaatatccttaattaataaaataccttactaaggaagttttatagcgagg

SEQ ID NO: 47474 - DNA, 96 bp, Fusarium virguliforme
  misc_feature: 50
aataataataacgataataataataataataacgataataataaggcgatagataataagggcataatagctctataatataaagcgcttaatagg

SEQ ID NO: 47475 - DNA, 96 bp, Fusarium virguliforme
  misc_feature: 50
cctaaaagctattcttatctataataattaaaagttctcccctagtaataaagctaggatattaatagaattatccggtattactataatattctt

SEQ ID NO: 47476 - DNA, 96 bp, Fusarium virguliforme
  misc_feature: 50
cccttattatacctttcttaaatataccttattactatctacccttataatatattatataatactattaccttactccttatattaaatactctt

SEQ ID NO: 47477 - DNA, 96 bp, Fusarium virguliforme
  misc_feature: 50
aaagaaaataattaacgaaagggtttttttattctatagttatatttagctatatatagactcgctatatttctatataatacccttattctaggg

SEQ ID NO: 47478 - DNA, 96 bp, Fusarium virguliforme
  misc_feature: 50
catattatgtacgttattaataataataatagcggtatattaataaagacaattaatagcttaataagagcttataaggagtataatatagcctat

SEQ ID NO: 47479 - DNA, 96 bp, Fusarium virguliforme
  misc_feature: 50
caatagtgattttaataatgatcccttatttattagtctagatattatagtccttactctatatctattagtaatatttagtattttattatatct

SEQ ID NO: 47480 - DNA, 96 bp, Fusarium virguliforme
  misc_feature: 50
atttaggttagctagaatagataatataaacttaataataaatattaattaatagctaaatactattaaagctacctttttttattttttttattt

SEQ ID NO: 47481 - DNA, 96 bp, Fusarium virguliforme
  misc_feature: 50
atttaatagattacttatattaccttaaataatattaaacgtaataattactcctattacccctataaataattaataataatagagcctatctat

SEQ ID NO: 47482 - DNA, 96 bp, Fusarium virguliforme
  misc_feature: 50
attcccttaggcgattcagccttattaataaaagttagttatataaaggtaaaagatttaaatttattagataattaaagtatatagaggtcattt

SEQ ID NO: 47483 - DNA, 96 bp, Fusarium virguliforme
  misc_feature: 50
attatctaggtattatttaggtattatttattttatacttattaggaggtagctatttattctatagttatatagaggttatttattttaatgctt

SEQ ID NO: 47484 - DNA, 96 bp, Fusarium virguliforme
  misc_feature: 50
agcttctaagaagtataataaagcctatatatataatagtaataaaagaaataggaataaaagcgagaaagagagataatatagcaaaggtataat

SEQ ID NO: 47485 - DNA, 96 bp, Fusarium virguliforme
  misc_feature: 50
attaggatattactttattattaatatataggctatacctaatatatctatctatagtagccctattaatatttattagggaggatctttaatatt

SEQ ID NO: 47486 - DNA, 96 bp, Fusarium virguliforme
  misc_feature: 50
atacccctaatactataaggttatatagctcttatgccgatactatatatataagatatatctcgctaagaaataggaatatagatatttcctaat

SEQ ID NO: 47487 - DNA, 96 bp, Fusarium virguliforme
  misc_feature: 50
attacttaagccttattaataaattaattaaatagctactaacttaattaagctataattaagcacttagcgggagcttaatatatttaaagtaat

SEQ ID NO: 47488 - DNA, 96 bp, Fusarium virguliforme
  misc_feature: 50
aatatagcttatattagataatttataagtatatatataacgtaaaaggttatattgcttatctttaattatacgattctataaacccttagtaat

SEQ ID NO: 47489 - DNA, 96 bp, Fusarium virguliforme
  misc_feature: 50
aagggtacctttttccttatatctctctatattacctagctctttttatacctttttatttttagctttattaataaataggaattaccctttaat

SEQ ID NO: 47490 - DNA, 96 bp, Fusarium virguliforme
  misc_feature: 50
atgctttttattctcgtaattatcgttattatattataggacctagttcgacctagtgcgctgaatgcgtaaaggcttattagagatataagcgtt

SEQ ID NO: 47491 - DNA, 96 bp, Fusarium virguliforme
  misc_feature: 50
atataggctaatatctagctattaagctctatcgcaatattaacttaaatgactcctatagtatatacttagtgatataactataaaataaatcat

SEQ ID NO: 47492 - DNA, 96 bp, Fusarium virguliforme
  misc_feature: 50
atctttatatatattatcctaaaagctattcttatctataataattaaaagttctcccctagtaataaagctaggatattaatagaattatccggt

SEQ ID NO: 47493 - DNA, 96 bp, Fusarium virguliforme
  misc_feature: 50
atataataagaaacttttacttagataaatataatctaatatatttatagctatctttttatttaagtagctatatattagtattaaaggcgagat

SEQ ID NO: 47494 - DNA, 96 bp, Fusarium virguliforme
  misc_feature: 50
atctattttctatctatatacttattcctcttattactctattacttctacttcctattttaattatctactttatattactgtctcctacctttt

SEQ ID NO: 47495 - DNA, 96 bp, Fusarium virguliforme
  misc_feature: 50
aagctaccctagccctattatatataactttcgctttaatataattaaaataatagttagaataattaataactaccttataggataaaccccgat

SEQ ID NO: 47496 - DNA, 96 bp, Fusarium virguliforme
  misc_feature: 50
atcgcttaatattttattatatctctttaagttcctattatacttattatatctatcgtctataacggttatattaaagttagattaacttaagtt

SEQ ID NO: 47497 - DNA, 96 bp, Fusarium virguliforme
  misc_feature: 50
aatattagagaagaaacttaatatattattatactcaattaacttatttatagctaataagtatatctcgatataatatagattaatcttctcgat

SEQ ID NO: 47498 - DNA, 96 bp, Fusarium virguliforme
  misc_feature: 50
aagattaatctatattatatcgagatatacttattagctataaataagttaattgagtataataatatattaagtttcttctctaatattatggat

SEQ ID NO: 47499 - DNA, 96 bp, Fusarium virguliforme
  misc_feature: 50
aatttattatcctaaaataaaaagtattaaaattaaaggtcctttattattattataataactctagagctagatatataggatttaaaaaaatat

SEQ ID NO: 47500 - DNA, 96 bp, Fusarium virguliforme
  misc_feature: 50
aagtttatatatttataaacattatataggtctagggctaataatataaatattatagctatattatatactttctccgcgatattaataaaatat

SEQ ID NO: 47501 - DNA, 96 bp, Fusarium virguliforme
  misc_feature: 50
ataagaaaacgatagaaggcagagagatagaggtaaaaagagaaaggagaaagcgaaaaggtagtaagaaaggttaagtaaggtaagaggaaatat

SEQ ID NO: 47502 - DNA, 96 bp, Fusarium virguliforme
  misc_feature: 50
aagaggcttagatatagctttagtatatagttaaatacctttacagcttaaagtatataatatatatacccttatagctatttatattagagatat

SEQ ID NO: 47503 - DNA, 96 bp, Fusarium virguliforme
  misc_feature: 50
aatagattaaactatctctaatatataaattaataataacttacgactaaagccttaagcttctataatataataaccccctctaatatactatat

SEQ ID NO: 47504 - DNA, 96 bp, Fusarium virguliforme
  misc_feature: 50
atataagttaagtataaggatatagatatagatagaaatatctatagaggccttaatagagaagataataataataacgattatagcgacctatat

SEQ ID NO: 47505 - DNA, 96 bp, Fusarium virguliforme
  misc_feature: 50
agtatattatttatattactggcgtattattctagagataatagagggataactattattattatattattaatagtattgcgagataatttatat

SEQ ID NO: 47506 - DNA, 96 bp, Fusarium virguliforme
  misc_feature: 50
atagatgatgttattatttattattattataatcgtaataataaaagagggagaagaagaagaagaagaagaaagaaaaaaagacctatttatagt

SEQ ID NO: 47507 - DNA, 96 bp, Fusarium virguliforme
  misc_feature: 50
atacttaacttttatatatatctttaagctacggtttatataactatttatattactaattattatttattacatctctatctaatactttattat

SEQ ID NO: 47508 - DNA, 96 bp, Fusarium virguliforme
  misc_feature: 50
ataatactcctattattatctttaagtataattagcttataataaatagcctatatctatattatctattttataaacttaatccccctttacttt

SEQ ID NO: 47509 - DNA, 96 bp, Fusarium virguliforme
  misc_feature: 50
ataataaaaaagaataataattaaaaaaataggtaaaggtaaagagaaggtaaagtaaattaaagttttaataaattaaaaggttaagggtaaagt

SEQ ID NO: 47510 - DNA, 96 bp, Fusarium virguliforme
  misc_feature: 50
aactctctaatatcttacttatataagaagatattacttatataaagatatcgctataaagcgctagctttatactatattatagtagattcttat

SEQ ID NO: 47511 - DNA, 96 bp, Fusarium virguliforme
  misc_feature: 50
ataactataacggtagactaactctcctttatttaattccttccttatttatttatattttacttacctattatttccccccttattttatccttt

SEQ ID NO: 47512 - DNA, 96 bp, Fusarium virguliforme
  misc_feature: 50
ataacaataagataaatatataggaccttaaattaaggttatataagctataagtaagttaattatataaagtaattcgcgatatattatattatt

SEQ ID NO: 47513 - DNA, 96 bp, Fusarium virguliforme
  misc_feature: 50
ataaaaagctttatatctttttctcttttttttcttttttttcttttttttctttctttaattttatttacctctattatctacttttacctttat

SEQ ID NO: 47514 - DNA, 96 bp, Fusarium virguliforme
  misc_feature: 50
ataaagagcctaaaagaggtatttcttattacttcctccccttagctataattttctttcttttctttctttattattattattactagcttcctt

SEQ ID NO: 47515 - DNA, 96 bp, Fusarium virguliforme
  misc_feature: 50
agtctagatttattatagctactttatattatagcgatagtatttattatttatatcgctatttaggagttattttataaagagatgaagtttatt

SEQ ID NO: 47516 - DNA, 96 bp, Fusarium virguliforme
  misc_feature: 50
agggatattattctaaagtagaagtttaatataactaattattaaaatagatataaataatagggctatagaaatagctattattatagcttattt

SEQ ID NO: 47517 - DNA, 96 bp, Fusarium virguliforme
  misc_feature: 50
aggactctataaaatatctatattagtctcgagaaatactaaagtaatatatattatataaaaggagatataagtacttaaactcctctttatatt

SEQ ID NO: 47518 - DNA, 96 bp, Fusarium virguliforme
  misc_feature: 50
aaaagtttaataggaacttaaatctactatctagcttaatttaatcttaattctaataattaattaaatagtatatactttattaccctctaagct

SEQ ID NO: 47519 - DNA, 96 bp, Fusarium virguliforme
  misc_feature: 50
agattcttttcctatccatttattttaattaaatatataaccctatttcttatataaagtaaaagactattaagtaaaataataatatcaagggct

SEQ ID NO: 47520 - DNA, 96 bp, Fusarium virguliforme
  misc_feature: 50
aaattttaaaattataataaagtaagttaatttatataattaggcgagggtaaaggtaataatatattaatcttaaggctaaatcttataatttct

SEQ ID NO: 47521 - DNA, 96 bp, Fusarium virguliforme
  misc_feature: 50
aacgtataattatataccttatactaaaagatactaagtataataagtatatataaggagatataattaattaattagaagtcccggagttatagt

SEQ ID NO: 47522 - DNA, 96 bp, Fusarium virguliforme
  misc_feature: 50
aagaagggctataaggctaataaatactataagaagtaataagatattaaggaaggatattattaatagaagctataataaaacctcctagaaggt

SEQ ID NO: 47523 - DNA, 96 bp, Fusarium virguliforme
  misc_feature: 50
accctttatccctatatcttagctcgataattatatttatatattagctttaaatatacttacgctaatagtagaaataatatataagatactatt

SEQ ID NO: 47524 - DNA, 96 bp, Fusarium virguliforme
  misc_feature: 50
aatttagattatattaaggtattaaatatccttcttaggtttatattattaattaatcttaattaggttaagatatttagatttataatattcttt

SEQ ID NO: 47525 - DNA, 96 bp, Fusarium virguliforme
  misc_feature: 50
aagggttattatatatatagcgcgggtagctataagtatattataggttctagttttatagctttatagaggagaagttattgatagtcttctctt

SEQ ID NO: 47526 - DNA, 96 bp, Fusarium virguliforme
  misc_feature: 50
aaggaggagtttaggtatttatatctccttttatatagtatatattactttagtatttcttgagattaatatagatattttatggagtcctctctt

SEQ ID NO: 47527 - DNA, 96 bp, Fusarium virguliforme
  misc_feature: 50
aaagcctctttaagggggggccctatagtaagtattttaatattaagaggtaatatttaatactataattatttaattagatagattactttattt

SEQ ID NO: 47528 - DNA, 96 bp, Fusarium virguliforme
  misc_feature: 49
gattaatactatatatataataaggtaaagaggcattattattatacttactatatactatatagctatattaatagaataggaggctaaaaaaaa

SEQ ID NO: 47529 - DNA, 96 bp, Fusarium virguliforme
  misc_feature: 49
gaagtaaaagagaggaataaaaaagaaagagtaatataaaggtaaaagtagataatagaggtaaataaaattaaagaaagaaaaaaaagaaaaaaa

SEQ ID NO: 47530 - DNA, 96 bp, Fusarium virguliforme
  misc_feature: 49
aagtaataaaaccatacgctacgctataataaatattaataaaagcaaaatcaataattctaaactaaataaaggcagagctctaaaataaaaaaa

SEQ ID NO: 47531 - DNA, 96 bp, Fusarium virguliforme
  misc_feature: 49
tttttttattacttactcttttattttacccttttataattacttattttacttttacctatatatatacccttactactttacccttaacctttt

SEQ ID NO: 47532 - DNA, 96 bp, Fusarium virguliforme
  misc_feature: 49
agaagtaaaagagaggaataaaaaagaaagagtaatataaaggtaaaagtagataatagaggtaaataaaattaaagaaagaaaaaaaagaaaaaa

SEQ ID NO: 47533 - DNA, 96 bp, Fusarium virguliforme
  misc_feature: 49
taagtaataaaaccatacgctacgctataataaatattaataaaagcaaaatcaataattctaaactaaataaaggcagagctctaaaataaaaaa

SEQ ID NO: 47534 - DNA, 96 bp, Fusarium virguliforme
  misc_feature: 49
tatttattatttataaaacgtgccgttatatatatattggtaagtatattaagtagcatataaagtaatattataggtctatttagataataaaaa

SEQ ID NO: 47535 - DNA, 96 bp, Fusarium virguliforme
  misc_feature: 49
agttctatattaatcttttagttaaagtaaaagttaaagaattataagagtattaagccttaataataataattaaggtaaaaccatagataaaaa

SEQ ID NO: 47536 - DNA, 96 bp, Fusarium virguliforme
  misc_feature: 49
ttttctaatgcttagaccgtcgctttaaatcttataatggttaggttaataataatcttaacttataataacttatataacttaaatagtttattt

SEQ ID NO: 47537 - DNA, 96 bp, Fusarium virguliforme
  misc_feature: 49
aaataatatattaaggaagtaatacttctagcctacttttaggctaaagaataactaaagctcgagattaataaatagctaacctaaataataaaa

SEQ ID NO: 47538 - DNA, 96 bp, Fusarium virguliforme
  misc_feature: 49
gctagagtataaggtataattatagctcttaatataatactataactaacttaagccggtatttctatattaataatatatattaggcgactaaaa

SEQ ID NO: 47539 - DNA, 96 bp, Fusarium virguliforme
  misc_feature: 49
taaataaataactaatcgttttattaatagtattatctaagagctcgccctatgggatcttaggtaagctaagcttagttagagattaatctaaaa

SEQ ID NO: 47540 - DNA, 96 bp, Fusarium virguliforme
  misc_feature: 49
ttttacttttacctatatatatacccttactactttacccttaaccttttaatttattaaaactttaatttactttaccttctctttacctttacc

SEQ ID NO: 47541 - DNA, 96 bp, Fusarium virguliforme
  misc_feature: 49
aaataagataagcttataatataaattaaataccttgactataaatactaatagcttaataaatatactagtaatattaaatacctagagttaaaa

SEQ ID NO: 47542 - DNA, 96 bp, Fusarium virguliforme
  misc_feature: 49
aaagagggatttcctaaaatataaatatagagataatctcgcgaaaggtagataaaataatataattatatagcttagcctaataattatttaaaa

SEQ ID NO: 47543 - DNA, 96 bp, Fusarium virguliforme
  misc_feature: 49
tttcttttctttctttcttttcttttttttctttctttcttttcttttttccttacttttaccctttactactccctttttacccttcctataact

SEQ ID NO: 47544 - DNA, 96 bp, Fusarium virguliforme
  misc_feature: 49
gcctttatagcttaatataaataagagaaataataaaagactaaagataatagctttaggagcgataatatattaaaactttatttattaaagaaa

SEQ ID NO: 47545 - DNA, 96 bp, Fusarium virguliforme
  misc_feature: 49
tttcttagactatctattactcttatttctttttatttaataccttcttttagtaatatcttatacctttttcctatatatatctgccttataatt

SEQ ID NO: 47546 - DNA, 96 bp, Fusarium virguliforme
  misc_feature: 49
tttctaagttaatattaggtatactatctatctaaaataagctataataatagctatttctatagccctattatttatatctattttaataattag

SEQ ID NO: 47547 - DNA, 96 bp, Fusarium virguliforme
  misc_feature: 49
ttacttatattattatacttatagtatattaatagggctattatagcttaatatatattagtatttatataggatagatttaataaggaaaggaaa

SEQ ID NO: 47548 - DNA, 96 bp, Fusarium virguliforme
  misc_feature: 49
tttcctatctagttttaaatatctttatttaaaacctttaagttttagctttatctagctttaacttagcctttagctatttatttttagtaagac

SEQ ID NO: 47549 - DNA, 96 bp, Fusarium virguliforme
  misc_feature: 49
aatactatatatataataaggtaaagaggcattattattatacttactatatactatatagctatattaatagaataggaggctaaaaaaaataaa

SEQ ID NO: 47550 - DNA, 96 bp, Fusarium virguliforme
  misc_feature: 49
gggtctattctcgtctatatctatcttattaggtcttcttctatatctccctatctctatatctctataattatctaaaactttaaaaaaaataaa

SEQ ID NO: 47551 - DNA, 96 bp, Fusarium virguliforme
  misc_feature: 49
agctttaagtatttactaattattaataattacaaaagctattattattatataagctctaaagaatatttaataggtaatcaatagagtaataaa

SEQ ID NO: 47552 - DNA, 96 bp, Fusarium virguliforme
  misc_feature: 49
tttattaatatttctagctatcgataaatagtattaagtatatttatagatagtaagggattataatataataagataataggggtagaataatat

SEQ ID NO: 47553 - DNA, 96 bp, Fusarium virguliforme
  misc_feature: 49
tttattaacttagggggttattataatagtaattaagttaggttacttaataaagtccttaatatttataatagtaataataaagaggaaaaagta

SEQ ID NO: 47554 - DNA, 96 bp, Fusarium virguliforme
  misc_feature: 49
tttatctattaataaagactctaaatatttattaggtttattaattatttcgtggagctatatattaatattatagttttaagcataaatttaact

SEQ ID NO: 47555 - DNA, 96 bp, Fusarium virguliforme
  misc_feature: 49
tttataggtaatataattatatctttatttatcttctatatctaagccttctttaggtatctttatctttataaggtcttttataaatttctaaag

SEQ ID NO: 47556 - DNA, 96 bp, Fusarium virguliforme
  misc_feature: 49
tttataaaaagctttatatctttttctcttttttttcttttttttcttttttttctttctttaattttatttacctctattatctacttttacctt

SEQ ID NO: 47557 - DNA, 96 bp, Fusarium virguliforme
  misc_feature: 49
ccctattaaaccttacttaatttccctcctttaacctaaataatttaccttttcccctttattacctttttaaccctcttttttcttttttataaa

SEQ ID NO: 47558 - DNA, 96 bp, Fusarium virguliforme
  misc_feature: 49
tttagttatattttatatcttttaaattatcttctttatactctttatttatttatagagtatttatagccctttatactataatctcttattcta

SEQ ID NO: 47559 - DNA, 96 bp, Fusarium virguliforme
  misc_feature: 49
ggctaagattatatgctccttaatttatatattatagttacttaggtaatttatttatattataaggtattcctttctaggcttatttttcctaaa

SEQ ID NO: 47560 - DNA, 96 bp, Fusarium virguliforme
  misc_feature: 49
tttagattaaatctttcttattactttaagattatattatcttttacttattagagattcttaatataagagataggactattatatttattatat

SEQ ID NO: 47561 - DNA, 96 bp, Fusarium virguliforme
  misc_feature: 49
tttagatagcaatataaatattaaagactataactatagcataaagtagctataataaaataagactatataaaggagaagttattatatttagtc

SEQ ID NO: 47562 - DNA, 96 bp, Fusarium virguliforme
  misc_feature: 49
tttaatttattaaaactttaatttactttaccttctctttacctttacctatttttttaattattattcttttttattattaatcctttttttctc

SEQ ID NO: 47563 - DNA, 96 bp, Fusarium virguliforme
  misc_feature: 49
tttaatttagattatattaaggtattaaatatccttcttaggtttatattattaattaatcttaattaggttaagatatttagatttataatattc

SEQ ID NO: 47564 - DNA, 96 bp, Fusarium virguliforme
  misc_feature: 49
tttaattatttttcccttaatatcttcttttcttttttcttttatctatatattaactcctttaatatctttaaaatagaatttaatcctaagaac

SEQ ID NO: 47565 - DNA, 96 bp, Fusarium virguliforme
  misc_feature: 49
ggttatatagctcttatgccgatactatatatataagatatatctcgctaagaaataggaatatagatatttcctaataatactaccttaattaaa

SEQ ID NO: 47566 - DNA, 96 bp, Fusarium virguliforme
  misc_feature: 49
tttaatatttatatacttagtctttaatttattatagtatcgtaatatattccgcgatatattataccttaattagcttagtagttaggatataat

SEQ ID NO: 47567 - DNA, 96 bp, Fusarium virguliforme
  misc_feature: 49
tttaatagattacttatattaccttaaataatattaaacgtaataattactcctattacccctataaataattaataataatagagcctatctata

SEQ ID NO: 47568 - DNA, 96 bp, Fusarium virguliforme
  misc_feature: 49
taataatcttaagttagtattataatattaaggataatataaggaggtaaaatagatatattaataagctcttaaggtaagagagaaggtattaaa

SEQ ID NO: 47569 - DNA, 96 bp, Fusarium virguliforme
  misc_feature: 49
tatttcttttagctatattaattaataatcgtaatctatctgccttatatcttattaatttagggttattatattaccgataaaccctttcttaaa

SEQ ID NO: 47570 - DNA, 96 bp, Fusarium virguliforme
  misc_feature: 49
tttaaatcgaccttaaaactagctaatttttaaattaacctaaaaactagctaattattaaattaaccttaaaactagtggatctttaaattaact

SEQ ID NO: 47571 - DNA, 96 bp, Fusarium virguliforme
  misc_feature: 49
gaaagagggatttcctaaaatataaatatagagataatctcgcgaaaggtagataaaataatataattatatagcttagcctaataattatttaaa

SEQ ID NO: 47572 - DNA, 96 bp, Fusarium virguliforme
  misc_feature: 49
ttcttttttccttatttttaccttttattactccctttttacccttcctataacttactatttactctcctacctttccttttaccccttaactct

SEQ ID NO: 47573 - DNA, 96 bp, Fusarium virguliforme
  misc_feature: 49
ttctttttcttatatagatatattttacccctatagtctatatataagatctagataaccttataatattataggtatcttaatagggttttatta

SEQ ID NO: 47574 - DNA, 96 bp, Fusarium virguliforme
  misc_feature: 49
ttcttttcctatccatttattttaattaaatatataaccctatttcttatataaagtaaaagactattaagtaaaataataatatcaagggcttaa

SEQ ID NO: 47575 - DNA, 96 bp, Fusarium virguliforme
  misc_feature: 49
ttctttaggctttagttatagcttattaaattaagagcttaaggttatattaagtagatatttaaatattattaatagacttattgccttagaggg

SEQ ID NO: 47576 - DNA, 96 bp, Fusarium virguliforme
  misc_feature: 49
ggcctttatagcttaatataaataagagaaataataaaagactaaagataatagctttaggagcgataatatattaaaactttatttattaaagaa

SEQ ID NO: 47577 - DNA, 96 bp, Fusarium virguliforme
  misc_feature: 49
ttcttaaggtagggtaataattattaattaatctaccgctagattaagtaattagctatttatttaatattaacctattatatttaattaccgctt

SEQ ID NO: 47578 - DNA, 96 bp, Fusarium virguliforme
  misc_feature: 49
ttctatctctttctttatctaataaagttattcctaactttatctctttatattaatctttctatttaatatatcttactcttctttatattatct

SEQ ID NO: 47579 - DNA, 96 bp, Fusarium virguliforme
  misc_feature: 49
ttctagtttattatttatcttccctttttccttctcttatctttatattttttattattatctattataacctatcttattatactctctcttaag

SEQ ID NO: 47580 - DNA, 96 bp, Fusarium virguliforme
  misc_feature: 49
agctaaatagataggtgagtctttatattatattatattataccgcagtagtatttccgggtatataactataaatataataaatctaaagtagaa

SEQ ID NO: 47581 - DNA, 96 bp, Fusarium virguliforme
  misc_feature: 49
ttcctttccttattaaatctatcctatataaatactaatatatattaagctataatagccctattaatatactataagtataataatataagtaac

SEQ ID NO: 47582 - DNA, 96 bp, Fusarium virguliforme
  misc_feature: 49
ttccgctaaagcttattttataaggttattcctaattattttaattattattctaattatattaacgtaaaggttatttataatagggctaatatt

SEQ ID NO: 47583 - DNA, 96 bp, Fusarium virguliforme
  misc_feature: 49
ttcacttatctttctttatgatactatttatatatttatattcaagctactattatacactctataattacttgtataataattactatatgtcgc

SEQ ID NO: 47584 - DNA, 96 bp, Fusarium virguliforme
  misc_feature: 49
taaaataaccctatataatataactgtaacctatacctataatactaaactaaagtattacgagaatataataaaacctataaataataaaaataa

SEQ ID NO: 47585 - DNA, 96 bp, Fusarium virguliforme
  misc_feature: 49
gcttgcttatctatcccacttacttattatatatattatgtcttctattataatattaagaagacttattattagcgctatatatagtataaataa

SEQ ID NO: 47586 - DNA, 96 bp, Fusarium virguliforme
  misc_feature: 49
aatagcttaataagagcttataaggagtataatatagcctatttataggataataataataaaaggaataaaaataaggttaaaaaaggtaaataa

SEQ ID NO: 47587 - DNA, 96 bp, Fusarium virguliforme
  misc_feature: 49
attactaggaaatggaaaactatcccactcacataacttcccacttgcttattatatacattacctcgatatatttattatatattacttaaataa

SEQ ID NO: 47588 - DNA, 96 bp, Fusarium virguliforme
  misc_feature: 49
ttattagccctaggtttataggtagtttaggcttattataattatagcttatagggcctcttatagctttttattttattaagtattttaatatta

SEQ ID NO: 47589 - DNA, 96 bp, Fusarium virguliforme
  misc_feature: 49
ttatcttaataatcctattaaatatagcttattattctttattattatattttgtttttagctttactcctctttcttaactaagcatattaataa

SEQ ID NO: 47590 - DNA, 96 bp, Fusarium virguliforme
  misc_feature: 49
ttattaataatctaagtattatttaggtattatttattttatacctattaggaggtagctatttattctatagttatatagaggttatctatttta

SEQ ID NO: 47591 - DNA, 96 bp, Fusarium virguliforme
  misc_feature: 49
ttattaagctaaggctatagcctattaagtatatagactatatatagtataccctttaatagtataatagtaaatttacctactatccgatattcc

SEQ ID NO: 47592 - DNA, 96 bp, Fusarium virguliforme
  misc_feature: 49
ttatctattttctatctatatacttattcctcttattactctattacttctacttcctattttaattatctactttatattactgtctcctacctt

SEQ ID NO: 47593 - DNA, 96 bp, Fusarium virguliforme
  misc_feature: 49
ttatctattaataaagactctaaatatttattaggtttattaattatttcgtggagctatatattaatattatagttttaagcataaatttaacta

SEQ ID NO: 47594 - DNA, 96 bp, Fusarium virguliforme
  misc_feature: 49
tagactatattatattttataagtctatacctctttataattacttaagaaactatttattaatattattattcatatttagaaccgttaggataa

SEQ ID NO: 47595 - DNA, 96 bp, Fusarium virguliforme
  misc_feature: 49
ttatccctatatcttagctcgataattatatttatatattagctttaaatatacttacgctaatagtagaaataatatataagatactattcttac

SEQ ID NO: 47596 - DNA, 96 bp, Fusarium virguliforme
  misc_feature: 49
ttatatattaataaatatcttagcatcttatttatcgctattattatatctatgccgcctcctattatcttatctccttactctctcccccgtatg

SEQ ID NO: 47597 - DNA, 96 bp, Fusarium virguliforme
  misc_feature: 49
aagactatttcctatagctactttccttaatatataacctatatctataattatcctgccgtctaatataatattaaaatctaaagctatatataa

SEQ ID NO: 47598 - DNA, 96 bp, Fusarium virguliforme
  misc_feature: 49
ttatatacctttactatatattcttagtaatattaatcttagctctataatttcttaattaataccttaaataactttaataattataggagtgta

SEQ ID NO: 47599 - DNA, 96 bp, Fusarium virguliforme
  misc_feature: 49
ttatataaagatataataagtaataattaataaggtaaatagtaatataagctagagagatttaattataatagaatcaagtaatatactaattaa

SEQ ID NO: 47600 - DNA, 96 bp, Fusarium virguliforme
  misc_feature: 49
taactataaaataaatagttaacttttagtaagtttagaataaataatatctaaataataccaaaatagttaataatctcgcgattattactataa

SEQ ID NO: 47601 - DNA, 96 bp, Fusarium virguliforme
  misc_feature: 49
taatttatttaatacttattatatttagcttactttatacctctattatttaccttaactcttttagttaggtcaagaaggtattattaagtataa

SEQ ID NO: 47602 - DNA, 96 bp, Fusarium virguliforme
  misc_feature: 49
tagcttctaagaagtataataaagcctatatatataatagtaataaaagaaataggaataaaagcgagaaagagagataatatagcaaaggtataa

SEQ ID NO: 47603 - DNA, 96 bp, Fusarium virguliforme
  misc_feature: 49
atataataagcttagctattattagtttatttaggatcttcctatagataaagatatatatctataggtatatattattatcctaaattattataa

SEQ ID NO: 47604 - DNA, 96 bp, Fusarium virguliforme
  misc_feature: 49
attttcttagactatctattactcttatttctttttatttaataccttcttttagtaatatcttatacctttttcctatatatatctgccttataa

SEQ ID NO: 47605 - DNA, 96 bp, Fusarium virguliforme
  misc_feature: 49
gatataagccttatatagctatatcctaggggtcccttattatagttattattagatttatagcctttattagataatacttctcgcctcttataa

SEQ ID NO: 47606 - DNA, 96 bp, Fusarium virguliforme
  misc_feature: 49
ttataaaattaaataataaaactatttctattttttaggtaatttattattatagcttaaagtattaattctttagtattactattctcttaatcg

SEQ ID NO: 47607 - DNA, 96 bp, Fusarium virguliforme
  misc_feature: 49
taataactttagtattttagattatctataattataaggagcttttattagtctatagcctatttttatttttagtctttaagcttttaagactaa

SEQ ID NO: 47608 - DNA, 96 bp, Fusarium virguliforme
  misc_feature: 49
ctatctatatctagtattttctcggtataatatatataatatactaacttagtctatatagccgtataatatatctatatattatctttaacctaa

SEQ ID NO: 47609 - DNA, 96 bp, Fusarium virguliforme
  misc_feature: 49
ttagctttatttattcatttatttatctttattaagtattattaattaagctagagtttatcgctagcactttttttacttttccttccctcttat

SEQ ID NO: 47610 - DNA, 96 bp, Fusarium virguliforme
  misc_feature: 49
cgctagaagtaataataatattaatttaaccttaaaaaactagctagtaataaagaagataataataaaaaagagtaagaccttttaaaaatctaa

SEQ ID NO: 47611 - DNA, 96 bp, Fusarium virguliforme
  misc_feature: 49
ttagatatccctaaggataaattagatatccctaaggataaattaaatatccctaataataaattaaataccttaatagaagataatacctctata

SEQ ID NO: 47612 - DNA, 96 bp, Fusarium virguliforme
  misc_feature: 49
cgagataactctttagcgataaattattatatgttatatttattagcttctagactatattttctataatatctcgcttattattataaagtctaa

SEQ ID NO: 47613 - DNA, 96 bp, Fusarium virguliforme
  misc_feature: 49
aaagatagattatttaataataaagcctattatgtaatataatataaaaatatactaaatacaagctattaatatataatatctagtattttctaa

SEQ ID NO: 47614 - DNA, 96 bp, Fusarium virguliforme
  misc_feature: 49
aggaggaaaaaataataatatttagtattaaaaggggcttttaaaattaaatcttaaaggctcttataaaggtaataataataattacttttctaa

SEQ ID NO: 47615 - DNA, 96 bp, Fusarium virguliforme
  misc_feature: 49
ctagcattatatattacgctataataatactatatataataactaaaataaaccctaaccctaatttattaagcaacttatattagaaagaagtaa

SEQ ID NO: 47616 - DNA, 96 bp, Fusarium virguliforme
  misc_feature: 49
ttacttatcggtctagatattatagtctttattctatatttattagtgctacttagtattttattatatctccttaagttcctattatatttatta

SEQ ID NO: 47617 - DNA, 96 bp, Fusarium virguliforme
  misc_feature: 49
ttacttatattattattaatagtatcgctataagcgtatatattataatataagttatttttctttagtttatagcgcttttctagcggggtagct

SEQ ID NO: 47618 - DNA, 96 bp, Fusarium virguliforme
  misc_feature: 49
agctttcttttattatcctaataattctatttaaggtaattcttcttttattattattttattctattcttagctctattcctcctacttaagtaa

SEQ ID NO: 47619 - DNA, 96 bp, Fusarium virguliforme
  misc_feature: 49
atataaattaaataccttgactataaatactaatagcttaataaatatactagtaatattaaatacctagagttaaaatataataagttatagtaa

SEQ ID NO: 47620 - DNA, 96 bp, Fusarium virguliforme
  misc_feature: 49
ttactaaaaataaatagctaaaggctaagttaaagctagataaagctaaaacttaaaggttttaaataaagatatttaaaactagataggaaatac

SEQ ID NO: 47621 - DNA, 96 bp, Fusarium virguliforme
  misc_feature: 49
aataaaaataataaaatgctattaaaaataaataaaactactataataattacttaaagctaatataagataataagctaatttataactatgtaa

SEQ ID NO: 47622 - DNA, 96 bp, Fusarium virguliforme
  misc_feature: 49
ttacataagagctcagtctcttacacttataaagaggatcgacttaattactcttccgtattaattaacgatacttctagtcgctattcccttatt

SEQ ID NO: 47623 - DNA, 96 bp, Fusarium virguliforme
  misc_feature: 49
ttaattagtaatatagttactaacctatagcctataaataatagcggatctagagaccttaatatagcctataataaaaatataataggcggtaat

SEQ ID NO: 47624 - DNA, 96 bp, Fusarium virguliforme
  misc_feature: 49
aaagagggttaaaaaggtaataaaggggaaaaggtaaattatttaggttaaaggagggaaattaagtaaggtttaatagggtaaagaagtaattaa

SEQ ID NO: 47625 - DNA, 96 bp, Fusarium virguliforme
  misc_feature: 49
ttaattaaccttttatattaattatttagattattatgatttattcttccctaatttatattactatttaccttactaattattgcttattatgtc

SEQ ID NO: 47626 - DNA, 96 bp, Fusarium virguliforme
  misc_feature: 49
ttaatatttctttctaagataaagacttaggtaataattaagaagataaagacaagaatagctaaaataataagataactaaagtaaatataatta

SEQ ID NO: 47627 - DNA, 96 bp, Fusarium virguliforme
  misc_feature: 49
tagatttaaacttttttatagatcttattaaaagtaatactttcttaaaagttaaagatatattaaagcctataaagattattaaaaagctattaa

SEQ ID NO: 47628 - DNA, 96 bp, Fusarium virguliforme
  misc_feature: 49
ttaatagattacttatattaccttaaataatattaaacgtaataattactcctattacccctataaataattaataataatagagcctatctatac

SEQ ID NO: 47629 - DNA, 96 bp, Fusarium virguliforme
  misc_feature: 49
ataataatcttaagttagtattataatattaaggataatataaggaggtaaaatagatatattaataagctcttaaggtaagagagaaggtattaa

SEQ ID NO: 47630 - DNA, 96 bp, Fusarium virguliforme
  misc_feature: 49
ttaataaagtagcctaaagttaaggattataataaagaggtaaagttaaattaagatagagattataataaaaaggtaagattaaattaaaatagg

SEQ ID NO: 47631 - DNA, 96 bp, Fusarium virguliforme
  misc_feature: 49
ttaagtttatatatttataaacattatataggtctagggctaataatataaatattatagctatattatatactttctccgcgatattaataaaat

SEQ ID NO: 47632 - DNA, 96 bp, Fusarium virguliforme
  misc_feature: 49
taacctttattaataccttaaatatattaatattctaagaaataaactgattaatagccttattaaaaataataataaacttccggaataacttaa

SEQ ID NO: 47633 - DNA, 96 bp, Fusarium virguliforme
  misc_feature: 49
ttaagtgctatcttaccctctcgcttaagctataatatatcctccttaagtattagttaatcctattactattaatatatattatatactacctta

SEQ ID NO: 47634 - DNA, 96 bp, Fusarium virguliforme
  misc_feature: 49
aatatatcgcgaattactttatataattaacttacttatagcttatataaccttaatttaaggtcctatatatttatcttattgttatagacttaa

SEQ ID NO: 47635 - DNA, 96 bp, Fusarium virguliforme
  misc_feature: 49
ttaaggctagacctataataatctatagatataagagtatagctatatatatttaacgtatataataagcaagtgggatagataagtaagcgggat

SEQ ID NO: 47636 - DNA, 96 bp, Fusarium virguliforme
  misc_feature: 49
ttaagctttataatttatatcgccttttcctaattaataatctactctttttaatttattttattatttaaggtatcctttagtaccttaaaatac

SEQ ID NO: 47637 - DNA, 96 bp, Fusarium virguliforme
  misc_feature: 49
actaccgcgtgaaccctaacccccatattcccatataacccgatattaggttagggttagggttagacttagggttaaacttagggttaagcttaa

SEQ ID NO: 47638 - DNA, 96 bp, Fusarium virguliforme
  misc_feature: 49
gagatataagagagagtctaataaaattaagattaattaaggataattataagataaaggaaaatatttaagagaggtttaagcttattagcttaa

SEQ ID NO: 47639 - DNA, 96 bp, Fusarium virguliforme
  misc_feature: 49
ttaagaatattaatattaataattattttatcagaagtaatactttagtaagttaatcttattaattattaatagttaatagttagaagattaaac

SEQ ID NO: 47640 - DNA, 96 bp, Fusarium virguliforme
  misc_feature: 49
atttaagatacctctagtagaagatattatcttatatatccttactttttattttaggtacttatatatatagatagatcgctatataatagttaa

SEQ ID NO: 47641 - DNA, 96 bp, Fusarium virguliforme
  misc_feature: 49
ttaacctttattaataccttaaatatattaatattctaagaaataaactgattaatagccttattaaaaataataataaacttccggaataactta

SEQ ID NO: 47642 - DNA, 96 bp, Fusarium virguliforme
  misc_feature: 49
aggattaataaacctaatggttaaattaattaatgtacgataagataattaagcttaggtctaataaataataatattagagtagaataaggttaa

SEQ ID NO: 47643 - DNA, 96 bp, Fusarium virguliforme
  misc_feature: 49
ttaaattagccttttatagcttattatctattttaatagttcggagcttaatattatatattgtattaagtatttatataaagtgctttaatatta

SEQ ID NO: 47644 - DNA, 96 bp, Fusarium virguliforme
  misc_feature: 49
ttaaagatataattaaattaaaatataggaataagagctataataataagcttacttaaattacttacttatataatatagcttataataaagcta

SEQ ID NO: 47645 - DNA, 96 bp, Fusarium virguliforme
  misc_feature: 49
ttaaaaggggcttttaaaattaaatcttaaaggctcttataaaggtaataataataattacttttctaaaataatatctaaagtttaatattacct

SEQ ID NO: 47646 - DNA, 96 bp, Fusarium virguliforme
  misc_feature: 49
taaatactagcttatatttatattatttgtcttttttaagatctttattagctcttttatcttattaaaataatatcttttattataagcttttaa

SEQ ID NO: 47647 - DNA, 96 bp, Fusarium virguliforme
  misc_feature: 49
tgtcctccgaactaccgcgtgaaccctaacccccatattcccatataacccttaagtctactataaaatacggcaatatccctcctttaagaattt

SEQ ID NO: 47648 - DNA, 96 bp, Fusarium virguliforme
  misc_feature: 49
tgccctataatataatattatatcgtttatatatatagaggataaagtcctatattattttatatttaagattttagtgcgaggttatcgcgagat

SEQ ID NO: 47649 - DNA, 96 bp, Fusarium virguliforme
  misc_feature: 49
atataataaggtaaagaggcattattattatacttactatatactatatagctatattaatagaataggaggctaaaaaaaataaaataggagtca

SEQ ID NO: 47650 - DNA, 96 bp, Fusarium virguliforme
  misc_feature: 49
aggaataaaaaagaaagagtaatataaaggtaaaagtagataatagaggtaaataaaattaaagaaagaaaaaaaagaaaaaaaagaaaaaaaaga

SEQ ID NO: 47651 - DNA, 96 bp, Fusarium virguliforme
  misc_feature: 49
tctttcttttcttttctttcttttttccttatttttaccttttattactccctttttacccttcctataacttactatttactctcctacctttcc

SEQ ID NO: 47652 - DNA, 96 bp, Fusarium virguliforme
  misc_feature: 49
tctttctttaattttatttacctctattatctacttttacctttatattactctttcttttttattcctctcttttacttctatattatctatctt

SEQ ID NO: 47653 - DNA, 96 bp, Fusarium virguliforme
  misc_feature: 49
tctttagattagctattacccttataatattcttaggatataatattcttagccttaattaatatattataggccttagggctttaattatagggg

SEQ ID NO: 47654 - DNA, 96 bp, Fusarium virguliforme
  misc_feature: 49
atattataaatctaaatatcttaacctaattaagattaattaataatataaacctaagaaggatatttaataccttaatataatctaaattaaaga

SEQ ID NO: 47655 - DNA, 96 bp, Fusarium virguliforme
  misc_feature: 49
tcttattaaagaggctaatcgcctatataataatttaatatttaggcttaaacttaatattaacttacttaagattaaagataatatagctaatta

SEQ ID NO: 47656 - DNA, 96 bp, Fusarium virguliforme
  misc_feature: 49
gactattgcgggaagtagacttagataatagcgatagtaatagtaataataatagagatagtctatataatctataagctagttataggtctaaga

SEQ ID NO: 47657 - DNA, 96 bp, Fusarium virguliforme
  misc_feature: 49
atagggctcccacttaggtataataaatagagctataagtaatacctagactataaatagatatcctagcactatataatatcaatagagttaaga

SEQ ID NO: 47658 - DNA, 96 bp, Fusarium virguliforme
  misc_feature: 49
attaagccttctaaggtcgcaatccctttaattaaataaataccctttatgctattaattaaattattaaagcttaattagatataaaaaaagaga

SEQ ID NO: 47659 - DNA, 96 bp, Fusarium virguliforme
  misc_feature: 49
tctctttaacttaaataacttaattatcgatttaattaacctataattcttaacctttaacttattatattaggaatctagccttatttaatttat

SEQ ID NO: 47660 - DNA, 96 bp, Fusarium virguliforme
  misc_feature: 49
tctctatattacctagctctttttatacctttttatttttagctttattaataaataggaattaccctttaattattagatctaggagacctttta

SEQ ID NO: 47661 - DNA, 96 bp, Fusarium virguliforme
  misc_feature: 49
aatataataagaaacttttacttagataaatataatctaatatatttatagctatctttttatttaagtagctatatattagtattaaaggcgaga

SEQ ID NO: 47662 - DNA, 96 bp, Fusarium virguliforme
  misc_feature: 49
taataagatatacttaggaataatagtaataataaattaagaaaggactagctattctataataatagctaatataaagtattaattattaataga

SEQ ID NO: 47663 - DNA, 96 bp, Fusarium virguliforme
  misc_feature: 49
tctatctaagttaatatatatttatattatattcgagatagcgagattattaataggtatctttatagaattaggaatattatatataatccactc

SEQ ID NO: 47664 - DNA, 96 bp, Fusarium virguliforme
  misc_feature: 49
tctatataggaattaagagaggactctataaaatatctatattaatctcgagaaatactaaagtaatatatactatataaaaggagatataagcac

SEQ ID NO: 47665 - DNA, 96 bp, Fusarium virguliforme
  misc_feature: 49
aatatataaatatataattatatgccctatattaaaagatagtgagtataataagtatatataaggtgatataattagttaattaggagtcctaga

SEQ ID NO: 47666 - DNA, 96 bp, Fusarium virguliforme
  misc_feature: 49
tagctaaatagataggtgagtctttatattatattatattataccgcagtagtatttccgggtatataactataaatataataaatctaaagtaga

SEQ ID NO: 47667 - DNA, 96 bp, Fusarium virguliforme
  misc_feature: 49
tattaatatagataggtatagctataatatatacttaatttattactcgcactaaattattatagattagctataatatatactccttctcgccga

SEQ ID NO: 47668 - DNA, 96 bp, Fusarium virguliforme
  misc_feature: 49
tcgctaataaggcgctttattatagggatatattaagtatatttagtaaacctaataacgataataagtatattattatatatctttctatttatt

SEQ ID NO: 47669 - DNA, 96 bp, Fusarium virguliforme
  misc_feature: 49
tccttatttttaccttttattactccctttttacccttcctataacttactatttactctcctacctttccttttaccccttaactctactttata

SEQ ID NO: 47670 - DNA, 96 bp, Fusarium virguliforme
  misc_feature: 49
tattatattcatatattcttaataaagggcgtaataaactaattcctatataatagctaatataatattaacttaaaatactagatatttagagga

SEQ ID NO: 47671 - DNA, 96 bp, Fusarium virguliforme
  misc_feature: 49
agctacttaaataagggataaggaaaagtagagtaagtaagtataagagagagtgaagtaaataaagtataggtggatagaacgttataaggagga

SEQ ID NO: 47672 - DNA, 96 bp, Fusarium virguliforme
  misc_feature: 49
tcctatccatttattttaattaaatatataaccctatttcttatataaagtaaaagactattaagtaaaataataatatcaagggcttaaagttat

SEQ ID NO: 47673 - DNA, 96 bp, Fusarium virguliforme
  misc_feature: 49
tcctagatgctatttatatattatatattttatattcgctatatttcgcctcttctctcgattaagttatatatattatttattttagtggttata

SEQ ID NO: 47674 - DNA, 96 bp, Fusarium virguliforme
  misc_feature: 49
tcctaatataataagttaaaggttaagaattataggttaattaaatcgataattaagttatttaagttaaagagaaggcataaataatagatatta

SEQ ID NO: 47675 - DNA, 96 bp, Fusarium virguliforme
  misc_feature: 49
tcccttattatacctttcttaaatataccttattactatctacccttataatatattatataatactattaccttactccttatattaaatactct

SEQ ID NO: 47676 - DNA, 96 bp, Fusarium virguliforme
  misc_feature: 49
tcacttaaaatactaaataaactatttaagttatataagttattataagttaagattattattaacctaaccattataagatttaaagcgacggtc

SEQ ID NO: 47677 - DNA, 96 bp, Fusarium virguliforme
  misc_feature: 49
tatttccgctaaagcttattttataaggttattcctaattattttaattattattctaattatattaacgtaaaggttatttataatagggctaat

SEQ ID NO: 47678 - DNA, 96 bp, Fusarium virguliforme
  misc_feature: 49
tatttatgccttctctttaacttaaataacttaattatcgatttaattaacctataattcttaacctttaacttattatattaggaatctagcctt

SEQ ID NO: 47679 - DNA, 96 bp, Fusarium virguliforme
  misc_feature: 49
tatttatcttttatttttattacctgccttatagtctttaaagactatatttattttatcctttagtcttttatagttatataagaaaattaaatt

SEQ ID NO: 47680 - DNA, 96 bp, Fusarium virguliforme
  misc_feature: 49
tatttactttcttttattattaataaataagtatttctttattttttctctaaaggccttattaatctttattatataggctaatattatatatac

SEQ ID NO: 47681 - DNA, 96 bp, Fusarium virguliforme
  misc_feature: 49
agcgctaggataatataggttaggtagttttagaagcttaattatatttagcttattaattagattattttattagtattcctaaataattaaata

SEQ ID NO: 47682 - DNA, 96 bp, Fusarium virguliforme
  misc_feature: 49
tatttaagaggaaagaattaatatataaaagctataataagcaataagatactaagatataagatctatagtaggggggtttaaaataatatagat

SEQ ID NO: 47683 - DNA, 96 bp, Fusarium virguliforme
  misc_feature: 49
atttattaatatttctagctatcgataaatagtattaagtatatttatagatagtaagggattataatataataagataataggggtagaataata

SEQ ID NO: 47684 - DNA, 96 bp, Fusarium virguliforme
  misc_feature: 49
tattattatacttctcttaggtatattatttatcctatatctagtttccgtactatatctatttatttatcttatcctactttaattatattacct

SEQ ID NO: 47685 - DNA, 96 bp, Fusarium virguliforme
  misc_feature: 49
tattatgtacgttattaataataataatagcggtatattaataaagacaattaatagcttaataagagcttataaggagtataatatagcctattt

SEQ ID NO: 47686 - DNA, 96 bp, Fusarium virguliforme
  misc_feature: 49
tattatctttaaccttatattatacttatttacgaactatatatattatatatattaaccgtaaatttagcttataatattttaattaaataaatc

SEQ ID NO: 47687 - DNA, 96 bp, Fusarium virguliforme
  misc_feature: 49
tattatattataggacctagttcgacctagtgcgctgaatgcgtaaaggcttattagagatataagcgtttagggttagaggtctttgcttatggg

SEQ ID NO: 47688 - DNA, 120 bp, Homo sapiens
  misc_feature: 990 for SV(W|O) and 18S
tagttggatcttgggagcgggcgggcggtccgccgcgaggcgagccaccgcccgtccccgccccttgcctctcggcgccccctcgatgctcttagctgagtgtcccgcggggcccgaagc

SEQ ID NO: 47689 - DNA, 120 bp, Homo sapiens
  misc_feature: 988 for SV(W|O) and 18S
aactagttagcatgccagagtctcgttcgttatcggaattaaccagacaaatcgctccaccaactaagaacggccatgcaccaccacccacggaatcgagaaagagctatcaatctgtca

SEQ ID NO: 47690 - DNA, 120 bp, Homo sapiens
  misc_feature: 986 for SV(W|O) and 18S
gctcgtagttggatcttgggagcgggcgggcggtccgccgcgaggcgagccaccgcccgtccccgccccttgcctctcggcgccccctcgatgctcttagctgagtgtcccgcggggccc

SEQ ID NO: 47691 - DNA, 120 bp, Homo sapiens
  misc_feature: 983 for SV(W|O) and 18S
ctcgtagttggatcttgggagcgggcgggcggtccgccgcgaggcgagccaccgcccgtccccgccccttgcctctcggcgccccctcgatgctcttagctgagtgtcccgcggggcccg

SEQ ID NO: 47692 - DNA, 120 bp, Homo sapiens
  misc_feature: 983 for SV(W|O) and 18S
ctagttagcatgccagagtctcgttcgttatcggaattaaccagacaaatcgctccaccaactaagaacggccatgcaccaccacccacggaatcgagaaagagctatcaatctgtcaat

SEQ ID NO: 47693 - DNA, 120 bp, Homo sapiens
  misc_feature: 981 for SV(W|O) and 18S
gtagttggatcttgggagcgggcgggcggtccgccgcgaggcgagccaccgcccgtccccgccccttgcctctcggcgccccctcgatgctcttagctgagtgtcccgcggggcccgaag

SEQ ID NO: 47694 - DNA, 120 bp, Homo sapiens
  misc_feature: 978 for SV(W|O) and 18S
actagttagcatgccagagtctcgttcgttatcggaattaaccagacaaatcgctccaccaactaagaacggccatgcaccaccacccacggaatcgagaaagagctatcaatctgtcaa

SEQ ID NO: 47695 - DNA, 120 bp, Homo sapiens
  misc_feature: 978 for SV(W|O) and 18S
tagttagcatgccagagtctcgttcgttatcggaattaaccagacaaatcgctccaccaactaagaacggccatgcaccaccacccacggaatcgagaaagagctatcaatctgtcaatc

SEQ ID NO: 47696 - DNA, 120 bp, Homo sapiens
  misc_feature: 973 for SV(W|O) and 18S
taactagttagcatgccagagtctcgttcgttatcggaattaaccagacaaatcgctccaccaactaagaacggccatgcaccaccacccacggaatcgagaaagagctatcaatctgtc

SEQ ID NO: 47697 - DNA, 120 bp, Homo sapiens
  misc_feature: 971 for SV(W|O) and 18S
gttagcatgccagagtctcgttcgttatcggaattaaccagacaaatcgctccaccaactaagaacggccatgcaccaccacccacggaatcgagaaagagctatcaatctgtcaatcct

SEQ ID NO: 47698 - DNA, 120 bp, Homo sapiens
  misc_feature: 969 for SV(W|O) and 18S
cgtagttggatcttgggagcgggcgggcggtccgccgcgaggcgagccaccgcccgtccccgccccttgcctctcggcgccccctcgatgctcttagctgagtgtcccgcggggcccgaa

SEQ ID NO: 47699 - DNA, 120 bp, Homo sapiens
  misc_feature: 966 for SV(W|O) and 18S
ttagcatgccagagtctcgttcgttatcggaattaaccagacaaatcgctccaccaactaagaacggccatgcaccaccacccacggaatcgagaaagagctatcaatctgtcaatcctg

SEQ ID NO: 47700 - DNA, 120 bp, Homo sapiens
  misc_feature: 966 for SV(W|O) and 18S
tcgtagttggatcttgggagcgggcgggcggtccgccgcgaggcgagccaccgcccgtccccgccccttgcctctcggcgccccctcgatgctcttagctgagtgtcccgcggggcccga

SEQ ID NO: 47701 - DNA, 120 bp, Homo sapiens
  misc_feature: 966 for SV(W|O) and 18S
tagcatgccagagtctcgttcgttatcggaattaaccagacaaatcgctccaccaactaagaacggccatgcaccaccacccacggaatcgagaaagagctatcaatctgtcaatcctgt

SEQ ID NO: 47702 - DNA, 120 bp, Homo sapiens
  misc_feature: 966 for SV(W|O) and 18S
agttagcatgccagagtctcgttcgttatcggaattaaccagacaaatcgctccaccaactaagaacggccatgcaccaccacccacggaatcgagaaagagctatcaatctgtcaatcc

SEQ ID NO: 47703 - DNA, 120 bp, Homo sapiens
  misc_feature: 965 for SV(W|O) and 18S
agctcgtagttggatcttgggagcgggcgggcggtccgccgcgaggcgagccaccgcccgtccccgccccttgcctctcggcgccccctcgatgctcttagctgagtgtcccgcggggcc

SEQ ID NO: 47704 - DNA, 120 bp, Homo sapiens
  misc_feature: 964 for SV(W|O) and 18S
aagctcgtagttggatcttgggagcgggcgggcggtccgccgcgaggcgagccaccgcccgtccccgccccttgcctctcggcgccccctcgatgctcttagctgagtgtcccgcggggc

SEQ ID NO: 47705 - DNA, 120 bp, Homo sapiens
  misc_feature: 963 for SV(W|O) and 18S
agttggatcttgggagcgggcgggcggtccgccgcgaggcgagccaccgcccgtccccgccccttgcctctcggcgccccctcgatgctcttagctgagtgtcccgcggggcccgaagcg

SEQ ID NO: 47706 - DNA, 120 bp, Homo sapiens
  misc_feature: 961 for SV(W|O) and 18S
ctcagctaagagcatcgagggggcgccgagaggcaaggggcggggacgggcggtggctcgcctcgcggcggaccgcccgcccgctcccaagatccaactacgagctttttaactgcagca

SEQ ID NO: 47707 - DNA, 120 bp, Homo sapiens
  misc_feature: 960 for SV(W|O) and 18S
aaaagctcgtagttggatcttgggagcgggcgggcggtccgccgcgaggcgagccaccgcccgtccccgccccttgcctctcggcgccccctcgatgctcttagctgagtgtcccgcggg

SEQ ID NO: 47708 - DNA, 120 bp, Homo sapiens
  misc_feature: 956 for SV(W|O) and 18S
tcagctaagagcatcgagggggcgccgagaggcaaggggcggggacgggcggtggctcgcctcgcggcggaccgcccgcccgctcccaagatccaactacgagctttttaactgcagcaa

SEQ ID NO: 47709 - DNA, 120 bp, Homo sapiens
  misc_feature: 956 for SV(W|O) and 18S
aaagctcgtagttggatcttgggagcgggcgggcggtccgccgcgaggcgagccaccgcccgtccccgccccttgcctctcggcgccccctcgatgctcttagctgagtgtcccgcgggg

SEQ ID NO: 47710 - DNA, 120 bp, Homo sapiens
  misc_feature: 955 for SV(W|O) and 18S
ctgcagttaaaaagctcgtagttggatcttgggagcgggcgggcggtccgccgcgaggcgagccaccgcccgtccccgccccttgcctctcggcgccccctcgatgctcttagctgagtg

SEQ ID NO: 47711 - DNA, 120 bp, Homo sapiens
  misc_feature: 953 for SV(W|O) and 18S
gctgcagttaaaaagctcgtagttggatcttgggagcgggcgggcggtccgccgcgaggcgagccaccgcccgtccccgccccttgcctctcggcgccccctcgatgctcttagctgagt

SEQ ID NO: 47712 - DNA, 120 bp, Homo sapiens
  misc_feature: 951 for SV(W|O) and 18S
gcatgccagagtctcgttcgttatcggaattaaccagacaaatcgctccaccaactaagaacggccatgcaccaccacccacggaatcgagaaagagctatcaatctgtcaatcctgtcc

SEQ ID NO: 47713 - DNA, 120 bp, Homo sapiens
  misc_feature: 950 for SV(W|O) and 18S
agcatgccagagtctcgttcgttatcggaattaaccagacaaatcgctccaccaactaagaacggccatgcaccaccacccacggaatcgagaaagagctatcaatctgtcaatcctgtc

SEQ ID NO: 47714 - DNA, 120 bp, Homo sapiens
  misc_feature: 949 for SV(W|O) and 18S
aaaaagctcgtagttggatcttgggagcgggcgggcggtccgccgcgaggcgagccaccgcccgtccccgccccttgcctctcggcgccccctcgatgctcttagctgagtgtcccgcgg

SEQ ID NO: 47715 - DNA, 120 bp, Homo sapiens
  misc_feature: 948 for SV(W|O) and 18S
taaaaagctcgtagttggatcttgggagcgggcgggcggtccgccgcgaggcgagccaccgcccgtccccgccccttgcctctcggcgccccctcgatgctcttagctgagtgtcccgcg

SEQ ID NO: 47716 - DNA, 120 bp, Homo sapiens
  misc_feature: 948 for SV(W|O) and 18S
cagctaagagcatcgagggggcgccgagaggcaaggggcggggacgggcggtggctcgcctcgcggcggaccgcccgcccgctcccaagatccaactacgagctttttaactgcagcaac

SEQ ID NO: 47717 - DNA, 120 bp, Homo sapiens
  misc_feature: 946 for SV(W|O) and 18S
ttaaaaagctcgtagttggatcttgggagcgggcgggcggtccgccgcgaggcgagccaccgcccgtccccgccccttgcctctcggcgccccctcgatgctcttagctgagtgtcccgc

SEQ ID NO: 47718 - DNA, 120 bp, Homo sapiens
  misc_feature: 945 for SV(W|O) and 18S
ctaagagcatcgagggggcgccgagaggcaaggggcggggacgggcggtggctcgcctcgcggcggaccgcccgcccgctcccaagatccaactacgagctttttaactgcagcaacttt

SEQ ID NO: 47719 - DNA, 120 bp, Homo sapiens
  misc_feature: 944 for SV(W|O) and 18S
tgcagttaaaaagctcgtagttggatcttgggagcgggcgggcggtccgccgcgaggcgagccaccgcccgtccccgccccttgcctctcggcgccccctcgatgctcttagctgagtgt

SEQ ID NO: 47720 - DNA, 120 bp, Homo sapiens
  misc_feature: 943 for SV(W|O) and 18S
cagttaaaaagctcgtagttggatcttgggagcgggcgggcggtccgccgcgaggcgagccaccgcccgtccccgccccttgcctctcggcgccccctcgatgctcttagctgagtgtcc

SEQ ID NO: 47721 - DNA, 120 bp, Homo sapiens
  misc_feature: 942 for SV(W|O) and 18S
gtaactagttagcatgccagagtctcgttcgttatcggaattaaccagacaaatcgctccaccaactaagaacggccatgcaccaccacccacggaatcgagaaagagctatcaatctgt

SEQ ID NO: 47722 - DNA, 120 bp, Homo sapiens
  misc_feature: 941 for SV(W|O) and 18S
gttggatcttgggagcgggcgggcggtccgccgcgaggcgagccaccgcccgtccccgccccttgcctctcggcgccccctcgatgctcttagctgagtgtcccgcggggcccgaagcgt

SEQ ID NO: 47723 - DNA, 120 bp, Homo sapiens
  misc_feature: 941 for SV(W|O) and 18S
agctaagagcatcgagggggcgccgagaggcaaggggcggggacgggcggtggctcgcctcgcggcggaccgcccgcccgctcccaagatccaactacgagctttttaactgcagcaact

SEQ ID NO: 47724 - DNA, 120 bp, Homo sapiens
  misc_feature: 939 for SV(W|O) and 18S
gctaagagcatcgagggggcgccgagaggcaaggggcggggacgggcggtggctcgcctcgcggcggaccgcccgcccgctcccaagatccaactacgagctttttaactgcagcaactt

SEQ ID NO: 47725 - DNA, 120 bp, Homo sapiens
  misc_feature: 939 for SV(W|O) and 18S
cgtaactagttagcatgccagagtctcgttcgttatcggaattaaccagacaaatcgctccaccaactaagaacggccatgcaccaccacccacggaatcgagaaagagctatcaatctg

SEQ ID NO: 47726 - DNA, 120 bp, Homo sapiens
  misc_feature: 938 for SV(W|O) and 18S
gcagttaaaaagctcgtagttggatcttgggagcgggcgggcggtccgccgcgaggcgagccaccgcccgtccccgccccttgcctctcggcgccccctcgatgctcttagctgagtgtc

SEQ ID NO: 47727 - DNA, 120 bp, Homo sapiens
  misc_feature: 934 for SV(W|O) and 18S
ttggatcttgggagcgggcgggcggtccgccgcgaggcgagccaccgcccgtccccgccccttgcctctcggcgccccctcgatgctcttagctgagtgtcccgcggggcccgaagcgtt

SEQ ID NO: 47728 - DNA, 120 bp, Homo sapiens
  misc_feature: 931 for SV(W|O) and 18S
taagagcatcgagggggcgccgagaggcaaggggcggggacgggcggtggctcgcctcgcggcggaccgcccgcccgctcccaagatccaactacgagctttttaactgcagcaacttta

SEQ ID NO: 47729 - DNA, 120 bp, Homo sapiens
  misc_feature: 931 for SV(W|O) and 18S
agttaaaaagctcgtagttggatcttgggagcgggcgggcggtccgccgcgaggcgagccaccgcccgtccccgccccttgcctctcggcgccccctcgatgctcttagctgagtgtccc

SEQ ID NO: 47730 - DNA, 120 bp, Homo sapiens
  misc_feature: 930 for SV(W|O) and 18S
gttaaaaagctcgtagttggatcttgggagcgggcgggcggtccgccgcgaggcgagccaccgcccgtccccgccccttgcctctcggcgccccctcgatgctcttagctgagtgtcccg

SEQ ID NO: 47731 - DNA, 120 bp, Homo sapiens
  misc_feature: 928 for SV(W|O) and 18S
tggatcttgggagcgggcgggcggtccgccgcgaggcgagccaccgcccgtccccgccccttgcctctcggcgccccctcgatgctcttagctgagtgtcccgcggggcccgaagcgttt

SEQ ID NO: 47732 - DNA, 120 bp, Homo sapiens
  misc_feature: 928 for SV(W|O) and 18S
agtgacgaaaaataacaatacaggactctttcgaggccctgtaattggaatgagtccactttaaatcctttaacgaggatccattggagggcaagtctggtgccagcagccgcggtaatt

SEQ ID NO: 47733 - DNA, 120 bp, Homo sapiens
  misc_feature: 927 for SV(W|O) and 18S
gacgaaaaataacaatacaggactctttcgaggccctgtaattggaatgagtccactttaaatcctttaacgaggatccattggagggcaagtctggtgccagcagccgcggtaattcca

SEQ ID NO: 47734 - DNA, 120 bp, Homo sapiens
  misc_feature: 927 for SV(W|O) and 18S
tagtgacgaaaaataacaatacaggactctttcgaggccctgtaattggaatgagtccactttaaatcctttaacgaggatccattggagggcaagtctggtgccagcagccgcggtaat

SEQ ID NO: 47735 - DNA, 120 bp, Homo sapiens
  misc_feature: 924 for SV(W|O) and 18S
gtgacgaaaaataacaatacaggactctttcgaggccctgtaattggaatgagtccactttaaatcctttaacgaggatccattggagggcaagtctggtgccagcagccgcggtaattc

SEQ ID NO: 47736 - DNA, 120 bp, Homo sapiens
  misc_feature: 924 for SV(W|O) and 18S
agagcatcgagggggcgccgagaggcaaggggcggggacgggcggtggctcgcctcgcggcggaccgcccgcccgctcccaagatccaactacgagctttttaactgcagcaactttaat

SEQ ID NO: 47737 - DNA, 120 bp, Homo sapiens
  misc_feature: 923 for SV(W|O) and 18S
aagagcatcgagggggcgccgagaggcaaggggcggggacgggcggtggctcgcctcgcggcggaccgcccgcccgctcccaagatccaactacgagctttttaactgcagcaactttaa

SEQ ID NO: 47738 - DNA, 120 bp, Homo sapiens
  misc_feature: 921 for SV(W|O) and 18S
tttttaactgcagcaactttaatatacgctattggagctggaattaccgcggctgctggcaccagacttgccctccaatggatcctcgttaaaggatttaaagtggactcattccaatta

SEQ ID NO: 47739 - DNA, 120 bp, Homo sapiens
  misc_feature: 921 for SV(W|O) and 18S
catgccagagtctcgttcgttatcggaattaaccagacaaatcgctccaccaactaagaacggccatgcaccaccacccacggaatcgagaaagagctatcaatctgtcaatcctgtccg

SEQ ID NO: 47740 - DNA, 120 bp, Homo sapiens
  misc_feature: 920 for SV(W|O) and 18S
ggtagtgacgaaaaataacaatacaggactctttcgaggccctgtaattggaatgagtccactttaaatcctttaacgaggatccattggagggcaagtctggtgccagcagccgcggta

SEQ ID NO: 47741 - DNA, 120 bp, Homo sapiens
  misc_feature: 919 for SV(W|O) and 18S
gaggtagtgacgaaaaataacaatacaggactctttcgaggccctgtaattggaatgagtccactttaaatcctttaacgaggatccattggagggcaagtctggtgccagcagccgcgg

SEQ ID NO: 47742 - DNA, 120 bp, Homo sapiens
  misc_feature: 918 for SV(W|O) and 18S
gcgtaactagttagcatgccagagtctcgttcgttatcggaattaaccagacaaatcgctccaccaactaagaacggccatgcaccaccacccacggaatcgagaaagagctatcaatct

SEQ ID NO: 47743 - DNA, 120 bp, Homo sapiens
  misc_feature: 915 for SV(W|O) and 18S
ttgggagcgggcgggcggtccgccgcgaggcgagccaccgcccgtccccgccccttgcctctcggcgccccctcgatgctcttagctgagtgtcccgcggggcccgaagcgtttactttg

SEQ ID NO: 47744 - DNA, 120 bp, Homo sapiens
  misc_feature: 915 for SV(W|O) and 18S
tgacgaaaaataacaatacaggactctttcgaggccctgtaattggaatgagtccactttaaatcctttaacgaggatccattggagggcaagtctggtgccagcagccgcggtaattcc

SEQ ID NO: 47745 - DNA, 120 bp, Homo sapiens
  misc_feature: 915 for SV(W|O) and 18S
ggatcttgggagcgggcgggcggtccgccgcgaggcgagccaccgcccgtccccgccccttgcctctcggcgccccctcgatgctcttagctgagtgtcccgcggggcccgaagcgttta

SEQ ID NO: 47746 - DNA, 120 bp, Homo sapiens
  misc_feature: 913 for SV(W|O) and 18S
cttgggagcgggcgggcggtccgccgcgaggcgagccaccgcccgtccccgccccttgcctctcggcgccccctcgatgctcttagctgagtgtcccgcggggcccgaagcgtttacttt

SEQ ID NO: 47747 - DNA, 120 bp, Homo sapiens
  misc_feature: 912 for SV(W|O) and 18S
aggtagtgacgaaaaataacaatacaggactctttcgaggccctgtaattggaatgagtccactttaaatcctttaacgaggatccattggagggcaagtctggtgccagcagccgcggt

SEQ ID NO: 47748 - DNA, 120 bp, Homo sapiens
  misc_feature: 911 for SV(W|O) and 18S
ctttttaactgcagcaactttaatatacgctattggagctggaattaccgcggctgctggcaccagacttgccctccaatggatcctcgttaaaggatttaaagtggactcattccaatt

SEQ ID NO: 47749 - DNA, 120 bp, Homo sapiens
  misc_feature: 911 for SV(W|O) and 18S
atgccagagtctcgttcgttatcggaattaaccagacaaatcgctccaccaactaagaacggccatgcaccaccacccacggaatcgagaaagagctatcaatctgtcaatcctgtccgt

SEQ ID NO: 47750 - DNA, 120 bp, Homo sapiens
  misc_feature: 910 for SV(W|O) and 18S
gagcatcgagggggcgccgagaggcaaggggcggggacgggcggtggctcgcctcgcggcggaccgcccgcccgctcccaagatccaactacgagctttttaactgcagcaactttaata

SEQ ID NO: 47751 - DNA, 120 bp, Homo sapiens
  misc_feature: 909 for SV(W|O) and 18S
gtagtgacgaaaaataacaatacaggactctttcgaggccctgtaattggaatgagtccactttaaatcctttaacgaggatccattggagggcaagtctggtgccagcagccgcggtaa

SEQ ID NO: 47752 - DNA, 120 bp, Homo sapiens
  misc_feature: 908 for SV(W|O) and 18S
gatcttgggagcgggcgggcggtccgccgcgaggcgagccaccgcccgtccccgccccttgcctctcggcgccccctcgatgctcttagctgagtgtcccgcggggcccgaagcgtttac

SEQ ID NO: 47753 - DNA, 120 bp, Homo sapiens
  misc_feature: 907 for SV(W|O) and 18S
ggaggtagtgacgaaaaataacaatacaggactctttcgaggccctgtaattggaatgagtccactttaaatcctttaacgaggatccattggagggcaagtctggtgccagcagccgcg

SEQ ID NO: 47754 - DNA, 120 bp, Homo sapiens
  misc_feature: 906 for SV(W|O) and 18S
tgccagagtctcgttcgttatcggaattaaccagacaaatcgctccaccaactaagaacggccatgcaccaccacccacggaatcgagaaagagctatcaatctgtcaatcctgtccgtg

SEQ ID NO: 47755 - DNA, 120 bp, Homo sapiens
  misc_feature: 906 for SV(W|O) and 18S
acgaaaaataacaatacaggactctttcgaggccctgtaattggaatgagtccactttaaatcctttaacgaggatccattggagggcaagtctggtgccagcagccgcggtaattccag

SEQ ID NO: 47756 - DNA, 120 bp, Homo sapiens
  misc_feature: 905 for SV(W|O) and 18S
tcttgggagcgggcgggcggtccgccgcgaggcgagccaccgcccgtccccgccccttgcctctcggcgccccctcgatgctcttagctgagtgtcccgcggggcccgaagcgtttactt

SEQ ID NO: 47757 - DNA, 120 bp, Homo sapiens
  misc_feature: 905 for SV(W|O) and 18S
cgcgtaactagttagcatgccagagtctcgttcgttatcggaattaaccagacaaatcgctccaccaactaagaacggccatgcaccaccacccacggaatcgagaaagagctatcaatc

SEQ ID NO: 47758 - DNA, 120 bp, Homo sapiens
  misc_feature: 904 for SV(W|O) and 18S
ggggaggtagtgacgaaaaataacaatacaggactctttcgaggccctgtaattggaatgagtccactttaaatcctttaacgaggatccattggagggcaagtctggtgccagcagccg

SEQ ID NO: 47759 - DNA, 120 bp, Homo sapiens
  misc_feature: 904 for SV(W|O) and 18S
gggaggtagtgacgaaaaataacaatacaggactctttcgaggccctgtaattggaatgagtccactttaaatcctttaacgaggatccattggagggcaagtctggtgccagcagccgc

SEQ ID NO: 47760 - DNA, 120 bp, Homo sapiens
  misc_feature: 904 for SV(W|O) and 18S
cgaaaaataacaatacaggactctttcgaggccctgtaattggaatgagtccactttaaatcctttaacgaggatccattggagggcaagtctggtgccagcagccgcggtaattccagc

SEQ ID NO: 47761 - DNA, 120 bp, Homo sapiens
  misc_feature: 904 for SV(W|O) and 18S
ccggggaggtagtgacgaaaaataacaatacaggactctttcgaggccctgtaattggaatgagtccactttaaatcctttaacgaggatccattggagggcaagtctggtgccagcagc

SEQ ID NO: 47762 - DNA, 120 bp, Homo sapiens
  misc_feature: 903 for SV(W|O) and 18S
gctttttaactgcagcaactttaatatacgctattggagctggaattaccgcggctgctggcaccagacttgccctccaatggatcctcgttaaaggatttaaagtggactcattccaat

SEQ ID NO: 47763 - DNA, 120 bp, Homo sapiens
  misc_feature: 902 for SV(W|O) and 18S
aataacaatacaggactctttcgaggccctgtaattggaatgagtccactttaaatcctttaacgaggatccattggagggcaagtctggtgccagcagccgcggtaattccagctccaa

SEQ ID NO: 47764 - DNA, 120 bp, Homo sapiens
  misc_feature: 902 for SV(W|O) and 18S
gtcgcgtaactagttagcatgccagagtctcgttcgttatcggaattaaccagacaaatcgctccaccaactaagaacggccatgcaccaccacccacggaatcgagaaagagctatcaa

SEQ ID NO: 47765 - DNA, 120 bp, Homo sapiens
  misc_feature: 902 for SV(W|O) and 18S
ttaactgcagcaactttaatatacgctattggagctggaattaccgcggctgctggcaccagacttgccctccaatggatcctcgttaaaggatttaaagtggactcattccaattacag

SEQ ID NO: 47766 - DNA, 120 bp, Homo sapiens
  misc_feature: 901 for SV(W|O) and 18S
ttttaactgcagcaactttaatatacgctattggagctggaattaccgcggctgctggcaccagacttgccctccaatggatcctcgttaaaggatttaaagtggactcattccaattac

SEQ ID NO: 47767 - DNA, 120 bp, Homo sapiens
  misc_feature: 900 for SV(W|O) and 18S
ataacaatacaggactctttcgaggccctgtaattggaatgagtccactttaaatcctttaacgaggatccattggagggcaagtctggtgccagcagccgcggtaattccagctccaat

SEQ ID NO: 47768 - DNA, 120 bp, Homo sapiens
  misc_feature: 899 for SV(W|O) and 18S
ttcatggggaataattgcaatccccgatccccatcacgaatggggttcaacgggttacccgcgcctgccggcgtagggtaggcacacgctgagccagtcagtgtagcgcgcgtgcagccc

SEQ ID NO: 47769 - DNA, 120 bp, Homo sapiens
  misc_feature: 899 for SV(W|O) and 18S
aaaaataacaatacaggactctttcgaggccctgtaattggaatgagtccactttaaatcctttaacgaggatccattggagggcaagtctggtgccagcagccgcggtaattccagctc

SEQ ID NO: 47770 - DNA, 120 bp, Homo sapiens
  misc_feature: 899 for SV(W|O) and 18S
atcttgggagcgggcgggcggtccgccgcgaggcgagccaccgcccgtccccgccccttgcctctcggcgccccctcgatgctcttagctgagtgtcccgcggggcccgaagcgtttact

SEQ ID NO: 47771 - DNA, 120 bp, Homo sapiens
  misc_feature: 898 for SV(W|O) and 18S
tcgcgtaactagttagcatgccagagtctcgttcgttatcggaattaaccagacaaatcgctccaccaactaagaacggccatgcaccaccacccacggaatcgagaaagagctatcaat

SEQ ID NO: 47772 - DNA, 120 bp, Homo sapiens
  misc_feature: 898 for SV(W|O) and 18S
tcatggggaataattgcaatccccgatccccatcacgaatggggttcaacgggttacccgcgcctgccggcgtagggtaggcacacgctgagccagtcagtgtagcgcgcgtgcagcccc

SEQ ID NO: 47773 - DNA, 120 bp, Homo sapiens
  misc_feature: 896 for SV(W|O) and 18S
tttaactgcagcaactttaatatacgctattggagctggaattaccgcggctgctggcaccagacttgccctccaatggatcctcgttaaaggatttaaagtggactcattccaattaca

SEQ ID NO: 47774 - DNA, 120 bp, Homo sapiens
  misc_feature: 896 for SV(W|O) and 18S
aaataacaatacaggactctttcgaggccctgtaattggaatgagtccactttaaatcctttaacgaggatccattggagggcaagtctggtgccagcagccgcggtaattccagctcca

SEQ ID NO: 47775 - DNA, 120 bp, Homo sapiens
  misc_feature: 896 for SV(W|O) and 18S
cggggaggtagtgacgaaaaataacaatacaggactctttcgaggccctgtaattggaatgagtccactttaaatcctttaacgaggatccattggagggcaagtctggtgccagcagcc

SEQ ID NO: 47776 - DNA, 120 bp, Homo sapiens
  misc_feature: 896 for SV(W|O) and 18S
ccgccagggccgtgggccgaccccggcggggccgatccgagggcctcactaaaccatccaatcggtagtagcgacgggcggtgtgtacaaagggcagggacttaatcaacgcaagcttat

SEQ ID NO: 47777 - DNA, 120 bp, Homo sapiens
  misc_feature: 896 for SV(W|O) and 18S
agcatcgagggggcgccgagaggcaaggggcggggacgggcggtggctcgcctcgcggcggaccgcccgcccgctcccaagatccaactacgagctttttaactgcagcaactttaatat

SEQ ID NO: 47778 - DNA, 120 bp, Homo sapiens
  misc_feature: 894 for SV(W|O) and 18S
agctttttaactgcagcaactttaatatacgctattggagctggaattaccgcggctgctggcaccagacttgccctccaatggatcctcgttaaaggatttaaagtggactcattccaa

SEQ ID NO: 47779 - DNA, 120 bp, Homo sapiens
  misc_feature: 893 for SV(W|O) and 18S
aaaataacaatacaggactctttcgaggccctgtaattggaatgagtccactttaaatcctttaacgaggatccattggagggcaagtctggtgccagcagccgcggtaattccagctcc

SEQ ID NO: 47780 - DNA, 120 bp, Homo sapiens
  misc_feature: 892 for SV(W|O) and 18S
gaaaaataacaatacaggactctttcgaggccctgtaattggaatgagtccactttaaatcctttaacgaggatccattggagggcaagtctggtgccagcagccgcggtaattccagct

SEQ ID NO: 47781 - DNA, 120 bp, Homo sapiens
  misc_feature: 891 for SV(W|O) and 18S
gggagcgggcgggcggtccgccgcgaggcgagccaccgcccgtccccgccccttgcctctcggcgccccctcgatgctcttagctgagtgtcccgcggggcccgaagcgtttactttgaa

SEQ ID NO: 47782 - DNA, 120 bp, Homo sapiens
  misc_feature: 891 for SV(W|O) and 18S
cccggggaggtagtgacgaaaaataacaatacaggactctttcgaggccctgtaattggaatgagtccactttaaatcctttaacgaggatccattggagggcaagtctggtgccagcag

SEQ ID NO: 47783 - DNA, 120 bp, Homo sapiens
  misc_feature: 890 for SV(W|O) and 18S
gctattggagctggaattaccgcggctgctggcaccagacttgccctccaatggatcctcgttaaaggatttaaagtggactcattccaattacagggcctcgaaagagtcctgtattgt

SEQ ID NO: 47784 - DNA, 120 bp, Homo sapiens
  misc_feature: 888 for SV(W|O) and 18S
tccgccagggccgtgggccgaccccggcggggccgatccgagggcctcactaaaccatccaatcggtagtagcgacgggcggtgtgtacaaagggcagggacttaatcaacgcaagctta

SEQ ID NO: 47785 - DNA, 120 bp, Homo sapiens
  misc_feature: 888 for SV(W|O) and 18S
cagggccgtgggccgaccccggcggggccgatccgagggcctcactaaaccatccaatcggtagtagcgacgggcggtgtgtacaaagggcagggacttaatcaacgcaagcttatgacc

SEQ ID NO: 47786 - DNA, 120 bp, Homo sapiens
  misc_feature: 888 for SV(W|O) and 18S
gcagcaactttaatatacgctattggagctggaattaccgcggctgctggcaccagacttgccctccaatggatcctcgttaaaggatttaaagtggactcattccaattacagggcctc

SEQ ID NO: 47787 - DNA, 120 bp, Homo sapiens
  misc_feature: 888 for SV(W|O) and 18S
ctccgccagggccgtgggccgaccccggcggggccgatccgagggcctcactaaaccatccaatcggtagtagcgacgggcggtgtgtacaaagggcagggacttaatcaacgcaagctt

SEQ ID NO: 47788 - DNA, 120 bp, Homo sapiens
  misc_feature: 888 for SV(W|O) and 18S
ctattggagctggaattaccgcggctgctggcaccagacttgccctccaatggatcctcgttaaaggatttaaagtggactcattccaattacagggcctcgaaagagtcctgtattgtt

SEQ ID NO: 47789 - DNA, 120 bp, Homo sapiens
  misc_feature: 887 for SV(W|O) and 18S
tgcagcaactttaatatacgctattggagctggaattaccgcggctgctggcaccagacttgccctccaatggatcctcgttaaaggatttaaagtggactcattccaattacagggcct

SEQ ID NO: 47790 - DNA, 120 bp, Homo sapiens
  misc_feature: 887 for SV(W|O) and 18S
gccagggccgtgggccgaccccggcggggccgatccgagggcctcactaaaccatccaatcggtagtagcgacgggcggtgtgtacaaagggcagggacttaatcaacgcaagcttatga

SEQ ID NO: 47791 - DNA, 120 bp, Homo sapiens
  misc_feature: 887 for SV(W|O) and 18S
taactgcagcaactttaatatacgctattggagctggaattaccgcggctgctggcaccagacttgccctccaatggatcctcgttaaaggatttaaagtggactcattccaattacagg

SEQ ID NO: 47792 - DNA, 120 bp, Homo sapiens
  misc_feature: 887 for SV(W|O) and 18S
actgcagcaactttaatatacgctattggagctggaattaccgcggctgctggcaccagacttgccctccaatggatcctcgttaaaggatttaaagtggactcattccaattacagggc

SEQ ID NO: 47793 - DNA, 120 bp, Homo sapiens
  misc_feature: 886 for SV(W|O) and 18S
tgggagcgggcgggcggtccgccgcgaggcgagccaccgcccgtccccgccccttgcctctcggcgccccctcgatgctcttagctgagtgtcccgcggggcccgaagcgtttactttga

SEQ ID NO: 47794 - DNA, 120 bp, Homo sapiens
  misc_feature: 886 for SV(W|O) and 18S
tattggagctggaattaccgcggctgctggcaccagacttgccctccaatggatcctcgttaaaggatttaaagtggactcattccaattacagggcctcgaaagagtcctgtattgtta

SEQ ID NO: 47795 - DNA, 120 bp, Homo sapiens
  misc_feature: 886 for SV(W|O) and 18S
agggccgtgggccgaccccggcggggccgatccgagggcctcactaaaccatccaatcggtagtagcgacgggcggtgtgtacaaagggcagggacttaatcaacgcaagcttatgaccc

SEQ ID NO: 47796 - DNA, 120 bp, Homo sapiens
  misc_feature: 886 for SV(W|O) and 18S
aactgcagcaactttaatatacgctattggagctggaattaccgcggctgctggcaccagacttgccctccaatggatcctcgttaaaggatttaaagtggactcattccaattacaggg

SEQ ID NO: 47797 - DNA, 120 bp, Homo sapiens
  misc_feature: 885 for SV(W|O) and 18S
gtgcgggtcataagcttgcgttgattaagtccctgccctttgtacacaccgcccgtcgctactaccgattggatggtttagtgaggccctcggatcggccccgccggggtcggcccacgg

SEQ ID NO: 47798 - DNA, 120 bp, Homo sapiens
  misc_feature: 885 for SV(W|O) and 18S
aaagactttggtttcccggaagctgcccggcgggtcatgggaataacgccgccgcatcgccggtcggcatcgtttatggtcggaactacgacggtatctgatcgtcttcgaacctccgac

SEQ ID NO: 47799 - DNA, 120 bp, Homo sapiens
  misc_feature: 885 for SV(W|O) and 18S
cgctattggagctggaattaccgcggctgctggcaccagacttgccctccaatggatcctcgttaaaggatttaaagtggactcattccaattacagggcctcgaaagagtcctgtattg

SEQ ID NO: 47800 - DNA, 120 bp, Homo sapiens
  misc_feature: 884 for SV(W|O) and 18S
ggagcgggcgggcggtccgccgcgaggcgagccaccgcccgtccccgccccttgcctctcggcgccccctcgatgctcttagctgagtgtcccgcggggcccgaagcgtttactttgaaa

SEQ ID NO: 47801 - DNA, 120 bp, Homo sapiens
  misc_feature: 884 for SV(W|O) and 18S
cgccagggccgtgggccgaccccggcggggccgatccgagggcctcactaaaccatccaatcggtagtagcgacgggcggtgtgtacaaagggcagggacttaatcaacgcaagcttatg

SEQ ID NO: 47802 - DNA, 120 bp, Homo sapiens
  misc_feature: 882 for SV(W|O) and 18S
gagctttttaactgcagcaactttaatatacgctattggagctggaattaccgcggctgctggcaccagacttgccctccaatggatcctcgttaaaggatttaaagtggactcattcca

SEQ ID NO: 47803 - DNA, 120 bp, Homo sapiens
  misc_feature: 881 for SV(W|O) and 18S
ccagggccgtgggccgaccccggcggggccgatccgagggcctcactaaaccatccaatcggtagtagcgacgggcggtgtgtacaaagggcagggacttaatcaacgcaagcttatgac

SEQ ID NO: 47804 - DNA, 120 bp, Homo sapiens
  misc_feature: 881 for SV(W|O) and 18S
gctccgccagggccgtgggccgaccccggcggggccgatccgagggcctcactaaaccatccaatcggtagtagcgacgggcggtgtgtacaaagggcagggacttaatcaacgcaagct

SEQ ID NO: 47805 - DNA, 120 bp, Homo sapiens
  misc_feature: 881 for SV(W|O) and 18S
atccaactacgagctttttaactgcagcaactttaatatacgctattggagctggaattaccgcggctgctggcaccagacttgccctccaatggatcctcgttaaaggatttaaagtgg

SEQ ID NO: 47806 - DNA, 120 bp, Homo sapiens
  misc_feature: 880 for SV(W|O) and 18S
ggtcgcgtaactagttagcatgccagagtctcgttcgttatcggaattaaccagacaaatcgctccaccaactaagaacggccatgcaccaccacccacggaatcgagaaagagctatca

SEQ ID NO: 47807 - DNA, 120 bp, Homo sapiens
  misc_feature: 880 for SV(W|O) and 18S
cgctccgccagggccgtgggccgaccccggcggggccgatccgagggcctcactaaaccatccaatcggtagtagcgacgggcggtgtgtacaaagggcagggacttaatcaacgcaagc

SEQ ID NO: 47808 - DNA, 120 bp, Homo sapiens
  misc_feature: 879 for SV(W|O) and 18S
tccaactacgagctttttaactgcagcaactttaatatacgctattggagctggaattaccgcggctgctggcaccagacttgccctccaatggatcctcgttaaaggatttaaagtgga

SEQ ID NO: 47809 - DNA, 120 bp, Homo sapiens
  misc_feature: 879 for SV(W|O) and 18S
aagactttggtttcccggaagctgcccggcgggtcatgggaataacgccgccgcatcgccggtcggcatcgtttatggtcggaactacgacggtatctgatcgtcttcgaacctccgact

SEQ ID NO: 47810 - DNA, 120 bp, Homo sapiens
  misc_feature: 879 for SV(W|O) and 18S
acgctattggagctggaattaccgcggctgctggcaccagacttgccctccaatggatcctcgttaaaggatttaaagtggactcattccaattacagggcctcgaaagagtcctgtatt

SEQ ID NO: 47811 - DNA, 120 bp, Homo sapiens
  misc_feature: 878 for SV(W|O) and 18S
agcaactttaatatacgctattggagctggaattaccgcggctgctggcaccagacttgccctccaatggatcctcgttaaaggatttaaagtggactcattccaattacagggcctcga

SEQ ID NO: 47812 - DNA, 120 bp, Homo sapiens
  misc_feature: 876 for SV(W|O) and 18S
acccggggaggtagtgacgaaaaataacaatacaggactctttcgaggccctgtaattggaatgagtccactttaaatcctttaacgaggatccattggagggcaagtctggtgccagca

SEQ ID NO: 47813 - DNA, 120 bp, Homo sapiens
  misc_feature: 876 for SV(W|O) and 18S
atacaggactctttcgaggccctgtaattggaatgagtccactttaaatcctttaacgaggatccattggagggcaagtctggtgccagcagccgcggtaattccagctccaatagcgta

SEQ ID NO: 47814 - DNA, 120 bp, Homo sapiens
  misc_feature: 876 for SV(W|O) and 18S
catggggaataattgcaatccccgatccccatcacgaatggggttcaacgggttacccgcgcctgccggcgtagggtaggcacacgctgagccagtcagtgtagcgcgcgtgcagccccg

SEQ ID NO: 47815 - DNA, 120 bp, Homo sapiens
  misc_feature: 875 for SV(W|O) and 18S
gccgtgggccgaccccggcggggccgatccgagggcctcactaaaccatccaatcggtagtagcgacgggcggtgtgtacaaagggcagggacttaatcaacgcaagcttatgacccgca

SEQ ID NO: 47816 - DNA, 120 bp, Homo sapiens
  misc_feature: 875 for SV(W|O) and 18S
gccagagtctcgttcgttatcggaattaaccagacaaatcgctccaccaactaagaacggccatgcaccaccacccacggaatcgagaaagagctatcaatctgtcaatcctgtccgtgt

SEQ ID NO: 47817 - DNA, 120 bp, Homo sapiens
  misc_feature: 875 for SV(W|O) and 18S
agtgcgggtcataagcttgcgttgattaagtccctgccctttgtacacaccgcccgtcgctactaccgattggatggtttagtgaggccctcggatcggccccgccggggtcggcccacg

SEQ ID NO: 47818 - DNA, 120 bp, Homo sapiens
  misc_feature: 874 for SV(W|O) and 18S
cgagctttttaactgcagcaactttaatatacgctattggagctggaattaccgcggctgctggcaccagacttgccctccaatggatcctcgttaaaggatttaaagtggactcattcc

SEQ ID NO: 47819 - DNA, 120 bp, Homo sapiens
  misc_feature: 874 for SV(W|O) and 18S
gcgctccgccagggccgtgggccgaccccggcggggccgatccgagggcctcactaaaccatccaatcggtagtagcgacgggcggtgtgtacaaagggcagggacttaatcaacgcaag

SEQ ID NO: 47820 - DNA, 120 bp, Homo sapiens
  misc_feature: 873 for SV(W|O) and 18S
gggccgtgggccgaccccggcggggccgatccgagggcctcactaaaccatccaatcggtagtagcgacgggcggtgtgtacaaagggcagggacttaatcaacgcaagcttatgacccg

SEQ ID NO: 47821 - DNA, 120 bp, Homo sapiens
  misc_feature: 873 for SV(W|O) and 18S
ggccgtgggccgaccccggcggggccgatccgagggcctcactaaaccatccaatcggtagtagcgacgggcggtgtgtacaaagggcagggacttaatcaacgcaagcttatgacccgc

SEQ ID NO: 47822 - DNA, 120 bp, Homo sapiens
  misc_feature: 873 for SV(W|O) and 18S
ctttaaatcctttaacgaggatccattggagggcaagtctggtgccagcagccgcggtaattccagctccaatagcgtatattaaagttgctgcagttaaaaagctcgtagttggatctt

SEQ ID NO: 47823 - DNA, 120 bp, Homo sapiens
  misc_feature: 872 for SV(W|O) and 18S
tcgctactaccgattggatggtttagtgaggccctcggatcggccccgccggggtcggcccacggccctggcggagcgctgagaagacggtcgaacttgactatctagaggaagtaaaag

SEQ ID NO: 47824 - DNA, 120 bp, Homo sapiens
  misc_feature: 872 for SV(W|O) and 18S
tacaggactctttcgaggccctgtaattggaatgagtccactttaaatcctttaacgaggatccattggagggcaagtctggtgccagcagccgcggtaattccagctccaatagcgtat

SEQ ID NO: 47825 - DNA, 120 bp, Homo sapiens
  misc_feature: 872 for SV(W|O) and 18S
gatccaactacgagctttttaactgcagcaactttaatatacgctattggagctggaattaccgcggctgctggcaccagacttgccctccaatggatcctcgttaaaggatttaaagtg

SEQ ID NO: 47826 - DNA, 120 bp, Homo sapiens
  misc_feature: 872 for SV(W|O) and 18S
cgctactaccgattggatggtttagtgaggccctcggatcggccccgccggggtcggcccacggccctggcggagcgctgagaagacggtcgaacttgactatctagaggaagtaaaagt

SEQ ID NO: 47827 - DNA, 120 bp, Homo sapiens
  misc_feature: 871 for SV(W|O) and 18S
gttcatggggaataattgcaatccccgatccccatcacgaatggggttcaacgggttacccgcgcctgccggcgtagggtaggcacacgctgagccagtcagtgtagcgcgcgtgcagcc

SEQ ID NO: 47828 - DNA, 120 bp, Homo sapiens
  misc_feature: 871 for SV(W|O) and 18S
gggtcgcgtaactagttagcatgccagagtctcgttcgttatcggaattaaccagacaaatcgctccaccaactaagaacggccatgcaccaccacccacggaatcgagaaagagctatc

SEQ ID NO: 47829 - DNA, 120 bp, Homo sapiens
  misc_feature: 871 for SV(W|O) and 18S
gctactaccgattggatggtttagtgaggccctcggatcggccccgccggggtcggcccacggccctggcggagcgctgagaagacggtcgaacttgactatctagaggaagtaaaagtc

SEQ ID NO: 47830 - DNA, 120 bp, Homo sapiens
  misc_feature: 870 for SV(W|O) and 18S
cagcaactttaatatacgctattggagctggaattaccgcggctgctggcaccagacttgccctccaatggatcctcgttaaaggatttaaagtggactcattccaattacagggcctcg

SEQ ID NO: 47831 - DNA, 120 bp, Homo sapiens
  misc_feature: 869 for SV(W|O) and 18S
gcatcgagggggcgccgagaggcaaggggcggggacgggcggtggctcgcctcgcggcggaccgcccgcccgctcccaagatccaactacgagctttttaactgcagcaactttaatata

SEQ ID NO: 47832 - DNA, 120 bp, Homo sapiens
  misc_feature: 869 for SV(W|O) and 18S
cagagtctcgttcgttatcggaattaaccagacaaatcgctccaccaactaagaacggccatgcaccaccacccacggaatcgagaaagagctatcaatctgtcaatcctgtccgtgtcc

SEQ ID NO: 47833 - DNA, 120 bp, Homo sapiens
  misc_feature: 869 for SV(W|O) and 18S
ccagagtctcgttcgttatcggaattaaccagacaaatcgctccaccaactaagaacggccatgcaccaccacccacggaatcgagaaagagctatcaatctgtcaatcctgtccgtgtc

SEQ ID NO: 47834 - DNA, 120 bp, Homo sapiens
  misc_feature: 869 for SV(W|O) and 18S
actttggtttcccggaagctgcccggcgggtcatgggaataacgccgccgcatcgccggtcggcatcgtttatggtcggaactacgacggtatctgatcgtcttcgaacctccgactttc

SEQ ID NO: 47835 - DNA, 120 bp, Homo sapiens
  misc_feature: 869 for SV(W|O) and 18S
agactttggtttcccggaagctgcccggcgggtcatgggaataacgccgccgcatcgccggtcggcatcgtttatggtcggaactacgacggtatctgatcgtcttcgaacctccgactt

SEQ ID NO: 47836 - DNA, 120 bp, Homo sapiens
  misc_feature: 868 for SV(W|O) and 18S
agcgggcgggcggtccgccgcgaggcgagccaccgcccgtccccgccccttgcctctcggcgccccctcgatgctcttagctgagtgtcccgcggggcccgaagcgtttactttgaaaaa

SEQ ID NO: 47837 - DNA, 120 bp, Homo sapiens
  misc_feature: 868 for SV(W|O) and 18S
ctgcagcaactttaatatacgctattggagctggaattaccgcggctgctggcaccagacttgccctccaatggatcctcgttaaaggatttaaagtggactcattccaattacagggcc

SEQ ID NO: 47838 - DNA, 120 bp, Homo sapiens
  misc_feature: 867 for SV(W|O) and 18S
gggggtcgcgtaactagttagcatgccagagtctcgttcgttatcggaattaaccagacaaatcgctccaccaactaagaacggccatgcaccaccacccacggaatcgagaaagagcta

SEQ ID NO: 47839 - DNA, 120 bp, Homo sapiens
  misc_feature: 867 for SV(W|O) and 18S
tactaccgattggatggtttagtgaggccctcggatcggccccgccggggtcggcccacggccctggcggagcgctgagaagacggtcgaacttgactatctagaggaagtaaaagtcgt

SEQ ID NO: 47840 - DNA, 120 bp, Homo sapiens
  misc_feature: 867 for SV(W|O) and 18S
ccaactacgagctttttaactgcagcaactttaatatacgctattggagctggaattaccgcggctgctggcaccagacttgccctccaatggatcctcgttaaaggatttaaagtggac

SEQ ID NO: 47841 - DNA, 120 bp, Homo sapiens
  misc_feature: 867 for SV(W|O) and 18S
ggggtcgcgtaactagttagcatgccagagtctcgttcgttatcggaattaaccagacaaatcgctccaccaactaagaacggccatgcaccaccacccacggaatcgagaaagagctat

SEQ ID NO: 47842 - DNA, 120 bp, Homo sapiens
  misc_feature: 867 for SV(W|O) and 18S
aactacgagctttttaactgcagcaactttaatatacgctattggagctggaattaccgcggctgctggcaccagacttgccctccaatggatcctcgttaaaggatttaaagtggactc

SEQ ID NO: 47843 - DNA, 120 bp, Homo sapiens
  misc_feature: 867 for SV(W|O) and 18S
gactttggtttcccggaagctgcccggcgggtcatgggaataacgccgccgcatcgccggtcggcatcgtttatggtcggaactacgacggtatctgatcgtcttcgaacctccgacttt

SEQ ID NO: 47844 - DNA, 120 bp, Homo sapiens
  misc_feature: 867 for SV(W|O) and 18S
atggggaataattgcaatccccgatccccatcacgaatggggttcaacgggttacccgcgcctgccggcgtagggtaggcacacgctgagccagtcagtgtagcgcgcgtgcagccccgg

SEQ ID NO: 47845 - DNA, 120 bp, Homo sapiens
  misc_feature: 867 for SV(W|O) and 18S
agatccaactacgagctttttaactgcagcaactttaatatacgctattggagctggaattaccgcggctgctggcaccagacttgccctccaatggatcctcgttaaaggatttaaagt

SEQ ID NO: 47846 - DNA, 120 bp, Homo sapiens
  misc_feature: 866 for SV(W|O) and 18S
gagcgggcgggcggtccgccgcgaggcgagccaccgcccgtccccgccccttgcctctcggcgccccctcgatgctcttagctgagtgtcccgcggggcccgaagcgtttactttgaaaa

SEQ ID NO: 47847 - DNA, 120 bp, Homo sapiens
  misc_feature: 866 for SV(W|O) and 18S
gcaactttaatatacgctattggagctggaattaccgcggctgctggcaccagacttgccctccaatggatcctcgttaaaggatttaaagtggactcattccaattacagggcctcgaa

SEQ ID NO: 47848 - DNA, 120 bp, Homo sapiens
  misc_feature: 865 for SV(W|O) and 18S
tttaaatcctttaacgaggatccattggagggcaagtctggtgccagcagccgcggtaattccagctccaatagcgtatattaaagttgctgcagttaaaaagctcgtagttggatcttg

SEQ ID NO: 47849 - DNA, 120 bp, Homo sapiens
  misc_feature: 865 for SV(W|O) and 18S
agcgctccgccagggccgtgggccgaccccggcggggccgatccgagggcctcactaaaccatccaatcggtagtagcgacgggcggtgtgtacaaagggcagggacttaatcaacgcaa

SEQ ID NO: 47850 - DNA, 120 bp, Homo sapiens
  misc_feature: 865 for SV(W|O) and 18S
tacgagctttttaactgcagcaactttaatatacgctattggagctggaattaccgcggctgctggcaccagacttgccctccaatggatcctcgttaaaggatttaaagtggactcatt

SEQ ID NO: 47851 - DNA, 120 bp, Homo sapiens
  misc_feature: 865 for SV(W|O) and 18S
ctactaccgattggatggtttagtgaggccctcggatcggccccgccggggtcggcccacggccctggcggagcgctgagaagacggtcgaacttgactatctagaggaagtaaaagtcg

SEQ ID NO: 47852 - DNA, 120 bp, Homo sapiens
  misc_feature: 865 for SV(W|O) and 18S
agagtctcgttcgttatcggaattaaccagacaaatcgctccaccaactaagaacggccatgcaccaccacccacggaatcgagaaagagctatcaatctgtcaatcctgtccgtgtccg

SEQ ID NO: 47853 - DNA, 120 bp, Homo sapiens
  misc_feature: 864 for SV(W|O) and 18S
cagcgctccgccagggccgtgggccgaccccggcggggccgatccgagggcctcactaaaccatccaatcggtagtagcgacgggcggtgtgtacaaagggcagggacttaatcaacgca

SEQ ID NO: 47854 - DNA, 120 bp, Homo sapiens
  misc_feature: 864 for SV(W|O) and 18S
tcggaggttcgaagacgatcagataccgtcgtagttccgaccataaacgatgccgaccggcgatgcggcggcgttattcccatgacccgccgggcagcttccgggaaaccaaagtctttg

SEQ ID NO: 47855 - DNA, 120 bp, Homo sapiens
  misc_feature: 862 for SV(W|O) and 18S
acgagctttttaactgcagcaactttaatatacgctattggagctggaattaccgcggctgctggcaccagacttgccctccaatggatcctcgttaaaggatttaaagtggactcattc

SEQ ID NO: 47856 - DNA, 120 bp, Homo sapiens
  misc_feature: 862 for SV(W|O) and 18S
caactacgagctttttaactgcagcaactttaatatacgctattggagctggaattaccgcggctgctggcaccagacttgccctccaatggatcctcgttaaaggatttaaagtggact

SEQ ID NO: 47857 - DNA, 120 bp, Homo sapiens
  misc_feature: 861 for SV(W|O) and 18S
aagtgcgggtcataagcttgcgttgattaagtccctgccctttgtacacaccgcccgtcgctactaccgattggatggtttagtgaggccctcggatcggccccgccggggtcggcccac

SEQ ID NO: 47858 - DNA, 120 bp, Homo sapiens
  misc_feature: 859 for SV(W|O) and 18S
tttgaaaaaattagagtgttcaaagcaggcccgagccgcctggataccgcagctaggaataatggaataggaccgcggttctattttgttggttttcggaactgaggccatgattaagag

SEQ ID NO: 47859 - DNA, 120 bp, Homo sapiens
  misc_feature: 859 for SV(W|O) and 18S
ctacgagctttttaactgcagcaactttaatatacgctattggagctggaattaccgcggctgctggcaccagacttgccctccaatggatcctcgttaaaggatttaaagtggactcat

SEQ ID NO: 47860 - DNA, 120 bp, Homo sapiens
  misc_feature: 858 for SV(W|O) and 18S
gtcgctactaccgattggatggtttagtgaggccctcggatcggccccgccggggtcggcccacggccctggcggagcgctgagaagacggtcgaacttgactatctagaggaagtaaaa

SEQ ID NO: 47861 - DNA, 120 bp, Homo sapiens
  misc_feature: 858 for SV(W|O) and 18S
ttgcgcgcctgctgccttccttggatgtggtagccgtttctcaggctccctctccggaatcgaaccctgattccccgtcacccgtggtcaccatggtaggcacggcgactaccatcgaaa

SEQ ID NO: 47862 - DNA, 120 bp, Homo sapiens
  misc_feature: 858 for SV(W|O) and 18S
tggggaataattgcaatccccgatccccatcacgaatggggttcaacgggttacccgcgcctgccggcgtagggtaggcacacgctgagccagtcagtgtagcgcgcgtgcagccccgga

SEQ ID NO: 47863 - DNA, 120 bp, Homo sapiens
  misc_feature: 858 for SV(W|O) and 18S
ctcgttcatggggaataattgcaatccccgatccccatcacgaatggggttcaacgggttacccgcgcctgccggcgtagggtaggcacacgctgagccagtcagtgtagcgcgcgtgca

SEQ ID NO: 47864 - DNA, 120 bp, Homo sapiens
  misc_feature: 858 for SV(W|O) and 18S
tcttagttggtggagcgatttgtctggttaattccgataacgaacgagactctggcatgctaactagttacgcgacccccgagcggtcggcgtcccccaacttcttagagggacaagtgg

SEQ ID NO: 47865 - DNA, 120 bp, Homo sapiens
  misc_feature: 857 for SV(W|O) and 18S
actaccgattggatggtttagtgaggccctcggatcggccccgccggggtcggcccacggccctggcggagcgctgagaagacggtcgaacttgactatctagaggaagtaaaagtcgta

SEQ ID NO: 47866 - DNA, 120 bp, Homo sapiens
  misc_feature: 857 for SV(W|O) and 18S
ggtttcccggaagctgcccggcgggtcatgggaataacgccgccgcatcgccggtcggcatcgtttatggtcggaactacgacggtatctgatcgtcttcgaacctccgactttcgttct

SEQ ID NO: 47867 - DNA, 120 bp, Homo sapiens
  misc_feature: 857 for SV(W|O) and 18S
cctcgttcatggggaataattgcaatccccgatccccatcacgaatggggttcaacgggttacccgcgcctgccggcgtagggtaggcacacgctgagccagtcagtgtagcgcgcgtgc

SEQ ID NO: 47868 - DNA, 120 bp, Homo sapiens
  misc_feature: 857 for SV(W|O) and 18S
aaaaattagagtgttcaaagcaggcccgagccgcctggataccgcagctaggaataatggaataggaccgcggttctattttgttggttttcggaactgaggccatgattaagagggacg

SEQ ID NO: 47869 - DNA, 120 bp, Homo sapiens
  misc_feature: 856 for SV(W|O) and 18S
actacgagctttttaactgcagcaactttaatatacgctattggagctggaattaccgcggctgctggcaccagacttgccctccaatggatcctcgttaaaggatttaaagtggactca

SEQ ID NO: 47870 - DNA, 120 bp, Homo sapiens
  misc_feature: 856 for SV(W|O) and 18S
gattggatggtttagtgaggccctcggatcggccccgccggggtcggcccacggccctggcggagcgctgagaagacggtcgaacttgactatctagaggaagtaaaagtcgtaacaagg

SEQ ID NO: 47871 - DNA, 120 bp, Homo sapiens
  misc_feature: 855 for SV(W|O) and 18S
ccgattggatggtttagtgaggccctcggatcggccccgccggggtcggcccacggccctggcggagcgctgagaagacggtcgaacttgactatctagaggaagtaaaagtcgtaacaa

SEQ ID NO: 47872 - DNA, 120 bp, Homo sapiens
  misc_feature: 855 for SV(W|O) and 18S
gggaataattgcaatccccgatccccatcacgaatggggttcaacgggttacccgcgcctgccggcgtagggtaggcacacgctgagccagtcagtgtagcgcgcgtgcagccccggaca

SEQ ID NO: 47873 - DNA, 120 bp, Homo sapiens
  misc_feature: 855 for SV(W|O) and 18S
tgaaaaaattagagtgttcaaagcaggcccgagccgcctggataccgcagctaggaataatggaataggaccgcggttctattttgttggttttcggaactgaggccatgattaagaggg

SEQ ID NO: 47874 - DNA, 120 bp, Homo sapiens
  misc_feature: 855 for SV(W|O) and 18S
tcttctcagcgctccgccagggccgtgggccgaccccggcggggccgatccgagggcctcactaaaccatccaatcggtagtagcgacgggcggtgtgtacaaagggcagggacttaatc

SEQ ID NO: 47875 - DNA, 120 bp, Homo sapiens
  misc_feature: 855 for SV(W|O) and 18S
ctcagcgctccgccagggccgtgggccgaccccggcggggccgatccgagggcctcactaaaccatccaatcggtagtagcgacgggcggtgtgtacaaagggcagggacttaatcaacg

SEQ ID NO: 47876 - DNA, 120 bp, Homo sapiens
  misc_feature: 854 for SV(W|O) and 18S
gcgggcgggcggtccgccgcgaggcgagccaccgcccgtccccgccccttgcctctcggcgccccctcgatgctcttagctgagtgtcccgcggggcccgaagcgtttactttgaaaaaa

SEQ ID NO: 47877 - DNA, 120 bp, Homo sapiens
  misc_feature: 854 for SV(W|O) and 18S
cttctcagcgctccgccagggccgtgggccgaccccggcggggccgatccgagggcctcactaaaccatccaatcggtagtagcgacgggcggtgtgtacaaagggcagggacttaatca

SEQ ID NO: 47878 - DNA, 120 bp, Homo sapiens
  misc_feature: 854 for SV(W|O) and 18S
ctttgaaaaaattagagtgttcaaagcaggcccgagccgcctggataccgcagctaggaataatggaataggaccgcggttctattttgttggttttcggaactgaggccatgattaaga

SEQ ID NO: 47879 - DNA, 120 bp, Homo sapiens
  misc_feature: 854 for SV(W|O) and 18S
gtttcccggaagctgcccggcgggtcatgggaataacgccgccgcatcgccggtcggcatcgtttatggtcggaactacgacggtatctgatcgtcttcgaacctccgactttcgttctt

SEQ ID NO: 47880 - DNA, 120 bp, Homo sapiens
  misc_feature: 854 for SV(W|O) and 18S
ctaccatggtgaccacgggtgacggggaatcagggttcgattccggagagggagcctgagaaacggctaccacatccaaggaaggcagcaggcgcgcaaattacccactcccgacccggg

SEQ ID NO: 47881 - DNA, 120 bp, Homo sapiens
  misc_feature: 853 for SV(W|O) and 18S
tttcccggaagctgcccggcgggtcatgggaataacgccgccgcatcgccggtcggcatcgtttatggtcggaactacgacggtatctgatcgtcttcgaacctccgactttcgttcttg

SEQ ID NO: 47882 - DNA, 120 bp, Homo sapiens
  misc_feature: 853 for SV(W|O) and 18S
ttaaatcctttaacgaggatccattggagggcaagtctggtgccagcagccgcggtaattccagctccaatagcgtatattaaagttgctgcagttaaaaagctcgtagttggatcttgg

SEQ ID NO: 47883 - DNA, 120 bp, Homo sapiens
  misc_feature: 853 for SV(W|O) and 18S
ggggaataattgcaatccccgatccccatcacgaatggggttcaacgggttacccgcgcctgccggcgtagggtaggcacacgctgagccagtcagtgtagcgcgcgtgcagccccggac

SEQ ID NO: 47884 - DNA, 120 bp, Homo sapiens
  misc_feature: 853 for SV(W|O) and 18S
cgattggatggtttagtgaggccctcggatcggccccgccggggtcggcccacggccctggcggagcgctgagaagacggtcgaacttgactatctagaggaagtaaaagtcgtaacaag

SEQ ID NO: 47885 - DNA, 120 bp, Homo sapiens
  misc_feature: 853 for SV(W|O) and 18S
cgggggtcgcgtaactagttagcatgccagagtctcgttcgttatcggaattaaccagacaaatcgctccaccaactaagaacggccatgcaccaccacccacggaatcgagaaagagct

SEQ ID NO: 47886 - DNA, 120 bp, Homo sapiens
  misc_feature: 852 for SV(W|O) and 18S
ttgaaaaaattagagtgttcaaagcaggcccgagccgcctggataccgcagctaggaataatggaataggaccgcggttctattttgttggttttcggaactgaggccatgattaagagg

SEQ ID NO: 47887 - DNA, 120 bp, Homo sapiens
  misc_feature: 852 for SV(W|O) and 18S
gttatccaagtaggagaggagcgagcgaccaaaggaaccataactgatttaatgagccattcgcagtttcactgtaccggccgtgcgtacttagacatgcatggcttaatctttgagaca

SEQ ID NO: 47888 - DNA, 120 bp, Homo sapiens
  misc_feature: 852 for SV(W|O) and 18S
ataattgcaatccccgatccccatcacgaatggggttcaacgggttacccgcgcctgccggcgtagggtaggcacacgctgagccagtcagtgtagcgcgcgtgcagccccggacatcta

SEQ ID NO: 47889 - DNA, 120 bp, Homo sapiens
  misc_feature: 851 for SV(W|O) and 18S
ttctcagcgctccgccagggccgtgggccgaccccggcggggccgatccgagggcctcactaaaccatccaatcggtagtagcgacgggcggtgtgtacaaagggcagggacttaatcaa

SEQ ID NO: 47890 - DNA, 120 bp, Homo sapiens
  misc_feature: 851 for SV(W|O) and 18S
ttcttagttggtggagcgatttgtctggttaattccgataacgaacgagactctggcatgctaactagttacgcgacccccgagcggtcggcgtcccccaacttcttagagggacaagtg

SEQ ID NO: 47891 - DNA, 120 bp, Homo sapiens
  misc_feature: 851 for SV(W|O) and 18S
taattgcaatccccgatccccatcacgaatggggttcaacgggttacccgcgcctgccggcgtagggtaggcacacgctgagccagtcagtgtagcgcgcgtgcagccccggacatctaa

SEQ ID NO: 47892 - DNA, 120 bp, Homo sapiens
  misc_feature: 850 for SV(W|O) and 18S
cttagttggtggagcgatttgtctggttaattccgataacgaacgagactctggcatgctaactagttacgcgacccccgagcggtcggcgtcccccaacttcttagagggacaagtggc

SEQ ID NO: 47893 - DNA, 120 bp, Homo sapiens
  misc_feature: 850 for SV(W|O) and 18S
aagggggtcagcgcccgtcggcatgtattagctctagaattaccacagttatccaagtaggagaggagcgagcgaccaaaggaaccataactgatttaatgagccattcgcagtttcact

SEQ ID NO: 47894 - DNA, 120 bp, Homo sapiens
  misc_feature: 849 for SV(W|O) and 18S
tctcagcgctccgccagggccgtgggccgaccccggcggggccgatccgagggcctcactaaaccatccaatcggtagtagcgacgggcggtgtgtacaaagggcagggacttaatcaac

SEQ ID NO: 47895 - DNA, 120 bp, Homo sapiens
  misc_feature: 849 for SV(W|O) and 18S
gaaaaaattagagtgttcaaagcaggcccgagccgcctggataccgcagctaggaataatggaataggaccgcggttctattttgttggttttcggaactgaggccatgattaagaggga

SEQ ID NO: 47896 - DNA, 120 bp, Homo sapiens
  misc_feature: 849 for SV(W|O) and 18S
ctttgtacacaccgcccgtcgctactaccgattggatggtttagtgaggccctcggatcggccccgccggggtcggcccacggccctggcggagcgctgagaagacggtcgaacttgact

SEQ ID NO: 47897 - DNA, 120 bp, Homo sapiens
  misc_feature: 849 for SV(W|O) and 18S
acagttatccaagtaggagaggagcgagcgaccaaaggaaccataactgatttaatgagccattcgcagtttcactgtaccggccgtgcgtacttagacatgcatggcttaatctttgag

SEQ ID NO: 47898 - DNA, 120 bp, Homo sapiens
  misc_feature: 849 for SV(W|O) and 18S
agggggtcagcgcccgtcggcatgtattagctctagaattaccacagttatccaagtaggagaggagcgagcgaccaaaggaaccataactgatttaatgagccattcgcagtttcactg

SEQ ID NO: 47899 - DNA, 120 bp, Homo sapiens
  misc_feature: 848 for SV(W|O) and 18S
cagttatccaagtaggagaggagcgagcgaccaaaggaaccataactgatttaatgagccattcgcagtttcactgtaccggccgtgcgtacttagacatgcatggcttaatctttgaga

SEQ ID NO: 47900 - DNA, 120 bp, Homo sapiens
  misc_feature: 848 for SV(W|O) and 18S
tcgggggtcgcgtaactagttagcatgccagagtctcgttcgttatcggaattaaccagacaaatcgctccaccaactaagaacggccatgcaccaccacccacggaatcgagaaagagc

SEQ ID NO: 47901 - DNA, 120 bp, Homo sapiens
  misc_feature: 848 for SV(W|O) and 18S
taccacagttatccaagtaggagaggagcgagcgaccaaaggaaccataactgatttaatgagccattcgcagtttcactgtaccggccgtgcgtacttagacatgcatggcttaatctt

SEQ ID NO: 47902 - DNA, 120 bp, Homo sapiens
  misc_feature: 847 for SV(W|O) and 18S
atttgcgcgcctgctgccttccttggatgtggtagccgtttctcaggctccctctccggaatcgaaccctgattccccgtcacccgtggtcaccatggtaggcacggcgactaccatcga

SEQ ID NO: 47903 - DNA, 120 bp, Homo sapiens
  misc_feature: 847 for SV(W|O) and 18S
taaatcctttaacgaggatccattggagggcaagtctggtgccagcagccgcggtaattccagctccaatagcgtatattaaagttgctgcagttaaaaagctcgtagttggatcttggg

SEQ ID NO: 47904 - DNA, 120 bp, Homo sapiens
  misc_feature: 847 for SV(W|O) and 18S
agttatccaagtaggagaggagcgagcgaccaaaggaaccataactgatttaatgagccattcgcagtttcactgtaccggccgtgcgtacttagacatgcatggcttaatctttgagac

SEQ ID NO: 47905 - DNA, 120 bp, Homo sapiens
  misc_feature: 847 for SV(W|O) and 18S
aataattgcaatccccgatccccatcacgaatggggttcaacgggttacccgcgcctgccggcgtagggtaggcacacgctgagccagtcagtgtagcgcgcgtgcagccccggacatct

SEQ ID NO: 47906 - DNA, 120 bp, Homo sapiens
  misc_feature: 846 for SV(W|O) and 18S
gatccccatcacgaatggggttcaacgggttacccgcgcctgccggcgtagggtaggcacacgctgagccagtcagtgtagcgcgcgtgcagccccggacatctaagggcatcacagacc

SEQ ID NO: 47907 - DNA, 120 bp, Homo sapiens
  misc_feature: 845 for SV(W|O) and 18S
aaatcctttaacgaggatccattggagggcaagtctggtgccagcagccgcggtaattccagctccaatagcgtatattaaagttgctgcagttaaaaagctcgtagttggatcttggga

SEQ ID NO: 47908 - DNA, 120 bp, Homo sapiens
  misc_feature: 845 for SV(W|O) and 18S
ggaataattgcaatccccgatccccatcacgaatggggttcaacgggttacccgcgcctgccggcgtagggtaggcacacgctgagccagtcagtgtagcgcgcgtgcagccccggacat

SEQ ID NO: 47909 - DNA, 120 bp, Homo sapiens
  misc_feature: 845 for SV(W|O) and 18S
cgttcatggggaataattgcaatccccgatccccatcacgaatggggttcaacgggttacccgcgcctgccggcgtagggtaggcacacgctgagccagtcagtgtagcgcgcgtgcagc

SEQ ID NO: 47910 - DNA, 120 bp, Homo sapiens
  misc_feature: 844 for SV(W|O) and 18S
tttgtacacaccgcccgtcgctactaccgattggatggtttagtgaggccctcggatcggccccgccggggtcggcccacggccctggcggagcgctgagaagacggtcgaacttgacta

SEQ ID NO: 47911 - DNA, 120 bp, Homo sapiens
  misc_feature: 844 for SV(W|O) and 18S
cgtcgctactaccgattggatggtttagtgaggccctcggatcggccccgccggggtcggcccacggccctggcggagcgctgagaagacggtcgaacttgactatctagaggaagtaaa

SEQ ID NO: 47912 - DNA, 120 bp, Homo sapiens
  misc_feature: 844 for SV(W|O) and 18S
tgcgcgcctgctgccttccttggatgtggtagccgtttctcaggctccctctccggaatcgaaccctgattccccgtcacccgtggtcaccatggtaggcacggcgactaccatcgaaag

SEQ ID NO: 47913 - DNA, 120 bp, Homo sapiens
  misc_feature: 844 for SV(W|O) and 18S
tcagcgctccgccagggccgtgggccgaccccggcggggccgatccgagggcctcactaaaccatccaatcggtagtagcgacgggcggtgtgtacaaagggcagggacttaatcaacgc

SEQ ID NO: 47914 - DNA, 120 bp, Homo sapiens
  misc_feature: 844 for SV(W|O) and 18S
gtcttctcagcgctccgccagggccgtgggccgaccccggcggggccgatccgagggcctcactaaaccatccaatcggtagtagcgacgggcggtgtgtacaaagggcagggacttaat

SEQ ID NO: 47915 - DNA, 120 bp, Homo sapiens
  misc_feature: 844 for SV(W|O) and 18S
cgggcgggcggtccgccgcgaggcgagccaccgcccgtccccgccccttgcctctcggcgccccctcgatgctcttagctgagtgtcccgcggggcccgaagcgtttactttgaaaaaat

SEQ ID NO: 47916 - DNA, 120 bp, Homo sapiens
  misc_feature: 844 for SV(W|O) and 18S
cctaccatggtgaccacgggtgacggggaatcagggttcgattccggagagggagcctgagaaacggctaccacatccaaggaaggcagcaggcgcgcaaattacccactcccgacccgg

SEQ ID NO: 47917 - DNA, 120 bp, Homo sapiens
  misc_feature: 843 for SV(W|O) and 18S
tttgcgcgcctgctgccttccttggatgtggtagccgtttctcaggctccctctccggaatcgaaccctgattccccgtcacccgtggtcaccatggtaggcacggcgactaccatcgaa

SEQ ID NO: 47918 - DNA, 120 bp, Homo sapiens
  misc_feature: 843 for SV(W|O) and 18S
ttcccggaagctgcccggcgggtcatgggaataacgccgccgcatcgccggtcggcatcgtttatggtcggaactacgacggtatctgatcgtcttcgaacctccgactttcgttcttga

SEQ ID NO: 47919 - DNA, 120 bp, Homo sapiens
  misc_feature: 843 for SV(W|O) and 18S
ttagttggtggagcgatttgtctggttaattccgataacgaacgagactctggcatgctaactagttacgcgacccccgagcggtcggcgtcccccaacttcttagagggacaagtggcg

SEQ ID NO: 47920 - DNA, 120 bp, Homo sapiens
  misc_feature: 843 for SV(W|O) and 18S
tgcctaccatggtgaccacgggtgacggggaatcagggttcgattccggagagggagcctgagaaacggctaccacatccaaggaaggcagcaggcgcgcaaattacccactcccgaccc

SEQ ID NO: 47921 - DNA, 120 bp, Homo sapiens
  misc_feature: 843 for SV(W|O) and 18S
aaaaaattagagtgttcaaagcaggcccgagccgcctggataccgcagctaggaataatggaataggaccgcggttctattttgttggttttcggaactgaggccatgattaagagggac

SEQ ID NO: 47922 - DNA, 120 bp, Homo sapiens
  misc_feature: 843 for SV(W|O) and 18S
aatttgcgcgcctgctgccttccttggatgtggtagccgtttctcaggctccctctccggaatcgaaccctgattccccgtcacccgtggtcaccatggtaggcacggcgactaccatcg

SEQ ID NO: 47923 - DNA, 120 bp, Homo sapiens
  misc_feature: 842 for SV(W|O) and 18S
tggtttagtgaggccctcggatcggccccgccggggtcggcccacggccctggcggagcgctgagaagacggtcgaacttgactatctagaggaagtaaaagtcgtaacaaggtttccgt

SEQ ID NO: 47924 - DNA, 120 bp, Homo sapiens
  misc_feature: 842 for SV(W|O) and 18S
tcctcgttcatggggaataattgcaatccccgatccccatcacgaatggggttcaacgggttacccgcgcctgccggcgtagggtaggcacacgctgagccagtcagtgtagcgcgcgtg

SEQ ID NO: 47925 - DNA, 120 bp, Homo sapiens
  misc_feature: 842 for SV(W|O) and 18S
cacagttatccaagtaggagaggagcgagcgaccaaaggaaccataactgatttaatgagccattcgcagtttcactgtaccggccgtgcgtacttagacatgcatggcttaatctttga

SEQ ID NO: 47926 - DNA, 120 bp, Homo sapiens
  misc_feature: 842 for SV(W|O) and 18S
taccgattggatggtttagtgaggccctcggatcggccccgccggggtcggcccacggccctggcggagcgctgagaagacggtcgaacttgactatctagaggaagtaaaagtcgtaac

SEQ ID NO: 47927 - DNA, 120 bp, Homo sapiens
  misc_feature: 842 for SV(W|O) and 18S
gttcttagttggtggagcgatttgtctggttaattccgataacgaacgagactctggcatgctaactagttacgcgacccccgagcggtcggcgtcccccaacttcttagagggacaagt

SEQ ID NO: 47928 - DNA, 120 bp, Homo sapiens
  misc_feature: 842 for SV(W|O) and 18S
gattaagccatgcatgtctaagtacgcacggccggtacagtgaaactgcgaatggctcattaaatcagttatggttcctttggtcgctcgctcctctcctacttggataactgtggtaat

SEQ ID NO: 47929 - DNA, 120 bp, Homo sapiens
  misc_feature: 842 for SV(W|O) and 18S
cgttcttagttggtggagcgatttgtctggttaattccgataacgaacgagactctggcatgctaactagttacgcgacccccgagcggtcggcgtcccccaacttcttagagggacaag

SEQ ID NO: 47930 - DNA, 120 bp, Homo sapiens
  misc_feature: 842 for SV(W|O) and 18S
aaaattagagtgttcaaagcaggcccgagccgcctggataccgcagctaggaataatggaataggaccgcggttctattttgttggttttcggaactgaggccatgattaagagggacgg

SEQ ID NO: 47931 - DNA, 120 bp, Homo sapiens
  misc_feature: 841 for SV(W|O) and 18S
ttatccaagtaggagaggagcgagcgaccaaaggaaccataactgatttaatgagccattcgcagtttcactgtaccggccgtgcgtacttagacatgcatggcttaatctttgagacaa

SEQ ID NO: 47932 - DNA, 120 bp, Homo sapiens
  misc_feature: 841 for SV(W|O) and 18S
accgattggatggtttagtgaggccctcggatcggccccgccggggtcggcccacggccctggcggagcgctgagaagacggtcgaacttgactatctagaggaagtaaaagtcgtaaca

SEQ ID NO: 47933 - DNA, 120 bp, Homo sapiens
  misc_feature: 841 for SV(W|O) and 18S
gaagggggtcagcgcccgtcggcatgtattagctctagaattaccacagttatccaagtaggagaggagcgagcgaccaaaggaaccataactgatttaatgagccattcgcagtttcac

SEQ ID NO: 47934 - DNA, 120 bp, Homo sapiens
  misc_feature: 841 for SV(W|O) and 18S
gggggtcagcgcccgtcggcatgtattagctctagaattaccacagttatccaagtaggagaggagcgagcgaccaaaggaaccataactgatttaatgagccattcgcagtttcactgt

SEQ ID NO: 47935 - DNA, 120 bp, Homo sapiens
  misc_feature: 841 for SV(W|O) and 18S
gatggtttagtgaggccctcggatcggccccgccggggtcggcccacggccctggcggagcgctgagaagacggtcgaacttgactatctagaggaagtaaaagtcgtaacaaggtttcc

SEQ ID NO: 47936 - DNA, 120 bp, Homo sapiens
  misc_feature: 841 for SV(W|O) and 18S
aggttcgaagacgatcagataccgtcgtagttccgaccataaacgatgccgaccggcgatgcggcggcgttattcccatgacccgccgggcagcttccgggaaaccaaagtctttgggtt

SEQ ID NO: 47937 - DNA, 120 bp, Homo sapiens
  misc_feature: 841 for SV(W|O) and 18S
accacagttatccaagtaggagaggagcgagcgaccaaaggaaccataactgatttaatgagccattcgcagtttcactgtaccggccgtgcgtacttagacatgcatggcttaatcttt

SEQ ID NO: 47938 - DNA, 120 bp, Homo sapiens
  misc_feature: 840 for SV(W|O) and 18S
tttggtttcccggaagctgcccggcgggtcatgggaataacgccgccgcatcgccggtcggcatcgtttatggtcggaactacgacggtatctgatcgtcttcgaacctccgactttcgt

SEQ ID NO: 47939 - DNA, 120 bp, Homo sapiens
  misc_feature: 840 for SV(W|O) and 18S
aattgcaatccccgatccccatcacgaatggggttcaacgggttacccgcgcctgccggcgtagggtaggcacacgctgagccagtcagtgtagcgcgcgtgcagccccggacatctaag

SEQ ID NO: 47940 - DNA, 120 bp, Homo sapiens
  misc_feature: 840 for SV(W|O) and 18S
ccctctaagaagttgggggacgccgaccgctcgggggtcgcgtaactagttagcatgccagagtctcgttcgttatcggaattaaccagacaaatcgctccaccaactaagaacggccat

SEQ ID NO: 47941 - DNA, 120 bp, Homo sapiens
  misc_feature: 840 for SV(W|O) and 18S
caggactctttcgaggccctgtaattggaatgagtccactttaaatcctttaacgaggatccattggagggcaagtctggtgccagcagccgcggtaattccagctccaatagcgtatat

SEQ ID NO: 47942 - DNA, 120 bp, Homo sapiens
  misc_feature: 839 for SV(W|O) and 18S
tcgttcatggggaataattgcaatccccgatccccatcacgaatggggttcaacgggttacccgcgcctgccggcgtagggtaggcacacgctgagccagtcagtgtagcgcgcgtgcag

SEQ ID NO: 47943 - DNA, 120 bp, Homo sapiens
  misc_feature: 839 for SV(W|O) and 18S
gtgcctaccatggtgaccacgggtgacggggaatcagggttcgattccggagagggagcctgagaaacggctaccacatccaaggaaggcagcaggcgcgcaaattacccactcccgacc

SEQ ID NO: 47944 - DNA, 120 bp, Homo sapiens
  misc_feature: 839 for SV(W|O) and 18S
gagtctcgttcgttatcggaattaaccagacaaatcgctccaccaactaagaacggccatgcaccaccacccacggaatcgagaaagagctatcaatctgtcaatcctgtccgtgtccgg

SEQ ID NO: 47945 - DNA, 120 bp, Homo sapiens
  misc_feature: 839 for SV(W|O) and 18S
atggtttagtgaggccctcggatcggccccgccggggtcggcccacggccctggcggagcgctgagaagacggtcgaacttgactatctagaggaagtaaaagtcgtaacaaggtttccg

SEQ ID NO: 47946 - DNA, 120 bp, Homo sapiens
  misc_feature: 839 for SV(W|O) and 18S
cccggaagctgcccggcgggtcatgggaataacgccgccgcatcgccggtcggcatcgtttatggtcggaactacgacggtatctgatcgtcttcgaacctccgactttcgttcttgatt

SEQ ID NO: 47947 - DNA, 120 bp, Homo sapiens
  misc_feature: 839 for SV(W|O) and 18S
attggatggtttagtgaggccctcggatcggccccgccggggtcggcccacggccctggcggagcgctgagaagacggtcgaacttgactatctagaggaagtaaaagtcgtaacaaggt

SEQ ID NO: 47948 - DNA, 120 bp, Homo sapiens
  misc_feature: 838 for SV(W|O) and 18S
ttgtacacaccgcccgtcgctactaccgattggatggtttagtgaggccctcggatcggccccgccggggtcggcccacggccctggcggagcgctgagaagacggtcgaacttgactat

SEQ ID NO: 47949 - DNA, 120 bp, Homo sapiens
  misc_feature: 838 for SV(W|O) and 18S
ttggatggtttagtgaggccctcggatcggccccgccggggtcggcccacggccctggcggagcgctgagaagacggtcgaacttgactatctagaggaagtaaaagtcgtaacaaggtt

SEQ ID NO: 47950 - DNA, 120 bp, Homo sapiens
  misc_feature: 838 for SV(W|O) and 18S
ccgtcgctactaccgattggatggtttagtgaggccctcggatcggccccgccggggtcggcccacggccctggcggagcgctgagaagacggtcgaacttgactatctagaggaagtaa

SEQ ID NO: 47951 - DNA, 120 bp, Homo sapiens
  misc_feature: 838 for SV(W|O) and 18S
tggtttcccggaagctgcccggcgggtcatgggaataacgccgccgcatcgccggtcggcatcgtttatggtcggaactacgacggtatctgatcgtcttcgaacctccgactttcgttc

SEQ ID NO: 47952 - DNA, 120 bp, Homo sapiens
  misc_feature: 838 for SV(W|O) and 18S
tatccaagtaggagaggagcgagcgaccaaaggaaccataactgatttaatgagccattcgcagtttcactgtaccggccgtgcgtacttagacatgcatggcttaatctttgagacaag

SEQ ID NO: 47953 - DNA, 120 bp, Homo sapiens
  misc_feature: 838 for SV(W|O) and 18S
gaataattgcaatccccgatccccatcacgaatggggttcaacgggttacccgcgcctgccggcgtagggtaggcacacgctgagccagtcagtgtagcgcgcgtgcagccccggacatc

SEQ ID NO: 47954 - DNA, 120 bp, Homo sapiens
  misc_feature: 838 for SV(W|O) and 18S
ccccatcacgaatggggttcaacgggttacccgcgcctgccggcgtagggtaggcacacgctgagccagtcagtgtagcgcgcgtgcagccccggacatctaagggcatcacagacctgt

SEQ ID NO: 47955 - DNA, 120 bp, Homo sapiens
  misc_feature: 838 for SV(W|O) and 18S
cccatcacgaatggggttcaacgggttacccgcgcctgccggcgtagggtaggcacacgctgagccagtcagtgtagcgcgcgtgcagccccggacatctaagggcatcacagacctgtt

SEQ ID NO: 47956 - DNA, 120 bp, Homo sapiens
  misc_feature: 837 for SV(W|O) and 18S
ttggtttcccggaagctgcccggcgggtcatgggaataacgccgccgcatcgccggtcggcatcgtttatggtcggaactacgacggtatctgatcgtcttcgaacctccgactttcgtt

SEQ ID NO: 47957 - DNA, 120 bp, Homo sapiens
  misc_feature: 837 for SV(W|O) and 18S
ccctttgtacacaccgcccgtcgctactaccgattggatggtttagtgaggccctcggatcggccccgccggggtcggcccacggccctggcggagcgctgagaagacggtcgaacttga

SEQ ID NO: 47958 - DNA, 120 bp, Homo sapiens
  misc_feature: 837 for SV(W|O) and 18S
acaggactctttcgaggccctgtaattggaatgagtccactttaaatcctttaacgaggatccattggagggcaagtctggtgccagcagccgcggtaattccagctccaatagcgtata

SEQ ID NO: 47959 - DNA, 120 bp, Homo sapiens
  misc_feature: 837 for SV(W|O) and 18S
ccgtcttctcagcgctccgccagggccgtgggccgaccccggcggggccgatccgagggcctcactaaaccatccaatcggtagtagcgacgggcggtgtgtacaaagggcagggactta

SEQ ID NO: 47960 - DNA, 120 bp, Homo sapiens
  misc_feature: 837 for SV(W|O) and 18S
ctcgggggtcgcgtaactagttagcatgccagagtctcgttcgttatcggaattaaccagacaaatcgctccaccaactaagaacggccatgcaccaccacccacggaatcgagaaagag

SEQ ID NO: 47961 - DNA, 120 bp, Homo sapiens
  misc_feature: 836 for SV(W|O) and 18S
ttcctcgttcatggggaataattgcaatccccgatccccatcacgaatggggttcaacgggttacccgcgcctgccggcgtagggtaggcacacgctgagccagtcagtgtagcgcgcgt

SEQ ID NO: 47962 - DNA, 120 bp, Homo sapiens
  misc_feature: 836 for SV(W|O) and 18S
tgtacacaccgcccgtcgctactaccgattggatggtttagtgaggccctcggatcggccccgccggggtcggcccacggccctggcggagcgctgagaagacggtcgaacttgactatc

SEQ ID NO: 47963 - DNA, 120 bp, Homo sapiens
  misc_feature: 836 for SV(W|O) and 18S
ccacagttatccaagtaggagaggagcgagcgaccaaaggaaccataactgatttaatgagccattcgcagtttcactgtaccggccgtgcgtacttagacatgcatggcttaatctttg

SEQ ID NO: 47964 - DNA, 120 bp, Homo sapiens
  misc_feature: 835 for SV(W|O) and 18S
ctaccgattggatggtttagtgaggccctcggatcggccccgccggggtcggcccacggccctggcggagcgctgagaagacggtcgaacttgactatctagaggaagtaaaagtcgtaa

SEQ ID NO: 47965 - DNA, 120 bp, Homo sapiens
  misc_feature: 835 for SV(W|O) and 18S
ttaccacagttatccaagtaggagaggagcgagcgaccaaaggaaccataactgatttaatgagccattcgcagtttcactgtaccggccgtgcgtacttagacatgcatggcttaatct

SEQ ID NO: 47966 - DNA, 120 bp, Homo sapiens
  misc_feature: 835 for SV(W|O) and 18S
cctgctgccttccttggatgtggtagccgtttctcaggctccctctccggaatcgaaccctgattccccgtcacccgtggtcaccatggtaggcacggcgactaccatcgaaagttgata

SEQ ID NO: 47967 - DNA, 120 bp, Homo sapiens
  misc_feature: 835 for SV(W|O) and 18S
ggggtcagcgcccgtcggcatgtattagctctagaattaccacagttatccaagtaggagaggagcgagcgaccaaaggaaccataactgatttaatgagccattcgcagtttcactgta

SEQ ID NO: 47968 - DNA, 120 bp, Homo sapiens
  misc_feature: 835 for SV(W|O) and 18S
cctttgtacacaccgcccgtcgctactaccgattggatggtttagtgaggccctcggatcggccccgccggggtcggcccacggccctggcggagcgctgagaagacggtcgaacttgac

SEQ ID NO: 47969 - DNA, 120 bp, Homo sapiens
  misc_feature: 835 for SV(W|O) and 18S
ggaggttcgaagacgatcagataccgtcgtagttccgaccataaacgatgccgaccggcgatgcggcggcgttattcccatgacccgccgggcagcttccgggaaaccaaagtctttggg

SEQ ID NO: 47970 - DNA, 120 bp, Homo sapiens
  misc_feature: 835 for SV(W|O) and 18S
gaggttcgaagacgatcagataccgtcgtagttccgaccataaacgatgccgaccggcgatgcggcggcgttattcccatgacccgccgggcagcttccgggaaaccaaagtctttgggt

SEQ ID NO: 47971 - DNA, 120 bp, Homo sapiens
  misc_feature: 835 for SV(W|O) and 18S
cggaggttcgaagacgatcagataccgtcgtagttccgaccataaacgatgccgaccggcgatgcggcggcgttattcccatgacccgccgggcagcttccgggaaaccaaagtctttgg

SEQ ID NO: 47972 - DNA, 120 bp, Homo sapiens
  misc_feature: 835 for SV(W|O) and 18S
attaagccatgcatgtctaagtacgcacggccggtacagtgaaactgcgaatggctcattaaatcagttatggttcctttggtcgctcgctcctctcctacttggataactgtggtaatt

SEQ ID NO: 47973 - DNA, 120 bp, Homo sapiens
  misc_feature: 835 for SV(W|O) and 18S
atccccatcacgaatggggttcaacgggttacccgcgcctgccggcgtagggtaggcacacgctgagccagtcagtgtagcgcgcgtgcagccccggacatctaagggcatcacagacct

SEQ ID NO: 47974 - DNA, 120 bp, Homo sapiens
  misc_feature: 834 for SV(W|O) and 18S
cgtcttctcagcgctccgccagggccgtgggccgaccccggcggggccgatccgagggcctcactaaaccatccaatcggtagtagcgacgggcggtgtgtacaaagggcagggacttaa

SEQ ID NO: 47975 - DNA, 120 bp, Homo sapiens
  misc_feature: 834 for SV(W|O) and 18S
tccctctaagaagttgggggacgccgaccgctcgggggtcgcgtaactagttagcatgccagagtctcgttcgttatcggaattaaccagacaaatcgctccaccaactaagaacggcca

SEQ ID NO: 47976 - DNA, 120 bp, Homo sapiens
  misc_feature: 834 for SV(W|O) and 18S
tggatggtttagtgaggccctcggatcggccccgccggggtcggcccacggccctggcggagcgctgagaagacggtcgaacttgactatctagaggaagtaaaagtcgtaacaaggttt

SEQ ID NO: 47977 - DNA, 120 bp, Homo sapiens
  misc_feature: 834 for SV(W|O) and 18S
tcccggaagctgcccggcgggtcatgggaataacgccgccgcatcgccggtcggcatcgtttatggtcggaactacgacggtatctgatcgtcttcgaacctccgactttcgttcttgat

SEQ ID NO: 47978 - DNA, 120 bp, Homo sapiens
  misc_feature: 834 for SV(W|O) and 18S
cgatccccatcacgaatggggttcaacgggttacccgcgcctgccggcgtagggtaggcacacgctgagccagtcagtgtagcgcgcgtgcagccccggacatctaagggcatcacagac

SEQ ID NO: 47979 - DNA, 120 bp, Homo sapiens
  misc_feature: 834 for SV(W|O) and 18S
cgtgcctaccatggtgaccacgggtgacggggaatcagggttcgattccggagagggagcctgagaaacggctaccacatccaaggaaggcagcaggcgcgcaaattacccactcccgac

SEQ ID NO: 47980 - DNA, 120 bp, Homo sapiens
  misc_feature: 834 for SV(W|O) and 18S
ctttggtttcccggaagctgcccggcgggtcatgggaataacgccgccgcatcgccggtcggcatcgtttatggtcggaactacgacggtatctgatcgtcttcgaacctccgactttcg

SEQ ID NO: 47981 - DNA, 120 bp, Homo sapiens
  misc_feature: 833 for SV(W|O) and 18S
ccgatccccatcacgaatggggttcaacgggttacccgcgcctgccggcgtagggtaggcacacgctgagccagtcagtgtagcgcgcgtgcagccccggacatctaagggcatcacaga

SEQ ID NO: 47982 - DNA, 120 bp, Homo sapiens
  misc_feature: 833 for SV(W|O) and 18S
tccccatcacgaatggggttcaacgggttacccgcgcctgccggcgtagggtaggcacacgctgagccagtcagtgtagcgcgcgtgcagccccggacatctaagggcatcacagacctg

SEQ ID NO: 47983 - DNA, 120 bp, Homo sapiens
  misc_feature: 833 for SV(W|O) and 18S
ccatcacgaatggggttcaacgggttacccgcgcctgccggcgtagggtaggcacacgctgagccagtcagtgtagcgcgcgtgcagccccggacatctaagggcatcacagacctgtta

SEQ ID NO: 47984 - DNA, 120 bp, Homo sapiens
  misc_feature: 833 for SV(W|O) and 18S
catcgagggggcgccgagaggcaaggggcggggacgggcggtggctcgcctcgcggcggaccgcccgcccgctcccaagatccaactacgagctttttaactgcagcaactttaatatac

SEQ ID NO: 47985 - DNA, 120 bp, Homo sapiens
  misc_feature: 833 for SV(W|O) and 18S
gcctaccatggtgaccacgggtgacggggaatcagggttcgattccggagagggagcctgagaaacggctaccacatccaaggaaggcagcaggcgcgcaaattacccactcccgacccg

SEQ ID NO: 47986 - DNA, 120 bp, Homo sapiens
  misc_feature: 832 for SV(W|O) and 18S
ccccgatccccatcacgaatggggttcaacgggttacccgcgcctgccggcgtagggtaggcacacgctgagccagtcagtgtagcgcgcgtgcagccccggacatctaagggcatcaca

SEQ ID NO: 47987 - DNA, 120 bp, Homo sapiens
  misc_feature: 832 for SV(W|O) and 18S
gctcgggggtcgcgtaactagttagcatgccagagtctcgttcgttatcggaattaaccagacaaatcgctccaccaactaagaacggccatgcaccaccacccacggaatcgagaaaga

SEQ ID NO: 47988 - DNA, 120 bp, Homo sapiens
  misc_feature: 832 for SV(W|O) and 18S
aattttttcaaagtaaacgcttcgggccccgcgggacactcagctaagagcatcgagggggcgccgagaggcaaggggcggggacgggcggtggctcgcctcgcggcggaccgcccgccc

SEQ ID NO: 47989 - DNA, 120 bp, Homo sapiens
  misc_feature: 832 for SV(W|O) and 18S
cctctaagaagttgggggacgccgaccgctcgggggtcgcgtaactagttagcatgccagagtctcgttcgttatcggaattaaccagacaaatcgctccaccaactaagaacggccatg

SEQ ID NO: 47990 - DNA, 120 bp, Homo sapiens
  misc_feature: 832 for SV(W|O) and 18S
agtctcgttcgttatcggaattaaccagacaaatcgctccaccaactaagaacggccatgcaccaccacccacggaatcgagaaagagctatcaatctgtcaatcctgtccgtgtccggg

SEQ ID NO: 47991 - DNA, 120 bp, Homo sapiens
  misc_feature: 831 for SV(W|O) and 18S
taatttgcgcgcctgctgccttccttggatgtggtagccgtttctcaggctccctctccggaatcgaaccctgattccccgtcacccgtggtcaccatggtaggcacggcgactaccatc

SEQ ID NO: 47992 - DNA, 120 bp, Homo sapiens
  misc_feature: 831 for SV(W|O) and 18S
ggatggtttagtgaggccctcggatcggccccgccggggtcggcccacggccctggcggagcgctgagaagacggtcgaacttgactatctagaggaagtaaaagtcgtaacaaggtttc

SEQ ID NO: 47993 - DNA, 120 bp, Homo sapiens
  misc_feature: 831 for SV(W|O) and 18S
aaattagagtgttcaaagcaggcccgagccgcctggataccgcagctaggaataatggaataggaccgcggttctattttgttggttttcggaactgaggccatgattaagagggacggc

SEQ ID NO: 47994 - DNA, 120 bp, Homo sapiens
  misc_feature: 831 for SV(W|O) and 18S
ctgctgccttccttggatgtggtagccgtttctcaggctccctctccggaatcgaaccctgattccccgtcacccgtggtcaccatggtaggcacggcgactaccatcgaaagttgatag

SEQ ID NO: 47995 - DNA, 120 bp, Homo sapiens
  misc_feature: 830 for SV(W|O) and 18S
atccaagtaggagaggagcgagcgaccaaaggaaccataactgatttaatgagccattcgcagtttcactgtaccggccgtgcgtacttagacatgcatggcttaatctttgagacaagc

SEQ ID NO: 47996 - DNA, 120 bp, Homo sapiens
  misc_feature: 830 for SV(W|O) and 18S
actttgaaaaaattagagtgttcaaagcaggcccgagccgcctggataccgcagctaggaataatggaataggaccgcggttctattttgttggttttcggaactgaggccatgattaag

SEQ ID NO: 47997 - DNA, 120 bp, Homo sapiens
  misc_feature: 830 for SV(W|O) and 18S
accgtcttctcagcgctccgccagggccgtgggccgaccccggcggggccgatccgagggcctcactaaaccatccaatcggtagtagcgacgggcggtgtgtacaaagggcagggactt

SEQ ID NO: 47998 - DNA, 120 bp, Homo sapiens
  misc_feature: 829 for SV(W|O) and 18S
ttcgaccgtcttctcagcgctccgccagggccgtgggccgaccccggcggggccgatccgagggcctcactaaaccatccaatcggtagtagcgacgggcggtgtgtacaaagggcaggg

SEQ ID NO: 47999 - DNA, 120 bp, Homo sapiens
  misc_feature: 829 for SV(W|O) and 18S
gcatgtctaagtacgcacggccggtacagtgaaactgcgaatggctcattaaatcagttatggttcctttggtcgctcgctcctctcctacttggataactgtggtaattctagagctaa

SEQ ID NO: 48000 - DNA, 120 bp, Homo sapiens
  misc_feature: 829 for SV(W|O) and 18S
gcccggcgggtcatgggaataacgccgccgcatcgccggtcggcatcgtttatggtcggaactacgacggtatctgatcgtcttcgaacctccgactttcgttcttgattaatgaaaaca

SEQ ID NO: 48001 - DNA, 120 bp, Homo sapiens
  misc_feature: 829 for SV(W|O) and 18S
gtaatttgcgcgcctgctgccttccttggatgtggtagccgtttctcaggctccctctccggaatcgaaccctgattccccgtcacccgtggtcaccatggtaggcacggcgactaccat

SEQ ID NO: 48002 - DNA, 120 bp, Homo sapiens
  misc_feature: 829 for SV(W|O) and 18S
ggttcgaagacgatcagataccgtcgtagttccgaccataaacgatgccgaccggcgatgcggcggcgttattcccatgacccgccgggcagcttccgggaaaccaaagtctttgggttc

SEQ ID NO: 48003 - DNA, 120 bp, Homo sapiens
  misc_feature: 829 for SV(W|O) and 18S
cccgatccccatcacgaatggggttcaacgggttacccgcgcctgccggcgtagggtaggcacacgctgagccagtcagtgtagcgcgcgtgcagccccggacatctaagggcatcacag

SEQ ID NO: 48004 - DNA, 120 bp, Homo sapiens
  misc_feature: 829 for SV(W|O) and 18S
aatcctttaacgaggatccattggagggcaagtctggtgccagcagccgcggtaattccagctccaatagcgtatattaaagttgctgcagttaaaaagctcgtagttggatcttgggag

SEQ ID NO: 48005 - DNA, 120 bp, Homo sapiens
  misc_feature: 829 for SV(W|O) and 18S
cgcgcctgctgccttccttggatgtggtagccgtttctcaggctccctctccggaatcgaaccctgattccccgtcacccgtggtcaccatggtaggcacggcgactaccatcgaaagtt

SEQ ID NO: 48006 - DNA, 120 bp, Homo sapiens
  misc_feature: 828 for SV(W|O) and 18S
ccgtgcctaccatggtgaccacgggtgacggggaatcagggttcgattccggagagggagcctgagaaacggctaccacatccaaggaaggcagcaggcgcgcaaattacccactcccga

SEQ ID NO: 48007 - DNA, 120 bp, Homo sapiens
  misc_feature: 828 for SV(W|O) and 18S
aattagagtgttcaaagcaggcccgagccgcctggataccgcagctaggaataatggaataggaccgcggttctattttgttggttttcggaactgaggccatgattaagagggacggcc

SEQ ID NO: 48008 - DNA, 120 bp, Homo sapiens
  misc_feature: 828 for SV(W|O) and 18S
gcgcctgctgccttccttggatgtggtagccgtttctcaggctccctctccggaatcgaaccctgattccccgtcacccgtggtcaccatggtaggcacggcgactaccatcgaaagttg

SEQ ID NO: 48009 - DNA, 120 bp, Homo sapiens
  misc_feature: 828 for SV(W|O) and 18S
gccctttgtacacaccgcccgtcgctactaccgattggatggtttagtgaggccctcggatcggccccgccggggtcggcccacggccctggcggagcgctgagaagacggtcgaacttg

SEQ ID NO: 48010 - DNA, 120 bp, Homo sapiens
  misc_feature: 828 for SV(W|O) and 18S
ctgggaattcctcgttcatggggaataattgcaatccccgatccccatcacgaatggggttcaacgggttacccgcgcctgccggcgtagggtaggcacacgctgagccagtcagtgtag

SEQ ID NO: 48011 - DNA, 120 bp, Homo sapiens
  misc_feature: 827 for SV(W|O) and 18S
ttgtccctctaagaagttgggggacgccgaccgctcgggggtcgcgtaactagttagcatgccagagtctcgttcgttatcggaattaaccagacaaatcgctccaccaactaagaacgg

SEQ ID NO: 48012 - DNA, 120 bp, Homo sapiens
  misc_feature: 827 for SV(W|O) and 18S
aagttcgaccgtcttctcagcgctccgccagggccgtgggccgaccccggcggggccgatccgagggcctcactaaaccatccaatcggtagtagcgacgggcggtgtgtacaaagggca

SEQ ID NO: 48013 - DNA, 120 bp, Homo sapiens
  misc_feature: 827 for SV(W|O) and 18S
attcctcgttcatggggaataattgcaatccccgatccccatcacgaatggggttcaacgggttacccgcgcctgccggcgtagggtaggcacacgctgagccagtcagtgtagcgcgcg

SEQ ID NO: 48014 - DNA, 120 bp, Homo sapiens
  misc_feature: 827 for SV(W|O) and 18S
attgcaatccccgatccccatcacgaatggggttcaacgggttacccgcgcctgccggcgtagggtaggcacacgctgagccagtcagtgtagcgcgcgtgcagccccggacatctaagg

SEQ ID NO: 48015 - DNA, 120 bp, Homo sapiens
  misc_feature: 827 for SV(W|O) and 18S
aatacgaatgcccccggccgtccctcttaatcatggcctcagttccgaaaaccaacaaaatagaaccgcggtcctattccattattcctagctgcggtatccaggcggctcgggcctgct

SEQ ID NO: 48016 - DNA, 120 bp, Homo sapiens
  misc_feature: 826 for SV(W|O) and 18S
ttactgggaattcctcgttcatggggaataattgcaatccccgatccccatcacgaatggggttcaacgggttacccgcgcctgccggcgtagggtaggcacacgctgagccagtcagtg

SEQ ID NO: 48017 - DNA, 120 bp, Homo sapiens
  misc_feature: 826 for SV(W|O) and 18S
gcgcgcctgctgccttccttggatgtggtagccgtttctcaggctccctctccggaatcgaaccctgattccccgtcacccgtggtcaccatggtaggcacggcgactaccatcgaaagt

SEQ ID NO: 48018 - DNA, 120 bp, Homo sapiens
  misc_feature: 826 for SV(W|O) and 18S
caatccccgatccccatcacgaatggggttcaacgggttacccgcgcctgccggcgtagggtaggcacacgctgagccagtcagtgtagcgcgcgtgcagccccggacatctaagggcat

SEQ ID NO: 48019 - DNA, 120 bp, Homo sapiens
  misc_feature: 825 for SV(W|O) and 18S
tagttggtggagcgatttgtctggttaattccgataacgaacgagactctggcatgctaactagttacgcgacccccgagcggtcggcgtcccccaacttcttagagggacaagtggcgt

SEQ ID NO: 48020 - DNA, 120 bp, Homo sapiens
  misc_feature: 825 for SV(W|O) and 18S
actgggaattcctcgttcatggggaataattgcaatccccgatccccatcacgaatggggttcaacgggttacccgcgcctgccggcgtagggtaggcacacgctgagccagtcagtgta

SEQ ID NO: 48021 - DNA, 120 bp, Homo sapiens
  misc_feature: 825 for SV(W|O) and 18S
ccggaagctgcccggcgggtcatgggaataacgccgccgcatcgccggtcggcatcgtttatggtcggaactacgacggtatctgatcgtcttcgaacctccgactttcgttcttgatta

SEQ ID NO: 48022 - DNA, 120 bp, Homo sapiens
  misc_feature: 825 for SV(W|O) and 18S
gtccctctaagaagttgggggacgccgaccgctcgggggtcgcgtaactagttagcatgccagagtctcgttcgttatcggaattaaccagacaaatcgctccaccaactaagaacggcc

SEQ ID NO: 48023 - DNA, 120 bp, Homo sapiens
  misc_feature: 825 for SV(W|O) and 18S
gcaatacgaatgcccccggccgtccctcttaatcatggcctcagttccgaaaaccaacaaaatagaaccgcggtcctattccattattcctagctgcggtatccaggcggctcgggcctg

SEQ ID NO: 48024 - DNA, 120 bp, Homo sapiens
  misc_feature: 824 for SV(W|O) and 18S
cggaagctgcccggcgggtcatgggaataacgccgccgcatcgccggtcggcatcgtttatggtcggaactacgacggtatctgatcgtcttcgaacctccgactttcgttcttgattaa

SEQ ID NO: 48025 - DNA, 120 bp, Homo sapiens
  misc_feature: 824 for SV(W|O) and 18S
tgcatgtctaagtacgcacggccggtacagtgaaactgcgaatggctcattaaatcagttatggttcctttggtcgctcgctcctctcctacttggataactgtggtaattctagagcta

SEQ ID NO: 48026 - DNA, 120 bp, Homo sapiens
  misc_feature: 824 for SV(W|O) and 18S
tactgggaattcctcgttcatggggaataattgcaatccccgatccccatcacgaatggggttcaacgggttacccgcgcctgccggcgtagggtaggcacacgctgagccagtcagtgt

SEQ ID NO: 48027 - DNA, 120 bp, Homo sapiens
  misc_feature: 824 for SV(W|O) and 18S
ggtttagtgaggccctcggatcggccccgccggggtcggcccacggccctggcggagcgctgagaagacggtcgaacttgactatctagaggaagtaaaagtcgtaacaaggtttccgta

SEQ ID NO: 48028 - DNA, 120 bp, Homo sapiens
  misc_feature: 824 for SV(W|O) and 18S
caatacgaatgcccccggccgtccctcttaatcatggcctcagttccgaaaaccaacaaaatagaaccgcggtcctattccattattcctagctgcggtatccaggcggctcgggcctgc

SEQ ID NO: 48029 - DNA, 120 bp, Homo sapiens
  misc_feature: 824 for SV(W|O) and 18S
gaagctgcccggcgggtcatgggaataacgccgccgcatcgccggtcggcatcgtttatggtcggaactacgacggtatctgatcgtcttcgaacctccgactttcgttcttgattaatg

SEQ ID NO: 48030 - DNA, 120 bp, Homo sapiens
  misc_feature: 823 for SV(W|O) and 18S
tgggaattcctcgttcatggggaataattgcaatccccgatccccatcacgaatggggttcaacgggttacccgcgcctgccggcgtagggtaggcacacgctgagccagtcagtgtagc

SEQ ID NO: 48031 - DNA, 120 bp, Homo sapiens
  misc_feature: 823 for SV(W|O) and 18S
taagccatgcatgtctaagtacgcacggccggtacagtgaaactgcgaatggctcattaaatcagttatggttcctttggtcgctcgctcctctcctacttggataactgtggtaattct

SEQ ID NO: 48032 - DNA, 120 bp, Homo sapiens
  misc_feature: 823 for SV(W|O) and 18S
ggaagctgcccggcgggtcatgggaataacgccgccgcatcgccggtcggcatcgtttatggtcggaactacgacggtatctgatcgtcttcgaacctccgactttcgttcttgattaat

SEQ ID NO: 48033 - DNA, 120 bp, Homo sapiens
  misc_feature: 823 for SV(W|O) and 18S
gcctgctgccttccttggatgtggtagccgtttctcaggctccctctccggaatcgaaccctgattccccgtcacccgtggtcaccatggtaggcacggcgactaccatcgaaagttgat

SEQ ID NO: 48034 - DNA, 120 bp, Homo sapiens
  misc_feature: 823 for SV(W|O) and 18S
acgaatgcccccggccgtccctcttaatcatggcctcagttccgaaaaccaacaaaatagaaccgcggtcctattccattattcctagctgcggtatccaggcggctcgggcctgctttg

SEQ ID NO: 48035 - DNA, 120 bp, Homo sapiens
  misc_feature: 823 for SV(W|O) and 18S
agttggtggagcgatttgtctggttaattccgataacgaacgagactctggcatgctaactagttacgcgacccccgagcggtcggcgtcccccaacttcttagagggacaagtggcgtt

SEQ ID NO: 48036 - DNA, 120 bp, Homo sapiens
  misc_feature: 822 for SV(W|O) and 18S
taattttttcaaagtaaacgcttcgggccccgcgggacactcagctaagagcatcgagggggcgccgagaggcaaggggcggggacgggcggtggctcgcctcgcggcggaccgcccgcc

SEQ ID NO: 48037 - DNA, 120 bp, Homo sapiens
  misc_feature: 822 for SV(W|O) and 18S
atcgagggggcgccgagaggcaaggggcggggacgggcggtggctcgcctcgcggcggaccgcccgcccgctcccaagatccaactacgagctttttaactgcagcaactttaatatacg

SEQ ID NO: 48038 - DNA, 120 bp, Homo sapiens
  misc_feature: 821 for SV(W|O) and 18S
tctaagtacgcacggccggtacagtgaaactgcgaatggctcattaaatcagttatggttcctttggtcgctcgctcctctcctacttggataactgtggtaattctagagctaatacat

SEQ ID NO: 48039 - DNA, 120 bp, Homo sapiens
  misc_feature: 821 for SV(W|O) and 18S
gaccgtcttctcagcgctccgccagggccgtgggccgaccccggcggggccgatccgagggcctcactaaaccatccaatcggtagtagcgacgggcggtgtgtacaaagggcagggact

SEQ ID NO: 48040 - DNA, 120 bp, Homo sapiens
  misc_feature: 820 for SV(W|O) and 18S
ttaagccatgcatgtctaagtacgcacggccggtacagtgaaactgcgaatggctcattaaatcagttatggttcctttggtcgctcgctcctctcctacttggataactgtggtaattc

SEQ ID NO: 48041 - DNA, 120 bp, Homo sapiens
  misc_feature: 820 for SV(W|O) and 18S
tgtccctctaagaagttgggggacgccgaccgctcgggggtcgcgtaactagttagcatgccagagtctcgttcgttatcggaattaaccagacaaatcgctccaccaactaagaacggc

SEQ ID NO: 48042 - DNA, 120 bp, Homo sapiens
  misc_feature: 820 for SV(W|O) and 18S
ggtaatttgcgcgcctgctgccttccttggatgtggtagccgtttctcaggctccctctccggaatcgaaccctgattccccgtcacccgtggtcaccatggtaggcacggcgactacca

SEQ ID NO: 48043 - DNA, 120 bp, Homo sapiens
  misc_feature: 820 for SV(W|O) and 18S
gcaatccccgatccccatcacgaatggggttcaacgggttacccgcgcctgccggcgtagggtaggcacacgctgagccagtcagtgtagcgcgcgtgcagccccggacatctaagggca

SEQ ID NO: 48044 - DNA, 120 bp, Homo sapiens
  misc_feature: 820 for SV(W|O) and 18S
tcgaccgtcttctcagcgctccgccagggccgtgggccgaccccggcggggccgatccgagggcctcactaaaccatccaatcggtagtagcgacgggcggtgtgtacaaagggcaggga

SEQ ID NO: 48045 - DNA, 120 bp, Homo sapiens
  misc_feature: 820 for SV(W|O) and 18S
tcgaagacgatcagataccgtcgtagttccgaccataaacgatgccgaccggcgatgcggcggcgttattcccatgacccgccgggcagcttccgggaaaccaaagtctttgggttccgg

SEQ ID NO: 48046 - DNA, 120 bp, Homo sapiens
  misc_feature: 820 for SV(W|O) and 18S
aagccatgcatgtctaagtacgcacggccggtacagtgaaactgcgaatggctcattaaatcagttatggttcctttggtcgctcgctcctctcctacttggataactgtggtaattcta

SEQ ID NO: 48047 - DNA, 120 bp, Homo sapiens
  misc_feature: 820 for SV(W|O) and 18S
catgtctaagtacgcacggccggtacagtgaaactgcgaatggctcattaaatcagttatggttcctttggtcgctcgctcctctcctacttggataactgtggtaattctagagctaat

SEQ ID NO: 48048 - DNA, 120 bp, Homo sapiens
  misc_feature: 819 for SV(W|O) and 18S
gtctaagtacgcacggccggtacagtgaaactgcgaatggctcattaaatcagttatggttcctttggtcgctcgctcctctcctacttggataactgtggtaattctagagctaataca

SEQ ID NO: 48049 - DNA, 120 bp, Homo sapiens
  misc_feature: 819 for SV(W|O) and 18S
tacgaatgcccccggccgtccctcttaatcatggcctcagttccgaaaaccaacaaaatagaaccgcggtcctattccattattcctagctgcggtatccaggcggctcgggcctgcttt

SEQ ID NO: 48050 - DNA, 120 bp, Homo sapiens
  misc_feature: 819 for SV(W|O) and 18S
gttcgaccgtcttctcagcgctccgccagggccgtgggccgaccccggcggggccgatccgagggcctcactaaaccatccaatcggtagtagcgacgggcggtgtgtacaaagggcagg

SEQ ID NO: 48051 - DNA, 120 bp, Homo sapiens
  misc_feature: 819 for SV(W|O) and 18S
agttcgaccgtcttctcagcgctccgccagggccgtgggccgaccccggcggggccgatccgagggcctcactaaaccatccaatcggtagtagcgacgggcggtgtgtacaaagggcag

SEQ ID NO: 48052 - DNA, 120 bp, Homo sapiens
  misc_feature: 818 for SV(W|O) and 18S
ctgcccggcgggtcatgggaataacgccgccgcatcgccggtcggcatcgtttatggtcggaactacgacggtatctgatcgtcttcgaacctccgactttcgttcttgattaatgaaaa

SEQ ID NO: 48053 - DNA, 120 bp, Homo sapiens
  misc_feature: 818 for SV(W|O) and 18S
ttggtggagcgatttgtctggttaattccgataacgaacgagactctggcatgctaactagttacgcgacccccgagcggtcggcgtcccccaacttcttagagggacaagtggcgttca

SEQ ID NO: 48054 - DNA, 120 bp, Homo sapiens
  misc_feature: 818 for SV(W|O) and 18S
tgcccggcgggtcatgggaataacgccgccgcatcgccggtcggcatcgtttatggtcggaactacgacggtatctgatcgtcttcgaacctccgactttcgttcttgattaatgaaaac

SEQ ID NO: 48055 - DNA, 120 bp, Homo sapiens
  misc_feature: 818 for SV(W|O) and 18S
atccccgatccccatcacgaatggggttcaacgggttacccgcgcctgccggcgtagggtaggcacacgctgagccagtcagtgtagcgcgcgtgcagccccggacatctaagggcatca

SEQ ID NO: 48056 - DNA, 120 bp, Homo sapiens
  misc_feature: 818 for SV(W|O) and 18S
tgaccacgggtgacggggaatcagggttcgattccggagagggagcctgagaaacggctaccacatccaaggaaggcagcaggcgcgcaaattacccactcccgacccggggaggtagtg

SEQ ID NO: 48057 - DNA, 120 bp, Homo sapiens
  misc_feature: 818 for SV(W|O) and 18S
atgtctaagtacgcacggccggtacagtgaaactgcgaatggctcattaaatcagttatggttcctttggtcgctcgctcctctcctacttggataactgtggtaattctagagctaata

SEQ ID NO: 48058 - DNA, 120 bp, Homo sapiens
  misc_feature: 818 for SV(W|O) and 18S
gtttagtgaggccctcggatcggccccgccggggtcggcccacggccctggcggagcgctgagaagacggtcgaacttgactatctagaggaagtaaaagtcgtaacaaggtttccgtag

SEQ ID NO: 48059 - DNA, 120 bp, Homo sapiens
  misc_feature: 818 for SV(W|O) and 18S
cccggcgggtcatgggaataacgccgccgcatcgccggtcggcatcgtttatggtcggaactacgacggtatctgatcgtcttcgaacctccgactttcgttcttgattaatgaaaacat

SEQ ID NO: 48060 - DNA, 120 bp, Homo sapiens
  misc_feature: 818 for SV(W|O) and 18S
atgcatgtctaagtacgcacggccggtacagtgaaactgcgaatggctcattaaatcagttatggttcctttggtcgctcgctcctctcctacttggataactgtggtaattctagagct

SEQ ID NO: 48061 - DNA, 120 bp, Homo sapiens
  misc_feature: 817 for SV(W|O) and 18S
gctgcccggcgggtcatgggaataacgccgccgcatcgccggtcggcatcgtttatggtcggaactacgacggtatctgatcgtcttcgaacctccgactttcgttcttgattaatgaaa

SEQ ID NO: 48062 - DNA, 120 bp, Homo sapiens
  misc_feature: 817 for SV(W|O) and 18S
gagggggcgccgagaggcaaggggcggggacgggcggtggctcgcctcgcggcggaccgcccgcccgctcccaagatccaactacgagctttttaactgcagcaactttaatatacgcta

SEQ ID NO: 48063 - DNA, 120 bp, Homo sapiens
  misc_feature: 817 for SV(W|O) and 18S
gggtcagcgcccgtcggcatgtattagctctagaattaccacagttatccaagtaggagaggagcgagcgaccaaaggaaccataactgatttaatgagccattcgcagtttcactgtac

SEQ ID NO: 48064 - DNA, 120 bp, Homo sapiens
  misc_feature: 817 for SV(W|O) and 18S
gggtaatttgcgcgcctgctgccttccttggatgtggtagccgtttctcaggctccctctccggaatcgaaccctgattccccgtcacccgtggtcaccatggtaggcacggcgactacc

SEQ ID NO: 48065 - DNA, 120 bp, Homo sapiens
  misc_feature: 817 for SV(W|O) and 18S
gggggcgccgagaggcaaggggcggggacgggcggtggctcgcctcgcggcggaccgcccgcccgctcccaagatccaactacgagctttttaactgcagcaactttaatatacgctatt

SEQ ID NO: 48066 - DNA, 120 bp, Homo sapiens
  misc_feature: 817 for SV(W|O) and 18S
atacgaatgcccccggccgtccctcttaatcatggcctcagttccgaaaaccaacaaaatagaaccgcggtcctattccattattcctagctgcggtatccaggcggctcgggcctgctt

SEQ ID NO: 48067 - DNA, 120 bp, Homo sapiens
  misc_feature: 816 for SV(W|O) and 18S
tggtggagcgatttgtctggttaattccgataacgaacgagactctggcatgctaactagttacgcgacccccgagcggtcggcgtcccccaacttcttagagggacaagtggcgttcag

SEQ ID NO: 48068 - DNA, 120 bp, Homo sapiens
  misc_feature: 816 for SV(W|O) and 18S
tccccgatccccatcacgaatggggttcaacgggttacccgcgcctgccggcgtagggtaggcacacgctgagccagtcagtgtagcgcgcgtgcagccccggacatctaagggcatcac

SEQ ID NO: 48069 - DNA, 120 bp, Homo sapiens
  misc_feature: 816 for SV(W|O) and 18S
gttggtggagcgatttgtctggttaattccgataacgaacgagactctggcatgctaactagttacgcgacccccgagcggtcggcgtcccccaacttcttagagggacaagtggcgttc

SEQ ID NO: 48070 - DNA, 120 bp, Homo sapiens
  misc_feature: 816 for SV(W|O) and 18S
ggtcagcgcccgtcggcatgtattagctctagaattaccacagttatccaagtaggagaggagcgagcgaccaaaggaaccataactgatttaatgagccattcgcagtttcactgtacc

SEQ ID NO: 48071 - DNA, 120 bp, Homo sapiens
  misc_feature: 815 for SV(W|O) and 18S
tgcaatccccgatccccatcacgaatggggttcaacgggttacccgcgcctgccggcgtagggtaggcacacgctgagccagtcagtgtagcgcgcgtgcagccccggacatctaagggc

SEQ ID NO: 48072 - DNA, 120 bp, Homo sapiens
  misc_feature: 815 for SV(W|O) and 18S
gttcgaagacgatcagataccgtcgtagttccgaccataaacgatgccgaccggcgatgcggcggcgttattcccatgacccgccgggcagcttccgggaaaccaaagtctttgggttcc

SEQ ID NO: 48073 - DNA, 120 bp, Homo sapiens
  misc_feature: 815 for SV(W|O) and 18S
gaattcctcgttcatggggaataattgcaatccccgatccccatcacgaatggggttcaacgggttacccgcgcctgccggcgtagggtaggcacacgctgagccagtcagtgtagcgcg

SEQ ID NO: 48074 - DNA, 120 bp, Homo sapiens
  misc_feature: 815 for SV(W|O) and 18S
cttactgggaattcctcgttcatggggaataattgcaatccccgatccccatcacgaatggggttcaacgggttacccgcgcctgccggcgtagggtaggcacacgctgagccagtcagt

SEQ ID NO: 48075 - DNA, 120 bp, Homo sapiens
  misc_feature: 814 for SV(W|O) and 18S
tgctgccttccttggatgtggtagccgtttctcaggctccctctccggaatcgaaccctgattccccgtcacccgtggtcaccatggtaggcacggcgactaccatcgaaagttgatagg

SEQ ID NO: 48076 - DNA, 120 bp, Homo sapiens
  misc_feature: 814 for SV(W|O) and 18S
cgcctgctgccttccttggatgtggtagccgtttctcaggctccctctccggaatcgaaccctgattccccgtcacccgtggtcaccatggtaggcacggcgactaccatcgaaagttga

SEQ ID NO: 48077 - DNA, 120 bp, Homo sapiens
  misc_feature: 814 for SV(W|O) and 18S
gtggagcgatttgtctggttaattccgataacgaacgagactctggcatgctaactagttacgcgacccccgagcggtcggcgtcccccaacttcttagagggacaagtggcgttcagcc

SEQ ID NO: 48078 - DNA, 120 bp, Homo sapiens
  misc_feature: 814 for SV(W|O) and 18S
gtcagcgcccgtcggcatgtattagctctagaattaccacagttatccaagtaggagaggagcgagcgaccaaaggaaccataactgatttaatgagccattcgcagtttcactgtaccg

SEQ ID NO: 48079 - DNA, 120 bp, Homo sapiens
  misc_feature: 814 for SV(W|O) and 18S
cggcaggcgcgggtaacccgttgaaccccattcgtgatggggatcggggattgcaattattccccatgaacgaggaattcccagtaagtgcgggtcataagcttgcgttgattaagtccc

SEQ ID NO: 48080 - DNA, 120 bp, Homo sapiens
  misc_feature: 814 for SV(W|O) and 18S
cgctacactgactggctcagcgtgtgcctaccctacgccggcaggcgcgggtaacccgttgaaccccattcgtgatggggatcggggattgcaattattccccatgaacgaggaattccc

SEQ ID NO: 48081 - DNA, 120 bp, Homo sapiens
  misc_feature: 814 for SV(W|O) and 18S
atcctttaacgaggatccattggagggcaagtctggtgccagcagccgcggtaattccagctccaatagcgtatattaaagttgctgcagttaaaaagctcgtagttggatcttgggagc

SEQ ID NO: 48082 - DNA, 120 bp, Homo sapiens
  misc_feature: 813 for SV(W|O) and 18S
ttgcaatccccgatccccatcacgaatggggttcaacgggttacccgcgcctgccggcgtagggtaggcacacgctgagccagtcagtgtagcgcgcgtgcagccccggacatctaaggg

SEQ ID NO: 48083 - DNA, 120 bp, Homo sapiens
  misc_feature: 813 for SV(W|O) and 18S
ttcgaagacgatcagataccgtcgtagttccgaccataaacgatgccgaccggcgatgcggcggcgttattcccatgacccgccgggcagcttccgggaaaccaaagtctttgggttccg

SEQ ID NO: 48084 - DNA, 120 bp, Homo sapiens
  misc_feature: 813 for SV(W|O) and 18S
ggcaggcgcgggtaacccgttgaaccccattcgtgatggggatcggggattgcaattattccccatgaacgaggaattcccagtaagtgcgggtcataagcttgcgttgattaagtccct

SEQ ID NO: 48085 - DNA, 120 bp, Homo sapiens
  misc_feature: 813 for SV(W|O) and 18S
caggcgcgggtaacccgttgaaccccattcgtgatggggatcggggattgcaattattccccatgaacgaggaattcccagtaagtgcgggtcataagcttgcgttgattaagtccctgc

SEQ ID NO: 48086 - DNA, 120 bp, Homo sapiens
  misc_feature: 812 for SV(W|O) and 18S
tccaagtaggagaggagcgagcgaccaaaggaaccataactgatttaatgagccattcgcagtttcactgtaccggccgtgcgtacttagacatgcatggcttaatctttgagacaagca

SEQ ID NO: 48087 - DNA, 120 bp, Homo sapiens
  misc_feature: 812 for SV(W|O) and 18S
cgaccgtcttctcagcgctccgccagggccgtgggccgaccccggcggggccgatccgagggcctcactaaaccatccaatcggtagtagcgacgggcggtgtgtacaaagggcagggac

SEQ ID NO: 48088 - DNA, 120 bp, Homo sapiens
  misc_feature: 812 for SV(W|O) and 18S
cgccgtgcctaccatggtgaccacgggtgacggggaatcagggttcgattccggagagggagcctgagaaacggctaccacatccaaggaaggcagcaggcgcgcaaattacccactccc

SEQ ID NO: 48089 - DNA, 120 bp, Homo sapiens
  misc_feature: 812 for SV(W|O) and 18S
catgcatgtctaagtacgcacggccggtacagtgaaactgcgaatggctcattaaatcagttatggttcctttggtcgctcgctcctctcctacttggataactgtggtaattctagagc

SEQ ID NO: 48090 - DNA, 120 bp, Homo sapiens
  misc_feature: 812 for SV(W|O) and 18S
aattcctcgttcatggggaataattgcaatccccgatccccatcacgaatggggttcaacgggttacccgcgcctgccggcgtagggtaggcacacgctgagccagtcagtgtagcgcgc

SEQ ID NO: 48091 - DNA, 120 bp, Homo sapiens
  misc_feature: 812 for SV(W|O) and 18S
agccatgcatgtctaagtacgcacggccggtacagtgaaactgcgaatggctcattaaatcagttatggttcctttggtcgctcgctcctctcctacttggataactgtggtaattctag

SEQ ID NO: 48092 - DNA, 120 bp, Homo sapiens
  misc_feature: 812 for SV(W|O) and 18S
attagagtgttcaaagcaggcccgagccgcctggataccgcagctaggaataatggaataggaccgcggttctattttgttggttttcggaactgaggccatgattaagagggacggccg

SEQ ID NO: 48093 - DNA, 120 bp, Homo sapiens
  misc_feature: 812 for SV(W|O) and 18S
catcacgaatggggttcaacgggttacccgcgcctgccggcgtagggtaggcacacgctgagccagtcagtgtagcgcgcgtgcagccccggacatctaagggcatcacagacctgttat

SEQ ID NO: 48094 - DNA, 120 bp, Homo sapiens
  misc_feature: 811 for SV(W|O) and 18S
aagctgcccggcgggtcatgggaataacgccgccgcatcgccggtcggcatcgtttatggtcggaactacgacggtatctgatcgtcttcgaacctccgactttcgttcttgattaatga

SEQ ID NO: 48095 - DNA, 120 bp, Homo sapiens
  misc_feature: 811 for SV(W|O) and 18S
ggtggagcgatttgtctggttaattccgataacgaacgagactctggcatgctaactagttacgcgacccccgagcggtcggcgtcccccaacttcttagagggacaagtggcgttcagc

SEQ ID NO: 48096 - DNA, 120 bp, Homo sapiens
  misc_feature: 811 for SV(W|O) and 18S
aggcgcgggtaacccgttgaaccccattcgtgatggggatcggggattgcaattattccccatgaacgaggaattcccagtaagtgcgggtcataagcttgcgttgattaagtccctgcc

SEQ ID NO: 48097 - DNA, 120 bp, Homo sapiens
  misc_feature: 811 for SV(W|O) and 18S
gctgccttccttggatgtggtagccgtttctcaggctccctctccggaatcgaaccctgattccccgtcacccgtggtcaccatggtaggcacggcgactaccatcgaaagttgataggg

SEQ ID NO: 48098 - DNA, 120 bp, Homo sapiens
  misc_feature: 811 for SV(W|O) and 18S
gcaggcgcgggtaacccgttgaaccccattcgtgatggggatcggggattgcaattattccccatgaacgaggaattcccagtaagtgcgggtcataagcttgcgttgattaagtccctg

SEQ ID NO: 48099 - DNA, 120 bp, Homo sapiens
  misc_feature: 811 for SV(W|O) and 18S
ccggcgggtcatgggaataacgccgccgcatcgccggtcggcatcgtttatggtcggaactacgacggtatctgatcgtcttcgaacctccgactttcgttcttgattaatgaaaacatt

SEQ ID NO: 48100 - DNA, 120 bp, Homo sapiens
  misc_feature: 810 for SV(W|O) and 18S
tctaattttttcaaagtaaacgcttcgggccccgcgggacactcagctaagagcatcgagggggcgccgagaggcaaggggcggggacgggcggtggctcgcctcgcggcggaccgcccg

SEQ ID NO: 48101 - DNA, 120 bp, Homo sapiens
  misc_feature: 810 for SV(W|O) and 18S
gccgtgcctaccatggtgaccacgggtgacggggaatcagggttcgattccggagagggagcctgagaaacggctaccacatccaaggaaggcagcaggcgcgcaaattacccactcccg

SEQ ID NO: 48102 - DNA, 120 bp, Homo sapiens
  misc_feature: 810 for SV(W|O) and 18S
cctttaacgaggatccattggagggcaagtctggtgccagcagccgcggtaattccagctccaatagcgtatattaaagttgctgcagttaaaaagctcgtagttggatcttgggagcgg

SEQ ID NO: 48103 - DNA, 120 bp, Homo sapiens
  misc_feature: 809 for SV(W|O) and 18S
tactttgaaaaaattagagtgttcaaagcaggcccgagccgcctggataccgcagctaggaataatggaataggaccgcggttctattttgttggttttcggaactgaggccatgattaa

SEQ ID NO: 48104 - DNA, 120 bp, Homo sapiens
  misc_feature: 809 for SV(W|O) and 18S
aatccccgatccccatcacgaatggggttcaacgggttacccgcgcctgccggcgtagggtaggcacacgctgagccagtcagtgtagcgcgcgtgcagccccggacatctaagggcatc

SEQ ID NO: 48105 - DNA, 120 bp, Homo sapiens
  misc_feature: 809 for SV(W|O) and 18S
cgccggcaggcgcgggtaacccgttgaaccccattcgtgatggggatcggggattgcaattattccccatgaacgaggaattcccagtaagtgcgggtcataagcttgcgttgattaagt

SEQ ID NO: 48106 - DNA, 120 bp, Homo sapiens
  misc_feature: 809 for SV(W|O) and 18S
ccaagtaggagaggagcgagcgaccaaaggaaccataactgatttaatgagccattcgcagtttcactgtaccggccgtgcgtacttagacatgcatggcttaatctttgagacaagcat

SEQ ID NO: 48107 - DNA, 120 bp, Homo sapiens
  misc_feature: 809 for SV(W|O) and 18S
agtgggtaatttgcgcgcctgctgccttccttggatgtggtagccgtttctcaggctccctctccggaatcgaaccctgattccccgtcacccgtggtcaccatggtaggcacggcgact

SEQ ID NO: 48108 - DNA, 120 bp, Homo sapiens
  misc_feature: 809 for SV(W|O) and 18S
aggccctcggatcggccccgccggggtcggcccacggccctggcggagcgctgagaagacggtcgaacttgactatctagaggaagtaaaagtcgtaacaaggtttccgtaggtgaacct

SEQ ID NO: 48109 - DNA, 120 bp, Homo sapiens
  misc_feature: 808 for SV(W|O) and 18S
tgtctaagtacgcacggccggtacagtgaaactgcgaatggctcattaaatcagttatggttcctttggtcgctcgctcctctcctacttggataactgtggtaattctagagctaatac

SEQ ID NO: 48110 - DNA, 120 bp, Homo sapiens
  misc_feature: 808 for SV(W|O) and 18S
cgaagggggtcagcgcccgtcggcatgtattagctctagaattaccacagttatccaagtaggagaggagcgagcgaccaaaggaaccataactgatttaatgagccattcgcagtttca

SEQ ID NO: 48111 - DNA, 120 bp, Homo sapiens
  misc_feature: 808 for SV(W|O) and 18S
tcagcgcccgtcggcatgtattagctctagaattaccacagttatccaagtaggagaggagcgagcgaccaaaggaaccataactgatttaatgagccattcgcagtttcactgtaccgg

SEQ ID NO: 48112 - DNA, 120 bp, Homo sapiens
  misc_feature: 808 for SV(W|O) and 18S
gtcgccgtgcctaccatggtgaccacgggtgacggggaatcagggttcgattccggagagggagcctgagaaacggctaccacatccaaggaaggcagcaggcgcgcaaattacccactc

SEQ ID NO: 48113 - DNA, 120 bp, Homo sapiens
  misc_feature: 808 for SV(W|O) and 18S
ggccctcggatcggccccgccggggtcggcccacggccctggcggagcgctgagaagacggtcgaacttgactatctagaggaagtaaaagtcgtaacaaggtttccgtaggtgaacctg

SEQ ID NO: 48114 - DNA, 120 bp, Homo sapiens
  misc_feature: 808 for SV(W|O) and 18S
gccggcaggcgcgggtaacccgttgaaccccattcgtgatggggatcggggattgcaattattccccatgaacgaggaattcccagtaagtgcgggtcataagcttgcgttgattaagtc

SEQ ID NO: 48115 - DNA, 120 bp, Homo sapiens
  misc_feature: 808 for SV(W|O) and 18S
ctctaagaagttgggggacgccgaccgctcgggggtcgcgtaactagttagcatgccagagtctcgttcgttatcggaattaaccagacaaatcgctccaccaactaagaacggccatgc

SEQ ID NO: 48116 - DNA, 120 bp, Homo sapiens
  misc_feature: 808 for SV(W|O) and 18S
agggggcgccgagaggcaaggggcggggacgggcggtggctcgcctcgcggcggaccgcccgcccgctcccaagatccaactacgagctttttaactgcagcaactttaatatacgctat

SEQ ID NO: 48117 - DNA, 120 bp, Homo sapiens
  misc_feature: 807 for SV(W|O) and 18S
tttagtgaggccctcggatcggccccgccggggtcggcccacggccctggcggagcgctgagaagacggtcgaacttgactatctagaggaagtaaaagtcgtaacaaggtttccgtagg

SEQ ID NO: 48118 - DNA, 120 bp, Homo sapiens
  misc_feature: 807 for SV(W|O) and 18S
agctgcccggcgggtcatgggaataacgccgccgcatcgccggtcggcatcgtttatggtcggaactacgacggtatctgatcgtcttcgaacctccgactttcgttcttgattaatgaa

SEQ ID NO: 48119 - DNA, 120 bp, Homo sapiens
  misc_feature: 807 for SV(W|O) and 18S
tcgagggggcgccgagaggcaaggggcggggacgggcggtggctcgcctcgcggcggaccgcccgcccgctcccaagatccaactacgagctttttaactgcagcaactttaatatacgc

SEQ ID NO: 48120 - DNA, 120 bp, Homo sapiens
  misc_feature: 807 for SV(W|O) and 18S
ctaattttttcaaagtaaacgcttcgggccccgcgggacactcagctaagagcatcgagggggcgccgagaggcaaggggcggggacgggcggtggctcgcctcgcggcggaccgcccgc

SEQ ID NO: 48121 - DNA, 120 bp, Homo sapiens
  misc_feature: 807 for SV(W|O) and 18S
cgctcgggggtcgcgtaactagttagcatgccagagtctcgttcgttatcggaattaaccagacaaatcgctccaccaactaagaacggccatgcaccaccacccacggaatcgagaaag

SEQ ID NO: 48122 - DNA, 120 bp, Homo sapiens
  misc_feature: 807 for SV(W|O) and 18S
cgagggggcgccgagaggcaaggggcggggacgggcggtggctcgcctcgcggcggaccgcccgcccgctcccaagatccaactacgagctttttaactgcagcaactttaatatacgct

SEQ ID NO: 48123 - DNA, 120 bp, Homo sapiens
  misc_feature: 806 for SV(W|O) and 18S
tcgccgtgcctaccatggtgaccacgggtgacggggaatcagggttcgattccggagagggagcctgagaaacggctaccacatccaaggaaggcagcaggcgcgcaaattacccactcc

SEQ ID NO: 48124 - DNA, 120 bp, Homo sapiens
  misc_feature: 806 for SV(W|O) and 18S
cttccttggatgtggtagccgtttctcaggctccctctccggaatcgaaccctgattccccgtcacccgtggtcaccatggtaggcacggcgactaccatcgaaagttgatagggcagac

SEQ ID NO: 48125 - DNA, 120 bp, Homo sapiens
  misc_feature: 806 for SV(W|O) and 18S
gccttccttggatgtggtagccgtttctcaggctccctctccggaatcgaaccctgattccccgtcacccgtggtcaccatggtaggcacggcgactaccatcgaaagttgatagggcag

SEQ ID NO: 48126 - DNA, 120 bp, Homo sapiens
  misc_feature: 806 for SV(W|O) and 18S
aatcaacgcaagcttatgacccgcacttactgggaattcctcgttcatggggaataattgcaatccccgatccccatcacgaatggggttcaacgggttacccgcgcctgccggcgtagg

SEQ ID NO: 48127 - DNA, 120 bp, Homo sapiens
  misc_feature: 806 for SV(W|O) and 18S
agactctggcatgctaactagttacgcgacccccgagcggtcggcgtcccccaacttcttagagggacaagtggcgttcagccacccgagattgagcaataacaggtctgtgatgccctt

SEQ ID NO: 48128 - DNA, 120 bp, Homo sapiens
  misc_feature: 805 for SV(W|O) and 18S
gccatgcatgtctaagtacgcacggccggtacagtgaaactgcgaatggctcattaaatcagttatggttcctttggtcgctcgctcctctcctacttggataactgtggtaattctaga

SEQ ID NO: 48129 - DNA, 120 bp, Homo sapiens
  misc_feature: 805 for SV(W|O) and 18S
taatcaacgcaagcttatgacccgcacttactgggaattcctcgttcatggggaataattgcaatccccgatccccatcacgaatggggttcaacgggttacccgcgcctgccggcgtag

SEQ ID NO: 48130 - DNA, 120 bp, Homo sapiens
  misc_feature: 805 for SV(W|O) and 18S
gtctcgttcgttatcggaattaaccagacaaatcgctccaccaactaagaacggccatgcaccaccacccacggaatcgagaaagagctatcaatctgtcaatcctgtccgtgtccgggc

SEQ ID NO: 48131 - DNA, 120 bp, Homo sapiens
  misc_feature: 805 for SV(W|O) and 18S
ggcgcgggtaacccgttgaaccccattcgtgatggggatcggggattgcaattattccccatgaacgaggaattcccagtaagtgcgggtcataagcttgcgttgattaagtccctgccc

SEQ ID NO: 48132 - DNA, 120 bp, Homo sapiens
  misc_feature: 805 for SV(W|O) and 18S
cgcaatacgaatgcccccggccgtccctcttaatcatggcctcagttccgaaaaccaacaaaatagaaccgcggtcctattccattattcctagctgcggtatccaggcggctcgggcct

SEQ ID NO: 48133 - DNA, 120 bp, Homo sapiens
  misc_feature: 804 for SV(W|O) and 18S
gaccacgggtgacggggaatcagggttcgattccggagagggagcctgagaaacggctaccacatccaaggaaggcagcaggcgcgcaaattacccactcccgacccggggaggtagtga

SEQ ID NO: 48134 - DNA, 120 bp, Homo sapiens
  misc_feature: 804 for SV(W|O) and 18S
gaggccctcggatcggccccgccggggtcggcccacggccctggcggagcgctgagaagacggtcgaacttgactatctagaggaagtaaaagtcgtaacaaggtttccgtaggtgaacc

SEQ ID NO: 48135 - DNA, 120 bp, Homo sapiens
  misc_feature: 804 for SV(W|O) and 18S
ggaattcctcgttcatggggaataattgcaatccccgatccccatcacgaatggggttcaacgggttacccgcgcctgccggcgtagggtaggcacacgctgagccagtcagtgtagcgc

SEQ ID NO: 48136 - DNA, 120 bp, Homo sapiens
  misc_feature: 804 for SV(W|O) and 18S
ctaagtacgcacggccggtacagtgaaactgcgaatggctcattaaatcagttatggttcctttggtcgctcgctcctctcctacttggataactgtggtaattctagagctaatacatg

SEQ ID NO: 48137 - DNA, 120 bp, Homo sapiens
  misc_feature: 803 for SV(W|O) and 18S
aagttgggggacgccgaccgctcgggggtcgcgtaactagttagcatgccagagtctcgttcgttatcggaattaaccagacaaatcgctccaccaactaagaacggccatgcaccacca

SEQ ID NO: 48138 - DNA, 120 bp, Homo sapiens
  misc_feature: 803 for SV(W|O) and 18S
aagaagttgggggacgccgaccgctcgggggtcgcgtaactagttagcatgccagagtctcgttcgttatcggaattaaccagacaaatcgctccaccaactaagaacggccatgcacca

SEQ ID NO: 48139 - DNA, 120 bp, Homo sapiens
  misc_feature: 803 for SV(W|O) and 18S
gagcgatttgtctggttaattccgataacgaacgagactctggcatgctaactagttacgcgacccccgagcggtcggcgtcccccaacttcttagagggacaagtggcgttcagccacc

SEQ ID NO: 48140 - DNA, 120 bp, Homo sapiens
  misc_feature: 802 for SV(W|O) and 18S
ttccttggatgtggtagccgtttctcaggctccctctccggaatcgaaccctgattccccgtcacccgtggtcaccatggtaggcacggcgactaccatcgaaagttgatagggcagacg

SEQ ID NO: 48141 - DNA, 120 bp, Homo sapiens
  misc_feature: 802 for SV(W|O) and 18S
atttgtctggttaattccgataacgaacgagactctggcatgctaactagttacgcgacccccgagcggtcggcgtcccccaacttcttagagggacaagtggcgttcagccacccgaga

SEQ ID NO: 48142 - DNA, 120 bp, Homo sapiens
  misc_feature: 801 for SV(W|O) and 18S
tgggtaatttgcgcgcctgctgccttccttggatgtggtagccgtttctcaggctccctctccggaatcgaaccctgattccccgtcacccgtggtcaccatggtaggcacggcgactac

SEQ ID NO: 48143 - DNA, 120 bp, Homo sapiens
  misc_feature: 801 for SV(W|O) and 18S
gagactctggcatgctaactagttacgcgacccccgagcggtcggcgtcccccaacttcttagagggacaagtggcgttcagccacccgagattgagcaataacaggtctgtgatgccct

SEQ ID NO: 48144 - DNA, 120 bp, Homo sapiens
  misc_feature: 801 for SV(W|O) and 18S
atcaacgcaagcttatgacccgcacttactgggaattcctcgttcatggggaataattgcaatccccgatccccatcacgaatggggttcaacgggttacccgcgcctgccggcgtaggg

SEQ ID NO: 48145 - DNA, 120 bp, Homo sapiens
  misc_feature: 800 for SV(W|O) and 18S
ccggccgtccctcttaatcatggcctcagttccgaaaaccaacaaaatagaaccgcggtcctattccattattcctagctgcggtatccaggcggctcgggcctgctttgaacactctaa

SEQ ID NO: 48146 - DNA, 120 bp, Homo sapiens
  misc_feature: 800 for SV(W|O) and 18S
tctaagaagttgggggacgccgaccgctcgggggtcgcgtaactagttagcatgccagagtctcgttcgttatcggaattaaccagacaaatcgctccaccaactaagaacggccatgca

SEQ ID NO: 48147 - DNA, 120 bp, Homo sapiens
  misc_feature: 800 for SV(W|O) and 18S
ccttccttggatgtggtagccgtttctcaggctccctctccggaatcgaaccctgattccccgtcacccgtggtcaccatggtaggcacggcgactaccatcgaaagttgatagggcaga

SEQ ID NO: 48148 - DNA, 120 bp, Homo sapiens
  misc_feature: 800 for SV(W|O) and 18S
gtgggtaatttgcgcgcctgctgccttccttggatgtggtagccgtttctcaggctccctctccggaatcgaaccctgattccccgtcacccgtggtcaccatggtaggcacggcgacta

SEQ ID NO: 48149 - DNA, 120 bp, Homo sapiens
  misc_feature: 800 for SV(W|O) and 18S
ctaagaagttgggggacgccgaccgctcgggggtcgcgtaactagttagcatgccagagtctcgttcgttatcggaattaaccagacaaatcgctccaccaactaagaacggccatgcac

SEQ ID NO: 48150 - DNA, 120 bp, Homo sapiens
  misc_feature: 800 for SV(W|O) and 18S
gcgaagggggtcagcgcccgtcggcatgtattagctctagaattaccacagttatccaagtaggagaggagcgagcgaccaaaggaaccataactgatttaatgagccattcgcagtttc

SEQ ID NO: 48151 - DNA, 120 bp, Homo sapiens
  misc_feature: 799 for SV(W|O) and 18S
tcctttaacgaggatccattggagggcaagtctggtgccagcagccgcggtaattccagctccaatagcgtatattaaagttgctgcagttaaaaagctcgtagttggatcttgggagcg

SEQ ID NO: 48152 - DNA, 120 bp, Homo sapiens
  misc_feature: 799 for SV(W|O) and 18S
cgaatgcccccggccgtccctcttaatcatggcctcagttccgaaaaccaacaaaatagaaccgcggtcctattccattattcctagctgcggtatccaggcggctcgggcctgctttga

SEQ ID NO: 48153 - DNA, 120 bp, Homo sapiens
  misc_feature: 799 for SV(W|O) and 18S
ctctaattttttcaaagtaaacgcttcgggccccgcgggacactcagctaagagcatcgagggggcgccgagaggcaaggggcggggacgggcggtggctcgcctcgcggcggaccgccc

SEQ ID NO: 48154 - DNA, 120 bp, Homo sapiens
  misc_feature: 799 for SV(W|O) and 18S
ccggcaggcgcgggtaacccgttgaaccccattcgtgatggggatcggggattgcaattattccccatgaacgaggaattcccagtaagtgcgggtcataagcttgcgttgattaagtcc

SEQ ID NO: 48155 - DNA, 120 bp, Homo sapiens
  misc_feature: 799 for SV(W|O) and 18S
acgccggcaggcgcgggtaacccgttgaaccccattcgtgatggggatcggggattgcaattattccccatgaacgaggaattcccagtaagtgcgggtcataagcttgcgttgattaag

SEQ ID NO: 48156 - DNA, 120 bp, Homo sapiens
  misc_feature: 799 for SV(W|O) and 18S
ccatgcatgtctaagtacgcacggccggtacagtgaaactgcgaatggctcattaaatcagttatggttcctttggtcgctcgctcctctcctacttggataactgtggtaattctagag

SEQ ID NO: 48157 - DNA, 120 bp, Homo sapiens
  misc_feature: 798 for SV(W|O) and 18S
taacccgttgaaccccattcgtgatggggatcggggattgcaattattccccatgaacgaggaattcccagtaagtgcgggtcataagcttgcgttgattaagtccctgccctttgtaca

SEQ ID NO: 48158 - DNA, 120 bp, Homo sapiens
  misc_feature: 798 for SV(W|O) and 18S
tctggttaattccgataacgaacgagactctggcatgctaactagttacgcgacccccgagcggtcggcgtcccccaacttcttagagggacaagtggcgttcagccacccgagattgag

SEQ ID NO: 48159 - DNA, 120 bp, Homo sapiens
  misc_feature: 798 for SV(W|O) and 18S
tctcgttcgttatcggaattaaccagacaaatcgctccaccaactaagaacggccatgcaccaccacccacggaatcgagaaagagctatcaatctgtcaatcctgtccgtgtccgggcc

SEQ ID NO: 48160 - DNA, 120 bp, Homo sapiens
  misc_feature: 798 for SV(W|O) and 18S
ggcgggtcatgggaataacgccgccgcatcgccggtcggcatcgtttatggtcggaactacgacggtatctgatcgtcttcgaacctccgactttcgttcttgattaatgaaaacattct

SEQ ID NO: 48161 - DNA, 120 bp, Homo sapiens
  misc_feature: 797 for SV(W|O) and 18S
cagcgcccgtcggcatgtattagctctagaattaccacagttatccaagtaggagaggagcgagcgaccaaaggaaccataactgatttaatgagccattcgcagtttcactgtaccggc

SEQ ID NO: 48162 - DNA, 120 bp, Homo sapiens
  misc_feature: 797 for SV(W|O) and 18S
cgcgaagggggtcagcgcccgtcggcatgtattagctctagaattaccacagttatccaagtaggagaggagcgagcgaccaaaggaaccataactgatttaatgagccattcgcagttt

SEQ ID NO: 48163 - DNA, 120 bp, Homo sapiens
  misc_feature: 797 for SV(W|O) and 18S
ccgcgaagggggtcagcgcccgtcggcatgtattagctctagaattaccacagttatccaagtaggagaggagcgagcgaccaaaggaaccataactgatttaatgagccattcgcagtt

SEQ ID NO: 48164 - DNA, 120 bp, Homo sapiens
  misc_feature: 796 for SV(W|O) and 18S
tgccttccttggatgtggtagccgtttctcaggctccctctccggaatcgaaccctgattccccgtcacccgtggtcaccatggtaggcacggcgactaccatcgaaagttgatagggca

SEQ ID NO: 48165 - DNA, 120 bp, Homo sapiens
  misc_feature: 796 for SV(W|O) and 18S
tgaggccctcggatcggccccgccggggtcggcccacggccctggcggagcgctgagaagacggtcgaacttgactatctagaggaagtaaaagtcgtaacaaggtttccgtaggtgaac

SEQ ID NO: 48166 - DNA, 120 bp, Homo sapiens
  misc_feature: 796 for SV(W|O) and 18S
caacgcaagcttatgacccgcacttactgggaattcctcgttcatggggaataattgcaatccccgatccccatcacgaatggggttcaacgggttacccgcgcctgccggcgtagggta

SEQ ID NO: 48167 - DNA, 120 bp, Homo sapiens
  misc_feature: 796 for SV(W|O) and 18S
gtgtagcgcgcgtgcagccccggacatctaagggcatcacagacctgttattgctcaatctcgggtggctgaacgccacttgtccctctaagaagttgggggacgccgaccgctcggggg

SEQ ID NO: 48168 - DNA, 120 bp, Homo sapiens
  misc_feature: 796 for SV(W|O) and 18S
gcgcgggtaacccgttgaaccccattcgtgatggggatcggggattgcaattattccccatgaacgaggaattcccagtaagtgcgggtcataagcttgcgttgattaagtccctgccct

SEQ ID NO: 48169 - DNA, 120 bp, Homo sapiens
  misc_feature: 796 for SV(W|O) and 18S
caagaatttcacctctagcggcgcaatacgaatgcccccggccgtccctcttaatcatggcctcagttccgaaaaccaacaaaatagaaccgcggtcctattccattattcctagctgcg

SEQ ID NO: 48170 - DNA, 120 bp, Homo sapiens
  misc_feature: 795 for SV(W|O) and 18S
ttagtgaggccctcggatcggccccgccggggtcggcccacggccctggcggagcgctgagaagacggtcgaacttgactatctagaggaagtaaaagtcgtaacaaggtttccgtaggt

SEQ ID NO: 48171 - DNA, 120 bp, Homo sapiens
  misc_feature: 795 for SV(W|O) and 18S
ttactttgaaaaaattagagtgttcaaagcaggcccgagccgcctggataccgcagctaggaataatggaataggaccgcggttctattttgttggttttcggaactgaggccatgatta

SEQ ID NO: 48172 - DNA, 120 bp, Homo sapiens
  misc_feature: 795 for SV(W|O) and 18S
taagaagttgggggacgccgaccgctcgggggtcgcgtaactagttagcatgccagagtctcgttcgttatcggaattaaccagacaaatcgctccaccaactaagaacggccatgcacc

SEQ ID NO: 48173 - DNA, 120 bp, Homo sapiens
  misc_feature: 795 for SV(W|O) and 18S
ccagtagcatatgcttgtctcaaagattaagccatgcatgtctaagtacgcacggccggtacagtgaaactgcgaatggctcattaaatcagttatggttcctttggtcgctcgctcctc

SEQ ID NO: 48174 - DNA, 120 bp, Homo sapiens
  misc_feature: 795 for SV(W|O) and 18S
agtagcatatgcttgtctcaaagattaagccatgcatgtctaagtacgcacggccggtacagtgaaactgcgaatggctcattaaatcagttatggttcctttggtcgctcgctcctctc

SEQ ID NO: 48175 - DNA, 120 bp, Homo sapiens
  misc_feature: 795 for SV(W|O) and 18S
cgttcgttatcggaattaaccagacaaatcgctccaccaactaagaacggccatgcaccaccacccacggaatcgagaaagagctatcaatctgtcaatcctgtccgtgtccgggccggg

SEQ ID NO: 48176 - DNA, 120 bp, Homo sapiens
  misc_feature: 795 for SV(W|O) and 18S
cagtgtagcgcgcgtgcagccccggacatctaagggcatcacagacctgttattgctcaatctcgggtggctgaacgccacttgtccctctaagaagttgggggacgccgaccgctcggg

SEQ ID NO: 48177 - DNA, 120 bp, Homo sapiens
  misc_feature: 794 for SV(W|O) and 18S
cccccgcgaagggggtcagcgcccgtcggcatgtattagctctagaattaccacagttatccaagtaggagaggagcgagcgaccaaaggaaccataactgatttaatgagccattcgca

SEQ ID NO: 48178 - DNA, 120 bp, Homo sapiens
  misc_feature: 794 for SV(W|O) and 18S
cccggccgtccctcttaatcatggcctcagttccgaaaaccaacaaaatagaaccgcggtcctattccattattcctagctgcggtatccaggcggctcgggcctgctttgaacactcta

SEQ ID NO: 48179 - DNA, 120 bp, Homo sapiens
  misc_feature: 794 for SV(W|O) and 18S
taagtacgcacggccggtacagtgaaactgcgaatggctcattaaatcagttatggttcctttggtcgctcgctcctctcctacttggataactgtggtaattctagagctaatacatgc

SEQ ID NO: 48180 - DNA, 120 bp, Homo sapiens
  misc_feature: 794 for SV(W|O) and 18S
gaagttgggggacgccgaccgctcgggggtcgcgtaactagttagcatgccagagtctcgttcgttatcggaattaaccagacaaatcgctccaccaactaagaacggccatgcaccacc

SEQ ID NO: 48181 - DNA, 120 bp, Homo sapiens
  misc_feature: 794 for SV(W|O) and 18S
ggtccaagaatttcacctctagcggcgcaatacgaatgcccccggccgtccctcttaatcatggcctcagttccgaaaaccaacaaaatagaaccgcggtcctattccattattcctagc

SEQ ID NO: 48182 - DNA, 120 bp, Homo sapiens
  misc_feature: 794 for SV(W|O) and 18S
aggaattcccagtaagtgcgggtcataagcttgcgttgattaagtccctgccctttgtacacaccgcccgtcgctactaccgattggatggtttagtgaggccctcggatcggccccgcc

SEQ ID NO: 48183 - DNA, 120 bp, Homo sapiens
  misc_feature: 794 for SV(W|O) and 18S
ctgccttccttggatgtggtagccgtttctcaggctccctctccggaatcgaaccctgattccccgtcacccgtggtcaccatggtaggcacggcgactaccatcgaaagttgatagggc

SEQ ID NO: 48184 - DNA, 120 bp, Homo sapiens
  misc_feature: 794 for SV(W|O) and 18S
gatttgtctggttaattccgataacgaacgagactctggcatgctaactagttacgcgacccccgagcggtcggcgtcccccaacttcttagagggacaagtggcgttcagccacccgag

SEQ ID NO: 48185 - DNA, 120 bp, Homo sapiens
  misc_feature: 793 for SV(W|O) and 18S
ccgctcgggggtcgcgtaactagttagcatgccagagtctcgttcgttatcggaattaaccagacaaatcgctccaccaactaagaacggccatgcaccaccacccacggaatcgagaaa

SEQ ID NO: 48186 - DNA, 120 bp, Homo sapiens
  misc_feature: 793 for SV(W|O) and 18S
gaatgcccccggccgtccctcttaatcatggcctcagttccgaaaaccaacaaaatagaaccgcggtcctattccattattcctagctgcggtatccaggcggctcgggcctgctttgaa

SEQ ID NO: 48187 - DNA, 120 bp, Homo sapiens
  misc_feature: 793 for SV(W|O) and 18S
aagtacgcacggccggtacagtgaaactgcgaatggctcattaaatcagttatggttcctttggtcgctcgctcctctcctacttggataactgtggtaattctagagctaatacatgcc

SEQ ID NO: 48188 - DNA, 120 bp, Homo sapiens
  misc_feature: 793 for SV(W|O) and 18S
gcgggtcatgggaataacgccgccgcatcgccggtcggcatcgtttatggtcggaactacgacggtatctgatcgtcttcgaacctccgactttcgttcttgattaatgaaaacattctt

SEQ ID NO: 48189 - DNA, 120 bp, Homo sapiens
  misc_feature: 793 for SV(W|O) and 18S
ctgccagtagcatatgcttgtctcaaagattaagccatgcatgtctaagtacgcacggccggtacagtgaaactgcgaatggctcattaaatcagttatggttcctttggtcgctcgctc

SEQ ID NO: 48190 - DNA, 120 bp, Homo sapiens
  misc_feature: 793 for SV(W|O) and 18S
cggcgggtcatgggaataacgccgccgcatcgccggtcggcatcgtttatggtcggaactacgacggtatctgatcgtcttcgaacctccgactttcgttcttgattaatgaaaacattc

SEQ ID NO: 48191 - DNA, 120 bp, Homo sapiens
  misc_feature: 792 for SV(W|O) and 18S
tggagcgatttgtctggttaattccgataacgaacgagactctggcatgctaactagttacgcgacccccgagcggtcggcgtcccccaacttcttagagggacaagtggcgttcagcca

SEQ ID NO: 48192 - DNA, 120 bp, Homo sapiens
  misc_feature: 792 for SV(W|O) and 18S
tagtgaggccctcggatcggccccgccggggtcggcccacggccctggcggagcgctgagaagacggtcgaacttgactatctagaggaagtaaaagtcgtaacaaggtttccgtaggtg

SEQ ID NO: 48193 - DNA, 120 bp, Homo sapiens
  misc_feature: 792 for SV(W|O) and 18S
agcgatttgtctggttaattccgataacgaacgagactctggcatgctaactagttacgcgacccccgagcggtcggcgtcccccaacttcttagagggacaagtggcgttcagccaccc

SEQ ID NO: 48194 - DNA, 120 bp, Homo sapiens
  misc_feature: 792 for SV(W|O) and 18S
ggggcgccgagaggcaaggggcggggacgggcggtggctcgcctcgcggcggaccgcccgcccgctcccaagatccaactacgagctttttaactgcagcaactttaatatacgctattg

SEQ ID NO: 48195 - DNA, 120 bp, Homo sapiens
  misc_feature: 792 for SV(W|O) and 18S
gaggaattcccagtaagtgcgggtcataagcttgcgttgattaagtccctgccctttgtacacaccgcccgtcgctactaccgattggatggtttagtgaggccctcggatcggccccgc

SEQ ID NO: 48196 - DNA, 120 bp, Homo sapiens
  misc_feature: 792 for SV(W|O) and 18S
cgcgggtaacccgttgaaccccattcgtgatggggatcggggattgcaattattccccatgaacgaggaattcccagtaagtgcgggtcataagcttgcgttgattaagtccctgccctt

SEQ ID NO: 48197 - DNA, 120 bp, Homo sapiens
  misc_feature: 791 for SV(W|O) and 18S
tacgccggcaggcgcgggtaacccgttgaaccccattcgtgatggggatcggggattgcaattattccccatgaacgaggaattcccagtaagtgcgggtcataagcttgcgttgattaa

SEQ ID NO: 48198 - DNA, 120 bp, Homo sapiens
  misc_feature: 791 for SV(W|O) and 18S
tgccagtagcatatgcttgtctcaaagattaagccatgcatgtctaagtacgcacggccggtacagtgaaactgcgaatggctcattaaatcagttatggttcctttggtcgctcgctcc

SEQ ID NO: 48199 - DNA, 120 bp, Homo sapiens
  misc_feature: 791 for SV(W|O) and 18S
tccttggatgtggtagccgtttctcaggctccctctccggaatcgaaccctgattccccgtcacccgtggtcaccatggtaggcacggcgactaccatcgaaagttgatagggcagacgt

SEQ ID NO: 48200 - DNA, 120 bp, Homo sapiens
  misc_feature: 791 for SV(W|O) and 18S
aacccgttgaaccccattcgtgatggggatcggggattgcaattattccccatgaacgaggaattcccagtaagtgcgggtcataagcttgcgttgattaagtccctgccctttgtacac

SEQ ID NO: 48201 - DNA, 120 bp, Homo sapiens
  misc_feature: 791 for SV(W|O) and 18S
cgagactctggcatgctaactagttacgcgacccccgagcggtcggcgtcccccaacttcttagagggacaagtggcgttcagccacccgagattgagcaataacaggtctgtgatgccc

SEQ ID NO: 48202 - DNA, 120 bp, Homo sapiens
  misc_feature: 791 for SV(W|O) and 18S
acgagactctggcatgctaactagttacgcgacccccgagcggtcggcgtcccccaacttcttagagggacaagtggcgttcagccacccgagattgagcaataacaggtctgtgatgcc

SEQ ID NO: 48203 - DNA, 120 bp, Homo sapiens
  misc_feature: 791 for SV(W|O) and 18S
cctggttgatcctgccagtagcatatgcttgtctcaaagattaagccatgcatgtctaagtacgcacggccggtacagtgaaactgcgaatggctcattaaatcagttatggttcctttg

SEQ ID NO: 48204 - DNA, 120 bp, Homo sapiens
  misc_feature: 791 for SV(W|O) and 18S
cctgccagtagcatatgcttgtctcaaagattaagccatgcatgtctaagtacgcacggccggtacagtgaaactgcgaatggctcattaaatcagttatggttcctttggtcgctcgct

SEQ ID NO: 48205 - DNA, 120 bp, Homo sapiens
  misc_feature: 791 for SV(W|O) and 18S
cccgcgaagggggtcagcgcccgtcggcatgtattagctctagaattaccacagttatccaagtaggagaggagcgagcgaccaaaggaaccataactgatttaatgagccattcgcagt

SEQ ID NO: 48206 - DNA, 120 bp, Homo sapiens
  misc_feature: 791 for SV(W|O) and 18S
cagtagcatatgcttgtctcaaagattaagccatgcatgtctaagtacgcacggccggtacagtgaaactgcgaatggctcattaaatcagttatggttcctttggtcgctcgctcctct

SEQ ID NO: 48207 - DNA, 120 bp, Homo sapiens
  misc_feature: 790 for SV(W|O) and 18S
aagcttatgacccgcacttactgggaattcctcgttcatggggaataattgcaatccccgatccccatcacgaatggggttcaacgggttacccgcgcctgccggcgtagggtaggcaca

SEQ ID NO: 48208 - DNA, 120 bp, Homo sapiens
  misc_feature: 790 for SV(W|O) and 18S
agttgggggacgccgaccgctcgggggtcgcgtaactagttagcatgccagagtctcgttcgttatcggaattaaccagacaaatcgctccaccaactaagaacggccatgcaccaccac

SEQ ID NO: 48209 - DNA, 120 bp, Homo sapiens
  misc_feature: 790 for SV(W|O) and 18S
agcgcccgtcggcatgtattagctctagaattaccacagttatccaagtaggagaggagcgagcgaccaaaggaaccataactgatttaatgagccattcgcagtttcactgtaccggcc

SEQ ID NO: 48210 - DNA, 120 bp, Homo sapiens
  misc_feature: 790 for SV(W|O) and 18S
ctggttgatcctgccagtagcatatgcttgtctcaaagattaagccatgcatgtctaagtacgcacggccggtacagtgaaactgcgaatggctcattaaatcagttatggttcctttgg

SEQ ID NO: 48211 - DNA, 120 bp, Homo sapiens
  misc_feature: 790 for SV(W|O) and 18S
ctcgttcgttatcggaattaaccagacaaatcgctccaccaactaagaacggccatgcaccaccacccacggaatcgagaaagagctatcaatctgtcaatcctgtccgtgtccgggccg

SEQ ID NO: 48212 - DNA, 120 bp, Homo sapiens
  misc_feature: 790 for SV(W|O) and 18S
agtacgcacggccggtacagtgaaactgcgaatggctcattaaatcagttatggttcctttggtcgctcgctcctctcctacttggataactgtggtaattctagagctaatacatgccg

SEQ ID NO: 48213 - DNA, 120 bp, Homo sapiens
  misc_feature: 789 for SV(W|O) and 18S
tggttgatcctgccagtagcatatgcttgtctcaaagattaagccatgcatgtctaagtacgcacggccggtacagtgaaactgcgaatggctcattaaatcagttatggttcctttggt

SEQ ID NO: 48214 - DNA, 120 bp, Homo sapiens
  misc_feature: 789 for SV(W|O) and 18S
caagtaggagaggagcgagcgaccaaaggaaccataactgatttaatgagccattcgcagtttcactgtaccggccgtgcgtacttagacatgcatggcttaatctttgagacaagcata

SEQ ID NO: 48215 - DNA, 120 bp, Homo sapiens
  misc_feature: 789 for SV(W|O) and 18S
gactctggcatgctaactagttacgcgacccccgagcggtcggcgtcccccaacttcttagagggacaagtggcgttcagccacccgagattgagcaataacaggtctgtgatgccctta

SEQ ID NO: 48216 - DNA, 120 bp, Homo sapiens
  misc_feature: 789 for SV(W|O) and 18S
gttcgttatcggaattaaccagacaaatcgctccaccaactaagaacggccatgcaccaccacccacggaatcgagaaagagctatcaatctgtcaatcctgtccgtgtccgggccgggt

SEQ ID NO: 48217 - DNA, 120 bp, Homo sapiens
  misc_feature: 789 for SV(W|O) and 18S
agaagttgggggacgccgaccgctcgggggtcgcgtaactagttagcatgccagagtctcgttcgttatcggaattaaccagacaaatcgctccaccaactaagaacggccatgcaccac

SEQ ID NO: 48218 - DNA, 120 bp, Homo sapiens
  misc_feature: 789 for SV(W|O) and 18S
gtccaagaatttcacctctagcggcgcaatacgaatgcccccggccgtccctcttaatcatggcctcagttccgaaaaccaacaaaatagaaccgcggtcctattccattattcctagct

SEQ ID NO: 48219 - DNA, 120 bp, Homo sapiens
  misc_feature: 789 for SV(W|O) and 18S
gccctcggatcggccccgccggggtcggcccacggccctggcggagcgctgagaagacggtcgaacttgactatctagaggaagtaaaagtcgtaacaaggtttccgtaggtgaacctgc

SEQ ID NO: 48220 - DNA, 120 bp, Homo sapiens
  misc_feature: 789 for SV(W|O) and 18S
aagaatttcacctctagcggcgcaatacgaatgcccccggccgtccctcttaatcatggcctcagttccgaaaaccaacaaaatagaaccgcggtcctattccattattcctagctgcgg

SEQ ID NO: 48221 - DNA, 120 bp, Homo sapiens
  misc_feature: 788 for SV(W|O) and 18S
gtgaggccctcggatcggccccgccggggtcggcccacggccctggcggagcgctgagaagacggtcgaacttgactatctagaggaagtaaaagtcgtaacaaggtttccgtaggtgaa

SEQ ID NO: 48222 - DNA, 120 bp, Homo sapiens
  misc_feature: 788 for SV(W|O) and 18S
agtgaggccctcggatcggccccgccggggtcggcccacggccctggcggagcgctgagaagacggtcgaacttgactatctagaggaagtaaaagtcgtaacaaggtttccgtaggtga

SEQ ID NO: 48223 - DNA, 120 bp, Homo sapiens
  misc_feature: 788 for SV(W|O) and 18S
gccagtagcatatgcttgtctcaaagattaagccatgcatgtctaagtacgcacggccggtacagtgaaactgcgaatggctcattaaatcagttatggttcctttggtcgctcgctcct

SEQ ID NO: 48224 - DNA, 120 bp, Homo sapiens
  misc_feature: 788 for SV(W|O) and 18S
agtgtagcgcgcgtgcagccccggacatctaagggcatcacagacctgttattgctcaatctcgggtggctgaacgccacttgtccctctaagaagttgggggacgccgaccgctcgggg

SEQ ID NO: 48225 - DNA, 120 bp, Homo sapiens
  misc_feature: 787 for SV(W|O) and 18S
ttgtctggttaattccgataacgaacgagactctggcatgctaactagttacgcgacccccgagcggtcggcgtcccccaacttcttagagggacaagtggcgttcagccacccgagatt

SEQ ID NO: 48226 - DNA, 120 bp, Homo sapiens
  misc_feature: 787 for SV(W|O) and 18S
ttgatcctgccagtagcatatgcttgtctcaaagattaagccatgcatgtctaagtacgcacggccggtacagtgaaactgcgaatggctcattaaatcagttatggttcctttggtcgc

SEQ ID NO: 48227 - DNA, 120 bp, Homo sapiens
  misc_feature: 787 for SV(W|O) and 18S
tcaacgcaagcttatgacccgcacttactgggaattcctcgttcatggggaataattgcaatccccgatccccatcacgaatggggttcaacgggttacccgcgcctgccggcgtagggt

SEQ ID NO: 48228 - DNA, 120 bp, Homo sapiens
  misc_feature: 787 for SV(W|O) and 18S
accacgggtgacggggaatcagggttcgattccggagagggagcctgagaaacggctaccacatccaaggaaggcagcaggcgcgcaaattacccactcccgacccggggaggtagtgac

SEQ ID NO: 48229 - DNA, 120 bp, Homo sapiens
  misc_feature: 787 for SV(W|O) and 18S
ggttgatcctgccagtagcatatgcttgtctcaaagattaagccatgcatgtctaagtacgcacggccggtacagtgaaactgcgaatggctcattaaatcagttatggttcctttggtc

SEQ ID NO: 48230 - DNA, 120 bp, Homo sapiens
  misc_feature: 787 for SV(W|O) and 18S
gggcgccgagaggcaaggggcggggacgggcggtggctcgcctcgcggcggaccgcccgcccgctcccaagatccaactacgagctttttaactgcagcaactttaatatacgctattgg

SEQ ID NO: 48231 - DNA, 120 bp, Homo sapiens
  misc_feature: 787 for SV(W|O) and 18S
ctttaacgaggatccattggagggcaagtctggtgccagcagccgcggtaattccagctccaatagcgtatattaaagttgctgcagttaaaaagctcgtagttggatcttgggagcggg

SEQ ID NO: 48232 - DNA, 120 bp, Homo sapiens
  misc_feature: 787 for SV(W|O) and 18S
atcctgccagtagcatatgcttgtctcaaagattaagccatgcatgtctaagtacgcacggccggtacagtgaaactgcgaatggctcattaaatcagttatggttcctttggtcgctcg

SEQ ID NO: 48233 - DNA, 120 bp, Homo sapiens
  misc_feature: 786 for SV(W|O) and 18S
tttactttgaaaaaattagagtgttcaaagcaggcccgagccgcctggataccgcagctaggaataatggaataggaccgcggttctattttgttggttttcggaactgaggccatgatt

SEQ ID NO: 48234 - DNA, 120 bp, Homo sapiens
  misc_feature: 786 for SV(W|O) and 18S
tttaacgaggatccattggagggcaagtctggtgccagcagccgcggtaattccagctccaatagcgtatattaaagttgctgcagttaaaaagctcgtagttggatcttgggagcgggc

SEQ ID NO: 48235 - DNA, 120 bp, Homo sapiens
  misc_feature: 786 for SV(W|O) and 18S
tgtctggttaattccgataacgaacgagactctggcatgctaactagttacgcgacccccgagcggtcggcgtcccccaacttcttagagggacaagtggcgttcagccacccgagattg

SEQ ID NO: 48236 - DNA, 120 bp, Homo sapiens
  misc_feature: 786 for SV(W|O) and 18S
gtctggttaattccgataacgaacgagactctggcatgctaactagttacgcgacccccgagcggtcggcgtcccccaacttcttagagggacaagtggcgttcagccacccgagattga

SEQ ID NO: 48237 - DNA, 120 bp, Homo sapiens
  misc_feature: 786 for SV(W|O) and 18S
gaacgagactctggcatgctaactagttacgcgacccccgagcggtcggcgtcccccaacttcttagagggacaagtggcgttcagccacccgagattgagcaataacaggtctgtgatg

SEQ ID NO: 48238 - DNA, 120 bp, Homo sapiens
  misc_feature: 785 for SV(W|O) and 18S
tcttgcgccggtccaagaatttcacctctagcggcgcaatacgaatgcccccggccgtccctcttaatcatggcctcagttccgaaaaccaacaaaatagaaccgcggtcctattccatt

SEQ ID NO: 48239 - DNA, 120 bp, Homo sapiens
  misc_feature: 785 for SV(W|O) and 18S
tacgcacggccggtacagtgaaactgcgaatggctcattaaatcagttatggttcctttggtcgctcgctcctctcctacttggataactgtggtaattctagagctaatacatgccgac

SEQ ID NO: 48240 - DNA, 120 bp, Homo sapiens
  misc_feature: 785 for SV(W|O) and 18S
aacgagactctggcatgctaactagttacgcgacccccgagcggtcggcgtcccccaacttcttagagggacaagtggcgttcagccacccgagattgagcaataacaggtctgtgatgc

SEQ ID NO: 48241 - DNA, 120 bp, Homo sapiens
  misc_feature: 785 for SV(W|O) and 18S
gcaataacaggtctgtgatgcccttagatgtccggggctgcacgcgcgctacactgactggctcagcgtgtgcctaccctacgccggcaggcgcgggtaacccgttgaaccccattcgtg

SEQ ID NO: 48242 - DNA, 120 bp, Homo sapiens
  misc_feature: 785 for SV(W|O) and 18S
cttggatgtggtagccgtttctcaggctccctctccggaatcgaaccctgattccccgtcacccgtggtcaccatggtaggcacggcgactaccatcgaaagttgatagggcagacgttc

SEQ ID NO: 48243 - DNA, 120 bp, Homo sapiens
  misc_feature: 785 for SV(W|O) and 18S
cgggtcatgggaataacgccgccgcatcgccggtcggcatcgtttatggtcggaactacgacggtatctgatcgtcttcgaacctccgactttcgttcttgattaatgaaaacattcttg

SEQ ID NO: 48244 - DNA, 120 bp, Homo sapiens
  misc_feature: 785 for SV(W|O) and 18S
ccttggatgtggtagccgtttctcaggctccctctccggaatcgaaccctgattccccgtcacccgtggtcaccatggtaggcacggcgactaccatcgaaagttgatagggcagacgtt

SEQ ID NO: 48245 - DNA, 120 bp, Homo sapiens
  misc_feature: 784 for SV(W|O) and 18S
ttcgttatcggaattaaccagacaaatcgctccaccaactaagaacggccatgcaccaccacccacggaatcgagaaagagctatcaatctgtcaatcctgtccgtgtccgggccgggtg

SEQ ID NO: 48246 - DNA, 120 bp, Homo sapiens
  misc_feature: 784 for SV(W|O) and 18S
aggagaggagcgagcgaccaaaggaaccataactgatttaatgagccattcgcagtttcactgtaccggccgtgcgtacttagacatgcatggcttaatctttgagacaagcatatgcta

SEQ ID NO: 48247 - DNA, 120 bp, Homo sapiens
  misc_feature: 784 for SV(W|O) and 18S
ggtaacccgttgaaccccattcgtgatggggatcggggattgcaattattccccatgaacgaggaattcccagtaagtgcgggtcataagcttgcgttgattaagtccctgccctttgta

SEQ ID NO: 48248 - DNA, 120 bp, Homo sapiens
  misc_feature: 784 for SV(W|O) and 18S
gtaacccgttgaaccccattcgtgatggggatcggggattgcaattattccccatgaacgaggaattcccagtaagtgcgggtcataagcttgcgttgattaagtccctgccctttgtac

SEQ ID NO: 48249 - DNA, 120 bp, Homo sapiens
  misc_feature: 784 for SV(W|O) and 18S
ccaagaatttcacctctagcggcgcaatacgaatgcccccggccgtccctcttaatcatggcctcagttccgaaaaccaacaaaatagaaccgcggtcctattccattattcctagctgc

SEQ ID NO: 48250 - DNA, 120 bp, Homo sapiens
  misc_feature: 784 for SV(W|O) and 18S
ccccggccgtccctcttaatcatggcctcagttccgaaaaccaacaaaatagaaccgcggtcctattccattattcctagctgcggtatccaggcggctcgggcctgctttgaacactct

SEQ ID NO: 48251 - DNA, 120 bp, Homo sapiens
  misc_feature: 784 for SV(W|O) and 18S
agaatttcacctctagcggcgcaatacgaatgcccccggccgtccctcttaatcatggcctcagttccgaaaaccaacaaaatagaaccgcggtcctattccattattcctagctgcggt

SEQ ID NO: 48252 - DNA, 120 bp, Homo sapiens
  misc_feature: 783 for SV(W|O) and 18S
tccaagaatttcacctctagcggcgcaatacgaatgcccccggccgtccctcttaatcatggcctcagttccgaaaaccaacaaaatagaaccgcggtcctattccattattcctagctg

SEQ ID NO: 48253 - DNA, 120 bp, Homo sapiens
  misc_feature: 783 for SV(W|O) and 18S
caataacaggtctgtgatgcccttagatgtccggggctgcacgcgcgctacactgactggctcagcgtgtgcctaccctacgccggcaggcgcgggtaacccgttgaaccccattcgtga

SEQ ID NO: 48254 - DNA, 120 bp, Homo sapiens
  misc_feature: 783 for SV(W|O) and 18S
ccggtccaagaatttcacctctagcggcgcaatacgaatgcccccggccgtccctcttaatcatggcctcagttccgaaaaccaacaaaatagaaccgcggtcctattccattattccta

SEQ ID NO: 48255 - DNA, 120 bp, Homo sapiens
  misc_feature: 783 for SV(W|O) and 18S
gaatttcacctctagcggcgcaatacgaatgcccccggccgtccctcttaatcatggcctcagttccgaaaaccaacaaaatagaaccgcggtcctattccattattcctagctgcggta

SEQ ID NO: 48256 - DNA, 120 bp, Homo sapiens
  misc_feature: 783 for SV(W|O) and 18S
ggagcgatttgtctggttaattccgataacgaacgagactctggcatgctaactagttacgcgacccccgagcggtcggcgtcccccaacttcttagagggacaagtggcgttcagccac

SEQ ID NO: 48257 - DNA, 120 bp, Homo sapiens
  misc_feature: 783 for SV(W|O) and 18S
gggtaacccgttgaaccccattcgtgatggggatcggggattgcaattattccccatgaacgaggaattcccagtaagtgcgggtcataagcttgcgttgattaagtccctgccctttgt

SEQ ID NO: 48258 - DNA, 120 bp, Homo sapiens
  misc_feature: 783 for SV(W|O) and 18S
gccggtccaagaatttcacctctagcggcgcaatacgaatgcccccggccgtccctcttaatcatggcctcagttccgaaaaccaacaaaatagaaccgcggtcctattccattattcct

SEQ ID NO: 48259 - DNA, 120 bp, Homo sapiens
  misc_feature: 782 for SV(W|O) and 18S
tttgtctggttaattccgataacgaacgagactctggcatgctaactagttacgcgacccccgagcggtcggcgtcccccaacttcttagagggacaagtggcgttcagccacccgagat

SEQ ID NO: 48260 - DNA, 120 bp, Homo sapiens
  misc_feature: 782 for SV(W|O) and 18S
tgatcctgccagtagcatatgcttgtctcaaagattaagccatgcatgtctaagtacgcacggccggtacagtgaaactgcgaatggctcattaaatcagttatggttcctttggtcgct

SEQ ID NO: 48261 - DNA, 120 bp, Homo sapiens
  misc_feature: 782 for SV(W|O) and 18S
gaccgctcgggggtcgcgtaactagttagcatgccagagtctcgttcgttatcggaattaaccagacaaatcgctccaccaactaagaacggccatgcaccaccacccacggaatcgaga

SEQ ID NO: 48262 - DNA, 120 bp, Homo sapiens
  misc_feature: 782 for SV(W|O) and 18S
tcgttcgttatcggaattaaccagacaaatcgctccaccaactaagaacggccatgcaccaccacccacggaatcgagaaagagctatcaatctgtcaatcctgtccgtgtccgggccgg

SEQ ID NO: 48263 - DNA, 120 bp, Homo sapiens
  misc_feature: 782 for SV(W|O) and 18S
cggtccaagaatttcacctctagcggcgcaatacgaatgcccccggccgtccctcttaatcatggcctcagttccgaaaaccaacaaaatagaaccgcggtcctattccattattcctag

SEQ ID NO: 48264 - DNA, 120 bp, Homo sapiens
  misc_feature: 781 for SV(W|O) and 18S
tcgttatcggaattaaccagacaaatcgctccaccaactaagaacggccatgcaccaccacccacggaatcgagaaagagctatcaatctgtcaatcctgtccgtgtccgggccgggtga

SEQ ID NO: 48265 - DNA, 120 bp, Homo sapiens
  misc_feature: 781 for SV(W|O) and 18S
gtcttgcgccggtccaagaatttcacctctagcggcgcaatacgaatgcccccggccgtccctcttaatcatggcctcagttccgaaaaccaacaaaatagaaccgcggtcctattccat

SEQ ID NO: 48266 - DNA, 120 bp, Homo sapiens
  misc_feature: 781 for SV(W|O) and 18S
gtaggagaggagcgagcgaccaaaggaaccataactgatttaatgagccattcgcagtttcactgtaccggccgtgcgtacttagacatgcatggcttaatctttgagacaagcatatgc

SEQ ID NO: 48267 - DNA, 120 bp, Homo sapiens
  misc_feature: 781 for SV(W|O) and 18S
gcggcggaccgcccgcccgctcccaagatccaactacgagctttttaactgcagcaactttaatatacgctattggagctggaattaccgcggctgctggcaccagacttgccctccaat

SEQ ID NO: 48268 - DNA, 120 bp, Homo sapiens
  misc_feature: 781 for SV(W|O) and 18S
ccccgcgaagggggtcagcgcccgtcggcatgtattagctctagaattaccacagttatccaagtaggagaggagcgagcgaccaaaggaaccataactgatttaatgagccattcgcag

SEQ ID NO: 48269 - DNA, 120 bp, Homo sapiens
  misc_feature: 781 for SV(W|O) and 18S
aataacaggtctgtgatgcccttagatgtccggggctgcacgcgcgctacactgactggctcagcgtgtgcctaccctacgccggcaggcgcgggtaacccgttgaaccccattcgtgat

SEQ ID NO: 48270 - DNA, 120 bp, Homo sapiens
  misc_feature: 780 for SV(W|O) and 18S
gtagcatatgcttgtctcaaagattaagccatgcatgtctaagtacgcacggccggtacagtgaaactgcgaatggctcattaaatcagttatggttcctttggtcgctcgctcctctcc

SEQ ID NO: 48271 - DNA, 120 bp, Homo sapiens
  misc_feature: 780 for SV(W|O) and 18S
ccccccgcgaagggggtcagcgcccgtcggcatgtattagctctagaattaccacagttatccaagtaggagaggagcgagcgaccaaaggaaccataactgatttaatgagccattcgc

SEQ ID NO: 48272 - DNA, 120 bp, Homo sapiens
  misc_feature: 780 for SV(W|O) and 18S
gcccgcccgctcccaagatccaactacgagctttttaactgcagcaactttaatatacgctattggagctggaattaccgcggctgctggcaccagacttgccctccaatggatcctcgt

SEQ ID NO: 48273 - DNA, 120 bp, Homo sapiens
  misc_feature: 780 for SV(W|O) and 18S
cgttatcggaattaaccagacaaatcgctccaccaactaagaacggccatgcaccaccacccacggaatcgagaaagagctatcaatctgtcaatcctgtccgtgtccgggccgggtgag

SEQ ID NO: 48274 - DNA, 120 bp, Homo sapiens
  misc_feature: 779 for SV(W|O) and 18S
cgcaagcttatgacccgcacttactgggaattcctcgttcatggggaataattgcaatccccgatccccatcacgaatggggttcaacgggttacccgcgcctgccggcgtagggtaggc

SEQ ID NO: 48275 - DNA, 120 bp, Homo sapiens
  misc_feature: 778 for SV(W|O) and 18S
tgtgtacaaagggcagggacttaatcaacgcaagcttatgacccgcacttactgggaattcctcgttcatggggaataattgcaatccccgatccccatcacgaatggggttcaacgggt

SEQ ID NO: 48276 - DNA, 120 bp, Homo sapiens
  misc_feature: 778 for SV(W|O) and 18S
gtacgcacggccggtacagtgaaactgcgaatggctcattaaatcagttatggttcctttggtcgctcgctcctctcctacttggataactgtggtaattctagagctaatacatgccga

SEQ ID NO: 48277 - DNA, 120 bp, Homo sapiens
  misc_feature: 778 for SV(W|O) and 18S
taggagaggagcgagcgaccaaaggaaccataactgatttaatgagccattcgcagtttcactgtaccggccgtgcgtacttagacatgcatggcttaatctttgagacaagcatatgct

SEQ ID NO: 48278 - DNA, 120 bp, Homo sapiens
  misc_feature: 778 for SV(W|O) and 18S
gttgatcctgccagtagcatatgcttgtctcaaagattaagccatgcatgtctaagtacgcacggccggtacagtgaaactgcgaatggctcattaaatcagttatggttcctttggtcg

SEQ ID NO: 48279 - DNA, 120 bp, Homo sapiens
  misc_feature: 778 for SV(W|O) and 18S
caagcttatgacccgcacttactgggaattcctcgttcatggggaataattgcaatccccgatccccatcacgaatggggttcaacgggttacccgcgcctgccggcgtagggtaggcac

SEQ ID NO: 48280 - DNA, 120 bp, Homo sapiens
  misc_feature: 777 for SV(W|O) and 18S
cgtcttgcgccggtccaagaatttcacctctagcggcgcaatacgaatgcccccggccgtccctcttaatcatggcctcagttccgaaaaccaacaaaatagaaccgcggtcctattcca

SEQ ID NO: 48281 - DNA, 120 bp, Homo sapiens
  misc_feature: 777 for SV(W|O) and 18S
ccgaccgctcgggggtcgcgtaactagttagcatgccagagtctcgttcgttatcggaattaaccagacaaatcgctccaccaactaagaacggccatgcaccaccacccacggaatcga

SEQ ID NO: 48282 - DNA, 120 bp, Homo sapiens
  misc_feature: 777 for SV(W|O) and 18S
cttgcgccggtccaagaatttcacctctagcggcgcaatacgaatgcccccggccgtccctcttaatcatggcctcagttccgaaaaccaacaaaatagaaccgcggtcctattccatta

SEQ ID NO: 48283 - DNA, 120 bp, Homo sapiens
  misc_feature: 777 for SV(W|O) and 18S
gatcctgccagtagcatatgcttgtctcaaagattaagccatgcatgtctaagtacgcacggccggtacagtgaaactgcgaatggctcattaaatcagttatggttcctttggtcgctc

SEQ ID NO: 48284 - DNA, 120 bp, Homo sapiens
  misc_feature: 777 for SV(W|O) and 18S
aacgcaagcttatgacccgcacttactgggaattcctcgttcatggggaataattgcaatccccgatccccatcacgaatggggttcaacgggttacccgcgcctgccggcgtagggtag

SEQ ID NO: 48285 - DNA, 120 bp, Homo sapiens
  misc_feature: 777 for SV(W|O) and 18S
cgaacgagactctggcatgctaactagttacgcgacccccgagcggtcggcgtcccccaacttcttagagggacaagtggcgttcagccacccgagattgagcaataacaggtctgtgat

SEQ ID NO: 48286 - DNA, 120 bp, Homo sapiens
  misc_feature: 777 for SV(W|O) and 18S
aacgaggatccattggagggcaagtctggtgccagcagccgcggtaattccagctccaatagcgtatattaaagttgctgcagttaaaaagctcgtagttggatcttgggagcgggcggg

SEQ ID NO: 48287 - DNA, 120 bp, Homo sapiens
  misc_feature: 777 for SV(W|O) and 18S
aagtaggagaggagcgagcgaccaaaggaaccataactgatttaatgagccattcgcagtttcactgtaccggccgtgcgtacttagacatgcatggcttaatctttgagacaagcatat

SEQ ID NO: 48288 - DNA, 120 bp, Homo sapiens
  misc_feature: 776 for SV(W|O) and 18S
accgctcgggggtcgcgtaactagttagcatgccagagtctcgttcgttatcggaattaaccagacaaatcgctccaccaactaagaacggccatgcaccaccacccacggaatcgagaa

SEQ ID NO: 48289 - DNA, 120 bp, Homo sapiens
  misc_feature: 776 for SV(W|O) and 18S
ttaacgaggatccattggagggcaagtctggtgccagcagccgcggtaattccagctccaatagcgtatattaaagttgctgcagttaaaaagctcgtagttggatcttgggagcgggcg

SEQ ID NO: 48290 - DNA, 120 bp, Homo sapiens
  misc_feature: 776 for SV(W|O) and 18S
gcaagcttatgacccgcacttactgggaattcctcgttcatggggaataattgcaatccccgatccccatcacgaatggggttcaacgggttacccgcgcctgccggcgtagggtaggca

SEQ ID NO: 48291 - DNA, 120 bp, Homo sapiens
  misc_feature: 776 for SV(W|O) and 18S
gatcggccccgccggggtcggcccacggccctggcggagcgctgagaagacggtcgaacttgactatctagaggaagtaaaagtcgtaacaaggtttccgtaggtgaacctgcggaagga

SEQ ID NO: 48292 - DNA, 120 bp, Homo sapiens
  misc_feature: 776 for SV(W|O) and 18S
tcctgccagtagcatatgcttgtctcaaagattaagccatgcatgtctaagtacgcacggccggtacagtgaaactgcgaatggctcattaaatcagttatggttcctttggtcgctcgc

SEQ ID NO: 48293 - DNA, 120 bp, Homo sapiens
  misc_feature: 776 for SV(W|O) and 18S
gttatcggaattaaccagacaaatcgctccaccaactaagaacggccatgcaccaccacccacggaatcgagaaagagctatcaatctgtcaatcctgtccgtgtccgggccgggtgagg

SEQ ID NO: 48294 - DNA, 120 bp, Homo sapiens
  misc_feature: 776 for SV(W|O) and 18S
ctggttaattccgataacgaacgagactctggcatgctaactagttacgcgacccccgagcggtcggcgtcccccaacttcttagagggacaagtggcgttcagccacccgagattgagc

SEQ ID NO: 48295 - DNA, 120 bp, Homo sapiens
  misc_feature: 776 for SV(W|O) and 18S
gcgggtaacccgttgaaccccattcgtgatggggatcggggattgcaattattccccatgaacgaggaattcccagtaagtgcgggtcataagcttgcgttgattaagtccctgcccttt

SEQ ID NO: 48296 - DNA, 120 bp, Homo sapiens
  misc_feature: 776 for SV(W|O) and 18S
gccgaccgctcgggggtcgcgtaactagttagcatgccagagtctcgttcgttatcggaattaaccagacaaatcgctccaccaactaagaacggccatgcaccaccacccacggaatcg

SEQ ID NO: 48297 - DNA, 120 bp, Homo sapiens
  misc_feature: 776 for SV(W|O) and 18S
acctggttgatcctgccagtagcatatgcttgtctcaaagattaagccatgcatgtctaagtacgcacggccggtacagtgaaactgcgaatggctcattaaatcagttatggttccttt

SEQ ID NO: 48298 - DNA, 120 bp, Homo sapiens
  misc_feature: 775 for SV(W|O) and 18S
aatgcccccggccgtccctcttaatcatggcctcagttccgaaaaccaacaaaatagaaccgcggtcctattccattattcctagctgcggtatccaggcggctcgggcctgctttgaac

SEQ ID NO: 48299 - DNA, 120 bp, Homo sapiens
  misc_feature: 775 for SV(W|O) and 18S
ggccgatcgcacgccccccgtggcggcgacgacccattcgaacgtctgccctatcaactttcgatggtagtcgccgtgcctaccatggtgaccacgggtgacggggaatcagggttcgat

SEQ ID NO: 48300 - DNA, 120 bp, Homo sapiens
  misc_feature: 775 for SV(W|O) and 18S
cgaccgctcgggggtcgcgtaactagttagcatgccagagtctcgttcgttatcggaattaaccagacaaatcgctccaccaactaagaacggccatgcaccaccacccacggaatcgag

SEQ ID NO: 48301 - DNA, 120 bp, Homo sapiens
  misc_feature: 775 for SV(W|O) and 18S
cgggtaacccgttgaaccccattcgtgatggggatcggggattgcaattattccccatgaacgaggaattcccagtaagtgcgggtcataagcttgcgttgattaagtccctgccctttg

SEQ ID NO: 48302 - DNA, 120 bp, Homo sapiens
  misc_feature: 775 for SV(W|O) and 18S
cggggccgatccgagggcctcactaaaccatccaatcggtagtagcgacgggcggtgtgtacaaagggcagggacttaatcaacgcaagcttatgacccgcacttactgggaattcctcg

SEQ ID NO: 48303 - DNA, 120 bp, Homo sapiens
  misc_feature: 775 for SV(W|O) and 18S
ccggacatctaagggcatcacagacctgttattgctcaatctcgggtggctgaacgccacttgtccctctaagaagttgggggacgccgaccgctcgggggtcgcgtaactagttagcat

SEQ ID NO: 48304 - DNA, 120 bp, Homo sapiens
  misc_feature: 775 for SV(W|O) and 18S
cacagacctgttattgctcaatctcgggtggctgaacgccacttgtccctctaagaagttgggggacgccgaccgctcgggggtcgcgtaactagttagcatgccagagtctcgttcgtt

SEQ ID NO: 48305 - DNA, 120 bp, Homo sapiens
  misc_feature: 774 for SV(W|O) and 18S
tttcacctctagcggcgcaatacgaatgcccccggccgtccctcttaatcatggcctcagttccgaaaaccaacaaaatagaaccgcggtcctattccattattcctagctgcggtatcc

SEQ ID NO: 48306 - DNA, 120 bp, Homo sapiens
  misc_feature: 774 for SV(W|O) and 18S
cgcggcggaccgcccgcccgctcccaagatccaactacgagctttttaactgcagcaactttaatatacgctattggagctggaattaccgcggctgctggcaccagacttgccctccaa

SEQ ID NO: 48307 - DNA, 120 bp, Homo sapiens
  misc_feature: 774 for SV(W|O) and 18S
cccggacatctaagggcatcacagacctgttattgctcaatctcgggtggctgaacgccacttgtccctctaagaagttgggggacgccgaccgctcgggggtcgcgtaactagttagca

SEQ ID NO: 48308 - DNA, 120 bp, Homo sapiens
  misc_feature: 774 for SV(W|O) and 18S
taacgaggatccattggagggcaagtctggtgccagcagccgcggtaattccagctccaatagcgtatattaaagttgctgcagttaaaaagctcgtagttggatcttgggagcgggcgg

SEQ ID NO: 48309 - DNA, 120 bp, Homo sapiens
  misc_feature: 774 for SV(W|O) and 18S
acagacctgttattgctcaatctcgggtggctgaacgccacttgtccctctaagaagttgggggacgccgaccgctcgggggtcgcgtaactagttagcatgccagagtctcgttcgtta

SEQ ID NO: 48310 - DNA, 120 bp, Homo sapiens
  misc_feature: 774 for SV(W|O) and 18S
gggggacgccgaccgctcgggggtcgcgtaactagttagcatgccagagtctcgttcgttatcggaattaaccagacaaatcgctccaccaactaagaacggccatgcaccaccacccac

SEQ ID NO: 48311 - DNA, 120 bp, Homo sapiens
  misc_feature: 774 for SV(W|O) and 18S
actctaattttttcaaagtaaacgcttcgggccccgcgggacactcagctaagagcatcgagggggcgccgagaggcaaggggcggggacgggcggtggctcgcctcgcggcggaccgcc

SEQ ID NO: 48312 - DNA, 120 bp, Homo sapiens
  misc_feature: 774 for SV(W|O) and 18S
gcgcaatacgaatgcccccggccgtccctcttaatcatggcctcagttccgaaaaccaacaaaatagaaccgcggtcctattccattattcctagctgcggtatccaggcggctcgggcc

SEQ ID NO: 48313 - DNA, 120 bp, Homo sapiens
  misc_feature: 774 for SV(W|O) and 18S
gcgcccgtcggcatgtattagctctagaattaccacagttatccaagtaggagaggagcgagcgaccaaaggaaccataactgatttaatgagccattcgcagtttcactgtaccggccg

SEQ ID NO: 48314 - DNA, 120 bp, Homo sapiens
  misc_feature: 774 for SV(W|O) and 18S
atcggccccgccggggtcggcccacggccctggcggagcgctgagaagacggtcgaacttgactatctagaggaagtaaaagtcgtaacaaggtttccgtaggtgaacctgcggaaggat

SEQ ID NO: 48315 - DNA, 120 bp, Homo sapiens
  misc_feature: 774 for SV(W|O) and 18S
aatttcacctctagcggcgcaatacgaatgcccccggccgtccctcttaatcatggcctcagttccgaaaaccaacaaaatagaaccgcggtcctattccattattcctagctgcggtat

SEQ ID NO: 48316 - DNA, 120 bp, Homo sapiens
  misc_feature: 773 for SV(W|O) and 18S
tattgctcaatctcgggtggctgaacgccacttgtccctctaagaagttgggggacgccgaccgctcgggggtcgcgtaactagttagcatgccagagtctcgttcgttatcggaattaa

SEQ ID NO: 48317 - DNA, 120 bp, Homo sapiens
  misc_feature: 773 for SV(W|O) and 18S
tcgcggcggaccgcccgcccgctcccaagatccaactacgagctttttaactgcagcaactttaatatacgctattggagctggaattaccgcggctgctggcaccagacttgccctcca

SEQ ID NO: 48318 - DNA, 120 bp, Homo sapiens
  misc_feature: 773 for SV(W|O) and 18S
ggaccgcccgcccgctcccaagatccaactacgagctttttaactgcagcaactttaatatacgctattggagctggaattaccgcggctgctggcaccagacttgccctccaatggatc

SEQ ID NO: 48319 - DNA, 120 bp, Homo sapiens
  misc_feature: 773 for SV(W|O) and 18S
gcgatttgtctggttaattccgataacgaacgagactctggcatgctaactagttacgcgacccccgagcggtcggcgtcccccaacttcttagagggacaagtggcgttcagccacccg

SEQ ID NO: 48320 - DNA, 120 bp, Homo sapiens
  misc_feature: 773 for SV(W|O) and 18S
cggcggaccgcccgcccgctcccaagatccaactacgagctttttaactgcagcaactttaatatacgctattggagctggaattaccgcggctgctggcaccagacttgccctccaatg

SEQ ID NO: 48321 - DNA, 120 bp, Homo sapiens
  misc_feature: 773 for SV(W|O) and 18S
agtaggagaggagcgagcgaccaaaggaaccataactgatttaatgagccattcgcagtttcactgtaccggccgtgcgtacttagacatgcatggcttaatctttgagacaagcatatg

SEQ ID NO: 48322 - DNA, 120 bp, Homo sapiens
  misc_feature: 772 for SV(W|O) and 18S
gccgatcgcacgccccccgtggcggcgacgacccattcgaacgtctgccctatcaactttcgatggtagtcgccgtgcctaccatggtgaccacgggtgacggggaatcagggttcgatt

SEQ ID NO: 48323 - DNA, 120 bp, Homo sapiens
  misc_feature: 772 for SV(W|O) and 18S
gatgtggtagccgtttctcaggctccctctccggaatcgaaccctgattccccgtcacccgtggtcaccatggtaggcacggcgactaccatcgaaagttgatagggcagacgttcgaat

SEQ ID NO: 48324 - DNA, 120 bp, Homo sapiens
  misc_feature: 772 for SV(W|O) and 18S
cccgagccgcctggataccgcagctaggaataatggaataggaccgcggttctattttgttggttttcggaactgaggccatgattaagagggacggccgggggcattcgtattgcgccg

SEQ ID NO: 48325 - DNA, 120 bp, Homo sapiens
  misc_feature: 771 for SV(W|O) and 18S
ttattgctcaatctcgggtggctgaacgccacttgtccctctaagaagttgggggacgccgaccgctcgggggtcgcgtaactagttagcatgccagagtctcgttcgttatcggaatta

SEQ ID NO: 48326 - DNA, 120 bp, Homo sapiens
  misc_feature: 771 for SV(W|O) and 18S
tgggggacgccgaccgctcgggggtcgcgtaactagttagcatgccagagtctcgttcgttatcggaattaaccagacaaatcgctccaccaactaagaacggccatgcaccaccaccca

SEQ ID NO: 48327 - DNA, 120 bp, Homo sapiens
  misc_feature: 771 for SV(W|O) and 18S
ggcgccgagaggcaaggggcggggacgggcggtggctcgcctcgcggcggaccgcccgcccgctcccaagatccaactacgagctttttaactgcagcaactttaatatacgctattgga

SEQ ID NO: 48328 - DNA, 120 bp, Homo sapiens
  misc_feature: 771 for SV(W|O) and 18S
cggaccgcccgcccgctcccaagatccaactacgagctttttaactgcagcaactttaatatacgctattggagctggaattaccgcggctgctggcaccagacttgccctccaatggat

SEQ ID NO: 48329 - DNA, 120 bp, Homo sapiens
  misc_feature: 771 for SV(W|O) and 18S
ccctcggatcggccccgccggggtcggcccacggccctggcggagcgctgagaagacggtcgaacttgactatctagaggaagtaaaagtcgtaacaaggtttccgtaggtgaacctgcg

SEQ ID NO: 48330 - DNA, 120 bp, Homo sapiens
  misc_feature: 770 for SV(W|O) and 18S
gttaattccgataacgaacgagactctggcatgctaactagttacgcgacccccgagcggtcggcgtcccccaacttcttagagggacaagtggcgttcagccacccgagattgagcaat

SEQ ID NO: 48331 - DNA, 120 bp, Homo sapiens
  misc_feature: 770 for SV(W|O) and 18S
ctcgcggcggaccgcccgcccgctcccaagatccaactacgagctttttaactgcagcaactttaatatacgctattggagctggaattaccgcggctgctggcaccagacttgccctcc

SEQ ID NO: 48332 - DNA, 120 bp, Homo sapiens
  misc_feature: 770 for SV(W|O) and 18S
gcgccggtccaagaatttcacctctagcggcgcaatacgaatgcccccggccgtccctcttaatcatggcctcagttccgaaaaccaacaaaatagaaccgcggtcctattccattattc

SEQ ID NO: 48333 - DNA, 120 bp, Homo sapiens
  misc_feature: 770 for SV(W|O) and 18S
acgcaagcttatgacccgcacttactgggaattcctcgttcatggggaataattgcaatccccgatccccatcacgaatggggttcaacgggttacccgcgcctgccggcgtagggtagg

SEQ ID NO: 48334 - DNA, 120 bp, Homo sapiens
  misc_feature: 769 for SV(W|O) and 18S
ttcacctctagcggcgcaatacgaatgcccccggccgtccctcttaatcatggcctcagttccgaaaaccaacaaaatagaaccgcggtcctattccattattcctagctgcggtatcca

SEQ ID NO: 48335 - DNA, 120 bp, Homo sapiens
  misc_feature: 769 for SV(W|O) and 18S
tacctggttgatcctgccagtagcatatgcttgtctcaaagattaagccatgcatgtctaagtacgcacggccggtacagtgaaactgcgaatggctcattaaatcagttatggttcctt

SEQ ID NO: 48336 - DNA, 120 bp, Homo sapiens
  misc_feature: 769 for SV(W|O) and 18S
ggccccgccggggtcggcccacggccctggcggagcgctgagaagacggtcgaacttgactatctagaggaagtaaaagtcgtaacaaggtttccgtaggtgaacctgcggaaggatcat

SEQ ID NO: 48337 - DNA, 120 bp, Homo sapiens
  misc_feature: 769 for SV(W|O) and 18S
gccccgccggggtcggcccacggccctggcggagcgctgagaagacggtcgaacttgactatctagaggaagtaaaagtcgtaacaaggtttccgtaggtgaacctgcggaaggatcatt

SEQ ID NO: 48338 - DNA, 120 bp, Homo sapiens
  misc_feature: 769 for SV(W|O) and 18S
atttcacctctagcggcgcaatacgaatgcccccggccgtccctcttaatcatggcctcagttccgaaaaccaacaaaatagaaccgcggtcctattccattattcctagctgcggtatc

SEQ ID NO: 48339 - DNA, 120 bp, Homo sapiens
  misc_feature: 769 for SV(W|O) and 18S
cccccggccgtccctcttaatcatggcctcagttccgaaaaccaacaaaatagaaccgcggtcctattccattattcctagctgcggtatccaggcggctcgggcctgctttgaacactc

SEQ ID NO: 48340 - DNA, 120 bp, Homo sapiens
  misc_feature: 768 for SV(W|O) and 18S
ttggatgtggtagccgtttctcaggctccctctccggaatcgaaccctgattccccgtcacccgtggtcaccatggtaggcacggcgactaccatcgaaagttgatagggcagacgttcg

SEQ ID NO: 48341 - DNA, 120 bp, Homo sapiens
  misc_feature: 768 for SV(W|O) and 18S
acgaacgagactctggcatgctaactagttacgcgacccccgagcggtcggcgtcccccaacttcttagagggacaagtggcgttcagccacccgagattgagcaataacaggtctgtga

SEQ ID NO: 48342 - DNA, 120 bp, Homo sapiens
  misc_feature: 768 for SV(W|O) and 18S
agcttatgacccgcacttactgggaattcctcgttcatggggaataattgcaatccccgatccccatcacgaatggggttcaacgggttacccgcgcctgccggcgtagggtaggcacac

SEQ ID NO: 48343 - DNA, 120 bp, Homo sapiens
  misc_feature: 768 for SV(W|O) and 18S
ggcgcaatacgaatgcccccggccgtccctcttaatcatggcctcagttccgaaaaccaacaaaatagaaccgcggtcctattccattattcctagctgcggtatccaggcggctcgggc

SEQ ID NO: 48344 - DNA, 120 bp, Homo sapiens
  misc_feature: 768 for SV(W|O) and 18S
ccgcccgcccgctcccaagatccaactacgagctttttaactgcagcaactttaatatacgctattggagctggaattaccgcggctgctggcaccagacttgccctccaatggatcctc

SEQ ID NO: 48345 - DNA, 120 bp, Homo sapiens
  misc_feature: 767 for SV(W|O) and 18S
tgcgccggtccaagaatttcacctctagcggcgcaatacgaatgcccccggccgtccctcttaatcatggcctcagttccgaaaaccaacaaaatagaaccgcggtcctattccattatt

SEQ ID NO: 48346 - DNA, 120 bp, Homo sapiens
  misc_feature: 767 for SV(W|O) and 18S
gttgggggacgccgaccgctcgggggtcgcgtaactagttagcatgccagagtctcgttcgttatcggaattaaccagacaaatcgctccaccaactaagaacggccatgcaccaccacc

SEQ ID NO: 48347 - DNA, 120 bp, Homo sapiens
  misc_feature: 767 for SV(W|O) and 18S
ggtagtagcgacgggcggtgtgtacaaagggcagggacttaatcaacgcaagcttatgacccgcacttactgggaattcctcgttcatggggaataattgcaatccccgatccccatcac

SEQ ID NO: 48348 - DNA, 120 bp, Homo sapiens
  misc_feature: 767 for SV(W|O) and 18S
ggcttaatttgactcaacacgggaaacctcacccggcccggacacggacaggattgacagattgatagctctttctcgattccgtgggtggtggtgcatggccgttcttagttggtggag

SEQ ID NO: 48349 - DNA, 120 bp, Homo sapiens
  misc_feature: 767 for SV(W|O) and 18S
cactctaattttttcaaagtaaacgcttcgggccccgcgggacactcagctaagagcatcgagggggcgccgagaggcaaggggcggggacgggcggtggctcgcctcgcggcggaccgc

SEQ ID NO: 48350 - DNA, 120 bp, Homo sapiens
  misc_feature: 767 for SV(W|O) and 18S
atgtggtagccgtttctcaggctccctctccggaatcgaaccctgattccccgtcacccgtggtcaccatggtaggcacggcgactaccatcgaaagttgatagggcagacgttcgaatg

SEQ ID NO: 48351 - DNA, 120 bp, Homo sapiens
  misc_feature: 766 for SV(W|O) and 18S
tggttaattccgataacgaacgagactctggcatgctaactagttacgcgacccccgagcggtcggcgtcccccaacttcttagagggacaagtggcgttcagccacccgagattgagca

SEQ ID NO: 48352 - DNA, 120 bp, Homo sapiens
  misc_feature: 766 for SV(W|O) and 18S
cggtagtagcgacgggcggtgtgtacaaagggcagggacttaatcaacgcaagcttatgacccgcacttactgggaattcctcgttcatggggaataattgcaatccccgatccccatca

SEQ ID NO: 48353 - DNA, 120 bp, Homo sapiens
  misc_feature: 766 for SV(W|O) and 18S
gcggaccgcccgcccgctcccaagatccaactacgagctttttaactgcagcaactttaatatacgctattggagctggaattaccgcggctgctggcaccagacttgccctccaatgga

SEQ ID NO: 48354 - DNA, 120 bp, Homo sapiens
  misc_feature: 766 for SV(W|O) and 18S
gcttaatttgactcaacacgggaaacctcacccggcccggacacggacaggattgacagattgatagctctttctcgattccgtgggtggtggtgcatggccgttcttagttggtggagc

SEQ ID NO: 48355 - DNA, 120 bp, Homo sapiens
  misc_feature: 766 for SV(W|O) and 18S
acgcacggccggtacagtgaaactgcgaatggctcattaaatcagttatggttcctttggtcgctcgctcctctcctacttggataactgtggtaattctagagctaatacatgccgacg

SEQ ID NO: 48356 - DNA, 120 bp, Homo sapiens
  misc_feature: 765 for SV(W|O) and 18S
ttgggggacgccgaccgctcgggggtcgcgtaactagttagcatgccagagtctcgttcgttatcggaattaaccagacaaatcgctccaccaactaagaacggccatgcaccaccaccc

SEQ ID NO: 48357 - DNA, 120 bp, Homo sapiens
  misc_feature: 765 for SV(W|O) and 18S
cggccccgccggggtcggcccacggccctggcggagcgctgagaagacggtcgaacttgactatctagaggaagtaaaagtcgtaacaaggtttccgtaggtgaacctgcggaaggatca

SEQ ID NO: 48358 - DNA, 120 bp, Homo sapiens
  misc_feature: 765 for SV(W|O) and 18S
tctggcatgctaactagttacgcgacccccgagcggtcggcgtcccccaacttcttagagggacaagtggcgttcagccacccgagattgagcaataacaggtctgtgatgcccttagat

SEQ ID NO: 48359 - DNA, 120 bp, Homo sapiens
  misc_feature: 765 for SV(W|O) and 18S
tcacctctagcggcgcaatacgaatgcccccggccgtccctcttaatcatggcctcagttccgaaaaccaacaaaatagaaccgcggtcctattccattattcctagctgcggtatccag

SEQ ID NO: 48360 - DNA, 120 bp, Homo sapiens
  misc_feature: 765 for SV(W|O) and 18S
ggatcggccccgccggggtcggcccacggccctggcggagcgctgagaagacggtcgaacttgactatctagaggaagtaaaagtcgtaacaaggtttccgtaggtgaacctgcggaagg

SEQ ID NO: 48361 - DNA, 120 bp, Homo sapiens
  misc_feature: 765 for SV(W|O) and 18S
gaccgcccgcccgctcccaagatccaactacgagctttttaactgcagcaactttaatatacgctattggagctggaattaccgcggctgctggcaccagacttgccctccaatggatcc

SEQ ID NO: 48362 - DNA, 120 bp, Homo sapiens
  misc_feature: 765 for SV(W|O) and 18S
accgcccgcccgctcccaagatccaactacgagctttttaactgcagcaactttaatatacgctattggagctggaattaccgcggctgctggcaccagacttgccctccaatggatcct

SEQ ID NO: 48363 - DNA, 120 bp, Homo sapiens
  misc_feature: 764 for SV(W|O) and 18S
ggttaattccgataacgaacgagactctggcatgctaactagttacgcgacccccgagcggtcggcgtcccccaacttcttagagggacaagtggcgttcagccacccgagattgagcaa

SEQ ID NO: 48364 - DNA, 120 bp, Homo sapiens
  misc_feature: 764 for SV(W|O) and 18S
ttgcgccggtccaagaatttcacctctagcggcgcaatacgaatgcccccggccgtccctcttaatcatggcctcagttccgaaaaccaacaaaatagaaccgcggtcctattccattat

SEQ ID NO: 48365 - DNA, 120 bp, Homo sapiens
  misc_feature: 764 for SV(W|O) and 18S
tgtggtagccgtttctcaggctccctctccggaatcgaaccctgattccccgtcacccgtggtcaccatggtaggcacggcgactaccatcgaaagttgatagggcagacgttcgaatgg

SEQ ID NO: 48366 - DNA, 120 bp, Homo sapiens
  misc_feature: 764 for SV(W|O) and 18S
tagtagcgacgggcggtgtgtacaaagggcagggacttaatcaacgcaagcttatgacccgcacttactgggaattcctcgttcatggggaataattgcaatccccgatccccatcacga

SEQ ID NO: 48367 - DNA, 120 bp, Homo sapiens
  misc_feature: 764 for SV(W|O) and 18S
cgatttgtctggttaattccgataacgaacgagactctggcatgctaactagttacgcgacccccgagcggtcggcgtcccccaacttcttagagggacaagtggcgttcagccacccga

SEQ ID NO: 48368 - DNA, 120 bp, Homo sapiens
  misc_feature: 764 for SV(W|O) and 18S
ggggacgccgaccgctcgggggtcgcgtaactagttagcatgccagagtctcgttcgttatcggaattaaccagacaaatcgctccaccaactaagaacggccatgcaccaccacccacg

SEQ ID NO: 48369 - DNA, 120 bp, Homo sapiens
  misc_feature: 764 for SV(W|O) and 18S
ggcggaccgcccgcccgctcccaagatccaactacgagctttttaactgcagcaactttaatatacgctattggagctggaattaccgcggctgctggcaccagacttgccctccaatgg

SEQ ID NO: 48370 - DNA, 120 bp, Homo sapiens
  misc_feature: 764 for SV(W|O) and 18S
cgccggtccaagaatttcacctctagcggcgcaatacgaatgcccccggccgtccctcttaatcatggcctcagttccgaaaaccaacaaaatagaaccgcggtcctattccattattcc

SEQ ID NO: 48371 - DNA, 120 bp, Homo sapiens
  misc_feature: 764 for SV(W|O) and 18S
gcgccgagaggcaaggggcggggacgggcggtggctcgcctcgcggcggaccgcccgcccgctcccaagatccaactacgagctttttaactgcagcaactttaatatacgctattggag

SEQ ID NO: 48372 - DNA, 120 bp, Homo sapiens
  misc_feature: 764 for SV(W|O) and 18S
cagacctgttattgctcaatctcgggtggctgaacgccacttgtccctctaagaagttgggggacgccgaccgctcgggggtcgcgtaactagttagcatgccagagtctcgttcgttat

SEQ ID NO: 48373 - DNA, 120 bp, Homo sapiens
  misc_feature: 763 for SV(W|O) and 18S
catgggaataacgccgccgcatcgccggtcggcatcgtttatggtcggaactacgacggtatctgatcgtcttcgaacctccgactttcgttcttgattaatgaaaacattcttggcaaa

SEQ ID NO: 48374 - DNA, 120 bp, Homo sapiens
  misc_feature: 763 for SV(W|O) and 18S
cggcccacggccctggcggagcgctgagaagacggtcgaacttgactatctagaggaagtaaaagtcgtaacaaggtttccgtaggtgaacctgcggaaggatcattaacggagcccgga

SEQ ID NO: 48375 - DNA, 120 bp, Homo sapiens
  misc_feature: 763 for SV(W|O) and 18S
tatggttgcaaagctgaaacttaaaggaattgacggaagggcaccaccaggagtggagcctgcggcttaatttgactcaacacgggaaacctcacccggcccggacacggacaggattga

SEQ ID NO: 48376 - DNA, 120 bp, Homo sapiens
  misc_feature: 763 for SV(W|O) and 18S
ccccgccggggtcggcccacggccctggcggagcgctgagaagacggtcgaacttgactatctagaggaagtaaaagtcgtaacaaggtttccgtaggtgaacctgcggaaggatcatta

SEQ ID NO: 48377 - DNA, 120 bp, Homo sapiens
  misc_feature: 763 for SV(W|O) and 18S
gttattgctcaatctcgggtggctgaacgccacttgtccctctaagaagttgggggacgccgaccgctcgggggtcgcgtaactagttagcatgccagagtctcgttcgttatcggaatt

SEQ ID NO: 48378 - DNA, 120 bp, Homo sapiens
  misc_feature: 763 for SV(W|O) and 18S
gggtcatgggaataacgccgccgcatcgccggtcggcatcgtttatggtcggaactacgacggtatctgatcgtcttcgaacctccgactttcgttcttgattaatgaaaacattcttgg

SEQ ID NO: 48379 - DNA, 120 bp, Homo sapiens
  misc_feature: 763 for SV(W|O) and 18S
ggggccgatccgagggcctcactaaaccatccaatcggtagtagcgacgggcggtgtgtacaaagggcagggacttaatcaacgcaagcttatgacccgcacttactgggaattcctcgt

SEQ ID NO: 48380 - DNA, 120 bp, Homo sapiens
  misc_feature: 763 for SV(W|O) and 18S
ccccggacatctaagggcatcacagacctgttattgctcaatctcgggtggctgaacgccacttgtccctctaagaagttgggggacgccgaccgctcgggggtcgcgtaactagttagc

SEQ ID NO: 48381 - DNA, 120 bp, Homo sapiens
  misc_feature: 763 for SV(W|O) and 18S
gcccgtcggcatgtattagctctagaattaccacagttatccaagtaggagaggagcgagcgaccaaaggaaccataactgatttaatgagccattcgcagtttcactgtaccggccgtg

SEQ ID NO: 48382 - DNA, 120 bp, Homo sapiens
  misc_feature: 763 for SV(W|O) and 18S
cgccgaccgctcgggggtcgcgtaactagttagcatgccagagtctcgttcgttatcggaattaaccagacaaatcgctccaccaactaagaacggccatgcaccaccacccacggaatc

SEQ ID NO: 48383 - DNA, 120 bp, Homo sapiens
  misc_feature: 763 for SV(W|O) and 18S
ctggcatgctaactagttacgcgacccccgagcggtcggcgtcccccaacttcttagagggacaagtggcgttcagccacccgagattgagcaataacaggtctgtgatgcccttagatg

SEQ ID NO: 48384 - DNA, 120 bp, Homo sapiens
  misc_feature: 763 for SV(W|O) and 18S
cgcccgtcggcatgtattagctctagaattaccacagttatccaagtaggagaggagcgagcgaccaaaggaaccataactgatttaatgagccattcgcagtttcactgtaccggccgt

SEQ ID NO: 48385 - DNA, 120 bp, Homo sapiens
  misc_feature: 762 for SV(W|O) and 18S
tgaaacttaaaggaattgacggaagggcaccaccaggagtggagcctgcggcttaatttgactcaacacgggaaacctcacccggcccggacacggacaggattgacagattgatagctc

SEQ ID NO: 48386 - DNA, 120 bp, Homo sapiens
  misc_feature: 762 for SV(W|O) and 18S
gggccgatcgcacgccccccgtggcggcgacgacccattcgaacgtctgccctatcaactttcgatggtagtcgccgtgcctaccatggtgaccacgggtgacggggaatcagggttcga

SEQ ID NO: 48387 - DNA, 120 bp, Homo sapiens
  misc_feature: 762 for SV(W|O) and 18S
gtgtgtacaaagggcagggacttaatcaacgcaagcttatgacccgcacttactgggaattcctcgttcatggggaataattgcaatccccgatccccatcacgaatggggttcaacggg

SEQ ID NO: 48388 - DNA, 120 bp, Homo sapiens
  misc_feature: 762 for SV(W|O) and 18S
gtggtagccgtttctcaggctccctctccggaatcgaaccctgattccccgtcacccgtggtcaccatggtaggcacggcgactaccatcgaaagttgatagggcagacgttcgaatggg

SEQ ID NO: 48389 - DNA, 120 bp, Homo sapiens
  misc_feature: 762 for SV(W|O) and 18S
gggaatcagggttcgattccggagagggagcctgagaaacggctaccacatccaaggaaggcagcaggcgcgcaaattacccactcccgacccggggaggtagtgacgaaaaataacaat

SEQ ID NO: 48390 - DNA, 120 bp, Homo sapiens
  misc_feature: 762 for SV(W|O) and 18S
cttaatttgactcaacacgggaaacctcacccggcccggacacggacaggattgacagattgatagctctttctcgattccgtgggtggtggtgcatggccgttcttagttggtggagcg

SEQ ID NO: 48391 - DNA, 120 bp, Homo sapiens
  misc_feature: 762 for SV(W|O) and 18S
cggacatctaagggcatcacagacctgttattgctcaatctcgggtggctgaacgccacttgtccctctaagaagttgggggacgccgaccgctcgggggtcgcgtaactagttagcatg

SEQ ID NO: 48392 - DNA, 120 bp, Homo sapiens
  misc_feature: 762 for SV(W|O) and 18S
agcgacgggcggtgtgtacaaagggcagggacttaatcaacgcaagcttatgacccgcacttactgggaattcctcgttcatggggaataattgcaatccccgatccccatcacgaatgg

SEQ ID NO: 48393 - DNA, 120 bp, Homo sapiens
  misc_feature: 761 for SV(W|O) and 18S
agtagcgacgggcggtgtgtacaaagggcagggacttaatcaacgcaagcttatgacccgcacttactgggaattcctcgttcatggggaataattgcaatccccgatccccatcacgaa

SEQ ID NO: 48394 - DNA, 120 bp, Homo sapiens
  misc_feature: 761 for SV(W|O) and 18S
tgttattgctcaatctcgggtggctgaacgccacttgtccctctaagaagttgggggacgccgaccgctcgggggtcgcgtaactagttagcatgccagagtctcgttcgttatcggaat

SEQ ID NO: 48395 - DNA, 120 bp, Homo sapiens
  misc_feature: 761 for SV(W|O) and 18S
tggcatgctaactagttacgcgacccccgagcggtcggcgtcccccaacttcttagagggacaagtggcgttcagccacccgagattgagcaataacaggtctgtgatgcccttagatgt

SEQ ID NO: 48396 - DNA, 120 bp, Homo sapiens
  misc_feature: 761 for SV(W|O) and 18S
cggcttaatttgactcaacacgggaaacctcacccggcccggacacggacaggattgacagattgatagctctttctcgattccgtgggtggtggtgcatggccgttcttagttggtgga

SEQ ID NO: 48397 - DNA, 120 bp, Homo sapiens
  misc_feature: 761 for SV(W|O) and 18S
gtagcgcgcgtgcagccccggacatctaagggcatcacagacctgttattgctcaatctcgggtggctgaacgccacttgtccctctaagaagttgggggacgccgaccgctcgggggtc

SEQ ID NO: 48398 - DNA, 120 bp, Homo sapiens
  misc_feature: 761 for SV(W|O) and 18S
cttatgacccgcacttactgggaattcctcgttcatggggaataattgcaatccccgatccccatcacgaatggggttcaacgggttacccgcgcctgccggcgtagggtaggcacacgc

SEQ ID NO: 48399 - DNA, 120 bp, Homo sapiens
  misc_feature: 761 for SV(W|O) and 18S
gaaacttaaaggaattgacggaagggcaccaccaggagtggagcctgcggcttaatttgactcaacacgggaaacctcacccggcccggacacggacaggattgacagattgatagctct

SEQ ID NO: 48400 - DNA, 120 bp, Homo sapiens
  misc_feature: 761 for SV(W|O) and 18S
actctggcatgctaactagttacgcgacccccgagcggtcggcgtcccccaacttcttagagggacaagtggcgttcagccacccgagattgagcaataacaggtctgtgatgcccttag

SEQ ID NO: 48401 - DNA, 120 bp, Homo sapiens
  misc_feature: 761 for SV(W|O) and 18S
cgcccgcccgctcccaagatccaactacgagctttttaactgcagcaactttaatatacgctattggagctggaattaccgcggctgctggcaccagacttgccctccaatggatcctcg

SEQ ID NO: 48402 - DNA, 120 bp, Homo sapiens
  misc_feature: 761 for SV(W|O) and 18S
acgccgaccgctcgggggtcgcgtaactagttagcatgccagagtctcgttcgttatcggaattaaccagacaaatcgctccaccaactaagaacggccatgcaccaccacccacggaat

SEQ ID NO: 48403 - DNA, 120 bp, Homo sapiens
  misc_feature: 760 for SV(W|O) and 18S
cccgccggggtcggcccacggccctggcggagcgctgagaagacggtcgaacttgactatctagaggaagtaaaagtcgtaacaaggtttccgtaggtgaacctgcggaaggatcattaa

SEQ ID NO: 48404 - DNA, 120 bp, Homo sapiens
  misc_feature: 760 for SV(W|O) and 18S
tgtagcgcgcgtgcagccccggacatctaagggcatcacagacctgttattgctcaatctcgggtggctgaacgccacttgtccctctaagaagttgggggacgccgaccgctcgggggt

SEQ ID NO: 48405 - DNA, 120 bp, Homo sapiens
  misc_feature: 760 for SV(W|O) and 18S
tgcccccggccgtccctcttaatcatggcctcagttccgaaaaccaacaaaatagaaccgcggtcctattccattattcctagctgcggtatccaggcggctcgggcctgctttgaacac

SEQ ID NO: 48406 - DNA, 120 bp, Homo sapiens
  misc_feature: 760 for SV(W|O) and 18S
ggtccgccgcgaggcgagccaccgcccgtccccgccccttgcctctcggcgccccctcgatgctcttagctgagtgtcccgcggggcccgaagcgtttactttgaaaaaattagagtgtt

SEQ ID NO: 48407 - DNA, 120 bp, Homo sapiens
  misc_feature: 760 for SV(W|O) and 18S
cccgtcggcatgtattagctctagaattaccacagttatccaagtaggagaggagcgagcgaccaaaggaaccataactgatttaatgagccattcgcagtttcactgtaccggccgtgc

SEQ ID NO: 48408 - DNA, 120 bp, Homo sapiens
  misc_feature: 759 for SV(W|O) and 18S
atgcccccggccgtccctcttaatcatggcctcagttccgaaaaccaacaaaatagaaccgcggtcctattccattattcctagctgcggtatccaggcggctcgggcctgctttgaaca

SEQ ID NO: 48409 - DNA, 120 bp, Homo sapiens
  misc_feature: 759 for SV(W|O) and 18S
ggaatcagggttcgattccggagagggagcctgagaaacggctaccacatccaaggaaggcagcaggcgcgcaaattacccactcccgacccggggaggtagtgacgaaaaataacaata

SEQ ID NO: 48410 - DNA, 120 bp, Homo sapiens
  misc_feature: 759 for SV(W|O) and 18S
tagcgacgggcggtgtgtacaaagggcagggacttaatcaacgcaagcttatgacccgcacttactgggaattcctcgttcatggggaataattgcaatccccgatccccatcacgaatg

SEQ ID NO: 48411 - DNA, 120 bp, Homo sapiens
  misc_feature: 759 for SV(W|O) and 18S
atggttgcaaagctgaaacttaaaggaattgacggaagggcaccaccaggagtggagcctgcggcttaatttgactcaacacgggaaacctcacccggcccggacacggacaggattgac

SEQ ID NO: 48412 - DNA, 120 bp, Homo sapiens
  misc_feature: 759 for SV(W|O) and 18S
gcccccggccgtccctcttaatcatggcctcagttccgaaaaccaacaaaatagaaccgcggtcctattccattattcctagctgcggtatccaggcggctcgggcctgctttgaacact

SEQ ID NO: 48413 - DNA, 120 bp, Homo sapiens
  misc_feature: 759 for SV(W|O) and 18S
gatccgagggcctcactaaaccatccaatcggtagtagcgacgggcggtgtgtacaaagggcagggacttaatcaacgcaagcttatgacccgcacttactgggaattcctcgttcatgg

SEQ ID NO: 48414 - DNA, 120 bp, Homo sapiens
  misc_feature: 759 for SV(W|O) and 18S
cacctctagcggcgcaatacgaatgcccccggccgtccctcttaatcatggcctcagttccgaaaaccaacaaaatagaaccgcggtcctattccattattcctagctgcggtatccagg

SEQ ID NO: 48415 - DNA, 120 bp, Homo sapiens
  misc_feature: 759 for SV(W|O) and 18S
actaaaccatccaatcggtagtagcgacgggcggtgtgtacaaagggcagggacttaatcaacgcaagcttatgacccgcacttactgggaattcctcgttcatggggaataattgcaat

SEQ ID NO: 48416 - DNA, 120 bp, Homo sapiens
  misc_feature: 759 for SV(W|O) and 18S
aaacttaaaggaattgacggaagggcaccaccaggagtggagcctgcggcttaatttgactcaacacgggaaacctcacccggcccggacacggacaggattgacagattgatagctctt

SEQ ID NO: 48417 - DNA, 120 bp, Homo sapiens
  misc_feature: 758 for SV(W|O) and 18S
aatcggtagtagcgacgggcggtgtgtacaaagggcagggacttaatcaacgcaagcttatgacccgcacttactgggaattcctcgttcatggggaataattgcaatccccgatcccca

SEQ ID NO: 48418 - DNA, 120 bp, Homo sapiens
  misc_feature: 758 for SV(W|O) and 18S
agacctgttattgctcaatctcgggtggctgaacgccacttgtccctctaagaagttgggggacgccgaccgctcgggggtcgcgtaactagttagcatgccagagtctcgttcgttatc

SEQ ID NO: 48419 - DNA, 120 bp, Homo sapiens
  misc_feature: 758 for SV(W|O) and 18S
cttaaaggaattgacggaagggcaccaccaggagtggagcctgcggcttaatttgactcaacacgggaaacctcacccggcccggacacggacaggattgacagattgatagctctttct

SEQ ID NO: 48420 - DNA, 120 bp, Homo sapiens
  misc_feature: 758 for SV(W|O) and 18S
ccgtcggcatgtattagctctagaattaccacagttatccaagtaggagaggagcgagcgaccaaaggaaccataactgatttaatgagccattcgcagtttcactgtaccggccgtgcg

SEQ ID NO: 48421 - DNA, 120 bp, Homo sapiens
  misc_feature: 757 for SV(W|O) and 18S
ggacgccgaccgctcgggggtcgcgtaactagttagcatgccagagtctcgttcgttatcggaattaaccagacaaatcgctccaccaactaagaacggccatgcaccaccacccacgga

SEQ ID NO: 48422 - DNA, 120 bp, Homo sapiens
  misc_feature: 757 for SV(W|O) and 18S
taaaggaattgacggaagggcaccaccaggagtggagcctgcggcttaatttgactcaacacgggaaacctcacccggcccggacacggacaggattgacagattgatagctctttctcg

SEQ ID NO: 48423 - DNA, 120 bp, Homo sapiens
  misc_feature: 757 for SV(W|O) and 18S
gtccgccgcgaggcgagccaccgcccgtccccgccccttgcctctcggcgccccctcgatgctcttagctgagtgtcccgcggggcccgaagcgtttactttgaaaaaattagagtgttc

SEQ ID NO: 48424 - DNA, 120 bp, Homo sapiens
  misc_feature: 757 for SV(W|O) and 18S
ggcatgctaactagttacgcgacccccgagcggtcggcgtcccccaacttcttagagggacaagtggcgttcagccacccgagattgagcaataacaggtctgtgatgcccttagatgtc

SEQ ID NO: 48425 - DNA, 120 bp, Homo sapiens
  misc_feature: 757 for SV(W|O) and 18S
gcggcttaatttgactcaacacgggaaacctcacccggcccggacacggacaggattgacagattgatagctctttctcgattccgtgggtggtggtgcatggccgttcttagttggtgg

SEQ ID NO: 48426 - DNA, 120 bp, Homo sapiens
  misc_feature: 757 for SV(W|O) and 18S
acttaaaggaattgacggaagggcaccaccaggagtggagcctgcggcttaatttgactcaacacgggaaacctcacccggcccggacacggacaggattgacagattgatagctctttc

SEQ ID NO: 48427 - DNA, 120 bp, Homo sapiens
  misc_feature: 757 for SV(W|O) and 18S
ccgagaggcaaggggcggggacgggcggtggctcgcctcgcggcggaccgcccgcccgctcccaagatccaactacgagctttttaactgcagcaactttaatatacgctattggagctg

SEQ ID NO: 48428 - DNA, 120 bp, Homo sapiens
  misc_feature: 756 for SV(W|O) and 18S
ggatgtggtagccgtttctcaggctccctctccggaatcgaaccctgattccccgtcacccgtggtcaccatggtaggcacggcgactaccatcgaaagttgatagggcagacgttcgaa

SEQ ID NO: 48429 - DNA, 120 bp, Homo sapiens
  misc_feature: 756 for SV(W|O) and 18S
gggacgccgaccgctcgggggtcgcgtaactagttagcatgccagagtctcgttcgttatcggaattaaccagacaaatcgctccaccaactaagaacggccatgcaccaccacccacgg

SEQ ID NO: 48430 - DNA, 120 bp, Homo sapiens
  misc_feature: 756 for SV(W|O) and 18S
cctcgcggcggaccgcccgcccgctcccaagatccaactacgagctttttaactgcagcaactttaatatacgctattggagctggaattaccgcggctgctggcaccagacttgccctc

SEQ ID NO: 48431 - DNA, 120 bp, Homo sapiens
  misc_feature: 756 for SV(W|O) and 18S
cctgcggcttaatttgactcaacacgggaaacctcacccggcccggacacggacaggattgacagattgatagctctttctcgattccgtgggtggtggtgcatggccgttcttagttgg

SEQ ID NO: 48432 - DNA, 120 bp, Homo sapiens
  misc_feature: 756 for SV(W|O) and 18S
caccaggagtggagcctgcggcttaatttgactcaacacgggaaacctcacccggcccggacacggacaggattgacagattgatagctctttctcgattccgtgggtggtggtgcatgg

SEQ ID NO: 48433 - DNA, 120 bp, Homo sapiens
  misc_feature: 756 for SV(W|O) and 18S
aaggaattgacggaagggcaccaccaggagtggagcctgcggcttaatttgactcaacacgggaaacctcacccggcccggacacggacaggattgacagattgatagctctttctcgat

SEQ ID NO: 48434 - DNA, 120 bp, Homo sapiens
  misc_feature: 755 for SV(W|O) and 18S
ggcggtgtgtacaaagggcagggacttaatcaacgcaagcttatgacccgcacttactgggaattcctcgttcatggggaataattgcaatccccgatccccatcacgaatggggttcaa

SEQ ID NO: 48435 - DNA, 120 bp, Homo sapiens
  misc_feature: 755 for SV(W|O) and 18S
tggtagccgtttctcaggctccctctccggaatcgaaccctgattccccgtcacccgtggtcaccatggtaggcacggcgactaccatcgaaagttgatagggcagacgttcgaatgggt

SEQ ID NO: 48436 - DNA, 120 bp, Homo sapiens
  misc_feature: 755 for SV(W|O) and 18S
gtagtagcgacgggcggtgtgtacaaagggcagggacttaatcaacgcaagcttatgacccgcacttactgggaattcctcgttcatggggaataattgcaatccccgatccccatcacg

SEQ ID NO: 48437 - DNA, 120 bp, Homo sapiens
  misc_feature: 755 for SV(W|O) and 18S
ccgagccgcctggataccgcagctaggaataatggaataggaccgcggttctattttgttggttttcggaactgaggccatgattaagagggacggccgggggcattcgtattgcgccgc

SEQ ID NO: 48438 - DNA, 120 bp, Homo sapiens
  misc_feature: 755 for SV(W|O) and 18S
accaactaagaacggccatgcaccaccacccacggaatcgagaaagagctatcaatctgtcaatcctgtccgtgtccgggccgggtgaggtttcccgtgttgagtcaaattaagccgcag

SEQ ID NO: 48439 - DNA, 120 bp, Homo sapiens
  misc_feature: 755 for SV(W|O) and 18S
ctgaaacttaaaggaattgacggaagggcaccaccaggagtggagcctgcggcttaatttgactcaacacgggaaacctcacccggcccggacacggacaggattgacagattgatagct

SEQ ID NO: 48440 - DNA, 120 bp, Homo sapiens
  misc_feature: 755 for SV(W|O) and 18S
aacttaaaggaattgacggaagggcaccaccaggagtggagcctgcggcttaatttgactcaacacgggaaacctcacccggcccggacacggacaggattgacagattgatagctcttt

SEQ ID NO: 48441 - DNA, 120 bp, Homo sapiens
  misc_feature: 754 for SV(W|O) and 18S
tcatgggaataacgccgccgcatcgccggtcggcatcgtttatggtcggaactacgacggtatctgatcgtcttcgaacctccgactttcgttcttgattaatgaaaacattcttggcaa

SEQ ID NO: 48442 - DNA, 120 bp, Homo sapiens
  misc_feature: 754 for SV(W|O) and 18S
tggatgtggtagccgtttctcaggctccctctccggaatcgaaccctgattccccgtcacccgtggtcaccatggtaggcacggcgactaccatcgaaagttgatagggcagacgttcga

SEQ ID NO: 48443 - DNA, 120 bp, Homo sapiens
  misc_feature: 754 for SV(W|O) and 18S
gtcatgggaataacgccgccgcatcgccggtcggcatcgtttatggtcggaactacgacggtatctgatcgtcttcgaacctccgactttcgttcttgattaatgaaaacattcttggca

SEQ ID NO: 48444 - DNA, 120 bp, Homo sapiens
  misc_feature: 754 for SV(W|O) and 18S
tcggccccgccggggtcggcccacggccctggcggagcgctgagaagacggtcgaacttgactatctagaggaagtaaaagtcgtaacaaggtttccgtaggtgaacctgcggaaggatc

SEQ ID NO: 48445 - DNA, 120 bp, Homo sapiens
  misc_feature: 754 for SV(W|O) and 18S
aaaggaattgacggaagggcaccaccaggagtggagcctgcggcttaatttgactcaacacgggaaacctcacccggcccggacacggacaggattgacagattgatagctctttctcga

SEQ ID NO: 48446 - DNA, 120 bp, Homo sapiens
  misc_feature: 754 for SV(W|O) and 18S
cccccccgcgaagggggtcagcgcccgtcggcatgtattagctctagaattaccacagttatccaagtaggagaggagcgagcgaccaaaggaaccataactgatttaatgagccattcg

SEQ ID NO: 48447 - DNA, 120 bp, Homo sapiens
  misc_feature: 754 for SV(W|O) and 18S
cctcggatcggccccgccggggtcggcccacggccctggcggagcgctgagaagacggtcgaacttgactatctagaggaagtaaaagtcgtaacaaggtttccgtaggtgaacctgcgg

SEQ ID NO: 48448 - DNA, 120 bp, Homo sapiens
  misc_feature: 754 for SV(W|O) and 18S
atgggaataacgccgccgcatcgccggtcggcatcgtttatggtcggaactacgacggtatctgatcgtcttcgaacctccgactttcgttcttgattaatgaaaacattcttggcaaat

SEQ ID NO: 48449 - DNA, 120 bp, Homo sapiens
  misc_feature: 754 for SV(W|O) and 18S
atcggtagtagcgacgggcggtgtgtacaaagggcagggacttaatcaacgcaagcttatgacccgcacttactgggaattcctcgttcatggggaataattgcaatccccgatccccat

SEQ ID NO: 48450 - DNA, 120 bp, Homo sapiens
  misc_feature: 753 for SV(W|O) and 18S
tgcggtatccaggcggctcgggcctgctttgaacactctaattttttcaaagtaaacgcttcgggccccgcgggacactcagctaagagcatcgagggggcgccgagaggcaaggggcgg

SEQ ID NO: 48451 - DNA, 120 bp, Homo sapiens
  misc_feature: 753 for SV(W|O) and 18S
gtagcgacgggcggtgtgtacaaagggcagggacttaatcaacgcaagcttatgacccgcacttactgggaattcctcgttcatggggaataattgcaatccccgatccccatcacgaat

SEQ ID NO: 48452 - DNA, 120 bp, Homo sapiens
  misc_feature: 753 for SV(W|O) and 18S
ggtcggcccacggccctggcggagcgctgagaagacggtcgaacttgactatctagaggaagtaaaagtcgtaacaaggtttccgtaggtgaacctgcggaaggatcattaacggagccc

SEQ ID NO: 48453 - DNA, 120 bp, Homo sapiens
  misc_feature: 753 for SV(W|O) and 18S
caatcggtagtagcgacgggcggtgtgtacaaagggcagggacttaatcaacgcaagcttatgacccgcacttactgggaattcctcgttcatggggaataattgcaatccccgatcccc

SEQ ID NO: 48454 - DNA, 120 bp, Homo sapiens
  misc_feature: 753 for SV(W|O) and 18S
ccaatcggtagtagcgacgggcggtgtgtacaaagggcagggacttaatcaacgcaagcttatgacccgcacttactgggaattcctcgttcatggggaataattgcaatccccgatccc

SEQ ID NO: 48455 - DNA, 120 bp, Homo sapiens
  misc_feature: 753 for SV(W|O) and 18S
cgccgagaggcaaggggcggggacgggcggtggctcgcctcgcggcggaccgcccgcccgctcccaagatccaactacgagctttttaactgcagcaactttaatatacgctattggagc

SEQ ID NO: 48456 - DNA, 120 bp, Homo sapiens
  misc_feature: 752 for SV(W|O) and 18S
gggcggtgtgtacaaagggcagggacttaatcaacgcaagcttatgacccgcacttactgggaattcctcgttcatggggaataattgcaatccccgatccccatcacgaatggggttca

SEQ ID NO: 48457 - DNA, 120 bp, Homo sapiens
  misc_feature: 752 for SV(W|O) and 18S
tccgagggcctcactaaaccatccaatcggtagtagcgacgggcggtgtgtacaaagggcagggacttaatcaacgcaagcttatgacccgcacttactgggaattcctcgttcatgggg

SEQ ID NO: 48458 - DNA, 120 bp, Homo sapiens
  misc_feature: 752 for SV(W|O) and 18S
gggtcggcccacggccctggcggagcgctgagaagacggtcgaacttgactatctagaggaagtaaaagtcgtaacaaggtttccgtaggtgaacctgcggaaggatcattaacggagcc

SEQ ID NO: 48459 - DNA, 120 bp, Homo sapiens
  misc_feature: 752 for SV(W|O) and 18S
gcttatgacccgcacttactgggaattcctcgttcatggggaataattgcaatccccgatccccatcacgaatggggttcaacgggttacccgcgcctgccggcgtagggtaggcacacg

SEQ ID NO: 48460 - DNA, 120 bp, Homo sapiens
  misc_feature: 752 for SV(W|O) and 18S
gcgacgggcggtgtgtacaaagggcagggacttaatcaacgcaagcttatgacccgcacttactgggaattcctcgttcatggggaataattgcaatccccgatccccatcacgaatggg

SEQ ID NO: 48461 - DNA, 120 bp, Homo sapiens
  misc_feature: 752 for SV(W|O) and 18S
ccgatcgcacgccccccgtggcggcgacgacccattcgaacgtctgccctatcaactttcgatggtagtcgccgtgcctaccatggtgaccacgggtgacggggaatcagggttcgattc

SEQ ID NO: 48462 - DNA, 120 bp, Homo sapiens
  misc_feature: 751 for SV(W|O) and 18S
ttaaaggaattgacggaagggcaccaccaggagtggagcctgcggcttaatttgactcaacacgggaaacctcacccggcccggacacggacaggattgacagattgatagctctttctc

SEQ ID NO: 48463 - DNA, 120 bp, Homo sapiens
  misc_feature: 751 for SV(W|O) and 18S
ggggtcggcccacggccctggcggagcgctgagaagacggtcgaacttgactatctagaggaagtaaaagtcgtaacaaggtttccgtaggtgaacctgcggaaggatcattaacggagc

SEQ ID NO: 48464 - DNA, 120 bp, Homo sapiens
  misc_feature: 751 for SV(W|O) and 18S
ctagcggcgcaatacgaatgcccccggccgtccctcttaatcatggcctcagttccgaaaaccaacaaaatagaaccgcggtcctattccattattcctagctgcggtatccaggcggct

SEQ ID NO: 48465 - DNA, 120 bp, Homo sapiens
  misc_feature: 751 for SV(W|O) and 18S
ccccattcgtgatggggatcggggattgcaattattccccatgaacgaggaattcccagtaagtgcgggtcataagcttgcgttgattaagtccctgccctttgtacacaccgcccgtcg

SEQ ID NO: 48466 - DNA, 120 bp, Homo sapiens
  misc_feature: 750 for SV(W|O) and 18S
tgcggcttaatttgactcaacacgggaaacctcacccggcccggacacggacaggattgacagattgatagctctttctcgattccgtgggtggtggtgcatggccgttcttagttggtg

SEQ ID NO: 48467 - DNA, 120 bp, Homo sapiens
  misc_feature: 750 for SV(W|O) and 18S
tccgccgcgaggcgagccaccgcccgtccccgccccttgcctctcggcgccccctcgatgctcttagctgagtgtcccgcggggcccgaagcgtttactttgaaaaaattagagtgttca

SEQ ID NO: 48468 - DNA, 120 bp, Homo sapiens
  misc_feature: 750 for SV(W|O) and 18S
agggcctcactaaaccatccaatcggtagtagcgacgggcggtgtgtacaaagggcagggacttaatcaacgcaagcttatgacccgcacttactgggaattcctcgttcatggggaata

SEQ ID NO: 48469 - DNA, 120 bp, Homo sapiens
  misc_feature: 750 for SV(W|O) and 18S
gtttactttgaaaaaattagagtgttcaaagcaggcccgagccgcctggataccgcagctaggaataatggaataggaccgcggttctattttgttggttttcggaactgaggccatgat

SEQ ID NO: 48470 - DNA, 120 bp, Homo sapiens
  misc_feature: 750 for SV(W|O) and 18S
ggtgtgtacaaagggcagggacttaatcaacgcaagcttatgacccgcacttactgggaattcctcgttcatggggaataattgcaatccccgatccccatcacgaatggggttcaacgg

SEQ ID NO: 48471 - DNA, 120 bp, Homo sapiens
  misc_feature: 750 for SV(W|O) and 18S
gccccggacatctaagggcatcacagacctgttattgctcaatctcgggtggctgaacgccacttgtccctctaagaagttgggggacgccgaccgctcgggggtcgcgtaactagttag

SEQ ID NO: 48472 - DNA, 120 bp, Homo sapiens
  misc_feature: 750 for SV(W|O) and 18S
cggatcggccccgccggggtcggcccacggccctggcggagcgctgagaagacggtcgaacttgactatctagaggaagtaaaagtcgtaacaaggtttccgtaggtgaacctgcggaag

SEQ ID NO: 48473 - DNA, 120 bp, Homo sapiens
  misc_feature: 750 for SV(W|O) and 18S
ccccgccccttgcctctcggcgccccctcgatgctcttagctgagtgtcccgcggggcccgaagcgtttactttgaaaaaattagagtgttcaaagcaggcccgagccgcctggataccg

SEQ ID NO: 48474 - DNA, 120 bp, Homo sapiens
  misc_feature: 750 for SV(W|O) and 18S
aggaattgacggaagggcaccaccaggagtggagcctgcggcttaatttgactcaacacgggaaacctcacccggcccggacacggacaggattgacagattgatagctctttctcgatt

SEQ ID NO: 48475 - DNA, 120 bp, Homo sapiens
  misc_feature: 749 for SV(W|O) and 18S
gggcctcactaaaccatccaatcggtagtagcgacgggcggtgtgtacaaagggcagggacttaatcaacgcaagcttatgacccgcacttactgggaattcctcgttcatggggaataa

SEQ ID NO: 48476 - DNA, 120 bp, Homo sapiens
  misc_feature: 749 for SV(W|O) and 18S
ttaaatcagttatggttcctttggtcgctcgctcctctcctacttggataactgtggtaattctagagctaatacatgccgacgggcgctgacccccttcgcgggggggatgcgtgcatt

SEQ ID NO: 48477 - DNA, 120 bp, Homo sapiens
  misc_feature: 749 for SV(W|O) and 18S
tgcacgcatcccccccgcgaagggggtcagcgcccgtcggcatgtattagctctagaattaccacagttatccaagtaggagaggagcgagcgaccaaaggaaccataactgatttaatg

SEQ ID NO: 48478 - DNA, 120 bp, Homo sapiens
  misc_feature: 749 for SV(W|O) and 18S
ctctggcatgctaactagttacgcgacccccgagcggtcggcgtcccccaacttcttagagggacaagtggcgttcagccacccgagattgagcaataacaggtctgtgatgcccttaga

SEQ ID NO: 48479 - DNA, 120 bp, Homo sapiens
  misc_feature: 749 for SV(W|O) and 18S
tcggtagtagcgacgggcggtgtgtacaaagggcagggacttaatcaacgcaagcttatgacccgcacttactgggaattcctcgttcatggggaataattgcaatccccgatccccatc

SEQ ID NO: 48480 - DNA, 120 bp, Homo sapiens
  misc_feature: 749 for SV(W|O) and 18S
tagcgcgcgtgcagccccggacatctaagggcatcacagacctgttattgctcaatctcgggtggctgaacgccacttgtccctctaagaagttgggggacgccgaccgctcgggggtcg

SEQ ID NO: 48481 - DNA, 120 bp, Homo sapiens
  misc_feature: 749 for SV(W|O) and 18S
cgcctcgcggcggaccgcccgcccgctcccaagatccaactacgagctttttaactgcagcaactttaatatacgctattggagctggaattaccgcggctgctggcaccagacttgccc

SEQ ID NO: 48482 - DNA, 120 bp, Homo sapiens
  misc_feature: 749 for SV(W|O) and 18S
gccgagaggcaaggggcggggacgggcggtggctcgcctcgcggcggaccgcccgcccgctcccaagatccaactacgagctttttaactgcagcaactttaatatacgctattggagct

SEQ ID NO: 48483 - DNA, 120 bp, Homo sapiens
  misc_feature: 749 for SV(W|O) and 18S
cgagaggcaaggggcggggacgggcggtggctcgcctcgcggcggaccgcccgcccgctcccaagatccaactacgagctttttaactgcagcaactttaatatacgctattggagctgg

SEQ ID NO: 48484 - DNA, 120 bp, Homo sapiens
  misc_feature: 748 for SV(W|O) and 18S
ttgcaaagctgaaacttaaaggaattgacggaagggcaccaccaggagtggagcctgcggcttaatttgactcaacacgggaaacctcacccggcccggacacggacaggattgacagat

SEQ ID NO: 48485 - DNA, 120 bp, Homo sapiens
  misc_feature: 748 for SV(W|O) and 18S
gacgccgaccgctcgggggtcgcgtaactagttagcatgccagagtctcgttcgttatcggaattaaccagacaaatcgctccaccaactaagaacggccatgcaccaccacccacggaa

SEQ ID NO: 48486 - DNA, 120 bp, Homo sapiens
  misc_feature: 748 for SV(W|O) and 18S
caccaccaggagtggagcctgcggcttaatttgactcaacacgggaaacctcacccggcccggacacggacaggattgacagattgatagctctttctcgattccgtgggtggtggtgca

SEQ ID NO: 48487 - DNA, 120 bp, Homo sapiens
  misc_feature: 748 for SV(W|O) and 18S
ggtcatgggaataacgccgccgcatcgccggtcggcatcgtttatggtcggaactacgacggtatctgatcgtcttcgaacctccgactttcgttcttgattaatgaaaacattcttggc

SEQ ID NO: 48488 - DNA, 120 bp, Homo sapiens
  misc_feature: 748 for SV(W|O) and 18S
ggtagccgtttctcaggctccctctccggaatcgaaccctgattccccgtcacccgtggtcaccatggtaggcacggcgactaccatcgaaagttgatagggcagacgttcgaatgggtc

SEQ ID NO: 48489 - DNA, 120 bp, Homo sapiens
  misc_feature: 748 for SV(W|O) and 18S
cccgccccttgcctctcggcgccccctcgatgctcttagctgagtgtcccgcggggcccgaagcgtttactttgaaaaaattagagtgttcaaagcaggcccgagccgcctggataccgc

SEQ ID NO: 48490 - DNA, 120 bp, Homo sapiens
  misc_feature: 748 for SV(W|O) and 18S
cggtccgccgcgaggcgagccaccgcccgtccccgccccttgcctctcggcgccccctcgatgctcttagctgagtgtcccgcggggcccgaagcgtttactttgaaaaaattagagtgt

SEQ ID NO: 48491 - DNA, 120 bp, Homo sapiens
  misc_feature: 748 for SV(W|O) and 18S
cctctagcggcgcaatacgaatgcccccggccgtccctcttaatcatggcctcagttccgaaaaccaacaaaatagaaccgcggtcctattccattattcctagctgcggtatccaggcg

SEQ ID NO: 48492 - DNA, 120 bp, Homo sapiens
  misc_feature: 747 for SV(W|O) and 18S
ttatcggaattaaccagacaaatcgctccaccaactaagaacggccatgcaccaccacccacggaatcgagaaagagctatcaatctgtcaatcctgtccgtgtccgggccgggtgaggt

SEQ ID NO: 48493 - DNA, 120 bp, Homo sapiens
  misc_feature: 747 for SV(W|O) and 18S
ttaatttgactcaacacgggaaacctcacccggcccggacacggacaggattgacagattgatagctctttctcgattccgtgggtggtggtgcatggccgttcttagttggtggagcga

SEQ ID NO: 48494 - DNA, 120 bp, Homo sapiens
  misc_feature: 747 for SV(W|O) and 18S
agccccggacatctaagggcatcacagacctgttattgctcaatctcgggtggctgaacgccacttgtccctctaagaagttgggggacgccgaccgctcgggggtcgcgtaactagtta

SEQ ID NO: 48495 - DNA, 120 bp, Homo sapiens
  misc_feature: 747 for SV(W|O) and 18S
gcggtgtgtacaaagggcagggacttaatcaacgcaagcttatgacccgcacttactgggaattcctcgttcatggggaataattgcaatccccgatccccatcacgaatggggttcaac

SEQ ID NO: 48496 - DNA, 120 bp, Homo sapiens
  misc_feature: 747 for SV(W|O) and 18S
ggttgcaaagctgaaacttaaaggaattgacggaagggcaccaccaggagtggagcctgcggcttaatttgactcaacacgggaaacctcacccggcccggacacggacaggattgacag

SEQ ID NO: 48497 - DNA, 120 bp, Homo sapiens
  misc_feature: 747 for SV(W|O) and 18S
ctaaaccatccaatcggtagtagcgacgggcggtgtgtacaaagggcagggacttaatcaacgcaagcttatgacccgcacttactgggaattcctcgttcatggggaataattgcaatc

SEQ ID NO: 48498 - DNA, 120 bp, Homo sapiens
  misc_feature: 747 for SV(W|O) and 18S
gacggaagggcaccaccaggagtggagcctgcggcttaatttgactcaacacgggaaacctcacccggcccggacacggacaggattgacagattgatagctctttctcgattccgtggg

SEQ ID NO: 48499 - DNA, 120 bp, Homo sapiens
  misc_feature: 747 for SV(W|O) and 18S
caggagtggagcctgcggcttaatttgactcaacacgggaaacctcacccggcccggacacggacaggattgacagattgatagctctttctcgattccgtgggtggtggtgcatggccg

SEQ ID NO: 48500 - DNA, 120 bp, Homo sapiens
  misc_feature: 747 for SV(W|O) and 18S
cgagccgcctggataccgcagctaggaataatggaataggaccgcggttctattttgttggttttcggaactgaggccatgattaagagggacggccgggggcattcgtattgcgccgct

SEQ ID NO: 48501 - DNA, 120 bp, Homo sapiens
  misc_feature: 747 for SV(W|O) and 18S
ccaccaggagtggagcctgcggcttaatttgactcaacacgggaaacctcacccggcccggacacggacaggattgacagattgatagctctttctcgattccgtgggtggtggtgcatg

SEQ ID NO: 48502 - DNA, 120 bp, Homo sapiens
  misc_feature: 746 for SV(W|O) and 18S
cactaaaccatccaatcggtagtagcgacgggcggtgtgtacaaagggcagggacttaatcaacgcaagcttatgacccgcacttactgggaattcctcgttcatggggaataattgcaa

SEQ ID NO: 48503 - DNA, 120 bp, Homo sapiens
  misc_feature: 746 for SV(W|O) and 18S
tcggcccacggccctggcggagcgctgagaagacggtcgaacttgactatctagaggaagtaaaagtcgtaacaaggtttccgtaggtgaacctgcggaaggatcattaacggagcccgg

SEQ ID NO: 48504 - DNA, 120 bp, Homo sapiens
  misc_feature: 746 for SV(W|O) and 18S
cctgttattgctcaatctcgggtggctgaacgccacttgtccctctaagaagttgggggacgccgaccgctcgggggtcgcgtaactagttagcatgccagagtctcgttcgttatcgga

SEQ ID NO: 48505 - DNA, 120 bp, Homo sapiens
  misc_feature: 746 for SV(W|O) and 18S
gcctcgcggcggaccgcccgcccgctcccaagatccaactacgagctttttaactgcagcaactttaatatacgctattggagctggaattaccgcggctgctggcaccagacttgccct

SEQ ID NO: 48506 - DNA, 120 bp, Homo sapiens
  misc_feature: 745 for SV(W|O) and 18S
ctgttattgctcaatctcgggtggctgaacgccacttgtccctctaagaagttgggggacgccgaccgctcgggggtcgcgtaactagttagcatgccagagtctcgttcgttatcggaa

SEQ ID NO: 48507 - DNA, 120 bp, Homo sapiens
  misc_feature: 745 for SV(W|O) and 18S
tgggaataacgccgccgcatcgccggtcggcatcgtttatggtcggaactacgacggtatctgatcgtcttcgaacctccgactttcgttcttgattaatgaaaacattcttggcaaatg

SEQ ID NO: 48508 - DNA, 120 bp, Homo sapiens
  misc_feature: 745 for SV(W|O) and 18S
gcctgcggcttaatttgactcaacacgggaaacctcacccggcccggacacggacaggattgacagattgatagctctttctcgattccgtgggtggtggtgcatggccgttcttagttg

SEQ ID NO: 48509 - DNA, 120 bp, Homo sapiens
  misc_feature: 745 for SV(W|O) and 18S
accaggagtggagcctgcggcttaatttgactcaacacgggaaacctcacccggcccggacacggacaggattgacagattgatagctctttctcgattccgtgggtggtggtgcatggc

SEQ ID NO: 48510 - DNA, 120 bp, Homo sapiens
  misc_feature: 745 for SV(W|O) and 18S
agctgaaacttaaaggaattgacggaagggcaccaccaggagtggagcctgcggcttaatttgactcaacacgggaaacctcacccggcccggacacggacaggattgacagattgatag

SEQ ID NO: 48511 - DNA, 120 bp, Homo sapiens
  misc_feature: 745 for SV(W|O) and 18S
cggtgtgtacaaagggcagggacttaatcaacgcaagcttatgacccgcacttactgggaattcctcgttcatggggaataattgcaatccccgatccccatcacgaatggggttcaacg

SEQ ID NO: 48512 - DNA, 120 bp, Homo sapiens
  misc_feature: 745 for SV(W|O) and 18S
atccgagggcctcactaaaccatccaatcggtagtagcgacgggcggtgtgtacaaagggcagggacttaatcaacgcaagcttatgacccgcacttactgggaattcctcgttcatggg

SEQ ID NO: 48513 - DNA, 120 bp, Homo sapiens
  misc_feature: 744 for SV(W|O) and 18S
tgcagccccggacatctaagggcatcacagacctgttattgctcaatctcgggtggctgaacgccacttgtccctctaagaagttgggggacgccgaccgctcgggggtcgcgtaactag

SEQ ID NO: 48514 - DNA, 120 bp, Homo sapiens
  misc_feature: 744 for SV(W|O) and 18S
tccccgccccttgcctctcggcgccccctcgatgctcttagctgagtgtcccgcggggcccgaagcgtttactttgaaaaaattagagtgttcaaagcaggcccgagccgcctggatacc

SEQ ID NO: 48515 - DNA, 120 bp, Homo sapiens
  misc_feature: 744 for SV(W|O) and 18S
gggccgatccgagggcctcactaaaccatccaatcggtagtagcgacgggcggtgtgtacaaagggcagggacttaatcaacgcaagcttatgacccgcacttactgggaattcctcgtt

SEQ ID NO: 48516 - DNA, 120 bp, Homo sapiens
  misc_feature: 744 for SV(W|O) and 18S
gagtatggttgcaaagctgaaacttaaaggaattgacggaagggcaccaccaggagtggagcctgcggcttaatttgactcaacacgggaaacctcacccggcccggacacggacaggat

SEQ ID NO: 48517 - DNA, 120 bp, Homo sapiens
  misc_feature: 744 for SV(W|O) and 18S
gagggcctcactaaaccatccaatcggtagtagcgacgggcggtgtgtacaaagggcagggacttaatcaacgcaagcttatgacccgcacttactgggaattcctcgttcatggggaat

SEQ ID NO: 48518 - DNA, 120 bp, Homo sapiens
  misc_feature: 744 for SV(W|O) and 18S
cgatccgagggcctcactaaaccatccaatcggtagtagcgacgggcggtgtgtacaaagggcagggacttaatcaacgcaagcttatgacccgcacttactgggaattcctcgttcatg

SEQ ID NO: 48519 - DNA, 120 bp, Homo sapiens
  misc_feature: 744 for SV(W|O) and 18S
cagccccggacatctaagggcatcacagacctgttattgctcaatctcgggtggctgaacgccacttgtccctctaagaagttgggggacgccgaccgctcgggggtcgcgtaactagtt

SEQ ID NO: 48520 - DNA, 120 bp, Homo sapiens
  misc_feature: 743 for SV(W|O) and 18S
tcactaaaccatccaatcggtagtagcgacgggcggtgtgtacaaagggcagggacttaatcaacgcaagcttatgacccgcacttactgggaattcctcgttcatggggaataattgca

SEQ ID NO: 48521 - DNA, 120 bp, Homo sapiens
  misc_feature: 743 for SV(W|O) and 18S
gttgcaaagctgaaacttaaaggaattgacggaagggcaccaccaggagtggagcctgcggcttaatttgactcaacacgggaaacctcacccggcccggacacggacaggattgacaga

SEQ ID NO: 48522 - DNA, 120 bp, Homo sapiens
  misc_feature: 743 for SV(W|O) and 18S
tccaatcggtagtagcgacgggcggtgtgtacaaagggcagggacttaatcaacgcaagcttatgacccgcacttactgggaattcctcgttcatggggaataattgcaatccccgatcc

SEQ ID NO: 48523 - DNA, 120 bp, Homo sapiens
  misc_feature: 743 for SV(W|O) and 18S
cgtccccgccccttgcctctcggcgccccctcgatgctcttagctgagtgtcccgcggggcccgaagcgtttactttgaaaaaattagagtgttcaaagcaggcccgagccgcctggata

SEQ ID NO: 48524 - DNA, 120 bp, Homo sapiens
  misc_feature: 743 for SV(W|O) and 18S
gctgaaacttaaaggaattgacggaagggcaccaccaggagtggagcctgcggcttaatttgactcaacacgggaaacctcacccggcccggacacggacaggattgacagattgatagc

SEQ ID NO: 48525 - DNA, 120 bp, Homo sapiens
  misc_feature: 743 for SV(W|O) and 18S
acctctagcggcgcaatacgaatgcccccggccgtccctcttaatcatggcctcagttccgaaaaccaacaaaatagaaccgcggtcctattccattattcctagctgcggtatccaggc

SEQ ID NO: 48526 - DNA, 120 bp, Homo sapiens
  misc_feature: 743 for SV(W|O) and 18S
gccggggtcggcccacggccctggcggagcgctgagaagacggtcgaacttgactatctagaggaagtaaaagtcgtaacaaggtttccgtaggtgaacctgcggaaggatcattaacgg

SEQ ID NO: 48527 - DNA, 120 bp, Homo sapiens
  misc_feature: 743 for SV(W|O) and 18S
gatcgcacgccccccgtggcggcgacgacccattcgaacgtctgccctatcaactttcgatggtagtcgccgtgcctaccatggtgaccacgggtgacggggaatcagggttcgattccg

SEQ ID NO: 48528 - DNA, 120 bp, Homo sapiens
  misc_feature: 743 for SV(W|O) and 18S
ctctagcggcgcaatacgaatgcccccggccgtccctcttaatcatggcctcagttccgaaaaccaacaaaatagaaccgcggtcctattccattattcctagctgcggtatccaggcgg

SEQ ID NO: 48529 - DNA, 120 bp, Homo sapiens
  misc_feature: 742 for SV(W|O) and 18S
taaatcagttatggttcctttggtcgctcgctcctctcctacttggataactgtggtaattctagagctaatacatgccgacgggcgctgacccccttcgcgggggggatgcgtgcattt

SEQ ID NO: 48530 - DNA, 120 bp, Homo sapiens
  misc_feature: 742 for SV(W|O) and 18S
gtatggttgcaaagctgaaacttaaaggaattgacggaagggcaccaccaggagtggagcctgcggcttaatttgactcaacacgggaaacctcacccggcccggacacggacaggattg

SEQ ID NO: 48531 - DNA, 120 bp, Homo sapiens
  misc_feature: 742 for SV(W|O) and 18S
gggcaccaccaggagtggagcctgcggcttaatttgactcaacacgggaaacctcacccggcccggacacggacaggattgacagattgatagctctttctcgattccgtgggtggtggt

SEQ ID NO: 48532 - DNA, 120 bp, Homo sapiens
  misc_feature: 742 for SV(W|O) and 18S
ggctcgcctcgcggcggaccgcccgcccgctcccaagatccaactacgagctttttaactgcagcaactttaatatacgctattggagctggaattaccgcggctgctggcaccagactt

SEQ ID NO: 48533 - DNA, 120 bp, Homo sapiens
  misc_feature: 742 for SV(W|O) and 18S
gaattgacggaagggcaccaccaggagtggagcctgcggcttaatttgactcaacacgggaaacctcacccggcccggacacggacaggattgacagattgatagctctttctcgattcc

SEQ ID NO: 48534 - DNA, 120 bp, Homo sapiens
  misc_feature: 742 for SV(W|O) and 18S
agcgcgcgtgcagccccggacatctaagggcatcacagacctgttattgctcaatctcgggtggctgaacgccacttgtccctctaagaagttgggggacgccgaccgctcgggggtcgc

SEQ ID NO: 48535 - DNA, 120 bp, Homo sapiens
  misc_feature: 742 for SV(W|O) and 18S
gcagccccggacatctaagggcatcacagacctgttattgctcaatctcgggtggctgaacgccacttgtccctctaagaagttgggggacgccgaccgctcgggggtcgcgtaactagt

SEQ ID NO: 48536 - DNA, 120 bp, Homo sapiens
  misc_feature: 741 for SV(W|O) and 18S
ccgccgcgaggcgagccaccgcccgtccccgccccttgcctctcggcgccccctcgatgctcttagctgagtgtcccgcggggcccgaagcgtttactttgaaaaaattagagtgttcaa

SEQ ID NO: 48537 - DNA, 120 bp, Homo sapiens
  misc_feature: 741 for SV(W|O) and 18S
tgcaaagctgaaacttaaaggaattgacggaagggcaccaccaggagtggagcctgcggcttaatttgactcaacacgggaaacctcacccggcccggacacggacaggattgacagatt

SEQ ID NO: 48538 - DNA, 120 bp, Homo sapiens
  misc_feature: 741 for SV(W|O) and 18S
tctagcggcgcaatacgaatgcccccggccgtccctcttaatcatggcctcagttccgaaaaccaacaaaatagaaccgcggtcctattccattattcctagctgcggtatccaggcggc

SEQ ID NO: 48539 - DNA, 120 bp, Homo sapiens
  misc_feature: 741 for SV(W|O) and 18S
gcacgcatcccccccgcgaagggggtcagcgcccgtcggcatgtattagctctagaattaccacagttatccaagtaggagaggagcgagcgaccaaaggaaccataactgatttaatga

SEQ ID NO: 48540 - DNA, 120 bp, Homo sapiens
  misc_feature: 741 for SV(W|O) and 18S
caaagctgaaacttaaaggaattgacggaagggcaccaccaggagtggagcctgcggcttaatttgactcaacacgggaaacctcacccggcccggacacggacaggattgacagattga

SEQ ID NO: 48541 - DNA, 120 bp, Homo sapiens
  misc_feature: 741 for SV(W|O) and 18S
gagccgcctggataccgcagctaggaataatggaataggaccgcggttctattttgttggttttcggaactgaggccatgattaagagggacggccgggggcattcgtattgcgccgcta

SEQ ID NO: 48542 - DNA, 120 bp, Homo sapiens
  misc_feature: 741 for SV(W|O) and 18S
ccaggagtggagcctgcggcttaatttgactcaacacgggaaacctcacccggcccggacacggacaggattgacagattgatagctctttctcgattccgtgggtggtggtgcatggcc

SEQ ID NO: 48543 - DNA, 120 bp, Homo sapiens
  misc_feature: 741 for SV(W|O) and 18S
ggaattgacggaagggcaccaccaggagtggagcctgcggcttaatttgactcaacacgggaaacctcacccggcccggacacggacaggattgacagattgatagctctttctcgattc

SEQ ID NO: 48544 - DNA, 120 bp, Homo sapiens
  misc_feature: 741 for SV(W|O) and 18S
gcaccaccaggagtggagcctgcggcttaatttgactcaacacgggaaacctcacccggcccggacacggacaggattgacagattgatagctctttctcgattccgtgggtggtggtgc

SEQ ID NO: 48545 - DNA, 120 bp, Homo sapiens
  misc_feature: 741 for SV(W|O) and 18S
cggggtcggcccacggccctggcggagcgctgagaagacggtcgaacttgactatctagaggaagtaaaagtcgtaacaaggtttccgtaggtgaacctgcggaaggatcattaacggag

SEQ ID NO: 48546 - DNA, 120 bp, Homo sapiens
  misc_feature: 741 for SV(W|O) and 18S
aaagctgaaacttaaaggaattgacggaagggcaccaccaggagtggagcctgcggcttaatttgactcaacacgggaaacctcacccggcccggacacggacaggattgacagattgat

SEQ ID NO: 48547 - DNA, 120 bp, Homo sapiens
  misc_feature: 740 for SV(W|O) and 18S
tggctcgcctcgcggcggaccgcccgcccgctcccaagatccaactacgagctttttaactgcagcaactttaatatacgctattggagctggaattaccgcggctgctggcaccagact

SEQ ID NO: 48548 - DNA, 120 bp, Homo sapiens
  misc_feature: 740 for SV(W|O) and 18S
ctcggatcggccccgccggggtcggcccacggccctggcggagcgctgagaagacggtcgaacttgactatctagaggaagtaaaagtcgtaacaaggtttccgtaggtgaacctgcgga

SEQ ID NO: 48549 - DNA, 120 bp, Homo sapiens
  misc_feature: 740 for SV(W|O) and 18S
ccgccggggtcggcccacggccctggcggagcgctgagaagacggtcgaacttgactatctagaggaagtaaaagtcgtaacaaggtttccgtaggtgaacctgcggaaggatcattaac

SEQ ID NO: 48550 - DNA, 120 bp, Homo sapiens
  misc_feature: 740 for SV(W|O) and 18S
gtccccgccccttgcctctcggcgccccctcgatgctcttagctgagtgtcccgcggggcccgaagcgtttactttgaaaaaattagagtgttcaaagcaggcccgagccgcctggatac

SEQ ID NO: 48551 - DNA, 120 bp, Homo sapiens
  misc_feature: 740 for SV(W|O) and 18S
ggcaccaccaggagtggagcctgcggcttaatttgactcaacacgggaaacctcacccggcccggacacggacaggattgacagattgatagctctttctcgattccgtgggtggtggtg

SEQ ID NO: 48552 - DNA, 120 bp, Homo sapiens
  misc_feature: 740 for SV(W|O) and 18S
cgatcgcacgccccccgtggcggcgacgacccattcgaacgtctgccctatcaactttcgatggtagtcgccgtgcctaccatggtgaccacgggtgacggggaatcagggttcgattcc

SEQ ID NO: 48553 - DNA, 120 bp, Homo sapiens
  misc_feature: 740 for SV(W|O) and 18S
gcaaagctgaaacttaaaggaattgacggaagggcaccaccaggagtggagcctgcggcttaatttgactcaacacgggaaacctcacccggcccggacacggacaggattgacagattg

SEQ ID NO: 48554 - DNA, 120 bp, Homo sapiens
  misc_feature: 740 for SV(W|O) and 18S
atccaatcggtagtagcgacgggcggtgtgtacaaagggcagggacttaatcaacgcaagcttatgacccgcacttactgggaattcctcgttcatggggaataattgcaatccccgatc

SEQ ID NO: 48555 - DNA, 120 bp, Homo sapiens
  misc_feature: 740 for SV(W|O) and 18S
cgccggggtcggcccacggccctggcggagcgctgagaagacggtcgaacttgactatctagaggaagtaaaagtcgtaacaaggtttccgtaggtgaacctgcggaaggatcattaacg

SEQ ID NO: 48556 - DNA, 120 bp, Homo sapiens
  misc_feature: 740 for SV(W|O) and 18S
attaaatcagttatggttcctttggtcgctcgctcctctcctacttggataactgtggtaattctagagctaatacatgccgacgggcgctgacccccttcgcgggggggatgcgtgcat

SEQ ID NO: 48557 - DNA, 120 bp, Homo sapiens
  misc_feature: 740 for SV(W|O) and 18S
agtatggttgcaaagctgaaacttaaaggaattgacggaagggcaccaccaggagtggagcctgcggcttaatttgactcaacacgggaaacctcacccggcccggacacggacaggatt

SEQ ID NO: 48558 - DNA, 120 bp, Homo sapiens
  misc_feature: 739 for SV(W|O) and 18S
taatttgactcaacacgggaaacctcacccggcccggacacggacaggattgacagattgatagctctttctcgattccgtgggtggtggtgcatggccgttcttagttggtggagcgat

SEQ ID NO: 48559 - DNA, 120 bp, Homo sapiens
  misc_feature: 739 for SV(W|O) and 18S
ggaagggcaccaccaggagtggagcctgcggcttaatttgactcaacacgggaaacctcacccggcccggacacggacaggattgacagattgatagctctttctcgattccgtgggtgg

SEQ ID NO: 48560 - DNA, 120 bp, Homo sapiens
  misc_feature: 739 for SV(W|O) and 18S
cacgcatcccccccgcgaagggggtcagcgcccgtcggcatgtattagctctagaattaccacagttatccaagtaggagaggagcgagcgaccaaaggaaccataactgatttaatgag

SEQ ID NO: 48561 - DNA, 120 bp, Homo sapiens
  misc_feature: 739 for SV(W|O) and 18S
accaccaggagtggagcctgcggcttaatttgactcaacacgggaaacctcacccggcccggacacggacaggattgacagattgatagctctttctcgattccgtgggtggtggtgcat

SEQ ID NO: 48562 - DNA, 120 bp, Homo sapiens
  misc_feature: 739 for SV(W|O) and 18S
acgggcggtgtgtacaaagggcagggacttaatcaacgcaagcttatgacccgcacttactgggaattcctcgttcatggggaataattgcaatccccgatccccatcacgaatggggtt

SEQ ID NO: 48563 - DNA, 120 bp, Homo sapiens
  misc_feature: 738 for SV(W|O) and 18S
tggttgcaaagctgaaacttaaaggaattgacggaagggcaccaccaggagtggagcctgcggcttaatttgactcaacacgggaaacctcacccggcccggacacggacaggattgaca

SEQ ID NO: 48564 - DNA, 120 bp, Homo sapiens
  misc_feature: 738 for SV(W|O) and 18S
gcgtgcagccccggacatctaagggcatcacagacctgttattgctcaatctcgggtggctgaacgccacttgtccctctaagaagttgggggacgccgaccgctcgggggtcgcgtaac

SEQ ID NO: 48565 - DNA, 120 bp, Homo sapiens
  misc_feature: 738 for SV(W|O) and 18S
gggagtatggttgcaaagctgaaacttaaaggaattgacggaagggcaccaccaggagtggagcctgcggcttaatttgactcaacacgggaaacctcacccggcccggacacggacagg

SEQ ID NO: 48566 - DNA, 120 bp, Homo sapiens
  misc_feature: 738 for SV(W|O) and 18S
ggccgatccgagggcctcactaaaccatccaatcggtagtagcgacgggcggtgtgtacaaagggcagggacttaatcaacgcaagcttatgacccgcacttactgggaattcctcgttc

SEQ ID NO: 48567 - DNA, 120 bp, Homo sapiens
  misc_feature: 738 for SV(W|O) and 18S
ctcactaaaccatccaatcggtagtagcgacgggcggtgtgtacaaagggcagggacttaatcaacgcaagcttatgacccgcacttactgggaattcctcgttcatggggaataattgc

SEQ ID NO: 48568 - DNA, 120 bp, Homo sapiens
  misc_feature: 738 for SV(W|O) and 18S
aattgacggaagggcaccaccaggagtggagcctgcggcttaatttgactcaacacgggaaacctcacccggcccggacacggacaggattgacagattgatagctctttctcgattccg

SEQ ID NO: 48569 - DNA, 120 bp, Homo sapiens
  misc_feature: 738 for SV(W|O) and 18S
catccaatcggtagtagcgacgggcggtgtgtacaaagggcagggacttaatcaacgcaagcttatgacccgcacttactgggaattcctcgttcatggggaataattgcaatccccgat

SEQ ID NO: 48570 - DNA, 120 bp, Homo sapiens
  misc_feature: 737 for SV(W|O) and 18S
gcggcgacgacccattcgaacgtctgccctatcaactttcgatggtagtcgccgtgcctaccatggtgaccacgggtgacggggaatcagggttcgattccggagagggagcctgagaaa

SEQ ID NO: 48571 - DNA, 120 bp, Homo sapiens
  misc_feature: 737 for SV(W|O) and 18S
tgacggaagggcaccaccaggagtggagcctgcggcttaatttgactcaacacgggaaacctcacccggcccggacacggacaggattgacagattgatagctctttctcgattccgtgg

SEQ ID NO: 48572 - DNA, 120 bp, Homo sapiens
  misc_feature: 737 for SV(W|O) and 18S
tcgcctcgcggcggaccgcccgcccgctcccaagatccaactacgagctttttaactgcagcaactttaatatacgctattggagctggaattaccgcggctgctggcaccagacttgcc

SEQ ID NO: 48573 - DNA, 120 bp, Homo sapiens
  misc_feature: 737 for SV(W|O) and 18S
tatcggaattaaccagacaaatcgctccaccaactaagaacggccatgcaccaccacccacggaatcgagaaagagctatcaatctgtcaatcctgtccgtgtccgggccgggtgaggtt

SEQ ID NO: 48574 - DNA, 120 bp, Homo sapiens
  misc_feature: 737 for SV(W|O) and 18S
gtgcagccccggacatctaagggcatcacagacctgttattgctcaatctcgggtggctgaacgccacttgtccctctaagaagttgggggacgccgaccgctcgggggtcgcgtaacta

SEQ ID NO: 48575 - DNA, 120 bp, Homo sapiens
  misc_feature: 737 for SV(W|O) and 18S
gtattgttatttttcgtcactacctccccgggtcgggagtgggtaatttgcgcgcctgctgccttccttggatgtggtagccgtttctcaggctccctctccggaatcgaaccctgattc

SEQ ID NO: 48576 - DNA, 120 bp, Homo sapiens
  misc_feature: 737 for SV(W|O) and 18S
ccccgtggcggcgacgacccattcgaacgtctgccctatcaactttcgatggtagtcgccgtgcctaccatggtgaccacgggtgacggggaatcagggttcgattccggagagggagcc

SEQ ID NO: 48577 - DNA, 120 bp, Homo sapiens
  misc_feature: 737 for SV(W|O) and 18S
cgcatcccccccgcgaagggggtcagcgcccgtcggcatgtattagctctagaattaccacagttatccaagtaggagaggagcgagcgaccaaaggaaccataactgatttaatgagcc

SEQ ID NO: 48578 - DNA, 120 bp, Homo sapiens
  misc_feature: 737 for SV(W|O) and 18S
gcatgctaactagttacgcgacccccgagcggtcggcgtcccccaacttcttagagggacaagtggcgttcagccacccgagattgagcaataacaggtctgtgatgcccttagatgtcc

SEQ ID NO: 48579 - DNA, 120 bp, Homo sapiens
  misc_feature: 737 for SV(W|O) and 18S
gacgggcggtgtgtacaaagggcagggacttaatcaacgcaagcttatgacccgcacttactgggaattcctcgttcatggggaataattgcaatccccgatccccatcacgaatggggt

SEQ ID NO: 48580 - DNA, 120 bp, Homo sapiens
  misc_feature: 737 for SV(W|O) and 18S
aatttgactcaacacgggaaacctcacccggcccggacacggacaggattgacagattgatagctctttctcgattccgtgggtggtggtgcatggccgttcttagttggtggagcgatt

SEQ ID NO: 48581 - DNA, 120 bp, Homo sapiens
  misc_feature: 736 for SV(W|O) and 18S
cgcgtgcagccccggacatctaagggcatcacagacctgttattgctcaatctcgggtggctgaacgccacttgtccctctaagaagttgggggacgccgaccgctcgggggtcgcgtaa

SEQ ID NO: 48582 - DNA, 120 bp, Homo sapiens
  misc_feature: 736 for SV(W|O) and 18S
ggagtatggttgcaaagctgaaacttaaaggaattgacggaagggcaccaccaggagtggagcctgcggcttaatttgactcaacacgggaaacctcacccggcccggacacggacagga

SEQ ID NO: 48583 - DNA, 120 bp, Homo sapiens
  misc_feature: 736 for SV(W|O) and 18S
cctctcggcgccccctcgatgctcttagctgagtgtcccgcggggcccgaagcgtttactttgaaaaaattagagtgttcaaagcaggcccgagccgcctggataccgcagctaggaata

SEQ ID NO: 48584 - DNA, 120 bp, Homo sapiens
  misc_feature: 736 for SV(W|O) and 18S
taaaccatccaatcggtagtagcgacgggcggtgtgtacaaagggcagggacttaatcaacgcaagcttatgacccgcacttactgggaattcctcgttcatggggaataattgcaatcc

SEQ ID NO: 48585 - DNA, 120 bp, Homo sapiens
  misc_feature: 736 for SV(W|O) and 18S
gggcggtggctcgcctcgcggcggaccgcccgcccgctcccaagatccaactacgagctttttaactgcagcaactttaatatacgctattggagctggaattaccgcggctgctggcac

SEQ ID NO: 48586 - DNA, 120 bp, Homo sapiens
  misc_feature: 736 for SV(W|O) and 18S
gtcggcccacggccctggcggagcgctgagaagacggtcgaacttgactatctagaggaagtaaaagtcgtaacaaggtttccgtaggtgaacctgcggaaggatcattaacggagcccg

SEQ ID NO: 48587 - DNA, 120 bp, Homo sapiens
  misc_feature: 736 for SV(W|O) and 18S
gtagccgtttctcaggctccctctccggaatcgaaccctgattccccgtcacccgtggtcaccatggtaggcacggcgactaccatcgaaagttgatagggcagacgttcgaatgggtcg

SEQ ID NO: 48588 - DNA, 120 bp, Homo sapiens
  misc_feature: 736 for SV(W|O) and 18S
ggcctcactaaaccatccaatcggtagtagcgacgggcggtgtgtacaaagggcagggacttaatcaacgcaagcttatgacccgcacttactgggaattcctcgttcatggggaataat

SEQ ID NO: 48589 - DNA, 120 bp, Homo sapiens
  misc_feature: 736 for SV(W|O) and 18S
gcctcactaaaccatccaatcggtagtagcgacgggcggtgtgtacaaagggcagggacttaatcaacgcaagcttatgacccgcacttactgggaattcctcgttcatggggaataatt

SEQ ID NO: 48590 - DNA, 120 bp, Homo sapiens
  misc_feature: 736 for SV(W|O) and 18S
cgtgcagccccggacatctaagggcatcacagacctgttattgctcaatctcgggtggctgaacgccacttgtccctctaagaagttgggggacgccgaccgctcgggggtcgcgtaact

SEQ ID NO: 48591 - DNA, 120 bp, Homo sapiens
  misc_feature: 736 for SV(W|O) and 18S
ccgtccccgccccttgcctctcggcgccccctcgatgctcttagctgagtgtcccgcggggcccgaagcgtttactttgaaaaaattagagtgttcaaagcaggcccgagccgcctggat

SEQ ID NO: 48592 - DNA, 120 bp, Homo sapiens
  misc_feature: 736 for SV(W|O) and 18S
acctgttattgctcaatctcgggtggctgaacgccacttgtccctctaagaagttgggggacgccgaccgctcgggggtcgcgtaactagttagcatgccagagtctcgttcgttatcgg

SEQ ID NO: 48593 - DNA, 120 bp, Homo sapiens
  misc_feature: 735 for SV(W|O) and 18S
gggggagtatggttgcaaagctgaaacttaaaggaattgacggaagggcaccaccaggagtggagcctgcggcttaatttgactcaacacgggaaacctcacccggcccggacacggaca

SEQ ID NO: 48594 - DNA, 120 bp, Homo sapiens
  misc_feature: 735 for SV(W|O) and 18S
ccggggtcggcccacggccctggcggagcgctgagaagacggtcgaacttgactatctagaggaagtaaaagtcgtaacaaggtttccgtaggtgaacctgcggaaggatcattaacgga

SEQ ID NO: 48595 - DNA, 120 bp, Homo sapiens
  misc_feature: 735 for SV(W|O) and 18S
ctcgcctcgcggcggaccgcccgcccgctcccaagatccaactacgagctttttaactgcagcaactttaatatacgctattggagctggaattaccgcggctgctggcaccagacttgc

SEQ ID NO: 48596 - DNA, 120 bp, Homo sapiens
  misc_feature: 735 for SV(W|O) and 18S
gacctgttattgctcaatctcgggtggctgaacgccacttgtccctctaagaagttgggggacgccgaccgctcgggggtcgcgtaactagttagcatgccagagtctcgttcgttatcg

SEQ ID NO: 48597 - DNA, 120 bp, Homo sapiens
  misc_feature: 735 for SV(W|O) and 18S
attgacggaagggcaccaccaggagtggagcctgcggcttaatttgactcaacacgggaaacctcacccggcccggacacggacaggattgacagattgatagctctttctcgattccgt

SEQ ID NO: 48598 - DNA, 120 bp, Homo sapiens
  misc_feature: 735 for SV(W|O) and 18S
agcctgcggcttaatttgactcaacacgggaaacctcacccggcccggacacggacaggattgacagattgatagctctttctcgattccgtgggtggtggtgcatggccgttcttagtt

SEQ ID NO: 48599 - DNA, 120 bp, Homo sapiens
  misc_feature: 734 for SV(W|O) and 18S
tggagcctgcggcttaatttgactcaacacgggaaacctcacccggcccggacacggacaggattgacagattgatagctctttctcgattccgtgggtggtggtgcatggccgttctta

SEQ ID NO: 48600 - DNA, 120 bp, Homo sapiens
  misc_feature: 734 for SV(W|O) and 18S
gagaggcaaggggcggggacgggcggtggctcgcctcgcggcggaccgcccgcccgctcccaagatccaactacgagctttttaactgcagcaactttaatatacgctattggagctgga

SEQ ID NO: 48601 - DNA, 120 bp, Homo sapiens
  misc_feature: 734 for SV(W|O) and 18S
aagctgaaacttaaaggaattgacggaagggcaccaccaggagtggagcctgcggcttaatttgactcaacacgggaaacctcacccggcccggacacggacaggattgacagattgata

SEQ ID NO: 48602 - DNA, 120 bp, Homo sapiens
  misc_feature: 734 for SV(W|O) and 18S
gtggagcctgcggcttaatttgactcaacacgggaaacctcacccggcccggacacggacaggattgacagattgatagctctttctcgattccgtgggtggtggtgcatggccgttctt

SEQ ID NO: 48603 - DNA, 120 bp, Homo sapiens
  misc_feature: 734 for SV(W|O) and 18S
ggagcctgcggcttaatttgactcaacacgggaaacctcacccggcccggacacggacaggattgacagattgatagctctttctcgattccgtgggtggtggtgcatggccgttcttag

SEQ ID NO: 48604 - DNA, 120 bp, Homo sapiens
  misc_feature: 734 for SV(W|O) and 18S
cgggcggtgtgtacaaagggcagggacttaatcaacgcaagcttatgacccgcacttactgggaattcctcgttcatggggaataattgcaatccccgatccccatcacgaatggggttc

SEQ ID NO: 48605 - DNA, 120 bp, Homo sapiens
  misc_feature: 734 for SV(W|O) and 18S
cgccccttgcctctcggcgccccctcgatgctcttagctgagtgtcccgcggggcccgaagcgtttactttgaaaaaattagagtgttcaaagcaggcccgagccgcctggataccgcag

SEQ ID NO: 48606 - DNA, 120 bp, Homo sapiens
  misc_feature: 734 for SV(W|O) and 18S
cctcactaaaccatccaatcggtagtagcgacgggcggtgtgtacaaagggcagggacttaatcaacgcaagcttatgacccgcacttactgggaattcctcgttcatggggaataattg

SEQ ID NO: 48607 - DNA, 120 bp, Homo sapiens
  misc_feature: 733 for SV(W|O) and 18S
ttgacggaagggcaccaccaggagtggagcctgcggcttaatttgactcaacacgggaaacctcacccggcccggacacggacaggattgacagattgatagctctttctcgattccgtg

SEQ ID NO: 48608 - DNA, 120 bp, Homo sapiens
  misc_feature: 733 for SV(W|O) and 18S
ccgatccgagggcctcactaaaccatccaatcggtagtagcgacgggcggtgtgtacaaagggcagggacttaatcaacgcaagcttatgacccgcacttactgggaattcctcgttcat

SEQ ID NO: 48609 - DNA, 120 bp, Homo sapiens
  misc_feature: 733 for SV(W|O) and 18S
catcccccccgcgaagggggtcagcgcccgtcggcatgtattagctctagaattaccacagttatccaagtaggagaggagcgagcgaccaaaggaaccataactgatttaatgagccat

SEQ ID NO: 48610 - DNA, 120 bp, Homo sapiens
  misc_feature: 733 for SV(W|O) and 18S
aggagtggagcctgcggcttaatttgactcaacacgggaaacctcacccggcccggacacggacaggattgacagattgatagctctttctcgattccgtgggtggtggtgcatggccgt

SEQ ID NO: 48611 - DNA, 120 bp, Homo sapiens
  misc_feature: 732 for SV(W|O) and 18S
cgccgcgaggcgagccaccgcccgtccccgccccttgcctctcggcgccccctcgatgctcttagctgagtgtcccgcggggcccgaagcgtttactttgaaaaaattagagtgttcaaa

SEQ ID NO: 48612 - DNA, 120 bp, Homo sapiens
  misc_feature: 732 for SV(W|O) and 18S
ggcggcgacgacccattcgaacgtctgccctatcaactttcgatggtagtcgccgtgcctaccatggtgaccacgggtgacggggaatcagggttcgattccggagagggagcctgagaa

SEQ ID NO: 48613 - DNA, 120 bp, Homo sapiens
  misc_feature: 732 for SV(W|O) and 18S
cgagggcctcactaaaccatccaatcggtagtagcgacgggcggtgtgtacaaagggcagggacttaatcaacgcaagcttatgacccgcacttactgggaattcctcgttcatggggaa

SEQ ID NO: 48614 - DNA, 120 bp, Homo sapiens
  misc_feature: 732 for SV(W|O) and 18S
gccgatccgagggcctcactaaaccatccaatcggtagtagcgacgggcggtgtgtacaaagggcagggacttaatcaacgcaagcttatgacccgcacttactgggaattcctcgttca

SEQ ID NO: 48615 - DNA, 120 bp, Homo sapiens
  misc_feature: 732 for SV(W|O) and 18S
ggtggctcgcctcgcggcggaccgcccgcccgctcccaagatccaactacgagctttttaactgcagcaactttaatatacgctattggagctggaattaccgcggctgctggcaccaga

SEQ ID NO: 48616 - DNA, 120 bp, Homo sapiens
  misc_feature: 732 for SV(W|O) and 18S
ccatccaatcggtagtagcgacgggcggtgtgtacaaagggcagggacttaatcaacgcaagcttatgacccgcacttactgggaattcctcgttcatggggaataattgcaatccccga

SEQ ID NO: 48617 - DNA, 120 bp, Homo sapiens
  misc_feature: 732 for SV(W|O) and 18S
ggagtggagcctgcggcttaatttgactcaacacgggaaacctcacccggcccggacacggacaggattgacagattgatagctctttctcgattccgtgggtggtggtgcatggccgtt

SEQ ID NO: 48618 - DNA, 120 bp, Homo sapiens
  misc_feature: 732 for SV(W|O) and 18S
cccccgtggcggcgacgacccattcgaacgtctgccctatcaactttcgatggtagtcgccgtgcctaccatggtgaccacgggtgacggggaatcagggttcgattccggagagggagc

SEQ ID NO: 48619 - DNA, 120 bp, Homo sapiens
  misc_feature: 732 for SV(W|O) and 18S
gagtggagcctgcggcttaatttgactcaacacgggaaacctcacccggcccggacacggacaggattgacagattgatagctctttctcgattccgtgggtggtggtgcatggccgttc

SEQ ID NO: 48620 - DNA, 120 bp, Homo sapiens
  misc_feature: 731 for SV(W|O) and 18S
tcggatcggccccgccggggtcggcccacggccctggcggagcgctgagaagacggtcgaacttgactatctagaggaagtaaaagtcgtaacaaggtttccgtaggtgaacctgcggaa

SEQ ID NO: 48621 - DNA, 120 bp, Homo sapiens
  misc_feature: 731 for SV(W|O) and 18S
ccgtggcggcgacgacccattcgaacgtctgccctatcaactttcgatggtagtcgccgtgcctaccatggtgaccacgggtgacggggaatcagggttcgattccggagagggagcctg

SEQ ID NO: 48622 - DNA, 120 bp, Homo sapiens
  misc_feature: 731 for SV(W|O) and 18S
atttgactcaacacgggaaacctcacccggcccggacacggacaggattgacagattgatagctctttctcgattccgtgggtggtggtgcatggccgttcttagttggtggagcgattt

SEQ ID NO: 48623 - DNA, 120 bp, Homo sapiens
  misc_feature: 730 for SV(W|O) and 18S
ctctcggcgccccctcgatgctcttagctgagtgtcccgcggggcccgaagcgtttactttgaaaaaattagagtgttcaaagcaggcccgagccgcctggataccgcagctaggaataa

SEQ ID NO: 48624 - DNA, 120 bp, Homo sapiens
  misc_feature: 730 for SV(W|O) and 18S
gctcgcctcgcggcggaccgcccgcccgctcccaagatccaactacgagctttttaactgcagcaactttaatatacgctattggagctggaattaccgcggctgctggcaccagacttg

SEQ ID NO: 48625 - DNA, 120 bp, Homo sapiens
  misc_feature: 729 for SV(W|O) and 18S
ccgagggcctcactaaaccatccaatcggtagtagcgacgggcggtgtgtacaaagggcagggacttaatcaacgcaagcttatgacccgcacttactgggaattcctcgttcatgggga

SEQ ID NO: 48626 - DNA, 120 bp, Homo sapiens
  misc_feature: 729 for SV(W|O) and 18S
gaagggcaccaccaggagtggagcctgcggcttaatttgactcaacacgggaaacctcacccggcccggacacggacaggattgacagattgatagctctttctcgattccgtgggtggt

SEQ ID NO: 48627 - DNA, 120 bp, Homo sapiens
  misc_feature: 729 for SV(W|O) and 18S
ctcaacacgggaaacctcacccggcccggacacggacaggattgacagattgatagctctttctcgattccgtgggtggtggtgcatggccgttcttagttggtggagcgatttgtctgg

SEQ ID NO: 48628 - DNA, 120 bp, Homo sapiens
  misc_feature: 729 for SV(W|O) and 18S
cggaagggcaccaccaggagtggagcctgcggcttaatttgactcaacacgggaaacctcacccggcccggacacggacaggattgacagattgatagctctttctcgattccgtgggtg

SEQ ID NO: 48629 - DNA, 120 bp, Homo sapiens
  misc_feature: 729 for SV(W|O) and 18S
atcgcacgccccccgtggcggcgacgacccattcgaacgtctgccctatcaactttcgatggtagtcgccgtgcctaccatggtgaccacgggtgacggggaatcagggttcgattccgg

SEQ ID NO: 48630 - DNA, 120 bp, Homo sapiens
  misc_feature: 729 for SV(W|O) and 18S
agggcaccaccaggagtggagcctgcggcttaatttgactcaacacgggaaacctcacccggcccggacacggacaggattgacagattgatagctctttctcgattccgtgggtggtgg

SEQ ID NO: 48631 - DNA, 120 bp, Homo sapiens
  misc_feature: 729 for SV(W|O) and 18S
aagggcaccaccaggagtggagcctgcggcttaatttgactcaacacgggaaacctcacccggcccggacacggacaggattgacagattgatagctctttctcgattccgtgggtggtg

SEQ ID NO: 48632 - DNA, 120 bp, Homo sapiens
  misc_feature: 729 for SV(W|O) and 18S
agtggagcctgcggcttaatttgactcaacacgggaaacctcacccggcccggacacggacaggattgacagattgatagctctttctcgattccgtgggtggtggtgcatggccgttct

SEQ ID NO: 48633 - DNA, 120 bp, Homo sapiens
  misc_feature: 728 for SV(W|O) and 18S
ttgactcaacacgggaaacctcacccggcccggacacggacaggattgacagattgatagctctttctcgattccgtgggtggtggtgcatggccgttcttagttggtggagcgatttgt

SEQ ID NO: 48634 - DNA, 120 bp, Homo sapiens
  misc_feature: 728 for SV(W|O) and 18S
tgactcaacacgggaaacctcacccggcccggacacggacaggattgacagattgatagctctttctcgattccgtgggtggtggtgcatggccgttcttagttggtggagcgatttgtc

SEQ ID NO: 48635 - DNA, 120 bp, Homo sapiens
  misc_feature: 728 for SV(W|O) and 18S
gtggctcgcctcgcggcggaccgcccgcccgctcccaagatccaactacgagctttttaactgcagcaactttaatatacgctattggagctggaattaccgcggctgctggcaccagac

SEQ ID NO: 48636 - DNA, 120 bp, Homo sapiens
  misc_feature: 728 for SV(W|O) and 18S
ggggggagtatggttgcaaagctgaaacttaaaggaattgacggaagggcaccaccaggagtggagcctgcggcttaatttgactcaacacgggaaacctcacccggcccggacacggac

SEQ ID NO: 48637 - DNA, 120 bp, Homo sapiens
  misc_feature: 728 for SV(W|O) and 18S
gcccgtccccgccccttgcctctcggcgccccctcgatgctcttagctgagtgtcccgcggggcccgaagcgtttactttgaaaaaattagagtgttcaaagcaggcccgagccgcctgg

SEQ ID NO: 48638 - DNA, 120 bp, Homo sapiens
  misc_feature: 728 for SV(W|O) and 18S
gagcctgcggcttaatttgactcaacacgggaaacctcacccggcccggacacggacaggattgacagattgatagctctttctcgattccgtgggtggtggtgcatggccgttcttagt

SEQ ID NO: 48639 - DNA, 120 bp, Homo sapiens
  misc_feature: 728 for SV(W|O) and 18S
cccgtggcggcgacgacccattcgaacgtctgccctatcaactttcgatggtagtcgccgtgcctaccatggtgaccacgggtgacggggaatcagggttcgattccggagagggagcct

SEQ ID NO: 48640 - DNA, 120 bp, Homo sapiens
  misc_feature: 727 for SV(W|O) and 18S
tttgactcaacacgggaaacctcacccggcccggacacggacaggattgacagattgatagctctttctcgattccgtgggtggtggtgcatggccgttcttagttggtggagcgatttg

SEQ ID NO: 48641 - DNA, 120 bp, Homo sapiens
  misc_feature: 727 for SV(W|O) and 18S
tgtattgttatttttcgtcactacctccccgggtcgggagtgggtaatttgcgcgcctgctgccttccttggatgtggtagccgtttctcaggctccctctccggaatcgaaccctgatt

SEQ ID NO: 48642 - DNA, 120 bp, Homo sapiens
  misc_feature: 727 for SV(W|O) and 18S
tagccgtttctcaggctccctctccggaatcgaaccctgattccccgtcacccgtggtcaccatggtaggcacggcgactaccatcgaaagttgatagggcagacgttcgaatgggtcgt

SEQ ID NO: 48643 - DNA, 120 bp, Homo sapiens
  misc_feature: 727 for SV(W|O) and 18S
ggggagtatggttgcaaagctgaaacttaaaggaattgacggaagggcaccaccaggagtggagcctgcggcttaatttgactcaacacgggaaacctcacccggcccggacacggacag

SEQ ID NO: 48644 - DNA, 120 bp, Homo sapiens
  misc_feature: 727 for SV(W|O) and 18S
gcatttgccaagaatgttttcattaatcaagaacgaaagtcggaggttcgaagacgatcagataccgtcgtagttccgaccataaacgatgccgaccggcgatgcggcggcgttattccc

SEQ ID NO: 48645 - DNA, 120 bp, Homo sapiens
  misc_feature: 727 for SV(W|O) and 18S
agccgtttctcaggctccctctccggaatcgaaccctgattccccgtcacccgtggtcaccatggtaggcacggcgactaccatcgaaagttgatagggcagacgttcgaatgggtcgtc

SEQ ID NO: 48646 - DNA, 120 bp, Homo sapiens
  misc_feature: 727 for SV(W|O) and 18S
ccccccgtggcggcgacgacccattcgaacgtctgccctatcaactttcgatggtagtcgccgtgcctaccatggtgaccacgggtgacggggaatcagggttcgattccggagagggag

SEQ ID NO: 48647 - DNA, 120 bp, Homo sapiens
  misc_feature: 726 for SV(W|O) and 18S
gcatcccccccgcgaagggggtcagcgcccgtcggcatgtattagctctagaattaccacagttatccaagtaggagaggagcgagcgaccaaaggaaccataactgatttaatgagcca

SEQ ID NO: 48648 - DNA, 120 bp, Homo sapiens
  misc_feature: 726 for SV(W|O) and 18S
tggcggcgacgacccattcgaacgtctgccctatcaactttcgatggtagtcgccgtgcctaccatggtgaccacgggtgacggggaatcagggttcgattccggagagggagcctgaga

SEQ ID NO: 48649 - DNA, 120 bp, Homo sapiens
  misc_feature: 726 for SV(W|O) and 18S
cgggcggtggctcgcctcgcggcggaccgcccgcccgctcccaagatccaactacgagctttttaactgcagcaactttaatatacgctattggagctggaattaccgcggctgctggca

SEQ ID NO: 48650 - DNA, 120 bp, Homo sapiens
  misc_feature: 726 for SV(W|O) and 18S
cccgtccccgccccttgcctctcggcgccccctcgatgctcttagctgagtgtcccgcggggcccgaagcgtttactttgaaaaaattagagtgttcaaagcaggcccgagccgcctgga

SEQ ID NO: 48651 - DNA, 120 bp, Homo sapiens
  misc_feature: 726 for SV(W|O) and 18S
cgtggcggcgacgacccattcgaacgtctgccctatcaactttcgatggtagtcgccgtgcctaccatggtgaccacgggtgacggggaatcagggttcgattccggagagggagcctga

SEQ ID NO: 48652 - DNA, 120 bp, Homo sapiens
  misc_feature: 726 for SV(W|O) and 18S
gtttctcaggctccctctccggaatcgaaccctgattccccgtcacccgtggtcaccatggtaggcacggcgactaccatcgaaagttgatagggcagacgttcgaatgggtcgtcgccg

SEQ ID NO: 48653 - DNA, 120 bp, Homo sapiens
  misc_feature: 726 for SV(W|O) and 18S
actcaacacgggaaacctcacccggcccggacacggacaggattgacagattgatagctctttctcgattccgtgggtggtggtgcatggccgttcttagttggtggagcgatttgtctg

SEQ ID NO: 48654 - DNA, 120 bp, Homo sapiens
  misc_feature: 725 for SV(W|O) and 18S
gcccctctccggccccggccggggggcgggcgccggcggctttggtgactctagataacctcgggccgatcgcacgccccccgtggcggcgacgacccattcgaacgtctgccctatcaa

SEQ ID NO: 48655 - DNA, 120 bp, Homo sapiens
  misc_feature: 725 for SV(W|O) and 18S
agaggcaaggggcggggacgggcggtggctcgcctcgcggcggaccgcccgcccgctcccaagatccaactacgagctttttaactgcagcaactttaatatacgctattggagctggaa

SEQ ID NO: 48656 - DNA, 120 bp, Homo sapiens
  misc_feature: 725 for SV(W|O) and 18S
gcggtggctcgcctcgcggcggaccgcccgcccgctcccaagatccaactacgagctttttaactgcagcaactttaatatacgctattggagctggaattaccgcggctgctggcacca

SEQ ID NO: 48657 - DNA, 120 bp, Homo sapiens
  misc_feature: 725 for SV(W|O) and 18S
cgccccccgtggcggcgacgacccattcgaacgtctgccctatcaactttcgatggtagtcgccgtgcctaccatggtgaccacgggtgacggggaatcagggttcgattccggagaggg

SEQ ID NO: 48658 - DNA, 120 bp, Homo sapiens
  misc_feature: 725 for SV(W|O) and 18S
atcccccccgcgaagggggtcagcgcccgtcggcatgtattagctctagaattaccacagttatccaagtaggagaggagcgagcgaccaaaggaaccataactgatttaatgagccatt

SEQ ID NO: 48659 - DNA, 120 bp, Homo sapiens
  misc_feature: 724 for SV(W|O) and 18S
tcccccccgcgaagggggtcagcgcccgtcggcatgtattagctctagaattaccacagttatccaagtaggagaggagcgagcgaccaaaggaaccataactgatttaatgagccattc

SEQ ID NO: 48660 - DNA, 120 bp, Homo sapiens
  misc_feature: 724 for SV(W|O) and 18S
gcgcgtgcagccccggacatctaagggcatcacagacctgttattgctcaatctcgggtggctgaacgccacttgtccctctaagaagttgggggacgccgaccgctcgggggtcgcgta

SEQ ID NO: 48661 - DNA, 120 bp, Homo sapiens
  misc_feature: 724 for SV(W|O) and 18S
gcctctcggcgccccctcgatgctcttagctgagtgtcccgcggggcccgaagcgtttactttgaaaaaattagagtgttcaaagcaggcccgagccgcctggataccgcagctaggaat

SEQ ID NO: 48662 - DNA, 120 bp, Homo sapiens
  misc_feature: 723 for SV(W|O) and 18S
tcggcgccccctcgatgctcttagctgagtgtcccgcggggcccgaagcgtttactttgaaaaaattagagtgttcaaagcaggcccgagccgcctggataccgcagctaggaataatgg

SEQ ID NO: 48663 - DNA, 120 bp, Homo sapiens
  misc_feature: 723 for SV(W|O) and 18S
gccccccgtggcggcgacgacccattcgaacgtctgccctatcaactttcgatggtagtcgccgtgcctaccatggtgaccacgggtgacggggaatcagggttcgattccggagaggga

SEQ ID NO: 48664 - DNA, 120 bp, Homo sapiens
  misc_feature: 723 for SV(W|O) and 18S
cggtggctcgcctcgcggcggaccgcccgcccgctcccaagatccaactacgagctttttaactgcagcaactttaatatacgctattggagctggaattaccgcggctgctggcaccag

SEQ ID NO: 48665 - DNA, 120 bp, Homo sapiens
  misc_feature: 723 for SV(W|O) and 18S
aattaaccagacaaatcgctccaccaactaagaacggccatgcaccaccacccacggaatcgagaaagagctatcaatctgtcaatcctgtccgtgtccgggccgggtgaggtttcccgt

SEQ ID NO: 48666 - DNA, 120 bp, Homo sapiens
  misc_feature: 722 for SV(W|O) and 18S
tgagaaacggctaccacatccaaggaaggcagcaggcgcgcaaattacccactcccgacccggggaggtagtgacgaaaaataacaatacaggactctttcgaggccctgtaattggaat

SEQ ID NO: 48667 - DNA, 120 bp, Homo sapiens
  misc_feature: 722 for SV(W|O) and 18S
cggcgccccctcgatgctcttagctgagtgtcccgcggggcccgaagcgtttactttgaaaaaattagagtgttcaaagcaggcccgagccgcctggataccgcagctaggaataatgga

SEQ ID NO: 48668 - DNA, 120 bp, Homo sapiens
  misc_feature: 722 for SV(W|O) and 18S
aaatcagttatggttcctttggtcgctcgctcctctcctacttggataactgtggtaattctagagctaatacatgccgacgggcgctgacccccttcgcgggggggatgcgtgcattta

SEQ ID NO: 48669 - DNA, 120 bp, Homo sapiens
  misc_feature: 722 for SV(W|O) and 18S
ggcggtggctcgcctcgcggcggaccgcccgcccgctcccaagatccaactacgagctttttaactgcagcaactttaatatacgctattggagctggaattaccgcggctgctggcacc

SEQ ID NO: 48670 - DNA, 120 bp, Homo sapiens
  misc_feature: 722 for SV(W|O) and 18S
acgcatcccccccgcgaagggggtcagcgcccgtcggcatgtattagctctagaattaccacagttatccaagtaggagaggagcgagcgaccaaaggaaccataactgatttaatgagc

SEQ ID NO: 48671 - DNA, 120 bp, Homo sapiens
  misc_feature: 721 for SV(W|O) and 18S
gtggcggcgacgacccattcgaacgtctgccctatcaactttcgatggtagtcgccgtgcctaccatggtgaccacgggtgacggggaatcagggttcgattccggagagggagcctgag

SEQ ID NO: 48672 - DNA, 120 bp, Homo sapiens
  misc_feature: 721 for SV(W|O) and 18S
cgcccgtccccgccccttgcctctcggcgccccctcgatgctcttagctgagtgtcccgcggggcccgaagcgtttactttgaaaaaattagagtgttcaaagcaggcccgagccgcctg

SEQ ID NO: 48673 - DNA, 120 bp, Homo sapiens
  misc_feature: 720 for SV(W|O) and 18S
agcccctctccggccccggccggggggcgggcgccggcggctttggtgactctagataacctcgggccgatcgcacgccccccgtggcggcgacgacccattcgaacgtctgccctatca

SEQ ID NO: 48674 - DNA, 120 bp, Homo sapiens
  misc_feature: 720 for SV(W|O) and 18S
tcgcacgccccccgtggcggcgacgacccattcgaacgtctgccctatcaactttcgatggtagtcgccgtgcctaccatggtgaccacgggtgacggggaatcagggttcgattccgga

SEQ ID NO: 48675 - DNA, 120 bp, Homo sapiens
  misc_feature: 720 for SV(W|O) and 18S
cccctctccggccccggccggggggcgggcgccggcggctttggtgactctagataacctcgggccgatcgcacgccccccgtggcggcgacgacccattcgaacgtctgccctatcaac

SEQ ID NO: 48676 - DNA, 120 bp, Homo sapiens
  misc_feature: 720 for SV(W|O) and 18S
acgccccccgtggcggcgacgacccattcgaacgtctgccctatcaactttcgatggtagtcgccgtgcctaccatggtgaccacgggtgacggggaatcagggttcgattccggagagg

SEQ ID NO: 48677 - DNA, 120 bp, Homo sapiens
  misc_feature: 720 for SV(W|O) and 18S
attaaccagacaaatcgctccaccaactaagaacggccatgcaccaccacccacggaatcgagaaagagctatcaatctgtcaatcctgtccgtgtccgggccgggtgaggtttcccgtg

SEQ ID NO: 48678 - DNA, 120 bp, Homo sapiens
  misc_feature: 719 for SV(W|O) and 18S
ttgcctctcggcgccccctcgatgctcttagctgagtgtcccgcggggcccgaagcgtttactttgaaaaaattagagtgttcaaagcaggcccgagccgcctggataccgcagctagga

SEQ ID NO: 48679 - DNA, 120 bp, Homo sapiens
  misc_feature: 719 for SV(W|O) and 18S
cgtttactttgaaaaaattagagtgttcaaagcaggcccgagccgcctggataccgcagctaggaataatggaataggaccgcggttctattttgttggttttcggaactgaggccatga

SEQ ID NO: 48680 - DNA, 120 bp, Homo sapiens
  misc_feature: 719 for SV(W|O) and 18S
cccttgcctctcggcgccccctcgatgctcttagctgagtgtcccgcggggcccgaagcgtttactttgaaaaaattagagtgttcaaagcaggcccgagccgcctggataccgcagcta

SEQ ID NO: 48681 - DNA, 120 bp, Homo sapiens
  misc_feature: 719 for SV(W|O) and 18S
cacgccccccgtggcggcgacgacccattcgaacgtctgccctatcaactttcgatggtagtcgccgtgcctaccatggtgaccacgggtgacggggaatcagggttcgattccggagag

SEQ ID NO: 48682 - DNA, 120 bp, Homo sapiens
  misc_feature: 719 for SV(W|O) and 18S
ctaccacatccaaggaaggcagcaggcgcgcaaattacccactcccgacccggggaggtagtgacgaaaaataacaatacaggactctttcgaggccctgtaattggaatgagtccactt

SEQ ID NO: 48683 - DNA, 120 bp, Homo sapiens
  misc_feature: 718 for SV(W|O) and 18S
cgcacgccccccgtggcggcgacgacccattcgaacgtctgccctatcaactttcgatggtagtcgccgtgcctaccatggtgaccacgggtgacggggaatcagggttcgattccggag

SEQ ID NO: 48684 - DNA, 120 bp, Homo sapiens
  misc_feature: 717 for SV(W|O) and 18S
gccccttgcctctcggcgccccctcgatgctcttagctgagtgtcccgcggggcccgaagcgtttactttgaaaaaattagagtgttcaaagcaggcccgagccgcctggataccgcagc

SEQ ID NO: 48685 - DNA, 120 bp, Homo sapiens
  misc_feature: 717 for SV(W|O) and 18S
gcgcgcgtgcagccccggacatctaagggcatcacagacctgttattgctcaatctcgggtggctgaacgccacttgtccctctaagaagttgggggacgccgaccgctcgggggtcgcg

SEQ ID NO: 48686 - DNA, 120 bp, Homo sapiens
  misc_feature: 717 for SV(W|O) and 18S
gagggagcctgagaaacggctaccacatccaaggaaggcagcaggcgcgcaaattacccactcccgacccggggaggtagtgacgaaaaataacaatacaggactctttcgaggccctgt

SEQ ID NO: 48687 - DNA, 120 bp, Homo sapiens
  misc_feature: 717 for SV(W|O) and 18S
gagaaacggctaccacatccaaggaaggcagcaggcgcgcaaattacccactcccgacccggggaggtagtgacgaaaaataacaatacaggactctttcgaggccctgtaattggaatg

SEQ ID NO: 48688 - DNA, 120 bp, Homo sapiens
  misc_feature: 717 for SV(W|O) and 18S
gactcaacacgggaaacctcacccggcccggacacggacaggattgacagattgatagctctttctcgattccgtgggtggtggtgcatggccgttcttagttggtggagcgatttgtct

SEQ ID NO: 48689 - DNA, 120 bp, Homo sapiens
  misc_feature: 717 for SV(W|O) and 18S
ctcggcgccccctcgatgctcttagctgagtgtcccgcggggcccgaagcgtttactttgaaaaaattagagtgttcaaagcaggcccgagccgcctggataccgcagctaggaataatg

SEQ ID NO: 48690 - DNA, 120 bp, Homo sapiens
  misc_feature: 717 for SV(W|O) and 18S
accatccaatcggtagtagcgacgggcggtgtgtacaaagggcagggacttaatcaacgcaagcttatgacccgcacttactgggaattcctcgttcatggggaataattgcaatccccg

SEQ ID NO: 48691 - DNA, 120 bp, Homo sapiens
  misc_feature: 717 for SV(W|O) and 18S
acggaagggcaccaccaggagtggagcctgcggcttaatttgactcaacacgggaaacctcacccggcccggacacggacaggattgacagattgatagctctttctcgattccgtgggt

SEQ ID NO: 48692 - DNA, 120 bp, Homo sapiens
  misc_feature: 716 for SV(W|O) and 18S
ctgagaaacggctaccacatccaaggaaggcagcaggcgcgcaaattacccactcccgacccggggaggtagtgacgaaaaataacaatacaggactctttcgaggccctgtaattggaa

SEQ ID NO: 48693 - DNA, 120 bp, Homo sapiens
  misc_feature: 716 for SV(W|O) and 18S
tctcggcgccccctcgatgctcttagctgagtgtcccgcggggcccgaagcgtttactttgaaaaaattagagtgttcaaagcaggcccgagccgcctggataccgcagctaggaataat

SEQ ID NO: 48694 - DNA, 120 bp, Homo sapiens
  misc_feature: 716 for SV(W|O) and 18S
agggagcctgagaaacggctaccacatccaaggaaggcagcaggcgcgcaaattacccactcccgacccggggaggtagtgacgaaaaataacaatacaggactctttcgaggccctgta

SEQ ID NO: 48695 - DNA, 120 bp, Homo sapiens
  misc_feature: 716 for SV(W|O) and 18S
gctaccacatccaaggaaggcagcaggcgcgcaaattacccactcccgacccggggaggtagtgacgaaaaataacaatacaggactctttcgaggccctgtaattggaatgagtccact

SEQ ID NO: 48696 - DNA, 120 bp, Homo sapiens
  misc_feature: 716 for SV(W|O) and 18S
acgggcggtggctcgcctcgcggcggaccgcccgcccgctcccaagatccaactacgagctttttaactgcagcaactttaatatacgctattggagctggaattaccgcggctgctggc

SEQ ID NO: 48697 - DNA, 120 bp, Homo sapiens
  misc_feature: 716 for SV(W|O) and 18S
gagcctgagaaacggctaccacatccaaggaaggcagcaggcgcgcaaattacccactcccgacccggggaggtagtgacgaaaaataacaatacaggactctttcgaggccctgtaatt

SEQ ID NO: 48698 - DNA, 120 bp, Homo sapiens
  misc_feature: 716 for SV(W|O) and 18S
ccttgcctctcggcgccccctcgatgctcttagctgagtgtcccgcggggcccgaagcgtttactttgaaaaaattagagtgttcaaagcaggcccgagccgcctggataccgcagctag

SEQ ID NO: 48699 - DNA, 120 bp, Homo sapiens
  misc_feature: 715 for SV(W|O) and 18S
aaaccatccaatcggtagtagcgacgggcggtgtgtacaaagggcagggacttaatcaacgcaagcttatgacccgcacttactgggaattcctcgttcatggggaataattgcaatccc

SEQ ID NO: 48700 - DNA, 120 bp, Homo sapiens
  misc_feature: 715 for SV(W|O) and 18S
ggaattaaccagacaaatcgctccaccaactaagaacggccatgcaccaccacccacggaatcgagaaagagctatcaatctgtcaatcctgtccgtgtccgggccgggtgaggtttccc

SEQ ID NO: 48701 - DNA, 120 bp, Homo sapiens
  misc_feature: 715 for SV(W|O) and 18S
ggagcctgagaaacggctaccacatccaaggaaggcagcaggcgcgcaaattacccactcccgacccggggaggtagtgacgaaaaataacaatacaggactctttcgaggccctgtaat

SEQ ID NO: 48702 - DNA, 120 bp, Homo sapiens
  misc_feature: 715 for SV(W|O) and 18S
gcgtttactttgaaaaaattagagtgttcaaagcaggcccgagccgcctggataccgcagctaggaataatggaataggaccgcggttctattttgttggttttcggaactgaggccatg

SEQ ID NO: 48703 - DNA, 120 bp, Homo sapiens
  misc_feature: 715 for SV(W|O) and 18S
gaggcaaggggcggggacgggcggtggctcgcctcgcggcggaccgcccgcccgctcccaagatccaactacgagctttttaactgcagcaactttaatatacgctattggagctggaat

SEQ ID NO: 48704 - DNA, 120 bp, Homo sapiens
  misc_feature: 714 for SV(W|O) and 18S
tgcctctcggcgccccctcgatgctcttagctgagtgtcccgcggggcccgaagcgtttactttgaaaaaattagagtgttcaaagcaggcccgagccgcctggataccgcagctaggaa

SEQ ID NO: 48705 - DNA, 120 bp, Homo sapiens
  misc_feature: 714 for SV(W|O) and 18S
gccgcgaggcgagccaccgcccgtccccgccccttgcctctcggcgccccctcgatgctcttagctgagtgtcccgcggggcccgaagcgtttactttgaaaaaattagagtgttcaaag

SEQ ID NO: 48706 - DNA, 120 bp, Homo sapiens
  misc_feature: 714 for SV(W|O) and 18S
ctgtattgttatttttcgtcactacctccccgggtcgggagtgggtaatttgcgcgcctgctgccttccttggatgtggtagccgtttctcaggctccctctccggaatcgaaccctgat

SEQ ID NO: 48707 - DNA, 120 bp, Homo sapiens
  misc_feature: 713 for SV(W|O) and 18S
gcacgccccccgtggcggcgacgacccattcgaacgtctgccctatcaactttcgatggtagtcgccgtgcctaccatggtgaccacgggtgacggggaatcagggttcgattccggaga

SEQ ID NO: 48708 - DNA, 120 bp, Homo sapiens
  misc_feature: 713 for SV(W|O) and 18S
aaccatccaatcggtagtagcgacgggcggtgtgtacaaagggcagggacttaatcaacgcaagcttatgacccgcacttactgggaattcctcgttcatggggaataattgcaatcccc

SEQ ID NO: 48709 - DNA, 120 bp, Homo sapiens
  misc_feature: 713 for SV(W|O) and 18S
agcatttgccaagaatgttttcattaatcaagaacgaaagtcggaggttcgaagacgatcagataccgtcgtagttccgaccataaacgatgccgaccggcgatgcggcggcgttattcc

SEQ ID NO: 48710 - DNA, 120 bp, Homo sapiens
  misc_feature: 713 for SV(W|O) and 18S
cttgcctctcggcgccccctcgatgctcttagctgagtgtcccgcggggcccgaagcgtttactttgaaaaaattagagtgttcaaagcaggcccgagccgcctggataccgcagctagg

SEQ ID NO: 48711 - DNA, 120 bp, Homo sapiens
  misc_feature: 713 for SV(W|O) and 18S
ccctctccggccccggccggggggcgggcgccggcggctttggtgactctagataacctcgggccgatcgcacgccccccgtggcggcgacgacccattcgaacgtctgccctatcaact

SEQ ID NO: 48712 - DNA, 120 bp, Homo sapiens
  misc_feature: 713 for SV(W|O) and 18S
ccccttgcctctcggcgccccctcgatgctcttagctgagtgtcccgcggggcccgaagcgtttactttgaaaaaattagagtgttcaaagcaggcccgagccgcctggataccgcagct

SEQ ID NO: 48713 - DNA, 120 bp, Homo sapiens
  misc_feature: 712 for SV(W|O) and 18S
cggggggagtatggttgcaaagctgaaacttaaaggaattgacggaagggcaccaccaggagtggagcctgcggcttaatttgactcaacacgggaaacctcacccggcccggacacgga

SEQ ID NO: 48714 - DNA, 120 bp, Homo sapiens
  misc_feature: 712 for SV(W|O) and 18S
cctgagaaacggctaccacatccaaggaaggcagcaggcgcgcaaattacccactcccgacccggggaggtagtgacgaaaaataacaatacaggactctttcgaggccctgtaattgga

SEQ ID NO: 48715 - DNA, 120 bp, Homo sapiens
  misc_feature: 712 for SV(W|O) and 18S
cggaattaaccagacaaatcgctccaccaactaagaacggccatgcaccaccacccacggaatcgagaaagagctatcaatctgtcaatcctgtccgtgtccgggccgggtgaggtttcc

SEQ ID NO: 48716 - DNA, 120 bp, Homo sapiens
  misc_feature: 712 for SV(W|O) and 18S
gacgggcggtggctcgcctcgcggcggaccgcccgcccgctcccaagatccaactacgagctttttaactgcagcaactttaatatacgctattggagctggaattaccgcggctgctgg

SEQ ID NO: 48717 - DNA, 120 bp, Homo sapiens
  misc_feature: 712 for SV(W|O) and 18S
ccgcccgtccccgccccttgcctctcggcgccccctcgatgctcttagctgagtgtcccgcggggcccgaagcgtttactttgaaaaaattagagtgttcaaagcaggcccgagccgcct

SEQ ID NO: 48718 - DNA, 120 bp, Homo sapiens
  misc_feature: 712 for SV(W|O) and 18S
agcctgagaaacggctaccacatccaaggaaggcagcaggcgcgcaaattacccactcccgacccggggaggtagtgacgaaaaataacaatacaggactctttcgaggccctgtaattg

SEQ ID NO: 48719 - DNA, 120 bp, Homo sapiens
  misc_feature: 712 for SV(W|O) and 18S
caacacgggaaacctcacccggcccggacacggacaggattgacagattgatagctctttctcgattccgtgggtggtggtgcatggccgttcttagttggtggagcgatttgtctggtt

SEQ ID NO: 48720 - DNA, 120 bp, Homo sapiens
  misc_feature: 712 for SV(W|O) and 18S
ataaatgcacgcatcccccccgcgaagggggtcagcgcccgtcggcatgtattagctctagaattaccacagttatccaagtaggagaggagcgagcgaccaaaggaaccataactgatt

SEQ ID NO: 48721 - DNA, 120 bp, Homo sapiens
  misc_feature: 711 for SV(W|O) and 18S
ttccattattcctagctgcggtatccaggcggctcgggcctgctttgaacactctaattttttcaaagtaaacgcttcgggccccgcgggacactcagctaagagcatcgagggggcgcc

SEQ ID NO: 48722 - DNA, 120 bp, Homo sapiens
  misc_feature: 711 for SV(W|O) and 18S
aacacgggaaacctcacccggcccggacacggacaggattgacagattgatagctctttctcgattccgtgggtggtggtgcatggccgttcttagttggtggagcgatttgtctggtta

SEQ ID NO: 48723 - DNA, 120 bp, Homo sapiens
  misc_feature: 711 for SV(W|O) and 18S
aagcatttgccaagaatgttttcattaatcaagaacgaaagtcggaggttcgaagacgatcagataccgtcgtagttccgaccataaacgatgccgaccggcgatgcggcggcgttattc

SEQ ID NO: 48724 - DNA, 120 bp, Homo sapiens
  misc_feature: 711 for SV(W|O) and 18S
cttggataactgtggtaattctagagctaatacatgccgacgggcgctgacccccttcgcgggggggatgcgtgcatttatcagatcaaaaccaacccggtcagcccctctccggccccg

SEQ ID NO: 48725 - DNA, 120 bp, Homo sapiens
  misc_feature: 710 for SV(W|O) and 18S
aacggctaccacatccaaggaaggcagcaggcgcgcaaattacccactcccgacccggggaggtagtgacgaaaaataacaatacaggactctttcgaggccctgtaattggaatgagtc

SEQ ID NO: 48726 - DNA, 120 bp, Homo sapiens
  misc_feature: 709 for SV(W|O) and 18S
cgggttggttttgatctgataaatgcacgcatcccccccgcgaagggggtcagcgcccgtcggcatgtattagctctagaattaccacagttatccaagtaggagaggagcgagcgacca

SEQ ID NO: 48727 - DNA, 120 bp, Homo sapiens
  misc_feature: 709 for SV(W|O) and 18S
gaattaaccagacaaatcgctccaccaactaagaacggccatgcaccaccacccacggaatcgagaaagagctatcaatctgtcaatcctgtccgtgtccgggccgggtgaggtttcccg

SEQ ID NO: 48728 - DNA, 120 bp, Homo sapiens
  misc_feature: 709 for SV(W|O) and 18S
ctgataaatgcacgcatcccccccgcgaagggggtcagcgcccgtcggcatgtattagctctagaattaccacagttatccaagtaggagaggagcgagcgaccaaaggaaccataactg

SEQ ID NO: 48729 - DNA, 120 bp, Homo sapiens
  misc_feature: 709 for SV(W|O) and 18S
cgcgcgtgcagccccggacatctaagggcatcacagacctgttattgctcaatctcgggtggctgaacgccacttgtccctctaagaagttgggggacgccgaccgctcgggggtcgcgt

SEQ ID NO: 48730 - DNA, 120 bp, Homo sapiens
  misc_feature: 709 for SV(W|O) and 18S
cctctccggccccggccggggggcgggcgccggcggctttggtgactctagataacctcgggccgatcgcacgccccccgtggcggcgacgacccattcgaacgtctgccctatcaactt

SEQ ID NO: 48731 - DNA, 120 bp, Homo sapiens
  misc_feature: 709 for SV(W|O) and 18S
atcggaattaaccagacaaatcgctccaccaactaagaacggccatgcaccaccacccacggaatcgagaaagagctatcaatctgtcaatcctgtccgtgtccgggccgggtgaggttt

SEQ ID NO: 48732 - DNA, 120 bp, Homo sapiens
  misc_feature: 708 for SV(W|O) and 18S
gggagcctgagaaacggctaccacatccaaggaaggcagcaggcgcgcaaattacccactcccgacccggggaggtagtgacgaaaaataacaatacaggactctttcgaggccctgtaa

SEQ ID NO: 48733 - DNA, 120 bp, Homo sapiens
  misc_feature: 708 for SV(W|O) and 18S
cgtttctcaggctccctctccggaatcgaaccctgattccccgtcacccgtggtcaccatggtaggcacggcgactaccatcgaaagttgatagggcagacgttcgaatgggtcgtcgcc

SEQ ID NO: 48734 - DNA, 120 bp, Homo sapiens
  misc_feature: 708 for SV(W|O) and 18S
aggcaaggggcggggacgggcggtggctcgcctcgcggcggaccgcccgcccgctcccaagatccaactacgagctttttaactgcagcaactttaatatacgctattggagctggaatt

SEQ ID NO: 48735 - DNA, 120 bp, Homo sapiens
  misc_feature: 707 for SV(W|O) and 18S
acacgggaaacctcacccggcccggacacggacaggattgacagattgatagctctttctcgattccgtgggtggtggtgcatggccgttcttagttggtggagcgatttgtctggttaa

SEQ ID NO: 48736 - DNA, 120 bp, Homo sapiens
  misc_feature: 707 for SV(W|O) and 18S
aagcgtttactttgaaaaaattagagtgttcaaagcaggcccgagccgcctggataccgcagctaggaataatggaataggaccgcggttctattttgttggttttcggaactgaggcca

SEQ ID NO: 48737 - DNA, 120 bp, Homo sapiens
  misc_feature: 707 for SV(W|O) and 18S
tcctattccattattcctagctgcggtatccaggcggctcgggcctgctttgaacactctaattttttcaaagtaaacgcttcgggccccgcgggacactcagctaagagcatcgagggg

SEQ ID NO: 48738 - DNA, 120 bp, Homo sapiens
  misc_feature: 707 for SV(W|O) and 18S
agaaacggctaccacatccaaggaaggcagcaggcgcgcaaattacccactcccgacccggggaggtagtgacgaaaaataacaatacaggactctttcgaggccctgtaattggaatga

SEQ ID NO: 48739 - DNA, 120 bp, Homo sapiens
  misc_feature: 707 for SV(W|O) and 18S
tcaacacgggaaacctcacccggcccggacacggacaggattgacagattgatagctctttctcgattccgtgggtggtggtgcatggccgttcttagttggtggagcgatttgtctggt

SEQ ID NO: 48740 - DNA, 120 bp, Homo sapiens
  misc_feature: 707 for SV(W|O) and 18S
taccacatccaaggaaggcagcaggcgcgcaaattacccactcccgacccggggaggtagtgacgaaaaataacaatacaggactctttcgaggccctgtaattggaatgagtccacttt

SEQ ID NO: 48741 - DNA, 120 bp, Homo sapiens
  misc_feature: 707 for SV(W|O) and 18S
ggcaaggggcggggacgggcggtggctcgcctcgcggcggaccgcccgcccgctcccaagatccaactacgagctttttaactgcagcaactttaatatacgctattggagctggaatta

SEQ ID NO: 48742 - DNA, 120 bp, Homo sapiens
  misc_feature: 707 for SV(W|O) and 18S
gataaatgcacgcatcccccccgcgaagggggtcagcgcccgtcggcatgtattagctctagaattaccacagttatccaagtaggagaggagcgagcgaccaaaggaaccataactgat

SEQ ID NO: 48743 - DNA, 120 bp, Homo sapiens
  misc_feature: 706 for SV(W|O) and 18S
ctccggccccggccggggggcgggcgccggcggctttggtgactctagataacctcgggccgatcgcacgccccccgtggcggcgacgacccattcgaacgtctgccctatcaactttcg

SEQ ID NO: 48744 - DNA, 120 bp, Homo sapiens
  misc_feature: 706 for SV(W|O) and 18S
cctattccattattcctagctgcggtatccaggcggctcgggcctgctttgaacactctaattttttcaaagtaaacgcttcgggccccgcgggacactcagctaagagcatcgaggggg

SEQ ID NO: 48745 - DNA, 120 bp, Homo sapiens
  misc_feature: 705 for SV(W|O) and 18S
ggttttgatctgataaatgcacgcatcccccccgcgaagggggtcagcgcccgtcggcatgtattagctctagaattaccacagttatccaagtaggagaggagcgagcgaccaaaggaa

SEQ ID NO: 48746 - DNA, 120 bp, Homo sapiens
  misc_feature: 705 for SV(W|O) and 18S
acggctaccacatccaaggaaggcagcaggcgcgcaaattacccactcccgacccggggaggtagtgacgaaaaataacaatacaggactctttcgaggccctgtaattggaatgagtcc

SEQ ID NO: 48747 - DNA, 120 bp, Homo sapiens
  misc_feature: 705 for SV(W|O) and 18S
ctattccattattcctagctgcggtatccaggcggctcgggcctgctttgaacactctaattttttcaaagtaaacgcttcgggccccgcgggacactcagctaagagcatcgagggggc

SEQ ID NO: 48748 - DNA, 120 bp, Homo sapiens
  misc_feature: 705 for SV(W|O) and 18S
agagggagcctgagaaacggctaccacatccaaggaaggcagcaggcgcgcaaattacccactcccgacccggggaggtagtgacgaaaaataacaatacaggactctttcgaggccctg

SEQ ID NO: 48749 - DNA, 120 bp, Homo sapiens
  misc_feature: 704 for SV(W|O) and 18S
tgggttccggggggagtatggttgcaaagctgaaacttaaaggaattgacggaagggcaccaccaggagtggagcctgcggcttaatttgactcaacacgggaaacctcacccggcccgg

SEQ ID NO: 48750 - DNA, 120 bp, Homo sapiens
  misc_feature: 704 for SV(W|O) and 18S
cggctaccacatccaaggaaggcagcaggcgcgcaaattacccactcccgacccggggaggtagtgacgaaaaataacaatacaggactctttcgaggccctgtaattggaatgagtcca

SEQ ID NO: 48751 - DNA, 120 bp, Homo sapiens
  misc_feature: 704 for SV(W|O) and 18S
ggctaccacatccaaggaaggcagcaggcgcgcaaattacccactcccgacccggggaggtagtgacgaaaaataacaatacaggactctttcgaggccctgtaattggaatgagtccac

SEQ ID NO: 48752 - DNA, 120 bp, Homo sapiens
  misc_feature: 704 for SV(W|O) and 18S
ccgggttggttttgatctgataaatgcacgcatcccccccgcgaagggggtcagcgcccgtcggcatgtattagctctagaattaccacagttatccaagtaggagaggagcgagcgacc

SEQ ID NO: 48753 - DNA, 120 bp, Homo sapiens
  misc_feature: 704 for SV(W|O) and 18S
attccattattcctagctgcggtatccaggcggctcgggcctgctttgaacactctaattttttcaaagtaaacgcttcgggccccgcgggacactcagctaagagcatcgagggggcgc

SEQ ID NO: 48754 - DNA, 120 bp, Homo sapiens
  misc_feature: 703 for SV(W|O) and 18S
tgataaatgcacgcatcccccccgcgaagggggtcagcgcccgtcggcatgtattagctctagaattaccacagttatccaagtaggagaggagcgagcgaccaaaggaaccataactga

SEQ ID NO: 48755 - DNA, 120 bp, Homo sapiens
  misc_feature: 703 for SV(W|O) and 18S
gcctgagaaacggctaccacatccaaggaaggcagcaggcgcgcaaattacccactcccgacccggggaggtagtgacgaaaaataacaatacaggactctttcgaggccctgtaattgg

SEQ ID NO: 48756 - DNA, 120 bp, Homo sapiens
  misc_feature: 703 for SV(W|O) and 18S
cagcccctctccggccccggccggggggcgggcgccggcggctttggtgactctagataacctcgggccgatcgcacgccccccgtggcggcgacgacccattcgaacgtctgccctatc

SEQ ID NO: 48757 - DNA, 120 bp, Homo sapiens
  misc_feature: 703 for SV(W|O) and 18S
gaaacggctaccacatccaaggaaggcagcaggcgcgcaaattacccactcccgacccggggaggtagtgacgaaaaataacaatacaggactctttcgaggccctgtaattggaatgag

SEQ ID NO: 48758 - DNA, 120 bp, Homo sapiens
  misc_feature: 703 for SV(W|O) and 18S
ccggggggagtatggttgcaaagctgaaacttaaaggaattgacggaagggcaccaccaggagtggagcctgcggcttaatttgactcaacacgggaaacctcacccggcccggacacgg

SEQ ID NO: 48759 - DNA, 120 bp, Homo sapiens
  misc_feature: 702 for SV(W|O) and 18S
accacatccaaggaaggcagcaggcgcgcaaattacccactcccgacccggggaggtagtgacgaaaaataacaatacaggactctttcgaggccctgtaattggaatgagtccacttta

SEQ ID NO: 48760 - DNA, 120 bp, Homo sapiens
  misc_feature: 702 for SV(W|O) and 18S
ccgtttctcaggctccctctccggaatcgaaccctgattccccgtcacccgtggtcaccatggtaggcacggcgactaccatcgaaagttgatagggcagacgttcgaatgggtcgtcgc

SEQ ID NO: 48761 - DNA, 120 bp, Homo sapiens
  misc_feature: 702 for SV(W|O) and 18S
aaggggcggggacgggcggtggctcgcctcgcggcggaccgcccgcccgctcccaagatccaactacgagctttttaactgcagcaactttaatatacgctattggagctggaattaccg

SEQ ID NO: 48762 - DNA, 120 bp, Homo sapiens
  misc_feature: 701 for SV(W|O) and 18S
gttccggggggagtatggttgcaaagctgaaacttaaaggaattgacggaagggcaccaccaggagtggagcctgcggcttaatttgactcaacacgggaaacctcacccggcccggaca

SEQ ID NO: 48763 - DNA, 120 bp, Homo sapiens
  misc_feature: 701 for SV(W|O) and 18S
gttttgatctgataaatgcacgcatcccccccgcgaagggggtcagcgcccgtcggcatgtattagctctagaattaccacagttatccaagtaggagaggagcgagcgaccaaaggaac

SEQ ID NO: 48764 - DNA, 120 bp, Homo sapiens
  misc_feature: 701 for SV(W|O) and 18S
ggagagggagcctgagaaacggctaccacatccaaggaaggcagcaggcgcgcaaattacccactcccgacccggggaggtagtgacgaaaaataacaatacaggactctttcgaggccc

SEQ ID NO: 48765 - DNA, 120 bp, Homo sapiens
  misc_feature: 701 for SV(W|O) and 18S
ggacgggcggtggctcgcctcgcggcggaccgcccgcccgctcccaagatccaactacgagctttttaactgcagcaactttaatatacgctattggagctggaattaccgcggctgctg

SEQ ID NO: 48766 - DNA, 120 bp, Homo sapiens
  misc_feature: 701 for SV(W|O) and 18S
cccggccggggggcgggcgccggcggctttggtgactctagataacctcgggccgatcgcacgccccccgtggcggcgacgacccattcgaacgtctgccctatcaactttcgatggtag

SEQ ID NO: 48767 - DNA, 120 bp, Homo sapiens
  misc_feature: 701 for SV(W|O) and 18S
aaacggctaccacatccaaggaaggcagcaggcgcgcaaattacccactcccgacccggggaggtagtgacgaaaaataacaatacaggactctttcgaggccctgtaattggaatgagt

SEQ ID NO: 48768 - DNA, 120 bp, Homo sapiens
  misc_feature: 700 for SV(W|O) and 18S
tagataacctcgggccgatcgcacgccccccgtggcggcgacgacccattcgaacgtctgccctatcaactttcgatggtagtcgccgtgcctaccatggtgaccacgggtgacggggaa

SEQ ID NO: 48769 - DNA, 120 bp, Homo sapiens
  misc_feature: 700 for SV(W|O) and 18S
gggttccggggggagtatggttgcaaagctgaaacttaaaggaattgacggaagggcaccaccaggagtggagcctgcggcttaatttgactcaacacgggaaacctcacccggcccgga

SEQ ID NO: 48770 - DNA, 120 bp, Homo sapiens
  misc_feature: 700 for SV(W|O) and 18S
ctagataacctcgggccgatcgcacgccccccgtggcggcgacgacccattcgaacgtctgccctatcaactttcgatggtagtcgccgtgcctaccatggtgaccacgggtgacgggga

SEQ ID NO: 48771 - DNA, 120 bp, Homo sapiens
  misc_feature: 700 for SV(W|O) and 18S
gccgtttctcaggctccctctccggaatcgaaccctgattccccgtcacccgtggtcaccatggtaggcacggcgactaccatcgaaagttgatagggcagacgttcgaatgggtcgtcg

SEQ ID NO: 48772 - DNA, 120 bp, Homo sapiens
  misc_feature: 700 for SV(W|O) and 18S
agcgtttactttgaaaaaattagagtgttcaaagcaggcccgagccgcctggataccgcagctaggaataatggaataggaccgcggttctattttgttggttttcggaactgaggccat

SEQ ID NO: 48773 - DNA, 120 bp, Homo sapiens
  misc_feature: 699 for SV(W|O) and 18S
ttggtgactctagataacctcgggccgatcgcacgccccccgtggcggcgacgacccattcgaacgtctgccctatcaactttcgatggtagtcgccgtgcctaccatggtgaccacggg

SEQ ID NO: 48774 - DNA, 120 bp, Homo sapiens
  misc_feature: 699 for SV(W|O) and 18S
cagggttcgattccggagagggagcctgagaaacggctaccacatccaaggaaggcagcaggcgcgcaaattacccactcccgacccggggaggtagtgacgaaaaataacaatacagga

SEQ ID NO: 48775 - DNA, 120 bp, Homo sapiens
  misc_feature: 699 for SV(W|O) and 18S
tcagggttcgattccggagagggagcctgagaaacggctaccacatccaaggaaggcagcaggcgcgcaaattacccactcccgacccggggaggtagtgacgaaaaataacaatacagg

SEQ ID NO: 48776 - DNA, 120 bp, Homo sapiens
  misc_feature: 699 for SV(W|O) and 18S
tattccattattcctagctgcggtatccaggcggctcgggcctgctttgaacactctaattttttcaaagtaaacgcttcgggccccgcgggacactcagctaagagcatcgagggggcg

SEQ ID NO: 48777 - DNA, 120 bp, Homo sapiens
  misc_feature: 699 for SV(W|O) and 18S
gaagcgtttactttgaaaaaattagagtgttcaaagcaggcccgagccgcctggataccgcagctaggaataatggaataggaccgcggttctattttgttggttttcggaactgaggcc

SEQ ID NO: 48778 - DNA, 120 bp, Homo sapiens
  misc_feature: 698 for SV(W|O) and 18S
ttgggttccggggggagtatggttgcaaagctgaaacttaaaggaattgacggaagggcaccaccaggagtggagcctgcggcttaatttgactcaacacgggaaacctcacccggcccg

SEQ ID NO: 48779 - DNA, 120 bp, Homo sapiens
  misc_feature: 698 for SV(W|O) and 18S
gtcagcccctctccggccccggccggggggcgggcgccggcggctttggtgactctagataacctcgggccgatcgcacgccccccgtggcggcgacgacccattcgaacgtctgcccta

SEQ ID NO: 48780 - DNA, 120 bp, Homo sapiens
  misc_feature: 698 for SV(W|O) and 18S
tacttggataactgtggtaattctagagctaatacatgccgacgggcgctgacccccttcgcgggggggatgcgtgcatttatcagatcaaaaccaacccggtcagcccctctccggccc

SEQ ID NO: 48781 - DNA, 120 bp, Homo sapiens
  misc_feature: 698 for SV(W|O) and 18S
gttggttttgatctgataaatgcacgcatcccccccgcgaagggggtcagcgcccgtcggcatgtattagctctagaattaccacagttatccaagtaggagaggagcgagcgaccaaag

SEQ ID NO: 48782 - DNA, 120 bp, Homo sapiens
  misc_feature: 698 for SV(W|O) and 18S
ggttccggggggagtatggttgcaaagctgaaacttaaaggaattgacggaagggcaccaccaggagtggagcctgcggcttaatttgactcaacacgggaaacctcacccggcccggac

SEQ ID NO: 48783 - DNA, 120 bp, Homo sapiens
  misc_feature: 698 for SV(W|O) and 18S
acttggataactgtggtaattctagagctaatacatgccgacgggcgctgacccccttcgcgggggggatgcgtgcatttatcagatcaaaaccaacccggtcagcccctctccggcccc

SEQ ID NO: 48784 - DNA, 120 bp, Homo sapiens
  misc_feature: 698 for SV(W|O) and 18S
ctctagataacctcgggccgatcgcacgccccccgtggcggcgacgacccattcgaacgtctgccctatcaactttcgatggtagtcgccgtgcctaccatggtgaccacgggtgacggg

SEQ ID NO: 48785 - DNA, 120 bp, Homo sapiens
  misc_feature: 697 for SV(W|O) and 18S
ttccggggggagtatggttgcaaagctgaaacttaaaggaattgacggaagggcaccaccaggagtggagcctgcggcttaatttgactcaacacgggaaacctcacccggcccggacac

SEQ ID NO: 48786 - DNA, 120 bp, Homo sapiens
  misc_feature: 697 for SV(W|O) and 18S
tctccggccccggccggggggcgggcgccggcggctttggtgactctagataacctcgggccgatcgcacgccccccgtggcggcgacgacccattcgaacgtctgccctatcaactttc

SEQ ID NO: 48787 - DNA, 120 bp, Homo sapiens
  misc_feature: 697 for SV(W|O) and 18S
tctagataacctcgggccgatcgcacgccccccgtggcggcgacgacccattcgaacgtctgccctatcaactttcgatggtagtcgccgtgcctaccatggtgaccacgggtgacgggg

SEQ ID NO: 48788 - DNA, 120 bp, Homo sapiens
  misc_feature: 697 for SV(W|O) and 18S
tccggccccggccggggggcgggcgccggcggctttggtgactctagataacctcgggccgatcgcacgccccccgtggcggcgacgacccattcgaacgtctgccctatcaactttcga

SEQ ID NO: 48789 - DNA, 120 bp, Homo sapiens
  misc_feature: 697 for SV(W|O) and 18S
accgcccgtccccgccccttgcctctcggcgccccctcgatgctcttagctgagtgtcccgcggggcccgaagcgtttactttgaaaaaattagagtgttcaaagcaggcccgagccgcc

SEQ ID NO: 48790 - DNA, 120 bp, Homo sapiens
  misc_feature: 697 for SV(W|O) and 18S
aggggcggggacgggcggtggctcgcctcgcggcggaccgcccgcccgctcccaagatccaactacgagctttttaactgcagcaactttaatatacgctattggagctggaattaccgc

SEQ ID NO: 48791 - DNA, 120 bp, Homo sapiens
  misc_feature: 696 for SV(W|O) and 18S
tttggtgactctagataacctcgggccgatcgcacgccccccgtggcggcgacgacccattcgaacgtctgccctatcaactttcgatggtagtcgccgtgcctaccatggtgaccacgg

SEQ ID NO: 48792 - DNA, 120 bp, Homo sapiens
  misc_feature: 696 for SV(W|O) and 18S
tttgggttccggggggagtatggttgcaaagctgaaacttaaaggaattgacggaagggcaccaccaggagtggagcctgcggcttaatttgactcaacacgggaaacctcacccggccc

SEQ ID NO: 48793 - DNA, 120 bp, Homo sapiens
  misc_feature: 696 for SV(W|O) and 18S
agataacctcgggccgatcgcacgccccccgtggcggcgacgacccattcgaacgtctgccctatcaactttcgatggtagtcgccgtgcctaccatggtgaccacgggtgacggggaat

SEQ ID NO: 48794 - DNA, 120 bp, Homo sapiens
  misc_feature: 695 for SV(W|O) and 18S
ggttggttttgatctgataaatgcacgcatcccccccgcgaagggggtcagcgcccgtcggcatgtattagctctagaattaccacagttatccaagtaggagaggagcgagcgaccaaa

SEQ ID NO: 48795 - DNA, 120 bp, Homo sapiens
  misc_feature: 695 for SV(W|O) and 18S
ccacatccaaggaaggcagcaggcgcgcaaattacccactcccgacccggggaggtagtgacgaaaaataacaatacaggactctttcgaggccctgtaattggaatgagtccactttaa

SEQ ID NO: 48796 - DNA, 120 bp, Homo sapiens
  misc_feature: 695 for SV(W|O) and 18S
tcggaattaaccagacaaatcgctccaccaactaagaacggccatgcaccaccacccacggaatcgagaaagagctatcaatctgtcaatcctgtccgtgtccgggccgggtgaggtttc

SEQ ID NO: 48797 - DNA, 120 bp, Homo sapiens
  misc_feature: 695 for SV(W|O) and 18S
aaagcatttgccaagaatgttttcattaatcaagaacgaaagtcggaggttcgaagacgatcagataccgtcgtagttccgaccataaacgatgccgaccggcgatgcggcggcgttatt

SEQ ID NO: 48798 - DNA, 120 bp, Homo sapiens
  misc_feature: 694 for SV(W|O) and 18S
tcagcccctctccggccccggccggggggcgggcgccggcggctttggtgactctagataacctcgggccgatcgcacgccccccgtggcggcgacgacccattcgaacgtctgccctat

SEQ ID NO: 48799 - DNA, 120 bp, Homo sapiens
  misc_feature: 694 for SV(W|O) and 18S
caaggggcggggacgggcggtggctcgcctcgcggcggaccgcccgcccgctcccaagatccaactacgagctttttaactgcagcaactttaatatacgctattggagctggaattacc

SEQ ID NO: 48800 - DNA, 120 bp, Homo sapiens
  misc_feature: 694 for SV(W|O) and 18S
gggcagcttccgggaaaccaaagtctttgggttccggggggagtatggttgcaaagctgaaacttaaaggaattgacggaagggcaccaccaggagtggagcctgcggcttaatttgact

SEQ ID NO: 48801 - DNA, 120 bp, Homo sapiens
  misc_feature: 694 for SV(W|O) and 18S
gagagggagcctgagaaacggctaccacatccaaggaaggcagcaggcgcgcaaattacccactcccgacccggggaggtagtgacgaaaaataacaatacaggactctttcgaggccct

SEQ ID NO: 48802 - DNA, 120 bp, Homo sapiens
  misc_feature: 694 for SV(W|O) and 18S
ctctccggccccggccggggggcgggcgccggcggctttggtgactctagataacctcgggccgatcgcacgccccccgtggcggcgacgacccattcgaacgtctgccctatcaacttt

SEQ ID NO: 48803 - DNA, 120 bp, Homo sapiens
  misc_feature: 694 for SV(W|O) and 18S
ccggccccggccggggggcgggcgccggcggctttggtgactctagataacctcgggccgatcgcacgccccccgtggcggcgacgacccattcgaacgtctgccctatcaactttcgat

SEQ ID NO: 48804 - DNA, 120 bp, Homo sapiens
  misc_feature: 693 for SV(W|O) and 18S
gggttggttttgatctgataaatgcacgcatcccccccgcgaagggggtcagcgcccgtcggcatgtattagctctagaattaccacagttatccaagtaggagaggagcgagcgaccaa

SEQ ID NO: 48805 - DNA, 120 bp, Homo sapiens
  misc_feature: 693 for SV(W|O) and 18S
tggataactgtggtaattctagagctaatacatgccgacgggcgctgacccccttcgcgggggggatgcgtgcatttatcagatcaaaaccaacccggtcagcccctctccggccccggc

SEQ ID NO: 48806 - DNA, 120 bp, Homo sapiens
  misc_feature: 693 for SV(W|O) and 18S
gtcctattccattattcctagctgcggtatccaggcggctcgggcctgctttgaacactctaattttttcaaagtaaacgcttcgggccccgcgggacactcagctaagagcatcgaggg

SEQ ID NO: 48807 - DNA, 120 bp, Homo sapiens
  misc_feature: 693 for SV(W|O) and 18S
ggtcctattccattattcctagctgcggtatccaggcggctcgggcctgctttgaacactctaattttttcaaagtaaacgcttcgggccccgcgggacactcagctaagagcatcgagg

SEQ ID NO: 48808 - DNA, 120 bp, Homo sapiens
  misc_feature: 693 for SV(W|O) and 18S
ggccccggccggggggcgggcgccggcggctttggtgactctagataacctcgggccgatcgcacgccccccgtggcggcgacgacccattcgaacgtctgccctatcaactttcgatgg

SEQ ID NO: 48809 - DNA, 120 bp, Homo sapiens
  misc_feature: 693 for SV(W|O) and 18S
ccgcgaggcgagccaccgcccgtccccgccccttgcctctcggcgccccctcgatgctcttagctgagtgtcccgcggggcccgaagcgtttactttgaaaaaattagagtgttcaaagc

SEQ ID NO: 48810 - DNA, 120 bp, Homo sapiens
  misc_feature: 693 for SV(W|O) and 18S
ccgaagcgtttactttgaaaaaattagagtgttcaaagcaggcccgagccgcctggataccgcagctaggaataatggaataggaccgcggttctattttgttggttttcggaactgagg

SEQ ID NO: 48811 - DNA, 120 bp, Homo sapiens
  misc_feature: 692 for SV(W|O) and 18S
tctgataaatgcacgcatcccccccgcgaagggggtcagcgcccgtcggcatgtattagctctagaattaccacagttatccaagtaggagaggagcgagcgaccaaaggaaccataact

SEQ ID NO: 48812 - DNA, 120 bp, Homo sapiens
  misc_feature: 692 for SV(W|O) and 18S
cggccccggccggggggcgggcgccggcggctttggtgactctagataacctcgggccgatcgcacgccccccgtggcggcgacgacccattcgaacgtctgccctatcaactttcgatg

SEQ ID NO: 48813 - DNA, 120 bp, Homo sapiens
  misc_feature: 692 for SV(W|O) and 18S
ccggccggggggcgggcgccggcggctttggtgactctagataacctcgggccgatcgcacgccccccgtggcggcgacgacccattcgaacgtctgccctatcaactttcgatggtagt

SEQ ID NO: 48814 - DNA, 120 bp, Homo sapiens
  misc_feature: 691 for SV(W|O) and 18S
ttttgatctgataaatgcacgcatcccccccgcgaagggggtcagcgcccgtcggcatgtattagctctagaattaccacagttatccaagtaggagaggagcgagcgaccaaaggaacc

SEQ ID NO: 48815 - DNA, 120 bp, Homo sapiens
  misc_feature: 691 for SV(W|O) and 18S
gccccggccggggggcgggcgccggcggctttggtgactctagataacctcgggccgatcgcacgccccccgtggcggcgacgacccattcgaacgtctgccctatcaactttcgatggt

SEQ ID NO: 48816 - DNA, 120 bp, Homo sapiens
  misc_feature: 690 for SV(W|O) and 18S
tgttgagtcaaattaagccgcaggctccactcctggtggtgcccttccgtcaattcctttaagtttcagctttgcaaccatactccccccggaacccaaagactttggtttcccggaagc

SEQ ID NO: 48817 - DNA, 120 bp, Homo sapiens
  misc_feature: 690 for SV(W|O) and 18S
ccccggccggggggcgggcgccggcggctttggtgactctagataacctcgggccgatcgcacgccccccgtggcggcgacgacccattcgaacgtctgccctatcaactttcgatggta

SEQ ID NO: 48818 - DNA, 120 bp, Homo sapiens
  misc_feature: 690 for SV(W|O) and 18S
cggctttggtgactctagataacctcgggccgatcgcacgccccccgtggcggcgacgacccattcgaacgtctgccctatcaactttcgatggtagtcgccgtgcctaccatggtgacc

SEQ ID NO: 48819 - DNA, 120 bp, Homo sapiens
  misc_feature: 690 for SV(W|O) and 18S
gataacctcgggccgatcgcacgccccccgtggcggcgacgacccattcgaacgtctgccctatcaactttcgatggtagtcgccgtgcctaccatggtgaccacgggtgacggggaatc

SEQ ID NO: 48820 - DNA, 120 bp, Homo sapiens
  misc_feature: 690 for SV(W|O) and 18S
cccgaagcgtttactttgaaaaaattagagtgttcaaagcaggcccgagccgcctggataccgcagctaggaataatggaataggaccgcggttctattttgttggttttcggaactgag

SEQ ID NO: 48821 - DNA, 120 bp, Homo sapiens
  misc_feature: 689 for SV(W|O) and 18S
ttggttttgatctgataaatgcacgcatcccccccgcgaagggggtcagcgcccgtcggcatgtattagctctagaattaccacagttatccaagtaggagaggagcgagcgaccaaagg

SEQ ID NO: 48822 - DNA, 120 bp, Homo sapiens
  misc_feature: 689 for SV(W|O) and 18S
tggttttgatctgataaatgcacgcatcccccccgcgaagggggtcagcgcccgtcggcatgtattagctctagaattaccacagttatccaagtaggagaggagcgagcgaccaaagga

SEQ ID NO: 48823 - DNA, 120 bp, Homo sapiens
  misc_feature: 689 for SV(W|O) and 18S
tggtgactctagataacctcgggccgatcgcacgccccccgtggcggcgacgacccattcgaacgtctgccctatcaactttcgatggtagtcgccgtgcctaccatggtgaccacgggt

SEQ ID NO: 48824 - DNA, 120 bp, Homo sapiens
  misc_feature: 689 for SV(W|O) and 18S
gctttggtgactctagataacctcgggccgatcgcacgccccccgtggcggcgacgacccattcgaacgtctgccctatcaactttcgatggtagtcgccgtgcctaccatggtgaccac

SEQ ID NO: 48825 - DNA, 120 bp, Homo sapiens
  misc_feature: 689 for SV(W|O) and 18S
ggcagcttccgggaaaccaaagtctttgggttccggggggagtatggttgcaaagctgaaacttaaaggaattgacggaagggcaccaccaggagtggagcctgcggcttaatttgactc

SEQ ID NO: 48826 - DNA, 120 bp, Homo sapiens
  misc_feature: 688 for SV(W|O) and 18S
ttggataactgtggtaattctagagctaatacatgccgacgggcgctgacccccttcgcgggggggatgcgtgcatttatcagatcaaaaccaacccggtcagcccctctccggccccgg

SEQ ID NO: 48827 - DNA, 120 bp, Homo sapiens
  misc_feature: 688 for SV(W|O) and 18S
gcaaggggcggggacgggcggtggctcgcctcgcggcggaccgcccgcccgctcccaagatccaactacgagctttttaactgcagcaactttaatatacgctattggagctggaattac

SEQ ID NO: 48828 - DNA, 120 bp, Homo sapiens
  misc_feature: 688 for SV(W|O) and 18S
cggccggggggcgggcgccggcggctttggtgactctagataacctcgggccgatcgcacgccccccgtggcggcgacgacccattcgaacgtctgccctatcaactttcgatggtagtc

SEQ ID NO: 48829 - DNA, 120 bp, Homo sapiens
  misc_feature: 687 for SV(W|O) and 18S
gaggggctgaccgggttggttttgatctgataaatgcacgcatcccccccgcgaagggggtcagcgcccgtcggcatgtattagctctagaattaccacagttatccaagtaggagagga

SEQ ID NO: 48830 - DNA, 120 bp, Homo sapiens
  misc_feature: 687 for SV(W|O) and 18S
gtgactctagataacctcgggccgatcgcacgccccccgtggcggcgacgacccattcgaacgtctgccctatcaactttcgatggtagtcgccgtgcctaccatggtgaccacgggtga

SEQ ID NO: 48831 - DNA, 120 bp, Homo sapiens
  misc_feature: 687 for SV(W|O) and 18S
ctttgggttccggggggagtatggttgcaaagctgaaacttaaaggaattgacggaagggcaccaccaggagtggagcctgcggcttaatttgactcaacacgggaaacctcacccggcc

SEQ ID NO: 48832 - DNA, 120 bp, Homo sapiens
  misc_feature: 687 for SV(W|O) and 18S
ctttggtgactctagataacctcgggccgatcgcacgccccccgtggcggcgacgacccattcgaacgtctgccctatcaactttcgatggtagtcgccgtgcctaccatggtgaccacg

SEQ ID NO: 48833 - DNA, 120 bp, Homo sapiens
  misc_feature: 686 for SV(W|O) and 18S
cacatccaaggaaggcagcaggcgcgcaaattacccactcccgacccggggaggtagtgacgaaaaataacaatacaggactctttcgaggccctgtaattggaatgagtccactttaaa

SEQ ID NO: 48834 - DNA, 120 bp, Homo sapiens
  misc_feature: 686 for SV(W|O) and 18S
tccggggggagtatggttgcaaagctgaaacttaaaggaattgacggaagggcaccaccaggagtggagcctgcggcttaatttgactcaacacgggaaacctcacccggcccggacacg

SEQ ID NO: 48835 - DNA, 120 bp, Homo sapiens
  misc_feature: 686 for SV(W|O) and 18S
agggttcgattccggagagggagcctgagaaacggctaccacatccaaggaaggcagcaggcgcgcaaattacccactcccgacccggggaggtagtgacgaaaaataacaatacaggac

SEQ ID NO: 48836 - DNA, 120 bp, Homo sapiens
  misc_feature: 686 for SV(W|O) and 18S
ggtgactctagataacctcgggccgatcgcacgccccccgtggcggcgacgacccattcgaacgtctgccctatcaactttcgatggtagtcgccgtgcctaccatggtgaccacgggtg

SEQ ID NO: 48837 - DNA, 120 bp, Homo sapiens
  misc_feature: 686 for SV(W|O) and 18S
ggatgcgtgcatttatcagatcaaaaccaacccggtcagcccctctccggccccggccggggggcgggcgccggcggctttggtgactctagataacctcgggccgatcgcacgcccccc

SEQ ID NO: 48838 - DNA, 120 bp, Homo sapiens
  misc_feature: 686 for SV(W|O) and 18S
gcggggacgggcggtggctcgcctcgcggcggaccgcccgcccgctcccaagatccaactacgagctttttaactgcagcaactttaatatacgctattggagctggaattaccgcggct

SEQ ID NO: 48839 - DNA, 120 bp, Homo sapiens
  misc_feature: 685 for SV(W|O) and 18S
cgcgaggcgagccaccgcccgtccccgccccttgcctctcggcgccccctcgatgctcttagctgagtgtcccgcggggcccgaagcgtttactttgaaaaaattagagtgttcaaagca

SEQ ID NO: 48840 - DNA, 120 bp, Homo sapiens
  misc_feature: 685 for SV(W|O) and 18S
gcccgaagcgtttactttgaaaaaattagagtgttcaaagcaggcccgagccgcctggataccgcagctaggaataatggaataggaccgcggttctattttgttggttttcggaactga

SEQ ID NO: 48841 - DNA, 120 bp, Homo sapiens
  misc_feature: 685 for SV(W|O) and 18S
gggatgcgtgcatttatcagatcaaaaccaacccggtcagcccctctccggccccggccggggggcgggcgccggcggctttggtgactctagataacctcgggccgatcgcacgccccc

SEQ ID NO: 48842 - DNA, 120 bp, Homo sapiens
  misc_feature: 685 for SV(W|O) and 18S
ggggatgcgtgcatttatcagatcaaaaccaacccggtcagcccctctccggccccggccggggggcgggcgccggcggctttggtgactctagataacctcgggccgatcgcacgcccc

SEQ ID NO: 48843 - DNA, 120 bp, Homo sapiens
  misc_feature: 685 for SV(W|O) and 18S
gggacgggcggtggctcgcctcgcggcggaccgcccgcccgctcccaagatccaactacgagctttttaactgcagcaactttaatatacgctattggagctggaattaccgcggctgct

SEQ ID NO: 48844 - DNA, 120 bp, Homo sapiens
  misc_feature: 685 for SV(W|O) and 18S
cctacttggataactgtggtaattctagagctaatacatgccgacgggcgctgacccccttcgcgggggggatgcgtgcatttatcagatcaaaaccaacccggtcagcccctctccggc

SEQ ID NO: 48845 - DNA, 120 bp, Homo sapiens
  misc_feature: 685 for SV(W|O) and 18S
cggggggcgtgcgatcggcccgaggttatctagagtcaccaaagccgccggcgcccgccccccggccggggccggagaggggctgaccgggttggttttgatctgataaatgcacgcatc

SEQ ID NO: 48846 - DNA, 120 bp, Homo sapiens
  misc_feature: 685 for SV(W|O) and 18S
aaccaaagtctttgggttccggggggagtatggttgcaaagctgaaacttaaaggaattgacggaagggcaccaccaggagtggagcctgcggcttaatttgactcaacacgggaaacct

SEQ ID NO: 48847 - DNA, 120 bp, Homo sapiens
  misc_feature: 684 for SV(W|O) and 18S
ggctttggtgactctagataacctcgggccgatcgcacgccccccgtggcggcgacgacccattcgaacgtctgccctatcaactttcgatggtagtcgccgtgcctaccatggtgacca

SEQ ID NO: 48848 - DNA, 120 bp, Homo sapiens
  misc_feature: 684 for SV(W|O) and 18S
cacggggggcgtgcgatcggcccgaggttatctagagtcaccaaagccgccggcgcccgccccccggccggggccggagaggggctgaccgggttggttttgatctgataaatgcacgca

SEQ ID NO: 48849 - DNA, 120 bp, Homo sapiens
  misc_feature: 684 for SV(W|O) and 18S
aattacccactcccgacccggggaggtagtgacgaaaaataacaatacaggactctttcgaggccctgtaattggaatgagtccactttaaatcctttaacgaggatccattggagggca

SEQ ID NO: 48850 - DNA, 120 bp, Homo sapiens
  misc_feature: 684 for SV(W|O) and 18S
aagtctttgggttccggggggagtatggttgcaaagctgaaacttaaaggaattgacggaagggcaccaccaggagtggagcctgcggcttaatttgactcaacacgggaaacctcaccc

SEQ ID NO: 48851 - DNA, 120 bp, Homo sapiens
  misc_feature: 684 for SV(W|O) and 18S
cggagagggagcctgagaaacggctaccacatccaaggaaggcagcaggcgcgcaaattacccactcccgacccggggaggtagtgacgaaaaataacaatacaggactctttcgaggcc

SEQ ID NO: 48852 - DNA, 120 bp, Homo sapiens
  misc_feature: 684 for SV(W|O) and 18S
ctacttggataactgtggtaattctagagctaatacatgccgacgggcgctgacccccttcgcgggggggatgcgtgcatttatcagatcaaaaccaacccggtcagcccctctccggcc

SEQ ID NO: 48853 - DNA, 120 bp, Homo sapiens
  misc_feature: 684 for SV(W|O) and 18S
cgaagcgtttactttgaaaaaattagagtgttcaaagcaggcccgagccgcctggataccgcagctaggaataatggaataggaccgcggttctattttgttggttttcggaactgaggc

SEQ ID NO: 48854 - DNA, 120 bp, Homo sapiens
  misc_feature: 684 for SV(W|O) and 18S
accaaagtctttgggttccggggggagtatggttgcaaagctgaaacttaaaggaattgacggaagggcaccaccaggagtggagcctgcggcttaatttgactcaacacgggaaacctc

SEQ ID NO: 48855 - DNA, 120 bp, Homo sapiens
  misc_feature: 683 for SV(W|O) and 18S
gcagcttccgggaaaccaaagtctttgggttccggggggagtatggttgcaaagctgaaacttaaaggaattgacggaagggcaccaccaggagtggagcctgcggcttaatttgactca

SEQ ID NO: 48856 - DNA, 120 bp, Homo sapiens
  misc_feature: 683 for SV(W|O) and 18S
caaagtctttgggttccggggggagtatggttgcaaagctgaaacttaaaggaattgacggaagggcaccaccaggagtggagcctgcggcttaatttgactcaacacgggaaacctcac

SEQ ID NO: 48857 - DNA, 120 bp, Homo sapiens
  misc_feature: 683 for SV(W|O) and 18S
gccaccgcccgtccccgccccttgcctctcggcgccccctcgatgctcttagctgagtgtcccgcggggcccgaagcgtttactttgaaaaaattagagtgttcaaagcaggcccgagcc

SEQ ID NO: 48858 - DNA, 120 bp, Homo sapiens
  misc_feature: 683 for SV(W|O) and 18S
caccgcccgtccccgccccttgcctctcggcgccccctcgatgctcttagctgagtgtcccgcggggcccgaagcgtttactttgaaaaaattagagtgttcaaagcaggcccgagccgc

SEQ ID NO: 48859 - DNA, 120 bp, Homo sapiens
  misc_feature: 682 for SV(W|O) and 18S
tttgatctgataaatgcacgcatcccccccgcgaagggggtcagcgcccgtcggcatgtattagctctagaattaccacagttatccaagtaggagaggagcgagcgaccaaaggaacca

SEQ ID NO: 48860 - DNA, 120 bp, Homo sapiens
  misc_feature: 682 for SV(W|O) and 18S
gtctttgggttccggggggagtatggttgcaaagctgaaacttaaaggaattgacggaagggcaccaccaggagtggagcctgcggcttaatttgactcaacacgggaaacctcacccgg

SEQ ID NO: 48861 - DNA, 120 bp, Homo sapiens
  misc_feature: 682 for SV(W|O) and 18S
ggggcggggacgggcggtggctcgcctcgcggcggaccgcccgcccgctcccaagatccaactacgagctttttaactgcagcaactttaatatacgctattggagctggaattaccgcg

SEQ ID NO: 48862 - DNA, 120 bp, Homo sapiens
  misc_feature: 682 for SV(W|O) and 18S
agtctttgggttccggggggagtatggttgcaaagctgaaacttaaaggaattgacggaagggcaccaccaggagtggagcctgcggcttaatttgactcaacacgggaaacctcacccg

SEQ ID NO: 48863 - DNA, 120 bp, Homo sapiens
  misc_feature: 682 for SV(W|O) and 18S
agaggggctgaccgggttggttttgatctgataaatgcacgcatcccccccgcgaagggggtcagcgcccgtcggcatgtattagctctagaattaccacagttatccaagtaggagagg

SEQ ID NO: 48864 - DNA, 120 bp, Homo sapiens
  misc_feature: 682 for SV(W|O) and 18S
actctagataacctcgggccgatcgcacgccccccgtggcggcgacgacccattcgaacgtctgccctatcaactttcgatggtagtcgccgtgcctaccatggtgaccacgggtgacgg

SEQ ID NO: 48865 - DNA, 120 bp, Homo sapiens
  misc_feature: 681 for SV(W|O) and 18S
tcctacttggataactgtggtaattctagagctaatacatgccgacgggcgctgacccccttcgcgggggggatgcgtgcatttatcagatcaaaaccaacccggtcagcccctctccgg

SEQ ID NO: 48866 - DNA, 120 bp, Homo sapiens
  misc_feature: 681 for SV(W|O) and 18S
gaaaccaaagtctttgggttccggggggagtatggttgcaaagctgaaacttaaaggaattgacggaagggcaccaccaggagtggagcctgcggcttaatttgactcaacacgggaaac

SEQ ID NO: 48867 - DNA, 120 bp, Homo sapiens
  misc_feature: 681 for SV(W|O) and 18S
gttgagtcaaattaagccgcaggctccactcctggtggtgcccttccgtcaattcctttaagtttcagctttgcaaccatactccccccggaacccaaagactttggtttcccggaagct

SEQ ID NO: 48868 - DNA, 120 bp, Homo sapiens
  misc_feature: 681 for SV(W|O) and 18S
aaagtctttgggttccggggggagtatggttgcaaagctgaaacttaaaggaattgacggaagggcaccaccaggagtggagcctgcggcttaatttgactcaacacgggaaacctcacc

SEQ ID NO: 48869 - DNA, 120 bp, Homo sapiens
  misc_feature: 681 for SV(W|O) and 18S
ggcggggacgggcggtggctcgcctcgcggcggaccgcccgcccgctcccaagatccaactacgagctttttaactgcagcaactttaatatacgctattggagctggaattaccgcggc

SEQ ID NO: 48870 - DNA, 120 bp, Homo sapiens
  misc_feature: 681 for SV(W|O) and 18S
ggataactgtggtaattctagagctaatacatgccgacgggcgctgacccccttcgcgggggggatgcgtgcatttatcagatcaaaaccaacccggtcagcccctctccggccccggcc

SEQ ID NO: 48871 - DNA, 120 bp, Homo sapiens
  misc_feature: 681 for SV(W|O) and 18S
aggggctgaccgggttggttttgatctgataaatgcacgcatcccccccgcgaagggggtcagcgcccgtcggcatgtattagctctagaattaccacagttatccaagtaggagaggag

SEQ ID NO: 48872 - DNA, 120 bp, Homo sapiens
  misc_feature: 680 for SV(W|O) and 18S
ttgatctgataaatgcacgcatcccccccgcgaagggggtcagcgcccgtcggcatgtattagctctagaattaccacagttatccaagtaggagaggagcgagcgaccaaaggaaccat

SEQ ID NO: 48873 - DNA, 120 bp, Homo sapiens
  misc_feature: 680 for SV(W|O) and 18S
gctgaccgggttggttttgatctgataaatgcacgcatcccccccgcgaagggggtcagcgcccgtcggcatgtattagctctagaattaccacagttatccaagtaggagaggagcgag

SEQ ID NO: 48874 - DNA, 120 bp, Homo sapiens
  misc_feature: 679 for SV(W|O) and 18S
cgggcagcttccgggaaaccaaagtctttgggttccggggggagtatggttgcaaagctgaaacttaaaggaattgacggaagggcaccaccaggagtggagcctgcggcttaatttgac

SEQ ID NO: 48875 - DNA, 120 bp, Homo sapiens
  misc_feature: 679 for SV(W|O) and 18S
aggcgagccaccgcccgtccccgccccttgcctctcggcgccccctcgatgctcttagctgagtgtcccgcggggcccgaagcgtttactttgaaaaaattagagtgttcaaagcaggcc

SEQ ID NO: 48876 - DNA, 120 bp, Homo sapiens
  misc_feature: 678 for SV(W|O) and 18S
cagcttccgggaaaccaaagtctttgggttccggggggagtatggttgcaaagctgaaacttaaaggaattgacggaagggcaccaccaggagtggagcctgcggcttaatttgactcaa

SEQ ID NO: 48877 - DNA, 120 bp, Homo sapiens
  misc_feature: 678 for SV(W|O) and 18S
ccaaagtctttgggttccggggggagtatggttgcaaagctgaaacttaaaggaattgacggaagggcaccaccaggagtggagcctgcggcttaatttgactcaacacgggaaacctca

SEQ ID NO: 48878 - DNA, 120 bp, Homo sapiens
  misc_feature: 678 for SV(W|O) and 18S
ggagaggggctgaccgggttggttttgatctgataaatgcacgcatcccccccgcgaagggggtcagcgcccgtcggcatgtattagctctagaattaccacagttatccaagtaggaga

SEQ ID NO: 48879 - DNA, 120 bp, Homo sapiens
  misc_feature: 678 for SV(W|O) and 18S
gactctagataacctcgggccgatcgcacgccccccgtggcggcgacgacccattcgaacgtctgccctatcaactttcgatggtagtcgccgtgcctaccatggtgaccacgggtgacg

SEQ ID NO: 48880 - DNA, 120 bp, Homo sapiens
  misc_feature: 678 for SV(W|O) and 18S
ccaccgcccgtccccgccccttgcctctcggcgccccctcgatgctcttagctgagtgtcccgcggggcccgaagcgtttactttgaaaaaattagagtgttcaaagcaggcccgagccg

SEQ ID NO: 48881 - DNA, 120 bp, Homo sapiens
  misc_feature: 677 for SV(W|O) and 18S
tctttgggttccggggggagtatggttgcaaagctgaaacttaaaggaattgacggaagggcaccaccaggagtggagcctgcggcttaatttgactcaacacgggaaacctcacccggc

SEQ ID NO: 48882 - DNA, 120 bp, Homo sapiens
  misc_feature: 677 for SV(W|O) and 18S
aaaccaaagtctttgggttccggggggagtatggttgcaaagctgaaacttaaaggaattgacggaagggcaccaccaggagtggagcctgcggcttaatttgactcaacacgggaaacc

SEQ ID NO: 48883 - DNA, 120 bp, Homo sapiens
  misc_feature: 677 for SV(W|O) and 18S
ggcccgaagcgtttactttgaaaaaattagagtgttcaaagcaggcccgagccgcctggataccgcagctaggaataatggaataggaccgcggttctattttgttggttttcggaactg

SEQ ID NO: 48884 - DNA, 120 bp, Homo sapiens
  misc_feature: 677 for SV(W|O) and 18S
ctcctacttggataactgtggtaattctagagctaatacatgccgacgggcgctgacccccttcgcgggggggatgcgtgcatttatcagatcaaaaccaacccggtcagcccctctccg

SEQ ID NO: 48885 - DNA, 120 bp, Homo sapiens
  misc_feature: 676 for SV(W|O) and 18S
tggtaattctagagctaatacatgccgacgggcgctgacccccttcgcgggggggatgcgtgcatttatcagatcaaaaccaacccggtcagcccctctccggccccggccggggggcgg

SEQ ID NO: 48886 - DNA, 120 bp, Homo sapiens
  misc_feature: 676 for SV(W|O) and 18S
tgactctagataacctcgggccgatcgcacgccccccgtggcggcgacgacccattcgaacgtctgccctatcaactttcgatggtagtcgccgtgcctaccatggtgaccacgggtgac

SEQ ID NO: 48887 - DNA, 120 bp, Homo sapiens
  misc_feature: 676 for SV(W|O) and 18S
ggggacgggcggtggctcgcctcgcggcggaccgcccgcccgctcccaagatccaactacgagctttttaactgcagcaactttaatatacgctattggagctggaattaccgcggctgc

SEQ ID NO: 48888 - DNA, 120 bp, Homo sapiens
  misc_feature: 676 for SV(W|O) and 18S
aaattacccactcccgacccggggaggtagtgacgaaaaataacaatacaggactctttcgaggccctgtaattggaatgagtccactttaaatcctttaacgaggatccattggagggc

SEQ ID NO: 48889 - DNA, 120 bp, Homo sapiens
  misc_feature: 675 for SV(W|O) and 18S
gtgttgagtcaaattaagccgcaggctccactcctggtggtgcccttccgtcaattcctttaagtttcagctttgcaaccatactccccccggaacccaaagactttggtttcccggaag

SEQ ID NO: 48890 - DNA, 120 bp, Homo sapiens
  misc_feature: 675 for SV(W|O) and 18S
ccggagagggagcctgagaaacggctaccacatccaaggaaggcagcaggcgcgcaaattacccactcccgacccggggaggtagtgacgaaaaataacaatacaggactctttcgaggc

SEQ ID NO: 48891 - DNA, 120 bp, Homo sapiens
  misc_feature: 675 for SV(W|O) and 18S
ccgggaaaccaaagtctttgggttccggggggagtatggttgcaaagctgaaacttaaaggaattgacggaagggcaccaccaggagtggagcctgcggcttaatttgactcaacacggg

SEQ ID NO: 48892 - DNA, 120 bp, Homo sapiens
  misc_feature: 675 for SV(W|O) and 18S
acatccaaggaaggcagcaggcgcgcaaattacccactcccgacccggggaggtagtgacgaaaaataacaatacaggactctttcgaggccctgtaattggaatgagtccactttaaat

SEQ ID NO: 48893 - DNA, 120 bp, Homo sapiens
  misc_feature: 674 for SV(W|O) and 18S
ctgaccgggttggttttgatctgataaatgcacgcatcccccccgcgaagggggtcagcgcccgtcggcatgtattagctctagaattaccacagttatccaagtaggagaggagcgagc

SEQ ID NO: 48894 - DNA, 120 bp, Homo sapiens
  misc_feature: 673 for SV(W|O) and 18S
cggggcccgaagcgtttactttgaaaaaattagagtgttcaaagcaggcccgagccgcctggataccgcagctaggaataatggaataggaccgcggttctattttgttggttttcggaa

SEQ ID NO: 48895 - DNA, 120 bp, Homo sapiens
  misc_feature: 673 for SV(W|O) and 18S
tccgggaaaccaaagtctttgggttccggggggagtatggttgcaaagctgaaacttaaaggaattgacggaagggcaccaccaggagtggagcctgcggcttaatttgactcaacacgg

SEQ ID NO: 48896 - DNA, 120 bp, Homo sapiens
  misc_feature: 673 for SV(W|O) and 18S
gggggatgcgtgcatttatcagatcaaaaccaacccggtcagcccctctccggccccggccggggggcgggcgccggcggctttggtgactctagataacctcgggccgatcgcacgccc

SEQ ID NO: 48897 - DNA, 120 bp, Homo sapiens
  misc_feature: 673 for SV(W|O) and 18S
ggggctgaccgggttggttttgatctgataaatgcacgcatcccccccgcgaagggggtcagcgcccgtcggcatgtattagctctagaattaccacagttatccaagtaggagaggagc

SEQ ID NO: 48898 - DNA, 120 bp, Homo sapiens
  misc_feature: 673 for SV(W|O) and 18S
gggcccgaagcgtttactttgaaaaaattagagtgttcaaagcaggcccgagccgcctggataccgcagctaggaataatggaataggaccgcggttctattttgttggttttcggaact

SEQ ID NO: 48899 - DNA, 120 bp, Homo sapiens
  misc_feature: 673 for SV(W|O) and 18S
ggccggggggcgggcgccggcggctttggtgactctagataacctcgggccgatcgcacgccccccgtggcggcgacgacccattcgaacgtctgccctatcaactttcgatggtagtcg

SEQ ID NO: 48900 - DNA, 120 bp, Homo sapiens
  misc_feature: 673 for SV(W|O) and 18S
gagaggggctgaccgggttggttttgatctgataaatgcacgcatcccccccgcgaagggggtcagcgcccgtcggcatgtattagctctagaattaccacagttatccaagtaggagag

SEQ ID NO: 48901 - DNA, 120 bp, Homo sapiens
  misc_feature: 673 for SV(W|O) and 18S
gaaagcatttgccaagaatgttttcattaatcaagaacgaaagtcggaggttcgaagacgatcagataccgtcgtagttccgaccataaacgatgccgaccggcgatgcggcggcgttat

SEQ ID NO: 48902 - DNA, 120 bp, Homo sapiens
  misc_feature: 672 for SV(W|O) and 18S
ggaaaccaaagtctttgggttccggggggagtatggttgcaaagctgaaacttaaaggaattgacggaagggcaccaccaggagtggagcctgcggcttaatttgactcaacacgggaaa

SEQ ID NO: 48903 - DNA, 120 bp, Homo sapiens
  misc_feature: 672 for SV(W|O) and 18S
cgtgttgagtcaaattaagccgcaggctccactcctggtggtgcccttccgtcaattcctttaagtttcagctttgcaaccatactccccccggaacccaaagactttggtttcccggaa

SEQ ID NO: 48904 - DNA, 120 bp, Homo sapiens
  misc_feature: 672 for SV(W|O) and 18S
ggggcccgaagcgtttactttgaaaaaattagagtgttcaaagcaggcccgagccgcctggataccgcagctaggaataatggaataggaccgcggttctattttgttggttttcggaac

SEQ ID NO: 48905 - DNA, 120 bp, Homo sapiens
  misc_feature: 672 for SV(W|O) and 18S
gggttcgattccggagagggagcctgagaaacggctaccacatccaaggaaggcagcaggcgcgcaaattacccactcccgacccggggaggtagtgacgaaaaataacaatacaggact

SEQ ID NO: 48906 - DNA, 120 bp, Homo sapiens
  misc_feature: 672 for SV(W|O) and 18S
gggctgaccgggttggttttgatctgataaatgcacgcatcccccccgcgaagggggtcagcgcccgtcggcatgtattagctctagaattaccacagttatccaagtaggagaggagcg

SEQ ID NO: 48907 - DNA, 120 bp, Homo sapiens
  misc_feature: 672 for SV(W|O) and 18S
gcgaggcgagccaccgcccgtccccgccccttgcctctcggcgccccctcgatgctcttagctgagtgtcccgcggggcccgaagcgtttactttgaaaaaattagagtgttcaaagcag

SEQ ID NO: 48908 - DNA, 120 bp, Homo sapiens
  misc_feature: 672 for SV(W|O) and 18S
gaggcgagccaccgcccgtccccgccccttgcctctcggcgccccctcgatgctcttagctgagtgtcccgcggggcccgaagcgtttactttgaaaaaattagagtgttcaaagcaggc

SEQ ID NO: 48909 - DNA, 120 bp, Homo sapiens
  misc_feature: 671 for SV(W|O) and 18S
ttcccatgacccgccgggcagcttccgggaaaccaaagtctttgggttccggggggagtatggttgcaaagctgaaacttaaaggaattgacggaagggcaccaccaggagtggagcctg

SEQ ID NO: 48910 - DNA, 120 bp, Homo sapiens
  misc_feature: 671 for SV(W|O) and 18S
taactgtggtaattctagagctaatacatgccgacgggcgctgacccccttcgcgggggggatgcgtgcatttatcagatcaaaaccaacccggtcagcccctctccggccccggccggg

SEQ ID NO: 48911 - DNA, 120 bp, Homo sapiens
  misc_feature: 671 for SV(W|O) and 18S
gggcggggacgggcggtggctcgcctcgcggcggaccgcccgcccgctcccaagatccaactacgagctttttaactgcagcaactttaatatacgctattggagctggaattaccgcgg

SEQ ID NO: 48912 - DNA, 120 bp, Homo sapiens
  misc_feature: 671 for SV(W|O) and 18S
catccaaggaaggcagcaggcgcgcaaattacccactcccgacccggggaggtagtgacgaaaaataacaatacaggactctttcgaggccctgtaattggaatgagtccactttaaatc

SEQ ID NO: 48913 - DNA, 120 bp, Homo sapiens
  misc_feature: 671 for SV(W|O) and 18S
gataactgtggtaattctagagctaatacatgccgacgggcgctgacccccttcgcgggggggatgcgtgcatttatcagatcaaaaccaacccggtcagcccctctccggccccggccg

SEQ ID NO: 48914 - DNA, 120 bp, Homo sapiens
  misc_feature: 671 for SV(W|O) and 18S
cgaggcgagccaccgcccgtccccgccccttgcctctcggcgccccctcgatgctcttagctgagtgtcccgcggggcccgaagcgtttactttgaaaaaattagagtgttcaaagcagg

SEQ ID NO: 48915 - DNA, 120 bp, Homo sapiens
  misc_feature: 671 for SV(W|O) and 18S
acggggggcgtgcgatcggcccgaggttatctagagtcaccaaagccgccggcgcccgccccccggccggggccggagaggggctgaccgggttggttttgatctgataaatgcacgcat

SEQ ID NO: 48916 - DNA, 120 bp, Homo sapiens
  misc_feature: 670 for SV(W|O) and 18S
gatctgataaatgcacgcatcccccccgcgaagggggtcagcgcccgtcggcatgtattagctctagaattaccacagttatccaagtaggagaggagcgagcgaccaaaggaaccataa

SEQ ID NO: 48917 - DNA, 120 bp, Homo sapiens
  misc_feature: 670 for SV(W|O) and 18S
ggcgagccaccgcccgtccccgccccttgcctctcggcgccccctcgatgctcttagctgagtgtcccgcggggcccgaagcgtttactttgaaaaaattagagtgttcaaagcaggccc

SEQ ID NO: 48918 - DNA, 120 bp, Homo sapiens
  misc_feature: 670 for SV(W|O) and 18S
ataactgtggtaattctagagctaatacatgccgacgggcgctgacccccttcgcgggggggatgcgtgcatttatcagatcaaaaccaacccggtcagcccctctccggccccggccgg

SEQ ID NO: 48919 - DNA, 120 bp, Homo sapiens
  misc_feature: 669 for SV(W|O) and 18S
ccacggggggcgtgcgatcggcccgaggttatctagagtcaccaaagccgccggcgcccgccccccggccggggccggagaggggctgaccgggttggttttgatctgataaatgcacgc

SEQ ID NO: 48920 - DNA, 120 bp, Homo sapiens
  misc_feature: 669 for SV(W|O) and 18S
cccatgacccgccgggcagcttccgggaaaccaaagtctttgggttccggggggagtatggttgcaaagctgaaacttaaaggaattgacggaagggcaccaccaggagtggagcctgcg

SEQ ID NO: 48921 - DNA, 120 bp, Homo sapiens
  misc_feature: 668 for SV(W|O) and 18S
gggaaaccaaagtctttgggttccggggggagtatggttgcaaagctgaaacttaaaggaattgacggaagggcaccaccaggagtggagcctgcggcttaatttgactcaacacgggaa

SEQ ID NO: 48922 - DNA, 120 bp, Homo sapiens
  misc_feature: 668 for SV(W|O) and 18S
ggctgaccgggttggttttgatctgataaatgcacgcatcccccccgcgaagggggtcagcgcccgtcggcatgtattagctctagaattaccacagttatccaagtaggagaggagcga

SEQ ID NO: 48923 - DNA, 120 bp, Homo sapiens
  misc_feature: 668 for SV(W|O) and 18S
gtggtaattctagagctaatacatgccgacgggcgctgacccccttcgcgggggggatgcgtgcatttatcagatcaaaaccaacccggtcagcccctctccggccccggccggggggcg

SEQ ID NO: 48924 - DNA, 120 bp, Homo sapiens
  misc_feature: 668 for SV(W|O) and 18S
gcggctttggtgactctagataacctcgggccgatcgcacgccccccgtggcggcgacgacccattcgaacgtctgccctatcaactttcgatggtagtcgccgtgcctaccatggtgac

SEQ ID NO: 48925 - DNA, 120 bp, Homo sapiens
  misc_feature: 668 for SV(W|O) and 18S
agccaccgcccgtccccgccccttgcctctcggcgccccctcgatgctcttagctgagtgtcccgcggggcccgaagcgtttactttgaaaaaattagagtgttcaaagcaggcccgagc

SEQ ID NO: 48926 - DNA, 120 bp, Homo sapiens
  misc_feature: 667 for SV(W|O) and 18S
tgatctgataaatgcacgcatcccccccgcgaagggggtcagcgcccgtcggcatgtattagctctagaattaccacagttatccaagtaggagaggagcgagcgaccaaaggaaccata

SEQ ID NO: 48927 - DNA, 120 bp, Homo sapiens
  misc_feature: 667 for SV(W|O) and 18S
tcccatgacccgccgggcagcttccgggaaaccaaagtctttgggttccggggggagtatggttgcaaagctgaaacttaaaggaattgacggaagggcaccaccaggagtggagcctgc

SEQ ID NO: 48928 - DNA, 120 bp, Homo sapiens
  misc_feature: 667 for SV(W|O) and 18S
cggggacgggcggtggctcgcctcgcggcggaccgcccgcccgctcccaagatccaactacgagctttttaactgcagcaactttaatatacgctattggagctggaattaccgcggctg

SEQ ID NO: 48929 - DNA, 120 bp, Homo sapiens
  misc_feature: 667 for SV(W|O) and 18S
aactgtggtaattctagagctaatacatgccgacgggcgctgacccccttcgcgggggggatgcgtgcatttatcagatcaaaaccaacccggtcagcccctctccggccccggccgggg

SEQ ID NO: 48930 - DNA, 120 bp, Homo sapiens
  misc_feature: 667 for SV(W|O) and 18S
attcccatgacccgccgggcagcttccgggaaaccaaagtctttgggttccggggggagtatggttgcaaagctgaaacttaaaggaattgacggaagggcaccaccaggagtggagcct

SEQ ID NO: 48931 - DNA, 120 bp, Homo sapiens
  misc_feature: 666 for SV(W|O) and 18S
cgggaaaccaaagtctttgggttccggggggagtatggttgcaaagctgaaacttaaaggaattgacggaagggcaccaccaggagtggagcctgcggcttaatttgactcaacacggga

SEQ ID NO: 48932 - DNA, 120 bp, Homo sapiens
  misc_feature: 666 for SV(W|O) and 18S
tattcccatgacccgccgggcagcttccgggaaaccaaagtctttgggttccggggggagtatggttgcaaagctgaaacttaaaggaattgacggaagggcaccaccaggagtggagcc

SEQ ID NO: 48933 - DNA, 120 bp, Homo sapiens
  misc_feature: 666 for SV(W|O) and 18S
atctgataaatgcacgcatcccccccgcgaagggggtcagcgcccgtcggcatgtattagctctagaattaccacagttatccaagtaggagaggagcgagcgaccaaaggaaccataac

SEQ ID NO: 48934 - DNA, 120 bp, Homo sapiens
  misc_feature: 666 for SV(W|O) and 18S
accgggttggttttgatctgataaatgcacgcatcccccccgcgaagggggtcagcgcccgtcggcatgtattagctctagaattaccacagttatccaagtaggagaggagcgagcgac

SEQ ID NO: 48935 - DNA, 120 bp, Homo sapiens
  misc_feature: 664 for SV(W|O) and 18S
ttattcccatgacccgccgggcagcttccgggaaaccaaagtctttgggttccggggggagtatggttgcaaagctgaaacttaaaggaattgacggaagggcaccaccaggagtggagc

SEQ ID NO: 48936 - DNA, 120 bp, Homo sapiens
  misc_feature: 664 for SV(W|O) and 18S
gcgagccaccgcccgtccccgccccttgcctctcggcgccccctcgatgctcttagctgagtgtcccgcggggcccgaagcgtttactttgaaaaaattagagtgttcaaagcaggcccg

SEQ ID NO: 48937 - DNA, 120 bp, Homo sapiens
  misc_feature: 662 for SV(W|O) and 18S
gccggggggcgggcgccggcggctttggtgactctagataacctcgggccgatcgcacgccccccgtggcggcgacgacccattcgaacgtctgccctatcaactttcgatggtagtcgc

SEQ ID NO: 48938 - DNA, 120 bp, Homo sapiens
  misc_feature: 662 for SV(W|O) and 18S
gccgggcagcttccgggaaaccaaagtctttgggttccggggggagtatggttgcaaagctgaaacttaaaggaattgacggaagggcaccaccaggagtggagcctgcggcttaatttg

SEQ ID NO: 48939 - DNA, 120 bp, Homo sapiens
  misc_feature: 662 for SV(W|O) and 18S
cgcggggcccgaagcgtttactttgaaaaaattagagtgttcaaagcaggcccgagccgcctggataccgcagctaggaataatggaataggaccgcggttctattttgttggttttcgg

SEQ ID NO: 48940 - DNA, 120 bp, Homo sapiens
  misc_feature: 661 for SV(W|O) and 18S
tgtggtaattctagagctaatacatgccgacgggcgctgacccccttcgcgggggggatgcgtgcatttatcagatcaaaaccaacccggtcagcccctctccggccccggccggggggc

SEQ ID NO: 48941 - DNA, 120 bp, Homo sapiens
  misc_feature: 661 for SV(W|O) and 18S
ctgtggtaattctagagctaatacatgccgacgggcgctgacccccttcgcgggggggatgcgtgcatttatcagatcaaaaccaacccggtcagcccctctccggccccggccgggggg

SEQ ID NO: 48942 - DNA, 120 bp, Homo sapiens
  misc_feature: 661 for SV(W|O) and 18S
cccgccgggcagcttccgggaaaccaaagtctttgggttccggggggagtatggttgcaaagctgaaacttaaaggaattgacggaagggcaccaccaggagtggagcctgcggcttaat

SEQ ID NO: 48943 - DNA, 120 bp, Homo sapiens
  misc_feature: 660 for SV(W|O) and 18S
gagccaccgcccgtccccgccccttgcctctcggcgccccctcgatgctcttagctgagtgtcccgcggggcccgaagcgtttactttgaaaaaattagagtgttcaaagcaggcccgag

SEQ ID NO: 48944 - DNA, 120 bp, Homo sapiens
  misc_feature: 659 for SV(W|O) and 18S
tgaccgggttggttttgatctgataaatgcacgcatcccccccgcgaagggggtcagcgcccgtcggcatgtattagctctagaattaccacagttatccaagtaggagaggagcgagcg

SEQ ID NO: 48945 - DNA, 120 bp, Homo sapiens
  misc_feature: 659 for SV(W|O) and 18S
gcggggcccgaagcgtttactttgaaaaaattagagtgttcaaagcaggcccgagccgcctggataccgcagctaggaataatggaataggaccgcggttctattttgttggttttcgga

SEQ ID NO: 48946 - DNA, 120 bp, Homo sapiens
  misc_feature: 658 for SV(W|O) and 18S
cgagccaccgcccgtccccgccccttgcctctcggcgccccctcgatgctcttagctgagtgtcccgcggggcccgaagcgtttactttgaaaaaattagagtgttcaaagcaggcccga

SEQ ID NO: 48947 - DNA, 120 bp, Homo sapiens
  misc_feature: 658 for SV(W|O) and 18S
tccggagagggagcctgagaaacggctaccacatccaaggaaggcagcaggcgcgcaaattacccactcccgacccggggaggtagtgacgaaaaataacaatacaggactctttcgagg

SEQ ID NO: 48948 - DNA, 120 bp, Homo sapiens
  misc_feature: 658 for SV(W|O) and 18S
ggcggctttggtgactctagataacctcgggccgatcgcacgccccccgtggcggcgacgacccattcgaacgtctgccctatcaactttcgatggtagtcgccgtgcctaccatggtga

SEQ ID NO: 48949 - DNA, 120 bp, Homo sapiens
  misc_feature: 658 for SV(W|O) and 18S
ccgggcagcttccgggaaaccaaagtctttgggttccggggggagtatggttgcaaagctgaaacttaaaggaattgacggaagggcaccaccaggagtggagcctgcggcttaatttga

SEQ ID NO: 48950 - DNA, 120 bp, Homo sapiens
  misc_feature: 658 for SV(W|O) and 18S
ggggggatgcgtgcatttatcagatcaaaaccaacccggtcagcccctctccggccccggccggggggcgggcgccggcggctttggtgactctagataacctcgggccgatcgcacgcc

SEQ ID NO: 48951 - DNA, 120 bp, Homo sapiens
  misc_feature: 658 for SV(W|O) and 18S
gggggcgggcgccggcggctttggtgactctagataacctcgggccgatcgcacgccccccgtggcggcgacgacccattcgaacgtctgccctatcaactttcgatggtagtcgccgtg

SEQ ID NO: 48952 - DNA, 120 bp, Homo sapiens
  misc_feature: 657 for SV(W|O) and 18S
ccggggggcgggcgccggcggctttggtgactctagataacctcgggccgatcgcacgccccccgtggcggcgacgacccattcgaacgtctgccctatcaactttcgatggtagtcgcc

SEQ ID NO: 48953 - DNA, 120 bp, Homo sapiens
  misc_feature: 657 for SV(W|O) and 18S
cggggggcgggcgccggcggctttggtgactctagataacctcgggccgatcgcacgccccccgtggcggcgacgacccattcgaacgtctgccctatcaactttcgatggtagtcgccg

SEQ ID NO: 48954 - DNA, 120 bp, Homo sapiens
  misc_feature: 657 for SV(W|O) and 18S
actgtggtaattctagagctaatacatgccgacgggcgctgacccccttcgcgggggggatgcgtgcatttatcagatcaaaaccaacccggtcagcccctctccggccccggccggggg

SEQ ID NO: 48955 - DNA, 120 bp, Homo sapiens
  misc_feature: 656 for SV(W|O) and 18S
ggggcgggcgccggcggctttggtgactctagataacctcgggccgatcgcacgccccccgtggcggcgacgacccattcgaacgtctgccctatcaactttcgatggtagtcgccgtgc

SEQ ID NO: 48956 - DNA, 120 bp, Homo sapiens
  misc_feature: 655 for SV(W|O) and 18S
gaccgggttggttttgatctgataaatgcacgcatcccccccgcgaagggggtcagcgcccgtcggcatgtattagctctagaattaccacagttatccaagtaggagaggagcgagcga

SEQ ID NO: 48957 - DNA, 120 bp, Homo sapiens
  misc_feature: 655 for SV(W|O) and 18S
ggttcgattccggagagggagcctgagaaacggctaccacatccaaggaaggcagcaggcgcgcaaattacccactcccgacccggggaggtagtgacgaaaaataacaatacaggactc

SEQ ID NO: 48958 - DNA, 120 bp, Homo sapiens
  misc_feature: 655 for SV(W|O) and 18S
ggcgggcgccggcggctttggtgactctagataacctcgggccgatcgcacgccccccgtggcggcgacgacccattcgaacgtctgccctatcaactttcgatggtagtcgccgtgcct

SEQ ID NO: 48959 - DNA, 120 bp, Homo sapiens
  misc_feature: 655 for SV(W|O) and 18S
atccaaggaaggcagcaggcgcgcaaattacccactcccgacccggggaggtagtgacgaaaaataacaatacaggactctttcgaggccctgtaattggaatgagtccactttaaatcc

SEQ ID NO: 48960 - DNA, 120 bp, Homo sapiens
  misc_feature: 655 for SV(W|O) and 18S
gcaaattacccactcccgacccggggaggtagtgacgaaaaataacaatacaggactctttcgaggccctgtaattggaatgagtccactttaaatcctttaacgaggatccattggagg

SEQ ID NO: 48961 - DNA, 120 bp, Homo sapiens
  misc_feature: 655 for SV(W|O) and 18S
ccatgacccgccgggcagcttccgggaaaccaaagtctttgggttccggggggagtatggttgcaaagctgaaacttaaaggaattgacggaagggcaccaccaggagtggagcctgcgg

SEQ ID NO: 48962 - DNA, 120 bp, Homo sapiens
  misc_feature: 654 for SV(W|O) and 18S
catgacccgccgggcagcttccgggaaaccaaagtctttgggttccggggggagtatggttgcaaagctgaaacttaaaggaattgacggaagggcaccaccaggagtggagcctgcggc

SEQ ID NO: 48963 - DNA, 120 bp, Homo sapiens
  misc_feature: 654 for SV(W|O) and 18S
caaattacccactcccgacccggggaggtagtgacgaaaaataacaatacaggactctttcgaggccctgtaattggaatgagtccactttaaatcctttaacgaggatccattggaggg

SEQ ID NO: 48964 - DNA, 120 bp, Homo sapiens
  misc_feature: 653 for SV(W|O) and 18S
ttccggagagggagcctgagaaacggctaccacatccaaggaaggcagcaggcgcgcaaattacccactcccgacccggggaggtagtgacgaaaaataacaatacaggactctttcgag

SEQ ID NO: 48965 - DNA, 120 bp, Homo sapiens
  misc_feature: 653 for SV(W|O) and 18S
ccgcggggcccgaagcgtttactttgaaaaaattagagtgttcaaagcaggcccgagccgcctggataccgcagctaggaataatggaataggaccgcggttctattttgttggttttcg

SEQ ID NO: 48966 - DNA, 120 bp, Homo sapiens
  misc_feature: 652 for SV(W|O) and 18S
gttcgattccggagagggagcctgagaaacggctaccacatccaaggaaggcagcaggcgcgcaaattacccactcccgacccggggaggtagtgacgaaaaataacaatacaggactct

SEQ ID NO: 48967 - DNA, 120 bp, Homo sapiens
  misc_feature: 652 for SV(W|O) and 18S
ggggggcgggcgccggcggctttggtgactctagataacctcgggccgatcgcacgccccccgtggcggcgacgacccattcgaacgtctgccctatcaactttcgatggtagtcgccgt

SEQ ID NO: 48968 - DNA, 120 bp, Homo sapiens
  misc_feature: 652 for SV(W|O) and 18S
gggcgggcgccggcggctttggtgactctagataacctcgggccgatcgcacgccccccgtggcggcgacgacccattcgaacgtctgccctatcaactttcgatggtagtcgccgtgcc

SEQ ID NO: 48969 - DNA, 120 bp, Homo sapiens
  misc_feature: 651 for SV(W|O) and 18S
gttattcccatgacccgccgggcagcttccgggaaaccaaagtctttgggttccggggggagtatggttgcaaagctgaaacttaaaggaattgacggaagggcaccaccaggagtggag

SEQ ID NO: 48970 - DNA, 120 bp, Homo sapiens
  misc_feature: 651 for SV(W|O) and 18S
gccacggggggcgtgcgatcggcccgaggttatctagagtcaccaaagccgccggcgcccgccccccggccggggccggagaggggctgaccgggttggttttgatctgataaatgcacg

SEQ ID NO: 48971 - DNA, 120 bp, Homo sapiens
  misc_feature: 650 for SV(W|O) and 18S
tccaaggaaggcagcaggcgcgcaaattacccactcccgacccggggaggtagtgacgaaaaataacaatacaggactctttcgaggccctgtaattggaatgagtccactttaaatcct

SEQ ID NO: 48972 - DNA, 120 bp, Homo sapiens
  misc_feature: 650 for SV(W|O) and 18S
taagccgcaggctccactcctggtggtgcccttccgtcaattcctttaagtttcagctttgcaaccatactccccccggaacccaaagactttggtttcccggaagctgcccggcgggtc

SEQ ID NO: 48973 - DNA, 120 bp, Homo sapiens
  misc_feature: 650 for SV(W|O) and 18S
gccgccacggggggcgtgcgatcggcccgaggttatctagagtcaccaaagccgccggcgcccgccccccggccggggccggagaggggctgaccgggttggttttgatctgataaatgc

SEQ ID NO: 48974 - DNA, 120 bp, Homo sapiens
  misc_feature: 650 for SV(W|O) and 18S
cgccgggcagcttccgggaaaccaaagtctttgggttccggggggagtatggttgcaaagctgaaacttaaaggaattgacggaagggcaccaccaggagtggagcctgcggcttaattt

SEQ ID NO: 48975 - DNA, 120 bp, Homo sapiens
  misc_feature: 650 for SV(W|O) and 18S
ccgccgggcagcttccgggaaaccaaagtctttgggttccggggggagtatggttgcaaagctgaaacttaaaggaattgacggaagggcaccaccaggagtggagcctgcggcttaatt

SEQ ID NO: 48976 - DNA, 120 bp, Homo sapiens
  misc_feature: 648 for SV(W|O) and 18S
tcgccgccacggggggcgtgcgatcggcccgaggttatctagagtcaccaaagccgccggcgcccgccccccggccggggccggagaggggctgaccgggttggttttgatctgataaat

SEQ ID NO: 48977 - DNA, 120 bp, Homo sapiens
  misc_feature: 648 for SV(W|O) and 18S
cccgcggggcccgaagcgtttactttgaaaaaattagagtgttcaaagcaggcccgagccgcctggataccgcagctaggaataatggaataggaccgcggttctattttgttggttttc

SEQ ID NO: 48978 - DNA, 120 bp, Homo sapiens
  misc_feature: 647 for SV(W|O) and 18S
gtcgccgccacggggggcgtgcgatcggcccgaggttatctagagtcaccaaagccgccggcgcccgccccccggccggggccggagaggggctgaccgggttggttttgatctgataaa

SEQ ID NO: 48979 - DNA, 120 bp, Homo sapiens
  misc_feature: 647 for SV(W|O) and 18S
ccgccacggggggcgtgcgatcggcccgaggttatctagagtcaccaaagccgccggcgcccgccccccggccggggccggagaggggctgaccgggttggttttgatctgataaatgca

SEQ ID NO: 48980 - DNA, 120 bp, Homo sapiens
  misc_feature: 647 for SV(W|O) and 18S
aagccgcaggctccactcctggtggtgcccttccgtcaattcctttaagtttcagctttgcaaccatactccccccggaacccaaagactttggtttcccggaagctgcccggcgggtca

SEQ ID NO: 48981 - DNA, 120 bp, Homo sapiens
  misc_feature: 647 for SV(W|O) and 18S
gggggggatgcgtgcatttatcagatcaaaaccaacccggtcagcccctctccggccccggccggggggcgggcgccggcggctttggtgactctagataacctcgggccgatcgcacgc

SEQ ID NO: 48982 - DNA, 120 bp, Homo sapiens
  misc_feature: 647 for SV(W|O) and 18S
ccaaggaaggcagcaggcgcgcaaattacccactcccgacccggggaggtagtgacgaaaaataacaatacaggactctttcgaggccctgtaattggaatgagtccactttaaatcctt

SEQ ID NO: 48983 - DNA, 120 bp, Homo sapiens
  misc_feature: 646 for SV(W|O) and 18S
ttcgcgggggggatgcgtgcatttatcagatcaaaaccaacccggtcagcccctctccggccccggccggggggcgggcgccggcggctttggtgactctagataacctcgggccgatcg

SEQ ID NO: 48984 - DNA, 120 bp, Homo sapiens
  misc_feature: 646 for SV(W|O) and 18S
cggcggctttggtgactctagataacctcgggccgatcgcacgccccccgtggcggcgacgacccattcgaacgtctgccctatcaactttcgatggtagtcgccgtgcctaccatggtg

SEQ ID NO: 48985 - DNA, 120 bp, Homo sapiens
  misc_feature: 645 for SV(W|O) and 18S
acccgccgggcagcttccgggaaaccaaagtctttgggttccggggggagtatggttgcaaagctgaaacttaaaggaattgacggaagggcaccaccaggagtggagcctgcggcttaa

SEQ ID NO: 48986 - DNA, 120 bp, Homo sapiens
  misc_feature: 645 for SV(W|O) and 18S
cgcgggggggatgcgtgcatttatcagatcaaaaccaacccggtcagcccctctccggccccggccggggggcgggcgccggcggctttggtgactctagataacctcgggccgatcgca

SEQ ID NO: 48987 - DNA, 120 bp, Homo sapiens
  misc_feature: 645 for SV(W|O) and 18S
cttcgcgggggggatgcgtgcatttatcagatcaaaaccaacccggtcagcccctctccggccccggccggggggcgggcgccggcggctttggtgactctagataacctcgggccgatc

SEQ ID NO: 48988 - DNA, 120 bp, Homo sapiens
  misc_feature: 644 for SV(W|O) and 18S
ggcgccggcggctttggtgactctagataacctcgggccgatcgcacgccccccgtggcggcgacgacccattcgaacgtctgccctatcaactttcgatggtagtcgccgtgcctacca

SEQ ID NO: 48989 - DNA, 120 bp, Homo sapiens
  misc_feature: 644 for SV(W|O) and 18S
attccggagagggagcctgagaaacggctaccacatccaaggaaggcagcaggcgcgcaaattacccactcccgacccggggaggtagtgacgaaaaataacaatacaggactctttcga

SEQ ID NO: 48990 - DNA, 120 bp, Homo sapiens
  misc_feature: 644 for SV(W|O) and 18S
cgccacggggggcgtgcgatcggcccgaggttatctagagtcaccaaagccgccggcgcccgccccccggccggggccggagaggggctgaccgggttggttttgatctgataaatgcac

SEQ ID NO: 48991 - DNA, 120 bp, Homo sapiens
  misc_feature: 643 for SV(W|O) and 18S
gcgggggggatgcgtgcatttatcagatcaaaaccaacccggtcagcccctctccggccccggccggggggcgggcgccggcggctttggtgactctagataacctcgggccgatcgcac

SEQ ID NO: 48992 - DNA, 120 bp, Homo sapiens
  misc_feature: 643 for SV(W|O) and 18S
cgccggcggctttggtgactctagataacctcgggccgatcgcacgccccccgtggcggcgacgacccattcgaacgtctgccctatcaactttcgatggtagtcgccgtgcctaccatg

SEQ ID NO: 48993 - DNA, 120 bp, Homo sapiens
  misc_feature: 643 for SV(W|O) and 18S
cgccgccacggggggcgtgcgatcggcccgaggttatctagagtcaccaaagccgccggcgcccgccccccggccggggccggagaggggctgaccgggttggttttgatctgataaatg

SEQ ID NO: 48994 - DNA, 120 bp, Homo sapiens
  misc_feature: 642 for SV(W|O) and 18S
gcgggcgccggcggctttggtgactctagataacctcgggccgatcgcacgccccccgtggcggcgacgacccattcgaacgtctgccctatcaactttcgatggtagtcgccgtgccta

SEQ ID NO: 48995 - DNA, 120 bp, Homo sapiens
  misc_feature: 642 for SV(W|O) and 18S
aaggaaggcagcaggcgcgcaaattacccactcccgacccggggaggtagtgacgaaaaataacaatacaggactctttcgaggccctgtaattggaatgagtccactttaaatccttta

SEQ ID NO: 48996 - DNA, 120 bp, Homo sapiens
  misc_feature: 642 for SV(W|O) and 18S
gcgccggcggctttggtgactctagataacctcgggccgatcgcacgccccccgtggcggcgacgacccattcgaacgtctgccctatcaactttcgatggtagtcgccgtgcctaccat

SEQ ID NO: 48997 - DNA, 120 bp, Homo sapiens
  misc_feature: 642 for SV(W|O) and 18S
cgggggggatgcgtgcatttatcagatcaaaaccaacccggtcagcccctctccggccccggccggggggcgggcgccggcggctttggtgactctagataacctcgggccgatcgcacg

SEQ ID NO: 48998 - DNA, 120 bp, Homo sapiens
  misc_feature: 641 for SV(W|O) and 18S
aggcgcgcaaattacccactcccgacccggggaggtagtgacgaaaaataacaatacaggactctttcgaggccctgtaattggaatgagtccactttaaatcctttaacgaggatccat

SEQ ID NO: 48999 - DNA, 120 bp, Homo sapiens
  misc_feature: 640 for SV(W|O) and 18S
ttcgattccggagagggagcctgagaaacggctaccacatccaaggaaggcagcaggcgcgcaaattacccactcccgacccggggaggtagtgacgaaaaataacaatacaggactctt

SEQ ID NO: 49000 - DNA, 120 bp, Homo sapiens
  misc_feature: 638 for SV(W|O) and 18S
tcccgcggggcccgaagcgtttactttgaaaaaattagagtgttcaaagcaggcccgagccgcctggataccgcagctaggaataatggaataggaccgcggttctattttgttggtttt

SEQ ID NO: 49001 - DNA, 120 bp, Homo sapiens
  misc_feature: 638 for SV(W|O) and 18S
gcggcgttattcccatgacccgccgggcagcttccgggaaaccaaagtctttgggttccggggggagtatggttgcaaagctgaaacttaaaggaattgacggaagggcaccaccaggag

SEQ ID NO: 49002 - DNA, 120 bp, Homo sapiens
  misc_feature: 638 for SV(W|O) and 18S
caaggaaggcagcaggcgcgcaaattacccactcccgacccggggaggtagtgacgaaaaataacaatacaggactctttcgaggccctgtaattggaatgagtccactttaaatccttt

SEQ ID NO: 49003 - DNA, 120 bp, Homo sapiens
  misc_feature: 637 for SV(W|O) and 18S
tcgcgggggggatgcgtgcatttatcagatcaaaaccaacccggtcagcccctctccggccccggccggggggcgggcgccggcggctttggtgactctagataacctcgggccgatcgc

SEQ ID NO: 49004 - DNA, 120 bp, Homo sapiens
  misc_feature: 637 for SV(W|O) and 18S
tcgattccggagagggagcctgagaaacggctaccacatccaaggaaggcagcaggcgcgcaaattacccactcccgacccggggaggtagtgacgaaaaataacaatacaggactcttt

SEQ ID NO: 49005 - DNA, 120 bp, Homo sapiens
  misc_feature: 637 for SV(W|O) and 18S
gggcgccggcggctttggtgactctagataacctcgggccgatcgcacgccccccgtggcggcgacgacccattcgaacgtctgccctatcaactttcgatggtagtcgccgtgcctacc

SEQ ID NO: 49006 - DNA, 120 bp, Homo sapiens
  misc_feature: 637 for SV(W|O) and 18S
cggcggcgttattcccatgacccgccgggcagcttccgggaaaccaaagtctttgggttccggggggagtatggttgcaaagctgaaacttaaaggaattgacggaagggcaccaccagg

SEQ ID NO: 49007 - DNA, 120 bp, Homo sapiens
  misc_feature: 636 for SV(W|O) and 18S
gattccggagagggagcctgagaaacggctaccacatccaaggaaggcagcaggcgcgcaaattacccactcccgacccggggaggtagtgacgaaaaataacaatacaggactctttcg

SEQ ID NO: 49008 - DNA, 120 bp, Homo sapiens
  misc_feature: 635 for SV(W|O) and 18S
ggcggcgttattcccatgacccgccgggcagcttccgggaaaccaaagtctttgggttccggggggagtatggttgcaaagctgaaacttaaaggaattgacggaagggcaccaccagga

SEQ ID NO: 49009 - DNA, 120 bp, Homo sapiens
  misc_feature: 635 for SV(W|O) and 18S
gcgcgcaaattacccactcccgacccggggaggtagtgacgaaaaataacaatacaggactctttcgaggccctgtaattggaatgagtccactttaaatcctttaacgaggatccattg

SEQ ID NO: 49010 - DNA, 120 bp, Homo sapiens
  misc_feature: 635 for SV(W|O) and 18S
cgcaaattacccactcccgacccggggaggtagtgacgaaaaataacaatacaggactctttcgaggccctgtaattggaatgagtccactttaaatcctttaacgaggatccattggag

SEQ ID NO: 49011 - DNA, 120 bp, Homo sapiens
  misc_feature: 635 for SV(W|O) and 18S
agccgcaggctccactcctggtggtgcccttccgtcaattcctttaagtttcagctttgcaaccatactccccccggaacccaaagactttggtttcccggaagctgcccggcgggtcat

SEQ ID NO: 49012 - DNA, 120 bp, Homo sapiens
  misc_feature: 634 for SV(W|O) and 18S
cgttattcccatgacccgccgggcagcttccgggaaaccaaagtctttgggttccggggggagtatggttgcaaagctgaaacttaaaggaattgacggaagggcaccaccaggagtgga

SEQ ID NO: 49013 - DNA, 120 bp, Homo sapiens
  misc_feature: 634 for SV(W|O) and 18S
gcgttattcccatgacccgccgggcagcttccgggaaaccaaagtctttgggttccggggggagtatggttgcaaagctgaaacttaaaggaattgacggaagggcaccaccaggagtgg

SEQ ID NO: 49014 - DNA, 120 bp, Homo sapiens
  misc_feature: 634 for SV(W|O) and 18S
cgattccggagagggagcctgagaaacggctaccacatccaaggaaggcagcaggcgcgcaaattacccactcccgacccggggaggtagtgacgaaaaataacaatacaggactctttc

SEQ ID NO: 49015 - DNA, 120 bp, Homo sapiens
  misc_feature: 634 for SV(W|O) and 18S
ctgagtgtcccgcggggcccgaagcgtttactttgaaaaaattagagtgttcaaagcaggcccgagccgcctggataccgcagctaggaataatggaataggaccgcggttctattttgt

SEQ ID NO: 49016 - DNA, 120 bp, Homo sapiens
  misc_feature: 633 for SV(W|O) and 18S
ggcgttattcccatgacccgccgggcagcttccgggaaaccaaagtctttgggttccggggggagtatggttgcaaagctgaaacttaaaggaattgacggaagggcaccaccaggagtg

SEQ ID NO: 49017 - DNA, 120 bp, Homo sapiens
  misc_feature: 632 for SV(W|O) and 18S
cgcgcaaattacccactcccgacccggggaggtagtgacgaaaaataacaatacaggactctttcgaggccctgtaattggaatgagtccactttaaatcctttaacgaggatccattgg

SEQ ID NO: 49018 - DNA, 120 bp, Homo sapiens
  misc_feature: 632 for SV(W|O) and 18S
agtgtcccgcggggcccgaagcgtttactttgaaaaaattagagtgttcaaagcaggcccgagccgcctggataccgcagctaggaataatggaataggaccgcggttctattttgttgg

SEQ ID NO: 49019 - DNA, 120 bp, Homo sapiens
  misc_feature: 631 for SV(W|O) and 18S
aggaaggcagcaggcgcgcaaattacccactcccgacccggggaggtagtgacgaaaaataacaatacaggactctttcgaggccctgtaattggaatgagtccactttaaatcctttaa

SEQ ID NO: 49020 - DNA, 120 bp, Homo sapiens
  misc_feature: 631 for SV(W|O) and 18S
cgggcgccggcggctttggtgactctagataacctcgggccgatcgcacgccccccgtggcggcgacgacccattcgaacgtctgccctatcaactttcgatggtagtcgccgtgcctac

SEQ ID NO: 49021 - DNA, 120 bp, Homo sapiens
  misc_feature: 630 for SV(W|O) and 18S
ggcgcgcaaattacccactcccgacccggggaggtagtgacgaaaaataacaatacaggactctttcgaggccctgtaattggaatgagtccactttaaatcctttaacgaggatccatt

SEQ ID NO: 49022 - DNA, 120 bp, Homo sapiens
  misc_feature: 629 for SV(W|O) and 18S
tccaatggatcctcgttaaaggatttaaagtggactcattccaattacagggcctcgaaagagtcctgtattgttatttttcgtcactacctccccgggtcgggagtgggtaatttgcgc

SEQ ID NO: 49023 - DNA, 120 bp, Homo sapiens
  misc_feature: 629 for SV(W|O) and 18S
gtcccgcggggcccgaagcgtttactttgaaaaaattagagtgttcaaagcaggcccgagccgcctggataccgcagctaggaataatggaataggaccgcggttctattttgttggttt

SEQ ID NO: 49024 - DNA, 120 bp, Homo sapiens
  misc_feature: 629 for SV(W|O) and 18S
gccggcggctttggtgactctagataacctcgggccgatcgcacgccccccgtggcggcgacgacccattcgaacgtctgccctatcaactttcgatggtagtcgccgtgcctaccatgg

SEQ ID NO: 49025 - DNA, 120 bp, Homo sapiens
  misc_feature: 628 for SV(W|O) and 18S
tgcggcggcgttattcccatgacccgccgggcagcttccgggaaaccaaagtctttgggttccggggggagtatggttgcaaagctgaaacttaaaggaattgacggaagggcaccacca

SEQ ID NO: 49026 - DNA, 120 bp, Homo sapiens
  misc_feature: 628 for SV(W|O) and 18S
cagcaggcgcgcaaattacccactcccgacccggggaggtagtgacgaaaaataacaatacaggactctttcgaggccctgtaattggaatgagtccactttaaatcctttaacgaggat

SEQ ID NO: 49027 - DNA, 120 bp, Homo sapiens
  misc_feature: 627 for SV(W|O) and 18S
ggaaggcagcaggcgcgcaaattacccactcccgacccggggaggtagtgacgaaaaataacaatacaggactctttcgaggccctgtaattggaatgagtccactttaaatcctttaac

SEQ ID NO: 49028 - DNA, 120 bp, Homo sapiens
  misc_feature: 627 for SV(W|O) and 18S
agcaggcgcgcaaattacccactcccgacccggggaggtagtgacgaaaaataacaatacaggactctttcgaggccctgtaattggaatgagtccactttaaatcctttaacgaggatc

SEQ ID NO: 49029 - DNA, 120 bp, Homo sapiens
  misc_feature: 626 for SV(W|O) and 18S
gagtgtcccgcggggcccgaagcgtttactttgaaaaaattagagtgttcaaagcaggcccgagccgcctggataccgcagctaggaataatggaataggaccgcggttctattttgttg

SEQ ID NO: 49030 - DNA, 120 bp, Homo sapiens
  misc_feature: 626 for SV(W|O) and 18S
ccggcggctttggtgactctagataacctcgggccgatcgcacgccccccgtggcggcgacgacccattcgaacgtctgccctatcaactttcgatggtagtcgccgtgcctaccatggt

SEQ ID NO: 49031 - DNA, 120 bp, Homo sapiens
  misc_feature: 885 for SV(W|O) and 5.8S
gctagctgcgagaattaatgtgaattgcaggacacattgatcatcgacacttcgaacgcacttgcggccccgggttcctcccggggctacgcctgtctgagcgtcgcttgccgatcaatc

SEQ ID NO: 49032 - DNA, 120 bp, Homo sapiens
  misc_feature: 885 for SV(W|O) and 5.8S
ctagctgcgagaattaatgtgaattgcaggacacattgatcatcgacacttcgaacgcacttgcggccccgggttcctcccggggctacgcctgtctgagcgtcgcttgccgatcaatcg

SEQ ID NO: 49033 - DNA, 120 bp, Homo sapiens
  misc_feature: 869 for SV(W|O) and 5.8S
agctagctgcgagaattaatgtgaattgcaggacacattgatcatcgacacttcgaacgcacttgcggccccgggttcctcccggggctacgcctgtctgagcgtcgcttgccgatcaat

SEQ ID NO: 49034 - DNA, 120 bp, Homo sapiens
  misc_feature: 848 for SV(W|O) and 5.8S
ttgatcggcaagcgacgctcagacaggcgtagccccgggaggaacccggggccgcaagtgcgttcgaagtgtcgatgatcaatgtgtcctgcaattcacattaattctcgcagctagctg

SEQ ID NO: 49035 - DNA, 120 bp, Homo sapiens
  misc_feature: 829 for SV(W|O) and 5.8S
cgcagctagctgcgagaattaatgtgaattgcaggacacattgatcatcgacacttcgaacgcacttgcggccccgggttcctcccggggctacgcctgtctgagcgtcgcttgccgatc

SEQ ID NO: 49036 - DNA, 120 bp, Homo sapiens
  misc_feature: 827 for SV(W|O) and 5.8S
gaacgcagctagctgcgagaattaatgtgaattgcaggacacattgatcatcgacacttcgaacgcacttgcggccccgggttcctcccggggctacgcctgtctgagcgtcgcttgccg

SEQ ID NO: 49037 - DNA, 120 bp, Homo sapiens
  misc_feature: 825 for SV(W|O) and 5.8S
gcagctagctgcgagaattaatgtgaattgcaggacacattgatcatcgacacttcgaacgcacttgcggccccgggttcctcccggggctacgcctgtctgagcgtcgcttgccgatca

SEQ ID NO: 49038 - DNA, 120 bp, Homo sapiens
  misc_feature: 822 for SV(W|O) and 5.8S
agcggtggatcactcggctcgtgcgtcgatgaagaacgcagctagctgcgagaattaatgtgaattgcaggacacattgatcatcgacacttcgaacgcacttgcggccccgggttcctc

SEQ ID NO: 49039 - DNA, 120 bp, Homo sapiens
  misc_feature: 821 for SV(W|O) and 5.8S
acgcagctagctgcgagaattaatgtgaattgcaggacacattgatcatcgacacttcgaacgcacttgcggccccgggttcctcccggggctacgcctgtctgagcgtcgcttgccgat

SEQ ID NO: 49040 - DNA, 120 bp, Homo sapiens
  misc_feature: 813 for SV(W|O) and 5.8S
gcaagtgcgttcgaagtgtcgatgatcaatgtgtcctgcaattcacattaattctcgcagctagctgcgttcttcatcgacgcacgagccgagtgatccaccgctaagagtcgtacgagg

SEQ ID NO: 49041 - DNA, 120 bp, Homo sapiens
  misc_feature: 812 for SV(W|O) and 5.8S
aacgcagctagctgcgagaattaatgtgaattgcaggacacattgatcatcgacacttcgaacgcacttgcggccccgggttcctcccggggctacgcctgtctgagcgtcgcttgccga

SEQ ID NO: 49042 - DNA, 120 bp, Homo sapiens
  misc_feature: 812 for SV(W|O) and 5.8S
agaacgcagctagctgcgagaattaatgtgaattgcaggacacattgatcatcgacacttcgaacgcacttgcggccccgggttcctcccggggctacgcctgtctgagcgtcgcttgcc

SEQ ID NO: 49043 - DNA, 120 bp, Homo sapiens
  misc_feature: 810 for SV(W|O) and 5.8S
gaagaacgcagctagctgcgagaattaatgtgaattgcaggacacattgatcatcgacacttcgaacgcacttgcggccccgggttcctcccggggctacgcctgtctgagcgtcgcttg

SEQ ID NO: 49044 - DNA, 120 bp, Homo sapiens
  misc_feature: 808 for SV(W|O) and 5.8S
aagaacgcagctagctgcgagaattaatgtgaattgcaggacacattgatcatcgacacttcgaacgcacttgcggccccgggttcctcccggggctacgcctgtctgagcgtcgcttgc

SEQ ID NO: 49045 - DNA, 120 bp, Homo sapiens
  misc_feature: 807 for SV(W|O) and 5.8S
tagcggtggatcactcggctcgtgcgtcgatgaagaacgcagctagctgcgagaattaatgtgaattgcaggacacattgatcatcgacacttcgaacgcacttgcggccccgggttcct

SEQ ID NO: 49046 - DNA, 120 bp, Homo sapiens
  misc_feature: 804 for SV(W|O) and 5.8S
aagtgcgttcgaagtgtcgatgatcaatgtgtcctgcaattcacattaattctcgcagctagctgcgttcttcatcgacgcacgagccgagtgatccaccgctaagagtcgtacgaggtc

SEQ ID NO: 49047 - DNA, 120 bp, Homo sapiens
  misc_feature: 803 for SV(W|O) and 5.8S
tgaagaacgcagctagctgcgagaattaatgtgaattgcaggacacattgatcatcgacacttcgaacgcacttgcggccccgggttcctcccggggctacgcctgtctgagcgtcgctt

SEQ ID NO: 49048 - DNA, 120 bp, Homo sapiens
  misc_feature: 801 for SV(W|O) and 5.8S
gcggtggatcactcggctcgtgcgtcgatgaagaacgcagctagctgcgagaattaatgtgaattgcaggacacattgatcatcgacacttcgaacgcacttgcggccccgggttcctcc

SEQ ID NO: 49049 - DNA, 120 bp, Homo sapiens
  misc_feature: 800 for SV(W|O) and 5.8S
caagtgcgttcgaagtgtcgatgatcaatgtgtcctgcaattcacattaattctcgcagctagctgcgttcttcatcgacgcacgagccgagtgatccaccgctaagagtcgtacgaggt

SEQ ID NO: 49050 - DNA, 120 bp, Homo sapiens
  misc_feature: 799 for SV(W|O) and 5.8S
atgaagaacgcagctagctgcgagaattaatgtgaattgcaggacacattgatcatcgacacttcgaacgcacttgcggccccgggttcctcccggggctacgcctgtctgagcgtcgct

SEQ ID NO: 49051 - DNA, 120 bp, Homo sapiens
  misc_feature: 797 for SV(W|O) and 5.8S
tgcgttcgaagtgtcgatgatcaatgtgtcctgcaattcacattaattctcgcagctagctgcgttcttcatcgacgcacgagccgagtgatccaccgctaagagtcgtacgaggtcgat

SEQ ID NO: 49052 - DNA, 120 bp, Homo sapiens
  misc_feature: 795 for SV(W|O) and 5.8S
tcgatgaagaacgcagctagctgcgagaattaatgtgaattgcaggacacattgatcatcgacacttcgaacgcacttgcggccccgggttcctcccggggctacgcctgtctgagcgtc

SEQ ID NO: 49053 - DNA, 120 bp, Homo sapiens
  misc_feature: 795 for SV(W|O) and 5.8S
agtgcgttcgaagtgtcgatgatcaatgtgtcctgcaattcacattaattctcgcagctagctgcgttcttcatcgacgcacgagccgagtgatccaccgctaagagtcgtacgaggtcg

SEQ ID NO: 49054 - DNA, 120 bp, Homo sapiens
  misc_feature: 794 for SV(W|O) and 5.8S
cggtggatcactcggctcgtgcgtcgatgaagaacgcagctagctgcgagaattaatgtgaattgcaggacacattgatcatcgacacttcgaacgcacttgcggccccgggttcctccc

SEQ ID NO: 49055 - DNA, 120 bp, Homo sapiens
  misc_feature: 794 for SV(W|O) and 5.8S
ggctcgtgcgtcgatgaagaacgcagctagctgcgagaattaatgtgaattgcaggacacattgatcatcgacacttcgaacgcacttgcggccccgggttcctcccggggctacgcctg

SEQ ID NO: 49056 - DNA, 120 bp, Homo sapiens
  misc_feature: 791 for SV(W|O) and 5.8S
tgcgtcgatgaagaacgcagctagctgcgagaattaatgtgaattgcaggacacattgatcatcgacacttcgaacgcacttgcggccccgggttcctcccggggctacgcctgtctgag

SEQ ID NO: 49057 - DNA, 120 bp, Homo sapiens
  misc_feature: 791 for SV(W|O) and 5.8S
gtgcgttcgaagtgtcgatgatcaatgtgtcctgcaattcacattaattctcgcagctagctgcgttcttcatcgacgcacgagccgagtgatccaccgctaagagtcgtacgaggtcga

SEQ ID NO: 49058 - DNA, 120 bp, Homo sapiens
  misc_feature: 790 for SV(W|O) and 5.8S
gcgtcgatgaagaacgcagctagctgcgagaattaatgtgaattgcaggacacattgatcatcgacacttcgaacgcacttgcggccccgggttcctcccggggctacgcctgtctgagc

SEQ ID NO: 49059 - DNA, 120 bp, Homo sapiens
  misc_feature: 790 for SV(W|O) and 5.8S
cgatgaagaacgcagctagctgcgagaattaatgtgaattgcaggacacattgatcatcgacacttcgaacgcacttgcggccccgggttcctcccggggctacgcctgtctgagcgtcg

SEQ ID NO: 49060 - DNA, 120 bp, Homo sapiens
  misc_feature: 789 for SV(W|O) and 5.8S
gatgaagaacgcagctagctgcgagaattaatgtgaattgcaggacacattgatcatcgacacttcgaacgcacttgcggccccgggttcctcccggggctacgcctgtctgagcgtcgc

SEQ ID NO: 49061 - DNA, 120 bp, Homo sapiens
  misc_feature: 789 for SV(W|O) and 5.8S
ctcgtacgactcttagcggtggatcactcggctcgtgcgtcgatgaagaacgcagctagctgcgagaattaatgtgaattgcaggacacattgatcatcgacacttcgaacgcacttgcg

SEQ ID NO: 49062 - DNA, 120 bp, Homo sapiens
  misc_feature: 942 for SV(W|O) and 28S
attcaaacgagaactttgaaggccgaagtggagaagggttccatgtgaacagcagttgaacatgggtcagtcggtcctgagagatgggcgagcgccgttccgaagggacgggcgatggcc

SEQ ID NO: 49063 - DNA, 120 bp, Homo sapiens
  misc_feature: 937 for SV(W|O) and 28S
aatattcaaacgagaactttgaaggccgaagtggagaagggttccatgtgaacagcagttgaacatgggtcagtcggtcctgagagatgggcgagcgccgttccgaagggacgggcgatg

SEQ ID NO: 49064 - DNA, 120 bp, Homo sapiens
  misc_feature: 936 for SV(W|O) and 28S
gccgagggcaacggaggccatcgcccgtcccttcggaacggcgctcgcccatctctcaggaccgactgacccatgttcaactgctgttcacatggaacccttctccacttcggccttcaa

SEQ ID NO: 49065 - DNA, 120 bp, Homo sapiens
  misc_feature: 935 for SV(W|O) and 28S
ttcaaacgagaactttgaaggccgaagtggagaagggttccatgtgaacagcagttgaacatgggtcagtcggtcctgagagatgggcgagcgccgttccgaagggacgggcgatggcct

SEQ ID NO: 49066 - DNA, 120 bp, Homo sapiens
  misc_feature: 935 for SV(W|O) and 28S
tattcaaacgagaactttgaaggccgaagtggagaagggttccatgtgaacagcagttgaacatgggtcagtcggtcctgagagatgggcgagcgccgttccgaagggacgggcgatggc

SEQ ID NO: 49067 - DNA, 120 bp, Homo sapiens
  misc_feature: 934 for SV(W|O) and 28S
atattcaaacgagaactttgaaggccgaagtggagaagggttccatgtgaacagcagttgaacatgggtcagtcggtcctgagagatgggcgagcgccgttccgaagggacgggcgatgg

SEQ ID NO: 49068 - DNA, 120 bp, Homo sapiens
  misc_feature: 930 for SV(W|O) and 28S
ctaccttaagagagtcatagttactcccgccgtttacccgcgcttcattgaatttcttcactttgacattcagagcactgggcagaaatcacatcgcgtcaacacccgccgcgggccttc

SEQ ID NO: 49069 - DNA, 120 bp, Homo sapiens
  misc_feature: 929 for SV(W|O) and 28S
ggccgagggcaacggaggccatcgcccgtcccttcggaacggcgctcgcccatctctcaggaccgactgacccatgttcaactgctgttcacatggaacccttctccacttcggccttca

SEQ ID NO: 49070 - DNA, 120 bp, Homo sapiens
  misc_feature: 928 for SV(W|O) and 28S
aaatattcaaacgagaactttgaaggccgaagtggagaagggttccatgtgaacagcagttgaacatgggtcagtcggtcctgagagatgggcgagcgccgttccgaagggacgggcgat

SEQ ID NO: 49071 - DNA, 120 bp, Homo sapiens
  misc_feature: 927 for SV(W|O) and 28S
tggctaccttaagagagtcatagttactcccgccgtttacccgcgcttcattgaatttcttcactttgacattcagagcactgggcagaaatcacatcgcgtcaacacccgccgcgggcc

SEQ ID NO: 49072 - DNA, 120 bp, Homo sapiens
  misc_feature: 924 for SV(W|O) and 28S
ccgagggcaacggaggccatcgcccgtcccttcggaacggcgctcgcccatctctcaggaccgactgacccatgttcaactgctgttcacatggaacccttctccacttcggccttcaaa

SEQ ID NO: 49073 - DNA, 120 bp, Homo sapiens
  misc_feature: 922 for SV(W|O) and 28S
ggctaccttaagagagtcatagttactcccgccgtttacccgcgcttcattgaatttcttcactttgacattcagagcactgggcagaaatcacatcgcgtcaacacccgccgcgggcct

SEQ ID NO: 49074 - DNA, 120 bp, Homo sapiens
  misc_feature: 921 for SV(W|O) and 28S
tcaaacgagaactttgaaggccgaagtggagaagggttccatgtgaacagcagttgaacatgggtcagtcggtcctgagagatgggcgagcgccgttccgaagggacgggcgatggcctc

SEQ ID NO: 49075 - DNA, 120 bp, Homo sapiens
  misc_feature: 920 for SV(W|O) and 28S
ttggctaccttaagagagtcatagttactcccgccgtttacccgcgcttcattgaatttcttcactttgacattcagagcactgggcagaaatcacatcgcgtcaacacccgccgcgggc

SEQ ID NO: 49076 - DNA, 120 bp, Homo sapiens
  misc_feature: 920 for SV(W|O) and 28S
cggccgagggcaacggaggccatcgcccgtcccttcggaacggcgctcgcccatctctcaggaccgactgacccatgttcaactgctgttcacatggaacccttctccacttcggccttc

SEQ ID NO: 49077 - DNA, 120 bp, Homo sapiens
  misc_feature: 916 for SV(W|O) and 28S
tcggccgagggcaacggaggccatcgcccgtcccttcggaacggcgctcgcccatctctcaggaccgactgacccatgttcaactgctgttcacatggaacccttctccacttcggcctt

SEQ ID NO: 49078 - DNA, 120 bp, Homo sapiens
  misc_feature: 915 for SV(W|O) and 28S
gctaccttaagagagtcatagttactcccgccgtttacccgcgcttcattgaatttcttcactttgacattcagagcactgggcagaaatcacatcgcgtcaacacccgccgcgggcctt

SEQ ID NO: 49079 - DNA, 120 bp, Homo sapiens
  misc_feature: 915 for SV(W|O) and 28S
accttaagagagtcatagttactcccgccgtttacccgcgcttcattgaatttcttcactttgacattcagagcactgggcagaaatcacatcgcgtcaacacccgccgcgggccttcgc

SEQ ID NO: 49080 - DNA, 120 bp, Homo sapiens
  misc_feature: 913 for SV(W|O) and 28S
taccttaagagagtcatagttactcccgccgtttacccgcgcttcattgaatttcttcactttgacattcagagcactgggcagaaatcacatcgcgtcaacacccgccgcgggccttcg

SEQ ID NO: 49081 - DNA, 120 bp, Homo sapiens
  misc_feature: 913 for SV(W|O) and 28S
cgagggcaacggaggccatcgcccgtcccttcggaacggcgctcgcccatctctcaggaccgactgacccatgttcaactgctgttcacatggaacccttctccacttcggccttcaaag

SEQ ID NO: 49082 - DNA, 120 bp, Homo sapiens
  misc_feature: 913 for SV(W|O) and 28S
atcggccgagggcaacggaggccatcgcccgtcccttcggaacggcgctcgcccatctctcaggaccgactgacccatgttcaactgctgttcacatggaacccttctccacttcggcct

SEQ ID NO: 49083 - DNA, 120 bp, Homo sapiens
  misc_feature: 912 for SV(W|O) and 28S
tttggctaccttaagagagtcatagttactcccgccgtttacccgcgcttcattgaatttcttcactttgacattcagagcactgggcagaaatcacatcgcgtcaacacccgccgcggg

SEQ ID NO: 49084 - DNA, 120 bp, Homo sapiens
  misc_feature: 911 for SV(W|O) and 28S
gcaacggaggccatcgcccgtcccttcggaacggcgctcgcccatctctcaggaccgactgacccatgttcaactgctgttcacatggaacccttctccacttcggccttcaaagttctc

SEQ ID NO: 49085 - DNA, 120 bp, Homo sapiens
  misc_feature: 910 for SV(W|O) and 28S
caaatattcaaacgagaactttgaaggccgaagtggagaagggttccatgtgaacagcagttgaacatgggtcagtcggtcctgagagatgggcgagcgccgttccgaagggacgggcga

SEQ ID NO: 49086 - DNA, 120 bp, Homo sapiens
  misc_feature: 910 for SV(W|O) and 28S
gagggcaacggaggccatcgcccgtcccttcggaacggcgctcgcccatctctcaggaccgactgacccatgttcaactgctgttcacatggaacccttctccacttcggccttcaaagt

SEQ ID NO: 49087 - DNA, 120 bp, Homo sapiens
  misc_feature: 908 for SV(W|O) and 28S
caaacgagaactttgaaggccgaagtggagaagggttccatgtgaacagcagttgaacatgggtcagtcggtcctgagagatgggcgagcgccgttccgaagggacgggcgatggcctcc

SEQ ID NO: 49088 - DNA, 120 bp, Homo sapiens
  misc_feature: 905 for SV(W|O) and 28S
ctttcgatcggccgagggcaacggaggccatcgcccgtcccttcggaacggcgctcgcccatctctcaggaccgactgacccatgttcaactgctgttcacatggaacccttctccactt

SEQ ID NO: 49089 - DNA, 120 bp, Homo sapiens
  misc_feature: 905 for SV(W|O) and 28S
aaacgagaactttgaaggccgaagtggagaagggttccatgtgaacagcagttgaacatgggtcagtcggtcctgagagatgggcgagcgccgttccgaagggacgggcgatggcctccg

SEQ ID NO: 49090 - DNA, 120 bp, Homo sapiens
  misc_feature: 904 for SV(W|O) and 28S
ggcaacggaggccatcgcccgtcccttcggaacggcgctcgcccatctctcaggaccgactgacccatgttcaactgctgttcacatggaacccttctccacttcggccttcaaagttct

SEQ ID NO: 49091 - DNA, 120 bp, Homo sapiens
  misc_feature: 904 for SV(W|O) and 28S
atttggctaccttaagagagtcatagttactcccgccgtttacccgcgcttcattgaatttcttcactttgacattcagagcactgggcagaaatcacatcgcgtcaacacccgccgcgg

SEQ ID NO: 49092 - DNA, 120 bp, Homo sapiens
  misc_feature: 902 for SV(W|O) and 28S
aacgagaactttgaaggccgaagtggagaagggttccatgtgaacagcagttgaacatgggtcagtcggtcctgagagatgggcgagcgccgttccgaagggacgggcgatggcctccgt

SEQ ID NO: 49093 - DNA, 120 bp, Homo sapiens
  misc_feature: 900 for SV(W|O) and 28S
tttcgatcggccgagggcaacggaggccatcgcccgtcccttcggaacggcgctcgcccatctctcaggaccgactgacccatgttcaactgctgttcacatggaacccttctccacttc

SEQ ID NO: 49094 - DNA, 120 bp, Homo sapiens
  misc_feature: 900 for SV(W|O) and 28S
gatcggccgagggcaacggaggccatcgcccgtcccttcggaacggcgctcgcccatctctcaggaccgactgacccatgttcaactgctgttcacatggaacccttctccacttcggcc

SEQ ID NO: 49095 - DNA, 120 bp, Homo sapiens
  misc_feature: 900 for SV(W|O) and 28S
ccttaagagagtcatagttactcccgccgtttacccgcgcttcattgaatttcttcactttgacattcagagcactgggcagaaatcacatcgcgtcaacacccgccgcgggccttcgcg

SEQ ID NO: 49096 - DNA, 120 bp, Homo sapiens
  misc_feature: 899 for SV(W|O) and 28S
ttcgatcggccgagggcaacggaggccatcgcccgtcccttcggaacggcgctcgcccatctctcaggaccgactgacccatgttcaactgctgttcacatggaacccttctccacttcg

SEQ ID NO: 49097 - DNA, 120 bp, Homo sapiens
  misc_feature: 898 for SV(W|O) and 28S
caacggaggccatcgcccgtcccttcggaacggcgctcgcccatctctcaggaccgactgacccatgttcaactgctgttcacatggaacccttctccacttcggccttcaaagttctcg

SEQ ID NO: 49098 - DNA, 120 bp, Homo sapiens
  misc_feature: 895 for SV(W|O) and 28S
agcaaatattcaaacgagaactttgaaggccgaagtggagaagggttccatgtgaacagcagttgaacatgggtcagtcggtcctgagagatgggcgagcgccgttccgaagggacgggc

SEQ ID NO: 49099 - DNA, 120 bp, Homo sapiens
  misc_feature: 894 for SV(W|O) and 28S
agtagcaaatattcaaacgagaactttgaaggccgaagtggagaagggttccatgtgaacagcagttgaacatgggtcagtcggtcctgagagatgggcgagcgccgttccgaagggacg

SEQ ID NO: 49100 - DNA, 120 bp, Homo sapiens
  misc_feature: 891 for SV(W|O) and 28S
tcgatcggccgagggcaacggaggccatcgcccgtcccttcggaacggcgctcgcccatctctcaggaccgactgacccatgttcaactgctgttcacatggaacccttctccacttcgg

SEQ ID NO: 49101 - DNA, 120 bp, Homo sapiens
  misc_feature: 891 for SV(W|O) and 28S
cgatcggccgagggcaacggaggccatcgcccgtcccttcggaacggcgctcgcccatctctcaggaccgactgacccatgttcaactgctgttcacatggaacccttctccacttcggc

SEQ ID NO: 49102 - DNA, 120 bp, Homo sapiens
  misc_feature: 891 for SV(W|O) and 28S
agggcaacggaggccatcgcccgtcccttcggaacggcgctcgcccatctctcaggaccgactgacccatgttcaactgctgttcacatggaacccttctccacttcggccttcaaagtt

SEQ ID NO: 49103 - DNA, 120 bp, Homo sapiens
  misc_feature: 890 for SV(W|O) and 28S
tagcaaatattcaaacgagaactttgaaggccgaagtggagaagggttccatgtgaacagcagttgaacatgggtcagtcggtcctgagagatgggcgagcgccgttccgaagggacggg

SEQ ID NO: 49104 - DNA, 120 bp, Homo sapiens
  misc_feature: 890 for SV(W|O) and 28S
gcaaatattcaaacgagaactttgaaggccgaagtggagaagggttccatgtgaacagcagttgaacatgggtcagtcggtcctgagagatgggcgagcgccgttccgaagggacgggcg

SEQ ID NO: 49105 - DNA, 120 bp, Homo sapiens
  misc_feature: 889 for SV(W|O) and 28S
gggcaacggaggccatcgcccgtcccttcggaacggcgctcgcccatctctcaggaccgactgacccatgttcaactgctgttcacatggaacccttctccacttcggccttcaaagttc

SEQ ID NO: 49106 - DNA, 120 bp, Homo sapiens
  misc_feature: 889 for SV(W|O) and 28S
catttggctaccttaagagagtcatagttactcccgccgtttacccgcgcttcattgaatttcttcactttgacattcagagcactgggcagaaatcacatcgcgtcaacacccgccgcg

SEQ ID NO: 49107 - DNA, 120 bp, Homo sapiens
  misc_feature: 889 for SV(W|O) and 28S
aacggaggccatcgcccgtcccttcggaacggcgctcgcccatctctcaggaccgactgacccatgttcaactgctgttcacatggaacccttctccacttcggccttcaaagttctcgt

SEQ ID NO: 49108 - DNA, 120 bp, Homo sapiens
  misc_feature: 888 for SV(W|O) and 28S
tagtagcaaatattcaaacgagaactttgaaggccgaagtggagaagggttccatgtgaacagcagttgaacatgggtcagtcggtcctgagagatgggcgagcgccgttccgaagggac

SEQ ID NO: 49109 - DNA, 120 bp, Homo sapiens
  misc_feature: 886 for SV(W|O) and 28S
tgacgaggcatttggctaccttaagagagtcatagttactcccgccgtttacccgcgcttcattgaatttcttcactttgacattcagagcactgggcagaaatcacatcgcgtcaacac

SEQ ID NO: 49110 - DNA, 120 bp, Homo sapiens
  misc_feature: 886 for SV(W|O) and 28S
cttaagagagtcatagttactcccgccgtttacccgcgcttcattgaatttcttcactttgacattcagagcactgggcagaaatcacatcgcgtcaacacccgccgcgggccttcgcga

SEQ ID NO: 49111 - DNA, 120 bp, Homo sapiens
  misc_feature: 886 for SV(W|O) and 28S
gtagcaaatattcaaacgagaactttgaaggccgaagtggagaagggttccatgtgaacagcagttgaacatgggtcagtcggtcctgagagatgggcgagcgccgttccgaagggacgg

SEQ ID NO: 49112 - DNA, 120 bp, Homo sapiens
  misc_feature: 885 for SV(W|O) and 28S
atgacgaggcatttggctaccttaagagagtcatagttactcccgccgtttacccgcgcttcattgaatttcttcactttgacattcagagcactgggcagaaatcacatcgcgtcaaca

SEQ ID NO: 49113 - DNA, 120 bp, Homo sapiens
  misc_feature: 885 for SV(W|O) and 28S
gcatttggctaccttaagagagtcatagttactcccgccgtttacccgcgcttcattgaatttcttcactttgacattcagagcactgggcagaaatcacatcgcgtcaacacccgccgc

SEQ ID NO: 49114 - DNA, 120 bp, Homo sapiens
  misc_feature: 884 for SV(W|O) and 28S
gaggcatttggctaccttaagagagtcatagttactcccgccgtttacccgcgcttcattgaatttcttcactttgacattcagagcactgggcagaaatcacatcgcgtcaacacccgc

SEQ ID NO: 49115 - DNA, 120 bp, Homo sapiens
  misc_feature: 883 for SV(W|O) and 28S
ggcatttggctaccttaagagagtcatagttactcccgccgtttacccgcgcttcattgaatttcttcactttgacattcagagcactgggcagaaatcacatcgcgtcaacacccgccg

SEQ ID NO: 49116 - DNA, 120 bp, Homo sapiens
  misc_feature: 881 for SV(W|O) and 28S
aggcatttggctaccttaagagagtcatagttactcccgccgtttacccgcgcttcattgaatttcttcactttgacattcagagcactgggcagaaatcacatcgcgtcaacacccgcc

SEQ ID NO: 49117 - DNA, 120 bp, Homo sapiens
  misc_feature: 880 for SV(W|O) and 28S
agatgacgaggcatttggctaccttaagagagtcatagttactcccgccgtttacccgcgcttcattgaatttcttcactttgacattcagagcactgggcagaaatcacatcgcgtcaa

SEQ ID NO: 49118 - DNA, 120 bp, Homo sapiens
  misc_feature: 880 for SV(W|O) and 28S
tggtagtagcaaatattcaaacgagaactttgaaggccgaagtggagaagggttccatgtgaacagcagttgaacatgggtcagtcggtcctgagagatgggcgagcgccgttccgaagg

SEQ ID NO: 49119 - DNA, 120 bp, Homo sapiens
  misc_feature: 880 for SV(W|O) and 28S
gagcaggattaccatggcaacaacacatcatcagtagggtaaaactaacctgtctcacgacggtctaaacccagctcacgttccctattagtgggtgaacaatccaacgcttggtgaatt

SEQ ID NO: 49120 - DNA, 120 bp, Homo sapiens
  misc_feature: 879 for SV(W|O) and 28S
gatgacgaggcatttggctaccttaagagagtcatagttactcccgccgtttacccgcgcttcattgaatttcttcactttgacattcagagcactgggcagaaatcacatcgcgtcaac

SEQ ID NO: 49121 - DNA, 120 bp, Homo sapiens
  misc_feature: 877 for SV(W|O) and 28S
ttaagagagtcatagttactcccgccgtttacccgcgcttcattgaatttcttcactttgacattcagagcactgggcagaaatcacatcgcgtcaacacccgccgcgggccttcgcgat

SEQ ID NO: 49122 - DNA, 120 bp, Homo sapiens
  misc_feature: 877 for SV(W|O) and 28S
gacgaggcatttggctaccttaagagagtcatagttactcccgccgtttacccgcgcttcattgaatttcttcactttgacattcagagcactgggcagaaatcacatcgcgtcaacacc

SEQ ID NO: 49123 - DNA, 120 bp, Homo sapiens
  misc_feature: 877 for SV(W|O) and 28S
agcaggattaccatggcaacaacacatcatcagtagggtaaaactaacctgtctcacgacggtctaaacccagctcacgttccctattagtgggtgaacaatccaacgcttggtgaattc

SEQ ID NO: 49124 - DNA, 120 bp, Homo sapiens
  misc_feature: 875 for SV(W|O) and 28S
ttaccatggcaacaacacatcatcagtagggtaaaactaacctgtctcacgacggtctaaacccagctcacgttccctattagtgggtgaacaatccaacgcttggtgaattctgcttca

SEQ ID NO: 49125 - DNA, 120 bp, Homo sapiens
  misc_feature: 875 for SV(W|O) and 28S
gtagtagcaaatattcaaacgagaactttgaaggccgaagtggagaagggttccatgtgaacagcagttgaacatgggtcagtcggtcctgagagatgggcgagcgccgttccgaaggga

SEQ ID NO: 49126 - DNA, 120 bp, Homo sapiens
  misc_feature: 874 for SV(W|O) and 28S
cgaggcatttggctaccttaagagagtcatagttactcccgccgtttacccgcgcttcattgaatttcttcactttgacattcagagcactgggcagaaatcacatcgcgtcaacacccg

SEQ ID NO: 49127 - DNA, 120 bp, Homo sapiens
  misc_feature: 872 for SV(W|O) and 28S
acgaggcatttggctaccttaagagagtcatagttactcccgccgtttacccgcgcttcattgaatttcttcactttgacattcagagcactgggcagaaatcacatcgcgtcaacaccc

SEQ ID NO: 49128 - DNA, 120 bp, Homo sapiens
  misc_feature: 871 for SV(W|O) and 28S
tagatgacgaggcatttggctaccttaagagagtcatagttactcccgccgtttacccgcgcttcattgaatttcttcactttgacattcagagcactgggcagaaatcacatcgcgtca

SEQ ID NO: 49129 - DNA, 120 bp, Homo sapiens
  misc_feature: 871 for SV(W|O) and 28S
taagagagtcatagttactcccgccgtttacccgcgcttcattgaatttcttcactttgacattcagagcactgggcagaaatcacatcgcgtcaacacccgccgcgggccttcgcgatg

SEQ ID NO: 49130 - DNA, 120 bp, Homo sapiens
  misc_feature: 871 for SV(W|O) and 28S
ggtagtagcaaatattcaaacgagaactttgaaggccgaagtggagaagggttccatgtgaacagcagttgaacatgggtcagtcggtcctgagagatgggcgagcgccgttccgaaggg

SEQ ID NO: 49131 - DNA, 120 bp, Homo sapiens
  misc_feature: 870 for SV(W|O) and 28S
gtggtagtagcaaatattcaaacgagaactttgaaggccgaagtggagaagggttccatgtgaacagcagttgaacatgggtcagtcggtcctgagagatgggcgagcgccgttccgaag

SEQ ID NO: 49132 - DNA, 120 bp, Homo sapiens
  misc_feature: 867 for SV(W|O) and 28S
attaccatggcaacaacacatcatcagtagggtaaaactaacctgtctcacgacggtctaaacccagctcacgttccctattagtgggtgaacaatccaacgcttggtgaattctgcttc

SEQ ID NO: 49133 - DNA, 120 bp, Homo sapiens
  misc_feature: 865 for SV(W|O) and 28S
tgagcaggattaccatggcaacaacacatcatcagtagggtaaaactaacctgtctcacgacggtctaaacccagctcacgttccctattagtgggtgaacaatccaacgcttggtgaat

SEQ ID NO: 49134 - DNA, 120 bp, Homo sapiens
  misc_feature: 865 for SV(W|O) and 28S
taccatggcaacaacacatcatcagtagggtaaaactaacctgtctcacgacggtctaaacccagctcacgttccctattagtgggtgaacaatccaacgcttggtgaattctgcttcac

SEQ ID NO: 49135 - DNA, 120 bp, Homo sapiens
  misc_feature: 865 for SV(W|O) and 28S
taattagatgacgaggcatttggctaccttaagagagtcatagttactcccgccgtttacccgcgcttcattgaatttcttcactttgacattcagagcactgggcagaaatcacatcgc

SEQ ID NO: 49136 - DNA, 120 bp, Homo sapiens
  misc_feature: 864 for SV(W|O) and 28S
gattaccatggcaacaacacatcatcagtagggtaaaactaacctgtctcacgacggtctaaacccagctcacgttccctattagtgggtgaacaatccaacgcttggtgaattctgctt

SEQ ID NO: 49137 - DNA, 120 bp, Homo sapiens
  misc_feature: 864 for SV(W|O) and 28S
actaattagatgacgaggcatttggctaccttaagagagtcatagttactcccgccgtttacccgcgcttcattgaatttcttcactttgacattcagagcactgggcagaaatcacatc

SEQ ID NO: 49138 - DNA, 120 bp, Homo sapiens
  misc_feature: 862 for SV(W|O) and 28S
ttagatgacgaggcatttggctaccttaagagagtcatagttactcccgccgtttacccgcgcttcattgaatttcttcactttgacattcagagcactgggcagaaatcacatcgcgtc

SEQ ID NO: 49139 - DNA, 120 bp, Homo sapiens
  misc_feature: 862 for SV(W|O) and 28S
accatggcaacaacacatcatcagtagggtaaaactaacctgtctcacgacggtctaaacccagctcacgttccctattagtgggtgaacaatccaacgcttggtgaattctgcttcaca

SEQ ID NO: 49140 - DNA, 120 bp, Homo sapiens
  misc_feature: 858 for SV(W|O) and 28S
gcaggattaccatggcaacaacacatcatcagtagggtaaaactaacctgtctcacgacggtctaaacccagctcacgttccctattagtgggtgaacaatccaacgcttggtgaattct

SEQ ID NO: 49141 - DNA, 120 bp, Homo sapiens
  misc_feature: 858 for SV(W|O) and 28S
aattagatgacgaggcatttggctaccttaagagagtcatagttactcccgccgtttacccgcgcttcattgaatttcttcactttgacattcagagcactgggcagaaatcacatcgcg

SEQ ID NO: 49142 - DNA, 120 bp, Homo sapiens
  misc_feature: 857 for SV(W|O) and 28S
ggattaccatggcaacaacacatcatcagtagggtaaaactaacctgtctcacgacggtctaaacccagctcacgttccctattagtgggtgaacaatccaacgcttggtgaattctgct

SEQ ID NO: 49143 - DNA, 120 bp, Homo sapiens
  misc_feature: 856 for SV(W|O) and 28S
aggattaccatggcaacaacacatcatcagtagggtaaaactaacctgtctcacgacggtctaaacccagctcacgttccctattagtgggtgaacaatccaacgcttggtgaattctgc

SEQ ID NO: 49144 - DNA, 120 bp, Homo sapiens
  misc_feature: 856 for SV(W|O) and 28S
caggattaccatggcaacaacacatcatcagtagggtaaaactaacctgtctcacgacggtctaaacccagctcacgttccctattagtgggtgaacaatccaacgcttggtgaattctg

SEQ ID NO: 49145 - DNA, 120 bp, Homo sapiens
  misc_feature: 855 for SV(W|O) and 28S
attagatgacgaggcatttggctaccttaagagagtcatagttactcccgccgtttacccgcgcttcattgaatttcttcactttgacattcagagcactgggcagaaatcacatcgcgt

SEQ ID NO: 49146 - DNA, 120 bp, Homo sapiens
  misc_feature: 854 for SV(W|O) and 28S
ctaattagatgacgaggcatttggctaccttaagagagtcatagttactcccgccgtttacccgcgcttcattgaatttcttcactttgacattcagagcactgggcagaaatcacatcg

SEQ ID NO: 49147 - DNA, 120 bp, Homo sapiens
  misc_feature: 853 for SV(W|O) and 28S
ccatggcaacaacacatcatcagtagggtaaaactaacctgtctcacgacggtctaaacccagctcacgttccctattagtgggtgaacaatccaacgcttggtgaattctgcttcacaa

SEQ ID NO: 49148 - DNA, 120 bp, Homo sapiens
  misc_feature: 853 for SV(W|O) and 28S
ccctattagtgggtgaacaatccaacgcttggtgaattctgcttcacaatgataggaagagccgacatcgaaggatcaaaaagcgacgtcgctatgaacgcttggccgccacaagccagt

SEQ ID NO: 49149 - DNA, 120 bp, Homo sapiens
  misc_feature: 853 for SV(W|O) and 28S
cactaattagatgacgaggcatttggctaccttaagagagtcatagttactcccgccgtttacccgcgcttcattgaatttcttcactttgacattcagagcactgggcagaaatcacat

SEQ ID NO: 49150 - DNA, 120 bp, Homo sapiens
  misc_feature: 852 for SV(W|O) and 28S
gtcataatcccacagatggtagcttcgccccattggctcctcagccaagcacatacaccaaatgtctgaacctgcggttcctctcgtactgagcaggattaccatggcaacaacacatca

SEQ ID NO: 49151 - DNA, 120 bp, Homo sapiens
  misc_feature: 851 for SV(W|O) and 28S
agagagtcatagttactcccgccgtttacccgcgcttcattgaatttcttcactttgacattcagagcactgggcagaaatcacatcgcgtcaacacccgccgcgggccttcgcgatgct

SEQ ID NO: 49152 - DNA, 120 bp, Homo sapiens
  misc_feature: 850 for SV(W|O) and 28S
cagtcataatcccacagatggtagcttcgccccattggctcctcagccaagcacatacaccaaatgtctgaacctgcggttcctctcgtactgagcaggattaccatggcaacaacacat

SEQ ID NO: 49153 - DNA, 120 bp, Homo sapiens
  misc_feature: 849 for SV(W|O) and 28S
ggtggtagtagcaaatattcaaacgagaactttgaaggccgaagtggagaagggttccatgtgaacagcagttgaacatgggtcagtcggtcctgagagatgggcgagcgccgttccgaa

SEQ ID NO: 49154 - DNA, 120 bp, Homo sapiens
  misc_feature: 849 for SV(W|O) and 28S
ctgagcaggattaccatggcaacaacacatcatcagtagggtaaaactaacctgtctcacgacggtctaaacccagctcacgttccctattagtgggtgaacaatccaacgcttggtgaa

SEQ ID NO: 49155 - DNA, 120 bp, Homo sapiens
  misc_feature: 849 for SV(W|O) and 28S
gacttagaggcgttcagtcataatcccacagatggtagcttcgccccattggctcctcagccaagcacatacaccaaatgtctgaacctgcggttcctctcgtactgagcaggattacca

SEQ ID NO: 49156 - DNA, 120 bp, Homo sapiens
  misc_feature: 849 for SV(W|O) and 28S
acttagaggcgttcagtcataatcccacagatggtagcttcgccccattggctcctcagccaagcacatacaccaaatgtctgaacctgcggttcctctcgtactgagcaggattaccat

SEQ ID NO: 49157 - DNA, 120 bp, Homo sapiens
  misc_feature: 847 for SV(W|O) and 28S
aagagagtcatagttactcccgccgtttacccgcgcttcattgaatttcttcactttgacattcagagcactgggcagaaatcacatcgcgtcaacacccgccgcgggccttcgcgatgc

SEQ ID NO: 49158 - DNA, 120 bp, Homo sapiens
  misc_feature: 845 for SV(W|O) and 28S
ttccctattagtgggtgaacaatccaacgcttggtgaattctgcttcacaatgataggaagagccgacatcgaaggatcaaaaagcgacgtcgctatgaacgcttggccgccacaagcca

SEQ ID NO: 49159 - DNA, 120 bp, Homo sapiens
  misc_feature: 845 for SV(W|O) and 28S
tccctattagtgggtgaacaatccaacgcttggtgaattctgcttcacaatgataggaagagccgacatcgaaggatcaaaaagcgacgtcgctatgaacgcttggccgccacaagccag

SEQ ID NO: 49160 - DNA, 120 bp, Homo sapiens
  misc_feature: 845 for SV(W|O) and 28S
agagtcatagttactcccgccgtttacccgcgcttcattgaatttcttcactttgacattcagagcactgggcagaaatcacatcgcgtcaacacccgccgcgggccttcgcgatgcttt

SEQ ID NO: 49161 - DNA, 120 bp, Homo sapiens
  misc_feature: 844 for SV(W|O) and 28S
gagtcatagttactcccgccgtttacccgcgcttcattgaatttcttcactttgacattcagagcactgggcagaaatcacatcgcgtcaacacccgccgcgggccttcgcgatgctttg

SEQ ID NO: 49162 - DNA, 120 bp, Homo sapiens
  misc_feature: 842 for SV(W|O) and 28S
actgagcaggattaccatggcaacaacacatcatcagtagggtaaaactaacctgtctcacgacggtctaaacccagctcacgttccctattagtgggtgaacaatccaacgcttggtga

SEQ ID NO: 49163 - DNA, 120 bp, Homo sapiens
  misc_feature: 842 for SV(W|O) and 28S
agtcataatcccacagatggtagcttcgccccattggctcctcagccaagcacatacaccaaatgtctgaacctgcggttcctctcgtactgagcaggattaccatggcaacaacacatc

SEQ ID NO: 49164 - DNA, 120 bp, Homo sapiens
  misc_feature: 840 for SV(W|O) and 28S
gagagtcatagttactcccgccgtttacccgcgcttcattgaatttcttcactttgacattcagagcactgggcagaaatcacatcgcgtcaacacccgccgcgggccttcgcgatgctt

SEQ ID NO: 49165 - DNA, 120 bp, Homo sapiens
  misc_feature: 838 for SV(W|O) and 28S
catagttactcccgccgtttacccgcgcttcattgaatttcttcactttgacattcagagcactgggcagaaatcacatcgcgtcaacacccgccgcgggccttcgcgatgctttgtttt

SEQ ID NO: 49166 - DNA, 120 bp, Homo sapiens
  misc_feature: 838 for SV(W|O) and 28S
agtcatagttactcccgccgtttacccgcgcttcattgaatttcttcactttgacattcagagcactgggcagaaatcacatcgcgtcaacacccgccgcgggccttcgcgatgctttgt

SEQ ID NO: 49167 - DNA, 120 bp, Homo sapiens
  misc_feature: 837 for SV(W|O) and 28S
aggtgtcagaaaagttaccacagggataactggcttgtggcggccaagcgttcatagcgacgtcgctttttgatccttcgatgtcggctcttcctatcattgtgaagcagaattcaccaa

SEQ ID NO: 49168 - DNA, 120 bp, Homo sapiens
  misc_feature: 837 for SV(W|O) and 28S
tcagtcataatcccacagatggtagcttcgccccattggctcctcagccaagcacatacaccaaatgtctgaacctgcggttcctctcgtactgagcaggattaccatggcaacaacaca

SEQ ID NO: 49169 - DNA, 120 bp, Homo sapiens
  misc_feature: 837 for SV(W|O) and 28S
tggtggtagtagcaaatattcaaacgagaactttgaaggccgaagtggagaagggttccatgtgaacagcagttgaacatgggtcagtcggtcctgagagatgggcgagcgccgttccga

SEQ ID NO: 49170 - DNA, 120 bp, Homo sapiens
  misc_feature: 837 for SV(W|O) and 28S
tgacttagaggcgttcagtcataatcccacagatggtagcttcgccccattggctcctcagccaagcacatacaccaaatgtctgaacctgcggttcctctcgtactgagcaggattacc

SEQ ID NO: 49171 - DNA, 120 bp, Homo sapiens
  misc_feature: 837 for SV(W|O) and 28S
cttggtggtagtagcaaatattcaaacgagaactttgaaggccgaagtggagaagggttccatgtgaacagcagttgaacatgggtcagtcggtcctgagagatgggcgagcgccgttcc

SEQ ID NO: 49172 - DNA, 120 bp, Homo sapiens
  misc_feature: 837 for SV(W|O) and 28S
catggcaacaacacatcatcagtagggtaaaactaacctgtctcacgacggtctaaacccagctcacgttccctattagtgggtgaacaatccaacgcttggtgaattctgcttcacaat

SEQ ID NO: 49173 - DNA, 120 bp, Homo sapiens
  misc_feature: 835 for SV(W|O) and 28S
tcataatcccacagatggtagcttcgccccattggctcctcagccaagcacatacaccaaatgtctgaacctgcggttcctctcgtactgagcaggattaccatggcaacaacacatcat

SEQ ID NO: 49174 - DNA, 120 bp, Homo sapiens
  misc_feature: 835 for SV(W|O) and 28S
tactgagcaggattaccatggcaacaacacatcatcagtagggtaaaactaacctgtctcacgacggtctaaacccagctcacgttccctattagtgggtgaacaatccaacgcttggtg

SEQ ID NO: 49175 - DNA, 120 bp, Homo sapiens
  misc_feature: 834 for SV(W|O) and 28S
ttggtggtagtagcaaatattcaaacgagaactttgaaggccgaagtggagaagggttccatgtgaacagcagttgaacatgggtcagtcggtcctgagagatgggcgagcgccgttccg

SEQ ID NO: 49176 - DNA, 120 bp, Homo sapiens
  misc_feature: 834 for SV(W|O) and 28S
cttagaggcgttcagtcataatcccacagatggtagcttcgccccattggctcctcagccaagcacatacaccaaatgtctgaacctgcggttcctctcgtactgagcaggattaccatg

SEQ ID NO: 49177 - DNA, 120 bp, Homo sapiens
  misc_feature: 833 for SV(W|O) and 28S
tgtgatttctgcccagtgctctgaatgtcaaagtgaagaaattcaatgaagcgcgggtaaacggcgggagtaactatgactctcttaaggtagccaaatgcctcgtcatctaattagtga

SEQ ID NO: 49178 - DNA, 120 bp, Homo sapiens
  misc_feature: 833 for SV(W|O) and 28S
cctattagtgggtgaacaatccaacgcttggtgaattctgcttcacaatgataggaagagccgacatcgaaggatcaaaaagcgacgtcgctatgaacgcttggccgccacaagccagtt

SEQ ID NO: 49179 - DNA, 120 bp, Homo sapiens
  misc_feature: 832 for SV(W|O) and 28S
gccggaaccgcgacgctttccaaggcacgggcccctctctcggggcgaacccattccagggcgccctgcccttcacaaagaaaagagaactctccccggggctcccgccggcttctccgg

SEQ ID NO: 49180 - DNA, 120 bp, Homo sapiens
  misc_feature: 832 for SV(W|O) and 28S
atggcaacaacacatcatcagtagggtaaaactaacctgtctcacgacggtctaaacccagctcacgttccctattagtgggtgaacaatccaacgcttggtgaattctgcttcacaatg

SEQ ID NO: 49181 - DNA, 120 bp, Homo sapiens
  misc_feature: 830 for SV(W|O) and 28S
gattctgacttagaggcgttcagtcataatcccacagatggtagcttcgccccattggctcctcagccaagcacatacaccaaatgtctgaacctgcggttcctctcgtactgagcagga

SEQ ID NO: 49182 - DNA, 120 bp, Homo sapiens
  misc_feature: 830 for SV(W|O) and 28S
tcatagttactcccgccgtttacccgcgcttcattgaatttcttcactttgacattcagagcactgggcagaaatcacatcgcgtcaacacccgccgcgggccttcgcgatgctttgttt

SEQ ID NO: 49183 - DNA, 120 bp, Homo sapiens
  misc_feature: 830 for SV(W|O) and 28S
atagttactcccgccgtttacccgcgcttcattgaatttcttcactttgacattcagagcactgggcagaaatcacatcgcgtcaacacccgccgcgggccttcgcgatgctttgtttta

SEQ ID NO: 49184 - DNA, 120 bp, Homo sapiens
  misc_feature: 830 for SV(W|O) and 28S
attagtgggtgaacaatccaacgcttggtgaattctgcttcacaatgataggaagagccgacatcgaaggatcaaaaagcgacgtcgctatgaacgcttggccgccacaagccagttatc

SEQ ID NO: 49185 - DNA, 120 bp, Homo sapiens
  misc_feature: 829 for SV(W|O) and 28S
cgcttggtgaattctgcttcacaatgataggaagagccgacatcgaaggatcaaaaagcgacgtcgctatgaacgcttggccgccacaagccagttatccctgtggtaacttttctgaca

SEQ ID NO: 49186 - DNA, 120 bp, Homo sapiens
  misc_feature: 828 for SV(W|O) and 28S
tattagtgggtgaacaatccaacgcttggtgaattctgcttcacaatgataggaagagccgacatcgaaggatcaaaaagcgacgtcgctatgaacgcttggccgccacaagccagttat

SEQ ID NO: 49187 - DNA, 120 bp, Homo sapiens
  misc_feature: 828 for SV(W|O) and 28S
gtgatttctgcccagtgctctgaatgtcaaagtgaagaaattcaatgaagcgcgggtaaacggcgggagtaactatgactctcttaaggtagccaaatgcctcgtcatctaattagtgac

SEQ ID NO: 49188 - DNA, 120 bp, Homo sapiens
  misc_feature: 828 for SV(W|O) and 28S
gtcatagttactcccgccgtttacccgcgcttcattgaatttcttcactttgacattcagagcactgggcagaaatcacatcgcgtcaacacccgccgcgggccttcgcgatgctttgtt

SEQ ID NO: 49189 - DNA, 120 bp, Homo sapiens
  misc_feature: 828 for SV(W|O) and 28S
ggccgccacaagccagttatccctgtggtaacttttctgacacctcctgcttaaaacccaaaaggtcagaaggatcgtgaggccccgctttcacggtctgtattcgtactgaaaatcaag

SEQ ID NO: 49190 - DNA, 120 bp, Homo sapiens
  misc_feature: 828 for SV(W|O) and 28S
aacacatcatcagtagggtaaaactaacctgtctcacgacggtctaaacccagctcacgttccctattagtgggtgaacaatccaacgcttggtgaattctgcttcacaatgataggaag

SEQ ID NO: 49191 - DNA, 120 bp, Homo sapiens
  misc_feature: 827 for SV(W|O) and 28S
ctattagtgggtgaacaatccaacgcttggtgaattctgcttcacaatgataggaagagccgacatcgaaggatcaaaaagcgacgtcgctatgaacgcttggccgccacaagccagtta

SEQ ID NO: 49192 - DNA, 120 bp, Homo sapiens
  misc_feature: 827 for SV(W|O) and 28S
ccggaaccgcgacgctttccaaggcacgggcccctctctcggggcgaacccattccagggcgccctgcccttcacaaagaaaagagaactctccccggggctcccgccggcttctccggg

SEQ ID NO: 49193 - DNA, 120 bp, Homo sapiens
  misc_feature: 827 for SV(W|O) and 28S
ccgccacaagccagttatccctgtggtaacttttctgacacctcctgcttaaaacccaaaaggtcagaaggatcgtgaggccccgctttcacggtctgtattcgtactgaaaatcaagat

SEQ ID NO: 49194 - DNA, 120 bp, Homo sapiens
  misc_feature: 827 for SV(W|O) and 28S
attctgacttagaggcgttcagtcataatcccacagatggtagcttcgccccattggctcctcagccaagcacatacaccaaatgtctgaacctgcggttcctctcgtactgagcaggat

SEQ ID NO: 49195 - DNA, 120 bp, Homo sapiens
  misc_feature: 826 for SV(W|O) and 28S
ttagaggcgttcagtcataatcccacagatggtagcttcgccccattggctcctcagccaagcacatacaccaaatgtctgaacctgcggttcctctcgtactgagcaggattaccatgg

SEQ ID NO: 49196 - DNA, 120 bp, Homo sapiens
  misc_feature: 826 for SV(W|O) and 28S
ataatcccacagatggtagcttcgccccattggctcctcagccaagcacatacaccaaatgtctgaacctgcggttcctctcgtactgagcaggattaccatggcaacaacacatcatca

SEQ ID NO: 49197 - DNA, 120 bp, Homo sapiens
  misc_feature: 826 for SV(W|O) and 28S
gccccattggctcctcagccaagcacatacaccaaatgtctgaacctgcggttcctctcgtactgagcaggattaccatggcaacaacacatcatcagtagggtaaaactaacctgtctc

SEQ ID NO: 49198 - DNA, 120 bp, Homo sapiens
  misc_feature: 825 for SV(W|O) and 28S
cttggtgaattctgcttcacaatgataggaagagccgacatcgaaggatcaaaaagcgacgtcgctatgaacgcttggccgccacaagccagttatccctgtggtaacttttctgacacc

SEQ ID NO: 49199 - DNA, 120 bp, Homo sapiens
  misc_feature: 824 for SV(W|O) and 28S
gaggcgttcagtcataatcccacagatggtagcttcgccccattggctcctcagccaagcacatacaccaaatgtctgaacctgcggttcctctcgtactgagcaggattaccatggcaa

SEQ ID NO: 49200 - DNA, 120 bp, Homo sapiens
  misc_feature: 824 for SV(W|O) and 28S
ttcagtcataatcccacagatggtagcttcgccccattggctcctcagccaagcacatacaccaaatgtctgaacctgcggttcctctcgtactgagcaggattaccatggcaacaacac

SEQ ID NO: 49201 - DNA, 120 bp, Homo sapiens
  misc_feature: 824 for SV(W|O) and 28S
gaggtgtcagaaaagttaccacagggataactggcttgtggcggccaagcgttcatagcgacgtcgctttttgatccttcgatgtcggctcttcctatcattgtgaagcagaattcacca

SEQ ID NO: 49202 - DNA, 120 bp, Homo sapiens
  misc_feature: 824 for SV(W|O) and 28S
tgatttctgcccagtgctctgaatgtcaaagtgaagaaattcaatgaagcgcgggtaaacggcgggagtaactatgactctcttaaggtagccaaatgcctcgtcatctaattagtgacg

SEQ ID NO: 49203 - DNA, 120 bp, Homo sapiens
  misc_feature: 824 for SV(W|O) and 28S
ggaaccgcgacgctttccaaggcacgggcccctctctcggggcgaacccattccagggcgccctgcccttcacaaagaaaagagaactctccccggggctcccgccggcttctccgggat

SEQ ID NO: 49204 - DNA, 120 bp, Homo sapiens
  misc_feature: 823 for SV(W|O) and 28S
ttctgacttagaggcgttcagtcataatcccacagatggtagcttcgccccattggctcctcagccaagcacatacaccaaatgtctgaacctgcggttcctctcgtactgagcaggatt

SEQ ID NO: 49205 - DNA, 120 bp, Homo sapiens
  misc_feature: 822 for SV(W|O) and 28S
cggaaccgcgacgctttccaaggcacgggcccctctctcggggcgaacccattccagggcgccctgcccttcacaaagaaaagagaactctccccggggctcccgccggcttctccggga

SEQ ID NO: 49206 - DNA, 120 bp, Homo sapiens
  misc_feature: 822 for SV(W|O) and 28S
tagaggcgttcagtcataatcccacagatggtagcttcgccccattggctcctcagccaagcacatacaccaaatgtctgaacctgcggttcctctcgtactgagcaggattaccatggc

SEQ ID NO: 49207 - DNA, 120 bp, Homo sapiens
  misc_feature: 822 for SV(W|O) and 28S
gcttggtgaattctgcttcacaatgataggaagagccgacatcgaaggatcaaaaagcgacgtcgctatgaacgcttggccgccacaagccagttatccctgtggtaacttttctgacac

SEQ ID NO: 49208 - DNA, 120 bp, Homo sapiens
  misc_feature: 822 for SV(W|O) and 28S
cataatcccacagatggtagcttcgccccattggctcctcagccaagcacatacaccaaatgtctgaacctgcggttcctctcgtactgagcaggattaccatggcaacaacacatcatc

SEQ ID NO: 49209 - DNA, 120 bp, Homo sapiens
  misc_feature: 821 for SV(W|O) and 28S
gttccctattagtgggtgaacaatccaacgcttggtgaattctgcttcacaatgataggaagagccgacatcgaaggatcaaaaagcgacgtcgctatgaacgcttggccgccacaagcc

SEQ ID NO: 49210 - DNA, 120 bp, Homo sapiens
  misc_feature: 821 for SV(W|O) and 28S
gtcgctatgaacgcttggccgccacaagccagttatccctgtggtaacttttctgacacctcctgcttaaaacccaaaaggtcagaaggatcgtgaggccccgctttcacggtctgtatt

SEQ ID NO: 49211 - DNA, 120 bp, Homo sapiens
  misc_feature: 821 for SV(W|O) and 28S
cgtcgctatgaacgcttggccgccacaagccagttatccctgtggtaacttttctgacacctcctgcttaaaacccaaaaggtcagaaggatcgtgaggccccgctttcacggtctgtat

SEQ ID NO: 49212 - DNA, 120 bp, Homo sapiens
  misc_feature: 821 for SV(W|O) and 28S
cgccggaaccgcgacgctttccaaggcacgggcccctctctcggggcgaacccattccagggcgccctgcccttcacaaagaaaagagaactctccccggggctcccgccggcttctccg

SEQ ID NO: 49213 - DNA, 120 bp, Homo sapiens
  misc_feature: 821 for SV(W|O) and 28S
atcttggtggtagtagcaaatattcaaacgagaactttgaaggccgaagtggagaagggttccatgtgaacagcagttgaacatgggtcagtcggtcctgagagatgggcgagcgccgtt

SEQ ID NO: 49214 - DNA, 120 bp, Homo sapiens
  misc_feature: 820 for SV(W|O) and 28S
gccgccacaagccagttatccctgtggtaacttttctgacacctcctgcttaaaacccaaaaggtcagaaggatcgtgaggccccgctttcacggtctgtattcgtactgaaaatcaaga

SEQ ID NO: 49215 - DNA, 120 bp, Homo sapiens
  misc_feature: 820 for SV(W|O) and 28S
acgtcgctatgaacgcttggccgccacaagccagttatccctgtggtaacttttctgacacctcctgcttaaaacccaaaaggtcagaaggatcgtgaggccccgctttcacggtctgta

SEQ ID NO: 49216 - DNA, 120 bp, Homo sapiens
  misc_feature: 820 for SV(W|O) and 28S
ccgccggaaccgcgacgctttccaaggcacgggcccctctctcggggcgaacccattccagggcgccctgcccttcacaaagaaaagagaactctccccggggctcccgccggcttctcc

SEQ ID NO: 49217 - DNA, 120 bp, Homo sapiens
  misc_feature: 820 for SV(W|O) and 28S
acgttccctattagtgggtgaacaatccaacgcttggtgaattctgcttcacaatgataggaagagccgacatcgaaggatcaaaaagcgacgtcgctatgaacgcttggccgccacaag

SEQ ID NO: 49218 - DNA, 120 bp, Homo sapiens
  misc_feature: 820 for SV(W|O) and 28S
cgccccattggctcctcagccaagcacatacaccaaatgtctgaacctgcggttcctctcgtactgagcaggattaccatggcaacaacacatcatcagtagggtaaaactaacctgtct

SEQ ID NO: 49219 - DNA, 120 bp, Homo sapiens
  misc_feature: 820 for SV(W|O) and 28S
cccacagatggtagcttcgccccattggctcctcagccaagcacatacaccaaatgtctgaacctgcggttcctctcgtactgagcaggattaccatggcaacaacacatcatcagtagg

SEQ ID NO: 49220 - DNA, 120 bp, Homo sapiens
  misc_feature: 820 for SV(W|O) and 28S
atccaacgcttggtgaattctgcttcacaatgataggaagagccgacatcgaaggatcaaaaagcgacgtcgctatgaacgcttggccgccacaagccagttatccctgtggtaactttt

SEQ ID NO: 49221 - DNA, 120 bp, Homo sapiens
  misc_feature: 819 for SV(W|O) and 28S
ccccattggctcctcagccaagcacatacaccaaatgtctgaacctgcggttcctctcgtactgagcaggattaccatggcaacaacacatcatcagtagggtaaaactaacctgtctca

SEQ ID NO: 49222 - DNA, 120 bp, Homo sapiens
  misc_feature: 819 for SV(W|O) and 28S
atcccacagatggtagcttcgccccattggctcctcagccaagcacatacaccaaatgtctgaacctgcggttcctctcgtactgagcaggattaccatggcaacaacacatcatcagta

SEQ ID NO: 49223 - DNA, 120 bp, Homo sapiens
  misc_feature: 819 for SV(W|O) and 28S
acgcttggtgaattctgcttcacaatgataggaagagccgacatcgaaggatcaaaaagcgacgtcgctatgaacgcttggccgccacaagccagttatccctgtggtaacttttctgac

SEQ ID NO: 49224 - DNA, 120 bp, Homo sapiens
  misc_feature: 819 for SV(W|O) and 28S
cgttccctattagtgggtgaacaatccaacgcttggtgaattctgcttcacaatgataggaagagccgacatcgaaggatcaaaaagcgacgtcgctatgaacgcttggccgccacaagc

SEQ ID NO: 49225 - DNA, 120 bp, Homo sapiens
  misc_feature: 818 for SV(W|O) and 28S
cgcttggccgccacaagccagttatccctgtggtaacttttctgacacctcctgcttaaaacccaaaaggtcagaaggatcgtgaggccccgctttcacggtctgtattcgtactgaaaa

SEQ ID NO: 49226 - DNA, 120 bp, Homo sapiens
  misc_feature: 818 for SV(W|O) and 28S
cacgttccctattagtgggtgaacaatccaacgcttggtgaattctgcttcacaatgataggaagagccgacatcgaaggatcaaaaagcgacgtcgctatgaacgcttggccgccacaa

SEQ ID NO: 49227 - DNA, 120 bp, Homo sapiens
  misc_feature: 818 for SV(W|O) and 28S
cggtctaaacccagctcacgttccctattagtgggtgaacaatccaacgcttggtgaattctgcttcacaatgataggaagagccgacatcgaaggatcaaaaagcgacgtcgctatgaa

SEQ ID NO: 49228 - DNA, 120 bp, Homo sapiens
  misc_feature: 818 for SV(W|O) and 28S
ggcgttcagtcataatcccacagatggtagcttcgccccattggctcctcagccaagcacatacaccaaatgtctgaacctgcggttcctctcgtactgagcaggattaccatggcaaca

SEQ ID NO: 49229 - DNA, 120 bp, Homo sapiens
  misc_feature: 818 for SV(W|O) and 28S
tccaacgcttggtgaattctgcttcacaatgataggaagagccgacatcgaaggatcaaaaagcgacgtcgctatgaacgcttggccgccacaagccagttatccctgtggtaacttttc

SEQ ID NO: 49230 - DNA, 120 bp, Homo sapiens
  misc_feature: 818 for SV(W|O) and 28S
ggattctgacttagaggcgttcagtcataatcccacagatggtagcttcgccccattggctcctcagccaagcacatacaccaaatgtctgaacctgcggttcctctcgtactgagcagg

SEQ ID NO: 49231 - DNA, 120 bp, Homo sapiens
  misc_feature: 818 for SV(W|O) and 28S
gcgacgtcgctatgaacgcttggccgccacaagccagttatccctgtggtaacttttctgacacctcctgcttaaaacccaaaaggtcagaaggatcgtgaggccccgctttcacggtct

SEQ ID NO: 49232 - DNA, 120 bp, Homo sapiens
  misc_feature: 818 for SV(W|O) and 28S
gacgtcgctatgaacgcttggccgccacaagccagttatccctgtggtaacttttctgacacctcctgcttaaaacccaaaaggtcagaaggatcgtgaggccccgctttcacggtctgt

SEQ ID NO: 49233 - DNA, 120 bp, Homo sapiens
  misc_feature: 818 for SV(W|O) and 28S
cgatcccggagaagccggcgggagccccggggagagttctcttttctttgtgaagggcagggcgccctggaatgggttcgccccgagagaggggcccgtgccttggaaagcgtcgcggtt

SEQ ID NO: 49234 - DNA, 120 bp, Homo sapiens
  misc_feature: 818 for SV(W|O) and 28S
aacaacacatcatcagtagggtaaaactaacctgtctcacgacggtctaaacccagctcacgttccctattagtgggtgaacaatccaacgcttggtgaattctgcttcacaatgatagg

SEQ ID NO: 49235 - DNA, 120 bp, Homo sapiens
  misc_feature: 817 for SV(W|O) and 28S
tggcaacaacacatcatcagtagggtaaaactaacctgtctcacgacggtctaaacccagctcacgttccctattagtgggtgaacaatccaacgcttggtgaattctgcttcacaatga

SEQ ID NO: 49236 - DNA, 120 bp, Homo sapiens
  misc_feature: 817 for SV(W|O) and 28S
tcttggtggtagtagcaaatattcaaacgagaactttgaaggccgaagtggagaagggttccatgtgaacagcagttgaacatgggtcagtcggtcctgagagatgggcgagcgccgttc

SEQ ID NO: 49237 - DNA, 120 bp, Homo sapiens
  misc_feature: 817 for SV(W|O) and 28S
acggtctaaacccagctcacgttccctattagtgggtgaacaatccaacgcttggtgaattctgcttcacaatgataggaagagccgacatcgaaggatcaaaaagcgacgtcgctatga

SEQ ID NO: 49238 - DNA, 120 bp, Homo sapiens
  misc_feature: 817 for SV(W|O) and 28S
gcaacaacacatcatcagtagggtaaaactaacctgtctcacgacggtctaaacccagctcacgttccctattagtgggtgaacaatccaacgcttggtgaattctgcttcacaatgata

SEQ ID NO: 49239 - DNA, 120 bp, Homo sapiens
  misc_feature: 817 for SV(W|O) and 28S
cgttcagtcataatcccacagatggtagcttcgccccattggctcctcagccaagcacatacaccaaatgtctgaacctgcggttcctctcgtactgagcaggattaccatggcaacaac

SEQ ID NO: 49240 - DNA, 120 bp, Homo sapiens
  misc_feature: 817 for SV(W|O) and 28S
cgacgtcgctatgaacgcttggccgccacaagccagttatccctgtggtaacttttctgacacctcctgcttaaaacccaaaaggtcagaaggatcgtgaggccccgctttcacggtctg

SEQ ID NO: 49241 - DNA, 120 bp, Homo sapiens
  misc_feature: 817 for SV(W|O) and 28S
ccaacgcttggtgaattctgcttcacaatgataggaagagccgacatcgaaggatcaaaaagcgacgtcgctatgaacgcttggccgccacaagccagttatccctgtggtaacttttct

SEQ ID NO: 49242 - DNA, 120 bp, Homo sapiens
  misc_feature: 817 for SV(W|O) and 28S
atttcttcactttgacattcagagcactgggcagaaatcacatcgcgtcaacacccgccgcgggccttcgcgatgctttgttttaattaaacagtcggattcccctggtccgcaccagtt

SEQ ID NO: 49243 - DNA, 120 bp, Homo sapiens
  misc_feature: 816 for SV(W|O) and 28S
agaggcgttcagtcataatcccacagatggtagcttcgccccattggctcctcagccaagcacatacaccaaatgtctgaacctgcggttcctctcgtactgagcaggattaccatggca

SEQ ID NO: 49244 - DNA, 120 bp, Homo sapiens
  misc_feature: 816 for SV(W|O) and 28S
tctgacttagaggcgttcagtcataatcccacagatggtagcttcgccccattggctcctcagccaagcacatacaccaaatgtctgaacctgcggttcctctcgtactgagcaggatta

SEQ ID NO: 49245 - DNA, 120 bp, Homo sapiens
  misc_feature: 816 for SV(W|O) and 28S
ggtctaaacccagctcacgttccctattagtgggtgaacaatccaacgcttggtgaattctgcttcacaatgataggaagagccgacatcgaaggatcaaaaagcgacgtcgctatgaac

SEQ ID NO: 49246 - DNA, 120 bp, Homo sapiens
  misc_feature: 816 for SV(W|O) and 28S
gtactgagcaggattaccatggcaacaacacatcatcagtagggtaaaactaacctgtctcacgacggtctaaacccagctcacgttccctattagtgggtgaacaatccaacgcttggt

SEQ ID NO: 49247 - DNA, 120 bp, Homo sapiens
  misc_feature: 816 for SV(W|O) and 28S
gacggtctaaacccagctcacgttccctattagtgggtgaacaatccaacgcttggtgaattctgcttcacaatgataggaagagccgacatcgaaggatcaaaaagcgacgtcgctatg

SEQ ID NO: 49248 - DNA, 120 bp, Homo sapiens
  misc_feature: 816 for SV(W|O) and 28S
ccgatcccggagaagccggcgggagccccggggagagttctcttttctttgtgaagggcagggcgccctggaatgggttcgccccgagagaggggcccgtgccttggaaagcgtcgcggt

SEQ ID NO: 49249 - DNA, 120 bp, Homo sapiens
  misc_feature: 816 for SV(W|O) and 28S
aatttcttcactttgacattcagagcactgggcagaaatcacatcgcgtcaacacccgccgcgggccttcgcgatgctttgttttaattaaacagtcggattcccctggtccgcaccagt

SEQ ID NO: 49250 - DNA, 120 bp, Homo sapiens
  misc_feature: 815 for SV(W|O) and 28S
gcgttcagtcataatcccacagatggtagcttcgccccattggctcctcagccaagcacatacaccaaatgtctgaacctgcggttcctctcgtactgagcaggattaccatggcaacaa

SEQ ID NO: 49251 - DNA, 120 bp, Homo sapiens
  misc_feature: 815 for SV(W|O) and 28S
tcccacagatggtagcttcgccccattggctcctcagccaagcacatacaccaaatgtctgaacctgcggttcctctcgtactgagcaggattaccatggcaacaacacatcatcagtag

SEQ ID NO: 49252 - DNA, 120 bp, Homo sapiens
  misc_feature: 815 for SV(W|O) and 28S
ggcgggattctgacttagaggcgttcagtcataatcccacagatggtagcttcgccccattggctcctcagccaagcacatacaccaaatgtctgaacctgcggttcctctcgtactgag

SEQ ID NO: 49253 - DNA, 120 bp, Homo sapiens
  misc_feature: 815 for SV(W|O) and 28S
gatcccggagaagccggcgggagccccggggagagttctcttttctttgtgaagggcagggcgccctggaatgggttcgccccgagagaggggcccgtgccttggaaagcgtcgcggttc

SEQ ID NO: 49254 - DNA, 120 bp, Homo sapiens
  misc_feature: 814 for SV(W|O) and 28S
caacacatcatcagtagggtaaaactaacctgtctcacgacggtctaaacccagctcacgttccctattagtgggtgaacaatccaacgcttggtgaattctgcttcacaatgataggaa

SEQ ID NO: 49255 - DNA, 120 bp, Homo sapiens
  misc_feature: 814 for SV(W|O) and 28S
tcgccccattggctcctcagccaagcacatacaccaaatgtctgaacctgcggttcctctcgtactgagcaggattaccatggcaacaacacatcatcagtagggtaaaactaacctgtc

SEQ ID NO: 49256 - DNA, 120 bp, Homo sapiens
  misc_feature: 814 for SV(W|O) and 28S
ggcaacaacacatcatcagtagggtaaaactaacctgtctcacgacggtctaaacccagctcacgttccctattagtgggtgaacaatccaacgcttggtgaattctgcttcacaatgat

SEQ ID NO: 49257 - DNA, 120 bp, Homo sapiens
  misc_feature: 813 for SV(W|O) and 28S
tggccgccacaagccagttatccctgtggtaacttttctgacacctcctgcttaaaacccaaaaggtcagaaggatcgtgaggccccgctttcacggtctgtattcgtactgaaaatcaa

SEQ ID NO: 49258 - DNA, 120 bp, Homo sapiens
  misc_feature: 813 for SV(W|O) and 28S
tagttactcccgccgtttacccgcgcttcattgaatttcttcactttgacattcagagcactgggcagaaatcacatcgcgtcaacacccgccgcgggccttcgcgatgctttgttttaa

SEQ ID NO: 49259 - DNA, 120 bp, Homo sapiens
  misc_feature: 813 for SV(W|O) and 28S
taatcccacagatggtagcttcgccccattggctcctcagccaagcacatacaccaaatgtctgaacctgcggttcctctcgtactgagcaggattaccatggcaacaacacatcatcag

SEQ ID NO: 49260 - DNA, 120 bp, Homo sapiens
  misc_feature: 813 for SV(W|O) and 28S
aggcgttcagtcataatcccacagatggtagcttcgccccattggctcctcagccaagcacatacaccaaatgtctgaacctgcggttcctctcgtactgagcaggattaccatggcaac

SEQ ID NO: 49261 - DNA, 120 bp, Homo sapiens
  misc_feature: 813 for SV(W|O) and 28S
gcttggccgccacaagccagttatccctgtggtaacttttctgacacctcctgcttaaaacccaaaaggtcagaaggatcgtgaggccccgctttcacggtctgtattcgtactgaaaat

SEQ ID NO: 49262 - DNA, 120 bp, Homo sapiens
  misc_feature: 813 for SV(W|O) and 28S
agagcactgggcagaaatcacatcgcgtcaacacccgccgcgggccttcgcgatgctttgttttaattaaacagtcggattcccctggtccgcaccagttctaagtcggctgctaggcgc

SEQ ID NO: 49263 - DNA, 120 bp, Homo sapiens
  misc_feature: 812 for SV(W|O) and 28S
gttcagtcataatcccacagatggtagcttcgccccattggctcctcagccaagcacatacaccaaatgtctgaacctgcggttcctctcgtactgagcaggattaccatggcaacaaca

SEQ ID NO: 49264 - DNA, 120 bp, Homo sapiens
  misc_feature: 812 for SV(W|O) and 28S
cgggattctgacttagaggcgttcagtcataatcccacagatggtagcttcgccccattggctcctcagccaagcacatacaccaaatgtctgaacctgcggttcctctcgtactgagca

SEQ ID NO: 49265 - DNA, 120 bp, Homo sapiens
  misc_feature: 812 for SV(W|O) and 28S
acacatcatcagtagggtaaaactaacctgtctcacgacggtctaaacccagctcacgttccctattagtgggtgaacaatccaacgcttggtgaattctgcttcacaatgataggaaga

SEQ ID NO: 49266 - DNA, 120 bp, Homo sapiens
  misc_feature: 812 for SV(W|O) and 28S
gaccgatcccggagaagccggcgggagccccggggagagttctcttttctttgtgaagggcagggcgccctggaatgggttcgccccgagagaggggcccgtgccttggaaagcgtcgcg

SEQ ID NO: 49267 - DNA, 120 bp, Homo sapiens
  misc_feature: 812 for SV(W|O) and 28S
cagagcactgggcagaaatcacatcgcgtcaacacccgccgcgggccttcgcgatgctttgttttaattaaacagtcggattcccctggtccgcaccagttctaagtcggctgctaggcg

SEQ ID NO: 49268 - DNA, 120 bp, Homo sapiens
  misc_feature: 812 for SV(W|O) and 28S
accgatcccggagaagccggcgggagccccggggagagttctcttttctttgtgaagggcagggcgccctggaatgggttcgccccgagagaggggcccgtgccttggaaagcgtcgcgg

SEQ ID NO: 49269 - DNA, 120 bp, Homo sapiens
  misc_feature: 812 for SV(W|O) and 28S
agttactcccgccgtttacccgcgcttcattgaatttcttcactttgacattcagagcactgggcagaaatcacatcgcgtcaacacccgccgcgggccttcgcgatgctttgttttaat

SEQ ID NO: 49270 - DNA, 120 bp, Homo sapiens
  misc_feature: 811 for SV(W|O) and 28S
ttggccgccacaagccagttatccctgtggtaacttttctgacacctcctgcttaaaacccaaaaggtcagaaggatcgtgaggccccgctttcacggtctgtattcgtactgaaaatca

SEQ ID NO: 49271 - DNA, 120 bp, Homo sapiens
  misc_feature: 811 for SV(W|O) and 28S
tcacgttccctattagtgggtgaacaatccaacgcttggtgaattctgcttcacaatgataggaagagccgacatcgaaggatcaaaaagcgacgtcgctatgaacgcttggccgccaca

SEQ ID NO: 49272 - DNA, 120 bp, Homo sapiens
  misc_feature: 811 for SV(W|O) and 28S
gggcgggattctgacttagaggcgttcagtcataatcccacagatggtagcttcgccccattggctcctcagccaagcacatacaccaaatgtctgaacctgcggttcctctcgtactga

SEQ ID NO: 49273 - DNA, 120 bp, Homo sapiens
  misc_feature: 811 for SV(W|O) and 28S
cccattggctcctcagccaagcacatacaccaaatgtctgaacctgcggttcctctcgtactgagcaggattaccatggcaacaacacatcatcagtagggtaaaactaacctgtctcac

SEQ ID NO: 49274 - DNA, 120 bp, Homo sapiens
  misc_feature: 811 for SV(W|O) and 28S
attggctcctcagccaagcacatacaccaaatgtctgaacctgcggttcctctcgtactgagcaggattaccatggcaacaacacatcatcagtagggtaaaactaacctgtctcacgac

SEQ ID NO: 49275 - DNA, 120 bp, Homo sapiens
  misc_feature: 811 for SV(W|O) and 28S
ctgacttagaggcgttcagtcataatcccacagatggtagcttcgccccattggctcctcagccaagcacatacaccaaatgtctgaacctgcggttcctctcgtactgagcaggattac

SEQ ID NO: 49276 - DNA, 120 bp, Homo sapiens
  misc_feature: 811 for SV(W|O) and 28S
gcgggattctgacttagaggcgttcagtcataatcccacagatggtagcttcgccccattggctcctcagccaagcacatacaccaaatgtctgaacctgcggttcctctcgtactgagc

SEQ ID NO: 49277 - DNA, 120 bp, Homo sapiens
  misc_feature: 811 for SV(W|O) and 28S
agcgacgtcgctatgaacgcttggccgccacaagccagttatccctgtggtaacttttctgacacctcctgcttaaaacccaaaaggtcagaaggatcgtgaggccccgctttcacggtc

SEQ ID NO: 49278 - DNA, 120 bp, Homo sapiens
  misc_feature: 811 for SV(W|O) and 28S
caacaacacatcatcagtagggtaaaactaacctgtctcacgacggtctaaacccagctcacgttccctattagtgggtgaacaatccaacgcttggtgaattctgcttcacaatgatag

SEQ ID NO: 49279 - DNA, 120 bp, Homo sapiens
  misc_feature: 811 for SV(W|O) and 28S
aacgcgaccgatcccggagaagccggcgggagccccggggagagttctcttttctttgtgaagggcagggcgccctggaatgggttcgccccgagagaggggcccgtgccttggaaagcg

SEQ ID NO: 49280 - DNA, 120 bp, Homo sapiens
  misc_feature: 811 for SV(W|O) and 28S
caacgcttggtgaattctgcttcacaatgataggaagagccgacatcgaaggatcaaaaagcgacgtcgctatgaacgcttggccgccacaagccagttatccctgtggtaacttttctg

SEQ ID NO: 49281 - DNA, 120 bp, Homo sapiens
  misc_feature: 811 for SV(W|O) and 28S
aatcccacagatggtagcttcgccccattggctcctcagccaagcacatacaccaaatgtctgaacctgcggttcctctcgtactgagcaggattaccatggcaacaacacatcatcagt

SEQ ID NO: 49282 - DNA, 120 bp, Homo sapiens
  misc_feature: 810 for SV(W|O) and 28S
ttcgccccattggctcctcagccaagcacatacaccaaatgtctgaacctgcggttcctctcgtactgagcaggattaccatggcaacaacacatcatcagtagggtaaaactaacctgt

SEQ ID NO: 49283 - DNA, 120 bp, Homo sapiens
  misc_feature: 810 for SV(W|O) and 28S
aacgcttggtgaattctgcttcacaatgataggaagagccgacatcgaaggatcaaaaagcgacgtcgctatgaacgcttggccgccacaagccagttatccctgtggtaacttttctga

SEQ ID NO: 49284 - DNA, 120 bp, Homo sapiens
  misc_feature: 809 for SV(W|O) and 28S
tttcttcactttgacattcagagcactgggcagaaatcacatcgcgtcaacacccgccgcgggccttcgcgatgctttgttttaattaaacagtcggattcccctggtccgcaccagttc

SEQ ID NO: 49285 - DNA, 120 bp, Homo sapiens
  misc_feature: 809 for SV(W|O) and 28S
ttcttcactttgacattcagagcactgggcagaaatcacatcgcgtcaacacccgccgcgggccttcgcgatgctttgttttaattaaacagtcggattcccctggtccgcaccagttct

SEQ ID NO: 49286 - DNA, 120 bp, Homo sapiens
  misc_feature: 809 for SV(W|O) and 28S
ttagtgggtgaacaatccaacgcttggtgaattctgcttcacaatgataggaagagccgacatcgaaggatcaaaaagcgacgtcgctatgaacgcttggccgccacaagccagttatcc

SEQ ID NO: 49287 - DNA, 120 bp, Homo sapiens
  misc_feature: 809 for SV(W|O) and 28S
cattgaatttcttcactttgacattcagagcactgggcagaaatcacatcgcgtcaacacccgccgcgggccttcgcgatgctttgttttaattaaacagtcggattcccctggtccgca

SEQ ID NO: 49288 - DNA, 120 bp, Homo sapiens
  misc_feature: 809 for SV(W|O) and 28S
gggattctgacttagaggcgttcagtcataatcccacagatggtagcttcgccccattggctcctcagccaagcacatacaccaaatgtctgaacctgcggttcctctcgtactgagcag

SEQ ID NO: 49289 - DNA, 120 bp, Homo sapiens
  misc_feature: 809 for SV(W|O) and 28S
gaatttcttcactttgacattcagagcactgggcagaaatcacatcgcgtcaacacccgccgcgggccttcgcgatgctttgttttaattaaacagtcggattcccctggtccgcaccag

SEQ ID NO: 49290 - DNA, 120 bp, Homo sapiens
  misc_feature: 808 for SV(W|O) and 28S
cattggctcctcagccaagcacatacaccaaatgtctgaacctgcggttcctctcgtactgagcaggattaccatggcaacaacacatcatcagtagggtaaaactaacctgtctcacga

SEQ ID NO: 49291 - DNA, 120 bp, Homo sapiens
  misc_feature: 808 for SV(W|O) and 28S
gcggtaacgcgaccgatcccggagaagccggcgggagccccggggagagttctcttttctttgtgaagggcagggcgccctggaatgggttcgccccgagagaggggcccgtgccttgga

SEQ ID NO: 49292 - DNA, 120 bp, Homo sapiens
  misc_feature: 808 for SV(W|O) and 28S
tcagagcactgggcagaaatcacatcgcgtcaacacccgccgcgggccttcgcgatgctttgttttaattaaacagtcggattcccctggtccgcaccagttctaagtcggctgctaggc

SEQ ID NO: 49293 - DNA, 120 bp, Homo sapiens
  misc_feature: 808 for SV(W|O) and 28S
cgccacaagccagttatccctgtggtaacttttctgacacctcctgcttaaaacccaaaaggtcagaaggatcgtgaggccccgctttcacggtctgtattcgtactgaaaatcaagatc

SEQ ID NO: 49294 - DNA, 120 bp, Homo sapiens
  misc_feature: 807 for SV(W|O) and 28S
ttcagagcactgggcagaaatcacatcgcgtcaacacccgccgcgggccttcgcgatgctttgttttaattaaacagtcggattcccctggtccgcaccagttctaagtcggctgctagg

SEQ ID NO: 49295 - DNA, 120 bp, Homo sapiens
  misc_feature: 807 for SV(W|O) and 28S
tcgctatgaacgcttggccgccacaagccagttatccctgtggtaacttttctgacacctcctgcttaaaacccaaaaggtcagaaggatcgtgaggccccgctttcacggtctgtattc

SEQ ID NO: 49296 - DNA, 120 bp, Homo sapiens
  misc_feature: 807 for SV(W|O) and 28S
cttggccgccacaagccagttatccctgtggtaacttttctgacacctcctgcttaaaacccaaaaggtcagaaggatcgtgaggccccgctttcacggtctgtattcgtactgaaaatc

SEQ ID NO: 49297 - DNA, 120 bp, Homo sapiens
  misc_feature: 806 for SV(W|O) and 28S
cacatcatcagtagggtaaaactaacctgtctcacgacggtctaaacccagctcacgttccctattagtgggtgaacaatccaacgcttggtgaattctgcttcacaatgataggaagag

SEQ ID NO: 49298 - DNA, 120 bp, Homo sapiens
  misc_feature: 806 for SV(W|O) and 28S
ccattggctcctcagccaagcacatacaccaaatgtctgaacctgcggttcctctcgtactgagcaggattaccatggcaacaacacatcatcagtagggtaaaactaacctgtctcacg

SEQ ID NO: 49299 - DNA, 120 bp, Homo sapiens
  misc_feature: 806 for SV(W|O) and 28S
cgacggtctaaacccagctcacgttccctattagtgggtgaacaatccaacgcttggtgaattctgcttcacaatgataggaagagccgacatcgaaggatcaaaaagcgacgtcgctat

SEQ ID NO: 49300 - DNA, 120 bp, Homo sapiens
  misc_feature: 805 for SV(W|O) and 28S
tgcggtaacgcgaccgatcccggagaagccggcgggagccccggggagagttctcttttctttgtgaagggcagggcgccctggaatgggttcgccccgagagaggggcccgtgccttgg

SEQ ID NO: 49301 - DNA, 120 bp, Homo sapiens
  misc_feature: 805 for SV(W|O) and 28S
tcttcactttgacattcagagcactgggcagaaatcacatcgcgtcaacacccgccgcgggccttcgcgatgctttgttttaattaaacagtcggattcccctggtccgcaccagttcta

SEQ ID NO: 49302 - DNA, 120 bp, Homo sapiens
  misc_feature: 805 for SV(W|O) and 28S
ccgccggcttctccgggatcggtcgcgttaccgcactggacgcctcgcggcgcccatctccgccactccggattcggggatctgaacccgactccctttcgatcggccgagggcaacgga

SEQ ID NO: 49303 - DNA, 120 bp, Homo sapiens
  misc_feature: 805 for SV(W|O) and 28S
gggtgaacaatccaacgcttggtgaattctgcttcacaatgataggaagagccgacatcgaaggatcaaaaagcgacgtcgctatgaacgcttggccgccacaagccagttatccctgtg

SEQ ID NO: 49304 - DNA, 120 bp, Homo sapiens
  misc_feature: 805 for SV(W|O) and 28S
gctatgaacgcttggccgccacaagccagttatccctgtggtaacttttctgacacctcctgcttaaaacccaaaaggtcagaaggatcgtgaggccccgctttcacggtctgtattcgt

SEQ ID NO: 49305 - DNA, 120 bp, Homo sapiens
  misc_feature: 805 for SV(W|O) and 28S
gatcttggtggtagtagcaaatattcaaacgagaactttgaaggccgaagtggagaagggttccatgtgaacagcagttgaacatgggtcagtcggtcctgagagatgggcgagcgccgt

SEQ ID NO: 49306 - DNA, 120 bp, Homo sapiens
  misc_feature: 805 for SV(W|O) and 28S
cgctatgaacgcttggccgccacaagccagttatccctgtggtaacttttctgacacctcctgcttaaaacccaaaaggtcagaaggatcgtgaggccccgctttcacggtctgtattcg

SEQ ID NO: 49307 - DNA, 120 bp, Homo sapiens
  misc_feature: 805 for SV(W|O) and 28S
ccacagatggtagcttcgccccattggctcctcagccaagcacatacaccaaatgtctgaacctgcggttcctctcgtactgagcaggattaccatggcaacaacacatcatcagtaggg

SEQ ID NO: 49308 - DNA, 120 bp, Homo sapiens
  misc_feature: 804 for SV(W|O) and 28S
cttcactttgacattcagagcactgggcagaaatcacatcgcgtcaacacccgccgcgggccttcgcgatgctttgttttaattaaacagtcggattcccctggtccgcaccagttctaa

SEQ ID NO: 49309 - DNA, 120 bp, Homo sapiens
  misc_feature: 804 for SV(W|O) and 28S
acaacacatcatcagtagggtaaaactaacctgtctcacgacggtctaaacccagctcacgttccctattagtgggtgaacaatccaacgcttggtgaattctgcttcacaatgatagga

SEQ ID NO: 49310 - DNA, 120 bp, Homo sapiens
  misc_feature: 804 for SV(W|O) and 28S
gtgaaagcggggcctcacgatccttctgaccttttgggttttaagcaggaggtgtcagaaaagttaccacagggataactggcttgtggcggccaagcgttcatagcgacgtcgcttttt

SEQ ID NO: 49311 - DNA, 120 bp, Homo sapiens
  misc_feature: 804 for SV(W|O) and 28S
aaagcgacgtcgctatgaacgcttggccgccacaagccagttatccctgtggtaacttttctgacacctcctgcttaaaacccaaaaggtcagaaggatcgtgaggccccgctttcacgg

SEQ ID NO: 49312 - DNA, 120 bp, Homo sapiens
  misc_feature: 804 for SV(W|O) and 28S
atgaacgcttggccgccacaagccagttatccctgtggtaacttttctgacacctcctgcttaaaacccaaaaggtcagaaggatcgtgaggccccgctttcacggtctgtattcgtact

SEQ ID NO: 49313 - DNA, 120 bp, Homo sapiens
  misc_feature: 803 for SV(W|O) and 28S
caatgataggaagagccgacatcgaaggatcaaaaagcgacgtcgctatgaacgcttggccgccacaagccagttatccctgtggtaacttttctgacacctcctgcttaaaacccaaaa

SEQ ID NO: 49314 - DNA, 120 bp, Homo sapiens
  misc_feature: 803 for SV(W|O) and 28S
tgggcgggattctgacttagaggcgttcagtcataatcccacagatggtagcttcgccccattggctcctcagccaagcacatacaccaaatgtctgaacctgcggttcctctcgtactg

SEQ ID NO: 49315 - DNA, 120 bp, Homo sapiens
  misc_feature: 803 for SV(W|O) and 28S
acgacggtctaaacccagctcacgttccctattagtgggtgaacaatccaacgcttggtgaattctgcttcacaatgataggaagagccgacatcgaaggatcaaaaagcgacgtcgcta

SEQ ID NO: 49316 - DNA, 120 bp, Homo sapiens
  misc_feature: 803 for SV(W|O) and 28S
taaacccagctcacgttccctattagtgggtgaacaatccaacgcttggtgaattctgcttcacaatgataggaagagccgacatcgaaggatcaaaaagcgacgtcgctatgaacgctt

SEQ ID NO: 49317 - DNA, 120 bp, Homo sapiens
  misc_feature: 803 for SV(W|O) and 28S
gccgccggaaccgcgacgctttccaaggcacgggcccctctctcggggcgaacccattccagggcgccctgcccttcacaaagaaaagagaactctccccggggctcccgccggcttctc

SEQ ID NO: 49318 - DNA, 120 bp, Homo sapiens
  misc_feature: 803 for SV(W|O) and 28S
ctgggcgggattctgacttagaggcgttcagtcataatcccacagatggtagcttcgccccattggctcctcagccaagcacatacaccaaatgtctgaacctgcggttcctctcgtact

SEQ ID NO: 49319 - DNA, 120 bp, Homo sapiens
  misc_feature: 803 for SV(W|O) and 28S
cgtactgagcaggattaccatggcaacaacacatcatcagtagggtaaaactaacctgtctcacgacggtctaaacccagctcacgttccctattagtgggtgaacaatccaacgcttgg

SEQ ID NO: 49320 - DNA, 120 bp, Homo sapiens
  misc_feature: 803 for SV(W|O) and 28S
aagcgacgtcgctatgaacgcttggccgccacaagccagttatccctgtggtaacttttctgacacctcctgcttaaaacccaaaaggtcagaaggatcgtgaggccccgctttcacggt

SEQ ID NO: 49321 - DNA, 120 bp, Homo sapiens
  misc_feature: 802 for SV(W|O) and 28S
aacgcttggccgccacaagccagttatccctgtggtaacttttctgacacctcctgcttaaaacccaaaaggtcagaaggatcgtgaggccccgctttcacggtctgtattcgtactgaa

SEQ ID NO: 49322 - DNA, 120 bp, Homo sapiens
  misc_feature: 802 for SV(W|O) and 28S
tgaaagcggggcctcacgatccttctgaccttttgggttttaagcaggaggtgtcagaaaagttaccacagggataactggcttgtggcggccaagcgttcatagcgacgtcgctttttg

SEQ ID NO: 49323 - DNA, 120 bp, Homo sapiens
  misc_feature: 802 for SV(W|O) and 28S
ctatgaacgcttggccgccacaagccagttatccctgtggtaacttttctgacacctcctgcttaaaacccaaaaggtcagaaggatcgtgaggccccgctttcacggtctgtattcgta

SEQ ID NO: 49324 - DNA, 120 bp, Homo sapiens
  misc_feature: 802 for SV(W|O) and 28S
gtgggtgaacaatccaacgcttggtgaattctgcttcacaatgataggaagagccgacatcgaaggatcaaaaagcgacgtcgctatgaacgcttggccgccacaagccagttatccctg

SEQ ID NO: 49325 - DNA, 120 bp, Homo sapiens
  misc_feature: 802 for SV(W|O) and 28S
attgaatttcttcactttgacattcagagcactgggcagaaatcacatcgcgtcaacacccgccgcgggccttcgcgatgctttgttttaattaaacagtcggattcccctggtccgcac

SEQ ID NO: 49326 - DNA, 120 bp, Homo sapiens
  misc_feature: 802 for SV(W|O) and 28S
gtctaaacccagctcacgttccctattagtgggtgaacaatccaacgcttggtgaattctgcttcacaatgataggaagagccgacatcgaaggatcaaaaagcgacgtcgctatgaacg

SEQ ID NO: 49327 - DNA, 120 bp, Homo sapiens
  misc_feature: 802 for SV(W|O) and 28S
gagcactgggcagaaatcacatcgcgtcaacacccgccgcgggccttcgcgatgctttgttttaattaaacagtcggattcccctggtccgcaccagttctaagtcggctgctaggcgcc

SEQ ID NO: 49328 - DNA, 120 bp, Homo sapiens
  misc_feature: 802 for SV(W|O) and 28S
cgccgccggaaccgcgacgctttccaaggcacgggcccctctctcggggcgaacccattccagggcgccctgcccttcacaaagaaaagagaactctccccggggctcccgccggcttct

SEQ ID NO: 49329 - DNA, 120 bp, Homo sapiens
  misc_feature: 801 for SV(W|O) and 28S
ttccgcctgggcgggattctgacttagaggcgttcagtcataatcccacagatggtagcttcgccccattggctcctcagccaagcacatacaccaaatgtctgaacctgcggttcctct

SEQ ID NO: 49330 - DNA, 120 bp, Homo sapiens
  misc_feature: 801 for SV(W|O) and 28S
ttcactttgacattcagagcactgggcagaaatcacatcgcgtcaacacccgccgcgggccttcgcgatgctttgttttaattaaacagtcggattcccctggtccgcaccagttctaag

SEQ ID NO: 49331 - DNA, 120 bp, Homo sapiens
  misc_feature: 801 for SV(W|O) and 28S
gctcacgttccctattagtgggtgaacaatccaacgcttggtgaattctgcttcacaatgataggaagagccgacatcgaaggatcaaaaagcgacgtcgctatgaacgcttggccgcca

SEQ ID NO: 49332 - DNA, 120 bp, Homo sapiens
  misc_feature: 801 for SV(W|O) and 28S
tatgaacgcttggccgccacaagccagttatccctgtggtaacttttctgacacctcctgcttaaaacccaaaaggtcagaaggatcgtgaggccccgctttcacggtctgtattcgtac

SEQ ID NO: 49333 - DNA, 120 bp, Homo sapiens
  misc_feature: 801 for SV(W|O) and 28S
tagtgggtgaacaatccaacgcttggtgaattctgcttcacaatgataggaagagccgacatcgaaggatcaaaaagcgacgtcgctatgaacgcttggccgccacaagccagttatccc

SEQ ID NO: 49334 - DNA, 120 bp, Homo sapiens
  misc_feature: 801 for SV(W|O) and 28S
ggacaggcgggggaccggctatccgaggccaaccgaggctccgcggcgctgccgtatcgttccgcctgggcgggattctgacttagaggcgttcagtcataatcccacagatggtagctt

SEQ ID NO: 49335 - DNA, 120 bp, Homo sapiens
  misc_feature: 801 for SV(W|O) and 28S
cgaccgatcccggagaagccggcgggagccccggggagagttctcttttctttgtgaagggcagggcgccctggaatgggttcgccccgagagaggggcccgtgccttggaaagcgtcgc

SEQ ID NO: 49336 - DNA, 120 bp, Homo sapiens
  misc_feature: 800 for SV(W|O) and 28S
tgaatttcttcactttgacattcagagcactgggcagaaatcacatcgcgtcaacacccgccgcgggccttcgcgatgctttgttttaattaaacagtcggattcccctggtccgcacca

SEQ ID NO: 49337 - DNA, 120 bp, Homo sapiens
  misc_feature: 800 for SV(W|O) and 28S
cattcagagcactgggcagaaatcacatcgcgtcaacacccgccgcgggccttcgcgatgctttgttttaattaaacagtcggattcccctggtccgcaccagttctaagtcggctgcta

SEQ ID NO: 49338 - DNA, 120 bp, Homo sapiens
  misc_feature: 800 for SV(W|O) and 28S
ctcacgttccctattagtgggtgaacaatccaacgcttggtgaattctgcttcacaatgataggaagagccgacatcgaaggatcaaaaagcgacgtcgctatgaacgcttggccgccac

SEQ ID NO: 49339 - DNA, 120 bp, Homo sapiens
  misc_feature: 800 for SV(W|O) and 28S
cttttgggttttaagcaggaggtgtcagaaaagttaccacagggataactggcttgtggcggccaagcgttcatagcgacgtcgctttttgatccttcgatgtcggctcttcctatcatt

SEQ ID NO: 49340 - DNA, 120 bp, Homo sapiens
  misc_feature: 800 for SV(W|O) and 28S
ctaaacccagctcacgttccctattagtgggtgaacaatccaacgcttggtgaattctgcttcacaatgataggaagagccgacatcgaaggatcaaaaagcgacgtcgctatgaacgct

SEQ ID NO: 49341 - DNA, 120 bp, Homo sapiens
  misc_feature: 800 for SV(W|O) and 28S
agcactgggcagaaatcacatcgcgtcaacacccgccgcgggccttcgcgatgctttgttttaattaaacagtcggattcccctggtccgcaccagttctaagtcggctgctaggcgccg

SEQ ID NO: 49342 - DNA, 120 bp, Homo sapiens
  misc_feature: 800 for SV(W|O) and 28S
agtgggtgaacaatccaacgcttggtgaattctgcttcacaatgataggaagagccgacatcgaaggatcaaaaagcgacgtcgctatgaacgcttggccgccacaagccagttatccct

SEQ ID NO: 49343 - DNA, 120 bp, Homo sapiens
  misc_feature: 799 for SV(W|O) and 28S
cggtaacgcgaccgatcccggagaagccggcgggagccccggggagagttctcttttctttgtgaagggcagggcgccctggaatgggttcgccccgagagaggggcccgtgccttggaa

SEQ ID NO: 49344 - DNA, 120 bp, Homo sapiens
  misc_feature: 799 for SV(W|O) and 28S
ccttttgggttttaagcaggaggtgtcagaaaagttaccacagggataactggcttgtggcggccaagcgttcatagcgacgtcgctttttgatccttcgatgtcggctcttcctatcat

SEQ ID NO: 49345 - DNA, 120 bp, Homo sapiens
  misc_feature: 799 for SV(W|O) and 28S
aagcacatacaccaaatgtctgaacctgcggttcctctcgtactgagcaggattaccatggcaacaacacatcatcagtagggtaaaactaacctgtctcacgacggtctaaacccagct

SEQ ID NO: 49346 - DNA, 120 bp, Homo sapiens
  misc_feature: 798 for SV(W|O) and 28S
tgggtgaacaatccaacgcttggtgaattctgcttcacaatgataggaagagccgacatcgaaggatcaaaaagcgacgtcgctatgaacgcttggccgccacaagccagttatccctgt

SEQ ID NO: 49347 - DNA, 120 bp, Homo sapiens
  misc_feature: 798 for SV(W|O) and 28S
gccacaagccagttatccctgtggtaacttttctgacacctcctgcttaaaacccaaaaggtcagaaggatcgtgaggccccgctttcacggtctgtattcgtactgaaaatcaagatca

SEQ ID NO: 49348 - DNA, 120 bp, Homo sapiens
  misc_feature: 798 for SV(W|O) and 28S
accttttgggttttaagcaggaggtgtcagaaaagttaccacagggataactggcttgtggcggccaagcgttcatagcgacgtcgctttttgatccttcgatgtcggctcttcctatca

SEQ ID NO: 49349 - DNA, 120 bp, Homo sapiens
  misc_feature: 798 for SV(W|O) and 28S
gaacgcttggccgccacaagccagttatccctgtggtaacttttctgacacctcctgcttaaaacccaaaaggtcagaaggatcgtgaggccccgctttcacggtctgtattcgtactga

SEQ ID NO: 49350 - DNA, 120 bp, Homo sapiens
  misc_feature: 798 for SV(W|O) and 28S
gaaagcggggcctcacgatccttctgaccttttgggttttaagcaggaggtgtcagaaaagttaccacagggataactggcttgtggcggccaagcgttcatagcgacgtcgctttttga

SEQ ID NO: 49351 - DNA, 120 bp, Homo sapiens
  misc_feature: 798 for SV(W|O) and 28S
gtgcggtaacgcgaccgatcccggagaagccggcgggagccccggggagagttctcttttctttgtgaagggcagggcgccctggaatgggttcgccccgagagaggggcccgtgccttg

SEQ ID NO: 49352 - DNA, 120 bp, Homo sapiens
  misc_feature: 798 for SV(W|O) and 28S
gccggcttctccgggatcggtcgcgttaccgcactggacgcctcgcggcgcccatctccgccactccggattcggggatctgaacccgactccctttcgatcggccgagggcaacggagg

SEQ ID NO: 49353 - DNA, 120 bp, Homo sapiens
  misc_feature: 798 for SV(W|O) and 28S
cgccggcttctccgggatcggtcgcgttaccgcactggacgcctcgcggcgcccatctccgccactccggattcggggatctgaacccgactccctttcgatcggccgagggcaacggag

SEQ ID NO: 49354 - DNA, 120 bp, Homo sapiens
  misc_feature: 797 for SV(W|O) and 28S
ctatccgaggccaaccgaggctccgcggcgctgccgtatcgttccgcctgggcgggattctgacttagaggcgttcagtcataatcccacagatggtagcttcgccccattggctcctca

SEQ ID NO: 49355 - DNA, 120 bp, Homo sapiens
  misc_feature: 797 for SV(W|O) and 28S
tgaacgcttggccgccacaagccagttatccctgtggtaacttttctgacacctcctgcttaaaacccaaaaggtcagaaggatcgtgaggccccgctttcacggtctgtattcgtactg

SEQ ID NO: 49356 - DNA, 120 bp, Homo sapiens
  misc_feature: 797 for SV(W|O) and 28S
tcactttgacattcagagcactgggcagaaatcacatcgcgtcaacacccgccgcgggccttcgcgatgctttgttttaattaaacagtcggattcccctggtccgcaccagttctaagt

SEQ ID NO: 49357 - DNA, 120 bp, Homo sapiens
  misc_feature: 797 for SV(W|O) and 28S
catcatcagtagggtaaaactaacctgtctcacgacggtctaaacccagctcacgttccctattagtgggtgaacaatccaacgcttggtgaattctgcttcacaatgataggaagagcc

SEQ ID NO: 49358 - DNA, 120 bp, Homo sapiens
  misc_feature: 797 for SV(W|O) and 28S
gccgtatcgttccgcctgggcgggattctgacttagaggcgttcagtcataatcccacagatggtagcttcgccccattggctcctcagccaagcacatacaccaaatgtctgaacctgc

SEQ ID NO: 49359 - DNA, 120 bp, Homo sapiens
  misc_feature: 797 for SV(W|O) and 28S
ccccggattttcaagggccagcgagagctcaccggacgccgccggaaccgcgacgctttccaaggcacgggcccctctctcggggcgaacccattccagggcgccctgcccttcacaaag

SEQ ID NO: 49360 - DNA, 120 bp, Homo sapiens
  misc_feature: 797 for SV(W|O) and 28S
cggggcctcacgatccttctgaccttttgggttttaagcaggaggtgtcagaaaagttaccacagggataactggcttgtggcggccaagcgttcatagcgacgtcgctttttgatcctt

SEQ ID NO: 49361 - DNA, 120 bp, Homo sapiens
  misc_feature: 797 for SV(W|O) and 28S
cgcgtcactaattagatgacgaggcatttggctaccttaagagagtcatagttactcccgccgtttacccgcgcttcattgaatttcttcactttgacattcagagcactgggcagaaat

SEQ ID NO: 49362 - DNA, 120 bp, Homo sapiens
  misc_feature: 797 for SV(W|O) and 28S
cccgccggcttctccgggatcggtcgcgttaccgcactggacgcctcgcggcgcccatctccgccactccggattcggggatctgaacccgactccctttcgatcggccgagggcaacgg

SEQ ID NO: 49363 - DNA, 120 bp, Homo sapiens
  misc_feature: 797 for SV(W|O) and 28S
aatccaacgcttggtgaattctgcttcacaatgataggaagagccgacatcgaaggatcaaaaagcgacgtcgctatgaacgcttggccgccacaagccagttatccctgtggtaacttt

SEQ ID NO: 49364 - DNA, 120 bp, Homo sapiens
  misc_feature: 796 for SV(W|O) and 28S
ggaggtgtcagaaaagttaccacagggataactggcttgtggcggccaagcgttcatagcgacgtcgctttttgatccttcgatgtcggctcttcctatcattgtgaagcagaattcacc

SEQ ID NO: 49365 - DNA, 120 bp, Homo sapiens
  misc_feature: 796 for SV(W|O) and 28S
ggggcctcacgatccttctgaccttttgggttttaagcaggaggtgtcagaaaagttaccacagggataactggcttgtggcggccaagcgttcatagcgacgtcgctttttgatccttc

SEQ ID NO: 49366 - DNA, 120 bp, Homo sapiens
  misc_feature: 796 for SV(W|O) and 28S
gggacaggcgggggaccggctatccgaggccaaccgaggctccgcggcgctgccgtatcgttccgcctgggcgggattctgacttagaggcgttcagtcataatcccacagatggtagct

SEQ ID NO: 49367 - DNA, 120 bp, Homo sapiens
  misc_feature: 796 for SV(W|O) and 28S
ggctcctcagccaagcacatacaccaaatgtctgaacctgcggttcctctcgtactgagcaggattaccatggcaacaacacatcatcagtagggtaaaactaacctgtctcacgacggt

SEQ ID NO: 49368 - DNA, 120 bp, Homo sapiens
  misc_feature: 796 for SV(W|O) and 28S
agctcacgttccctattagtgggtgaacaatccaacgcttggtgaattctgcttcacaatgataggaagagccgacatcgaaggatcaaaaagcgacgtcgctatgaacgcttggccgcc

SEQ ID NO: 49369 - DNA, 120 bp, Homo sapiens
  misc_feature: 796 for SV(W|O) and 28S
gaccttttgggttttaagcaggaggtgtcagaaaagttaccacagggataactggcttgtggcggccaagcgttcatagcgacgtcgctttttgatccttcgatgtcggctcttcctatc

SEQ ID NO: 49370 - DNA, 120 bp, Homo sapiens
  misc_feature: 796 for SV(W|O) and 28S
attcagagcactgggcagaaatcacatcgcgtcaacacccgccgcgggccttcgcgatgctttgttttaattaaacagtcggattcccctggtccgcaccagttctaagtcggctgctag

SEQ ID NO: 49371 - DNA, 120 bp, Homo sapiens
  misc_feature: 796 for SV(W|O) and 28S
acgcgaccgatcccggagaagccggcgggagccccggggagagttctcttttctttgtgaagggcagggcgccctggaatgggttcgccccgagagaggggcccgtgccttggaaagcgt

SEQ ID NO: 49372 - DNA, 120 bp, Homo sapiens
  misc_feature: 795 for SV(W|O) and 28S
tgacattcagagcactgggcagaaatcacatcgcgtcaacacccgccgcgggccttcgcgatgctttgttttaattaaacagtcggattcccctggtccgcaccagttctaagtcggctg

SEQ ID NO: 49373 - DNA, 120 bp, Homo sapiens
  misc_feature: 795 for SV(W|O) and 28S
tctaaacccagctcacgttccctattagtgggtgaacaatccaacgcttggtgaattctgcttcacaatgataggaagagccgacatcgaaggatcaaaaagcgacgtcgctatgaacgc

SEQ ID NO: 49374 - DNA, 120 bp, Homo sapiens
  misc_feature: 795 for SV(W|O) and 28S
agcggggcctcacgatccttctgaccttttgggttttaagcaggaggtgtcagaaaagttaccacagggataactggcttgtggcggccaagcgttcatagcgacgtcgctttttgatcc

SEQ ID NO: 49375 - DNA, 120 bp, Homo sapiens
  misc_feature: 795 for SV(W|O) and 28S
acatcatcagtagggtaaaactaacctgtctcacgacggtctaaacccagctcacgttccctattagtgggtgaacaatccaacgcttggtgaattctgcttcacaatgataggaagagc

SEQ ID NO: 49376 - DNA, 120 bp, Homo sapiens
  misc_feature: 795 for SV(W|O) and 28S
gacaggcgggggaccggctatccgaggccaaccgaggctccgcggcgctgccgtatcgttccgcctgggcgggattctgacttagaggcgttcagtcataatcccacagatggtagcttc

SEQ ID NO: 49377 - DNA, 120 bp, Homo sapiens
  misc_feature: 795 for SV(W|O) and 28S
cgtgaaagcggggcctcacgatccttctgaccttttgggttttaagcaggaggtgtcagaaaagttaccacagggataactggcttgtggcggccaagcgttcatagcgacgtcgctttt

SEQ ID NO: 49378 - DNA, 120 bp, Homo sapiens
  misc_feature: 794 for SV(W|O) and 28S
acgcttggccgccacaagccagttatccctgtggtaacttttctgacacctcctgcttaaaacccaaaaggtcagaaggatcgtgaggccccgctttcacggtctgtattcgtactgaaa

SEQ ID NO: 49379 - DNA, 120 bp, Homo sapiens
  misc_feature: 794 for SV(W|O) and 28S
gctcccgccggcttctccgggatcggtcgcgttaccgcactggacgcctcgcggcgcccatctccgccactccggattcggggatctgaacccgactccctttcgatcggccgagggcaa

SEQ ID NO: 49380 - DNA, 120 bp, Homo sapiens
  misc_feature: 794 for SV(W|O) and 28S
ccacaagccagttatccctgtggtaacttttctgacacctcctgcttaaaacccaaaaggtcagaaggatcgtgaggccccgctttcacggtctgtattcgtactgaaaatcaagatcaa

SEQ ID NO: 49381 - DNA, 120 bp, Homo sapiens
  misc_feature: 794 for SV(W|O) and 28S
tcattgaatttcttcactttgacattcagagcactgggcagaaatcacatcgcgtcaacacccgccgcgggccttcgcgatgctttgttttaattaaacagtcggattcccctggtccgc

SEQ ID NO: 49382 - DNA, 120 bp, Homo sapiens
  misc_feature: 794 for SV(W|O) and 28S
tcacgatccttctgaccttttgggttttaagcaggaggtgtcagaaaagttaccacagggataactggcttgtggcggccaagcgttcatagcgacgtcgctttttgatccttcgatgtc

SEQ ID NO: 49383 - DNA, 120 bp, Homo sapiens
  misc_feature: 794 for SV(W|O) and 28S
agatcttggtggtagtagcaaatattcaaacgagaactttgaaggccgaagtggagaagggttccatgtgaacagcagttgaacatgggtcagtcggtcctgagagatgggcgagcgccg

SEQ ID NO: 49384 - DNA, 120 bp, Homo sapiens
  misc_feature: 794 for SV(W|O) and 28S
cctcacgatccttctgaccttttgggttttaagcaggaggtgtcagaaaagttaccacagggataactggcttgtggcggccaagcgttcatagcgacgtcgctttttgatccttcgatg

SEQ ID NO: 49385 - DNA, 120 bp, Homo sapiens
  misc_feature: 794 for SV(W|O) and 28S
caatccaacgcttggtgaattctgcttcacaatgataggaagagccgacatcgaaggatcaaaaagcgacgtcgctatgaacgcttggccgccacaagccagttatccctgtggtaactt

SEQ ID NO: 49386 - DNA, 120 bp, Homo sapiens
  misc_feature: 793 for SV(W|O) and 28S
ggtaacgcgaccgatcccggagaagccggcgggagccccggggagagttctcttttctttgtgaagggcagggcgccctggaatgggttcgccccgagagaggggcccgtgccttggaaa

SEQ ID NO: 49387 - DNA, 120 bp, Homo sapiens
  misc_feature: 793 for SV(W|O) and 28S
ttcagacatttggtgtatgtgcttggctgaggagccaatggggcgaagctaccatctgtgggattatgactgaacgcctctaagtcagaatcccgcccaggcggaacgatacggcagcgc

SEQ ID NO: 49388 - DNA, 120 bp, Homo sapiens
  misc_feature: 793 for SV(W|O) and 28S
gctcctcagccaagcacatacaccaaatgtctgaacctgcggttcctctcgtactgagcaggattaccatggcaacaacacatcatcagtagggtaaaactaacctgtctcacgacggtc

SEQ ID NO: 49389 - DNA, 120 bp, Homo sapiens
  misc_feature: 793 for SV(W|O) and 28S
cttcgccccattggctcctcagccaagcacatacaccaaatgtctgaacctgcggttcctctcgtactgagcaggattaccatggcaacaacacatcatcagtagggtaaaactaacctg

SEQ ID NO: 49390 - DNA, 120 bp, Homo sapiens
  misc_feature: 792 for SV(W|O) and 28S
tgcttcacaatgataggaagagccgacatcgaaggatcaaaaagcgacgtcgctatgaacgcttggccgccacaagccagttatccctgtggtaacttttctgacacctcctgcttaaaa

SEQ ID NO: 49391 - DNA, 120 bp, Homo sapiens
  misc_feature: 792 for SV(W|O) and 28S
ctcagccaagcacatacaccaaatgtctgaacctgcggttcctctcgtactgagcaggattaccatggcaacaacacatcatcagtagggtaaaactaacctgtctcacgacggtctaaa

SEQ ID NO: 49392 - DNA, 120 bp, Homo sapiens
  misc_feature: 792 for SV(W|O) and 28S
ctgcttcacaatgataggaagagccgacatcgaaggatcaaaaagcgacgtcgctatgaacgcttggccgccacaagccagttatccctgtggtaacttttctgacacctcctgcttaaa

SEQ ID NO: 49393 - DNA, 120 bp, Homo sapiens
  misc_feature: 792 for SV(W|O) and 28S
tcctcagccaagcacatacaccaaatgtctgaacctgcggttcctctcgtactgagcaggattaccatggcaacaacacatcatcagtagggtaaaactaacctgtctcacgacggtcta

SEQ ID NO: 49394 - DNA, 120 bp, Homo sapiens
  misc_feature: 792 for SV(W|O) and 28S
tccgcctgggcgggattctgacttagaggcgttcagtcataatcccacagatggtagcttcgccccattggctcctcagccaagcacatacaccaaatgtctgaacctgcggttcctctc

SEQ ID NO: 49395 - DNA, 120 bp, Homo sapiens
  misc_feature: 792 for SV(W|O) and 28S
gcgaccgatcccggagaagccggcgggagccccggggagagttctcttttctttgtgaagggcagggcgccctggaatgggttcgccccgagagaggggcccgtgccttggaaagcgtcg

SEQ ID NO: 49396 - DNA, 120 bp, Homo sapiens
  misc_feature: 792 for SV(W|O) and 28S
ccgtatcgttccgcctgggcgggattctgacttagaggcgttcagtcataatcccacagatggtagcttcgccccattggctcctcagccaagcacatacaccaaatgtctgaacctgcg

SEQ ID NO: 49397 - DNA, 120 bp, Homo sapiens
  misc_feature: 792 for SV(W|O) and 28S
acaatccaacgcttggtgaattctgcttcacaatgataggaagagccgacatcgaaggatcaaaaagcgacgtcgctatgaacgcttggccgccacaagccagttatccctgtggtaact

SEQ ID NO: 49398 - DNA, 120 bp, Homo sapiens
  misc_feature: 791 for SV(W|O) and 28S
gccaagcacatacaccaaatgtctgaacctgcggttcctctcgtactgagcaggattaccatggcaacaacacatcatcagtagggtaaaactaacctgtctcacgacggtctaaaccca

SEQ ID NO: 49399 - DNA, 120 bp, Homo sapiens
  misc_feature: 791 for SV(W|O) and 28S
tggctcctcagccaagcacatacaccaaatgtctgaacctgcggttcctctcgtactgagcaggattaccatggcaacaacacatcatcagtagggtaaaactaacctgtctcacgacgg

SEQ ID NO: 49400 - DNA, 120 bp, Homo sapiens
  misc_feature: 791 for SV(W|O) and 28S
ggcggggacaggcgggggaccggctatccgaggccaaccgaggctccgcggcgctgccgtatcgttccgcctgggcgggattctgacttagaggcgttcagtcataatcccacagatggt

SEQ ID NO: 49401 - DNA, 120 bp, Homo sapiens
  misc_feature: 791 for SV(W|O) and 28S
caagcacatacaccaaatgtctgaacctgcggttcctctcgtactgagcaggattaccatggcaacaacacatcatcagtagggtaaaactaacctgtctcacgacggtctaaacccagc

SEQ ID NO: 49402 - DNA, 120 bp, Homo sapiens
  misc_feature: 791 for SV(W|O) and 28S
gctatccgaggccaaccgaggctccgcggcgctgccgtatcgttccgcctgggcgggattctgacttagaggcgttcagtcataatcccacagatggtagcttcgccccattggctcctc

SEQ ID NO: 49403 - DNA, 120 bp, Homo sapiens
  misc_feature: 791 for SV(W|O) and 28S
cacgacggtctaaacccagctcacgttccctattagtgggtgaacaatccaacgcttggtgaattctgcttcacaatgataggaagagccgacatcgaaggatcaaaaagcgacgtcgct

SEQ ID NO: 49404 - DNA, 120 bp, Homo sapiens
  misc_feature: 790 for SV(W|O) and 28S
acaatgataggaagagccgacatcgaaggatcaaaaagcgacgtcgctatgaacgcttggccgccacaagccagttatccctgtggtaacttttctgacacctcctgcttaaaacccaaa

SEQ ID NO: 49405 - DNA, 120 bp, Homo sapiens
  misc_feature: 790 for SV(W|O) and 28S
ttgacattcagagcactgggcagaaatcacatcgcgtcaacacccgccgcgggccttcgcgatgctttgttttaattaaacagtcggattcccctggtccgcaccagttctaagtcggct

SEQ ID NO: 49406 - DNA, 120 bp, Homo sapiens
  misc_feature: 790 for SV(W|O) and 28S
ttgaatttcttcactttgacattcagagcactgggcagaaatcacatcgcgtcaacacccgccgcgggccttcgcgatgctttgttttaattaaacagtcggattcccctggtccgcacc

SEQ ID NO: 49407 - DNA, 120 bp, Homo sapiens
  misc_feature: 790 for SV(W|O) and 28S
cccggattttcaagggccagcgagagctcaccggacgccgccggaaccgcgacgctttccaaggcacgggcccctctctcggggcgaacccattccagggcgccctgcccttcacaaaga

SEQ ID NO: 49408 - DNA, 120 bp, Homo sapiens
  misc_feature: 790 for SV(W|O) and 28S
tatcgttccgcctgggcgggattctgacttagaggcgttcagtcataatcccacagatggtagcttcgccccattggctcctcagccaagcacatacaccaaatgtctgaacctgcggtt

SEQ ID NO: 49409 - DNA, 120 bp, Homo sapiens
  misc_feature: 790 for SV(W|O) and 28S
taacgcgaccgatcccggagaagccggcgggagccccggggagagttctcttttctttgtgaagggcagggcgccctggaatgggttcgccccgagagaggggcccgtgccttggaaagc

SEQ ID NO: 49410 - DNA, 120 bp, Homo sapiens
  misc_feature: 790 for SV(W|O) and 28S
gtaacgcgaccgatcccggagaagccggcgggagccccggggagagttctcttttctttgtgaagggcagggcgccctggaatgggttcgccccgagagaggggcccgtgccttggaaag

SEQ ID NO: 49411 - DNA, 120 bp, Homo sapiens
  misc_feature: 790 for SV(W|O) and 28S
gcttcgccccattggctcctcagccaagcacatacaccaaatgtctgaacctgcggttcctctcgtactgagcaggattaccatggcaacaacacatcatcagtagggtaaaactaacct

SEQ ID NO: 49412 - DNA, 120 bp, Homo sapiens
  misc_feature: 790 for SV(W|O) and 28S
gcggggcctcacgatccttctgaccttttgggttttaagcaggaggtgtcagaaaagttaccacagggataactggcttgtggcggccaagcgttcatagcgacgtcgctttttgatcct

SEQ ID NO: 49413 - DNA, 120 bp, Homo sapiens
  misc_feature: 790 for SV(W|O) and 28S
ccaagcacatacaccaaatgtctgaacctgcggttcctctcgtactgagcaggattaccatggcaacaacacatcatcagtagggtaaaactaacctgtctcacgacggtctaaacccag

SEQ ID NO: 49414 - DNA, 120 bp, Homo sapiens
  misc_feature: 790 for SV(W|O) and 28S
agtttgactggggcggtacacctgtcaaacggtaacgcaggtgtcctaaggcgagctcagggaggacagaaacctcccgtggagcagaagggcaaaagctcgcttgatcttgattttcag

SEQ ID NO: 49415 - DNA, 120 bp, Homo sapiens
  misc_feature: 789 for SV(W|O) and 28S
cggattttcaagggccagcgagagctcaccggacgccgccggaaccgcgacgctttccaaggcacgggcccctctctcggggcgaacccattccagggcgccctgcccttcacaaagaaa

SEQ ID NO: 49416 - DNA, 120 bp, Homo sapiens
  misc_feature: 789 for SV(W|O) and 28S
cacaatgataggaagagccgacatcgaaggatcaaaaagcgacgtcgctatgaacgcttggccgccacaagccagttatccctgtggtaacttttctgacacctcctgcttaaaacccaa

SEQ ID NO: 49417 - DNA, 120 bp, Homo sapiens
  misc_feature: 789 for SV(W|O) and 28S
cgaggccaaccgaggctccgcggcgctgccgtatcgttccgcctgggcgggattctgacttagaggcgttcagtcataatcccacagatggtagcttcgccccattggctcctcagccaa

SEQ ID NO: 49418 - DNA, 120 bp, Homo sapiens
  misc_feature: 789 for SV(W|O) and 28S
cctcagccaagcacatacaccaaatgtctgaacctgcggttcctctcgtactgagcaggattaccatggcaacaacacatcatcagtagggtaaaactaacctgtctcacgacggtctaa

SEQ ID NO: 49419 - DNA, 120 bp, Homo sapiens
  misc_feature: 789 for SV(W|O) and 28S
tcacaatgataggaagagccgacatcgaaggatcaaaaagcgacgtcgctatgaacgcttggccgccacaagccagttatccctgtggtaacttttctgacacctcctgcttaaaaccca

SEQ ID NO: 49420 - DNA, 120 bp, Homo sapiens
  misc_feature: 789 for SV(W|O) and 28S
tgccgtatcgttccgcctgggcgggattctgacttagaggcgttcagtcataatcccacagatggtagcttcgccccattggctcctcagccaagcacatacaccaaatgtctgaacctg

SEQ ID NO: 49421 - DNA, 120 bp, Homo sapiens
  misc_feature: 789 for SV(W|O) and 28S
gggcctcacgatccttctgaccttttgggttttaagcaggaggtgtcagaaaagttaccacagggataactggcttgtggcggccaagcgttcatagcgacgtcgctttttgatccttcg

SEQ ID NO: 49422 - DNA, 120 bp, Homo sapiens
  misc_feature: 789 for SV(W|O) and 28S
gatttctgcccagtgctctgaatgtcaaagtgaagaaattcaatgaagcgcgggtaaacggcgggagtaactatgactctcttaaggtagccaaatgcctcgtcatctaattagtgacgc

SEQ ID NO: 49423 - DNA, 120 bp, Homo sapiens
  misc_feature: 789 for SV(W|O) and 28S
gcctccgttgccctcggccgatcgaaagggagtcgggttcagatccccgaatccggagtggcggagatgggcgccgcgaggcgtccagtgcggtaacgcgaccgatcccggagaagccgg

SEQ ID NO: 49424 - DNA, 120 bp, Homo sapiens
  misc_feature: 789 for SV(W|O) and 28S
cgtatcgttccgcctgggcgggattctgacttagaggcgttcagtcataatcccacagatggtagcttcgccccattggctcctcagccaagcacatacaccaaatgtctgaacctgcgg

SEQ ID NO: 49425 - DNA, 120 bp, Homo sapiens
  misc_feature: 789 for SV(W|O) and 28S
cagcagttgaacatgggtcagtcggtcctgagagatgggcgagcgccgttccgaagggacgggcgatggcctccgttgccctcggccgatcgaaagggagtcgggttcagatccccgaat

SEQ ID NO: 49426 - DNA, 120 bp, Homo sapiens
  misc_feature: 789 for SV(W|O) and 28S
aaagcggggcctcacgatccttctgaccttttgggttttaagcaggaggtgtcagaaaagttaccacagggataactggcttgtggcggccaagcgttcatagcgacgtcgctttttgat

SEQ ID NO: 49427 - DNA, 120 bp, Homo sapiens
  misc_feature: 788 for SV(W|O) and 28S
ttcattgaatttcttcactttgacattcagagcactgggcagaaatcacatcgcgtcaacacccgccgcgggccttcgcgatgctttgttttaattaaacagtcggattcccctggtccg

SEQ ID NO: 49428 - DNA, 120 bp, Homo sapiens
  misc_feature: 788 for SV(W|O) and 28S
gcctgggcgggattctgacttagaggcgttcagtcataatcccacagatggtagcttcgccccattggctcctcagccaagcacatacaccaaatgtctgaacctgcggttcctctcgta

SEQ ID NO: 49429 - DNA, 120 bp, Homo sapiens
  misc_feature: 788 for SV(W|O) and 28S
agccaagcacatacaccaaatgtctgaacctgcggttcctctcgtactgagcaggattaccatggcaacaacacatcatcagtagggtaaaactaacctgtctcacgacggtctaaaccc

SEQ ID NO: 49430 - DNA, 120 bp, Homo sapiens
  misc_feature: 788 for SV(W|O) and 28S
acccagctcacgttccctattagtgggtgaacaatccaacgcttggtgaattctgcttcacaatgataggaagagccgacatcgaaggatcaaaaagcgacgtcgctatgaacgcttggc

SEQ ID NO: 49431 - DNA, 120 bp, Homo sapiens
  misc_feature: 788 for SV(W|O) and 28S
gcactgggcagaaatcacatcgcgtcaacacccgccgcgggccttcgcgatgctttgttttaattaaacagtcggattcccctggtccgcaccagttctaagtcggctgctaggcgccgg

SEQ ID NO: 49432 - DNA, 120 bp, Homo sapiens
  misc_feature: 788 for SV(W|O) and 28S
ctttgacattcagagcactgggcagaaatcacatcgcgtcaacacccgccgcgggccttcgcgatgctttgttttaattaaacagtcggattcccctggtccgcaccagttctaagtcgg

SEQ ID NO: 49433 - DNA, 120 bp, Homo sapiens
  misc_feature: 788 for SV(W|O) and 28S
ctcctcagccaagcacatacaccaaatgtctgaacctgcggttcctctcgtactgagcaggattaccatggcaacaacacatcatcagtagggtaaaactaacctgtctcacgacggtct

SEQ ID NO: 49434 - DNA, 120 bp, Homo sapiens
  misc_feature: 788 for SV(W|O) and 28S
ccagctcacgttccctattagtgggtgaacaatccaacgcttggtgaattctgcttcacaatgataggaagagccgacatcgaaggatcaaaaagcgacgtcgctatgaacgcttggccg

SEQ ID NO: 49435 - DNA, 120 bp, Homo sapiens
  misc_feature: 787 for SV(W|O) and 28S
tgaacaatccaacgcttggtgaattctgcttcacaatgataggaagagccgacatcgaaggatcaaaaagcgacgtcgctatgaacgcttggccgccacaagccagttatccctgtggta

SEQ ID NO: 49436 - DNA, 120 bp, Homo sapiens
  misc_feature: 787 for SV(W|O) and 28S
tccgaggccaaccgaggctccgcggcgctgccgtatcgttccgcctgggcgggattctgacttagaggcgttcagtcataatcccacagatggtagcttcgccccattggctcctcagcc

SEQ ID NO: 49437 - DNA, 120 bp, Homo sapiens
  misc_feature: 787 for SV(W|O) and 28S
tcagacatttggtgtatgtgcttggctgaggagccaatggggcgaagctaccatctgtgggattatgactgaacgcctctaagtcagaatcccgcccaggcggaacgatacggcagcgcc

SEQ ID NO: 49438 - DNA, 120 bp, Homo sapiens
  misc_feature: 787 for SV(W|O) and 28S
gtctcacgacggtctaaacccagctcacgttccctattagtgggtgaacaatccaacgcttggtgaattctgcttcacaatgataggaagagccgacatcgaaggatcaaaaagcgacgt

SEQ ID NO: 49439 - DNA, 120 bp, Homo sapiens
  misc_feature: 787 for SV(W|O) and 28S
agcttcgccccattggctcctcagccaagcacatacaccaaatgtctgaacctgcggttcctctcgtactgagcaggattaccatggcaacaacacatcatcagtagggtaaaactaacc

SEQ ID NO: 49440 - DNA, 120 bp, Homo sapiens
  misc_feature: 787 for SV(W|O) and 28S
cccagctcacgttccctattagtgggtgaacaatccaacgcttggtgaattctgcttcacaatgataggaagagccgacatcgaaggatcaaaaagcgacgtcgctatgaacgcttggcc

SEQ ID NO: 49441 - DNA, 120 bp, Homo sapiens
  misc_feature: 787 for SV(W|O) and 28S
cttggctgaggagccaatggggcgaagctaccatctgtgggattatgactgaacgcctctaagtcagaatcccgcccaggcggaacgatacggcagcgccgcggagcctcggttggcctc

SEQ ID NO: 49442 - DNA, 120 bp, Homo sapiens
  misc_feature: 786 for SV(W|O) and 28S
cccccggattttcaagggccagcgagagctcaccggacgccgccggaaccgcgacgctttccaaggcacgggcccctctctcggggcgaacccattccagggcgccctgcccttcacaaa

SEQ ID NO: 49443 - DNA, 120 bp, Homo sapiens
  misc_feature: 786 for SV(W|O) and 28S
tttgacattcagagcactgggcagaaatcacatcgcgtcaacacccgccgcgggccttcgcgatgctttgttttaattaaacagtcggattcccctggtccgcaccagttctaagtcggc

SEQ ID NO: 49444 - DNA, 120 bp, Homo sapiens
  misc_feature: 786 for SV(W|O) and 28S
ttggctcctcagccaagcacatacaccaaatgtctgaacctgcggttcctctcgtactgagcaggattaccatggcaacaacacatcatcagtagggtaaaactaacctgtctcacgacg

SEQ ID NO: 49445 - DNA, 120 bp, Homo sapiens
  misc_feature: 786 for SV(W|O) and 28S
ttcacaatgataggaagagccgacatcgaaggatcaaaaagcgacgtcgctatgaacgcttggccgccacaagccagttatccctgtggtaacttttctgacacctcctgcttaaaaccc

SEQ ID NO: 49446 - DNA, 120 bp, Homo sapiens
  misc_feature: 786 for SV(W|O) and 28S
ggctcccgccggcttctccgggatcggtcgcgttaccgcactggacgcctcgcggcgcccatctccgccactccggattcggggatctgaacccgactccctttcgatcggccgagggca

SEQ ID NO: 49447 - DNA, 120 bp, Homo sapiens
  misc_feature: 786 for SV(W|O) and 28S
gttccgcctgggcgggattctgacttagaggcgttcagtcataatcccacagatggtagcttcgccccattggctcctcagccaagcacatacaccaaatgtctgaacctgcggttcctc

SEQ ID NO: 49448 - DNA, 120 bp, Homo sapiens
  misc_feature: 786 for SV(W|O) and 28S
ggggacaggcgggggaccggctatccgaggccaaccgaggctccgcggcgctgccgtatcgttccgcctgggcgggattctgacttagaggcgttcagtcataatcccacagatggtagc

SEQ ID NO: 49449 - DNA, 120 bp, Homo sapiens
  misc_feature: 786 for SV(W|O) and 28S
ccttctgaccttttgggttttaagcaggaggtgtcagaaaagttaccacagggataactggcttgtggcggccaagcgttcatagcgacgtcgctttttgatccttcgatgtcggctctt

SEQ ID NO: 49450 - DNA, 120 bp, Homo sapiens
  misc_feature: 785 for SV(W|O) and 28S
ggattttcaagggccagcgagagctcaccggacgccgccggaaccgcgacgctttccaaggcacgggcccctctctcggggcgaacccattccagggcgccctgcccttcacaaagaaaa

SEQ ID NO: 49451 - DNA, 120 bp, Homo sapiens
  misc_feature: 785 for SV(W|O) and 28S
gcggggacaggcgggggaccggctatccgaggccaaccgaggctccgcggcgctgccgtatcgttccgcctgggcgggattctgacttagaggcgttcagtcataatcccacagatggta

SEQ ID NO: 49452 - DNA, 120 bp, Homo sapiens
  misc_feature: 785 for SV(W|O) and 28S
gtttgactggggcggtacacctgtcaaacggtaacgcaggtgtcctaaggcgagctcagggaggacagaaacctcccgtggagcagaagggcaaaagctcgcttgatcttgattttcagt

SEQ ID NO: 49453 - DNA, 120 bp, Homo sapiens
  misc_feature: 785 for SV(W|O) and 28S
gttcagacatttggtgtatgtgcttggctgaggagccaatggggcgaagctaccatctgtgggattatgactgaacgcctctaagtcagaatcccgcccaggcggaacgatacggcagcg

SEQ ID NO: 49454 - DNA, 120 bp, Homo sapiens
  misc_feature: 785 for SV(W|O) and 28S
gggctcccgccggcttctccgggatcggtcgcgttaccgcactggacgcctcgcggcgcccatctccgccactccggattcggggatctgaacccgactccctttcgatcggccgagggc

SEQ ID NO: 49455 - DNA, 120 bp, Homo sapiens
  misc_feature: 785 for SV(W|O) and 28S
cacaagccagttatccctgtggtaacttttctgacacctcctgcttaaaacccaaaaggtcagaaggatcgtgaggccccgctttcacggtctgtattcgtactgaaaatcaagatcaag

SEQ ID NO: 49456 - DNA, 120 bp, Homo sapiens
  misc_feature: 785 for SV(W|O) and 28S
ctcacgatccttctgaccttttgggttttaagcaggaggtgtcagaaaagttaccacagggataactggcttgtggcggccaagcgttcatagcgacgtcgctttttgatccttcgatgt

SEQ ID NO: 49457 - DNA, 120 bp, Homo sapiens
  misc_feature: 785 for SV(W|O) and 28S
aacccagctcacgttccctattagtgggtgaacaatccaacgcttggtgaattctgcttcacaatgataggaagagccgacatcgaaggatcaaaaagcgacgtcgctatgaacgcttgg

SEQ ID NO: 49458 - DNA, 120 bp, Homo sapiens
  misc_feature: 785 for SV(W|O) and 28S
cagtgcggtaacgcgaccgatcccggagaagccggcgggagccccggggagagttctcttttctttgtgaagggcagggcgccctggaatgggttcgccccgagagaggggcccgtgcct

SEQ ID NO: 49459 - DNA, 120 bp, Homo sapiens
  misc_feature: 784 for SV(W|O) and 28S
tttaccctactgatgatgtgttgttgccatggtaatcctgctcagtacgagaggaaccgcaggttcagacatttggtgtatgtgcttggctgaggagccaatggggcgaagctaccatct

SEQ ID NO: 49460 - DNA, 120 bp, Homo sapiens
  misc_feature: 784 for SV(W|O) and 28S
tttacccgcgcttcattgaatttcttcactttgacattcagagcactgggcagaaatcacatcgcgtcaacacccgccgcgggccttcgcgatgctttgttttaattaaacagtcggatt

SEQ ID NO: 49461 - DNA, 120 bp, Homo sapiens
  misc_feature: 784 for SV(W|O) and 28S
gaacaatccaacgcttggtgaattctgcttcacaatgataggaagagccgacatcgaaggatcaaaaagcgacgtcgctatgaacgcttggccgccacaagccagttatccctgtggtaa

SEQ ID NO: 49462 - DNA, 120 bp, Homo sapiens
  misc_feature: 784 for SV(W|O) and 28S
agcacatacaccaaatgtctgaacctgcggttcctctcgtactgagcaggattaccatggcaacaacacatcatcagtagggtaaaactaacctgtctcacgacggtctaaacccagctc

SEQ ID NO: 49463 - DNA, 120 bp, Homo sapiens
  misc_feature: 784 for SV(W|O) and 28S
aggtggggagtttgactggggcggtacacctgtcaaacggtaacgcaggtgtcctaaggcgagctcagggaggacagaaacctcccgtggagcagaagggcaaaagctcgcttgatcttg

SEQ ID NO: 49464 - DNA, 120 bp, Homo sapiens
  misc_feature: 783 for SV(W|O) and 28S
tttcaagggccagcgagagctcaccggacgccgccggaaccgcgacgctttccaaggcacgggcccctctctcggggcgaacccattccagggcgccctgcccttcacaaagaaaagaga

SEQ ID NO: 49465 - DNA, 120 bp, Homo sapiens
  misc_feature: 783 for SV(W|O) and 28S
tcccgccggcttctccgggatcggtcgcgttaccgcactggacgcctcgcggcgcccatctccgccactccggattcggggatctgaacccgactccctttcgatcggccgagggcaacg

SEQ ID NO: 49466 - DNA, 120 bp, Homo sapiens
  misc_feature: 783 for SV(W|O) and 28S
tatccgaggccaaccgaggctccgcggcgctgccgtatcgttccgcctgggcgggattctgacttagaggcgttcagtcataatcccacagatggtagcttcgccccattggctcctcag

SEQ ID NO: 49467 - DNA, 120 bp, Homo sapiens
  misc_feature: 783 for SV(W|O) and 28S
gtggggagtttgactggggcggtacacctgtcaaacggtaacgcaggtgtcctaaggcgagctcagggaggacagaaacctcccgtggagcagaagggcaaaagctcgcttgatcttgat

SEQ ID NO: 49468 - DNA, 120 bp, Homo sapiens
  misc_feature: 783 for SV(W|O) and 28S
cagccaagcacatacaccaaatgtctgaacctgcggttcctctcgtactgagcaggattaccatggcaacaacacatcatcagtagggtaaaactaacctgtctcacgacggtctaaacc

SEQ ID NO: 49469 - DNA, 120 bp, Homo sapiens
  misc_feature: 783 for SV(W|O) and 28S
ggtgaacaatccaacgcttggtgaattctgcttcacaatgataggaagagccgacatcgaaggatcaaaaagcgacgtcgctatgaacgcttggccgccacaagccagttatccctgtgg

SEQ ID NO: 49470 - DNA, 120 bp, Homo sapiens
  misc_feature: 783 for SV(W|O) and 28S
atccgaggccaaccgaggctccgcggcgctgccgtatcgttccgcctgggcgggattctgacttagaggcgttcagtcataatcccacagatggtagcttcgccccattggctcctcagc

SEQ ID NO: 49471 - DNA, 120 bp, Homo sapiens
  misc_feature: 783 for SV(W|O) and 28S
cagctcacgttccctattagtgggtgaacaatccaacgcttggtgaattctgcttcacaatgataggaagagccgacatcgaaggatcaaaaagcgacgtcgctatgaacgcttggccgc

SEQ ID NO: 49472 - DNA, 120 bp, Homo sapiens
  misc_feature: 783 for SV(W|O) and 28S
gattttcaagggccagcgagagctcaccggacgccgccggaaccgcgacgctttccaaggcacgggcccctctctcggggcgaacccattccagggcgccctgcccttcacaaagaaaag

SEQ ID NO: 49473 - DNA, 120 bp, Homo sapiens
  misc_feature: 783 for SV(W|O) and 28S
cgcgaccgatcccggagaagccggcgggagccccggggagagttctcttttctttgtgaagggcagggcgccctggaatgggttcgccccgagagaggggcccgtgccttggaaagcgtc

SEQ ID NO: 49474 - DNA, 120 bp, Homo sapiens
  misc_feature: 783 for SV(W|O) and 28S
cggtcgcgttaccgcactggacgcctcgcggcgcccatctccgccactccggattcggggatctgaacccgactccctttcgatcggccgagggcaacggaggccatcgcccgtcccttc

SEQ ID NO: 49475 - DNA, 120 bp, Homo sapiens
  misc_feature: 783 for SV(W|O) and 28S
aggttcagacatttggtgtatgtgcttggctgaggagccaatggggcgaagctaccatctgtgggattatgactgaacgcctctaagtcagaatcccgcccaggcggaacgatacggcag

SEQ ID NO: 49476 - DNA, 120 bp, Homo sapiens
  misc_feature: 783 for SV(W|O) and 28S
cggggacaggcgggggaccggctatccgaggccaaccgaggctccgcggcgctgccgtatcgttccgcctgggcgggattctgacttagaggcgttcagtcataatcccacagatggtag

SEQ ID NO: 49477 - DNA, 120 bp, Homo sapiens
  misc_feature: 783 for SV(W|O) and 28S
cgcctgggcgggattctgacttagaggcgttcagtcataatcccacagatggtagcttcgccccattggctcctcagccaagcacatacaccaaatgtctgaacctgcggttcctctcgt

SEQ ID NO: 49478 - DNA, 120 bp, Homo sapiens
  misc_feature: 783 for SV(W|O) and 28S
actttgacattcagagcactgggcagaaatcacatcgcgtcaacacccgccgcgggccttcgcgatgctttgttttaattaaacagtcggattcccctggtccgcaccagttctaagtcg

SEQ ID NO: 49479 - DNA, 120 bp, Homo sapiens
  misc_feature: 783 for SV(W|O) and 28S
agtgcggtaacgcgaccgatcccggagaagccggcgggagccccggggagagttctcttttctttgtgaagggcagggcgccctggaatgggttcgccccgagagaggggcccgtgcctt

SEQ ID NO: 49480 - DNA, 120 bp, Homo sapiens
  misc_feature: 782 for SV(W|O) and 28S
ccgaggccaaccgaggctccgcggcgctgccgtatcgttccgcctgggcgggattctgacttagaggcgttcagtcataatcccacagatggtagcttcgccccattggctcctcagcca

SEQ ID NO: 49481 - DNA, 120 bp, Homo sapiens
  misc_feature: 782 for SV(W|O) and 28S
tagcttcgccccattggctcctcagccaagcacatacaccaaatgtctgaacctgcggttcctctcgtactgagcaggattaccatggcaacaacacatcatcagtagggtaaaactaac

SEQ ID NO: 49482 - DNA, 120 bp, Homo sapiens
  misc_feature: 782 for SV(W|O) and 28S
gtttacccgcgcttcattgaatttcttcactttgacattcagagcactgggcagaaatcacatcgcgtcaacacccgccgcgggccttcgcgatgctttgttttaattaaacagtcggat

SEQ ID NO: 49483 - DNA, 120 bp, Homo sapiens
  misc_feature: 782 for SV(W|O) and 28S
gtgaacaatccaacgcttggtgaattctgcttcacaatgataggaagagccgacatcgaaggatcaaaaagcgacgtcgctatgaacgcttggccgccacaagccagttatccctgtggt

SEQ ID NO: 49484 - DNA, 120 bp, Homo sapiens
  misc_feature: 782 for SV(W|O) and 28S
cctgggcgggattctgacttagaggcgttcagtcataatcccacagatggtagcttcgccccattggctcctcagccaagcacatacaccaaatgtctgaacctgcggttcctctcgtac

SEQ ID NO: 49485 - DNA, 120 bp, Homo sapiens
  misc_feature: 782 for SV(W|O) and 28S
gggagtttgactggggcggtacacctgtcaaacggtaacgcaggtgtcctaaggcgagctcagggaggacagaaacctcccgtggagcagaagggcaaaagctcgcttgatcttgatttt

SEQ ID NO: 49486 - DNA, 120 bp, Homo sapiens
  misc_feature: 782 for SV(W|O) and 28S
gacattcagagcactgggcagaaatcacatcgcgtcaacacccgccgcgggccttcgcgatgctttgttttaattaaacagtcggattcccctggtccgcaccagttctaagtcggctgc

SEQ ID NO: 49487 - DNA, 120 bp, Homo sapiens
  misc_feature: 782 for SV(W|O) and 28S
acgccgccggaaccgcgacgctttccaaggcacgggcccctctctcggggcgaacccattccagggcgccctgcccttcacaaagaaaagagaactctccccggggctcccgccggcttc

SEQ ID NO: 49488 - DNA, 120 bp, Homo sapiens
  misc_feature: 782 for SV(W|O) and 28S
aaacccagctcacgttccctattagtgggtgaacaatccaacgcttggtgaattctgcttcacaatgataggaagagccgacatcgaaggatcaaaaagcgacgtcgctatgaacgcttg

SEQ ID NO: 49489 - DNA, 120 bp, Homo sapiens
  misc_feature: 782 for SV(W|O) and 28S
aagcaggaggtgtcagaaaagttaccacagggataactggcttgtggcggccaagcgttcatagcgacgtcgctttttgatccttcgatgtcggctcttcctatcattgtgaagcagaat

SEQ ID NO: 49490 - DNA, 120 bp, Homo sapiens
  misc_feature: 781 for SV(W|O) and 28S
ttttcaagggccagcgagagctcaccggacgccgccggaaccgcgacgctttccaaggcacgggcccctctctcggggcgaacccattccagggcgccctgcccttcacaaagaaaagag

SEQ ID NO: 49491 - DNA, 120 bp, Homo sapiens
  misc_feature: 781 for SV(W|O) and 28S
tctcacgacggtctaaacccagctcacgttccctattagtgggtgaacaatccaacgcttggtgaattctgcttcacaatgataggaagagccgacatcgaaggatcaaaaagcgacgtc

SEQ ID NO: 49492 - DNA, 120 bp, Homo sapiens
  misc_feature: 781 for SV(W|O) and 28S
aggaggtgtcagaaaagttaccacagggataactggcttgtggcggccaagcgttcatagcgacgtcgctttttgatccttcgatgtcggctcttcctatcattgtgaagcagaattcac

SEQ ID NO: 49493 - DNA, 120 bp, Homo sapiens
  misc_feature: 781 for SV(W|O) and 28S
cttcacaatgataggaagagccgacatcgaaggatcaaaaagcgacgtcgctatgaacgcttggccgccacaagccagttatccctgtggtaacttttctgacacctcctgcttaaaacc

SEQ ID NO: 49494 - DNA, 120 bp, Homo sapiens
  misc_feature: 781 for SV(W|O) and 28S
ggttcagacatttggtgtatgtgcttggctgaggagccaatggggcgaagctaccatctgtgggattatgactgaacgcctctaagtcagaatcccgcccaggcggaacgatacggcagc

SEQ ID NO: 49495 - DNA, 120 bp, Homo sapiens
  misc_feature: 781 for SV(W|O) and 28S
gcctcacgatccttctgaccttttgggttttaagcaggaggtgtcagaaaagttaccacagggataactggcttgtggcggccaagcgttcatagcgacgtcgctttttgatccttcgat

SEQ ID NO: 49496 - DNA, 120 bp, Homo sapiens
  misc_feature: 781 for SV(W|O) and 28S
aagcggggcctcacgatccttctgaccttttgggttttaagcaggaggtgtcagaaaagttaccacagggataactggcttgtggcggccaagcgttcatagcgacgtcgctttttgatc

SEQ ID NO: 49497 - DNA, 120 bp, Homo sapiens
  misc_feature: 781 for SV(W|O) and 28S
atccttctgaccttttgggttttaagcaggaggtgtcagaaaagttaccacagggataactggcttgtggcggccaagcgttcatagcgacgtcgctttttgatccttcgatgtcggctc

SEQ ID NO: 49498 - DNA, 120 bp, Homo sapiens
  misc_feature: 781 for SV(W|O) and 28S
cagacatttggtgtatgtgcttggctgaggagccaatggggcgaagctaccatctgtgggattatgactgaacgcctctaagtcagaatcccgcccaggcggaacgatacggcagcgccg

SEQ ID NO: 49499 - DNA, 120 bp, Homo sapiens
  misc_feature: 781 for SV(W|O) and 28S
ccggacgccgccggaaccgcgacgctttccaaggcacgggcccctctctcggggcgaacccattccagggcgccctgcccttcacaaagaaaagagaactctccccggggctcccgccgg

SEQ ID NO: 49500 - DNA, 120 bp, Homo sapiens
  misc_feature: 780 for SV(W|O) and 28S
ccggattttcaagggccagcgagagctcaccggacgccgccggaaccgcgacgctttccaaggcacgggcccctctctcggggcgaacccattccagggcgccctgcccttcacaaagaa

SEQ ID NO: 49501 - DNA, 120 bp, Homo sapiens
  misc_feature: 780 for SV(W|O) and 28S
ggtggggagtttgactggggcggtacacctgtcaaacggtaacgcaggtgtcctaaggcgagctcagggaggacagaaacctcccgtggagcagaagggcaaaagctcgcttgatcttga

SEQ ID NO: 49502 - DNA, 120 bp, Homo sapiens
  misc_feature: 780 for SV(W|O) and 28S
ggacgccgccggaaccgcgacgctttccaaggcacgggcccctctctcggggcgaacccattccagggcgccctgcccttcacaaagaaaagagaactctccccggggctcccgccggct

SEQ ID NO: 49503 - DNA, 120 bp, Homo sapiens
  misc_feature: 780 for SV(W|O) and 28S
ctctcgactgccggcgacggccgggtatgggcccgacgctccagcgccatccattttcagggctagttgattcggcaggtgagttgttacacactccttagcggattccgacttccatgg

SEQ ID NO: 49504 - DNA, 120 bp, Homo sapiens
  misc_feature: 780 for SV(W|O) and 28S
atcatcagtagggtaaaactaacctgtctcacgacggtctaaacccagctcacgttccctattagtgggtgaacaatccaacgcttggtgaattctgcttcacaatgataggaagagccg

SEQ ID NO: 49505 - DNA, 120 bp, Homo sapiens
  misc_feature: 780 for SV(W|O) and 28S
accctactgatgatgtgttgttgccatggtaatcctgctcagtacgagaggaaccgcaggttcagacatttggtgtatgtgcttggctgaggagccaatggggcgaagctaccatctgtg

SEQ ID NO: 49506 - DNA, 120 bp, Homo sapiens
  misc_feature: 780 for SV(W|O) and 28S
agcaggaggtgtcagaaaagttaccacagggataactggcttgtggcggccaagcgttcatagcgacgtcgctttttgatccttcgatgtcggctcttcctatcattgtgaagcagaatt

SEQ ID NO: 49507 - DNA, 120 bp, Homo sapiens
  misc_feature: 779 for SV(W|O) and 28S
tggggagtttgactggggcggtacacctgtcaaacggtaacgcaggtgtcctaaggcgagctcagggaggacagaaacctcccgtggagcagaagggcaaaagctcgcttgatcttgatt

SEQ ID NO: 49508 - DNA, 120 bp, Homo sapiens
  misc_feature: 779 for SV(W|O) and 28S
tctgaccttttgggttttaagcaggaggtgtcagaaaagttaccacagggataactggcttgtggcggccaagcgttcatagcgacgtcgctttttgatccttcgatgtcggctcttcct

SEQ ID NO: 49509 - DNA, 120 bp, Homo sapiens
  misc_feature: 779 for SV(W|O) and 28S
ggcctcacgatccttctgaccttttgggttttaagcaggaggtgtcagaaaagttaccacagggataactggcttgtggcggccaagcgttcatagcgacgtcgctttttgatccttcga

SEQ ID NO: 49510 - DNA, 120 bp, Homo sapiens
  misc_feature: 779 for SV(W|O) and 28S
tccttctgaccttttgggttttaagcaggaggtgtcagaaaagttaccacagggataactggcttgtggcggccaagcgttcatagcgacgtcgctttttgatccttcgatgtcggctct

SEQ ID NO: 49511 - DNA, 120 bp, Homo sapiens
  misc_feature: 779 for SV(W|O) and 28S
ctcccgccggcttctccgggatcggtcgcgttaccgcactggacgcctcgcggcgcccatctccgccactccggattcggggatctgaacccgactccctttcgatcggccgagggcaac

SEQ ID NO: 49512 - DNA, 120 bp, Homo sapiens
  misc_feature: 779 for SV(W|O) and 28S
gtatcgttccgcctgggcgggattctgacttagaggcgttcagtcataatcccacagatggtagcttcgccccattggctcctcagccaagcacatacaccaaatgtctgaacctgcggt

SEQ ID NO: 49513 - DNA, 120 bp, Homo sapiens
  misc_feature: 779 for SV(W|O) and 28S
gggatcggtcgcgttaccgcactggacgcctcgcggcgcccatctccgccactccggattcggggatctgaacccgactccctttcgatcggccgagggcaacggaggccatcgcccgtc

SEQ ID NO: 49514 - DNA, 120 bp, Homo sapiens
  misc_feature: 779 for SV(W|O) and 28S
ggatcggtcgcgttaccgcactggacgcctcgcggcgcccatctccgccactccggattcggggatctgaacccgactccctttcgatcggccgagggcaacggaggccatcgcccgtcc

SEQ ID NO: 49515 - DNA, 120 bp, Homo sapiens
  misc_feature: 779 for SV(W|O) and 28S
accggacgccgccggaaccgcgacgctttccaaggcacgggcccctctctcggggcgaacccattccagggcgccctgcccttcacaaagaaaagagaactctccccggggctcccgccg

SEQ ID NO: 49516 - DNA, 120 bp, Homo sapiens
  misc_feature: 779 for SV(W|O) and 28S
caggtggggagtttgactggggcggtacacctgtcaaacggtaacgcaggtgtcctaaggcgagctcagggaggacagaaacctcccgtggagcagaagggcaaaagctcgcttgatctt

SEQ ID NO: 49517 - DNA, 120 bp, Homo sapiens
  misc_feature: 779 for SV(W|O) and 28S
atcggtcgcgttaccgcactggacgcctcgcggcgcccatctccgccactccggattcggggatctgaacccgactccctttcgatcggccgagggcaacggaggccatcgcccgtccct

SEQ ID NO: 49518 - DNA, 120 bp, Homo sapiens
  misc_feature: 778 for SV(W|O) and 28S
ttttaccctactgatgatgtgttgttgccatggtaatcctgctcagtacgagaggaaccgcaggttcagacatttggtgtatgtgcttggctgaggagccaatggggcgaagctaccatc

SEQ ID NO: 49519 - DNA, 120 bp, Homo sapiens
  misc_feature: 778 for SV(W|O) and 28S
ttaccctactgatgatgtgttgttgccatggtaatcctgctcagtacgagaggaaccgcaggttcagacatttggtgtatgtgcttggctgaggagccaatggggcgaagctaccatctg

SEQ ID NO: 49520 - DNA, 120 bp, Homo sapiens
  misc_feature: 778 for SV(W|O) and 28S
gagtttgactggggcggtacacctgtcaaacggtaacgcaggtgtcctaaggcgagctcagggaggacagaaacctcccgtggagcagaagggcaaaagctcgcttgatcttgattttca

SEQ ID NO: 49521 - DNA, 120 bp, Homo sapiens
  misc_feature: 778 for SV(W|O) and 28S
tcggtcgcgttaccgcactggacgcctcgcggcgcccatctccgccactccggattcggggatctgaacccgactccctttcgatcggccgagggcaacggaggccatcgcccgtccctt

SEQ ID NO: 49522 - DNA, 120 bp, Homo sapiens
  misc_feature: 778 for SV(W|O) and 28S
tcagccaagcacatacaccaaatgtctgaacctgcggttcctctcgtactgagcaggattaccatggcaacaacacatcatcagtagggtaaaactaacctgtctcacgacggtctaaac

SEQ ID NO: 49523 - DNA, 120 bp, Homo sapiens
  misc_feature: 778 for SV(W|O) and 28S
cacatacaccaaatgtctgaacctgcggttcctctcgtactgagcaggattaccatggcaacaacacatcatcagtagggtaaaactaacctgtctcacgacggtctaaacccagctcac

SEQ ID NO: 49524 - DNA, 120 bp, Homo sapiens
  misc_feature: 778 for SV(W|O) and 28S
ggggaccggctatccgaggccaaccgaggctccgcggcgctgccgtatcgttccgcctgggcgggattctgacttagaggcgttcagtcataatcccacagatggtagcttcgccccatt

SEQ ID NO: 49525 - DNA, 120 bp, Homo sapiens
  misc_feature: 778 for SV(W|O) and 28S
ggctatccgaggccaaccgaggctccgcggcgctgccgtatcgttccgcctgggcgggattctgacttagaggcgttcagtcataatcccacagatggtagcttcgccccattggctcct

SEQ ID NO: 49526 - DNA, 120 bp, Homo sapiens
  misc_feature: 778 for SV(W|O) and 28S
gacgccgccggaaccgcgacgctttccaaggcacgggcccctctctcggggcgaacccattccagggcgccctgcccttcacaaagaaaagagaactctccccggggctcccgccggctt

SEQ ID NO: 49527 - DNA, 120 bp, Homo sapiens
  misc_feature: 778 for SV(W|O) and 28S
cggcggggacaggcgggggaccggctatccgaggccaaccgaggctccgcggcgctgccgtatcgttccgcctgggcgggattctgacttagaggcgttcagtcataatcccacagatgg

SEQ ID NO: 49528 - DNA, 120 bp, Homo sapiens
  misc_feature: 778 for SV(W|O) and 28S
ccgcctgggcgggattctgacttagaggcgttcagtcataatcccacagatggtagcttcgccccattggctcctcagccaagcacatacaccaaatgtctgaacctgcggttcctctcg

SEQ ID NO: 49529 - DNA, 120 bp, Homo sapiens
  misc_feature: 778 for SV(W|O) and 28S
cacgatccttctgaccttttgggttttaagcaggaggtgtcagaaaagttaccacagggataactggcttgtggcggccaagcgttcatagcgacgtcgctttttgatccttcgatgtcg

SEQ ID NO: 49530 - DNA, 120 bp, Homo sapiens
  misc_feature: 778 for SV(W|O) and 28S
acagtgccaggtggggagtttgactggggcggtacacctgtcaaacggtaacgcaggtgtcctaaggcgagctcagggaggacagaaacctcccgtggagcagaagggcaaaagctcgct

SEQ ID NO: 49531 - DNA, 120 bp, Homo sapiens
  misc_feature: 778 for SV(W|O) and 28S
acattcagagcactgggcagaaatcacatcgcgtcaacacccgccgcgggccttcgcgatgctttgttttaattaaacagtcggattcccctggtccgcaccagttctaagtcggctgct

SEQ ID NO: 49532 - DNA, 120 bp, Homo sapiens
  misc_feature: 777 for SV(W|O) and 28S
tcatcagtagggtaaaactaacctgtctcacgacggtctaaacccagctcacgttccctattagtgggtgaacaatccaacgcttggtgaattctgcttcacaatgataggaagagccga

SEQ ID NO: 49533 - DNA, 120 bp, Homo sapiens
  misc_feature: 777 for SV(W|O) and 28S
gcttcacaatgataggaagagccgacatcgaaggatcaaaaagcgacgtcgctatgaacgcttggccgccacaagccagttatccctgtggtaacttttctgacacctcctgcttaaaac

SEQ ID NO: 49534 - DNA, 120 bp, Homo sapiens
  misc_feature: 777 for SV(W|O) and 28S
gggggaccggctatccgaggccaaccgaggctccgcggcgctgccgtatcgttccgcctgggcgggattctgacttagaggcgttcagtcataatcccacagatggtagcttcgccccat

SEQ ID NO: 49535 - DNA, 120 bp, Homo sapiens
  misc_feature: 777 for SV(W|O) and 28S
ggggagtttgactggggcggtacacctgtcaaacggtaacgcaggtgtcctaaggcgagctcagggaggacagaaacctcccgtggagcagaagggcaaaagctcgcttgatcttgattt

SEQ ID NO: 49536 - DNA, 120 bp, Homo sapiens
  misc_feature: 777 for SV(W|O) and 28S
gggaccggctatccgaggccaaccgaggctccgcggcgctgccgtatcgttccgcctgggcgggattctgacttagaggcgttcagtcataatcccacagatggtagcttcgccccattg

SEQ ID NO: 49537 - DNA, 120 bp, Homo sapiens
  misc_feature: 777 for SV(W|O) and 28S
ggcctccgttgccctcggccgatcgaaagggagtcgggttcagatccccgaatccggagtggcggagatgggcgccgcgaggcgtccagtgcggtaacgcgaccgatcccggagaagccg

SEQ ID NO: 49538 - DNA, 120 bp, Homo sapiens
  misc_feature: 777 for SV(W|O) and 28S
gccgtttacccgcgcttcattgaatttcttcactttgacattcagagcactgggcagaaatcacatcgcgtcaacacccgccgcgggccttcgcgatgctttgttttaattaaacagtcg

SEQ ID NO: 49539 - DNA, 120 bp, Homo sapiens
  misc_feature: 776 for SV(W|O) and 28S
tctgcttcacaatgataggaagagccgacatcgaaggatcaaaaagcgacgtcgctatgaacgcttggccgccacaagccagttatccctgtggtaacttttctgacacctcctgcttaa

SEQ ID NO: 49540 - DNA, 120 bp, Homo sapiens
  misc_feature: 776 for SV(W|O) and 28S
tcgtactgagcaggattaccatggcaacaacacatcatcagtagggtaaaactaacctgtctcacgacggtctaaacccagctcacgttccctattagtgggtgaacaatccaacgcttg

SEQ ID NO: 49541 - DNA, 120 bp, Homo sapiens
  misc_feature: 776 for SV(W|O) and 28S
aacaatccaacgcttggtgaattctgcttcacaatgataggaagagccgacatcgaaggatcaaaaagcgacgtcgctatgaacgcttggccgccacaagccagttatccctgtggtaac

SEQ ID NO: 49542 - DNA, 120 bp, Homo sapiens
  misc_feature: 776 for SV(W|O) and 28S
actgggcagaaatcacatcgcgtcaacacccgccgcgggccttcgcgatgctttgttttaattaaacagtcggattcccctggtccgcaccagttctaagtcggctgctaggcgccggcc

SEQ ID NO: 49543 - DNA, 120 bp, Homo sapiens
  misc_feature: 776 for SV(W|O) and 28S
gcttggctgaggagccaatggggcgaagctaccatctgtgggattatgactgaacgcctctaagtcagaatcccgcccaggcggaacgatacggcagcgccgcggagcctcggttggcct

SEQ ID NO: 49544 - DNA, 120 bp, Homo sapiens
  misc_feature: 776 for SV(W|O) and 28S
cactttgacattcagagcactgggcagaaatcacatcgcgtcaacacccgccgcgggccttcgcgatgctttgttttaattaaacagtcggattcccctggtccgcaccagttctaagtc

SEQ ID NO: 49545 - DNA, 120 bp, Homo sapiens
  misc_feature: 775 for SV(W|O) and 28S
cgggggaccggctatccgaggccaaccgaggctccgcggcgctgccgtatcgttccgcctgggcgggattctgacttagaggcgttcagtcataatcccacagatggtagcttcgcccca

SEQ ID NO: 49546 - DNA, 120 bp, Homo sapiens
  misc_feature: 775 for SV(W|O) and 28S
tgaccttttgggttttaagcaggaggtgtcagaaaagttaccacagggataactggcttgtggcggccaagcgttcatagcgacgtcgctttttgatccttcgatgtcggctcttcctat

SEQ ID NO: 49547 - DNA, 120 bp, Homo sapiens
  misc_feature: 775 for SV(W|O) and 28S
atggtagcttcgccccattggctcctcagccaagcacatacaccaaatgtctgaacctgcggttcctctcgtactgagcaggattaccatggcaacaacacatcatcagtagggtaaaac

SEQ ID NO: 49548 - DNA, 120 bp, Homo sapiens
  misc_feature: 775 for SV(W|O) and 28S
cttctgaccttttgggttttaagcaggaggtgtcagaaaagttaccacagggataactggcttgtggcggccaagcgttcatagcgacgtcgctttttgatccttcgatgtcggctcttc

SEQ ID NO: 49549 - DNA, 120 bp, Homo sapiens
  misc_feature: 775 for SV(W|O) and 28S
ctcgtactgagcaggattaccatggcaacaacacatcatcagtagggtaaaactaacctgtctcacgacggtctaaacccagctcacgttccctattagtgggtgaacaatccaacgctt

SEQ ID NO: 49550 - DNA, 120 bp, Homo sapiens
  misc_feature: 775 for SV(W|O) and 28S
agagctcaccggacgccgccggaaccgcgacgctttccaaggcacgggcccctctctcggggcgaacccattccagggcgccctgcccttcacaaagaaaagagaactctccccggggct

SEQ ID NO: 49551 - DNA, 120 bp, Homo sapiens
  misc_feature: 774 for SV(W|O) and 28S
ggtaaaactaacctgtctcacgacggtctaaacccagctcacgttccctattagtgggtgaacaatccaacgcttggtgaattctgcttcacaatgataggaagagccgacatcgaagga

SEQ ID NO: 49552 - DNA, 120 bp, Homo sapiens
  misc_feature: 774 for SV(W|O) and 28S
gatcggtcgcgttaccgcactggacgcctcgcggcgcccatctccgccactccggattcggggatctgaacccgactccctttcgatcggccgagggcaacggaggccatcgcccgtccc

SEQ ID NO: 49553 - DNA, 120 bp, Homo sapiens
  misc_feature: 774 for SV(W|O) and 28S
caccggacgccgccggaaccgcgacgctttccaaggcacgggcccctctctcggggcgaacccattccagggcgccctgcccttcacaaagaaaagagaactctccccggggctcccgcc

SEQ ID NO: 49554 - DNA, 120 bp, Homo sapiens
  misc_feature: 774 for SV(W|O) and 28S
ccagtgcggtaacgcgaccgatcccggagaagccggcgggagccccggggagagttctcttttctttgtgaagggcagggcgccctggaatgggttcgccccgagagaggggcccgtgcc

SEQ ID NO: 49555 - DNA, 120 bp, Homo sapiens
  misc_feature: 774 for SV(W|O) and 28S
cttcattgaatttcttcactttgacattcagagcactgggcagaaatcacatcgcgtcaacacccgccgcgggccttcgcgatgctttgttttaattaaacagtcggattcccctggtcc

SEQ ID NO: 49556 - DNA, 120 bp, Homo sapiens
  misc_feature: 774 for SV(W|O) and 28S
acatttggtgtatgtgcttggctgaggagccaatggggcgaagctaccatctgtgggattatgactgaacgcctctaagtcagaatcccgcccaggcggaacgatacggcagcgccgcgg

SEQ ID NO: 49557 - DNA, 120 bp, Homo sapiens
  misc_feature: 773 for SV(W|O) and 28S
ttcaagggccagcgagagctcaccggacgccgccggaaccgcgacgctttccaaggcacgggcccctctctcggggcgaacccattccagggcgccctgcccttcacaaagaaaagagaa

SEQ ID NO: 49558 - DNA, 120 bp, Homo sapiens
  misc_feature: 773 for SV(W|O) and 28S
gtagcttcgccccattggctcctcagccaagcacatacaccaaatgtctgaacctgcggttcctctcgtactgagcaggattaccatggcaacaacacatcatcagtagggtaaaactaa

SEQ ID NO: 49559 - DNA, 120 bp, Homo sapiens
  misc_feature: 773 for SV(W|O) and 28S
attttcaagggccagcgagagctcaccggacgccgccggaaccgcgacgctttccaaggcacgggcccctctctcggggcgaacccattccagggcgccctgcccttcacaaagaaaaga

SEQ ID NO: 49560 - DNA, 120 bp, Homo sapiens
  misc_feature: 773 for SV(W|O) and 28S
ctgtctcacgacggtctaaacccagctcacgttccctattagtgggtgaacaatccaacgcttggtgaattctgcttcacaatgataggaagagccgacatcgaaggatcaaaaagcgac

SEQ ID NO: 49561 - DNA, 120 bp, Homo sapiens
  misc_feature: 773 for SV(W|O) and 28S
cggctatccgaggccaaccgaggctccgcggcgctgccgtatcgttccgcctgggcgggattctgacttagaggcgttcagtcataatcccacagatggtagcttcgccccattggctcc

SEQ ID NO: 49562 - DNA, 120 bp, Homo sapiens
  misc_feature: 773 for SV(W|O) and 28S
ccggctatccgaggccaaccgaggctccgcggcgctgccgtatcgttccgcctgggcgggattctgacttagaggcgttcagtcataatcccacagatggtagcttcgccccattggctc

SEQ ID NO: 49563 - DNA, 120 bp, Homo sapiens
  misc_feature: 773 for SV(W|O) and 28S
ccgtttacccgcgcttcattgaatttcttcactttgacattcagagcactgggcagaaatcacatcgcgtcaacacccgccgcgggccttcgcgatgctttgttttaattaaacagtcgg

SEQ ID NO: 49564 - DNA, 120 bp, Homo sapiens
  misc_feature: 772 for SV(W|O) and 28S
ttctgcttcacaatgataggaagagccgacatcgaaggatcaaaaagcgacgtcgctatgaacgcttggccgccacaagccagttatccctgtggtaacttttctgacacctcctgctta

SEQ ID NO: 49565 - DNA, 120 bp, Homo sapiens
  misc_feature: 772 for SV(W|O) and 28S
tagggtaaaactaacctgtctcacgacggtctaaacccagctcacgttccctattagtgggtgaacaatccaacgcttggtgaattctgcttcacaatgataggaagagccgacatcgaa

SEQ ID NO: 49566 - DNA, 120 bp, Homo sapiens
  misc_feature: 772 for SV(W|O) and 28S
agaaggatcgtgaggccccgctttcacggtctgtattcgtactgaaaatcaagatcaagcgagcttttgcccttctgctccacgggaggtttctgtcctccctgagctcgccttaggaca

SEQ ID NO: 49567 - DNA, 120 bp, Homo sapiens
  misc_feature: 772 for SV(W|O) and 28S
gcacatacaccaaatgtctgaacctgcggttcctctcgtactgagcaggattaccatggcaacaacacatcatcagtagggtaaaactaacctgtctcacgacggtctaaacccagctca

SEQ ID NO: 49568 - DNA, 120 bp, Homo sapiens
  misc_feature: 772 for SV(W|O) and 28S
tctcgtactgagcaggattaccatggcaacaacacatcatcagtagggtaaaactaacctgtctcacgacggtctaaacccagctcacgttccctattagtgggtgaacaatccaacgct

SEQ ID NO: 49569 - DNA, 120 bp, Homo sapiens
  misc_feature: 772 for SV(W|O) and 28S
ctgaccttttgggttttaagcaggaggtgtcagaaaagttaccacagggataactggcttgtggcggccaagcgttcatagcgacgtcgctttttgatccttcgatgtcggctcttccta

SEQ ID NO: 49570 - DNA, 120 bp, Homo sapiens
  misc_feature: 772 for SV(W|O) and 28S
taaaactaacctgtctcacgacggtctaaacccagctcacgttccctattagtgggtgaacaatccaacgcttggtgaattctgcttcacaatgataggaagagccgacatcgaaggatc

SEQ ID NO: 49571 - DNA, 120 bp, Homo sapiens
  misc_feature: 772 for SV(W|O) and 28S
ggcgtccagtgcggtaacgcgaccgatcccggagaagccggcgggagccccggggagagttctcttttctttgtgaagggcagggcgccctggaatgggttcgccccgagagaggggccc

SEQ ID NO: 49572 - DNA, 120 bp, Homo sapiens
  misc_feature: 772 for SV(W|O) and 28S
acaagccagttatccctgtggtaacttttctgacacctcctgcttaaaacccaaaaggtcagaaggatcgtgaggccccgctttcacggtctgtattcgtactgaaaatcaagatcaagc

SEQ ID NO: 49573 - DNA, 120 bp, Homo sapiens
  misc_feature: 772 for SV(W|O) and 28S
gacagtgccaggtggggagtttgactggggcggtacacctgtcaaacggtaacgcaggtgtcctaaggcgagctcagggaggacagaaacctcccgtggagcagaagggcaaaagctcgc

SEQ ID NO: 49574 - DNA, 120 bp, Homo sapiens
  misc_feature: 772 for SV(W|O) and 28S
caggcgggggaccggctatccgaggccaaccgaggctccgcggcgctgccgtatcgttccgcctgggcgggattctgacttagaggcgttcagtcataatcccacagatggtagcttcgc

SEQ ID NO: 49575 - DNA, 120 bp, Homo sapiens
  misc_feature: 772 for SV(W|O) and 28S
cactgggcagaaatcacatcgcgtcaacacccgccgcgggccttcgcgatgctttgttttaattaaacagtcggattcccctggtccgcaccagttctaagtcggctgctaggcgccggc

SEQ ID NO: 49576 - DNA, 120 bp, Homo sapiens
  misc_feature: 772 for SV(W|O) and 28S
gagagctcaccggacgccgccggaaccgcgacgctttccaaggcacgggcccctctctcggggcgaacccattccagggcgccctgcccttcacaaagaaaagagaactctccccggggc

SEQ ID NO: 49577 - DNA, 120 bp, Homo sapiens
  misc_feature: 772 for SV(W|O) and 28S
ccccggggctcccgccggcttctccgggatcggtcgcgttaccgcactggacgcctcgcggcgcccatctccgccactccggattcggggatctgaacccgactccctttcgatcggccg

SEQ ID NO: 49578 - DNA, 120 bp, Homo sapiens
  misc_feature: 772 for SV(W|O) and 28S
ccaggtggggagtttgactggggcggtacacctgtcaaacggtaacgcaggtgtcctaaggcgagctcagggaggacagaaacctcccgtggagcagaagggcaaaagctcgcttgatct

SEQ ID NO: 49579 - DNA, 120 bp, Homo sapiens
  misc_feature: 772 for SV(W|O) and 28S
aggatcgtgaggccccgctttcacggtctgtattcgtactgaaaatcaagatcaagcgagcttttgcccttctgctccacgggaggtttctgtcctccctgagctcgccttaggacacct

SEQ ID NO: 49580 - DNA, 120 bp, Homo sapiens
  misc_feature: 771 for SV(W|O) and 28S
ttctgaccttttgggttttaagcaggaggtgtcagaaaagttaccacagggataactggcttgtggcggccaagcgttcatagcgacgtcgctttttgatccttcgatgtcggctcttcc

SEQ ID NO: 49581 - DNA, 120 bp, Homo sapiens
  misc_feature: 771 for SV(W|O) and 28S
tgtctcacgacggtctaaacccagctcacgttccctattagtgggtgaacaatccaacgcttggtgaattctgcttcacaatgataggaagagccgacatcgaaggatcaaaaagcgacg

SEQ ID NO: 49582 - DNA, 120 bp, Homo sapiens
  misc_feature: 771 for SV(W|O) and 28S
tgcttggctgaggagccaatggggcgaagctaccatctgtgggattatgactgaacgcctctaagtcagaatcccgcccaggcggaacgatacggcagcgccgcggagcctcggttggcc

SEQ ID NO: 49583 - DNA, 120 bp, Homo sapiens
  misc_feature: 771 for SV(W|O) and 28S
gtcgcgttaccgcactggacgcctcgcggcgcccatctccgccactccggattcggggatctgaacccgactccctttcgatcggccgagggcaacggaggccatcgcccgtcccttcgg

SEQ ID NO: 49584 - DNA, 120 bp, Homo sapiens
  misc_feature: 771 for SV(W|O) and 28S
gtaaaactaacctgtctcacgacggtctaaacccagctcacgttccctattagtgggtgaacaatccaacgcttggtgaattctgcttcacaatgataggaagagccgacatcgaaggat

SEQ ID NO: 49585 - DNA, 120 bp, Homo sapiens
  misc_feature: 771 for SV(W|O) and 28S
ggaccggctatccgaggccaaccgaggctccgcggcgctgccgtatcgttccgcctgggcgggattctgacttagaggcgttcagtcataatcccacagatggtagcttcgccccattgg

SEQ ID NO: 49586 - DNA, 120 bp, Homo sapiens
  misc_feature: 770 for SV(W|O) and 28S
ttacccgcgcttcattgaatttcttcactttgacattcagagcactgggcagaaatcacatcgcgtcaacacccgccgcgggccttcgcgatgctttgttttaattaaacagtcggattc

SEQ ID NO: 49587 - DNA, 120 bp, Homo sapiens
  misc_feature: 770 for SV(W|O) and 28S
ttaaaacccaaaaggtcagaaggatcgtgaggccccgctttcacggtctgtattcgtactgaaaatcaagatcaagcgagcttttgcccttctgctccacgggaggtttctgtcctccct

SEQ ID NO: 49588 - DNA, 120 bp, Homo sapiens
  misc_feature: 770 for SV(W|O) and 28S
caggaggtgtcagaaaagttaccacagggataactggcttgtggcggccaagcgttcatagcgacgtcgctttttgatccttcgatgtcggctcttcctatcattgtgaagcagaattca

SEQ ID NO: 49589 - DNA, 120 bp, Homo sapiens
  misc_feature: 770 for SV(W|O) and 28S
catttggtgtatgtgcttggctgaggagccaatggggcgaagctaccatctgtgggattatgactgaacgcctctaagtcagaatcccgcccaggcggaacgatacggcagcgccgcgga

SEQ ID NO: 49590 - DNA, 120 bp, Homo sapiens
  misc_feature: 770 for SV(W|O) and 28S
tcacgacggtctaaacccagctcacgttccctattagtgggtgaacaatccaacgcttggtgaattctgcttcacaatgataggaagagccgacatcgaaggatcaaaaagcgacgtcgc

SEQ ID NO: 49591 - DNA, 120 bp, Homo sapiens
  misc_feature: 770 for SV(W|O) and 28S
tcaagggccagcgagagctcaccggacgccgccggaaccgcgacgctttccaaggcacgggcccctctctcggggcgaacccattccagggcgccctgcccttcacaaagaaaagagaac

SEQ ID NO: 49592 - DNA, 120 bp, Homo sapiens
  misc_feature: 770 for SV(W|O) and 28S
taccctactgatgatgtgttgttgccatggtaatcctgctcagtacgagaggaaccgcaggttcagacatttggtgtatgtgcttggctgaggagccaatggggcgaagctaccatctgt

SEQ ID NO: 49593 - DNA, 120 bp, Homo sapiens
  misc_feature: 770 for SV(W|O) and 28S
ggcgggggaccggctatccgaggccaaccgaggctccgcggcgctgccgtatcgttccgcctgggcgggattctgacttagaggcgttcagtcataatcccacagatggtagcttcgccc

SEQ ID NO: 49594 - DNA, 120 bp, Homo sapiens
  misc_feature: 770 for SV(W|O) and 28S
aggcgggggaccggctatccgaggccaaccgaggctccgcggcgctgccgtatcgttccgcctgggcgggattctgacttagaggcgttcagtcataatcccacagatggtagcttcgcc

SEQ ID NO: 49595 - DNA, 120 bp, Homo sapiens
  misc_feature: 770 for SV(W|O) and 28S
cgccgtttacccgcgcttcattgaatttcttcactttgacattcagagcactgggcagaaatcacatcgcgtcaacacccgccgcgggccttcgcgatgctttgttttaattaaacagtc

SEQ ID NO: 49596 - DNA, 120 bp, Homo sapiens
  misc_feature: 770 for SV(W|O) and 28S
atttggtgtatgtgcttggctgaggagccaatggggcgaagctaccatctgtgggattatgactgaacgcctctaagtcagaatcccgcccaggcggaacgatacggcagcgccgcggag

SEQ ID NO: 49597 - DNA, 120 bp, Homo sapiens
  misc_feature: 770 for SV(W|O) and 28S
cgggatcggtcgcgttaccgcactggacgcctcgcggcgcccatctccgccactccggattcggggatctgaacccgactccctttcgatcggccgagggcaacggaggccatcgcccgt

SEQ ID NO: 49598 - DNA, 120 bp, Homo sapiens
  misc_feature: 770 for SV(W|O) and 28S
ccagttatccctgtggtaacttttctgacacctcctgcttaaaacccaaaaggtcagaaggatcgtgaggccccgctttcacggtctgtattcgtactgaaaatcaagatcaagcgagct

SEQ ID NO: 49599 - DNA, 120 bp, Homo sapiens
  misc_feature: 769 for SV(W|O) and 28S
tttgactggggcggtacacctgtcaaacggtaacgcaggtgtcctaaggcgagctcagggaggacagaaacctcccgtggagcagaagggcaaaagctcgcttgatcttgattttcagta

SEQ ID NO: 49600 - DNA, 120 bp, Homo sapiens
  misc_feature: 769 for SV(W|O) and 28S
cctgtctcacgacggtctaaacccagctcacgttccctattagtgggtgaacaatccaacgcttggtgaattctgcttcacaatgataggaagagccgacatcgaaggatcaaaaagcga

SEQ ID NO: 49601 - DNA, 120 bp, Homo sapiens
  misc_feature: 769 for SV(W|O) and 28S
gccagttatccctgtggtaacttttctgacacctcctgcttaaaacccaaaaggtcagaaggatcgtgaggccccgctttcacggtctgtattcgtactgaaaatcaagatcaagcgagc

SEQ ID NO: 49602 - DNA, 120 bp, Homo sapiens
  misc_feature: 769 for SV(W|O) and 28S
gcaggaggtgtcagaaaagttaccacagggataactggcttgtggcggccaagcgttcatagcgacgtcgctttttgatccttcgatgtcggctcttcctatcattgtgaagcagaattc

SEQ ID NO: 49603 - DNA, 120 bp, Homo sapiens
  misc_feature: 769 for SV(W|O) and 28S
atcgttccgcctgggcgggattctgacttagaggcgttcagtcataatcccacagatggtagcttcgccccattggctcctcagccaagcacatacaccaaatgtctgaacctgcggttc

SEQ ID NO: 49604 - DNA, 120 bp, Homo sapiens
  misc_feature: 769 for SV(W|O) and 28S
attcgtactgaaaatcaagatcaagcgagcttttgcccttctgctccacgggaggtttctgtcctccctgagctcgccttaggacacctgcgttaccgtttgacaggtgtaccgccccag

SEQ ID NO: 49605 - DNA, 120 bp, Homo sapiens
  misc_feature: 769 for SV(W|O) and 28S
acatacaccaaatgtctgaacctgcggttcctctcgtactgagcaggattaccatggcaacaacacatcatcagtagggtaaaactaacctgtctcacgacggtctaaacccagctcacg

SEQ ID NO: 49606 - DNA, 120 bp, Homo sapiens
  misc_feature: 769 for SV(W|O) and 28S
ccgggatcggtcgcgttaccgcactggacgcctcgcggcgcccatctccgccactccggattcggggatctgaacccgactccctttcgatcggccgagggcaacggaggccatcgcccg

SEQ ID NO: 49607 - DNA, 120 bp, Homo sapiens
  misc_feature: 769 for SV(W|O) and 28S
acaggcgggggaccggctatccgaggccaaccgaggctccgcggcgctgccgtatcgttccgcctgggcgggattctgacttagaggcgttcagtcataatcccacagatggtagcttcg

SEQ ID NO: 49608 - DNA, 120 bp, Homo sapiens
  misc_feature: 769 for SV(W|O) and 28S
ccggcggggacaggcgggggaccggctatccgaggccaaccgaggctccgcggcgctgccgtatcgttccgcctgggcgggattctgacttagaggcgttcagtcataatcccacagatg

SEQ ID NO: 49609 - DNA, 120 bp, Homo sapiens
  misc_feature: 768 for SV(W|O) and 28S
ggtcgcgttaccgcactggacgcctcgcggcgcccatctccgccactccggattcggggatctgaacccgactccctttcgatcggccgagggcaacggaggccatcgcccgtcccttcg

SEQ ID NO: 49610 - DNA, 120 bp, Homo sapiens
  misc_feature: 768 for SV(W|O) and 28S
cagatcttggtggtagtagcaaatattcaaacgagaactttgaaggccgaagtggagaagggttccatgtgaacagcagttgaacatgggtcagtcggtcctgagagatgggcgagcgcc

SEQ ID NO: 49611 - DNA, 120 bp, Homo sapiens
  misc_feature: 768 for SV(W|O) and 28S
ctcgactgccggcgacggccgggtatgggcccgacgctccagcgccatccattttcagggctagttgattcggcaggtgagttgttacacactccttagcggattccgacttccatggcc

SEQ ID NO: 49612 - DNA, 120 bp, Homo sapiens
  misc_feature: 768 for SV(W|O) and 28S
ggagtttgactggggcggtacacctgtcaaacggtaacgcaggtgtcctaaggcgagctcagggaggacagaaacctcccgtggagcagaagggcaaaagctcgcttgatcttgattttc

SEQ ID NO: 49613 - DNA, 120 bp, Homo sapiens
  misc_feature: 768 for SV(W|O) and 28S
ctctcttaaggtagccaaatgcctcgtcatctaattagtgacgcgcatgaatggatgaacgagattcccactgtccctacctactatccagcgaaaccacagccaagggaacgggcttgg

SEQ ID NO: 49614 - DNA, 120 bp, Homo sapiens
  misc_feature: 767 for SV(W|O) and 28S
tctcttaaggtagccaaatgcctcgtcatctaattagtgacgcgcatgaatggatgaacgagattcccactgtccctacctactatccagcgaaaccacagccaagggaacgggcttggc

SEQ ID NO: 49615 - DNA, 120 bp, Homo sapiens
  misc_feature: 767 for SV(W|O) and 28S
cgtttacccgcgcttcattgaatttcttcactttgacattcagagcactgggcagaaatcacatcgcgtcaacacccgccgcgggccttcgcgatgctttgttttaattaaacagtcgga

SEQ ID NO: 49616 - DNA, 120 bp, Homo sapiens
  misc_feature: 767 for SV(W|O) and 28S
tccagtgcggtaacgcgaccgatcccggagaagccggcgggagccccggggagagttctcttttctttgtgaagggcagggcgccctggaatgggttcgccccgagagaggggcccgtgc

SEQ ID NO: 49617 - DNA, 120 bp, Homo sapiens
  misc_feature: 767 for SV(W|O) and 28S
cttaaaacccaaaaggtcagaaggatcgtgaggccccgctttcacggtctgtattcgtactgaaaatcaagatcaagcgagcttttgcccttctgctccacgggaggtttctgtcctccc

SEQ ID NO: 49618 - DNA, 120 bp, Homo sapiens
  misc_feature: 767 for SV(W|O) and 28S
gcttcattgaatttcttcactttgacattcagagcactgggcagaaatcacatcgcgtcaacacccgccgcgggccttcgcgatgctttgttttaattaaacagtcggattcccctggtc

SEQ ID NO: 49619 - DNA, 120 bp, Homo sapiens
  misc_feature: 767 for SV(W|O) and 28S
agacatttggtgtatgtgcttggctgaggagccaatggggcgaagctaccatctgtgggattatgactgaacgcctctaagtcagaatcccgcccaggcggaacgatacggcagcgccgc

SEQ ID NO: 49620 - DNA, 120 bp, Homo sapiens
  misc_feature: 767 for SV(W|O) and 28S
cggacgccgccggaaccgcgacgctttccaaggcacgggcccctctctcggggcgaacccattccagggcgccctgcccttcacaaagaaaagagaactctccccggggctcccgccggc

SEQ ID NO: 49621 - DNA, 120 bp, Homo sapiens
  misc_feature: 767 for SV(W|O) and 28S
agggtaaaactaacctgtctcacgacggtctaaacccagctcacgttccctattagtgggtgaacaatccaacgcttggtgaattctgcttcacaatgataggaagagccgacatcgaag

SEQ ID NO: 49622 - DNA, 120 bp, Homo sapiens
  misc_feature: 767 for SV(W|O) and 28S
acctgtctcacgacggtctaaacccagctcacgttccctattagtgggtgaacaatccaacgcttggtgaattctgcttcacaatgataggaagagccgacatcgaaggatcaaaaagcg

SEQ ID NO: 49623 - DNA, 120 bp, Homo sapiens
  misc_feature: 767 for SV(W|O) and 28S
cccttggctgtggtttcgctggatagtaggtagggacagtgggaatctcgttcatccattcatgcgcgtcactaattagatgacgaggcatttggctaccttaagagagtcatagttact

SEQ ID NO: 49624 - DNA, 120 bp, Homo sapiens
  misc_feature: 766 for SV(W|O) and 28S
aaaactaacctgtctcacgacggtctaaacccagctcacgttccctattagtgggtgaacaatccaacgcttggtgaattctgcttcacaatgataggaagagccgacatcgaaggatca

SEQ ID NO: 49625 - DNA, 120 bp, Homo sapiens
  misc_feature: 766 for SV(W|O) and 28S
tcgttccgcctgggcgggattctgacttagaggcgttcagtcataatcccacagatggtagcttcgccccattggctcctcagccaagcacatacaccaaatgtctgaacctgcggttcc

SEQ ID NO: 49626 - DNA, 120 bp, Homo sapiens
  misc_feature: 766 for SV(W|O) and 28S
aagccagttatccctgtggtaacttttctgacacctcctgcttaaaacccaaaaggtcagaaggatcgtgaggccccgctttcacggtctgtattcgtactgaaaatcaagatcaagcga

SEQ ID NO: 49627 - DNA, 120 bp, Homo sapiens
  misc_feature: 766 for SV(W|O) and 28S
gggtaaaactaacctgtctcacgacggtctaaacccagctcacgttccctattagtgggtgaacaatccaacgcttggtgaattctgcttcacaatgataggaagagccgacatcgaagg

SEQ ID NO: 49628 - DNA, 120 bp, Homo sapiens
  misc_feature: 766 for SV(W|O) and 28S
gagctcaccggacgccgccggaaccgcgacgctttccaaggcacgggcccctctctcggggcgaacccattccagggcgccctgcccttcacaaagaaaagagaactctccccggggctc

SEQ ID NO: 49629 - DNA, 120 bp, Homo sapiens
  misc_feature: 766 for SV(W|O) and 28S
cgttccgcctgggcgggattctgacttagaggcgttcagtcataatcccacagatggtagcttcgccccattggctcctcagccaagcacatacaccaaatgtctgaacctgcggttcct

SEQ ID NO: 49630 - DNA, 120 bp, Homo sapiens
  misc_feature: 766 for SV(W|O) and 28S
acgatccttctgaccttttgggttttaagcaggaggtgtcagaaaagttaccacagggataactggcttgtggcggccaagcgttcatagcgacgtcgctttttgatccttcgatgtcgg

SEQ ID NO: 49631 - DNA, 120 bp, Homo sapiens
  misc_feature: 765 for SV(W|O) and 28S
ctcccccggattttcaagggccagcgagagctcaccggacgccgccggaaccgcgacgctttccaaggcacgggcccctctctcggggcgaacccattccagggcgccctgcccttcaca

SEQ ID NO: 49632 - DNA, 120 bp, Homo sapiens
  misc_feature: 765 for SV(W|O) and 28S
tggcctccgttgccctcggccgatcgaaagggagtcgggttcagatccccgaatccggagtggcggagatgggcgccgcgaggcgtccagtgcggtaacgcgaccgatcccggagaagcc

SEQ ID NO: 49633 - DNA, 120 bp, Homo sapiens
  misc_feature: 765 for SV(W|O) and 28S
atgcgcgtcactaattagatgacgaggcatttggctaccttaagagagtcatagttactcccgccgtttacccgcgcttcattgaatttcttcactttgacattcagagcactgggcaga

SEQ ID NO: 49634 - DNA, 120 bp, Homo sapiens
  misc_feature: 765 for SV(W|O) and 28S
cttggctgtggtttcgctggatagtaggtagggacagtgggaatctcgttcatccattcatgcgcgtcactaattagatgacgaggcatttggctaccttaagagagtcatagttactcc

SEQ ID NO: 49635 - DNA, 120 bp, Homo sapiens
  misc_feature: 765 for SV(W|O) and 28S
ctctcgtactgagcaggattaccatggcaacaacacatcatcagtagggtaaaactaacctgtctcacgacggtctaaacccagctcacgttccctattagtgggtgaacaatccaacgc

SEQ ID NO: 49636 - DNA, 120 bp, Homo sapiens
  misc_feature: 765 for SV(W|O) and 28S
gccaggtggggagtttgactggggcggtacacctgtcaaacggtaacgcaggtgtcctaaggcgagctcagggaggacagaaacctcccgtggagcagaagggcaaaagctcgcttgatc

SEQ ID NO: 49637 - DNA, 120 bp, Homo sapiens
  misc_feature: 765 for SV(W|O) and 28S
gaccggctatccgaggccaaccgaggctccgcggcgctgccgtatcgttccgcctgggcgggattctgacttagaggcgttcagtcataatcccacagatggtagcttcgccccattggc

SEQ ID NO: 49638 - DNA, 120 bp, Homo sapiens
  misc_feature: 765 for SV(W|O) and 28S
caagggccagcgagagctcaccggacgccgccggaaccgcgacgctttccaaggcacgggcccctctctcggggcgaacccattccagggcgccctgcccttcacaaagaaaagagaact

SEQ ID NO: 49639 - DNA, 120 bp, Homo sapiens
  misc_feature: 765 for SV(W|O) and 28S
agggccagcgagagctcaccggacgccgccggaaccgcgacgctttccaaggcacgggcccctctctcggggcgaacccattccagggcgccctgcccttcacaaagaaaagagaactct

SEQ ID NO: 49640 - DNA, 120 bp, Homo sapiens
  misc_feature: 764 for SV(W|O) and 28S
gcgcgtcactaattagatgacgaggcatttggctaccttaagagagtcatagttactcccgccgtttacccgcgcttcattgaatttcttcactttgacattcagagcactgggcagaaa

SEQ ID NO: 49641 - DNA, 120 bp, Homo sapiens
  misc_feature: 764 for SV(W|O) and 28S
tggtagcttcgccccattggctcctcagccaagcacatacaccaaatgtctgaacctgcggttcctctcgtactgagcaggattaccatggcaacaacacatcatcagtagggtaaaact

SEQ ID NO: 49642 - DNA, 120 bp, Homo sapiens
  misc_feature: 764 for SV(W|O) and 28S
atggcctccgttgccctcggccgatcgaaagggagtcgggttcagatccccgaatccggagtggcggagatgggcgccgcgaggcgtccagtgcggtaacgcgaccgatcccggagaagc

SEQ ID NO: 49643 - DNA, 120 bp, Homo sapiens
  misc_feature: 764 for SV(W|O) and 28S
cagtagggtaaaactaacctgtctcacgacggtctaaacccagctcacgttccctattagtgggtgaacaatccaacgcttggtgaattctgcttcacaatgataggaagagccgacatc

SEQ ID NO: 49644 - DNA, 120 bp, Homo sapiens
  misc_feature: 764 for SV(W|O) and 28S
gatccttctgaccttttgggttttaagcaggaggtgtcagaaaagttaccacagggataactggcttgtggcggccaagcgttcatagcgacgtcgctttttgatccttcgatgtcggct

SEQ ID NO: 49645 - DNA, 120 bp, Homo sapiens
  misc_feature: 764 for SV(W|O) and 28S
aagggccagcgagagctcaccggacgccgccggaaccgcgacgctttccaaggcacgggcccctctctcggggcgaacccattccagggcgccctgcccttcacaaagaaaagagaactc

SEQ ID NO: 49646 - DNA, 120 bp, Homo sapiens
  misc_feature: 764 for SV(W|O) and 28S
agccagttatccctgtggtaacttttctgacacctcctgcttaaaacccaaaaggtcagaaggatcgtgaggccccgctttcacggtctgtattcgtactgaaaatcaagatcaagcgag

SEQ ID NO: 49647 - DNA, 120 bp, Homo sapiens
  misc_feature: 764 for SV(W|O) and 28S
ctcacgacggtctaaacccagctcacgttccctattagtgggtgaacaatccaacgcttggtgaattctgcttcacaatgataggaagagccgacatcgaaggatcaaaaagcgacgtcg

SEQ ID NO: 49648 - DNA, 120 bp, Homo sapiens
  misc_feature: 764 for SV(W|O) and 28S
cagtgccaggtggggagtttgactggggcggtacacctgtcaaacggtaacgcaggtgtcctaaggcgagctcagggaggacagaaacctcccgtggagcagaagggcaaaagctcgctt

SEQ ID NO: 49649 - DNA, 120 bp, Homo sapiens
  misc_feature: 763 for SV(W|O) and 28S
tattcgtactgaaaatcaagatcaagcgagcttttgcccttctgctccacgggaggtttctgtcctccctgagctcgccttaggacacctgcgttaccgtttgacaggtgtaccgcccca

SEQ ID NO: 49650 - DNA, 120 bp, Homo sapiens
  misc_feature: 763 for SV(W|O) and 28S
ggggctcccgccggcttctccgggatcggtcgcgttaccgcactggacgcctcgcggcgcccatctccgccactccggattcggggatctgaacccgactccctttcgatcggccgaggg

SEQ ID NO: 49651 - DNA, 120 bp, Homo sapiens
  misc_feature: 763 for SV(W|O) and 28S
aggcgtccagtgcggtaacgcgaccgatcccggagaagccggcgggagccccggggagagttctcttttctttgtgaagggcagggcgccctggaatgggttcgccccgagagaggggcc

SEQ ID NO: 49652 - DNA, 120 bp, Homo sapiens
  misc_feature: 763 for SV(W|O) and 28S
gacatttggtgtatgtgcttggctgaggagccaatggggcgaagctaccatctgtgggattatgactgaacgcctctaagtcagaatcccgcccaggcggaacgatacggcagcgccgcg

SEQ ID NO: 49653 - DNA, 120 bp, Homo sapiens
  misc_feature: 762 for SV(W|O) and 28S
ctaacctgtctcacgacggtctaaacccagctcacgttccctattagtgggtgaacaatccaacgcttggtgaattctgcttcacaatgataggaagagccgacatcgaaggatcaaaaa

SEQ ID NO: 49654 - DNA, 120 bp, Homo sapiens
  misc_feature: 762 for SV(W|O) and 28S
tttggtgtatgtgcttggctgaggagccaatggggcgaagctaccatctgtgggattatgactgaacgcctctaagtcagaatcccgcccaggcggaacgatacggcagcgccgcggagc

SEQ ID NO: 49655 - DNA, 120 bp, Homo sapiens
  misc_feature: 762 for SV(W|O) and 28S
tcccccggattttcaagggccagcgagagctcaccggacgccgccggaaccgcgacgctttccaaggcacgggcccctctctcggggcgaacccattccagggcgccctgcccttcacaa

SEQ ID NO: 49656 - DNA, 120 bp, Homo sapiens
  misc_feature: 762 for SV(W|O) and 28S
tgcgcgtcactaattagatgacgaggcatttggctaccttaagagagtcatagttactcccgccgtttacccgcgcttcattgaatttcttcactttgacattcagagcactgggcagaa

SEQ ID NO: 49657 - DNA, 120 bp, Homo sapiens
  misc_feature: 762 for SV(W|O) and 28S
ggatcgtgaggccccgctttcacggtctgtattcgtactgaaaatcaagatcaagcgagcttttgcccttctgctccacgggaggtttctgtcctccctgagctcgccttaggacacctg

SEQ ID NO: 49658 - DNA, 120 bp, Homo sapiens
  misc_feature: 762 for SV(W|O) and 28S
gccggcggggacaggcgggggaccggctatccgaggccaaccgaggctccgcggcgctgccgtatcgttccgcctgggcgggattctgacttagaggcgttcagtcataatcccacagat

SEQ ID NO: 49659 - DNA, 120 bp, Homo sapiens
  misc_feature: 762 for SV(W|O) and 28S
agcagttgaacatgggtcagtcggtcctgagagatgggcgagcgccgttccgaagggacgggcgatggcctccgttgccctcggccgatcgaaagggagtcgggttcagatccccgaatc

SEQ ID NO: 49660 - DNA, 120 bp, Homo sapiens
  misc_feature: 762 for SV(W|O) and 28S
caagccagttatccctgtggtaacttttctgacacctcctgcttaaaacccaaaaggtcagaaggatcgtgaggccccgctttcacggtctgtattcgtactgaaaatcaagatcaagcg

SEQ ID NO: 49661 - DNA, 120 bp, Homo sapiens
  misc_feature: 761 for SV(W|O) and 28S
aactaacctgtctcacgacggtctaaacccagctcacgttccctattagtgggtgaacaatccaacgcttggtgaattctgcttcacaatgataggaagagccgacatcgaaggatcaaa

SEQ ID NO: 49662 - DNA, 120 bp, Homo sapiens
  misc_feature: 761 for SV(W|O) and 28S
tcaccggacgccgccggaaccgcgacgctttccaaggcacgggcccctctctcggggcgaacccattccagggcgccctgcccttcacaaagaaaagagaactctccccggggctcccgc

SEQ ID NO: 49663 - DNA, 120 bp, Homo sapiens
  misc_feature: 761 for SV(W|O) and 28S
gtgcagatcttggtggtagtagcaaatattcaaacgagaactttgaaggccgaagtggagaagggttccatgtgaacagcagttgaacatgggtcagtcggtcctgagagatgggcgagc

SEQ ID NO: 49664 - DNA, 120 bp, Homo sapiens
  misc_feature: 761 for SV(W|O) and 28S
cccaaaaggtcagaaggatcgtgaggccccgctttcacggtctgtattcgtactgaaaatcaagatcaagcgagcttttgcccttctgctccacgggaggtttctgtcctccctgagctc

SEQ ID NO: 49665 - DNA, 120 bp, Homo sapiens
  misc_feature: 761 for SV(W|O) and 28S
agttgaacatgggtcagtcggtcctgagagatgggcgagcgccgttccgaagggacgggcgatggcctccgttgccctcggccgatcgaaagggagtcgggttcagatccccgaatccgg

SEQ ID NO: 49666 - DNA, 120 bp, Homo sapiens
  misc_feature: 761 for SV(W|O) and 28S
ccgcgcttcattgaatttcttcactttgacattcagagcactgggcagaaatcacatcgcgtcaacacccgccgcgggccttcgcgatgctttgttttaattaaacagtcggattcccct

SEQ ID NO: 49667 - DNA, 120 bp, Homo sapiens
  misc_feature: 760 for SV(W|O) and 28S
aaactaacctgtctcacgacggtctaaacccagctcacgttccctattagtgggtgaacaatccaacgcttggtgaattctgcttcacaatgataggaagagccgacatcgaaggatcaa

SEQ ID NO: 49668 - DNA, 120 bp, Homo sapiens
  misc_feature: 760 for SV(W|O) and 28S
ttcgtactgaaaatcaagatcaagcgagcttttgcccttctgctccacgggaggtttctgtcctccctgagctcgccttaggacacctgcgttaccgtttgacaggtgtaccgccccagt

SEQ ID NO: 49669 - DNA, 120 bp, Homo sapiens
  misc_feature: 760 for SV(W|O) and 28S
atcagtagggtaaaactaacctgtctcacgacggtctaaacccagctcacgttccctattagtgggtgaacaatccaacgcttggtgaattctgcttcacaatgataggaagagccgaca

SEQ ID NO: 49670 - DNA, 120 bp, Homo sapiens
  misc_feature: 760 for SV(W|O) and 28S
tcagaaggatcgtgaggccccgctttcacggtctgtattcgtactgaaaatcaagatcaagcgagcttttgcccttctgctccacgggaggtttctgtcctccctgagctcgccttagga

SEQ ID NO: 49671 - DNA, 120 bp, Homo sapiens
  misc_feature: 760 for SV(W|O) and 28S
cccgcgcttcattgaatttcttcactttgacattcagagcactgggcagaaatcacatcgcgtcaacacccgccgcgggccttcgcgatgctttgttttaattaaacagtcggattcccc

SEQ ID NO: 49672 - DNA, 120 bp, Homo sapiens
  misc_feature: 760 for SV(W|O) and 28S
gcagttgaacatgggtcagtcggtcctgagagatgggcgagcgccgttccgaagggacgggcgatggcctccgttgccctcggccgatcgaaagggagtcgggttcagatccccgaatcc

SEQ ID NO: 49673 - DNA, 120 bp, Homo sapiens
  misc_feature: 759 for SV(W|O) and 28S
ttgggccccccacgagcggcgccggggagcgggtcttccgtacgccacatgtcccgcgccccgccgcggggcggggattcggcgctgggctcttccctgttcactcgccgttactgaggg

SEQ ID NO: 49674 - DNA, 120 bp, Homo sapiens
  misc_feature: 759 for SV(W|O) and 28S
tcccttggctgtggtttcgctggatagtaggtagggacagtgggaatctcgttcatccattcatgcgcgtcactaattagatgacgaggcatttggctaccttaagagagtcatagttac

SEQ ID NO: 49675 - DNA, 120 bp, Homo sapiens
  misc_feature: 759 for SV(W|O) and 28S
tcagtagggtaaaactaacctgtctcacgacggtctaaacccagctcacgttccctattagtgggtgaacaatccaacgcttggtgaattctgcttcacaatgataggaagagccgacat

SEQ ID NO: 49676 - DNA, 120 bp, Homo sapiens
  misc_feature: 759 for SV(W|O) and 28S
aactatgactctcttaaggtagccaaatgcctcgtcatctaattagtgacgcgcatgaatggatgaacgagattcccactgtccctacctactatccagcgaaaccacagccaagggaac

SEQ ID NO: 49677 - DNA, 120 bp, Homo sapiens
  misc_feature: 759 for SV(W|O) and 28S
catcagtagggtaaaactaacctgtctcacgacggtctaaacccagctcacgttccctattagtgggtgaacaatccaacgcttggtgaattctgcttcacaatgataggaagagccgac

SEQ ID NO: 49678 - DNA, 120 bp, Homo sapiens
  misc_feature: 759 for SV(W|O) and 28S
ggggacagtgccaggtggggagtttgactggggcggtacacctgtcaaacggtaacgcaggtgtcctaaggcgagctcagggaggacagaaacctcccgtggagcagaagggcaaaagct

SEQ ID NO: 49679 - DNA, 120 bp, Homo sapiens
  misc_feature: 759 for SV(W|O) and 28S
gctcaccggacgccgccggaaccgcgacgctttccaaggcacgggcccctctctcggggcgaacccattccagggcgccctgcccttcacaaagaaaagagaactctccccggggctccc

SEQ ID NO: 49680 - DNA, 120 bp, Homo sapiens
  misc_feature: 759 for SV(W|O) and 28S
gcgcttcattgaatttcttcactttgacattcagagcactgggcagaaatcacatcgcgtcaacacccgccgcgggccttcgcgatgctttgttttaattaaacagtcggattcccctgg

SEQ ID NO: 49681 - DNA, 120 bp, Homo sapiens
  misc_feature: 759 for SV(W|O) and 28S
cgatccttctgaccttttgggttttaagcaggaggtgtcagaaaagttaccacagggataactggcttgtggcggccaagcgttcatagcgacgtcgctttttgatccttcgatgtcggc

SEQ ID NO: 49682 - DNA, 120 bp, Homo sapiens
  misc_feature: 759 for SV(W|O) and 28S
ccggggctcccgccggcttctccgggatcggtcgcgttaccgcactggacgcctcgcggcgcccatctccgccactccggattcggggatctgaacccgactccctttcgatcggccgag

SEQ ID NO: 49683 - DNA, 120 bp, Homo sapiens
  misc_feature: 759 for SV(W|O) and 28S
cagttgaacatgggtcagtcggtcctgagagatgggcgagcgccgttccgaagggacgggcgatggcctccgttgccctcggccgatcgaaagggagtcgggttcagatccccgaatccg

SEQ ID NO: 49684 - DNA, 120 bp, Homo sapiens
  misc_feature: 759 for SV(W|O) and 28S
agtgccaggtggggagtttgactggggcggtacacctgtcaaacggtaacgcaggtgtcctaaggcgagctcagggaggacagaaacctcccgtggagcagaagggcaaaagctcgcttg

SEQ ID NO: 49685 - DNA, 120 bp, Homo sapiens
  misc_feature: 759 for SV(W|O) and 28S
atgtgcttggctgaggagccaatggggcgaagctaccatctgtgggattatgactgaacgcctctaagtcagaatcccgcccaggcggaacgatacggcagcgccgcggagcctcggttg

SEQ ID NO: 49686 - DNA, 120 bp, Homo sapiens
  misc_feature: 759 for SV(W|O) and 28S
accggctatccgaggccaaccgaggctccgcggcgctgccgtatcgttccgcctgggcgggattctgacttagaggcgttcagtcataatcccacagatggtagcttcgccccattggct

SEQ ID NO: 49687 - DNA, 120 bp, Homo sapiens
  misc_feature: 758 for SV(W|O) and 28S
ttcccttggctgtggtttcgctggatagtaggtagggacagtgggaatctcgttcatccattcatgcgcgtcactaattagatgacgaggcatttggctaccttaagagagtcatagtta

SEQ ID NO: 49688 - DNA, 120 bp, Homo sapiens
  misc_feature: 758 for SV(W|O) and 28S
tgtatgtgcttggctgaggagccaatggggcgaagctaccatctgtgggattatgactgaacgcctctaagtcagaatcccgcccaggcggaacgatacggcagcgccgcggagcctcgg

SEQ ID NO: 49689 - DNA, 120 bp, Homo sapiens
  misc_feature: 758 for SV(W|O) and 28S
ggtagcttcgccccattggctcctcagccaagcacatacaccaaatgtctgaacctgcggttcctctcgtactgagcaggattaccatggcaacaacacatcatcagtagggtaaaacta

SEQ ID NO: 49690 - DNA, 120 bp, Homo sapiens
  misc_feature: 758 for SV(W|O) and 28S
ggtgtatgtgcttggctgaggagccaatggggcgaagctaccatctgtgggattatgactgaacgcctctaagtcagaatcccgcccaggcggaacgatacggcagcgccgcggagcctc

SEQ ID NO: 49691 - DNA, 120 bp, Homo sapiens
  misc_feature: 758 for SV(W|O) and 28S
ggtgcagatcttggtggtagtagcaaatattcaaacgagaactttgaaggccgaagtggagaagggttccatgtgaacagcagttgaacatgggtcagtcggtcctgagagatgggcgag

SEQ ID NO: 49692 - DNA, 120 bp, Homo sapiens
  misc_feature: 758 for SV(W|O) and 28S
gcgggggaccggctatccgaggccaaccgaggctccgcggcgctgccgtatcgttccgcctgggcgggattctgacttagaggcgttcagtcataatcccacagatggtagcttcgcccc

SEQ ID NO: 49693 - DNA, 120 bp, Homo sapiens
  misc_feature: 758 for SV(W|O) and 28S
ggacagtgccaggtggggagtttgactggggcggtacacctgtcaaacggtaacgcaggtgtcctaaggcgagctcagggaggacagaaacctcccgtggagcagaagggcaaaagctcg

SEQ ID NO: 49694 - DNA, 120 bp, Homo sapiens
  misc_feature: 758 for SV(W|O) and 28S
gcagatcttggtggtagtagcaaatattcaaacgagaactttgaaggccgaagtggagaagggttccatgtgaacagcagttgaacatgggtcagtcggtcctgagagatgggcgagcgc

SEQ ID NO: 49695 - DNA, 120 bp, Homo sapiens
  misc_feature: 758 for SV(W|O) and 28S
gaggcgtccagtgcggtaacgcgaccgatcccggagaagccggcgggagccccggggagagttctcttttctttgtgaagggcagggcgccctggaatgggttcgccccgagagaggggc

SEQ ID NO: 49696 - DNA, 120 bp, Homo sapiens
  misc_feature: 758 for SV(W|O) and 28S
cttgggccccccacgagcggcgccggggagcgggtcttccgtacgccacatgtcccgcgccccgccgcggggcggggattcggcgctgggctcttccctgttcactcgccgttactgagg

SEQ ID NO: 49697 - DNA, 120 bp, Homo sapiens
  misc_feature: 758 for SV(W|O) and 28S
acttgggccccccacgagcggcgccggggagcgggtcttccgtacgccacatgtcccgcgccccgccgcggggcggggattcggcgctgggctcttccctgttcactcgccgttactgag

SEQ ID NO: 49698 - DNA, 120 bp, Homo sapiens
  misc_feature: 758 for SV(W|O) and 28S
ccggcgacggccgggtatgggcccgacgctccagcgccatccattttcagggctagttgattcggcaggtgagttgttacacactccttagcggattccgacttccatggccaccgtcct

SEQ ID NO: 49699 - DNA, 120 bp, Homo sapiens
  misc_feature: 757 for SV(W|O) and 28S
actaacctgtctcacgacggtctaaacccagctcacgttccctattagtgggtgaacaatccaacgcttggtgaattctgcttcacaatgataggaagagccgacatcgaaggatcaaaa

SEQ ID NO: 49700 - DNA, 120 bp, Homo sapiens
  misc_feature: 757 for SV(W|O) and 28S
tgtgcttggctgaggagccaatggggcgaagctaccatctgtgggattatgactgaacgcctctaagtcagaatcccgcccaggcggaacgatacggcagcgccgcggagcctcggttgg

SEQ ID NO: 49701 - DNA, 120 bp, Homo sapiens
  misc_feature: 757 for SV(W|O) and 28S
gaaggatcgtgaggccccgctttcacggtctgtattcgtactgaaaatcaagatcaagcgagcttttgcccttctgctccacgggaggtttctgtcctccctgagctcgccttaggacac

SEQ ID NO: 49702 - DNA, 120 bp, Homo sapiens
  misc_feature: 757 for SV(W|O) and 28S
gcgtccagtgcggtaacgcgaccgatcccggagaagccggcgggagccccggggagagttctcttttctttgtgaagggcagggcgccctggaatgggttcgccccgagagaggggcccg

SEQ ID NO: 49703 - DNA, 120 bp, Homo sapiens
  misc_feature: 757 for SV(W|O) and 28S
gatggcctccgttgccctcggccgatcgaaagggagtcgggttcagatccccgaatccggagtggcggagatgggcgccgcgaggcgtccagtgcggtaacgcgaccgatcccggagaag

SEQ ID NO: 49704 - DNA, 120 bp, Homo sapiens
  misc_feature: 757 for SV(W|O) and 28S
ccttggctgtggtttcgctggatagtaggtagggacagtgggaatctcgttcatccattcatgcgcgtcactaattagatgacgaggcatttggctaccttaagagagtcatagttactc

SEQ ID NO: 49705 - DNA, 120 bp, Homo sapiens
  misc_feature: 757 for SV(W|O) and 28S
cggggctcccgccggcttctccgggatcggtcgcgttaccgcactggacgcctcgcggcgcccatctccgccactccggattcggggatctgaacccgactccctttcgatcggccgagg

SEQ ID NO: 49706 - DNA, 120 bp, Homo sapiens
  misc_feature: 757 for SV(W|O) and 28S
cagttatccctgtggtaacttttctgacacctcctgcttaaaacccaaaaggtcagaaggatcgtgaggccccgctttcacggtctgtattcgtactgaaaatcaagatcaagcgagctt

SEQ ID NO: 49707 - DNA, 120 bp, Homo sapiens
  misc_feature: 756 for SV(W|O) and 28S
gccggcgacggccgggtatgggcccgacgctccagcgccatccattttcagggctagttgattcggcaggtgagttgttacacactccttagcggattccgacttccatggccaccgtcc

SEQ ID NO: 49708 - DNA, 120 bp, Homo sapiens
  misc_feature: 756 for SV(W|O) and 28S
catgcgcgtcactaattagatgacgaggcatttggctaccttaagagagtcatagttactcccgccgtttacccgcgcttcattgaatttcttcactttgacattcagagcactgggcag

SEQ ID NO: 49709 - DNA, 120 bp, Homo sapiens
  misc_feature: 755 for SV(W|O) and 28S
ttggtgtatgtgcttggctgaggagccaatggggcgaagctaccatctgtgggattatgactgaacgcctctaagtcagaatcccgcccaggcggaacgatacggcagcgccgcggagcc

SEQ ID NO: 49710 - DNA, 120 bp, Homo sapiens
  misc_feature: 755 for SV(W|O) and 28S
ttcctctcgtactgagcaggattaccatggcaacaacacatcatcagtagggtaaaactaacctgtctcacgacggtctaaacccagctcacgttccctattagtgggtgaacaatccaa

SEQ ID NO: 49711 - DNA, 120 bp, Homo sapiens
  misc_feature: 755 for SV(W|O) and 28S
tgccaggtggggagtttgactggggcggtacacctgtcaaacggtaacgcaggtgtcctaaggcgagctcagggaggacagaaacctcccgtggagcagaagggcaaaagctcgcttgat

SEQ ID NO: 49712 - DNA, 120 bp, Homo sapiens
  misc_feature: 755 for SV(W|O) and 28S
tgcagatcttggtggtagtagcaaatattcaaacgagaactttgaaggccgaagtggagaagggttccatgtgaacagcagttgaacatgggtcagtcggtcctgagagatgggcgagcg

SEQ ID NO: 49713 - DNA, 120 bp, Homo sapiens
  misc_feature: 755 for SV(W|O) and 28S
cgccggcggggacaggcgggggaccggctatccgaggccaaccgaggctccgcggcgctgccgtatcgttccgcctgggcgggattctgacttagaggcgttcagtcataatcccacaga

SEQ ID NO: 49714 - DNA, 120 bp, Homo sapiens
  misc_feature: 755 for SV(W|O) and 28S
tacccgcgcttcattgaatttcttcactttgacattcagagcactgggcagaaatcacatcgcgtcaacacccgccgcgggccttcgcgatgctttgttttaattaaacagtcggattcc

SEQ ID NO: 49715 - DNA, 120 bp, Homo sapiens
  misc_feature: 755 for SV(W|O) and 28S
taacctgtctcacgacggtctaaacccagctcacgttccctattagtgggtgaacaatccaacgcttggtgaattctgcttcacaatgataggaagagccgacatcgaaggatcaaaaag

SEQ ID NO: 49716 - DNA, 120 bp, Homo sapiens
  misc_feature: 755 for SV(W|O) and 28S
cagaaggatcgtgaggccccgctttcacggtctgtattcgtactgaaaatcaagatcaagcgagcttttgcccttctgctccacgggaggtttctgtcctccctgagctcgccttaggac

SEQ ID NO: 49717 - DNA, 120 bp, Homo sapiens
  misc_feature: 755 for SV(W|O) and 28S
ggttcctctcgtactgagcaggattaccatggcaacaacacatcatcagtagggtaaaactaacctgtctcacgacggtctaaacccagctcacgttccctattagtgggtgaacaatcc

SEQ ID NO: 49718 - DNA, 120 bp, Homo sapiens
  misc_feature: 755 for SV(W|O) and 28S
aaggatcgtgaggccccgctttcacggtctgtattcgtactgaaaatcaagatcaagcgagcttttgcccttctgctccacgggaggtttctgtcctccctgagctcgccttaggacacc

SEQ ID NO: 49719 - DNA, 120 bp, Homo sapiens
  misc_feature: 755 for SV(W|O) and 28S
gggacagtgccaggtggggagtttgactggggcggtacacctgtcaaacggtaacgcaggtgtcctaaggcgagctcagggaggacagaaacctcccgtggagcagaagggcaaaagctc

SEQ ID NO: 49720 - DNA, 120 bp, Homo sapiens
  misc_feature: 755 for SV(W|O) and 28S
agctcaccggacgccgccggaaccgcgacgctttccaaggcacgggcccctctctcggggcgaacccattccagggcgccctgcccttcacaaagaaaagagaactctccccggggctcc

SEQ ID NO: 49721 - DNA, 120 bp, Homo sapiens
  misc_feature: 755 for SV(W|O) and 28S
gatcgtgaggccccgctttcacggtctgtattcgtactgaaaatcaagatcaagcgagcttttgcccttctgctccacgggaggtttctgtcctccctgagctcgccttaggacacctgc

SEQ ID NO: 49722 - DNA, 120 bp, Homo sapiens
  misc_feature: 755 for SV(W|O) and 28S
ctcaccggacgccgccggaaccgcgacgctttccaaggcacgggcccctctctcggggcgaacccattccagggcgccctgcccttcacaaagaaaagagaactctccccggggctcccg

SEQ ID NO: 49723 - DNA, 120 bp, Homo sapiens
  misc_feature: 755 for SV(W|O) and 28S
actatgactctcttaaggtagccaaatgcctcgtcatctaattagtgacgcgcatgaatggatgaacgagattcccactgtccctacctactatccagcgaaaccacagccaagggaacg

SEQ ID NO: 49724 - DNA, 120 bp, Homo sapiens
  misc_feature: 754 for SV(W|O) and 28S
tcgactgccggcgacggccgggtatgggcccgacgctccagcgccatccattttcagggctagttgattcggcaggtgagttgttacacactccttagcggattccgacttccatggcca

SEQ ID NO: 49725 - DNA, 120 bp, Homo sapiens
  misc_feature: 754 for SV(W|O) and 28S
aggacccgaaagatggtgaactatgcctgggcagggcgaagccagaggaaactctggtggaggtccgtagcggtcctgacgtgcaaatcggtcgtccgacctgggtataggggcgaaaga

SEQ ID NO: 49726 - DNA, 120 bp, Homo sapiens
  misc_feature: 754 for SV(W|O) and 28S
cccggggctcccgccggcttctccgggatcggtcgcgttaccgcactggacgcctcgcggcgcccatctccgccactccggattcggggatctgaacccgactccctttcgatcggccga

SEQ ID NO: 49727 - DNA, 120 bp, Homo sapiens
  misc_feature: 754 for SV(W|O) and 28S
gtgccaggtggggagtttgactggggcggtacacctgtcaaacggtaacgcaggtgtcctaaggcgagctcagggaggacagaaacctcccgtggagcagaagggcaaaagctcgcttga

SEQ ID NO: 49728 - DNA, 120 bp, Homo sapiens
  misc_feature: 754 for SV(W|O) and 28S
ctgggcagaaatcacatcgcgtcaacacccgccgcgggccttcgcgatgctttgttttaattaaacagtcggattcccctggtccgcaccagttctaagtcggctgctaggcgccggccg

SEQ ID NO: 49729 - DNA, 120 bp, Homo sapiens
  misc_feature: 754 for SV(W|O) and 28S
ctatgactctcttaaggtagccaaatgcctcgtcatctaattagtgacgcgcatgaatggatgaacgagattcccactgtccctacctactatccagcgaaaccacagccaagggaacgg

SEQ ID NO: 49730 - DNA, 120 bp, Homo sapiens
  misc_feature: 754 for SV(W|O) and 28S
cgcgcttcattgaatttcttcactttgacattcagagcactgggcagaaatcacatcgcgtcaacacccgccgcgggccttcgcgatgctttgttttaattaaacagtcggattcccctg

SEQ ID NO: 49731 - DNA, 120 bp, Homo sapiens
  misc_feature: 754 for SV(W|O) and 28S
ccgtccactctcgactgccggcgacggccgggtatgggcccgacgctccagcgccatccattttcagggctagttgattcggcaggtgagttgttacacactccttagcggattccgact

SEQ ID NO: 49732 - DNA, 120 bp, Homo sapiens
  misc_feature: 754 for SV(W|O) and 28S
catacaccaaatgtctgaacctgcggttcctctcgtactgagcaggattaccatggcaacaacacatcatcagtagggtaaaactaacctgtctcacgacggtctaaacccagctcacgt

SEQ ID NO: 49733 - DNA, 120 bp, Homo sapiens
  misc_feature: 753 for SV(W|O) and 28S
agctcaacagggtcttctttccccgctgattccgccaagcccgttcccttggctgtggtttcgctggatagtaggtagggacagtgggaatctcgttcatccattcatgcgcgtcactaa

SEQ ID NO: 49734 - DNA, 120 bp, Homo sapiens
  misc_feature: 753 for SV(W|O) and 28S
tctcgactgccggcgacggccgggtatgggcccgacgctccagcgccatccattttcagggctagttgattcggcaggtgagttgttacacactccttagcggattccgacttccatggc

SEQ ID NO: 49735 - DNA, 120 bp, Homo sapiens
  misc_feature: 753 for SV(W|O) and 28S
tatgtgcttggctgaggagccaatggggcgaagctaccatctgtgggattatgactgaacgcctctaagtcagaatcccgcccaggcggaacgatacggcagcgccgcggagcctcggtt

SEQ ID NO: 49736 - DNA, 120 bp, Homo sapiens
  misc_feature: 753 for SV(W|O) and 28S
aacctgtctcacgacggtctaaacccagctcacgttccctattagtgggtgaacaatccaacgcttggtgaattctgcttcacaatgataggaagagccgacatcgaaggatcaaaaagc

SEQ ID NO: 49737 - DNA, 120 bp, Homo sapiens
  misc_feature: 753 for SV(W|O) and 28S
caaaaggtcagaaggatcgtgaggccccgctttcacggtctgtattcgtactgaaaatcaagatcaagcgagcttttgcccttctgctccacgggaggtttctgtcctccctgagctcgc

SEQ ID NO: 49738 - DNA, 120 bp, Homo sapiens
  misc_feature: 753 for SV(W|O) and 28S
gcgacggccgggtatgggcccgacgctccagcgccatccattttcagggctagttgattcggcaggtgagttgttacacactccttagcggattccgacttccatggccaccgtcctgct

SEQ ID NO: 49739 - DNA, 120 bp, Homo sapiens
  misc_feature: 753 for SV(W|O) and 28S
atcgtgaggccccgctttcacggtctgtattcgtactgaaaatcaagatcaagcgagcttttgcccttctgctccacgggaggtttctgtcctccctgagctcgccttaggacacctgcg

SEQ ID NO: 49740 - DNA, 120 bp, Homo sapiens
  misc_feature: 752 for SV(W|O) and 28S
ttaggacccgaaagatggtgaactatgcctgggcagggcgaagccagaggaaactctggtggaggtccgtagcggtcctgacgtgcaaatcggtcgtccgacctgggtataggggcgaaa

SEQ ID NO: 49741 - DNA, 120 bp, Homo sapiens
  misc_feature: 752 for SV(W|O) and 28S
gtactgaaaatcaagatcaagcgagcttttgcccttctgctccacgggaggtttctgtcctccctgagctcgccttaggacacctgcgttaccgtttgacaggtgtaccgccccagtcaa

SEQ ID NO: 49742 - DNA, 120 bp, Homo sapiens
  misc_feature: 752 for SV(W|O) and 28S
tggtttcgctggatagtaggtagggacagtgggaatctcgttcatccattcatgcgcgtcactaattagatgacgaggcatttggctaccttaagagagtcatagttactcccgccgttt

SEQ ID NO: 49743 - DNA, 120 bp, Homo sapiens
  misc_feature: 752 for SV(W|O) and 28S
tggtgtatgtgcttggctgaggagccaatggggcgaagctaccatctgtgggattatgactgaacgcctctaagtcagaatcccgcccaggcggaacgatacggcagcgccgcggagcct

SEQ ID NO: 49744 - DNA, 120 bp, Homo sapiens
  misc_feature: 752 for SV(W|O) and 28S
tcgtactgaaaatcaagatcaagcgagcttttgcccttctgctccacgggaggtttctgtcctccctgagctcgccttaggacacctgcgttaccgtttgacaggtgtaccgccccagtc

SEQ ID NO: 49745 - DNA, 120 bp, Homo sapiens
  misc_feature: 752 for SV(W|O) and 28S
taggacccgaaagatggtgaactatgcctgggcagggcgaagccagaggaaactctggtggaggtccgtagcggtcctgacgtgcaaatcggtcgtccgacctgggtataggggcgaaag

SEQ ID NO: 49746 - DNA, 120 bp, Homo sapiens
  misc_feature: 752 for SV(W|O) and 28S
gtgcttggctgaggagccaatggggcgaagctaccatctgtgggattatgactgaacgcctctaagtcagaatcccgcccaggcggaacgatacggcagcgccgcggagcctcggttggc

SEQ ID NO: 49747 - DNA, 120 bp, Homo sapiens
  misc_feature: 752 for SV(W|O) and 28S
gtccactctcgactgccggcgacggccgggtatgggcccgacgctccagcgccatccattttcagggctagttgattcggcaggtgagttgttacacactccttagcggattccgacttc

SEQ ID NO: 49748 - DNA, 120 bp, Homo sapiens
  misc_feature: 752 for SV(W|O) and 28S
gcagaaatcacatcgcgtcaacacccgccgcgggccttcgcgatgctttgttttaattaaacagtcggattcccctggtccgcaccagttctaagtcggctgctaggcgccggccgaggc

SEQ ID NO: 49749 - DNA, 120 bp, Homo sapiens
  misc_feature: 752 for SV(W|O) and 28S
cgccccgctccccgcccccggagccccgcggacgctacgccgcgacgagtaggagggccgctgcggtgagccttgaagcctagggcgcgggcccgggtggagccgccgcaggtgcagatc

SEQ ID NO: 49750 - DNA, 120 bp, Homo sapiens
  misc_feature: 752 for SV(W|O) and 28S
cgcttcattgaatttcttcactttgacattcagagcactgggcagaaatcacatcgcgtcaacacccgccgcgggccttcgcgatgctttgttttaattaaacagtcggattcccctggt

SEQ ID NO: 49751 - DNA, 120 bp, Homo sapiens
  misc_feature: 752 for SV(W|O) and 28S
ccaaaaggtcagaaggatcgtgaggccccgctttcacggtctgtattcgtactgaaaatcaagatcaagcgagcttttgcccttctgctccacgggaggtttctgtcctccctgagctcg

SEQ ID NO: 49752 - DNA, 120 bp, Homo sapiens
  misc_feature: 751 for SV(W|O) and 28S
tgttaggacccgaaagatggtgaactatgcctgggcagggcgaagccagaggaaactctggtggaggtccgtagcggtcctgacgtgcaaatcggtcgtccgacctgggtataggggcga

SEQ ID NO: 49753 - DNA, 120 bp, Homo sapiens
  misc_feature: 751 for SV(W|O) and 28S
gacttgggccccccacgagcggcgccggggagcgggtcttccgtacgccacatgtcccgcgccccgccgcggggcggggattcggcgctgggctcttccctgttcactcgccgttactga

SEQ ID NO: 49754 - DNA, 120 bp, Homo sapiens
  misc_feature: 751 for SV(W|O) and 28S
taaaacccaaaaggtcagaaggatcgtgaggccccgctttcacggtctgtattcgtactgaaaatcaagatcaagcgagcttttgcccttctgctccacgggaggtttctgtcctccctg

SEQ ID NO: 49755 - DNA, 120 bp, Homo sapiens
  misc_feature: 751 for SV(W|O) and 28S
gtccagtgcggtaacgcgaccgatcccggagaagccggcgggagccccggggagagttctcttttctttgtgaagggcagggcgccctggaatgggttcgccccgagagaggggcccgtg

SEQ ID NO: 49756 - DNA, 120 bp, Homo sapiens
  misc_feature: 751 for SV(W|O) and 28S
acccgcgcttcattgaatttcttcactttgacattcagagcactgggcagaaatcacatcgcgtcaacacccgccgcgggccttcgcgatgctttgttttaattaaacagtcggattccc

SEQ ID NO: 49757 - DNA, 120 bp, Homo sapiens
  misc_feature: 751 for SV(W|O) and 28S
ccgccggcggggacaggcgggggaccggctatccgaggccaaccgaggctccgcggcgctgccgtatcgttccgcctgggcgggattctgacttagaggcgttcagtcataatcccacag

SEQ ID NO: 49758 - DNA, 120 bp, Homo sapiens
  misc_feature: 751 for SV(W|O) and 28S
cgtccagtgcggtaacgcgaccgatcccggagaagccggcgggagccccggggagagttctcttttctttgtgaagggcagggcgccctggaatgggttcgccccgagagaggggcccgt

SEQ ID NO: 49759 - DNA, 120 bp, Homo sapiens
  misc_feature: 751 for SV(W|O) and 28S
cgtccactctcgactgccggcgacggccgggtatgggcccgacgctccagcgccatccattttcagggctagttgattcggcaggtgagttgttacacactccttagcggattccgactt

SEQ ID NO: 49760 - DNA, 120 bp, Homo sapiens
  misc_feature: 750 for SV(W|O) and 28S
ttggctgtggtttcgctggatagtaggtagggacagtgggaatctcgttcatccattcatgcgcgtcactaattagatgacgaggcatttggctaccttaagagagtcatagttactccc

SEQ ID NO: 49761 - DNA, 120 bp, Homo sapiens
  misc_feature: 750 for SV(W|O) and 28S
cgtactgaaaatcaagatcaagcgagcttttgcccttctgctccacgggaggtttctgtcctccctgagctcgccttaggacacctgcgttaccgtttgacaggtgtaccgccccagtca

SEQ ID NO: 49762 - DNA, 120 bp, Homo sapiens
  misc_feature: 750 for SV(W|O) and 28S
cttaaggtagccaaatgcctcgtcatctaattagtgacgcgcatgaatggatgaacgagattcccactgtccctacctactatccagcgaaaccacagccaagggaacgggcttggcgga

SEQ ID NO: 49763 - DNA, 120 bp, Homo sapiens
  misc_feature: 750 for SV(W|O) and 28S
gtgtatgtgcttggctgaggagccaatggggcgaagctaccatctgtgggattatgactgaacgcctctaagtcagaatcccgcccaggcggaacgatacggcagcgccgcggagcctcg

SEQ ID NO: 49764 - DNA, 120 bp, Homo sapiens
  misc_feature: 750 for SV(W|O) and 28S
cgactgccggcgacggccgggtatgggcccgacgctccagcgccatccattttcagggctagttgattcggcaggtgagttgttacacactccttagcggattccgacttccatggccac

SEQ ID NO: 49765 - DNA, 120 bp, Homo sapiens
  misc_feature: 750 for SV(W|O) and 28S
cgaggcgtccagtgcggtaacgcgaccgatcccggagaagccggcgggagccccggggagagttctcttttctttgtgaagggcagggcgccctggaatgggttcgccccgagagagggg

SEQ ID NO: 49766 - DNA, 120 bp, Homo sapiens
  misc_feature: 750 for SV(W|O) and 28S
cccgctccccgcccccggagccccgcggacgctacgccgcgacgagtaggagggccgctgcggtgagccttgaagcctagggcgcgggcccgggtggagccgccgcaggtgcagatcttg

SEQ ID NO: 49767 - DNA, 120 bp, Homo sapiens
  misc_feature: 749 for SV(W|O) and 28S
ttcatgcgcgtcactaattagatgacgaggcatttggctaccttaagagagtcatagttactcccgccgtttacccgcgcttcattgaatttcttcactttgacattcagagcactgggc

SEQ ID NO: 49768 - DNA, 120 bp, Homo sapiens
  misc_feature: 749 for SV(W|O) and 28S
tgcttaaaacccaaaaggtcagaaggatcgtgaggccccgctttcacggtctgtattcgtactgaaaatcaagatcaagcgagcttttgcccttctgctccacgggaggtttctgtcctc

SEQ ID NO: 49769 - DNA, 120 bp, Homo sapiens
  misc_feature: 749 for SV(W|O) and 28S
tatgactctcttaaggtagccaaatgcctcgtcatctaattagtgacgcgcatgaatggatgaacgagattcccactgtccctacctactatccagcgaaaccacagccaagggaacggg

SEQ ID NO: 49770 - DNA, 120 bp, Homo sapiens
  misc_feature: 749 for SV(W|O) and 28S
gttctcgtttgaatatttgctactaccaccaagatctgcacctgcggcggctccacccgggcccgcgccctaggcttcaaggctcaccgcagcggccctcctactcgtcgcggcgtagcg

SEQ ID NO: 49771 - DNA, 120 bp, Homo sapiens
  misc_feature: 749 for SV(W|O) and 28S
cggggacagtgccaggtggggagtttgactggggcggtacacctgtcaaacggtaacgcaggtgtcctaaggcgagctcagggaggacagaaacctcccgtggagcagaagggcaaaagc

SEQ ID NO: 49772 - DNA, 120 bp, Homo sapiens
  misc_feature: 749 for SV(W|O) and 28S
ctgcttaaaacccaaaaggtcagaaggatcgtgaggccccgctttcacggtctgtattcgtactgaaaatcaagatcaagcgagcttttgcccttctgctccacgggaggtttctgtcct

SEQ ID NO: 49773 - DNA, 120 bp, Homo sapiens
  misc_feature: 749 for SV(W|O) and 28S
ctcttaaggtagccaaatgcctcgtcatctaattagtgacgcgcatgaatggatgaacgagattcccactgtccctacctactatccagcgaaaccacagccaagggaacgggcttggcg

SEQ ID NO: 49774 - DNA, 120 bp, Homo sapiens
  misc_feature: 749 for SV(W|O) and 28S
aaacccaaaaggtcagaaggatcgtgaggccccgctttcacggtctgtattcgtactgaaaatcaagatcaagcgagcttttgcccttctgctccacgggaggtttctgtcctccctgag

SEQ ID NO: 49775 - DNA, 120 bp, Homo sapiens
  misc_feature: 749 for SV(W|O) and 28S
ccggagtggcggagatgggcgccgcgaggcgtccagtgcggtaacgcgaccgatcccggagaagccggcgggagccccggggagagttctcttttctttgtgaagggcagggcgccctgg

SEQ ID NO: 49776 - DNA, 120 bp, Homo sapiens
  misc_feature: 749 for SV(W|O) and 28S
cattcatgcgcgtcactaattagatgacgaggcatttggctaccttaagagagtcatagttactcccgccgtttacccgcgcttcattgaatttcttcactttgacattcagagcactgg

SEQ ID NO: 49777 - DNA, 120 bp, Homo sapiens
  misc_feature: 749 for SV(W|O) and 28S
actctcgactgccggcgacggccgggtatgggcccgacgctccagcgccatccattttcagggctagttgattcggcaggtgagttgttacacactccttagcggattccgacttccatg

SEQ ID NO: 49778 - DNA, 120 bp, Homo sapiens
  misc_feature: 748 for SV(W|O) and 28S
gttaggacccgaaagatggtgaactatgcctgggcagggcgaagccagaggaaactctggtggaggtccgtagcggtcctgacgtgcaaatcggtcgtccgacctgggtataggggcgaa

SEQ ID NO: 49779 - DNA, 120 bp, Homo sapiens
  misc_feature: 748 for SV(W|O) and 28S
tggctgtggtttcgctggatagtaggtagggacagtgggaatctcgttcatccattcatgcgcgtcactaattagatgacgaggcatttggctaccttaagagagtcatagttactcccg

SEQ ID NO: 49780 - DNA, 120 bp, Homo sapiens
  misc_feature: 748 for SV(W|O) and 28S
gttcctctcgtactgagcaggattaccatggcaacaacacatcatcagtagggtaaaactaacctgtctcacgacggtctaaacccagctcacgttccctattagtgggtgaacaatcca

SEQ ID NO: 49781 - DNA, 120 bp, Homo sapiens
  misc_feature: 748 for SV(W|O) and 28S
gtagggtaaaactaacctgtctcacgacggtctaaacccagctcacgttccctattagtgggtgaacaatccaacgcttggtgaattctgcttcacaatgataggaagagccgacatcga

SEQ ID NO: 49782 - DNA, 120 bp, Homo sapiens
  misc_feature: 748 for SV(W|O) and 28S
atgactctcttaaggtagccaaatgcctcgtcatctaattagtgacgcgcatgaatggatgaacgagattcccactgtccctacctactatccagcgaaaccacagccaagggaacgggc

SEQ ID NO: 49783 - DNA, 120 bp, Homo sapiens
  misc_feature: 748 for SV(W|O) and 28S
cagcgagagctcaccggacgccgccggaaccgcgacgctttccaaggcacgggcccctctctcggggcgaacccattccagggcgccctgcccttcacaaagaaaagagaactctccccg

SEQ ID NO: 49784 - DNA, 120 bp, Homo sapiens
  misc_feature: 748 for SV(W|O) and 28S
agtagggtaaaactaacctgtctcacgacggtctaaacccagctcacgttccctattagtgggtgaacaatccaacgcttggtgaattctgcttcacaatgataggaagagccgacatcg

SEQ ID NO: 49785 - DNA, 120 bp, Homo sapiens
  misc_feature: 748 for SV(W|O) and 28S
agcgagagctcaccggacgccgccggaaccgcgacgctttccaaggcacgggcccctctctcggggcgaacccattccagggcgccctgcccttcacaaagaaaagagaactctccccgg

SEQ ID NO: 49786 - DNA, 120 bp, Homo sapiens
  misc_feature: 748 for SV(W|O) and 28S
actctcttaaggtagccaaatgcctcgtcatctaattagtgacgcgcatgaatggatgaacgagattcccactgtccctacctactatccagcgaaaccacagccaagggaacgggcttg

SEQ ID NO: 49787 - DNA, 120 bp, Homo sapiens
  misc_feature: 748 for SV(W|O) and 28S
acccaaaaggtcagaaggatcgtgaggccccgctttcacggtctgtattcgtactgaaaatcaagatcaagcgagcttttgcccttctgctccacgggaggtttctgtcctccctgagct

SEQ ID NO: 49788 - DNA, 120 bp, Homo sapiens
  misc_feature: 747 for SV(W|O) and 28S
ccactctcgactgccggcgacggccgggtatgggcccgacgctccagcgccatccattttcagggctagttgattcggcaggtgagttgttacacactccttagcggattccgacttcca

SEQ ID NO: 49789 - DNA, 120 bp, Homo sapiens
  misc_feature: 747 for SV(W|O) and 28S
tcttaaggtagccaaatgcctcgtcatctaattagtgacgcgcatgaatggatgaacgagattcccactgtccctacctactatccagcgaaaccacagccaagggaacgggcttggcgg

SEQ ID NO: 49790 - DNA, 120 bp, Homo sapiens
  misc_feature: 747 for SV(W|O) and 28S
tcgcgttaccgcactggacgcctcgcggcgcccatctccgccactccggattcggggatctgaacccgactccctttcgatcggccgagggcaacggaggccatcgcccgtcccttcgga

SEQ ID NO: 49791 - DNA, 120 bp, Homo sapiens
  misc_feature: 747 for SV(W|O) and 28S
tccactctcgactgccggcgacggccgggtatgggcccgacgctccagcgccatccattttcagggctagttgattcggcaggtgagttgttacacactccttagcggattccgacttcc

SEQ ID NO: 49792 - DNA, 120 bp, Homo sapiens
  misc_feature: 747 for SV(W|O) and 28S
gttatccctgtggtaacttttctgacacctcctgcttaaaacccaaaaggtcagaaggatcgtgaggccccgctttcacggtctgtattcgtactgaaaatcaagatcaagcgagctttt

SEQ ID NO: 49793 - DNA, 120 bp, Homo sapiens
  misc_feature: 747 for SV(W|O) and 28S
gggcagaaatcacatcgcgtcaacacccgccgcgggccttcgcgatgctttgttttaattaaacagtcggattcccctggtccgcaccagttctaagtcggctgctaggcgccggccgag

SEQ ID NO: 49794 - DNA, 120 bp, Homo sapiens
  misc_feature: 747 for SV(W|O) and 28S
ggccgccgacacggccggacccgccgccgggttgaatcctccgggcggactgcgcggaccccacccgtttacctcttaacggtttcacgccctcttgaactctctcttcaaagttctttt

SEQ ID NO: 49795 - DNA, 120 bp, Homo sapiens
  misc_feature: 747 for SV(W|O) and 28S
ccattcatgcgcgtcactaattagatgacgaggcatttggctaccttaagagagtcatagttactcccgccgtttacccgcgcttcattgaatttcttcactttgacattcagagcactg

SEQ ID NO: 49796 - DNA, 120 bp, Homo sapiens
  misc_feature: 746 for SV(W|O) and 28S
aagctcaacagggtcttctttccccgctgattccgccaagcccgttcccttggctgtggtttcgctggatagtaggtagggacagtgggaatctcgttcatccattcatgcgcgtcacta

SEQ ID NO: 49797 - DNA, 120 bp, Homo sapiens
  misc_feature: 746 for SV(W|O) and 28S
ggtggccatggaagtcggaatccgctaaggagtgtgtaacaactcacctgccgaatcaactagccctgaaaatggatggcgctggagcgtcgggcccatacccggccgtcgccggcagtc

SEQ ID NO: 49798 - DNA, 120 bp, Homo sapiens
  misc_feature: 746 for SV(W|O) and 28S
gggccgccgacacggccggacccgccgccgggttgaatcctccgggcggactgcgcggaccccacccgtttacctcttaacggtttcacgccctcttgaactctctcttcaaagttcttt

SEQ ID NO: 49799 - DNA, 120 bp, Homo sapiens
  misc_feature: 746 for SV(W|O) and 28S
gcttaaaacccaaaaggtcagaaggatcgtgaggccccgctttcacggtctgtattcgtactgaaaatcaagatcaagcgagcttttgcccttctgctccacgggaggtttctgtcctcc

SEQ ID NO: 49800 - DNA, 120 bp, Homo sapiens
  misc_feature: 746 for SV(W|O) and 28S
cctgcttaaaacccaaaaggtcagaaggatcgtgaggccccgctttcacggtctgtattcgtactgaaaatcaagatcaagcgagcttttgcccttctgctccacgggaggtttctgtcc

SEQ ID NO: 49801 - DNA, 120 bp, Homo sapiens
  misc_feature: 746 for SV(W|O) and 28S
gctttgttttaattaaacagtcggattcccctggtccgcaccagttctaagtcggctgctaggcgccggccgaggcgaggcgccgcgcggaaccgcggccccgggggcggacccggcggg

SEQ ID NO: 49802 - DNA, 120 bp, Homo sapiens
  misc_feature: 746 for SV(W|O) and 28S
ccctgtggtaacttttctgacacctcctgcttaaaacccaaaaggtcagaaggatcgtgaggccccgctttcacggtctgtattcgtactgaaaatcaagatcaagcgagcttttgccct

SEQ ID NO: 49803 - DNA, 120 bp, Homo sapiens
  misc_feature: 746 for SV(W|O) and 28S
attcatgcgcgtcactaattagatgacgaggcatttggctaccttaagagagtcatagttactcccgccgtttacccgcgcttcattgaatttcttcactttgacattcagagcactggg

SEQ ID NO: 49804 - DNA, 120 bp, Homo sapiens
  misc_feature: 746 for SV(W|O) and 28S
atccggagtggcggagatgggcgccgcgaggcgtccagtgcggtaacgcgaccgatcccggagaagccggcgggagccccggggagagttctcttttctttgtgaagggcagggcgccct

SEQ ID NO: 49805 - DNA, 120 bp, Homo sapiens
  misc_feature: 745 for SV(W|O) and 28S
ttctcgtttgaatatttgctactaccaccaagatctgcacctgcggcggctccacccgggcccgcgccctaggcttcaaggctcaccgcagcggccctcctactcgtcgcggcgtagcgt

SEQ ID NO: 49806 - DNA, 120 bp, Homo sapiens
  misc_feature: 745 for SV(W|O) and 28S
tgggcgccgcgaggcgtccagtgcggtaacgcgaccgatcccggagaagccggcgggagccccggggagagttctcttttctttgtgaagggcagggcgccctggaatgggttcgccccg

SEQ ID NO: 49807 - DNA, 120 bp, Homo sapiens
  misc_feature: 745 for SV(W|O) and 28S
tcatgcgcgtcactaattagatgacgaggcatttggctaccttaagagagtcatagttactcccgccgtttacccgcgcttcattgaatttcttcactttgacattcagagcactgggca

SEQ ID NO: 49808 - DNA, 120 bp, Homo sapiens
  misc_feature: 745 for SV(W|O) and 28S
cagactagagtcaagctcaacagggtcttctttccccgctgattccgccaagcccgttcccttggctgtggtttcgctggatagtaggtagggacagtgggaatctcgttcatccattca

SEQ ID NO: 49809 - DNA, 120 bp, Homo sapiens
  misc_feature: 745 for SV(W|O) and 28S
tcgtgaggccccgctttcacggtctgtattcgtactgaaaatcaagatcaagcgagcttttgcccttctgctccacgggaggtttctgtcctccctgagctcgccttaggacacctgcgt

SEQ ID NO: 49810 - DNA, 120 bp, Homo sapiens
  misc_feature: 745 for SV(W|O) and 28S
tcctctcgtactgagcaggattaccatggcaacaacacatcatcagtagggtaaaactaacctgtctcacgacggtctaaacccagctcacgttccctattagtgggtgaacaatccaac

SEQ ID NO: 49811 - DNA, 120 bp, Homo sapiens
  misc_feature: 745 for SV(W|O) and 28S
gcgttaccgcactggacgcctcgcggcgcccatctccgccactccggattcggggatctgaacccgactccctttcgatcggccgagggcaacggaggccatcgcccgtcccttcggaac

SEQ ID NO: 49812 - DNA, 120 bp, Homo sapiens
  misc_feature: 745 for SV(W|O) and 28S
gaggccccgctttcacggtctgtattcgtactgaaaatcaagatcaagcgagcttttgcccttctgctccacgggaggtttctgtcctccctgagctcgccttaggacacctgcgttacc

SEQ ID NO: 49813 - DNA, 120 bp, Homo sapiens
  misc_feature: 745 for SV(W|O) and 28S
ggcagaaatcacatcgcgtcaacacccgccgcgggccttcgcgatgctttgttttaattaaacagtcggattcccctggtccgcaccagttctaagtcggctgctaggcgccggccgagg

SEQ ID NO: 49814 - DNA, 120 bp, Homo sapiens
  misc_feature: 745 for SV(W|O) and 28S
aacccaaaaggtcagaaggatcgtgaggccccgctttcacggtctgtattcgtactgaaaatcaagatcaagcgagcttttgcccttctgctccacgggaggtttctgtcctccctgagc

SEQ ID NO: 49815 - DNA, 120 bp, Homo sapiens
  misc_feature: 745 for SV(W|O) and 28S
cctctcgtactgagcaggattaccatggcaacaacacatcatcagtagggtaaaactaacctgtctcacgacggtctaaacccagctcacgttccctattagtgggtgaacaatccaacg

SEQ ID NO: 49816 - DNA, 120 bp, Homo sapiens
  misc_feature: 744 for SV(W|O) and 28S
tccggggacagtgccaggtggggagtttgactggggcggtacacctgtcaaacggtaacgcaggtgtcctaaggcgagctcagggaggacagaaacctcccgtggagcagaagggcaaaa

SEQ ID NO: 49817 - DNA, 120 bp, Homo sapiens
  misc_feature: 744 for SV(W|O) and 28S
tttcacggtctgtattcgtactgaaaatcaagatcaagcgagcttttgcccttctgctccacgggaggtttctgtcctccctgagctcgccttaggacacctgcgttaccgtttgacagg

SEQ ID NO: 49818 - DNA, 120 bp, Homo sapiens
  misc_feature: 744 for SV(W|O) and 28S
tgggccccccacgagcggcgccggggagcgggtcttccgtacgccacatgtcccgcgccccgccgcggggcggggattcggcgctgggctcttccctgttcactcgccgttactgaggga

SEQ ID NO: 49819 - DNA, 120 bp, Homo sapiens
  misc_feature: 744 for SV(W|O) and 28S
aaaacccaaaaggtcagaaggatcgtgaggccccgctttcacggtctgtattcgtactgaaaatcaagatcaagcgagcttttgcccttctgctccacgggaggtttctgtcctccctga

SEQ ID NO: 49820 - DNA, 120 bp, Homo sapiens
  misc_feature: 744 for SV(W|O) and 28S
ccagcgagagctcaccggacgccgccggaaccgcgacgctttccaaggcacgggcccctctctcggggcgaacccattccagggcgccctgcccttcacaaagaaaagagaactctcccc

SEQ ID NO: 49821 - DNA, 120 bp, Homo sapiens
  misc_feature: 744 for SV(W|O) and 28S
gggccagcgagagctcaccggacgccgccggaaccgcgacgctttccaaggcacgggcccctctctcggggcgaacccattccagggcgccctgcccttcacaaagaaaagagaactctc

SEQ ID NO: 49822 - DNA, 120 bp, Homo sapiens
  misc_feature: 744 for SV(W|O) and 28S
ccggggacagtgccaggtggggagtttgactggggcggtacacctgtcaaacggtaacgcaggtgtcctaaggcgagctcagggaggacagaaacctcccgtggagcagaagggcaaaag

SEQ ID NO: 49823 - DNA, 120 bp, Homo sapiens
  misc_feature: 744 for SV(W|O) and 28S
ccacgccccgctccccgcccccggagccccgcggacgctacgccgcgacgagtaggagggccgctgcggtgagccttgaagcctagggcgcgggcccgggtggagccgccgcaggtgcag

SEQ ID NO: 49824 - DNA, 120 bp, Homo sapiens
  misc_feature: 744 for SV(W|O) and 28S
aatatttgctactaccaccaagatctgcacctgcggcggctccacccgggcccgcgccctaggcttcaaggctcaccgcagcggccctcctactcgtcgcggcgtagcgtccgcggggct

SEQ ID NO: 49825 - DNA, 120 bp, Homo sapiens
  misc_feature: 743 for SV(W|O) and 28S
cgcgttaccgcactggacgcctcgcggcgcccatctccgccactccggattcggggatctgaacccgactccctttcgatcggccgagggcaacggaggccatcgcccgtcccttcggaa

SEQ ID NO: 49826 - DNA, 120 bp, Homo sapiens
  misc_feature: 743 for SV(W|O) and 28S
ggagtggcggagatgggcgccgcgaggcgtccagtgcggtaacgcgaccgatcccggagaagccggcgggagccccggggagagttctcttttctttgtgaagggcagggcgccctggaa

SEQ ID NO: 49827 - DNA, 120 bp, Homo sapiens
  misc_feature: 743 for SV(W|O) and 28S
ttatccctgtggtaacttttctgacacctcctgcttaaaacccaaaaggtcagaaggatcgtgaggccccgctttcacggtctgtattcgtactgaaaatcaagatcaagcgagcttttg

SEQ ID NO: 49828 - DNA, 120 bp, Homo sapiens
  misc_feature: 743 for SV(W|O) and 28S
tgggcagaaatcacatcgcgtcaacacccgccgcgggccttcgcgatgctttgttttaattaaacagtcggattcccctggtccgcaccagttctaagtcggctgctaggcgccggccga

SEQ ID NO: 49829 - DNA, 120 bp, Homo sapiens
  misc_feature: 743 for SV(W|O) and 28S
tgaggccccgctttcacggtctgtattcgtactgaaaatcaagatcaagcgagcttttgcccttctgctccacgggaggtttctgtcctccctgagctcgccttaggacacctgcgttac

SEQ ID NO: 49830 - DNA, 120 bp, Homo sapiens
  misc_feature: 743 for SV(W|O) and 28S
tgactctcttaaggtagccaaatgcctcgtcatctaattagtgacgcgcatgaatggatgaacgagattcccactgtccctacctactatccagcgaaaccacagccaagggaacgggct

SEQ ID NO: 49831 - DNA, 120 bp, Homo sapiens
  misc_feature: 743 for SV(W|O) and 28S
aggtgcagatcttggtggtagtagcaaatattcaaacgagaactttgaaggccgaagtggagaagggttccatgtgaacagcagttgaacatgggtcagtcggtcctgagagatgggcga

SEQ ID NO: 49832 - DNA, 120 bp, Homo sapiens
  misc_feature: 743 for SV(W|O) and 28S
cggagtggcggagatgggcgccgcgaggcgtccagtgcggtaacgcgaccgatcccggagaagccggcgggagccccggggagagttctcttttctttgtgaagggcagggcgccctgga

SEQ ID NO: 49833 - DNA, 120 bp, Homo sapiens
  misc_feature: 743 for SV(W|O) and 28S
cgccagaagcgagagcccctcggggctcgcccccccgcctcaccgggtcagtgaaaaaacgatcagagtagtggtatttcaccggcggcccgcagggccggcggaccccgccccgggccc

SEQ ID NO: 49834 - DNA, 120 bp, Homo sapiens
  misc_feature: 743 for SV(W|O) and 28S
ggcgacggccgggtatgggcccgacgctccagcgccatccattttcagggctagttgattcggcaggtgagttgttacacactccttagcggattccgacttccatggccaccgtcctgc

SEQ ID NO: 49835 - DNA, 120 bp, Homo sapiens
  misc_feature: 743 for SV(W|O) and 28S
gccccgctccccgcccccggagccccgcggacgctacgccgcgacgagtaggagggccgctgcggtgagccttgaagcctagggcgcgggcccgggtggagccgccgcaggtgcagatct

SEQ ID NO: 49836 - DNA, 120 bp, Homo sapiens
  misc_feature: 742 for SV(W|O) and 28S
tttgaatatttgctactaccaccaagatctgcacctgcggcggctccacccgggcccgcgccctaggcttcaaggctcaccgcagcggccctcctactcgtcgcggcgtagcgtccgcgg

SEQ ID NO: 49837 - DNA, 120 bp, Homo sapiens
  misc_feature: 742 for SV(W|O) and 28S
cccacgccccgctccccgcccccggagccccgcggacgctacgccgcgacgagtaggagggccgctgcggtgagccttgaagcctagggcgcgggcccgggtggagccgccgcaggtgca

SEQ ID NO: 49838 - DNA, 120 bp, Homo sapiens
  misc_feature: 742 for SV(W|O) and 28S
tccacttcggccttcaaagttctcgtttgaatatttgctactaccaccaagatctgcacctgcggcggctccacccgggcccgcgccctaggcttcaaggctcaccgcagcggccctcct

SEQ ID NO: 49839 - DNA, 120 bp, Homo sapiens
  misc_feature: 742 for SV(W|O) and 28S
taaggtagccaaatgcctcgtcatctaattagtgacgcgcatgaatggatgaacgagattcccactgtccctacctactatccagcgaaaccacagccaagggaacgggcttggcggaat

SEQ ID NO: 49840 - DNA, 120 bp, Homo sapiens
  misc_feature: 742 for SV(W|O) and 28S
gtggtttcgctggatagtaggtagggacagtgggaatctcgttcatccattcatgcgcgtcactaattagatgacgaggcatttggctaccttaagagagtcatagttactcccgccgtt

SEQ ID NO: 49841 - DNA, 120 bp, Homo sapiens
  misc_feature: 742 for SV(W|O) and 28S
cccgtccactctcgactgccggcgacggccgggtatgggcccgacgctccagcgccatccattttcagggctagttgattcggcaggtgagttgttacacactccttagcggattccgac

SEQ ID NO: 49842 - DNA, 120 bp, Homo sapiens
  misc_feature: 742 for SV(W|O) and 28S
gtatgtgcttggctgaggagccaatggggcgaagctaccatctgtgggattatgactgaacgcctctaagtcagaatcccgcccaggcggaacgatacggcagcgccgcggagcctcggt

SEQ ID NO: 49843 - DNA, 120 bp, Homo sapiens
  misc_feature: 742 for SV(W|O) and 28S
gcgagagctcaccggacgccgccggaaccgcgacgctttccaaggcacgggcccctctctcggggcgaacccattccagggcgccctgcccttcacaaagaaaagagaactctccccggg

SEQ ID NO: 49844 - DNA, 120 bp, Homo sapiens
  misc_feature: 742 for SV(W|O) and 28S
cccgaatccggagtggcggagatgggcgccgcgaggcgtccagtgcggtaacgcgaccgatcccggagaagccggcgggagccccggggagagttctcttttctttgtgaagggcagggc

SEQ ID NO: 49845 - DNA, 120 bp, Homo sapiens
  misc_feature: 742 for SV(W|O) and 28S
cgttaccgcactggacgcctcgcggcgcccatctccgccactccggattcggggatctgaacccgactccctttcgatcggccgagggcaacggaggccatcgcccgtcccttcggaacg

SEQ ID NO: 49846 - DNA, 120 bp, Homo sapiens
  misc_feature: 742 for SV(W|O) and 28S
cggcgacggccgggtatgggcccgacgctccagcgccatccattttcagggctagttgattcggcaggtgagttgttacacactccttagcggattccgacttccatggccaccgtcctg

SEQ ID NO: 49847 - DNA, 120 bp, Homo sapiens
  misc_feature: 742 for SV(W|O) and 28S
cgcgaggcgtccagtgcggtaacgcgaccgatcccggagaagccggcgggagccccggggagagttctcttttctttgtgaagggcagggcgccctggaatgggttcgccccgagagagg

SEQ ID NO: 49848 - DNA, 120 bp, Homo sapiens
  misc_feature: 742 for SV(W|O) and 28S
cagaaatcacatcgcgtcaacacccgccgcgggccttcgcgatgctttgttttaattaaacagtcggattcccctggtccgcaccagttctaagtcggctgctaggcgccggccgaggcg

SEQ ID NO: 49849 - DNA, 120 bp, Homo sapiens
  misc_feature: 742 for SV(W|O) and 28S
ccgccgggccgccgacacggccggacccgccgccgggttgaatcctccgggcggactgcgcggaccccacccgtttacctcttaacggtttcacgccctcttgaactctctcttcaaagt

SEQ ID NO: 49850 - DNA, 120 bp, Homo sapiens
  misc_feature: 742 for SV(W|O) and 28S
cactctcgactgccggcgacggccgggtatgggcccgacgctccagcgccatccattttcagggctagttgattcggcaggtgagttgttacacactccttagcggattccgacttccat

SEQ ID NO: 49851 - DNA, 120 bp, Homo sapiens
  misc_feature: 742 for SV(W|O) and 28S
atacaccaaatgtctgaacctgcggttcctctcgtactgagcaggattaccatggcaacaacacatcatcagtagggtaaaactaacctgtctcacgacggtctaaacccagctcacgtt

SEQ ID NO: 49852 - DNA, 120 bp, Homo sapiens
  misc_feature: 742 for SV(W|O) and 28S
agttatccctgtggtaacttttctgacacctcctgcttaaaacccaaaaggtcagaaggatcgtgaggccccgctttcacggtctgtattcgtactgaaaatcaagatcaagcgagcttt

SEQ ID NO: 49853 - DNA, 120 bp, Homo sapiens
  misc_feature: 741 for SV(W|O) and 28S
tgcggttcctctcgtactgagcaggattaccatggcaacaacacatcatcagtagggtaaaactaacctgtctcacgacggtctaaacccagctcacgttccctattagtgggtgaacaa

SEQ ID NO: 49854 - DNA, 120 bp, Homo sapiens
  misc_feature: 741 for SV(W|O) and 28S
cttcacaaagaaaagagaactctccccggggctcccgccggcttctccgggatcggtcgcgttaccgcactggacgcctcgcggcgcccatctccgccactccggattcggggatctgaa

SEQ ID NO: 49855 - DNA, 120 bp, Homo sapiens
  misc_feature: 741 for SV(W|O) and 28S
tgtattcgtactgaaaatcaagatcaagcgagcttttgcccttctgctccacgggaggtttctgtcctccctgagctcgccttaggacacctgcgttaccgtttgacaggtgtaccgccc

SEQ ID NO: 49856 - DNA, 120 bp, Homo sapiens
  misc_feature: 741 for SV(W|O) and 28S
tcctgagagatgggcgagcgccgttccgaagggacgggcgatggcctccgttgccctcggccgatcgaaagggagtcgggttcagatccccgaatccggagtggcggagatgggcgccgc

SEQ ID NO: 49857 - DNA, 120 bp, Homo sapiens
  misc_feature: 741 for SV(W|O) and 28S
ctccacttcggccttcaaagttctcgtttgaatatttgctactaccaccaagatctgcacctgcggcggctccacccgggcccgcgccctaggcttcaaggctcaccgcagcggccctcc

SEQ ID NO: 49858 - DNA, 120 bp, Homo sapiens
  misc_feature: 741 for SV(W|O) and 28S
gcgaggcgtccagtgcggtaacgcgaccgatcccggagaagccggcgggagccccggggagagttctcttttctttgtgaagggcagggcgccctggaatgggttcgccccgagagaggg

SEQ ID NO: 49859 - DNA, 120 bp, Homo sapiens
  misc_feature: 741 for SV(W|O) and 28S
cgagagctcaccggacgccgccggaaccgcgacgctttccaaggcacgggcccctctctcggggcgaacccattccagggcgccctgcccttcacaaagaaaagagaactctccccgggg

SEQ ID NO: 49860 - DNA, 120 bp, Homo sapiens
  misc_feature: 741 for SV(W|O) and 28S
cgacggccgggtatgggcccgacgctccagcgccatccattttcagggctagttgattcggcaggtgagttgttacacactccttagcggattccgacttccatggccaccgtcctgctg

SEQ ID NO: 49861 - DNA, 120 bp, Homo sapiens
  misc_feature: 741 for SV(W|O) and 28S
cccgctttcacggtctgtattcgtactgaaaatcaagatcaagcgagcttttgcccttctgctccacgggaggtttctgtcctccctgagctcgccttaggacacctgcgttaccgtttg

SEQ ID NO: 49862 - DNA, 120 bp, Homo sapiens
  misc_feature: 741 for SV(W|O) and 28S
ccccgctccccgcccccggagccccgcggacgctacgccgcgacgagtaggagggccgctgcggtgagccttgaagcctagggcgcgggcccgggtggagccgccgcaggtgcagatctt

SEQ ID NO: 49863 - DNA, 120 bp, Homo sapiens
  misc_feature: 740 for SV(W|O) and 28S
cccgccggcggggacaggcgggggaccggctatccgaggccaaccgaggctccgcggcgctgccgtatcgttccgcctgggcgggattctgacttagaggcgttcagtcataatcccaca

SEQ ID NO: 49864 - DNA, 120 bp, Homo sapiens
  misc_feature: 740 for SV(W|O) and 28S
tctgtattcgtactgaaaatcaagatcaagcgagcttttgcccttctgctccacgggaggtttctgtcctccctgagctcgccttaggacacctgcgttaccgtttgacaggtgtaccgc

SEQ ID NO: 49865 - DNA, 120 bp, Homo sapiens
  misc_feature: 740 for SV(W|O) and 28S
gggcgatggcctccgttgccctcggccgatcgaaagggagtcgggttcagatccccgaatccggagtggcggagatgggcgccgcgaggcgtccagtgcggtaacgcgaccgatcccgga

SEQ ID NO: 49866 - DNA, 120 bp, Homo sapiens
  misc_feature: 740 for SV(W|O) and 28S
tccgccgggccgccgacacggccggacccgccgccgggttgaatcctccgggcggactgcgcggaccccacccgtttacctcttaacggtttcacgccctcttgaactctctcttcaaag

SEQ ID NO: 49867 - DNA, 120 bp, Homo sapiens
  misc_feature: 740 for SV(W|O) and 28S
taacttttctgacacctcctgcttaaaacccaaaaggtcagaaggatcgtgaggccccgctttcacggtctgtattcgtactgaaaatcaagatcaagcgagcttttgcccttctgctcc

SEQ ID NO: 49868 - DNA, 120 bp, Homo sapiens
  misc_feature: 740 for SV(W|O) and 28S
acttttctgacacctcctgcttaaaacccaaaaggtcagaaggatcgtgaggccccgctttcacggtctgtattcgtactgaaaatcaagatcaagcgagcttttgcccttctgctccac

SEQ ID NO: 49869 - DNA, 120 bp, Homo sapiens
  misc_feature: 740 for SV(W|O) and 28S
gcggttcctctcgtactgagcaggattaccatggcaacaacacatcatcagtagggtaaaactaacctgtctcacgacggtctaaacccagctcacgttccctattagtgggtgaacaat

SEQ ID NO: 49870 - DNA, 120 bp, Homo sapiens
  misc_feature: 740 for SV(W|O) and 28S
ctcaacagggtcttctttccccgctgattccgccaagcccgttcccttggctgtggtttcgctggatagtaggtagggacagtgggaatctcgttcatccattcatgcgcgtcactaatt

SEQ ID NO: 49871 - DNA, 120 bp, Homo sapiens
  misc_feature: 740 for SV(W|O) and 28S
ccgggccgccgacacggccggacccgccgccgggttgaatcctccgggcggactgcgcggaccccacccgtttacctcttaacggtttcacgccctcttgaactctctcttcaaagttct

SEQ ID NO: 49872 - DNA, 120 bp, Homo sapiens
  misc_feature: 740 for SV(W|O) and 28S
ccgctccccgcccccggagccccgcggacgctacgccgcgacgagtaggagggccgctgcggtgagccttgaagcctagggcgcgggcccgggtggagccgccgcaggtgcagatcttgg

SEQ ID NO: 49873 - DNA, 120 bp, Homo sapiens
  misc_feature: 740 for SV(W|O) and 28S
ccgaaagatggtgaactatgcctgggcagggcgaagccagaggaaactctggtggaggtccgtagcggtcctgacgtgcaaatcggtcgtccgacctgggtataggggcgaaagactaat

SEQ ID NO: 49874 - DNA, 120 bp, Homo sapiens
  misc_feature: 740 for SV(W|O) and 28S
aaagatccgccgggccgccgacacggccggacccgccgccgggttgaatcctccgggcggactgcgcggaccccacccgtttacctcttaacggtttcacgccctcttgaactctctctt

SEQ ID NO: 49875 - DNA, 120 bp, Homo sapiens
  misc_feature: 739 for SV(W|O) and 28S
gggcccgacgctccagcgccatccattttcagggctagttgattcggcaggtgagttgttacacactccttagcggattccgacttccatggccaccgtcctgctgtctatatcaaccaa

SEQ ID NO: 49876 - DNA, 120 bp, Homo sapiens
  misc_feature: 739 for SV(W|O) and 28S
aagatggtgaactatgcctgggcagggcgaagccagaggaaactctggtggaggtccgtagcggtcctgacgtgcaaatcggtcgtccgacctgggtataggggcgaaagactaatcgaa

SEQ ID NO: 49877 - DNA, 120 bp, Homo sapiens
  misc_feature: 739 for SV(W|O) and 28S
ttcacggtctgtattcgtactgaaaatcaagatcaagcgagcttttgcccttctgctccacgggaggtttctgtcctccctgagctcgccttaggacacctgcgttaccgtttgacaggt

SEQ ID NO: 49878 - DNA, 120 bp, Homo sapiens
  misc_feature: 739 for SV(W|O) and 28S
tgagagatgggcgagcgccgttccgaagggacgggcgatggcctccgttgccctcggccgatcgaaagggagtcgggttcagatccccgaatccggagtggcggagatgggcgccgcgag

SEQ ID NO: 49879 - DNA, 120 bp, Homo sapiens
  misc_feature: 739 for SV(W|O) and 28S
tccattcatgcgcgtcactaattagatgacgaggcatttggctaccttaagagagtcatagttactcccgccgtttacccgcgcttcattgaatttcttcactttgacattcagagcact

SEQ ID NO: 49880 - DNA, 120 bp, Homo sapiens
  misc_feature: 739 for SV(W|O) and 28S
aatccggagtggcggagatgggcgccgcgaggcgtccagtgcggtaacgcgaccgatcccggagaagccggcgggagccccggggagagttctcttttctttgtgaagggcagggcgccc

SEQ ID NO: 49881 - DNA, 120 bp, Homo sapiens
  misc_feature: 739 for SV(W|O) and 28S
ggctgtggtttcgctggatagtaggtagggacagtgggaatctcgttcatccattcatgcgcgtcactaattagatgacgaggcatttggctaccttaagagagtcatagttactcccgc

SEQ ID NO: 49882 - DNA, 120 bp, Homo sapiens
  misc_feature: 739 for SV(W|O) and 28S
gcgccagaagcgagagcccctcggggctcgcccccccgcctcaccgggtcagtgaaaaaacgatcagagtagtggtatttcaccggcggcccgcagggccggcggaccccgccccgggcc

SEQ ID NO: 49883 - DNA, 120 bp, Homo sapiens
  misc_feature: 739 for SV(W|O) and 28S
acaccaaatgtctgaacctgcggttcctctcgtactgagcaggattaccatggcaacaacacatcatcagtagggtaaaactaacctgtctcacgacggtctaaacccagctcacgttcc

SEQ ID NO: 49884 - DNA, 120 bp, Homo sapiens
  misc_feature: 739 for SV(W|O) and 28S
cggttcctctcgtactgagcaggattaccatggcaacaacacatcatcagtagggtaaaactaacctgtctcacgacggtctaaacccagctcacgttccctattagtgggtgaacaatc

SEQ ID NO: 49885 - DNA, 120 bp, Homo sapiens
  misc_feature: 739 for SV(W|O) and 28S
gagagatgggcgagcgccgttccgaagggacgggcgatggcctccgttgccctcggccgatcgaaagggagtcgggttcagatccccgaatccggagtggcggagatgggcgccgcgagg

SEQ ID NO: 49886 - DNA, 120 bp, Homo sapiens
  misc_feature: 739 for SV(W|O) and 28S
gaaagatccgccgggccgccgacacggccggacccgccgccgggttgaatcctccgggcggactgcgcggaccccacccgtttacctcttaacggtttcacgccctcttgaactctctct

SEQ ID NO: 49887 - DNA, 120 bp, Homo sapiens
  misc_feature: 739 for SV(W|O) and 28S
ccgcgaggcgtccagtgcggtaacgcgaccgatcccggagaagccggcgggagccccggggagagttctcttttctttgtgaagggcagggcgccctggaatgggttcgccccgagagag

SEQ ID NO: 49888 - DNA, 120 bp, Homo sapiens
  misc_feature: 738 for SV(W|O) and 28S
cgatggcctccgttgccctcggccgatcgaaagggagtcgggttcagatccccgaatccggagtggcggagatgggcgccgcgaggcgtccagtgcggtaacgcgaccgatcccggagaa

SEQ ID NO: 49889 - DNA, 120 bp, Homo sapiens
  misc_feature: 738 for SV(W|O) and 28S
ttaaggtagccaaatgcctcgtcatctaattagtgacgcgcatgaatggatgaacgagattcccactgtccctacctactatccagcgaaaccacagccaagggaacgggcttggcggaa

SEQ ID NO: 49890 - DNA, 120 bp, Homo sapiens
  misc_feature: 738 for SV(W|O) and 28S
aacttttctgacacctcctgcttaaaacccaaaaggtcagaaggatcgtgaggccccgctttcacggtctgtattcgtactgaaaatcaagatcaagcgagcttttgcccttctgctcca

SEQ ID NO: 49891 - DNA, 120 bp, Homo sapiens
  misc_feature: 738 for SV(W|O) and 28S
cacgccccgctccccgcccccggagccccgcggacgctacgccgcgacgagtaggagggccgctgcggtgagccttgaagcctagggcgcgggcccgggtggagccgccgcaggtgcaga

SEQ ID NO: 49892 - DNA, 120 bp, Homo sapiens
  misc_feature: 738 for SV(W|O) and 28S
ggacccgaaagatggtgaactatgcctgggcagggcgaagccagaggaaactctggtggaggtccgtagcggtcctgacgtgcaaatcggtcgtccgacctgggtataggggcgaaagac

SEQ ID NO: 49893 - DNA, 120 bp, Homo sapiens
  misc_feature: 738 for SV(W|O) and 28S
gatgggcgccgcgaggcgtccagtgcggtaacgcgaccgatcccggagaagccggcgggagccccggggagagttctcttttctttgtgaagggcagggcgccctggaatgggttcgccc

SEQ ID NO: 49894 - DNA, 120 bp, Homo sapiens
  misc_feature: 738 for SV(W|O) and 28S
gctgtggtttcgctggatagtaggtagggacagtgggaatctcgttcatccattcatgcgcgtcactaattagatgacgaggcatttggctaccttaagagagtcatagttactcccgcc

SEQ ID NO: 49895 - DNA, 120 bp, Homo sapiens
  misc_feature: 738 for SV(W|O) and 28S
ggacttgggccccccacgagcggcgccggggagcgggtcttccgtacgccacatgtcccgcgccccgccgcggggcggggattcggcgctgggctcttccctgttcactcgccgttactg

SEQ ID NO: 49896 - DNA, 120 bp, Homo sapiens
  misc_feature: 738 for SV(W|O) and 28S
gaatatttgctactaccaccaagatctgcacctgcggcggctccacccgggcccgcgccctaggcttcaaggctcaccgcagcggccctcctactcgtcgcggcgtagcgtccgcggggc

SEQ ID NO: 49897 - DNA, 120 bp, Homo sapiens
  misc_feature: 738 for SV(W|O) and 28S
gactctcttaaggtagccaaatgcctcgtcatctaattagtgacgcgcatgaatggatgaacgagattcccactgtccctacctactatccagcgaaaccacagccaagggaacgggctt

SEQ ID NO: 49898 - DNA, 120 bp, Homo sapiens
  misc_feature: 738 for SV(W|O) and 28S
cgtgaggccccgctttcacggtctgtattcgtactgaaaatcaagatcaagcgagcttttgcccttctgctccacgggaggtttctgtcctccctgagctcgccttaggacacctgcgtt

SEQ ID NO: 49899 - DNA, 120 bp, Homo sapiens
  misc_feature: 738 for SV(W|O) and 28S
cctgagagatgggcgagcgccgttccgaagggacgggcgatggcctccgttgccctcggccgatcgaaagggagtcgggttcagatccccgaatccggagtggcggagatgggcgccgcg

SEQ ID NO: 49900 - DNA, 120 bp, Homo sapiens
  misc_feature: 738 for SV(W|O) and 28S
cctgtggtaacttttctgacacctcctgcttaaaacccaaaaggtcagaaggatcgtgaggccccgctttcacggtctgtattcgtactgaaaatcaagatcaagcgagcttttgccctt

SEQ ID NO: 49901 - DNA, 120 bp, Homo sapiens
  misc_feature: 738 for SV(W|O) and 28S
cctcctgcttaaaacccaaaaggtcagaaggatcgtgaggccccgctttcacggtctgtattcgtactgaaaatcaagatcaagcgagcttttgcccttctgctccacgggaggtttctg

SEQ ID NO: 49902 - DNA, 120 bp, Homo sapiens
  misc_feature: 737 for SV(W|O) and 28S
ttgaatatttgctactaccaccaagatctgcacctgcggcggctccacccgggcccgcgccctaggcttcaaggctcaccgcagcggccctcctactcgtcgcggcgtagcgtccgcggg

SEQ ID NO: 49903 - DNA, 120 bp, Homo sapiens
  misc_feature: 737 for SV(W|O) and 28S
ttgaacatgggtcagtcggtcctgagagatgggcgagcgccgttccgaagggacgggcgatggcctccgttgccctcggccgatcgaaagggagtcgggttcagatccccgaatccggag

SEQ ID NO: 49904 - DNA, 120 bp, Homo sapiens
  misc_feature: 737 for SV(W|O) and 28S
ccccggagccccgcggacgctacgccgcgacgagtaggagggccgctgcggtgagccttgaagcctagggcgcgggcccgggtggagccgccgcaggtgcagatcttggtggtagtagca

SEQ ID NO: 49905 - DNA, 120 bp, Homo sapiens
  misc_feature: 737 for SV(W|O) and 28S
tgccggcgacggccgggtatgggcccgacgctccagcgccatccattttcagggctagttgattcggcaggtgagttgttacacactccttagcggattccgacttccatggccaccgtc

SEQ ID NO: 49906 - DNA, 120 bp, Homo sapiens
  misc_feature: 737 for SV(W|O) and 28S
tgaatatttgctactaccaccaagatctgcacctgcggcggctccacccgggcccgcgccctaggcttcaaggctcaccgcagcggccctcctactcgtcgcggcgtagcgtccgcgggg

SEQ ID NO: 49907 - DNA, 120 bp, Homo sapiens
  misc_feature: 737 for SV(W|O) and 28S
tccctgtggtaacttttctgacacctcctgcttaaaacccaaaaggtcagaaggatcgtgaggccccgctttcacggtctgtattcgtactgaaaatcaagatcaagcgagcttttgccc

SEQ ID NO: 49908 - DNA, 120 bp, Homo sapiens
  misc_feature: 737 for SV(W|O) and 28S
ccttcacaaagaaaagagaactctccccggggctcccgccggcttctccgggatcggtcgcgttaccgcactggacgcctcgcggcgcccatctccgccactccggattcggggatctga

SEQ ID NO: 49909 - DNA, 120 bp, Homo sapiens
  misc_feature: 737 for SV(W|O) and 28S
ccgggtatgggcccgacgctccagcgccatccattttcagggctagttgattcggcaggtgagttgttacacactccttagcggattccgacttccatggccaccgtcctgctgtctata

SEQ ID NO: 49910 - DNA, 120 bp, Homo sapiens
  misc_feature: 737 for SV(W|O) and 28S
gtattcgtactgaaaatcaagatcaagcgagcttttgcccttctgctccacgggaggtttctgtcctccctgagctcgccttaggacacctgcgttaccgtttgacaggtgtaccgcccc

SEQ ID NO: 49911 - DNA, 120 bp, Homo sapiens
  misc_feature: 737 for SV(W|O) and 28S
aaggacttgggccccccacgagcggcgccggggagcgggtcttccgtacgccacatgtcccgcgccccgccgcggggcggggattcggcgctgggctcttccctgttcactcgccgttac

SEQ ID NO: 49912 - DNA, 120 bp, Homo sapiens
  misc_feature: 737 for SV(W|O) and 28S
gacggccgggtatgggcccgacgctccagcgccatccattttcagggctagttgattcggcaggtgagttgttacacactccttagcggattccgacttccatggccaccgtcctgctgt

SEQ ID NO: 49913 - DNA, 120 bp, Homo sapiens
  misc_feature: 737 for SV(W|O) and 28S
acggccgggtatgggcccgacgctccagcgccatccattttcagggctagttgattcggcaggtgagttgttacacactccttagcggattccgacttccatggccaccgtcctgctgtc

SEQ ID NO: 49914 - DNA, 120 bp, Homo sapiens
  misc_feature: 737 for SV(W|O) and 28S
ctgtggtttcgctggatagtaggtagggacagtgggaatctcgttcatccattcatgcgcgtcactaattagatgacgaggcatttggctaccttaagagagtcatagttactcccgccg

SEQ ID NO: 49915 - DNA, 120 bp, Homo sapiens
  misc_feature: 737 for SV(W|O) and 28S
aaatcacatcgcgtcaacacccgccgcgggccttcgcgatgctttgttttaattaaacagtcggattcccctggtccgcaccagttctaagtcggctgctaggcgccggccgaggcgagg

SEQ ID NO: 49916 - DNA, 120 bp, Homo sapiens
  misc_feature: 737 for SV(W|O) and 28S
agactagagtcaagctcaacagggtcttctttccccgctgattccgccaagcccgttcccttggctgtggtttcgctggatagtaggtagggacagtgggaatctcgttcatccattcat

SEQ ID NO: 49917 - DNA, 120 bp, Homo sapiens
  misc_feature: 736 for SV(W|O) and 28S
ctccggggacagtgccaggtggggagtttgactggggcggtacacctgtcaaacggtaacgcaggtgtcctaaggcgagctcagggaggacagaaacctcccgtggagcagaagggcaaa

SEQ ID NO: 49918 - DNA, 120 bp, Homo sapiens
  misc_feature: 736 for SV(W|O) and 28S
tctcgtttgaatatttgctactaccaccaagatctgcacctgcggcggctccacccgggcccgcgccctaggcttcaaggctcaccgcagcggccctcctactcgtcgcggcgtagcgtc

SEQ ID NO: 49919 - DNA, 120 bp, Homo sapiens
  misc_feature: 736 for SV(W|O) and 28S
tcccgtccactctcgactgccggcgacggccgggtatgggcccgacgctccagcgccatccattttcagggctagttgattcggcaggtgagttgttacacactccttagcggattccga

SEQ ID NO: 49920 - DNA, 120 bp, Homo sapiens
  misc_feature: 736 for SV(W|O) and 28S
tacaccaaatgtctgaacctgcggttcctctcgtactgagcaggattaccatggcaacaacacatcatcagtagggtaaaactaacctgtctcacgacggtctaaacccagctcacgttc

SEQ ID NO: 49921 - DNA, 120 bp, Homo sapiens
  misc_feature: 736 for SV(W|O) and 28S
ggtttcgctggatagtaggtagggacagtgggaatctcgttcatccattcatgcgcgtcactaattagatgacgaggcatttggctaccttaagagagtcatagttactcccgccgttta

SEQ ID NO: 49922 - DNA, 120 bp, Homo sapiens
  misc_feature: 736 for SV(W|O) and 28S
atgggcgccgcgaggcgtccagtgcggtaacgcgaccgatcccggagaagccggcgggagccccggggagagttctcttttctttgtgaagggcagggcgccctggaatgggttcgcccc

SEQ ID NO: 49923 - DNA, 120 bp, Homo sapiens
  misc_feature: 736 for SV(W|O) and 28S
ctgtattcgtactgaaaatcaagatcaagcgagcttttgcccttctgctccacgggaggtttctgtcctccctgagctcgccttaggacacctgcgttaccgtttgacaggtgtaccgcc

SEQ ID NO: 49924 - DNA, 120 bp, Homo sapiens
  misc_feature: 736 for SV(W|O) and 28S
gctcaacagggtcttctttccccgctgattccgccaagcccgttcccttggctgtggtttcgctggatagtaggtagggacagtgggaatctcgttcatccattcatgcgcgtcactaat

SEQ ID NO: 49925 - DNA, 120 bp, Homo sapiens
  misc_feature: 736 for SV(W|O) and 28S
gccagactagagtcaagctcaacagggtcttctttccccgctgattccgccaagcccgttcccttggctgtggtttcgctggatagtaggtagggacagtgggaatctcgttcatccatt

SEQ ID NO: 49926 - DNA, 120 bp, Homo sapiens
  misc_feature: 736 for SV(W|O) and 28S
gagccccgcggacgctacgccgcgacgagtaggagggccgctgcggtgagccttgaagcctagggcgcgggcccgggtggagccgccgcaggtgcagatcttggtggtagtagcaaatat

SEQ ID NO: 49927 - DNA, 120 bp, Homo sapiens
  misc_feature: 736 for SV(W|O) and 28S
ctgtggtaacttttctgacacctcctgcttaaaacccaaaaggtcagaaggatcgtgaggccccgctttcacggtctgtattcgtactgaaaatcaagatcaagcgagcttttgcccttc

SEQ ID NO: 49928 - DNA, 120 bp, Homo sapiens
  misc_feature: 736 for SV(W|O) and 28S
cggccgggtatgggcccgacgctccagcgccatccattttcagggctagttgattcggcaggtgagttgttacacactccttagcggattccgacttccatggccaccgtcctgctgtct

SEQ ID NO: 49929 - DNA, 120 bp, Homo sapiens
  misc_feature: 735 for SV(W|O) and 28S
ctgcggttcctctcgtactgagcaggattaccatggcaacaacacatcatcagtagggtaaaactaacctgtctcacgacggtctaaacccagctcacgttccctattagtgggtgaaca

SEQ ID NO: 49930 - DNA, 120 bp, Homo sapiens
  misc_feature: 735 for SV(W|O) and 28S
tgtggtaacttttctgacacctcctgcttaaaacccaaaaggtcagaaggatcgtgaggccccgctttcacggtctgtattcgtactgaaaatcaagatcaagcgagcttttgcccttct

SEQ ID NO: 49931 - DNA, 120 bp, Homo sapiens
  misc_feature: 735 for SV(W|O) and 28S
ggcccgccggcggggacaggcgggggaccggctatccgaggccaaccgaggctccgcggcgctgccgtatcgttccgcctgggcgggattctgacttagaggcgttcagtcataatccca

SEQ ID NO: 49932 - DNA, 120 bp, Homo sapiens
  misc_feature: 735 for SV(W|O) and 28S
tagagtcaagctcaacagggtcttctttccccgctgattccgccaagcccgttcccttggctgtggtttcgctggatagtaggtagggacagtgggaatctcgttcatccattcatgcgc

SEQ ID NO: 49933 - DNA, 120 bp, Homo sapiens
  misc_feature: 735 for SV(W|O) and 28S
gcccgccggcggggacaggcgggggaccggctatccgaggccaaccgaggctccgcggcgctgccgtatcgttccgcctgggcgggattctgacttagaggcgttcagtcataatcccac

SEQ ID NO: 49934 - DNA, 120 bp, Homo sapiens
  misc_feature: 735 for SV(W|O) and 28S
ggccagcgagagctcaccggacgccgccggaaccgcgacgctttccaaggcacgggcccctctctcggggcgaacccattccagggcgccctgcccttcacaaagaaaagagaactctcc

SEQ ID NO: 49935 - DNA, 120 bp, Homo sapiens
  misc_feature: 735 for SV(W|O) and 28S
cttcggccttcaaagttctcgtttgaatatttgctactaccaccaagatctgcacctgcggcggctccacccgggcccgcgccctaggcttcaaggctcaccgcagcggccctcctactc

SEQ ID NO: 49936 - DNA, 120 bp, Homo sapiens
  misc_feature: 735 for SV(W|O) and 28S
gacccgaaagatggtgaactatgcctgggcagggcgaagccagaggaaactctggtggaggtccgtagcggtcctgacgtgcaaatcggtcgtccgacctgggtataggggcgaaagact

SEQ ID NO: 49937 - DNA, 120 bp, Homo sapiens
  misc_feature: 735 for SV(W|O) and 28S
cggggggcgggaaagatccgccgggccgccgacacggccggacccgccgccgggttgaatcctccgggcggactgcgcggaccccacccgtttacctcttaacggtttcacgccctcttg

SEQ ID NO: 49938 - DNA, 120 bp, Homo sapiens
  misc_feature: 735 for SV(W|O) and 28S
cgggccgccgacacggccggacccgccgccgggttgaatcctccgggcggactgcgcggaccccacccgtttacctcttaacggtttcacgccctcttgaactctctcttcaaagttctt

SEQ ID NO: 49939 - DNA, 120 bp, Homo sapiens
  misc_feature: 734 for SV(W|O) and 28S
gcccgacgctccagcgccatccattttcagggctagttgattcggcaggtgagttgttacacactccttagcggattccgacttccatggccaccgtcctgctgtctatatcaaccaaca

SEQ ID NO: 49940 - DNA, 120 bp, Homo sapiens
  misc_feature: 734 for SV(W|O) and 28S
gctttcacggtctgtattcgtactgaaaatcaagatcaagcgagcttttgcccttctgctccacgggaggtttctgtcctccctgagctcgccttaggacacctgcgttaccgtttgaca

SEQ ID NO: 49941 - DNA, 120 bp, Homo sapiens
  misc_feature: 734 for SV(W|O) and 28S
tgggcccgacgctccagcgccatccattttcagggctagttgattcggcaggtgagttgttacacactccttagcggattccgacttccatggccaccgtcctgctgtctatatcaacca

SEQ ID NO: 49942 - DNA, 120 bp, Homo sapiens
  misc_feature: 734 for SV(W|O) and 28S
tggtaacttttctgacacctcctgcttaaaacccaaaaggtcagaaggatcgtgaggccccgctttcacggtctgtattcgtactgaaaatcaagatcaagcgagcttttgcccttctgc

SEQ ID NO: 49943 - DNA, 120 bp, Homo sapiens
  misc_feature: 734 for SV(W|O) and 28S
agaaatcacatcgcgtcaacacccgccgcgggccttcgcgatgctttgttttaattaaacagtcggattcccctggtccgcaccagttctaagtcggctgctaggcgccggccgaggcga

SEQ ID NO: 49944 - DNA, 120 bp, Homo sapiens
  misc_feature: 734 for SV(W|O) and 28S
tccggagtggcggagatgggcgccgcgaggcgtccagtgcggtaacgcgaccgatcccggagaagccggcgggagccccggggagagttctcttttctttgtgaagggcagggcgccctg

SEQ ID NO: 49945 - DNA, 120 bp, Homo sapiens
  misc_feature: 734 for SV(W|O) and 28S
ggagccccgcggacgctacgccgcgacgagtaggagggccgctgcggtgagccttgaagcctagggcgcgggcccgggtggagccgccgcaggtgcagatcttggtggtagtagcaaata

SEQ ID NO: 49946 - DNA, 120 bp, Homo sapiens
  misc_feature: 734 for SV(W|O) and 28S
ggccgggtatgggcccgacgctccagcgccatccattttcagggctagttgattcggcaggtgagttgttacacactccttagcggattccgacttccatggccaccgtcctgctgtcta

SEQ ID NO: 49947 - DNA, 120 bp, Homo sapiens
  misc_feature: 734 for SV(W|O) and 28S
gtgaggccccgctttcacggtctgtattcgtactgaaaatcaagatcaagcgagcttttgcccttctgctccacgggaggtttctgtcctccctgagctcgccttaggacacctgcgtta

SEQ ID NO: 49948 - DNA, 120 bp, Homo sapiens
  misc_feature: 734 for SV(W|O) and 28S
atccattcatgcgcgtcactaattagatgacgaggcatttggctaccttaagagagtcatagttactcccgccgtttacccgcgcttcattgaatttcttcactttgacattcagagcac

SEQ ID NO: 49949 - DNA, 120 bp, Homo sapiens
  misc_feature: 734 for SV(W|O) and 28S
ggtaacttttctgacacctcctgcttaaaacccaaaaggtcagaaggatcgtgaggccccgctttcacggtctgtattcgtactgaaaatcaagatcaagcgagcttttgcccttctgct

SEQ ID NO: 49950 - DNA, 120 bp, Homo sapiens
  misc_feature: 734 for SV(W|O) and 28S
ggcgatggcctccgttgccctcggccgatcgaaagggagtcgggttcagatccccgaatccggagtggcggagatgggcgccgcgaggcgtccagtgcggtaacgcgaccgatcccggag

SEQ ID NO: 49951 - DNA, 120 bp, Homo sapiens
  misc_feature: 734 for SV(W|O) and 28S
gcctcgcctcggccggcgcctagcagccgacttagaactggtgcggaccaggggaatccgactgtttaattaaaacaaagcatcgcgaaggcccgcggcgggtgttgacgcgatgtgatt

SEQ ID NO: 49952 - DNA, 120 bp, Homo sapiens
  misc_feature: 734 for SV(W|O) and 28S
gccgccgacacggccggacccgccgccgggttgaatcctccgggcggactgcgcggaccccacccgtttacctcttaacggtttcacgccctcttgaactctctcttcaaagttcttttc

SEQ ID NO: 49953 - DNA, 120 bp, Homo sapiens
  misc_feature: 734 for SV(W|O) and 28S
aagatccgccgggccgccgacacggccggacccgccgccgggttgaatcctccgggcggactgcgcggaccccacccgtttacctcttaacggtttcacgccctcttgaactctctcttc

SEQ ID NO: 49954 - DNA, 120 bp, Homo sapiens
  misc_feature: 734 for SV(W|O) and 28S
gaaatcacatcgcgtcaacacccgccgcgggccttcgcgatgctttgttttaattaaacagtcggattcccctggtccgcaccagttctaagtcggctgctaggcgccggccgaggcgag

SEQ ID NO: 49955 - DNA, 120 bp, Homo sapiens
  misc_feature: 734 for SV(W|O) and 28S
ctcctgcttaaaacccaaaaggtcagaaggatcgtgaggccccgctttcacggtctgtattcgtactgaaaatcaagatcaagcgagcttttgcccttctgctccacgggaggtttctgt

SEQ ID NO: 49956 - DNA, 120 bp, Homo sapiens
  misc_feature: 733 for SV(W|O) and 28S
gggccccccacgagcggcgccggggagcgggtcttccgtacgccacatgtcccgcgccccgccgcggggcggggattcggcgctgggctcttccctgttcactcgccgttactgagggaa

SEQ ID NO: 49957 - DNA, 120 bp, Homo sapiens
  misc_feature: 733 for SV(W|O) and 28S
tgtctcttcaccgtgccagactagagtcaagctcaacagggtcttctttccccgctgattccgccaagcccgttcccttggctgtggtttcgctggatagtaggtagggacagtgggaat

SEQ ID NO: 49958 - DNA, 120 bp, Homo sapiens
  misc_feature: 733 for SV(W|O) and 28S
gggcgccgcgaggcgtccagtgcggtaacgcgaccgatcccggagaagccggcgggagccccggggagagttctcttttctttgtgaagggcagggcgccctggaatgggttcgccccga

SEQ ID NO: 49959 - DNA, 120 bp, Homo sapiens
  misc_feature: 733 for SV(W|O) and 28S
tcacggtctgtattcgtactgaaaatcaagatcaagcgagcttttgcccttctgctccacgggaggtttctgtcctccctgagctcgccttaggacacctgcgttaccgtttgacaggtg

SEQ ID NO: 49960 - DNA, 120 bp, Homo sapiens
  misc_feature: 733 for SV(W|O) and 28S
ccacttcggccttcaaagttctcgtttgaatatttgctactaccaccaagatctgcacctgcggcggctccacccgggcccgcgccctaggcttcaaggctcaccgcagcggccctccta

SEQ ID NO: 49961 - DNA, 120 bp, Homo sapiens
  misc_feature: 733 for SV(W|O) and 28S
cacttcggccttcaaagttctcgtttgaatatttgctactaccaccaagatctgcacctgcggcggctccacccgggcccgcgccctaggcttcaaggctcaccgcagcggccctcctac

SEQ ID NO: 49962 - DNA, 120 bp, Homo sapiens
  misc_feature: 733 for SV(W|O) and 28S
agttctcgtttgaatatttgctactaccaccaagatctgcacctgcggcggctccacccgggcccgcgccctaggcttcaaggctcaccgcagcggccctcctactcgtcgcggcgtagc

SEQ ID NO: 49963 - DNA, 120 bp, Homo sapiens
  misc_feature: 733 for SV(W|O) and 28S
gccccccacgagcggcgccggggagcgggtcttccgtacgccacatgtcccgcgccccgccgcggggcggggattcggcgctgggctcttccctgttcactcgccgttactgagggaatc

SEQ ID NO: 49964 - DNA, 120 bp, Homo sapiens
  misc_feature: 733 for SV(W|O) and 28S
gactagagtcaagctcaacagggtcttctttccccgctgattccgccaagcccgttcccttggctgtggtttcgctggatagtaggtagggacagtgggaatctcgttcatccattcatg

SEQ ID NO: 49965 - DNA, 120 bp, Homo sapiens
  misc_feature: 733 for SV(W|O) and 28S
ccagactagagtcaagctcaacagggtcttctttccccgctgattccgccaagcccgttcccttggctgtggtttcgctggatagtaggtagggacagtgggaatctcgttcatccattc

SEQ ID NO: 49966 - DNA, 120 bp, Homo sapiens
  misc_feature: 733 for SV(W|O) and 28S
cggtggccatggaagtcggaatccgctaaggagtgtgtaacaactcacctgccgaatcaactagccctgaaaatggatggcgctggagcgtcgggcccatacccggccgtcgccggcagt

SEQ ID NO: 49967 - DNA, 120 bp, Homo sapiens
  misc_feature: 733 for SV(W|O) and 28S
cgccgggccgccgacacggccggacccgccgccgggttgaatcctccgggcggactgcgcggaccccacccgtttacctcttaacggtttcacgccctcttgaactctctcttcaaagtt

SEQ ID NO: 49968 - DNA, 120 bp, Homo sapiens
  misc_feature: 733 for SV(W|O) and 28S
ccccgctttcacggtctgtattcgtactgaaaatcaagatcaagcgagcttttgcccttctgctccacgggaggtttctgtcctccctgagctcgccttaggacacctgcgttaccgttt

SEQ ID NO: 49969 - DNA, 120 bp, Homo sapiens
  misc_feature: 733 for SV(W|O) and 28S
ccaggattccctcagtaacggcgagtgaacagggaagagcccagcgccgaatccccgccccgcggcggggcgcgggacatgtggcgtacggaagacccgctccccggcgccgctcgtggg

SEQ ID NO: 49970 - DNA, 120 bp, Homo sapiens
  misc_feature: 733 for SV(W|O) and 28S
caagctcaacagggtcttctttccccgctgattccgccaagcccgttcccttggctgtggtttcgctggatagtaggtagggacagtgggaatctcgttcatccattcatgcgcgtcact

SEQ ID NO: 49971 - DNA, 120 bp, Homo sapiens
  misc_feature: 733 for SV(W|O) and 28S
aggacttgggccccccacgagcggcgccggggagcgggtcttccgtacgccacatgtcccgcgccccgccgcggggcggggattcggcgctgggctcttccctgttcactcgccgttact

SEQ ID NO: 49972 - DNA, 120 bp, Homo sapiens
  misc_feature: 732 for SV(W|O) and 28S
ttcggccttcaaagttctcgtttgaatatttgctactaccaccaagatctgcacctgcggcggctccacccgggcccgcgccctaggcttcaaggctcaccgcagcggccctcctactcg

SEQ ID NO: 49973 - DNA, 120 bp, Homo sapiens
  misc_feature: 732 for SV(W|O) and 28S
tgtggtttcgctggatagtaggtagggacagtgggaatctcgttcatccattcatgcgcgtcactaattagatgacgaggcatttggctaccttaagagagtcatagttactcccgccgt

SEQ ID NO: 49974 - DNA, 120 bp, Homo sapiens
  misc_feature: 732 for SV(W|O) and 28S
gtgccagactagagtcaagctcaacagggtcttctttccccgctgattccgccaagcccgttcccttggctgtggtttcgctggatagtaggtagggacagtgggaatctcgttcatcca

SEQ ID NO: 49975 - DNA, 120 bp, Homo sapiens
  misc_feature: 732 for SV(W|O) and 28S
tctcttcaccgtgccagactagagtcaagctcaacagggtcttctttccccgctgattccgccaagcccgttcccttggctgtggtttcgctggatagtaggtagggacagtgggaatct

SEQ ID NO: 49976 - DNA, 120 bp, Homo sapiens
  misc_feature: 732 for SV(W|O) and 28S
ctgagagatgggcgagcgccgttccgaagggacgggcgatggcctccgttgccctcggccgatcgaaagggagtcgggttcagatccccgaatccggagtggcggagatgggcgccgcga

SEQ ID NO: 49977 - DNA, 120 bp, Homo sapiens
  misc_feature: 732 for SV(W|O) and 28S
gttgaacatgggtcagtcggtcctgagagatgggcgagcgccgttccgaagggacgggcgatggcctccgttgccctcggccgatcgaaagggagtcgggttcagatccccgaatccgga

SEQ ID NO: 49978 - DNA, 120 bp, Homo sapiens
  misc_feature: 732 for SV(W|O) and 28S
tatccctgtggtaacttttctgacacctcctgcttaaaacccaaaaggtcagaaggatcgtgaggccccgctttcacggtctgtattcgtactgaaaatcaagatcaagcgagcttttgc

SEQ ID NO: 49979 - DNA, 120 bp, Homo sapiens
  misc_feature: 732 for SV(W|O) and 28S
gtttgaatatttgctactaccaccaagatctgcacctgcggcggctccacccgggcccgcgccctaggcttcaaggctcaccgcagcggccctcctactcgtcgcggcgtagcgtccgcg

SEQ ID NO: 49980 - DNA, 120 bp, Homo sapiens
  misc_feature: 732 for SV(W|O) and 28S
gccagcgagagctcaccggacgccgccggaaccgcgacgctttccaaggcacgggcccctctctcggggcgaacccattccagggcgccctgcccttcacaaagaaaagagaactctccc

SEQ ID NO: 49981 - DNA, 120 bp, Homo sapiens
  misc_feature: 732 for SV(W|O) and 28S
cgtgccagactagagtcaagctcaacagggtcttctttccccgctgattccgccaagcccgttcccttggctgtggtttcgctggatagtaggtagggacagtgggaatctcgttcatcc

SEQ ID NO: 49982 - DNA, 120 bp, Homo sapiens
  misc_feature: 732 for SV(W|O) and 28S
gcggcgcctcgcctcggccggcgcctagcagccgacttagaactggtgcggaccaggggaatccgactgtttaattaaaacaaagcatcgcgaaggcccgcggcgggtgttgacgcgatg

SEQ ID NO: 49983 - DNA, 120 bp, Homo sapiens
  misc_feature: 732 for SV(W|O) and 28S
cgaaagatggtgaactatgcctgggcagggcgaagccagaggaaactctggtggaggtccgtagcggtcctgacgtgcaaatcggtcgtccgacctgggtataggggcgaaagactaatc

SEQ ID NO: 49984 - DNA, 120 bp, Homo sapiens
  misc_feature: 732 for SV(W|O) and 28S
ctttcacggtctgtattcgtactgaaaatcaagatcaagcgagcttttgcccttctgctccacgggaggtttctgtcctccctgagctcgccttaggacacctgcgttaccgtttgacag

SEQ ID NO: 49985 - DNA, 120 bp, Homo sapiens
  misc_feature: 732 for SV(W|O) and 28S
cgggtatgggcccgacgctccagcgccatccattttcagggctagttgattcggcaggtgagttgttacacactccttagcggattccgacttccatggccaccgtcctgctgtctatat

SEQ ID NO: 49986 - DNA, 120 bp, Homo sapiens
  misc_feature: 732 for SV(W|O) and 28S
cggcgcctcgcctcggccggcgcctagcagccgacttagaactggtgcggaccaggggaatccgactgtttaattaaaacaaagcatcgcgaaggcccgcggcgggtgttgacgcgatgt

SEQ ID NO: 49987 - DNA, 120 bp, Homo sapiens
  misc_feature: 732 for SV(W|O) and 28S
ccccacgagcggcgccggggagcgggtcttccgtacgccacatgtcccgcgccccgccgcggggcggggattcggcgctgggctcttccctgttcactcgccgttactgagggaatcctg

SEQ ID NO: 49988 - DNA, 120 bp, Homo sapiens
  misc_feature: 731 for SV(W|O) and 28S
tgccagactagagtcaagctcaacagggtcttctttccccgctgattccgccaagcccgttcccttggctgtggtttcgctggatagtaggtagggacagtgggaatctcgttcatccat

SEQ ID NO: 49989 - DNA, 120 bp, Homo sapiens
  misc_feature: 731 for SV(W|O) and 28S
tcctgcttaaaacccaaaaggtcagaaggatcgtgaggccccgctttcacggtctgtattcgtactgaaaatcaagatcaagcgagcttttgcccttctgctccacgggaggtttctgtc

SEQ ID NO: 49990 - DNA, 120 bp, Homo sapiens
  misc_feature: 731 for SV(W|O) and 28S
agatggtgaactatgcctgggcagggcgaagccagaggaaactctggtggaggtccgtagcggtcctgacgtgcaaatcggtcgtccgacctgggtataggggcgaaagactaatcgaac

SEQ ID NO: 49991 - DNA, 120 bp, Homo sapiens
  misc_feature: 731 for SV(W|O) and 28S
gtcctgagagatgggcgagcgccgttccgaagggacgggcgatggcctccgttgccctcggccgatcgaaagggagtcgggttcagatccccgaatccggagtggcggagatgggcgccg

SEQ ID NO: 49992 - DNA, 120 bp, Homo sapiens
  misc_feature: 731 for SV(W|O) and 28S
ggtcctgagagatgggcgagcgccgttccgaagggacgggcgatggcctccgttgccctcggccgatcgaaagggagtcgggttcagatccccgaatccggagtggcggagatgggcgcc

SEQ ID NO: 49993 - DNA, 120 bp, Homo sapiens
  misc_feature: 731 for SV(W|O) and 28S
ccccccacgagcggcgccggggagcgggtcttccgtacgccacatgtcccgcgccccgccgcggggcggggattcggcgctgggctcttccctgttcactcgccgttactgagggaatcc

SEQ ID NO: 49994 - DNA, 120 bp, Homo sapiens
  misc_feature: 731 for SV(W|O) and 28S
gcccccggagccccgcggacgctacgccgcgacgagtaggagggccgctgcggtgagccttgaagcctagggcgcgggcccgggtggagccgccgcaggtgcagatcttggtggtagtag

SEQ ID NO: 49995 - DNA, 120 bp, Homo sapiens
  misc_feature: 731 for SV(W|O) and 28S
actagagtcaagctcaacagggtcttctttccccgctgattccgccaagcccgttcccttggctgtggtttcgctggatagtaggtagggacagtgggaatctcgttcatccattcatgc

SEQ ID NO: 49996 - DNA, 120 bp, Homo sapiens
  misc_feature: 731 for SV(W|O) and 28S
acggtggccatggaagtcggaatccgctaaggagtgtgtaacaactcacctgccgaatcaactagccctgaaaatggatggcgctggagcgtcgggcccatacccggccgtcgccggcag

SEQ ID NO: 49997 - DNA, 120 bp, Homo sapiens
  misc_feature: 731 for SV(W|O) and 28S
ccccgaatccggagtggcggagatgggcgccgcgaggcgtccagtgcggtaacgcgaccgatcccggagaagccggcgggagccccggggagagttctcttttctttgtgaagggcaggg

SEQ ID NO: 49998 - DNA, 120 bp, Homo sapiens
  misc_feature: 730 for SV(W|O) and 28S
ccggagccccgcggacgctacgccgcgacgagtaggagggccgctgcggtgagccttgaagcctagggcgcgggcccgggtggagccgccgcaggtgcagatcttggtggtagtagcaaa

SEQ ID NO: 49999 - DNA, 120 bp, Homo sapiens
  misc_feature: 730 for SV(W|O) and 28S
ttcacaaagaaaagagaactctccccggggctcccgccggcttctccgggatcggtcgcgttaccgcactggacgcctcgcggcgcccatctccgccactccggattcggggatctgaac

SEQ ID NO: 50000 - DNA, 120 bp, Homo sapiens
  misc_feature: 730 for SV(W|O) and 28S
tctccacttcggccttcaaagttctcgtttgaatatttgctactaccaccaagatctgcacctgcggcggctccacccgggcccgcgccctaggcttcaaggctcaccgcagcggccctc

SEQ ID NO: 50001 - DNA, 120 bp, Homo sapiens
  misc_feature: 730 for SV(W|O) and 28S
ggccccccacgagcggcgccggggagcgggtcttccgtacgccacatgtcccgcgccccgccgcggggcggggattcggcgctgggctcttccctgttcactcgccgttactgagggaat

SEQ ID NO: 50002 - DNA, 120 bp, Homo sapiens
  misc_feature: 730 for SV(W|O) and 28S
aaggtagccaaatgcctcgtcatctaattagtgacgcgcatgaatggatgaacgagattcccactgtccctacctactatccagcgaaaccacagccaagggaacgggcttggcggaatc

SEQ ID NO: 50003 - DNA, 120 bp, Homo sapiens
  misc_feature: 730 for SV(W|O) and 28S
cgccgcgaggcgtccagtgcggtaacgcgaccgatcccggagaagccggcgggagccccggggagagttctcttttctttgtgaagggcagggcgccctggaatgggttcgccccgagag

SEQ ID NO: 50004 - DNA, 120 bp, Homo sapiens
  misc_feature: 730 for SV(W|O) and 28S
ccgaatccggagtggcggagatgggcgccgcgaggcgtccagtgcggtaacgcgaccgatcccggagaagccggcgggagccccggggagagttctcttttctttgtgaagggcagggcg

SEQ ID NO: 50005 - DNA, 120 bp, Homo sapiens
  misc_feature: 730 for SV(W|O) and 28S
caggtgcagatcttggtggtagtagcaaatattcaaacgagaactttgaaggccgaagtggagaagggttccatgtgaacagcagttgaacatgggtcagtcggtcctgagagatgggcg

SEQ ID NO: 50006 - DNA, 120 bp, Homo sapiens
  misc_feature: 730 for SV(W|O) and 28S
cgcaggtgcagatcttggtggtagtagcaaatattcaaacgagaactttgaaggccgaagtggagaagggttccatgtgaacagcagttgaacatgggtcagtcggtcctgagagatggg

SEQ ID NO: 50007 - DNA, 120 bp, Homo sapiens
  misc_feature: 730 for SV(W|O) and 28S
cccgctccggggacagtgccaggtggggagtttgactggggcggtacacctgtcaaacggtaacgcaggtgtcctaaggcgagctcagggaggacagaaacctcccgtggagcagaaggg

SEQ ID NO: 50008 - DNA, 120 bp, Homo sapiens
  misc_feature: 729 for SV(W|O) and 28S
gccgcgaggcgtccagtgcggtaacgcgaccgatcccggagaagccggcgggagccccggggagagttctcttttctttgtgaagggcagggcgccctggaatgggttcgccccgagaga

SEQ ID NO: 50009 - DNA, 120 bp, Homo sapiens
  misc_feature: 729 for SV(W|O) and 28S
tcacaaagaaaagagaactctccccggggctcccgccggcttctccgggatcggtcgcgttaccgcactggacgcctcgcggcgcccatctccgccactccggattcggggatctgaacc

SEQ ID NO: 50010 - DNA, 120 bp, Homo sapiens
  misc_feature: 729 for SV(W|O) and 28S
gttcacccactaatagggaacgtgagctgggtttagaccgtcgtgagacaggttagttttaccctactgatgatgtgttgttgccatggtaatcctgctcagtacgagaggaaccgcagg

SEQ ID NO: 50011 - DNA, 120 bp, Homo sapiens
  misc_feature: 729 for SV(W|O) and 28S
gtaacttttctgacacctcctgcttaaaacccaaaaggtcagaaggatcgtgaggccccgctttcacggtctgtattcgtactgaaaatcaagatcaagcgagcttttgcccttctgctc

SEQ ID NO: 50012 - DNA, 120 bp, Homo sapiens
  misc_feature: 729 for SV(W|O) and 28S
ggtcggacgaccgatttgcacgtcaggaccgctacggacctccaccagagtttcctctggcttcgccctgcccaggcatagttcaccatctttcgggtcctaacacgtgcgctcgtgctc

SEQ ID NO: 50013 - DNA, 120 bp, Homo sapiens
  misc_feature: 729 for SV(W|O) and 28S
gggtatgggcccgacgctccagcgccatccattttcagggctagttgattcggcaggtgagttgttacacactccttagcggattccgacttccatggccaccgtcctgctgtctatatc

SEQ ID NO: 50014 - DNA, 120 bp, Homo sapiens
  misc_feature: 729 for SV(W|O) and 28S
gaatccggagtggcggagatgggcgccgcgaggcgtccagtgcggtaacgcgaccgatcccggagaagccggcgggagccccggggagagttctcttttctttgtgaagggcagggcgcc

SEQ ID NO: 50015 - DNA, 120 bp, Homo sapiens
  misc_feature: 729 for SV(W|O) and 28S
cccccggagccccgcggacgctacgccgcgacgagtaggagggccgctgcggtgagccttgaagcctagggcgcgggcccgggtggagccgccgcaggtgcagatcttggtggtagtagc

SEQ ID NO: 50016 - DNA, 120 bp, Homo sapiens
  misc_feature: 729 for SV(W|O) and 28S
gccgggccgccgacacggccggacccgccgccgggttgaatcctccgggcggactgcgcggaccccacccgtttacctcttaacggtttcacgccctcttgaactctctcttcaaagttc

SEQ ID NO: 50017 - DNA, 120 bp, Homo sapiens
  misc_feature: 729 for SV(W|O) and 28S
gagtggcggagatgggcgccgcgaggcgtccagtgcggtaacgcgaccgatcccggagaagccggcgggagccccggggagagttctcttttctttgtgaagggcagggcgccctggaat

SEQ ID NO: 50018 - DNA, 120 bp, Homo sapiens
  misc_feature: 729 for SV(W|O) and 28S
cttttctgacacctcctgcttaaaacccaaaaggtcagaaggatcgtgaggccccgctttcacggtctgtattcgtactgaaaatcaagatcaagcgagcttttgcccttctgctccacg

SEQ ID NO: 50019 - DNA, 120 bp, Homo sapiens
  misc_feature: 729 for SV(W|O) and 28S
cggagccccgcggacgctacgccgcgacgagtaggagggccgctgcggtgagccttgaagcctagggcgcgggcccgggtggagccgccgcaggtgcagatcttggtggtagtagcaaat

SEQ ID NO: 50020 - DNA, 120 bp, Homo sapiens
  misc_feature: 729 for SV(W|O) and 28S
cacggtctgtattcgtactgaaaatcaagatcaagcgagcttttgcccttctgctccacgggaggtttctgtcctccctgagctcgccttaggacacctgcgttaccgtttgacaggtgt

SEQ ID NO: 50021 - DNA, 120 bp, Homo sapiens
  misc_feature: 728 for SV(W|O) and 28S
cccggagccccgcggacgctacgccgcgacgagtaggagggccgctgcggtgagccttgaagcctagggcgcgggcccgggtggagccgccgcaggtgcagatcttggtggtagtagcaa

SEQ ID NO: 50022 - DNA, 120 bp, Homo sapiens
  misc_feature: 728 for SV(W|O) and 28S
ttcaccgtgccagactagagtcaagctcaacagggtcttctttccccgctgattccgccaagcccgttcccttggctgtggtttcgctggatagtaggtagggacagtgggaatctcgtt

SEQ ID NO: 50023 - DNA, 120 bp, Homo sapiens
  misc_feature: 728 for SV(W|O) and 28S
tgctttgttttaattaaacagtcggattcccctggtccgcaccagttctaagtcggctgctaggcgccggccgaggcgaggcgccgcgcggaaccgcggccccgggggcggacccggcgg

SEQ ID NO: 50024 - DNA, 120 bp, Homo sapiens
  misc_feature: 728 for SV(W|O) and 28S
gaaggacttgggccccccacgagcggcgccggggagcgggtcttccgtacgccacatgtcccgcgccccgccgcggggcggggattcggcgctgggctcttccctgttcactcgccgtta

SEQ ID NO: 50025 - DNA, 120 bp, Homo sapiens
  misc_feature: 728 for SV(W|O) and 28S
ggcccgacgctccagcgccatccattttcagggctagttgattcggcaggtgagttgttacacactccttagcggattccgacttccatggccaccgtcctgctgtctatatcaaccaac

SEQ ID NO: 50026 - DNA, 120 bp, Homo sapiens
  misc_feature: 728 for SV(W|O) and 28S
cggtctgtattcgtactgaaaatcaagatcaagcgagcttttgcccttctgctccacgggaggtttctgtcctccctgagctcgccttaggacacctgcgttaccgtttgacaggtgtac

SEQ ID NO: 50027 - DNA, 120 bp, Homo sapiens
  misc_feature: 728 for SV(W|O) and 28S
ggcgccagaagcgagagcccctcggggctcgcccccccgcctcaccgggtcagtgaaaaaacgatcagagtagtggtatttcaccggcggcccgcagggccggcggaccccgccccgggc

SEQ ID NO: 50028 - DNA, 120 bp, Homo sapiens
  misc_feature: 728 for SV(W|O) and 28S
ggccccgctttcacggtctgtattcgtactgaaaatcaagatcaagcgagcttttgcccttctgctccacgggaggtttctgtcctccctgagctcgccttaggacacctgcgttaccgt

SEQ ID NO: 50029 - DNA, 120 bp, Homo sapiens
  misc_feature: 728 for SV(W|O) and 28S
ctcgtttgaatatttgctactaccaccaagatctgcacctgcggcggctccacccgggcccgcgccctaggcttcaaggctcaccgcagcggccctcctactcgtcgcggcgtagcgtcc

SEQ ID NO: 50030 - DNA, 120 bp, Homo sapiens
  misc_feature: 728 for SV(W|O) and 28S
ggaaagatccgccgggccgccgacacggccggacccgccgccgggttgaatcctccgggcggactgcgcggaccccacccgtttacctcttaacggtttcacgccctcttgaactctctc

SEQ ID NO: 50031 - DNA, 120 bp, Homo sapiens
  misc_feature: 728 for SV(W|O) and 28S
cgtttgaatatttgctactaccaccaagatctgcacctgcggcggctccacccgggcccgcgccctaggcttcaaggctcaccgcagcggccctcctactcgtcgcggcgtagcgtccgc

SEQ ID NO: 50032 - DNA, 120 bp, Homo sapiens
  misc_feature: 728 for SV(W|O) and 28S
gatgctttgttttaattaaacagtcggattcccctggtccgcaccagttctaagtcggctgctaggcgccggccgaggcgaggcgccgcgcggaaccgcggccccgggggcggacccggc

SEQ ID NO: 50033 - DNA, 120 bp, Homo sapiens
  misc_feature: 728 for SV(W|O) and 28S
ctcccgtccactctcgactgccggcgacggccgggtatgggcccgacgctccagcgccatccattttcagggctagttgattcggcaggtgagttgttacacactccttagcggattccg

SEQ ID NO: 50034 - DNA, 120 bp, Homo sapiens
  misc_feature: 728 for SV(W|O) and 28S
ctagagtcaagctcaacagggtcttctttccccgctgattccgccaagcccgttcccttggctgtggtttcgctggatagtaggtagggacagtgggaatctcgttcatccattcatgcg

SEQ ID NO: 50035 - DNA, 120 bp, Homo sapiens
  misc_feature: 728 for SV(W|O) and 28S
aggccccgctttcacggtctgtattcgtactgaaaatcaagatcaagcgagcttttgcccttctgctccacgggaggtttctgtcctccctgagctcgccttaggacacctgcgttaccg

SEQ ID NO: 50036 - DNA, 120 bp, Homo sapiens
  misc_feature: 728 for SV(W|O) and 28S
acttcggccttcaaagttctcgtttgaatatttgctactaccaccaagatctgcacctgcggcggctccacccgggcccgcgccctaggcttcaaggctcaccgcagcggccctcctact

SEQ ID NO: 50037 - DNA, 120 bp, Homo sapiens
  misc_feature: 727 for SV(W|O) and 28S
atccgccgggccgccgacacggccggacccgccgccgggttgaatcctccgggcggactgcgcggaccccacccgtttacctcttaacggtttcacgccctcttgaactctctcttcaaa

SEQ ID NO: 50038 - DNA, 120 bp, Homo sapiens
  misc_feature: 727 for SV(W|O) and 28S
cccgaaagatggtgaactatgcctgggcagggcgaagccagaggaaactctggtggaggtccgtagcggtcctgacgtgcaaatcggtcgtccgacctgggtataggggcgaaagactaa

SEQ ID NO: 50039 - DNA, 120 bp, Homo sapiens
  misc_feature: 727 for SV(W|O) and 28S
tggtgaactatgcctgggcagggcgaagccagaggaaactctggtggaggtccgtagcggtcctgacgtgcaaatcggtcgtccgacctgggtataggggcgaaagactaatcgaaccat

SEQ ID NO: 50040 - DNA, 120 bp, Homo sapiens
  misc_feature: 727 for SV(W|O) and 28S
agatccgccgggccgccgacacggccggacccgccgccgggttgaatcctccgggcggactgcgcggaccccacccgtttacctcttaacggtttcacgccctcttgaactctctcttca

SEQ ID NO: 50041 - DNA, 120 bp, Homo sapiens
  misc_feature: 727 for SV(W|O) and 28S
tcggccttcaaagttctcgtttgaatatttgctactaccaccaagatctgcacctgcggcggctccacccgggcccgcgccctaggcttcaaggctcaccgcagcggccctcctactcgt

SEQ ID NO: 50042 - DNA, 120 bp, Homo sapiens
  misc_feature: 727 for SV(W|O) and 28S
aaagatggtgaactatgcctgggcagggcgaagccagaggaaactctggtggaggtccgtagcggtcctgacgtgcaaatcggtcgtccgacctgggtataggggcgaaagactaatcga

SEQ ID NO: 50043 - DNA, 120 bp, Homo sapiens
  misc_feature: 727 for SV(W|O) and 28S
ccgctttcacggtctgtattcgtactgaaaatcaagatcaagcgagcttttgcccttctgctccacgggaggtttctgtcctccctgagctcgccttaggacacctgcgttaccgtttga

SEQ ID NO: 50044 - DNA, 120 bp, Homo sapiens
  misc_feature: 727 for SV(W|O) and 28S
gtctgtattcgtactgaaaatcaagatcaagcgagcttttgcccttctgctccacgggaggtttctgtcctccctgagctcgccttaggacacctgcgttaccgtttgacaggtgtaccg

SEQ ID NO: 50045 - DNA, 120 bp, Homo sapiens
  misc_feature: 727 for SV(W|O) and 28S
agagatgggcgagcgccgttccgaagggacgggcgatggcctccgttgccctcggccgatcgaaagggagtcgggttcagatccccgaatccggagtggcggagatgggcgccgcgaggc

SEQ ID NO: 50046 - DNA, 120 bp, Homo sapiens
  misc_feature: 727 for SV(W|O) and 28S
gccgggtatgggcccgacgctccagcgccatccattttcagggctagttgattcggcaggtgagttgttacacactccttagcggattccgacttccatggccaccgtcctgctgtctat

SEQ ID NO: 50047 - DNA, 120 bp, Homo sapiens
  misc_feature: 727 for SV(W|O) and 28S
gacgctccagcgccatccattttcagggctagttgattcggcaggtgagttgttacacactccttagcggattccgacttccatggccaccgtcctgctgtctatatcaaccaacacctt

SEQ ID NO: 50048 - DNA, 120 bp, Homo sapiens
  misc_feature: 727 for SV(W|O) and 28S
cggccttcaaagttctcgtttgaatatttgctactaccaccaagatctgcacctgcggcggctccacccgggcccgcgccctaggcttcaaggctcaccgcagcggccctcctactcgtc

SEQ ID NO: 50049 - DNA, 120 bp, Homo sapiens
  misc_feature: 727 for SV(W|O) and 28S
ccgcaggtgcagatcttggtggtagtagcaaatattcaaacgagaactttgaaggccgaagtggagaagggttccatgtgaacagcagttgaacatgggtcagtcggtcctgagagatgg

SEQ ID NO: 50050 - DNA, 120 bp, Homo sapiens
  misc_feature: 727 for SV(W|O) and 28S
ccagaaaaggtgttggttgatatagacagcaggacggtggccatggaagtcggaatccgctaaggagtgtgtaacaactcacctgccgaatcaactagccctgaaaatggatggcgctgg

SEQ ID NO: 50051 - DNA, 120 bp, Homo sapiens
  misc_feature: 726 for SV(W|O) and 28S
aggtagccaaatgcctcgtcatctaattagtgacgcgcatgaatggatgaacgagattcccactgtccctacctactatccagcgaaaccacagccaagggaacgggcttggcggaatca

SEQ ID NO: 50052 - DNA, 120 bp, Homo sapiens
  misc_feature: 726 for SV(W|O) and 28S
caccgtgccagactagagtcaagctcaacagggtcttctttccccgctgattccgccaagcccgttcccttggctgtggtttcgctggatagtaggtagggacagtgggaatctcgttca

SEQ ID NO: 50053 - DNA, 120 bp, Homo sapiens
  misc_feature: 726 for SV(W|O) and 28S
gcgatggcctccgttgccctcggccgatcgaaagggagtcgggttcagatccccgaatccggagtggcggagatgggcgccgcgaggcgtccagtgcggtaacgcgaccgatcccggaga

SEQ ID NO: 50054 - DNA, 120 bp, Homo sapiens
  misc_feature: 726 for SV(W|O) and 28S
tcagtcggtcctgagagatgggcgagcgccgttccgaagggacgggcgatggcctccgttgccctcggccgatcgaaagggagtcgggttcagatccccgaatccggagtggcggagatg

SEQ ID NO: 50055 - DNA, 120 bp, Homo sapiens
  misc_feature: 726 for SV(W|O) and 28S
acggtctgtattcgtactgaaaatcaagatcaagcgagcttttgcccttctgctccacgggaggtttctgtcctccctgagctcgccttaggacacctgcgttaccgtttgacaggtgta

SEQ ID NO: 50056 - DNA, 120 bp, Homo sapiens
  misc_feature: 726 for SV(W|O) and 28S
gttaccgcactggacgcctcgcggcgcccatctccgccactccggattcggggatctgaacccgactccctttcgatcggccgagggcaacggaggccatcgcccgtcccttcggaacgg

SEQ ID NO: 50057 - DNA, 120 bp, Homo sapiens
  misc_feature: 726 for SV(W|O) and 28S
gccagaagcgagagcccctcggggctcgcccccccgcctcaccgggtcagtgaaaaaacgatcagagtagtggtatttcaccggcggcccgcagggccggcggaccccgccccgggcccc

SEQ ID NO: 50058 - DNA, 120 bp, Homo sapiens
  misc_feature: 726 for SV(W|O) and 28S
gggaaagatccgccgggccgccgacacggccggacccgccgccgggttgaatcctccgggcggactgcgcggaccccacccgtttacctcttaacggtttcacgccctcttgaactctct

SEQ ID NO: 50059 - DNA, 120 bp, Homo sapiens
  misc_feature: 726 for SV(W|O) and 28S
atccctgtggtaacttttctgacacctcctgcttaaaacccaaaaggtcagaaggatcgtgaggccccgctttcacggtctgtattcgtactgaaaatcaagatcaagcgagcttttgcc

SEQ ID NO: 50060 - DNA, 120 bp, Homo sapiens
  misc_feature: 726 for SV(W|O) and 28S
ctgacacctcctgcttaaaacccaaaaggtcagaaggatcgtgaggccccgctttcacggtctgtattcgtactgaaaatcaagatcaagcgagcttttgcccttctgctccacgggagg

SEQ ID NO: 50061 - DNA, 120 bp, Homo sapiens
  misc_feature: 726 for SV(W|O) and 28S
agtggcggagatgggcgccgcgaggcgtccagtgcggtaacgcgaccgatcccggagaagccggcgggagccccggggagagttctcttttctttgtgaagggcagggcgccctggaatg

SEQ ID NO: 50062 - DNA, 120 bp, Homo sapiens
  misc_feature: 726 for SV(W|O) and 28S
accgtgccagactagagtcaagctcaacagggtcttctttccccgctgattccgccaagcccgttcccttggctgtggtttcgctggatagtaggtagggacagtgggaatctcgttcat

SEQ ID NO: 50063 - DNA, 120 bp, Homo sapiens
  misc_feature: 726 for SV(W|O) and 28S
acgccccgctccccgcccccggagccccgcggacgctacgccgcgacgagtaggagggccgctgcggtgagccttgaagcctagggcgcgggcccgggtggagccgccgcaggtgcagat

SEQ ID NO: 50064 - DNA, 120 bp, Homo sapiens
  misc_feature: 726 for SV(W|O) and 28S
agaaggacttgggccccccacgagcggcgccggggagcgggtcttccgtacgccacatgtcccgcgccccgccgcggggcggggattcggcgctgggctcttccctgttcactcgccgtt

SEQ ID NO: 50065 - DNA, 120 bp, Homo sapiens
  misc_feature: 726 for SV(W|O) and 28S
acgctccagcgccatccattttcagggctagttgattcggcaggtgagttgttacacactccttagcggattccgacttccatggccaccgtcctgctgtctatatcaaccaacaccttt

SEQ ID NO: 50066 - DNA, 120 bp, Homo sapiens
  misc_feature: 725 for SV(W|O) and 28S
ttaccgcactggacgcctcgcggcgcccatctccgccactccggattcggggatctgaacccgactccctttcgatcggccgagggcaacggaggccatcgcccgtcccttcggaacggc

SEQ ID NO: 50067 - DNA, 120 bp, Homo sapiens
  misc_feature: 725 for SV(W|O) and 28S
taccgcactggacgcctcgcggcgcccatctccgccactccggattcggggatctgaacccgactccctttcgatcggccgagggcaacggaggccatcgcccgtcccttcggaacggcg

SEQ ID NO: 50068 - DNA, 120 bp, Homo sapiens
  misc_feature: 725 for SV(W|O) and 28S
gtggtaacttttctgacacctcctgcttaaaacccaaaaggtcagaaggatcgtgaggccccgctttcacggtctgtattcgtactgaaaatcaagatcaagcgagcttttgcccttctg

SEQ ID NO: 50069 - DNA, 120 bp, Homo sapiens
  misc_feature: 725 for SV(W|O) and 28S
gtggcggagatgggcgccgcgaggcgtccagtgcggtaacgcgaccgatcccggagaagccggcgggagccccggggagagttctcttttctttgtgaagggcagggcgccctggaatgg

SEQ ID NO: 50070 - DNA, 120 bp, Homo sapiens
  misc_feature: 725 for SV(W|O) and 28S
atgggcccgacgctccagcgccatccattttcagggctagttgattcggcaggtgagttgttacacactccttagcggattccgacttccatggccaccgtcctgctgtctatatcaacc

SEQ ID NO: 50071 - DNA, 120 bp, Homo sapiens
  misc_feature: 725 for SV(W|O) and 28S
ggcgccgcgaggcgtccagtgcggtaacgcgaccgatcccggagaagccggcgggagccccggggagagttctcttttctttgtgaagggcagggcgccctggaatgggttcgccccgag

SEQ ID NO: 50072 - DNA, 120 bp, Homo sapiens
  misc_feature: 725 for SV(W|O) and 28S
gcaggtgcagatcttggtggtagtagcaaatattcaaacgagaactttgaaggccgaagtggagaagggttccatgtgaacagcagttgaacatgggtcagtcggtcctgagagatgggc

SEQ ID NO: 50073 - DNA, 120 bp, Homo sapiens
  misc_feature: 725 for SV(W|O) and 28S
cttcaaagttctcgtttgaatatttgctactaccaccaagatctgcacctgcggcggctccacccgggcccgcgccctaggcttcaaggctcaccgcagcggccctcctactcgtcgcgg

SEQ ID NO: 50074 - DNA, 120 bp, Homo sapiens
  misc_feature: 725 for SV(W|O) and 28S
aagttctcgtttgaatatttgctactaccaccaagatctgcacctgcggcggctccacccgggcccgcgccctaggcttcaaggctcaccgcagcggccctcctactcgtcgcggcgtag

SEQ ID NO: 50075 - DNA, 120 bp, Homo sapiens
  misc_feature: 724 for SV(W|O) and 28S
tggacgcctcgcggcgcccatctccgccactccggattcggggatctgaacccgactccctttcgatcggccgagggcaacggaggccatcgcccgtcccttcggaacggcgctcgccca

SEQ ID NO: 50076 - DNA, 120 bp, Homo sapiens
  misc_feature: 724 for SV(W|O) and 28S
ggtcagtcggtcctgagagatgggcgagcgccgttccgaagggacgggcgatggcctccgttgccctcggccgatcgaaagggagtcgggttcagatccccgaatccggagtggcggaga

SEQ ID NO: 50077 - DNA, 120 bp, Homo sapiens
  misc_feature: 724 for SV(W|O) and 28S
tccagcgccatccattttcagggctagttgattcggcaggtgagttgttacacactccttagcggattccgacttccatggccaccgtcctgctgtctatatcaaccaacaccttttctg

SEQ ID NO: 50078 - DNA, 120 bp, Homo sapiens
  misc_feature: 724 for SV(W|O) and 28S
tcaccgtgccagactagagtcaagctcaacagggtcttctttccccgctgattccgccaagcccgttcccttggctgtggtttcgctggatagtaggtagggacagtgggaatctcgttc

SEQ ID NO: 50079 - DNA, 120 bp, Homo sapiens
  misc_feature: 724 for SV(W|O) and 28S
agatgggcgccgcgaggcgtccagtgcggtaacgcgaccgatcccggagaagccggcgggagccccggggagagttctcttttctttgtgaagggcagggcgccctggaatgggttcgcc

SEQ ID NO: 50080 - DNA, 120 bp, Homo sapiens
  misc_feature: 724 for SV(W|O) and 28S
ggccttcaaagttctcgtttgaatatttgctactaccaccaagatctgcacctgcggcggctccacccgggcccgcgccctaggcttcaaggctcaccgcagcggccctcctactcgtcg

SEQ ID NO: 50081 - DNA, 120 bp, Homo sapiens
  misc_feature: 724 for SV(W|O) and 28S
gccttcaaagttctcgtttgaatatttgctactaccaccaagatctgcacctgcggcggctccacccgggcccgcgccctaggcttcaaggctcaccgcagcggccctcctactcgtcgc

SEQ ID NO: 50082 - DNA, 120 bp, Homo sapiens
  misc_feature: 724 for SV(W|O) and 28S
ccgctccggggacagtgccaggtggggagtttgactggggcggtacacctgtcaaacggtaacgcaggtgtcctaaggcgagctcagggaggacagaaacctcccgtggagcagaagggc

SEQ ID NO: 50083 - DNA, 120 bp, Homo sapiens
  misc_feature: 724 for SV(W|O) and 28S
agagtcaagctcaacagggtcttctttccccgctgattccgccaagcccgttcccttggctgtggtttcgctggatagtaggtagggacagtgggaatctcgttcatccattcatgcgcg

SEQ ID NO: 50084 - DNA, 120 bp, Homo sapiens
  misc_feature: 724 for SV(W|O) and 28S
cgatgctttgttttaattaaacagtcggattcccctggtccgcaccagttctaagtcggctgctaggcgccggccgaggcgaggcgccgcgcggaaccgcggccccgggggcggacccgg

SEQ ID NO: 50085 - DNA, 120 bp, Homo sapiens
  misc_feature: 724 for SV(W|O) and 28S
cccttcacaaagaaaagagaactctccccggggctcccgccggcttctccgggatcggtcgcgttaccgcactggacgcctcgcggcgcccatctccgccactccggattcggggatctg

SEQ ID NO: 50086 - DNA, 120 bp, Homo sapiens
  misc_feature: 723 for SV(W|O) and 28S
ttcaaagttctcgtttgaatatttgctactaccaccaagatctgcacctgcggcggctccacccgggcccgcgccctaggcttcaaggctcaccgcagcggccctcctactcgtcgcggc

SEQ ID NO: 50087 - DNA, 120 bp, Homo sapiens
  misc_feature: 723 for SV(W|O) and 28S
atggtgaactatgcctgggcagggcgaagccagaggaaactctggtggaggtccgtagcggtcctgacgtgcaaatcggtcgtccgacctgggtataggggcgaaagactaatcgaacca

SEQ ID NO: 50088 - DNA, 120 bp, Homo sapiens
  misc_feature: 723 for SV(W|O) and 28S
cgctccggggacagtgccaggtggggagtttgactggggcggtacacctgtcaaacggtaacgcaggtgtcctaaggcgagctcagggaggacagaaacctcccgtggagcagaagggca

SEQ ID NO: 50089 - DNA, 120 bp, Homo sapiens
  misc_feature: 723 for SV(W|O) and 28S
ccaaatgtctgaacctgcggttcctctcgtactgagcaggattaccatggcaacaacacatcatcagtagggtaaaactaacctgtctcacgacggtctaaacccagctcacgttcccta

SEQ ID NO: 50090 - DNA, 120 bp, Homo sapiens
  misc_feature: 723 for SV(W|O) and 28S
gtcagtcggtcctgagagatgggcgagcgccgttccgaagggacgggcgatggcctccgttgccctcggccgatcgaaagggagtcgggttcagatccccgaatccggagtggcggagat

SEQ ID NO: 50091 - DNA, 120 bp, Homo sapiens
  misc_feature: 723 for SV(W|O) and 28S
cgctttcacggtctgtattcgtactgaaaatcaagatcaagcgagcttttgcccttctgctccacgggaggtttctgtcctccctgagctcgccttaggacacctgcgttaccgtttgac

SEQ ID NO: 50092 - DNA, 120 bp, Homo sapiens
  misc_feature: 723 for SV(W|O) and 28S
ggtctgtattcgtactgaaaatcaagatcaagcgagcttttgcccttctgctccacgggaggtttctgtcctccctgagctcgccttaggacacctgcgttaccgtttgacaggtgtacc

SEQ ID NO: 50093 - DNA, 120 bp, Homo sapiens
  misc_feature: 723 for SV(W|O) and 28S
gccccgctttcacggtctgtattcgtactgaaaatcaagatcaagcgagcttttgcccttctgctccacgggaggtttctgtcctccctgagctcgccttaggacacctgcgttaccgtt

SEQ ID NO: 50094 - DNA, 120 bp, Homo sapiens
  misc_feature: 723 for SV(W|O) and 28S
gcccacgccccgctccccgcccccggagccccgcggacgctacgccgcgacgagtaggagggccgctgcggtgagccttgaagcctagggcgcgggcccgggtggagccgccgcaggtgc

SEQ ID NO: 50095 - DNA, 120 bp, Homo sapiens
  misc_feature: 723 for SV(W|O) and 28S
ccgtgccagactagagtcaagctcaacagggtcttctttccccgctgattccgccaagcccgttcccttggctgtggtttcgctggatagtaggtagggacagtgggaatctcgttcatc

SEQ ID NO: 50096 - DNA, 120 bp, Homo sapiens
  misc_feature: 723 for SV(W|O) and 28S
ctcttcaccgtgccagactagagtcaagctcaacagggtcttctttccccgctgattccgccaagcccgttcccttggctgtggtttcgctggatagtaggtagggacagtgggaatctc

SEQ ID NO: 50097 - DNA, 120 bp, Homo sapiens
  misc_feature: 723 for SV(W|O) and 28S
cgacgctccagcgccatccattttcagggctagttgattcggcaggtgagttgttacacactccttagcggattccgacttccatggccaccgtcctgctgtctatatcaaccaacacct

SEQ ID NO: 50098 - DNA, 120 bp, Homo sapiens
  misc_feature: 723 for SV(W|O) and 28S
cccccacgagcggcgccggggagcgggtcttccgtacgccacatgtcccgcgccccgccgcggggcggggattcggcgctgggctcttccctgttcactcgccgttactgagggaatcct

SEQ ID NO: 50099 - DNA, 120 bp, Homo sapiens
  misc_feature: 723 for SV(W|O) and 28S
caaagttctcgtttgaatatttgctactaccaccaagatctgcacctgcggcggctccacccgggcccgcgccctaggcttcaaggctcaccgcagcggccctcctactcgtcgcggcgt

SEQ ID NO: 50100 - DNA, 120 bp, Homo sapiens
  misc_feature: 722 for SV(W|O) and 28S
gggggcgggaaagatccgccgggccgccgacacggccggacccgccgccgggttgaatcctccgggcggactgcgcggaccccacccgtttacctcttaacggtttcacgccctcttgaa

SEQ ID NO: 50101 - DNA, 120 bp, Homo sapiens
  misc_feature: 722 for SV(W|O) and 28S
ggggggcgggaaagatccgccgggccgccgacacggccggacccgccgccgggttgaatcctccgggcggactgcgcggaccccacccgtttacctcttaacggtttcacgccctcttga

SEQ ID NO: 50102 - DNA, 120 bp, Homo sapiens
  misc_feature: 722 for SV(W|O) and 28S
tcaaagttctcgtttgaatatttgctactaccaccaagatctgcacctgcggcggctccacccgggcccgcgccctaggcttcaaggctcaccgcagcggccctcctactcgtcgcggcg

SEQ ID NO: 50103 - DNA, 120 bp, Homo sapiens
  misc_feature: 722 for SV(W|O) and 28S
aaagttctcgtttgaatatttgctactaccaccaagatctgcacctgcggcggctccacccgggcccgcgccctaggcttcaaggctcaccgcagcggccctcctactcgtcgcggcgta

SEQ ID NO: 50104 - DNA, 120 bp, Homo sapiens
  misc_feature: 722 for SV(W|O) and 28S
gcccttcacaaagaaaagagaactctccccggggctcccgccggcttctccgggatcggtcgcgttaccgcactggacgcctcgcggcgcccatctccgccactccggattcggggatct

SEQ ID NO: 50105 - DNA, 120 bp, Homo sapiens
  misc_feature: 722 for SV(W|O) and 28S
ctccagcgccatccattttcagggctagttgattcggcaggtgagttgttacacactccttagcggattccgacttccatggccaccgtcctgctgtctatatcaaccaacaccttttct

SEQ ID NO: 50106 - DNA, 120 bp, Homo sapiens
  misc_feature: 722 for SV(W|O) and 28S
cgctccagcgccatccattttcagggctagttgattcggcaggtgagttgttacacactccttagcggattccgacttccatggccaccgtcctgctgtctatatcaaccaacacctttt

SEQ ID NO: 50107 - DNA, 120 bp, Homo sapiens
  misc_feature: 722 for SV(W|O) and 28S
ccttcaaagttctcgtttgaatatttgctactaccaccaagatctgcacctgcggcggctccacccgggcccgcgccctaggcttcaaggctcaccgcagcggccctcctactcgtcgcg

SEQ ID NO: 50108 - DNA, 120 bp, Homo sapiens
  misc_feature: 721 for SV(W|O) and 28S
gtttcgctggatagtaggtagggacagtgggaatctcgttcatccattcatgcgcgtcactaattagatgacgaggcatttggctaccttaagagagtcatagttactcccgccgtttac

SEQ ID NO: 50109 - DNA, 120 bp, Homo sapiens
  misc_feature: 721 for SV(W|O) and 28S
cccgacgctccagcgccatccattttcagggctagttgattcggcaggtgagttgttacacactccttagcggattccgacttccatggccaccgtcctgctgtctatatcaaccaacac

SEQ ID NO: 50110 - DNA, 120 bp, Homo sapiens
  misc_feature: 721 for SV(W|O) and 28S
gtctcttcaccgtgccagactagagtcaagctcaacagggtcttctttccccgctgattccgccaagcccgttcccttggctgtggtttcgctggatagtaggtagggacagtgggaatc

SEQ ID NO: 50111 - DNA, 120 bp, Homo sapiens
  misc_feature: 721 for SV(W|O) and 28S
gctccagcgccatccattttcagggctagttgattcggcaggtgagttgttacacactccttagcggattccgacttccatggccaccgtcctgctgtctatatcaaccaacaccttttc

SEQ ID NO: 50112 - DNA, 120 bp, Homo sapiens
  misc_feature: 721 for SV(W|O) and 28S
gccgcaggtgcagatcttggtggtagtagcaaatattcaaacgagaactttgaaggccgaagtggagaagggttccatgtgaacagcagttgaacatgggtcagtcggtcctgagagatg

SEQ ID NO: 50113 - DNA, 120 bp, Homo sapiens
  misc_feature: 721 for SV(W|O) and 28S
cacctcctgcttaaaacccaaaaggtcagaaggatcgtgaggccccgctttcacggtctgtattcgtactgaaaatcaagatcaagcgagcttttgcccttctgctccacgggaggtttc

SEQ ID NO: 50114 - DNA, 120 bp, Homo sapiens
  misc_feature: 721 for SV(W|O) and 28S
accaaatgtctgaacctgcggttcctctcgtactgagcaggattaccatggcaacaacacatcatcagtagggtaaaactaacctgtctcacgacggtctaaacccagctcacgttccct

SEQ ID NO: 50115 - DNA, 120 bp, Homo sapiens
  misc_feature: 720 for SV(W|O) and 28S
tttctgacacctcctgcttaaaacccaaaaggtcagaaggatcgtgaggccccgctttcacggtctgtattcgtactgaaaatcaagatcaagcgagcttttgcccttctgctccacggg

SEQ ID NO: 50116 - DNA, 120 bp, Homo sapiens
  misc_feature: 720 for SV(W|O) and 28S
ccgccgagggcgcaccaccggcccgtctcgcccgccgcgccggggaggtggagcacgagcgcacgtgttaggacccgaaagatggtgaactatgcctgggcagggcgaagccagaggaaa

SEQ ID NO: 50117 - DNA, 120 bp, Homo sapiens
  misc_feature: 720 for SV(W|O) and 28S
gctccggggacagtgccaggtggggagtttgactggggcggtacacctgtcaaacggtaacgcaggtgtcctaaggcgagctcagggaggacagaaacctcccgtggagcagaagggcaa

SEQ ID NO: 50118 - DNA, 120 bp, Homo sapiens
  misc_feature: 720 for SV(W|O) and 28S
acccgaaagatggtgaactatgcctgggcagggcgaagccagaggaaactctggtggaggtccgtagcggtcctgacgtgcaaatcggtcgtccgacctgggtataggggcgaaagacta

SEQ ID NO: 50119 - DNA, 120 bp, Homo sapiens
  misc_feature: 720 for SV(W|O) and 28S
ctggacgcctcgcggcgcccatctccgccactccggattcggggatctgaacccgactccctttcgatcggccgagggcaacggaggccatcgcccgtcccttcggaacggcgctcgccc

SEQ ID NO: 50120 - DNA, 120 bp, Homo sapiens
  misc_feature: 720 for SV(W|O) and 28S
agaaactaaccaggattccctcagtaacggcgagtgaacagggaagagcccagcgccgaatccccgccccgcggcggggcgcgggacatgtggcgtacggaagacccgctccccggcgcc

SEQ ID NO: 50121 - DNA, 120 bp, Homo sapiens
  misc_feature: 720 for SV(W|O) and 28S
ctaattagtgacgcgcatgaatggatgaacgagattcccactgtccctacctactatccagcgaaaccacagccaagggaacgggcttggcggaatcagcggggaaagaagaccctgttg

SEQ ID NO: 50122 - DNA, 120 bp, Homo sapiens
  misc_feature: 720 for SV(W|O) and 28S
cagtcggtcctgagagatgggcgagcgccgttccgaagggacgggcgatggcctccgttgccctcggccgatcgaaagggagtcgggttcagatccccgaatccggagtggcggagatgg

SEQ ID NO: 50123 - DNA, 120 bp, Homo sapiens
  misc_feature: 719 for SV(W|O) and 28S
gtatgggcccgacgctccagcgccatccattttcagggctagttgattcggcaggtgagttgttacacactccttagcggattccgacttccatggccaccgtcctgctgtctatatcaa

SEQ ID NO: 50124 - DNA, 120 bp, Homo sapiens
  misc_feature: 719 for SV(W|O) and 28S
ttcgctggatagtaggtagggacagtgggaatctcgttcatccattcatgcgcgtcactaattagatgacgaggcatttggctaccttaagagagtcatagttactcccgccgtttaccc

SEQ ID NO: 50125 - DNA, 120 bp, Homo sapiens
  misc_feature: 719 for SV(W|O) and 28S
tgggtcagtcggtcctgagagatgggcgagcgccgttccgaagggacgggcgatggcctccgttgccctcggccgatcgaaagggagtcgggttcagatccccgaatccggagtggcgga

SEQ ID NO: 50126 - DNA, 120 bp, Homo sapiens
  misc_feature: 719 for SV(W|O) and 28S
tggcggagatgggcgccgcgaggcgtccagtgcggtaacgcgaccgatcccggagaagccggcgggagccccggggagagttctcttttctttgtgaagggcagggcgccctggaatggg

SEQ ID NO: 50127 - DNA, 120 bp, Homo sapiens
  misc_feature: 719 for SV(W|O) and 28S
tggcgccagaagcgagagcccctcggggctcgcccccccgcctcaccgggtcagtgaaaaaacgatcagagtagtggtatttcaccggcggcccgcagggccggcggaccccgccccggg

SEQ ID NO: 50128 - DNA, 120 bp, Homo sapiens
  misc_feature: 719 for SV(W|O) and 28S
ccactaatagggaacgtgagctgggtttagaccgtcgtgagacaggttagttttaccctactgatgatgtgttgttgccatggtaatcctgctcagtacgagaggaaccgcaggttcaga

SEQ ID NO: 50129 - DNA, 120 bp, Homo sapiens
  misc_feature: 719 for SV(W|O) and 28S
tcaacagggtcttctttccccgctgattccgccaagcccgttcccttggctgtggtttcgctggatagtaggtagggacagtgggaatctcgttcatccattcatgcgcgtcactaatta

SEQ ID NO: 50130 - DNA, 120 bp, Homo sapiens
  misc_feature: 719 for SV(W|O) and 28S
attatgactgaacgcctctaagtcagaatcccgcccaggcggaacgatacggcagcgccgcggagcctcggttggcctcggatagccggtcccccgcctgtccccgccggcgggccgccc

SEQ ID NO: 50131 - DNA, 120 bp, Homo sapiens
  misc_feature: 719 for SV(W|O) and 28S
caccaaatgtctgaacctgcggttcctctcgtactgagcaggattaccatggcaacaacacatcatcagtagggtaaaactaacctgtctcacgacggtctaaacccagctcacgttccc

SEQ ID NO: 50132 - DNA, 120 bp, Homo sapiens
  misc_feature: 719 for SV(W|O) and 28S
ggcgcctcgcctcggccggcgcctagcagccgacttagaactggtgcggaccaggggaatccgactgtttaattaaaacaaagcatcgcgaaggcccgcggcgggtgttgacgcgatgtg

SEQ ID NO: 50133 - DNA, 120 bp, Homo sapiens
  misc_feature: 719 for SV(W|O) and 28S
cgcctcgcggcgcccatctccgccactccggattcggggatctgaacccgactccctttcgatcggccgagggcaacggaggccatcgcccgtcccttcggaacggcgctcgcccatctc

SEQ ID NO: 50134 - DNA, 120 bp, Homo sapiens
  misc_feature: 719 for SV(W|O) and 28S
atgctttgttttaattaaacagtcggattcccctggtccgcaccagttctaagtcggctgctaggcgccggccgaggcgaggcgccgcgcggaaccgcggccccgggggcggacccggcg

SEQ ID NO: 50135 - DNA, 120 bp, Homo sapiens
  misc_feature: 719 for SV(W|O) and 28S
acggggggcgggaaagatccgccgggccgccgacacggccggacccgccgccgggttgaatcctccgggcggactgcgcggaccccacccgtttacctcttaacggtttcacgccctctt

SEQ ID NO: 50136 - DNA, 120 bp, Homo sapiens
  misc_feature: 718 for SV(W|O) and 28S
gtcggacgaccgatttgcacgtcaggaccgctacggacctccaccagagtttcctctggcttcgccctgcccaggcatagttcaccatctttcgggtcctaacacgtgcgctcgtgctcc

SEQ ID NO: 50137 - DNA, 120 bp, Homo sapiens
  misc_feature: 718 for SV(W|O) and 28S
aaactaaccaggattccctcagtaacggcgagtgaacagggaagagcccagcgccgaatccccgccccgcggcggggcgcgggacatgtggcgtacggaagacccgctccccggcgccgc

SEQ ID NO: 50138 - DNA, 120 bp, Homo sapiens
  misc_feature: 718 for SV(W|O) and 28S
accgcactggacgcctcgcggcgcccatctccgccactccggattcggggatctgaacccgactccctttcgatcggccgagggcaacggaggccatcgcccgtcccttcggaacggcgc

SEQ ID NO: 50139 - DNA, 120 bp, Homo sapiens
  misc_feature: 718 for SV(W|O) and 28S
cgaatccggagtggcggagatgggcgccgcgaggcgtccagtgcggtaacgcgaccgatcccggagaagccggcgggagccccggggagagttctcttttctttgtgaagggcagggcgc

SEQ ID NO: 50140 - DNA, 120 bp, Homo sapiens
  misc_feature: 718 for SV(W|O) and 28S
cggtcctgagagatgggcgagcgccgttccgaagggacgggcgatggcctccgttgccctcggccgatcgaaagggagtcgggttcagatccccgaatccggagtggcggagatgggcgc

SEQ ID NO: 50141 - DNA, 120 bp, Homo sapiens
  misc_feature: 718 for SV(W|O) and 28S
cgcctcgcctcggccggcgcctagcagccgacttagaactggtgcggaccaggggaatccgactgtttaattaaaacaaagcatcgcgaaggcccgcggcgggtgttgacgcgatgtgat

SEQ ID NO: 50142 - DNA, 120 bp, Homo sapiens
  misc_feature: 717 for SV(W|O) and 28S
catccattcatgcgcgtcactaattagatgacgaggcatttggctaccttaagagagtcatagttactcccgccgtttacccgcgcttcattgaatttcttcactttgacattcagagca

SEQ ID NO: 50143 - DNA, 120 bp, Homo sapiens
  misc_feature: 717 for SV(W|O) and 28S
gtcaagctcaacagggtcttctttccccgctgattccgccaagcccgttcccttggctgtggtttcgctggatagtaggtagggacagtgggaatctcgttcatccattcatgcgcgtca

SEQ ID NO: 50144 - DNA, 120 bp, Homo sapiens
  misc_feature: 717 for SV(W|O) and 28S
tgaacatgggtcagtcggtcctgagagatgggcgagcgccgttccgaagggacgggcgatggcctccgttgccctcggccgatcgaaagggagtcgggttcagatccccgaatccggagt

SEQ ID NO: 50145 - DNA, 120 bp, Homo sapiens
  misc_feature: 717 for SV(W|O) and 28S
tcttcaccgtgccagactagagtcaagctcaacagggtcttctttccccgctgattccgccaagcccgttcccttggctgtggtttcgctggatagtaggtagggacagtgggaatctcg

SEQ ID NO: 50146 - DNA, 120 bp, Homo sapiens
  misc_feature: 717 for SV(W|O) and 28S
tcgtttgaatatttgctactaccaccaagatctgcacctgcggcggctccacccgggcccgcgccctaggcttcaaggctcaccgcagcggccctcctactcgtcgcggcgtagcgtccg

SEQ ID NO: 50147 - DNA, 120 bp, Homo sapiens
  misc_feature: 717 for SV(W|O) and 28S
tcacccactaatagggaacgtgagctgggtttagaccgtcgtgagacaggttagttttaccctactgatgatgtgttgttgccatggtaatcctgctcagtacgagaggaaccgcaggtt

SEQ ID NO: 50148 - DNA, 120 bp, Homo sapiens
  misc_feature: 717 for SV(W|O) and 28S
gggtcagtcggtcctgagagatgggcgagcgccgttccgaagggacgggcgatggcctccgttgccctcggccgatcgaaagggagtcgggttcagatccccgaatccggagtggcggag

SEQ ID NO: 50149 - DNA, 120 bp, Homo sapiens
  misc_feature: 717 for SV(W|O) and 28S
acacctcctgcttaaaacccaaaaggtcagaaggatcgtgaggccccgctttcacggtctgtattcgtactgaaaatcaagatcaagcgagcttttgcccttctgctccacgggaggttt

SEQ ID NO: 50150 - DNA, 120 bp, Homo sapiens
  misc_feature: 716 for SV(W|O) and 28S
ttttctgacacctcctgcttaaaacccaaaaggtcagaaggatcgtgaggccccgctttcacggtctgtattcgtactgaaaatcaagatcaagcgagcttttgcccttctgctccacgg

SEQ ID NO: 50151 - DNA, 120 bp, Homo sapiens
  misc_feature: 716 for SV(W|O) and 28S
gatccgccgggccgccgacacggccggacccgccgccgggttgaatcctccgggcggactgcgcggaccccacccgtttacctcttaacggtttcacgccctcttgaactctctcttcaa

SEQ ID NO: 50152 - DNA, 120 bp, Homo sapiens
  misc_feature: 716 for SV(W|O) and 28S
tgacacctcctgcttaaaacccaaaaggtcagaaggatcgtgaggccccgctttcacggtctgtattcgtactgaaaatcaagatcaagcgagcttttgcccttctgctccacgggaggt

SEQ ID NO: 50153 - DNA, 120 bp, Homo sapiens
  misc_feature: 716 for SV(W|O) and 28S
ccgccgacacggccggacccgccgccgggttgaatcctccgggcggactgcgcggaccccacccgtttacctcttaacggtttcacgccctcttgaactctctcttcaaagttcttttca

SEQ ID NO: 50154 - DNA, 120 bp, Homo sapiens
  misc_feature: 716 for SV(W|O) and 28S
gcgcctcgcctcggccggcgcctagcagccgacttagaactggtgcggaccaggggaatccgactgtttaattaaaacaaagcatcgcgaaggcccgcggcgggtgttgacgcgatgtga

SEQ ID NO: 50155 - DNA, 120 bp, Homo sapiens
  misc_feature: 716 for SV(W|O) and 28S
tatgggcccgacgctccagcgccatccattttcagggctagttgattcggcaggtgagttgttacacactccttagcggattccgacttccatggccaccgtcctgctgtctatatcaac

SEQ ID NO: 50156 - DNA, 120 bp, Homo sapiens
  misc_feature: 716 for SV(W|O) and 28S
gattatgactgaacgcctctaagtcagaatcccgcccaggcggaacgatacggcagcgccgcggagcctcggttggcctcggatagccggtcccccgcctgtccccgccggcgggccgcc

SEQ ID NO: 50157 - DNA, 120 bp, Homo sapiens
  misc_feature: 716 for SV(W|O) and 28S
gaaagatggtgaactatgcctgggcagggcgaagccagaggaaactctggtggaggtccgtagcggtcctgacgtgcaaatcggtcgtccgacctgggtataggggcgaaagactaatcg

SEQ ID NO: 50158 - DNA, 120 bp, Homo sapiens
  misc_feature: 716 for SV(W|O) and 28S
atccccgaatccggagtggcggagatgggcgccgcgaggcgtccagtgcggtaacgcgaccgatcccggagaagccggcgggagccccggggagagttctcttttctttgtgaagggcag

SEQ ID NO: 50159 - DNA, 120 bp, Homo sapiens
  misc_feature: 716 for SV(W|O) and 28S
cgcggcgcctcgcctcggccggcgcctagcagccgacttagaactggtgcggaccaggggaatccgactgtttaattaaaacaaagcatcgcgaaggcccgcggcgggtgttgacgcgat

SEQ ID NO: 50160 - DNA, 120 bp, Homo sapiens
  misc_feature: 715 for SV(W|O) and 28S
ttctccacttcggccttcaaagttctcgtttgaatatttgctactaccaccaagatctgcacctgcggcggctccacccgggcccgcgccctaggcttcaaggctcaccgcagcggccct

SEQ ID NO: 50161 - DNA, 120 bp, Homo sapiens
  misc_feature: 715 for SV(W|O) and 28S
ttatgactgaacgcctctaagtcagaatcccgcccaggcggaacgatacggcagcgccgcggagcctcggttggcctcggatagccggtcccccgcctgtccccgccggcgggccgcccc

SEQ ID NO: 50162 - DNA, 120 bp, Homo sapiens
  misc_feature: 715 for SV(W|O) and 28S
tccccgaatccggagtggcggagatgggcgccgcgaggcgtccagtgcggtaacgcgaccgatcccggagaagccggcgggagccccggggagagttctcttttctttgtgaagggcagg

SEQ ID NO: 50163 - DNA, 120 bp, Homo sapiens
  misc_feature: 715 for SV(W|O) and 28S
tcaagctcaacagggtcttctttccccgctgattccgccaagcccgttcccttggctgtggtttcgctggatagtaggtagggacagtgggaatctcgttcatccattcatgcgcgtcac

SEQ ID NO: 50164 - DNA, 120 bp, Homo sapiens
  misc_feature: 715 for SV(W|O) and 28S
ggacgcctcgcggcgcccatctccgccactccggattcggggatctgaacccgactccctttcgatcggccgagggcaacggaggccatcgcccgtcccttcggaacggcgctcgcccat

SEQ ID NO: 50165 - DNA, 120 bp, Homo sapiens
  misc_feature: 715 for SV(W|O) and 28S
gctcccgtccactctcgactgccggcgacggccgggtatgggcccgacgctccagcgccatccattttcagggctagttgattcggcaggtgagttgttacacactccttagcggattcc

SEQ ID NO: 50166 - DNA, 120 bp, Homo sapiens
  misc_feature: 715 for SV(W|O) and 28S
cactggacgcctcgcggcgcccatctccgccactccggattcggggatctgaacccgactccctttcgatcggccgagggcaacggaggccatcgcccgtcccttcggaacggcgctcgc

SEQ ID NO: 50167 - DNA, 120 bp, Homo sapiens
  misc_feature: 715 for SV(W|O) and 28S
gacacggccggacccgccgccgggttgaatcctccgggcggactgcgcggaccccacccgtttacctcttaacggtttcacgccctcttgaactctctcttcaaagttcttttcaacttt

SEQ ID NO: 50168 - DNA, 120 bp, Homo sapiens
  misc_feature: 715 for SV(W|O) and 28S
cccactaatagggaacgtgagctgggtttagaccgtcgtgagacaggttagttttaccctactgatgatgtgttgttgccatggtaatcctgctcagtacgagaggaaccgcaggttcag

SEQ ID NO: 50169 - DNA, 120 bp, Homo sapiens
  misc_feature: 715 for SV(W|O) and 28S
cgacacggccggacccgccgccgggttgaatcctccgggcggactgcgcggaccccacccgtttacctcttaacggtttcacgccctcttgaactctctcttcaaagttcttttcaactt

SEQ ID NO: 50170 - DNA, 120 bp, Homo sapiens
  misc_feature: 715 for SV(W|O) and 28S
acctcctgcttaaaacccaaaaggtcagaaggatcgtgaggccccgctttcacggtctgtattcgtactgaaaatcaagatcaagcgagcttttgcccttctgctccacgggaggtttct

SEQ ID NO: 50171 - DNA, 120 bp, Homo sapiens
  misc_feature: 714 for SV(W|O) and 28S
gatggtgaactatgcctgggcagggcgaagccagaggaaactctggtggaggtccgtagcggtcctgacgtgcaaatcggtcgtccgacctgggtataggggcgaaagactaatcgaacc

SEQ ID NO: 50172 - DNA, 120 bp, Homo sapiens
  misc_feature: 714 for SV(W|O) and 28S
ggttccggcggcgtccggtgagctctcgctggcccttgaaaatccgggggagagggtgtaaatctcgcgccgggccgtacccatatccgcagcaggtctccaaggtgaacagcctctggc

SEQ ID NO: 50173 - DNA, 120 bp, Homo sapiens
  misc_feature: 714 for SV(W|O) and 28S
ccgacgctccagcgccatccattttcagggctagttgattcggcaggtgagttgttacacactccttagcggattccgacttccatggccaccgtcctgctgtctatatcaaccaacacc

SEQ ID NO: 50174 - DNA, 120 bp, Homo sapiens
  misc_feature: 714 for SV(W|O) and 28S
gggcgggaaagatccgccgggccgccgacacggccggacccgccgccgggttgaatcctccgggcggactgcgcggaccccacccgtttacctcttaacggtttcacgccctcttgaact

SEQ ID NO: 50175 - DNA, 120 bp, Homo sapiens
  misc_feature: 714 for SV(W|O) and 28S
actggacgcctcgcggcgcccatctccgccactccggattcggggatctgaacccgactccctttcgatcggccgagggcaacggaggccatcgcccgtcccttcggaacggcgctcgcc

SEQ ID NO: 50176 - DNA, 120 bp, Homo sapiens
  misc_feature: 714 for SV(W|O) and 28S
cgcactggacgcctcgcggcgcccatctccgccactccggattcggggatctgaacccgactccctttcgatcggccgagggcaacggaggccatcgcccgtcccttcggaacggcgctc

SEQ ID NO: 50177 - DNA, 120 bp, Homo sapiens
  misc_feature: 714 for SV(W|O) and 28S
cgggaaagatccgccgggccgccgacacggccggacccgccgccgggttgaatcctccgggcggactgcgcggaccccacccgtttacctcttaacggtttcacgccctcttgaactctc

SEQ ID NO: 50178 - DNA, 120 bp, Homo sapiens
  misc_feature: 713 for SV(W|O) and 28S
tttcgctggatagtaggtagggacagtgggaatctcgttcatccattcatgcgcgtcactaattagatgacgaggcatttggctaccttaagagagtcatagttactcccgccgtttacc

SEQ ID NO: 50179 - DNA, 120 bp, Homo sapiens
  misc_feature: 713 for SV(W|O) and 28S
gttcatccattcatgcgcgtcactaattagatgacgaggcatttggctaccttaagagagtcatagttactcccgccgtttacccgcgcttcattgaatttcttcactttgacattcaga

SEQ ID NO: 50180 - DNA, 120 bp, Homo sapiens
  misc_feature: 713 for SV(W|O) and 28S
gcgccgcgaggcgtccagtgcggtaacgcgaccgatcccggagaagccggcgggagccccggggagagttctcttttctttgtgaagggcagggcgccctggaatgggttcgccccgaga

SEQ ID NO: 50181 - DNA, 120 bp, Homo sapiens
  misc_feature: 713 for SV(W|O) and 28S
ggtgaactatgcctgggcagggcgaagccagaggaaactctggtggaggtccgtagcggtcctgacgtgcaaatcggtcgtccgacctgggtataggggcgaaagactaatcgaaccatc

SEQ ID NO: 50182 - DNA, 120 bp, Homo sapiens
  misc_feature: 713 for SV(W|O) and 28S
cggcccgccggcggggacaggcgggggaccggctatccgaggccaaccgaggctccgcggcgctgccgtatcgttccgcctgggcgggattctgacttagaggcgttcagtcataatccc

SEQ ID NO: 50183 - DNA, 120 bp, Homo sapiens
  misc_feature: 713 for SV(W|O) and 28S
gaaactaaccaggattccctcagtaacggcgagtgaacagggaagagcccagcgccgaatccccgccccgcggcggggcgcgggacatgtggcgtacggaagacccgctccccggcgccg

SEQ ID NO: 50184 - DNA, 120 bp, Homo sapiens
  misc_feature: 713 for SV(W|O) and 28S
atgggtcagtcggtcctgagagatgggcgagcgccgttccgaagggacgggcgatggcctccgttgccctcggccgatcgaaagggagtcgggttcagatccccgaatccggagtggcgg

SEQ ID NO: 50185 - DNA, 120 bp, Homo sapiens
  misc_feature: 713 for SV(W|O) and 28S
cagaaggacttgggccccccacgagcggcgccggggagcgggtcttccgtacgccacatgtcccgcgccccgccgcggggcggggattcggcgctgggctcttccctgttcactcgccgt

SEQ ID NO: 50186 - DNA, 120 bp, Homo sapiens
  misc_feature: 712 for SV(W|O) and 28S
ttcatccattcatgcgcgtcactaattagatgacgaggcatttggctaccttaagagagtcatagttactcccgccgtttacccgcgcttcattgaatttcttcactttgacattcagag

SEQ ID NO: 50187 - DNA, 120 bp, Homo sapiens
  misc_feature: 712 for SV(W|O) and 28S
ttcacccactaatagggaacgtgagctgggtttagaccgtcgtgagacaggttagttttaccctactgatgatgtgttgttgccatggtaatcctgctcagtacgagaggaaccgcaggt

SEQ ID NO: 50188 - DNA, 120 bp, Homo sapiens
  misc_feature: 712 for SV(W|O) and 28S
gttccggcggcgtccggtgagctctcgctggcccttgaaaatccgggggagagggtgtaaatctcgcgccgggccgtacccatatccgcagcaggtctccaaggtgaacagcctctggca

SEQ ID NO: 50189 - DNA, 120 bp, Homo sapiens
  misc_feature: 712 for SV(W|O) and 28S
tctgacacctcctgcttaaaacccaaaaggtcagaaggatcgtgaggccccgctttcacggtctgtattcgtactgaaaatcaagatcaagcgagcttttgcccttctgctccacgggag

SEQ ID NO: 50190 - DNA, 120 bp, Homo sapiens
  misc_feature: 712 for SV(W|O) and 28S
ggcgggaaagatccgccgggccgccgacacggccggacccgccgccgggttgaatcctccgggcggactgcgcggaccccacccgtttacctcttaacggtttcacgccctcttgaactc

SEQ ID NO: 50191 - DNA, 120 bp, Homo sapiens
  misc_feature: 712 for SV(W|O) and 28S
gcggcccgccggcggggacaggcgggggaccggctatccgaggccaaccgaggctccgcggcgctgccgtatcgttccgcctgggcgggattctgacttagaggcgttcagtcataatcc

SEQ ID NO: 50192 - DNA, 120 bp, Homo sapiens
  misc_feature: 712 for SV(W|O) and 28S
aagaaactaaccaggattccctcagtaacggcgagtgaacagggaagagcccagcgccgaatccccgccccgcggcggggcgcgggacatgtggcgtacggaagacccgctccccggcgc

SEQ ID NO: 50193 - DNA, 120 bp, Homo sapiens
  misc_feature: 712 for SV(W|O) and 28S
gcgccgcccccgccgctcccgtccactctcgactgccggcgacggccgggtatgggcccgacgctccagcgccatccattttcagggctagttgattcggcaggtgagttgttacacact

SEQ ID NO: 50194 - DNA, 120 bp, Homo sapiens
  misc_feature: 712 for SV(W|O) and 28S
acatgggtcagtcggtcctgagagatgggcgagcgccgttccgaagggacgggcgatggcctccgttgccctcggccgatcgaaagggagtcgggttcagatccccgaatccggagtggc

SEQ ID NO: 50195 - DNA, 120 bp, Homo sapiens
  misc_feature: 712 for SV(W|O) and 28S
agtcaagctcaacagggtcttctttccccgctgattccgccaagcccgttcccttggctgtggtttcgctggatagtaggtagggacagtgggaatctcgttcatccattcatgcgcgtc

SEQ ID NO: 50196 - DNA, 120 bp, Homo sapiens
  misc_feature: 711 for SV(W|O) and 28S
ttctgacacctcctgcttaaaacccaaaaggtcagaaggatcgtgaggccccgctttcacggtctgtattcgtactgaaaatcaagatcaagcgagcttttgcccttctgctccacggga

SEQ ID NO: 50197 - DNA, 120 bp, Homo sapiens
  misc_feature: 711 for SV(W|O) and 28S
ttccggcggcgtccggtgagctctcgctggcccttgaaaatccgggggagagggtgtaaatctcgcgccgggccgtacccatatccgcagcaggtctccaaggtgaacagcctctggcat

SEQ ID NO: 50198 - DNA, 120 bp, Homo sapiens
  misc_feature: 711 for SV(W|O) and 28S
tcggacgaccgatttgcacgtcaggaccgctacggacctccaccagagtttcctctggcttcgccctgcccaggcatagttcaccatctttcgggtcctaacacgtgcgctcgtgctcca

SEQ ID NO: 50199 - DNA, 120 bp, Homo sapiens
  misc_feature: 711 for SV(W|O) and 28S
tgcccttcacaaagaaaagagaactctccccggggctcccgccggcttctccgggatcggtcgcgttaccgcactggacgcctcgcggcgcccatctccgccactccggattcggggatc

SEQ ID NO: 50200 - DNA, 120 bp, Homo sapiens
  misc_feature: 711 for SV(W|O) and 28S
ggggcgggaaagatccgccgggccgccgacacggccggacccgccgccgggttgaatcctccgggcggactgcgcggaccccacccgtttacctcttaacggtttcacgccctcttgaac

SEQ ID NO: 50201 - DNA, 120 bp, Homo sapiens
  misc_feature: 711 for SV(W|O) and 28S
gtgaactatgcctgggcagggcgaagccagaggaaactctggtggaggtccgtagcggtcctgacgtgcaaatcggtcgtccgacctgggtataggggcgaaagactaatcgaaccatct

SEQ ID NO: 50202 - DNA, 120 bp, Homo sapiens
  misc_feature: 711 for SV(W|O) and 28S
ggtagccaaatgcctcgtcatctaattagtgacgcgcatgaatggatgaacgagattcccactgtccctacctactatccagcgaaaccacagccaagggaacgggcttggcggaatcag

SEQ ID NO: 50203 - DNA, 120 bp, Homo sapiens
  misc_feature: 711 for SV(W|O) and 28S
accgatttgcacgtcaggaccgctacggacctccaccagagtttcctctggcttcgccctgcccaggcatagttcaccatctttcgggtcctaacacgtgcgctcgtgctccacctcccc

SEQ ID NO: 50204 - DNA, 120 bp, Homo sapiens
  misc_feature: 711 for SV(W|O) and 28S
cgcttggcgccagaagcgagagcccctcggggctcgcccccccgcctcaccgggtcagtgaaaaaacgatcagagtagtggtatttcaccggcggcccgcagggccggcggaccccgccc

SEQ ID NO: 50205 - DNA, 120 bp, Homo sapiens
  misc_feature: 711 for SV(W|O) and 28S
gagtcaagctcaacagggtcttctttccccgctgattccgccaagcccgttcccttggctgtggtttcgctggatagtaggtagggacagtgggaatctcgttcatccattcatgcgcgt

SEQ ID NO: 50206 - DNA, 120 bp, Homo sapiens
  misc_feature: 710 for SV(W|O) and 28S
ggtatgggcccgacgctccagcgccatccattttcagggctagttgattcggcaggtgagttgttacacactccttagcggattccgacttccatggccaccgtcctgctgtctatatca

SEQ ID NO: 50207 - DNA, 120 bp, Homo sapiens
  misc_feature: 710 for SV(W|O) and 28S
ggcggagatgggcgccgcgaggcgtccagtgcggtaacgcgaccgatcccggagaagccggcgggagccccggggagagttctcttttctttgtgaagggcagggcgccctggaatgggt

SEQ ID NO: 50208 - DNA, 120 bp, Homo sapiens
  misc_feature: 710 for SV(W|O) and 28S
gagatgggcgccgcgaggcgtccagtgcggtaacgcgaccgatcccggagaagccggcgggagccccggggagagttctcttttctttgtgaagggcagggcgccctggaatgggttcgc

SEQ ID NO: 50209 - DNA, 120 bp, Homo sapiens
  misc_feature: 710 for SV(W|O) and 28S
gccaaatgcctcgtcatctaattagtgacgcgcatgaatggatgaacgagattcccactgtccctacctactatccagcgaaaccacagccaagggaacgggcttggcggaatcagcggg

SEQ ID NO: 50210 - DNA, 120 bp, Homo sapiens
  misc_feature: 710 for SV(W|O) and 28S
gacgcctcgcggcgcccatctccgccactccggattcggggatctgaacccgactccctttcgatcggccgagggcaacggaggccatcgcccgtcccttcggaacggcgctcgcccatc

SEQ ID NO: 50211 - DNA, 120 bp, Homo sapiens
  misc_feature: 710 for SV(W|O) and 28S
cacccactaatagggaacgtgagctgggtttagaccgtcgtgagacaggttagttttaccctactgatgatgtgttgttgccatggtaatcctgctcagtacgagaggaaccgcaggttc

SEQ ID NO: 50212 - DNA, 120 bp, Homo sapiens
  misc_feature: 710 for SV(W|O) and 28S
ccggcccgtctcgcccgccgcgccggggaggtggagcacgagcgcacgtgttaggacccgaaagatggtgaactatgcctgggcagggcgaagccagaggaaactctggtggaggtccgt

SEQ ID NO: 50213 - DNA, 120 bp, Homo sapiens
  misc_feature: 709 for SV(W|O) and 28S
cgccgacacggccggacccgccgccgggttgaatcctccgggcggactgcgcggaccccacccgtttacctcttaacggtttcacgccctcttgaactctctcttcaaagttcttttcaa

SEQ ID NO: 50214 - DNA, 120 bp, Homo sapiens
  misc_feature: 709 for SV(W|O) and 28S
tcagaaggacttgggccccccacgagcggcgccggggagcgggtcttccgtacgccacatgtcccgcgccccgccgcggggcggggattcggcgctgggctcttccctgttcactcgccg

SEQ ID NO: 50215 - DNA, 120 bp, Homo sapiens
  misc_feature: 709 for SV(W|O) and 28S
tatgactgaacgcctctaagtcagaatcccgcccaggcggaacgatacggcagcgccgcggagcctcggttggcctcggatagccggtcccccgcctgtccccgccggcgggccgccccc

SEQ ID NO: 50216 - DNA, 120 bp, Homo sapiens
  misc_feature: 709 for SV(W|O) and 28S
cgcgccgcccccgccgctcccgtccactctcgactgccggcgacggccgggtatgggcccgacgctccagcgccatccattttcagggctagttgattcggcaggtgagttgttacacac

SEQ ID NO: 50217 - DNA, 120 bp, Homo sapiens
  misc_feature: 709 for SV(W|O) and 28S
gcttggcgccagaagcgagagcccctcggggctcgcccccccgcctcaccgggtcagtgaaaaaacgatcagagtagtggtatttcaccggcggcccgcagggccggcggaccccgcccc

SEQ ID NO: 50218 - DNA, 120 bp, Homo sapiens
  misc_feature: 709 for SV(W|O) and 28S
cttctccacttcggccttcaaagttctcgtttgaatatttgctactaccaccaagatctgcacctgcggcggctccacccgggcccgcgccctaggcttcaaggctcaccgcagcggccc

SEQ ID NO: 50219 - DNA, 120 bp, Homo sapiens
  misc_feature: 709 for SV(W|O) and 28S
gcgggaaagatccgccgggccgccgacacggccggacccgccgccgggttgaatcctccgggcggactgcgcggaccccacccgtttacctcttaacggtttcacgccctcttgaactct

SEQ ID NO: 50220 - DNA, 120 bp, Homo sapiens
  misc_feature: 709 for SV(W|O) and 28S
cttcaccgtgccagactagagtcaagctcaacagggtcttctttccccgctgattccgccaagcccgttcccttggctgtggtttcgctggatagtaggtagggacagtgggaatctcgt

SEQ ID NO: 50221 - DNA, 120 bp, Homo sapiens
  misc_feature: 709 for SV(W|O) and 28S
cggttccggcggcgtccggtgagctctcgctggcccttgaaaatccgggggagagggtgtaaatctcgcgccgggccgtacccatatccgcagcaggtctccaaggtgaacagcctctgg

SEQ ID NO: 50222 - DNA, 120 bp, Homo sapiens
  misc_feature: 709 for SV(W|O) and 28S
catgggtcagtcggtcctgagagatgggcgagcgccgttccgaagggacgggcgatggcctccgttgccctcggccgatcgaaagggagtcgggttcagatccccgaatccggagtggcg

SEQ ID NO: 50223 - DNA, 120 bp, Homo sapiens
  misc_feature: 709 for SV(W|O) and 28S
cccagcccttagagccaatccttatcccgaagttacggatccggcttgccgacttcccttacctacattgttccaacatgccagaggctgttcaccttggagacctgctgcggatatggg

SEQ ID NO: 50224 - DNA, 120 bp, Homo sapiens
  misc_feature: 708 for SV(W|O) and 28S
ttggcgccagaagcgagagcccctcggggctcgcccccccgcctcaccgggtcagtgaaaaaacgatcagagtagtggtatttcaccggcggcccgcagggccggcggaccccgccccgg

SEQ ID NO: 50225 - DNA, 120 bp, Homo sapiens
  misc_feature: 708 for SV(W|O) and 28S
ctcgtcatctaattagtgacgcgcatgaatggatgaacgagattcccactgtccctacctactatccagcgaaaccacagccaagggaacgggcttggcggaatcagcggggaaagaaga

SEQ ID NO: 50226 - DNA, 120 bp, Homo sapiens
  misc_feature: 708 for SV(W|O) and 28S
acgggtggggtccgcgcagtccgcccggaggattcaacccggcggcgggtccggccgtgtcggcggcccggcggatctttcccgccccccgttcctcccgacccctccacccgccctccc

SEQ ID NO: 50227 - DNA, 120 bp, Homo sapiens
  misc_feature: 708 for SV(W|O) and 28S
aacgggtggggtccgcgcagtccgcccggaggattcaacccggcggcgggtccggccgtgtcggcggcccggcggatctttcccgccccccgttcctcccgacccctccacccgccctcc

SEQ ID NO: 50228 - DNA, 120 bp, Homo sapiens
  misc_feature: 708 for SV(W|O) and 28S
ggaacggggggcgggaaagatccgccgggccgccgacacggccggacccgccgccgggttgaatcctccgggcggactgcgcggaccccacccgtttacctcttaacggtttcacgccct

SEQ ID NO: 50229 - DNA, 120 bp, Homo sapiens
  misc_feature: 708 for SV(W|O) and 28S
agtccgccgagggcgcaccaccggcccgtctcgcccgccgcgccggggaggtggagcacgagcgcacgtgttaggacccgaaagatggtgaactatgcctgggcagggcgaagccagagg

SEQ ID NO: 50230 - DNA, 120 bp, Homo sapiens
  misc_feature: 708 for SV(W|O) and 28S
agccaaatgcctcgtcatctaattagtgacgcgcatgaatggatgaacgagattcccactgtccctacctactatccagcgaaaccacagccaagggaacgggcttggcggaatcagcgg

SEQ ID NO: 50231 - DNA, 120 bp, Homo sapiens
  misc_feature: 708 for SV(W|O) and 28S
ccagaagcgagagcccctcggggctcgcccccccgcctcaccgggtcagtgaaaaaacgatcagagtagtggtatttcaccggcggcccgcagggccggcggaccccgccccgggcccct

SEQ ID NO: 50232 - DNA, 120 bp, Homo sapiens
  misc_feature: 708 for SV(W|O) and 28S
aacatgggtcagtcggtcctgagagatgggcgagcgccgttccgaagggacgggcgatggcctccgttgccctcggccgatcgaaagggagtcgggttcagatccccgaatccggagtgg

SEQ ID NO: 50233 - DNA, 120 bp, Homo sapiens
  misc_feature: 708 for SV(W|O) and 28S
caaatgtctgaacctgcggttcctctcgtactgagcaggattaccatggcaacaacacatcatcagtagggtaaaactaacctgtctcacgacggtctaaacccagctcacgttccctat

SEQ ID NO: 50234 - DNA, 120 bp, Homo sapiens
  misc_feature: 707 for SV(W|O) and 28S
ggagtcgggttgcttgggaatgcagcccaaagcgggtggtaaactccatctaaggctaaataccggcacgagaccgatagtcaacaagtaccgtaagggaaagttgaaaagaactttgaa

SEQ ID NO: 50235 - DNA, 120 bp, Homo sapiens
  misc_feature: 707 for SV(W|O) and 28S
tcgtcatctaattagtgacgcgcatgaatggatgaacgagattcccactgtccctacctactatccagcgaaaccacagccaagggaacgggcttggcggaatcagcggggaaagaagac

SEQ ID NO: 50236 - DNA, 120 bp, Homo sapiens
  misc_feature: 707 for SV(W|O) and 28S
tcgctggatagtaggtagggacagtgggaatctcgttcatccattcatgcgcgtcactaattagatgacgaggcatttggctaccttaagagagtcatagttactcccgccgtttacccg

SEQ ID NO: 50237 - DNA, 120 bp, Homo sapiens
  misc_feature: 707 for SV(W|O) and 28S
tcatccattcatgcgcgtcactaattagatgacgaggcatttggctaccttaagagagtcatagttactcccgccgtttacccgcgcttcattgaatttcttcactttgacattcagagc

SEQ ID NO: 50238 - DNA, 120 bp, Homo sapiens
  misc_feature: 707 for SV(W|O) and 28S
gccgacacggccggacccgccgccgggttgaatcctccgggcggactgcgcggaccccacccgtttacctcttaacggtttcacgccctcttgaactctctcttcaaagttcttttcaac

SEQ ID NO: 50239 - DNA, 120 bp, Homo sapiens
  misc_feature: 707 for SV(W|O) and 28S
gaacggggggcgggaaagatccgccgggccgccgacacggccggacccgccgccgggttgaatcctccgggcggactgcgcggaccccacccgtttacctcttaacggtttcacgccctc

SEQ ID NO: 50240 - DNA, 120 bp, Homo sapiens
  misc_feature: 707 for SV(W|O) and 28S
aaacgggtggggtccgcgcagtccgcccggaggattcaacccggcggcgggtccggccgtgtcggcggcccggcggatctttcccgccccccgttcctcccgacccctccacccgccctc

SEQ ID NO: 50241 - DNA, 120 bp, Homo sapiens
  misc_feature: 707 for SV(W|O) and 28S
gaacatgggtcagtcggtcctgagagatgggcgagcgccgttccgaagggacgggcgatggcctccgttgccctcggccgatcgaaagggagtcgggttcagatccccgaatccggagtg

SEQ ID NO: 50242 - DNA, 120 bp, Homo sapiens
  misc_feature: 707 for SV(W|O) and 28S
ccgcactggacgcctcgcggcgcccatctccgccactccggattcggggatctgaacccgactccctttcgatcggccgagggcaacggaggccatcgcccgtcccttcggaacggcgct

SEQ ID NO: 50243 - DNA, 120 bp, Homo sapiens
  misc_feature: 707 for SV(W|O) and 28S
cccagaaaaggtgttggttgatatagacagcaggacggtggccatggaagtcggaatccgctaaggagtgtgtaacaactcacctgccgaatcaactagccctgaaaatggatggcgctg

SEQ ID NO: 50244 - DNA, 120 bp, Homo sapiens
  misc_feature: 706 for SV(W|O) and 28S
tgcacgtcaggaccgctacggacctccaccagagtttcctctggcttcgccctgcccaggcatagttcaccatctttcgggtcctaacacgtgcgctcgtgctccacctccccggcgcgg

SEQ ID NO: 50245 - DNA, 120 bp, Homo sapiens
  misc_feature: 706 for SV(W|O) and 28S
tgaactatgcctgggcagggcgaagccagaggaaactctggtggaggtccgtagcggtcctgacgtgcaaatcggtcgtccgacctgggtataggggcgaaagactaatcgaaccatcta

SEQ ID NO: 50246 - DNA, 120 bp, Homo sapiens
  misc_feature: 706 for SV(W|O) and 28S
gcggttccggcggcgtccggtgagctctcgctggcccttgaaaatccgggggagagggtgtaaatctcgcgccgggccgtacccatatccgcagcaggtctccaaggtgaacagcctctg

SEQ ID NO: 50247 - DNA, 120 bp, Homo sapiens
  misc_feature: 706 for SV(W|O) and 28S
accaggattccctcagtaacggcgagtgaacagggaagagcccagcgccgaatccccgccccgcggcggggcgcgggacatgtggcgtacggaagacccgctccccggcgccgctcgtgg

SEQ ID NO: 50248 - DNA, 120 bp, Homo sapiens
  misc_feature: 706 for SV(W|O) and 28S
aactaaccaggattccctcagtaacggcgagtgaacagggaagagcccagcgccgaatccccgccccgcggcggggcgcgggacatgtggcgtacggaagacccgctccccggcgccgct

SEQ ID NO: 50249 - DNA, 120 bp, Homo sapiens
  misc_feature: 705 for SV(W|O) and 28S
ccagtccgccgagggcgcaccaccggcccgtctcgcccgccgcgccggggaggtggagcacgagcgcacgtgttaggacccgaaagatggtgaactatgcctgggcagggcgaagccaga

SEQ ID NO: 50250 - DNA, 120 bp, Homo sapiens
  misc_feature: 705 for SV(W|O) and 28S
tagccaaatgcctcgtcatctaattagtgacgcgcatgaatggatgaacgagattcccactgtccctacctactatccagcgaaaccacagccaagggaacgggcttggcggaatcagcg

SEQ ID NO: 50251 - DNA, 120 bp, Homo sapiens
  misc_feature: 705 for SV(W|O) and 28S
gaactatgcctgggcagggcgaagccagaggaaactctggtggaggtccgtagcggtcctgacgtgcaaatcggtcgtccgacctgggtataggggcgaaagactaatcgaaccatctag

SEQ ID NO: 50252 - DNA, 120 bp, Homo sapiens
  misc_feature: 705 for SV(W|O) and 28S
gaaagttgaaaagaactttgaagagagagttcaagagggcgtgaaaccgttaagaggtaaacgggtggggtccgcgcagtccgcccggaggattcaacccggcggcgggtccggccgtgt

SEQ ID NO: 50253 - DNA, 120 bp, Homo sapiens
  misc_feature: 705 for SV(W|O) and 28S
cgcccacgccccgctccccgcccccggagccccgcggacgctacgccgcgacgagtaggagggccgctgcggtgagccttgaagcctagggcgcgggcccgggtggagccgccgcaggtg

SEQ ID NO: 50254 - DNA, 120 bp, Homo sapiens
  misc_feature: 705 for SV(W|O) and 28S
aaatgtctgaacctgcggttcctctcgtactgagcaggattaccatggcaacaacacatcatcagtagggtaaaactaacctgtctcacgacggtctaaacccagctcacgttccctatt

SEQ ID NO: 50255 - DNA, 120 bp, Homo sapiens
  misc_feature: 704 for SV(W|O) and 28S
tctaattagtgacgcgcatgaatggatgaacgagattcccactgtccctacctactatccagcgaaaccacagccaagggaacgggcttggcggaatcagcggggaaagaagaccctgtt

SEQ ID NO: 50256 - DNA, 120 bp, Homo sapiens
  misc_feature: 704 for SV(W|O) and 28S
aggaacggggggcgggaaagatccgccgggccgccgacacggccggacccgccgccgggttgaatcctccgggcggactgcgcggaccccacccgtttacctcttaacggtttcacgccc

SEQ ID NO: 50257 - DNA, 120 bp, Homo sapiens
  misc_feature: 704 for SV(W|O) and 28S
cgccgcaggtgcagatcttggtggtagtagcaaatattcaaacgagaactttgaaggccgaagtggagaagggttccatgtgaacagcagttgaacatgggtcagtcggtcctgagagat

SEQ ID NO: 50258 - DNA, 120 bp, Homo sapiens
  misc_feature: 704 for SV(W|O) and 28S
agtcggtcctgagagatgggcgagcgccgttccgaagggacgggcgatggcctccgttgccctcggccgatcgaaagggagtcgggttcagatccccgaatccggagtggcggagatggg

SEQ ID NO: 50259 - DNA, 120 bp, Homo sapiens
  misc_feature: 704 for SV(W|O) and 28S
acgcctcgcggcgcccatctccgccactccggattcggggatctgaacccgactccctttcgatcggccgagggcaacggaggccatcgcccgtcccttcggaacggcgctcgcccatct

SEQ ID NO: 50260 - DNA, 120 bp, Homo sapiens
  misc_feature: 703 for SV(W|O) and 28S
gtccggtgagctctcgctggcccttgaaaatccgggggagagggtgtaaatctcgcgccgggccgtacccatatccgcagcaggtctccaaggtgaacagcctctggcatgttggaacaa

SEQ ID NO: 50261 - DNA, 120 bp, Homo sapiens
  misc_feature: 703 for SV(W|O) and 28S
gcgcgccgcccccgccgctcccgtccactctcgactgccggcgacggccgggtatgggcccgacgctccagcgccatccattttcagggctagttgattcggcaggtgagttgttacaca

SEQ ID NO: 50262 - DNA, 120 bp, Homo sapiens
  misc_feature: 703 for SV(W|O) and 28S
gtccgccgagggcgcaccaccggcccgtctcgcccgccgcgccggggaggtggagcacgagcgcacgtgttaggacccgaaagatggtgaactatgcctgggcagggcgaagccagagga

SEQ ID NO: 50263 - DNA, 120 bp, Homo sapiens
  misc_feature: 703 for SV(W|O) and 28S
cggagtcgggttgcttgggaatgcagcccaaagcgggtggtaaactccatctaaggctaaataccggcacgagaccgatagtcaacaagtaccgtaagggaaagttgaaaagaactttga

SEQ ID NO: 50264 - DNA, 120 bp, Homo sapiens
  misc_feature: 703 for SV(W|O) and 28S
taaacgggtggggtccgcgcagtccgcccggaggattcaacccggcggcgggtccggccgtgtcggcggcccggcggatctttcccgccccccgttcctcccgacccctccacccgccct

SEQ ID NO: 50265 - DNA, 120 bp, Homo sapiens
  misc_feature: 703 for SV(W|O) and 28S
gggtggggtccgcgcagtccgcccggaggattcaacccggcggcgggtccggccgtgtcggcggcccggcggatctttcccgccccccgttcctcccgacccctccacccgccctccctt

SEQ ID NO: 50266 - DNA, 120 bp, Homo sapiens
  misc_feature: 703 for SV(W|O) and 28S
gcacgtcaggaccgctacggacctccaccagagtttcctctggcttcgccctgcccaggcatagttcaccatctttcgggtcctaacacgtgcgctcgtgctccacctccccggcgcggc

SEQ ID NO: 50267 - DNA, 120 bp, Homo sapiens
  misc_feature: 703 for SV(W|O) and 28S
cttggcgccagaagcgagagcccctcggggctcgcccccccgcctcaccgggtcagtgaaaaaacgatcagagtagtggtatttcaccggcggcccgcagggccggcggaccccgccccg

SEQ ID NO: 50268 - DNA, 120 bp, Homo sapiens
  misc_feature: 703 for SV(W|O) and 28S
cgttcatccattcatgcgcgtcactaattagatgacgaggcatttggctaccttaagagagtcatagttactcccgccgtttacccgcgcttcattgaatttcttcactttgacattcag

SEQ ID NO: 50269 - DNA, 120 bp, Homo sapiens
  misc_feature: 703 for SV(W|O) and 28S
cagtccgccgagggcgcaccaccggcccgtctcgcccgccgcgccggggaggtggagcacgagcgcacgtgttaggacccgaaagatggtgaactatgcctgggcagggcgaagccagag

SEQ ID NO: 50270 - DNA, 120 bp, Homo sapiens
  misc_feature: 703 for SV(W|O) and 28S
cagggtcttctttccccgctgattccgccaagcccgttcccttggctgtggtttcgctggatagtaggtagggacagtgggaatctcgttcatccattcatgcgcgtcactaattagatg

SEQ ID NO: 50271 - DNA, 120 bp, Homo sapiens
  misc_feature: 702 for SV(W|O) and 28S
cggcccgtctcgcccgccgcgccggggaggtggagcacgagcgcacgtgttaggacccgaaagatggtgaactatgcctgggcagggcgaagccagaggaaactctggtggaggtccgta

SEQ ID NO: 50272 - DNA, 120 bp, Homo sapiens
  misc_feature: 702 for SV(W|O) and 28S
accggcccgtctcgcccgccgcgccggggaggtggagcacgagcgcacgtgttaggacccgaaagatggtgaactatgcctgggcagggcgaagccagaggaaactctggtggaggtccg

SEQ ID NO: 50273 - DNA, 120 bp, Homo sapiens
  misc_feature: 702 for SV(W|O) and 28S
cgcggttccggcggcgtccggtgagctctcgctggcccttgaaaatccgggggagagggtgtaaatctcgcgccgggccgtacccatatccgcagcaggtctccaaggtgaacagcctct

SEQ ID NO: 50274 - DNA, 120 bp, Homo sapiens
  misc_feature: 702 for SV(W|O) and 28S
cgcccccgccgctcccgtccactctcgactgccggcgacggccgggtatgggcccgacgctccagcgccatccattttcagggctagttgattcggcaggtgagttgttacacactcctt

SEQ ID NO: 50275 - DNA, 120 bp, Homo sapiens
  misc_feature: 702 for SV(W|O) and 28S
acccgctccggggacagtgccaggtggggagtttgactggggcggtacacctgtcaaacggtaacgcaggtgtcctaaggcgagctcagggaggacagaaacctcccgtggagcagaagg

SEQ ID NO: 50276 - DNA, 120 bp, Homo sapiens
  misc_feature: 702 for SV(W|O) and 28S
aaccaggattccctcagtaacggcgagtgaacagggaagagcccagcgccgaatccccgccccgcggcggggcgcgggacatgtggcgtacggaagacccgctccccggcgccgctcgtg

SEQ ID NO: 50277 - DNA, 120 bp, Homo sapiens
  misc_feature: 701 for SV(W|O) and 28S
aaatgcctcgtcatctaattagtgacgcgcatgaatggatgaacgagattcccactgtccctacctactatccagcgaaaccacagccaagggaacgggcttggcggaatcagcggggaa

SEQ ID NO: 50278 - DNA, 120 bp, Homo sapiens
  misc_feature: 701 for SV(W|O) and 28S
ctccagtccgccgagggcgcaccaccggcccgtctcgcccgccgcgccggggaggtggagcacgagcgcacgtgttaggacccgaaagatggtgaactatgcctgggcagggcgaagcca

SEQ ID NO: 50279 - DNA, 120 bp, Homo sapiens
  misc_feature: 701 for SV(W|O) and 28S
gcgcggcgcctcgcctcggccggcgcctagcagccgacttagaactggtgcggaccaggggaatccgactgtttaattaaaacaaagcatcgcgaaggcccgcggcgggtgttgacgcga

SEQ ID NO: 50280 - DNA, 120 bp, Homo sapiens
  misc_feature: 701 for SV(W|O) and 28S
gtcgcggttccggcggcgtccggtgagctctcgctggcccttgaaaatccgggggagagggtgtaaatctcgcgccgggccgtacccatatccgcagcaggtctccaaggtgaacagcct

SEQ ID NO: 50281 - DNA, 120 bp, Homo sapiens
  misc_feature: 701 for SV(W|O) and 28S
ccgacacggccggacccgccgccgggttgaatcctccgggcggactgcgcggaccccacccgtttacctcttaacggtttcacgccctcttgaactctctcttcaaagttcttttcaact

SEQ ID NO: 50282 - DNA, 120 bp, Homo sapiens
  misc_feature: 701 for SV(W|O) and 28S
ccagcccttagagccaatccttatcccgaagttacggatccggcttgccgacttcccttacctacattgttccaacatgccagaggctgttcaccttggagacctgctgcggatatgggt

SEQ ID NO: 50283 - DNA, 120 bp, Homo sapiens
  misc_feature: 701 for SV(W|O) and 28S
atctcgttcatccattcatgcgcgtcactaattagatgacgaggcatttggctaccttaagagagtcatagttactcccgccgtttacccgcgcttcattgaatttcttcactttgacat

SEQ ID NO: 50284 - DNA, 120 bp, Homo sapiens
  misc_feature: 701 for SV(W|O) and 28S
aacggggggcgggaaagatccgccgggccgccgacacggccggacccgccgccgggttgaatcctccgggcggactgcgcggaccccacccgtttacctcttaacggtttcacgccctct

SEQ ID NO: 50285 - DNA, 120 bp, Homo sapiens
  misc_feature: 700 for SV(W|O) and 28S
atgtctcttcaccgtgccagactagagtcaagctcaacagggtcttctttccccgctgattccgccaagcccgttcccttggctgtggtttcgctggatagtaggtagggacagtgggaa

SEQ ID NO: 50286 - DNA, 120 bp, Homo sapiens
  misc_feature: 700 for SV(W|O) and 28S
tggatagtaggtagggacagtgggaatctcgttcatccattcatgcgcgtcactaattagatgacgaggcatttggctaccttaagagagtcatagttactcccgccgtttacccgcgct

SEQ ID NO: 50287 - DNA, 120 bp, Homo sapiens
  misc_feature: 700 for SV(W|O) and 28S
gtaaacgggtggggtccgcgcagtccgcccggaggattcaacccggcggcgggtccggccgtgtcggcggcccggcggatctttcccgccccccgttcctcccgacccctccacccgccc

SEQ ID NO: 50288 - DNA, 120 bp, Homo sapiens
  misc_feature: 700 for SV(W|O) and 28S
ggcggggtccgccggccctgcgggccgccggtgaaataccactactctgatcgttttttcactgacccggtgaggcgggggggcgagccccgaggggctctcgcttctggcgccaagcgc

SEQ ID NO: 50289 - DNA, 120 bp, Homo sapiens
  misc_feature: 700 for SV(W|O) and 28S
cgctggatagtaggtagggacagtgggaatctcgttcatccattcatgcgcgtcactaattagatgacgaggcatttggctaccttaagagagtcatagttactcccgccgtttacccgc

SEQ ID NO: 50290 - DNA, 120 bp, Homo sapiens
  misc_feature: 700 for SV(W|O) and 28S
gcactggacgcctcgcggcgcccatctccgccactccggattcggggatctgaacccgactccctttcgatcggccgagggcaacggaggccatcgcccgtcccttcggaacggcgctcg

SEQ ID NO: 50291 - DNA, 120 bp, Homo sapiens
  misc_feature: 700 for SV(W|O) and 28S
gacacctcctgcttaaaacccaaaaggtcagaaggatcgtgaggccccgctttcacggtctgtattcgtactgaaaatcaagatcaagcgagcttttgcccttctgctccacgggaggtt

SEQ ID NO: 50292 - DNA, 120 bp, Homo sapiens
  misc_feature: 700 for SV(W|O) and 28S
aactatgcctgggcagggcgaagccagaggaaactctggtggaggtccgtagcggtcctgacgtgcaaatcggtcgtccgacctgggtataggggcgaaagactaatcgaaccatctagt

SEQ ID NO: 50293 - DNA, 120 bp, Homo sapiens
  misc_feature: 699 for SV(W|O) and 28S
gcctcgtcatctaattagtgacgcgcatgaatggatgaacgagattcccactgtccctacctactatccagcgaaaccacagccaagggaacgggcttggcggaatcagcggggaaagaa

SEQ ID NO: 50294 - DNA, 120 bp, Homo sapiens
  misc_feature: 699 for SV(W|O) and 28S
tccgccgagggcgcaccaccggcccgtctcgcccgccgcgccggggaggtggagcacgagcgcacgtgttaggacccgaaagatggtgaactatgcctgggcagggcgaagccagaggaa

SEQ ID NO: 50295 - DNA, 120 bp, Homo sapiens
  misc_feature: 699 for SV(W|O) and 28S
tctcgttcatccattcatgcgcgtcactaattagatgacgaggcatttggctaccttaagagagtcatagttactcccgccgtttacccgcgcttcattgaatttcttcactttgacatt

SEQ ID NO: 50296 - DNA, 120 bp, Homo sapiens
  misc_feature: 699 for SV(W|O) and 28S
tcggtcctgagagatgggcgagcgccgttccgaagggacgggcgatggcctccgttgccctcggccgatcgaaagggagtcgggttcagatccccgaatccggagtggcggagatgggcg

SEQ ID NO: 50297 - DNA, 120 bp, Homo sapiens
  misc_feature: 699 for SV(W|O) and 28S
tccggcggcgtccggtgagctctcgctggcccttgaaaatccgggggagagggtgtaaatctcgcgccgggccgtacccatatccgcagcaggtctccaaggtgaacagcctctggcatg

SEQ ID NO: 50298 - DNA, 120 bp, Homo sapiens
  misc_feature: 699 for SV(W|O) and 28S
agggtcttctttccccgctgattccgccaagcccgttcccttggctgtggtttcgctggatagtaggtagggacagtgggaatctcgttcatccattcatgcgcgtcactaattagatga

SEQ ID NO: 50299 - DNA, 120 bp, Homo sapiens
  misc_feature: 699 for SV(W|O) and 28S
actatgcctgggcagggcgaagccagaggaaactctggtggaggtccgtagcggtcctgacgtgcaaatcggtcgtccgacctgggtataggggcgaaagactaatcgaaccatctagta

SEQ ID NO: 50300 - DNA, 120 bp, Homo sapiens
  misc_feature: 699 for SV(W|O) and 28S
taacaactcacctgccgaatcaactagccctgaaaatggatggcgctggagcgtcgggcccatacccggccgtcgccggcagtcgagagtggacgggagcggcgggggcggcgcgcgcgc

SEQ ID NO: 50301 - DNA, 120 bp, Homo sapiens
  misc_feature: 699 for SV(W|O) and 28S
cactaatagggaacgtgagctgggtttagaccgtcgtgagacaggttagttttaccctactgatgatgtgttgttgccatggtaatcctgctcagtacgagaggaaccgcaggttcagac

SEQ ID NO: 50302 - DNA, 120 bp, Homo sapiens
  misc_feature: 699 for SV(W|O) and 28S
ggcgcggcgggcgagacgggccggtggtgcgccctcggcggactggagaggcctcgggatcccacctcggccggcgagcgcgccggccttcaccttcattgcgccacggcggctttcgtg

SEQ ID NO: 50303 - DNA, 120 bp, Homo sapiens
  misc_feature: 699 for SV(W|O) and 28S
atcagaaggacttgggccccccacgagcggcgccggggagcgggtcttccgtacgccacatgtcccgcgccccgccgcggggcggggattcggcgctgggctcttccctgttcactcgcc

SEQ ID NO: 50304 - DNA, 120 bp, Homo sapiens
  misc_feature: 699 for SV(W|O) and 28S
caccggcccgtctcgcccgccgcgccggggaggtggagcacgagcgcacgtgttaggacccgaaagatggtgaactatgcctgggcagggcgaagccagaggaaactctggtggaggtcc

SEQ ID NO: 50305 - DNA, 120 bp, Homo sapiens
  misc_feature: 699 for SV(W|O) and 28S
gcgggtggaggggtcgggaggaacggggggcgggaaagatccgccgggccgccgacacggccggacccgccgccgggttgaatcctccgggcggactgcgcggaccccacccgtttacct

SEQ ID NO: 50306 - DNA, 120 bp, Homo sapiens
  misc_feature: 699 for SV(W|O) and 28S
gcggagatgggcgccgcgaggcgtccagtgcggtaacgcgaccgatcccggagaagccggcgggagccccggggagagttctcttttctttgtgaagggcagggcgccctggaatgggtt

SEQ ID NO: 50307 - DNA, 120 bp, Homo sapiens
  misc_feature: 699 for SV(W|O) and 28S
acaactcacctgccgaatcaactagccctgaaaatggatggcgctggagcgtcgggcccatacccggccgtcgccggcagtcgagagtggacgggagcggcgggggcggcgcgcgcgcgc

SEQ ID NO: 50308 - DNA, 120 bp, Homo sapiens
  misc_feature: 699 for SV(W|O) and 28S
cggggccacgcgcgcgtcccccgaagagggggacggcggagcgagcgcacggggtcggcggcgacgtcggctacccacccgacccgtcttgaaacacggaccaaggagtctaacacgtgc

SEQ ID NO: 50309 - DNA, 120 bp, Homo sapiens
  misc_feature: 699 for SV(W|O) and 28S
ccaccggcccgtctcgcccgccgcgccggggaggtggagcacgagcgcacgtgttaggacccgaaagatggtgaactatgcctgggcagggcgaagccagaggaaactctggtggaggtc

SEQ ID NO: 50310 - DNA, 120 bp, Homo sapiens
  misc_feature: 699 for SV(W|O) and 28S
cgggtggggtccgcgcagtccgcccggaggattcaacccggcggcgggtccggccgtgtcggcggcccggcggatctttcccgccccccgttcctcccgacccctccacccgccctccct

SEQ ID NO: 50311 - DNA, 120 bp, Homo sapiens
  misc_feature: 699 for SV(W|O) and 28S
ccaaatgcctcgtcatctaattagtgacgcgcatgaatggatgaacgagattcccactgtccctacctactatccagcgaaaccacagccaagggaacgggcttggcggaatcagcgggg

SEQ ID NO: 50312 - DNA, 120 bp, Homo sapiens
  misc_feature: 699 for SV(W|O) and 28S
atctaattagtgacgcgcatgaatggatgaacgagattcccactgtccctacctactatccagcgaaaccacagccaagggaacgggcttggcggaatcagcggggaaagaagaccctgt

SEQ ID NO: 50313 - DNA, 120 bp, Homo sapiens
  misc_feature: 698 for SV(W|O) and 28S
tgtaacaactcacctgccgaatcaactagccctgaaaatggatggcgctggagcgtcgggcccatacccggccgtcgccggcagtcgagagtggacgggagcggcgggggcggcgcgcgc

SEQ ID NO: 50314 - DNA, 120 bp, Homo sapiens
  misc_feature: 698 for SV(W|O) and 28S
acccactaatagggaacgtgagctgggtttagaccgtcgtgagacaggttagttttaccctactgatgatgtgttgttgccatggtaatcctgctcagtacgagaggaaccgcaggttca

SEQ ID NO: 50315 - DNA, 120 bp, Homo sapiens
  misc_feature: 698 for SV(W|O) and 28S
gcccccgccgctcccgtccactctcgactgccggcgacggccgggtatgggcccgacgctccagcgccatccattttcagggctagttgattcggcaggtgagttgttacacactcctta

SEQ ID NO: 50316 - DNA, 120 bp, Homo sapiens
  misc_feature: 698 for SV(W|O) and 28S
gtgtaacaactcacctgccgaatcaactagccctgaaaatggatggcgctggagcgtcgggcccatacccggccgtcgccggcagtcgagagtggacgggagcggcgggggcggcgcgcg

SEQ ID NO: 50317 - DNA, 120 bp, Homo sapiens
  misc_feature: 698 for SV(W|O) and 28S
ccttctccacttcggccttcaaagttctcgtttgaatatttgctactaccaccaagatctgcacctgcggcggctccacccgggcccgcgccctaggcttcaaggctcaccgcagcggcc

SEQ ID NO: 50318 - DNA, 120 bp, Homo sapiens
  misc_feature: 698 for SV(W|O) and 28S
gccgcccccgccgctcccgtccactctcgactgccggcgacggccgggtatgggcccgacgctccagcgccatccattttcagggctagttgattcggcaggtgagttgttacacactcc

SEQ ID NO: 50319 - DNA, 120 bp, Homo sapiens
  misc_feature: 698 for SV(W|O) and 28S
ggaggaacggggggcgggaaagatccgccgggccgccgacacggccggacccgccgccgggttgaatcctccgggcggactgcgcggaccccacccgtttacctcttaacggtttcacgc

SEQ ID NO: 50320 - DNA, 120 bp, Homo sapiens
  misc_feature: 698 for SV(W|O) and 28S
ggagatgggcgccgcgaggcgtccagtgcggtaacgcgaccgatcccggagaagccggcgggagccccggggagagttctcttttctttgtgaagggcagggcgccctggaatgggttcg

SEQ ID NO: 50321 - DNA, 120 bp, Homo sapiens
  misc_feature: 698 for SV(W|O) and 28S
gatcagaaggacttgggccccccacgagcggcgccggggagcgggtcttccgtacgccacatgtcccgcgccccgccgcggggcggggattcggcgctgggctcttccctgttcactcgc

SEQ ID NO: 50322 - DNA, 120 bp, Homo sapiens
  misc_feature: 698 for SV(W|O) and 28S
gccgccgcaggtgcagatcttggtggtagtagcaaatattcaaacgagaactttgaaggccgaagtggagaagggttccatgtgaacagcagttgaacatgggtcagtcggtcctgagag

SEQ ID NO: 50323 - DNA, 120 bp, Homo sapiens
  misc_feature: 698 for SV(W|O) and 28S
gaggcctctccagtccgccgagggcgcaccaccggcccgtctcgcccgccgcgccggggaggtggagcacgagcgcacgtgttaggacccgaaagatggtgaactatgcctgggcagggc

SEQ ID NO: 50324 - DNA, 120 bp, Homo sapiens
  misc_feature: 698 for SV(W|O) and 28S
acgaccgatttgcacgtcaggaccgctacggacctccaccagagtttcctctggcttcgccctgcccaggcatagttcaccatctttcgggtcctaacacgtgcgctcgtgctccacctc

SEQ ID NO: 50325 - DNA, 120 bp, Homo sapiens
  misc_feature: 698 for SV(W|O) and 28S
actaaccaggattccctcagtaacggcgagtgaacagggaagagcccagcgccgaatccccgccccgcggcggggcgcgggacatgtggcgtacggaagacccgctccccggcgccgctc

SEQ ID NO: 50326 - DNA, 120 bp, Homo sapiens
  misc_feature: 698 for SV(W|O) and 28S
ctaatagggaacgtgagctgggtttagaccgtcgtgagacaggttagttttaccctactgatgatgtgttgttgccatggtaatcctgctcagtacgagaggaaccgcaggttcagacat

SEQ ID NO: 50327 - DNA, 120 bp, Homo sapiens
  misc_feature: 698 for SV(W|O) and 28S
aacaactcacctgccgaatcaactagccctgaaaatggatggcgctggagcgtcgggcccatacccggccgtcgccggcagtcgagagtggacgggagcggcgggggcggcgcgcgcgcg

SEQ ID NO: 50328 - DNA, 120 bp, Homo sapiens
  misc_feature: 697 for SV(W|O) and 28S
ccgccgcaggtgcagatcttggtggtagtagcaaatattcaaacgagaactttgaaggccgaagtggagaagggttccatgtgaacagcagttgaacatgggtcagtcggtcctgagaga

SEQ ID NO: 50329 - DNA, 120 bp, Homo sapiens
  misc_feature: 697 for SV(W|O) and 28S
catgtctcttcaccgtgccagactagagtcaagctcaacagggtcttctttccccgctgattccgccaagcccgttcccttggctgtggtttcgctggatagtaggtagggacagtggga

SEQ ID NO: 50330 - DNA, 120 bp, Homo sapiens
  misc_feature: 697 for SV(W|O) and 28S
cgccgagggcgcaccaccggcccgtctcgcccgccgcgccggggaggtggagcacgagcgcacgtgttaggacccgaaagatggtgaactatgcctgggcagggcgaagccagaggaaac

SEQ ID NO: 50331 - DNA, 120 bp, Homo sapiens
  misc_feature: 697 for SV(W|O) and 28S
cggacgaccgatttgcacgtcaggaccgctacggacctccaccagagtttcctctggcttcgccctgcccaggcatagttcaccatctttcgggtcctaacacgtgcgctcgtgctccac

SEQ ID NO: 50332 - DNA, 120 bp, Homo sapiens
  misc_feature: 697 for SV(W|O) and 28S
gtagccaaatgcctcgtcatctaattagtgacgcgcatgaatggatgaacgagattcccactgtccctacctactatccagcgaaaccacagccaagggaacgggcttggcggaatcagc

SEQ ID NO: 50333 - DNA, 120 bp, Homo sapiens
  misc_feature: 697 for SV(W|O) and 28S
cgccgcccccgccgctcccgtccactctcgactgccggcgacggccgggtatgggcccgacgctccagcgccatccattttcagggctagttgattcggcaggtgagttgttacacactc

SEQ ID NO: 50334 - DNA, 120 bp, Homo sapiens
  misc_feature: 697 for SV(W|O) and 28S
gacgaccgatttgcacgtcaggaccgctacggacctccaccagagtttcctctggcttcgccctgcccaggcatagttcaccatctttcgggtcctaacacgtgcgctcgtgctccacct

SEQ ID NO: 50335 - DNA, 120 bp, Homo sapiens
  misc_feature: 697 for SV(W|O) and 28S
ctaaccaggattccctcagtaacggcgagtgaacagggaagagcccagcgccgaatccccgccccgcggcggggcgcgggacatgtggcgtacggaagacccgctccccggcgccgctcg

SEQ ID NO: 50336 - DNA, 120 bp, Homo sapiens
  misc_feature: 696 for SV(W|O) and 28S
aggtagggacagtgggaatctcgttcatccattcatgcgcgtcactaattagatgacgaggcatttggctaccttaagagagtcatagttactcccgccgtttacccgcgcttcattgaa

SEQ ID NO: 50337 - DNA, 120 bp, Homo sapiens
  misc_feature: 696 for SV(W|O) and 28S
actaatagggaacgtgagctgggtttagaccgtcgtgagacaggttagttttaccctactgatgatgtgttgttgccatggtaatcctgctcagtacgagaggaaccgcaggttcagaca

SEQ ID NO: 50338 - DNA, 120 bp, Homo sapiens
  misc_feature: 696 for SV(W|O) and 28S
tctccagtccgccgagggcgcaccaccggcccgtctcgcccgccgcgccggggaggtggagcacgagcgcacgtgttaggacccgaaagatggtgaactatgcctgggcagggcgaagcc

SEQ ID NO: 50339 - DNA, 120 bp, Homo sapiens
  misc_feature: 696 for SV(W|O) and 28S
tccggtgagctctcgctggcccttgaaaatccgggggagagggtgtaaatctcgcgccgggccgtacccatatccgcagcaggtctccaaggtgaacagcctctggcatgttggaacaat

SEQ ID NO: 50340 - DNA, 120 bp, Homo sapiens
  misc_feature: 696 for SV(W|O) and 28S
gggaggaacggggggcgggaaagatccgccgggccgccgacacggccggacccgccgccgggttgaatcctccgggcggactgcgcggaccccacccgtttacctcttaacggtttcacg

SEQ ID NO: 50341 - DNA, 120 bp, Homo sapiens
  misc_feature: 696 for SV(W|O) and 28S
cgtcgcggttccggcggcgtccggtgagctctcgctggcccttgaaaatccgggggagagggtgtaaatctcgcgccgggccgtacccatatccgcagcaggtctccaaggtgaacagcc

SEQ ID NO: 50342 - DNA, 120 bp, Homo sapiens
  misc_feature: 696 for SV(W|O) and 28S
gaggaacggggggcgggaaagatccgccgggccgccgacacggccggacccgccgccgggttgaatcctccgggcggactgcgcggaccccacccgtttacctcttaacggtttcacgcc

SEQ ID NO: 50343 - DNA, 120 bp, Homo sapiens
  misc_feature: 696 for SV(W|O) and 28S
ggaaagttgaaaagaactttgaagagagagttcaagagggcgtgaaaccgttaagaggtaaacgggtggggtccgcgcagtccgcccggaggattcaacccggcggcgggtccggccgtg

SEQ ID NO: 50344 - DNA, 120 bp, Homo sapiens
  misc_feature: 696 for SV(W|O) and 28S
ctctccagtccgccgagggcgcaccaccggcccgtctcgcccgccgcgccggggaggtggagcacgagcgcacgtgttaggacccgaaagatggtgaactatgcctgggcagggcgaagc

SEQ ID NO: 50345 - DNA, 120 bp, Homo sapiens
  misc_feature: 696 for SV(W|O) and 28S
gcaccaccggcccgtctcgcccgccgcgccggggaggtggagcacgagcgcacgtgttaggacccgaaagatggtgaactatgcctgggcagggcgaagccagaggaaactctggtggag

SEQ ID NO: 50346 - DNA, 120 bp, Homo sapiens
  misc_feature: 696 for SV(W|O) and 28S
cgctcccgtccactctcgactgccggcgacggccgggtatgggcccgacgctccagcgccatccattttcagggctagttgattcggcaggtgagttgttacacactccttagcggattc

SEQ ID NO: 50347 - DNA, 120 bp, Homo sapiens
  misc_feature: 696 for SV(W|O) and 28S
gaaagccgccgtggcgcaatgaaggtgaaggccggcgcgctcgccggccgaggtgggatcccgaggcctctccagtccgccgagggcgcaccaccggcccgtctcgcccgccgcgccggg

SEQ ID NO: 50348 - DNA, 120 bp, Homo sapiens
  misc_feature: 696 for SV(W|O) and 28S
ccgctcccgtccactctcgactgccggcgacggccgggtatgggcccgacgctccagcgccatccattttcagggctagttgattcggcaggtgagttgttacacactccttagcggatt

SEQ ID NO: 50349 - DNA, 120 bp, Homo sapiens
  misc_feature: 695 for SV(W|O) and 28S
ttgcacgtcaggaccgctacggacctccaccagagtttcctctggcttcgccctgcccaggcatagttcaccatctttcgggtcctaacacgtgcgctcgtgctccacctccccggcgcg

SEQ ID NO: 50350 - DNA, 120 bp, Homo sapiens
  misc_feature: 695 for SV(W|O) and 28S
gcctctccagtccgccgagggcgcaccaccggcccgtctcgcccgccgcgccggggaggtggagcacgagcgcacgtgttaggacccgaaagatggtgaactatgcctgggcagggcgaa

SEQ ID NO: 50351 - DNA, 120 bp, Homo sapiens
  misc_feature: 695 for SV(W|O) and 28S
tgggaatctcgttcatccattcatgcgcgtcactaattagatgacgaggcatttggctaccttaagagagtcatagttactcccgccgtttacccgcgcttcattgaatttcttcacttt

SEQ ID NO: 50352 - DNA, 120 bp, Homo sapiens
  misc_feature: 695 for SV(W|O) and 28S
gctactagatggttcgattagtctttcgcccctatacccaggtcggacgaccgatttgcacgtcaggaccgctacggacctccaccagagtttcctctggcttcgccctgcccaggcata

SEQ ID NO: 50353 - DNA, 120 bp, Homo sapiens
  misc_feature: 695 for SV(W|O) and 28S
gcggtgagccttgaagcctagggcgcgggcccgggtggagccgccgcaggtgcagatcttggtggtagtagcaaatattcaaacgagaactttgaaggccgaagtggagaagggttccat

SEQ ID NO: 50354 - DNA, 120 bp, Homo sapiens
  misc_feature: 695 for SV(W|O) and 28S
cctcgtcatctaattagtgacgcgcatgaatggatgaacgagattcccactgtccctacctactatccagcgaaaccacagccaagggaacgggcttggcggaatcagcggggaaagaag

SEQ ID NO: 50355 - DNA, 120 bp, Homo sapiens
  misc_feature: 694 for SV(W|O) and 28S
tttgcacgtcaggaccgctacggacctccaccagagtttcctctggcttcgccctgcccaggcatagttcaccatctttcgggtcctaacacgtgcgctcgtgctccacctccccggcgc

SEQ ID NO: 50356 - DNA, 120 bp, Homo sapiens
  misc_feature: 694 for SV(W|O) and 28S
atagtaggtagggacagtgggaatctcgttcatccattcatgcgcgtcactaattagatgacgaggcatttggctaccttaagagagtcatagttactcccgccgtttacccgcgcttca

SEQ ID NO: 50357 - DNA, 120 bp, Homo sapiens
  misc_feature: 694 for SV(W|O) and 28S
tacacctctcatgtctcttcaccgtgccagactagagtcaagctcaacagggtcttctttccccgctgattccgccaagcccgttcccttggctgtggtttcgctggatagtaggtaggg

SEQ ID NO: 50358 - DNA, 120 bp, Homo sapiens
  misc_feature: 694 for SV(W|O) and 28S
taatagggaacgtgagctgggtttagaccgtcgtgagacaggttagttttaccctactgatgatgtgttgttgccatggtaatcctgctcagtacgagaggaaccgcaggttcagacatt

SEQ ID NO: 50359 - DNA, 120 bp, Homo sapiens
  misc_feature: 694 for SV(W|O) and 28S
taaccaggattccctcagtaacggcgagtgaacagggaagagcccagcgccgaatccccgccccgcggcggggcgcgggacatgtggcgtacggaagacccgctccccggcgccgctcgt

SEQ ID NO: 50360 - DNA, 120 bp, Homo sapiens
  misc_feature: 694 for SV(W|O) and 28S
gtcggtcctgagagatgggcgagcgccgttccgaagggacgggcgatggcctccgttgccctcggccgatcgaaagggagtcgggttcagatccccgaatccggagtggcggagatgggc

SEQ ID NO: 50361 - DNA, 120 bp, Homo sapiens
  misc_feature: 694 for SV(W|O) and 28S
gaccgatttgcacgtcaggaccgctacggacctccaccagagtttcctctggcttcgccctgcccaggcatagttcaccatctttcgggtcctaacacgtgcgctcgtgctccacctccc

SEQ ID NO: 50362 - DNA, 120 bp, Homo sapiens
  misc_feature: 694 for SV(W|O) and 28S
gccgagggcgcaccaccggcccgtctcgcccgccgcgccggggaggtggagcacgagcgcacgtgttaggacccgaaagatggtgaactatgcctgggcagggcgaagccagaggaaact

SEQ ID NO: 50363 - DNA, 120 bp, Homo sapiens
  misc_feature: 694 for SV(W|O) and 28S
gagccgccgcaggtgcagatcttggtggtagtagcaaatattcaaacgagaactttgaaggccgaagtggagaagggttccatgtgaacagcagttgaacatgggtcagtcggtcctgag

SEQ ID NO: 50364 - DNA, 120 bp, Homo sapiens
  misc_feature: 694 for SV(W|O) and 28S
cggagatgggcgccgcgaggcgtccagtgcggtaacgcgaccgatcccggagaagccggcgggagccccggggagagttctcttttctttgtgaagggcagggcgccctggaatgggttc

SEQ ID NO: 50365 - DNA, 120 bp, Homo sapiens
  misc_feature: 694 for SV(W|O) and 28S
ccgatttgcacgtcaggaccgctacggacctccaccagagtttcctctggcttcgccctgcccaggcatagttcaccatctttcgggtcctaacacgtgcgctcgtgctccacctccccg

SEQ ID NO: 50366 - DNA, 120 bp, Homo sapiens
  misc_feature: 694 for SV(W|O) and 28S
cggcgcggcgggcgagacgggccggtggtgcgccctcggcggactggagaggcctcgggatcccacctcggccggcgagcgcgccggccttcaccttcattgcgccacggcggctttcgt

SEQ ID NO: 50367 - DNA, 120 bp, Homo sapiens
  misc_feature: 694 for SV(W|O) and 28S
ccggtgagctctcgctggcccttgaaaatccgggggagagggtgtaaatctcgcgccgggccgtacccatatccgcagcaggtctccaaggtgaacagcctctggcatgttggaacaatg

SEQ ID NO: 50368 - DNA, 120 bp, Homo sapiens
  misc_feature: 694 for SV(W|O) and 28S
cccggagtcgggttgcttgggaatgcagcccaaagcgggtggtaaactccatctaaggctaaataccggcacgagaccgatagtcaacaagtaccgtaagggaaagttgaaaagaacttt

SEQ ID NO: 50369 - DNA, 120 bp, Homo sapiens
  misc_feature: 693 for SV(W|O) and 28S
agccgccgcaggtgcagatcttggtggtagtagcaaatattcaaacgagaactttgaaggccgaagtggagaagggttccatgtgaacagcagttgaacatgggtcagtcggtcctgaga

SEQ ID NO: 50370 - DNA, 120 bp, Homo sapiens
  misc_feature: 693 for SV(W|O) and 28S
caaatgcctcgtcatctaattagtgacgcgcatgaatggatgaacgagattcccactgtccctacctactatccagcgaaaccacagccaagggaacgggcttggcggaatcagcgggga

SEQ ID NO: 50371 - DNA, 120 bp, Homo sapiens
  misc_feature: 693 for SV(W|O) and 28S
tcatgtctcttcaccgtgccagactagagtcaagctcaacagggtcttctttccccgctgattccgccaagcccgttcccttggctgtggtttcgctggatagtaggtagggacagtggg

SEQ ID NO: 50372 - DNA, 120 bp, Homo sapiens
  misc_feature: 693 for SV(W|O) and 28S
ggtaaacgggtggggtccgcgcagtccgcccggaggattcaacccggcggcgggtccggccgtgtcggcggcccggcggatctttcccgccccccgttcctcccgacccctccacccgcc

SEQ ID NO: 50373 - DNA, 120 bp, Homo sapiens
  misc_feature: 693 for SV(W|O) and 28S
gggcgcaccaccggcccgtctcgcccgccgcgccggggaggtggagcacgagcgcacgtgttaggacccgaaagatggtgaactatgcctgggcagggcgaagccagaggaaactctggt

SEQ ID NO: 50374 - DNA, 120 bp, Homo sapiens
  misc_feature: 693 for SV(W|O) and 28S
gcgtcgcggttccggcggcgtccggtgagctctcgctggcccttgaaaatccgggggagagggtgtaaatctcgcgccgggccgtacccatatccgcagcaggtctccaaggtgaacagc

SEQ ID NO: 50375 - DNA, 120 bp, Homo sapiens
  misc_feature: 693 for SV(W|O) and 28S
gcgcggcgggcgagacgggccggtggtgcgccctcggcggactggagaggcctcgggatcccacctcggccggcgagcgcgccggccttcaccttcattgcgccacggcggctttcgtgc

SEQ ID NO: 50376 - DNA, 120 bp, Homo sapiens
  misc_feature: 693 for SV(W|O) and 28S
cgggtccgcccccggggccgcggttccgcgcggcgcctcgcctcggccggcgcctagcagccgacttagaactggtgcggaccaggggaatccgactgtttaattaaaacaaagcatcgc

SEQ ID NO: 50377 - DNA, 120 bp, Homo sapiens
  misc_feature: 693 for SV(W|O) and 28S
gagtcgggttgcttgggaatgcagcccaaagcgggtggtaaactccatctaaggctaaataccggcacgagaccgatagtcaacaagtaccgtaagggaaagttgaaaagaactttgaag

SEQ ID NO: 50378 - DNA, 120 bp, Homo sapiens
  misc_feature: 693 for SV(W|O) and 28S
gagggcgcaccaccggcccgtctcgcccgccgcgccggggaggtggagcacgagcgcacgtgttaggacccgaaagatggtgaactatgcctgggcagggcgaagccagaggaaactctg

SEQ ID NO: 50379 - DNA, 120 bp, Homo sapiens
  misc_feature: 693 for SV(W|O) and 28S
ctcgttcatccattcatgcgcgtcactaattagatgacgaggcatttggctaccttaagagagtcatagttactcccgccgtttacccgcgcttcattgaatttcttcactttgacattc

SEQ ID NO: 50380 - DNA, 120 bp, Homo sapiens
  misc_feature: 693 for SV(W|O) and 28S
cctctccagtccgccgagggcgcaccaccggcccgtctcgcccgccgcgccggggaggtggagcacgagcgcacgtgttaggacccgaaagatggtgaactatgcctgggcagggcgaag

SEQ ID NO: 50381 - DNA, 120 bp, Homo sapiens
  misc_feature: 693 for SV(W|O) and 28S
ctctcatgtctcttcaccgtgccagactagagtcaagctcaacagggtcttctttccccgctgattccgccaagcccgttcccttggctgtggtttcgctggatagtaggtagggacagt

SEQ ID NO: 50382 - DNA, 120 bp, Homo sapiens
  misc_feature: 693 for SV(W|O) and 28S
ctcatgtctcttcaccgtgccagactagagtcaagctcaacagggtcttctttccccgctgattccgccaagcccgttcccttggctgtggtttcgctggatagtaggtagggacagtgg

SEQ ID NO: 50383 - DNA, 120 bp, Homo sapiens
  misc_feature: 693 for SV(W|O) and 28S
ctactagatggttcgattagtctttcgcccctatacccaggtcggacgaccgatttgcacgtcaggaccgctacggacctccaccagagtttcctctggcttcgccctgcccaggcatag

SEQ ID NO: 50384 - DNA, 120 bp, Homo sapiens
  misc_feature: 693 for SV(W|O) and 28S
cgcgcgcgcgcgccgcccccgccgctcccgtccactctcgactgccggcgacggccgggtatgggcccgacgctccagcgccatccattttcagggctagttgattcggcaggtgagttg

SEQ ID NO: 50385 - DNA, 120 bp, Homo sapiens
  misc_feature: 693 for SV(W|O) and 28S
agccctgaaaatggatggcgctggagcgtcgggcccatacccggccgtcgccggcagtcgagagtggacgggagcggcgggggcggcgcgcgcgcgcgcgcgtgtggtgtgcgtcggagg

SEQ ID NO: 50386 - DNA, 120 bp, Homo sapiens
  misc_feature: 692 for SV(W|O) and 28S
aatgcctcgtcatctaattagtgacgcgcatgaatggatgaacgagattcccactgtccctacctactatccagcgaaaccacagccaagggaacgggcttggcggaatcagcggggaaa

SEQ ID NO: 50387 - DNA, 120 bp, Homo sapiens
  misc_feature: 692 for SV(W|O) and 28S
tcccggagtcgggttgcttgggaatgcagcccaaagcgggtggtaaactccatctaaggctaaataccggcacgagaccgatagtcaacaagtaccgtaagggaaagttgaaaagaactt

SEQ ID NO: 50388 - DNA, 120 bp, Homo sapiens
  misc_feature: 692 for SV(W|O) and 28S
taggtagggacagtgggaatctcgttcatccattcatgcgcgtcactaattagatgacgaggcatttggctaccttaagagagtcatagttactcccgccgtttacccgcgcttcattga

SEQ ID NO: 50389 - DNA, 120 bp, Homo sapiens
  misc_feature: 692 for SV(W|O) and 28S
aacagggaagagcccagcgccgaatccccgccccgcggcggggcgcgggacatgtggcgtacggaagacccgctccccggcgccgctcgtggggggcccaagtccttctgatcgaggccc

SEQ ID NO: 50390 - DNA, 120 bp, Homo sapiens
  misc_feature: 692 for SV(W|O) and 28S
gggaaagttgaaaagaactttgaagagagagttcaagagggcgtgaaaccgttaagaggtaaacgggtggggtccgcgcagtccgcccggaggattcaacccggcggcgggtccggccgt

SEQ ID NO: 50391 - DNA, 120 bp, Homo sapiens
  misc_feature: 692 for SV(W|O) and 28S
gcggggtccgccggccctgcgggccgccggtgaaataccactactctgatcgttttttcactgacccggtgaggcgggggggcgagccccgaggggctctcgcttctggcgccaagcgcc

SEQ ID NO: 50392 - DNA, 120 bp, Homo sapiens
  misc_feature: 692 for SV(W|O) and 28S
cagaagcgagagcccctcggggctcgcccccccgcctcaccgggtcagtgaaaaaacgatcagagtagtggtatttcaccggcggcccgcagggccggcggaccccgccccgggcccctc

SEQ ID NO: 50393 - DNA, 120 bp, Homo sapiens
  misc_feature: 692 for SV(W|O) and 28S
cggtgagctctcgctggcccttgaaaatccgggggagagggtgtaaatctcgcgccgggccgtacccatatccgcagcaggtctccaaggtgaacagcctctggcatgttggaacaatgt

SEQ ID NO: 50394 - DNA, 120 bp, Homo sapiens
  misc_feature: 692 for SV(W|O) and 28S
cgatcagaaggacttgggccccccacgagcggcgccggggagcgggtcttccgtacgccacatgtcccgcgccccgccgcggggcggggattcggcgctgggctcttccctgttcactcg

SEQ ID NO: 50395 - DNA, 120 bp, Homo sapiens
  misc_feature: 692 for SV(W|O) and 28S
caccaccggcccgtctcgcccgccgcgccggggaggtggagcacgagcgcacgtgttaggacccgaaagatggtgaactatgcctgggcagggcgaagccagaggaaactctggtggagg

SEQ ID NO: 50396 - DNA, 120 bp, Homo sapiens
  misc_feature: 691 for SV(W|O) and 28S
aatctcgttcatccattcatgcgcgtcactaattagatgacgaggcatttggctaccttaagagagtcatagttactcccgccgtttacccgcgcttcattgaatttcttcactttgaca

SEQ ID NO: 50397 - DNA, 120 bp, Homo sapiens
  misc_feature: 691 for SV(W|O) and 28S
tccagtccgccgagggcgcaccaccggcccgtctcgcccgccgcgccggggaggtggagcacgagcgcacgtgttaggacccgaaagatggtgaactatgcctgggcagggcgaagccag

SEQ ID NO: 50398 - DNA, 120 bp, Homo sapiens
  misc_feature: 691 for SV(W|O) and 28S
cgcgccccagcccgaccgacccagcccttagagccaatccttatcccgaagttacggatccggcttgccgacttcccttacctacattgttccaacatgccagaggctgttcaccttgga

SEQ ID NO: 50399 - DNA, 120 bp, Homo sapiens
  misc_feature: 691 for SV(W|O) and 28S
gtaacaactcacctgccgaatcaactagccctgaaaatggatggcgctggagcgtcgggcccatacccggccgtcgccggcagtcgagagtggacgggagcggcgggggcggcgcgcgcg

SEQ ID NO: 50400 - DNA, 120 bp, Homo sapiens
  misc_feature: 691 for SV(W|O) and 28S
gggtggaggggtcgggaggaacggggggcgggaaagatccgccgggccgccgacacggccggacccgccgccgggttgaatcctccgggcggactgcgcggaccccacccgtttacctct

SEQ ID NO: 50401 - DNA, 120 bp, Homo sapiens
  misc_feature: 691 for SV(W|O) and 28S
ggcgcaccaccggcccgtctcgcccgccgcgccggggaggtggagcacgagcgcacgtgttaggacccgaaagatggtgaactatgcctgggcagggcgaagccagaggaaactctggtg

SEQ ID NO: 50402 - DNA, 120 bp, Homo sapiens
  misc_feature: 691 for SV(W|O) and 28S
ctgcggtgagccttgaagcctagggcgcgggcccgggtggagccgccgcaggtgcagatcttggtggtagtagcaaatattcaaacgagaactttgaaggccgaagtggagaagggttcc

SEQ ID NO: 50403 - DNA, 120 bp, Homo sapiens
  misc_feature: 691 for SV(W|O) and 28S
cgcggcgggcgagacgggccggtggtgcgccctcggcggactggagaggcctcgggatcccacctcggccggcgagcgcgccggccttcaccttcattgcgccacggcggctttcgtgcg

SEQ ID NO: 50404 - DNA, 120 bp, Homo sapiens
  misc_feature: 691 for SV(W|O) and 28S
cacgtcaggaccgctacggacctccaccagagtttcctctggcttcgccctgcccaggcatagttcaccatctttcgggtcctaacacgtgcgctcgtgctccacctccccggcgcggcg

SEQ ID NO: 50405 - DNA, 120 bp, Homo sapiens
  misc_feature: 691 for SV(W|O) and 28S
aggcctctccagtccgccgagggcgcaccaccggcccgtctcgcccgccgcgccggggaggtggagcacgagcgcacgtgttaggacccgaaagatggtgaactatgcctgggcagggcg

SEQ ID NO: 50406 - DNA, 120 bp, Homo sapiens
  misc_feature: 691 for SV(W|O) and 28S
ccccagaaaaggtgttggttgatatagacagcaggacggtggccatggaagtcggaatccgctaaggagtgtgtaacaactcacctgccgaatcaactagccctgaaaatggatggcgct

SEQ ID NO: 50407 - DNA, 120 bp, Homo sapiens
  misc_feature: 690 for SV(W|O) and 28S
tgcggtgagccttgaagcctagggcgcgggcccgggtggagccgccgcaggtgcagatcttggtggtagtagcaaatattcaaacgagaactttgaaggccgaagtggagaagggttcca

SEQ ID NO: 50408 - DNA, 120 bp, Homo sapiens
  misc_feature: 690 for SV(W|O) and 28S
tgcctcgtcatctaattagtgacgcgcatgaatggatgaacgagattcccactgtccctacctactatccagcgaaaccacagccaagggaacgggcttggcggaatcagcggggaaaga

SEQ ID NO: 50409 - DNA, 120 bp, Homo sapiens
  misc_feature: 690 for SV(W|O) and 28S
tcgttcatccattcatgcgcgtcactaattagatgacgaggcatttggctaccttaagagagtcatagttactcccgccgtttacccgcgcttcattgaatttcttcactttgacattca

SEQ ID NO: 50410 - DNA, 120 bp, Homo sapiens
  misc_feature: 690 for SV(W|O) and 28S
cttcccggagtcgggttgcttgggaatgcagcccaaagcgggtggtaaactccatctaaggctaaataccggcacgagaccgatagtcaacaagtaccgtaagggaaagttgaaaagaac

SEQ ID NO: 50411 - DNA, 120 bp, Homo sapiens
  misc_feature: 690 for SV(W|O) and 28S
ggtagggacagtgggaatctcgttcatccattcatgcgcgtcactaattagatgacgaggcatttggctaccttaagagagtcatagttactcccgccgtttacccgcgcttcattgaat

SEQ ID NO: 50412 - DNA, 120 bp, Homo sapiens
  misc_feature: 690 for SV(W|O) and 28S
ggggccacgcgcgcgtcccccgaagagggggacggcggagcgagcgcacggggtcggcggcgacgtcggctacccacccgacccgtcttgaaacacggaccaaggagtctaacacgtgcg

SEQ ID NO: 50413 - DNA, 120 bp, Homo sapiens
  misc_feature: 690 for SV(W|O) and 28S
ctggatagtaggtagggacagtgggaatctcgttcatccattcatgcgcgtcactaattagatgacgaggcatttggctaccttaagagagtcatagttactcccgccgtttacccgcgc

SEQ ID NO: 50414 - DNA, 120 bp, Homo sapiens
  misc_feature: 690 for SV(W|O) and 28S
ctcggggccacgcgcgcgtcccccgaagagggggacggcggagcgagcgcacggggtcggcggcgacgtcggctacccacccgacccgtcttgaaacacggaccaaggagtctaacacgt

SEQ ID NO: 50415 - DNA, 120 bp, Homo sapiens
  misc_feature: 690 for SV(W|O) and 28S
cggtgagccttgaagcctagggcgcgggcccgggtggagccgccgcaggtgcagatcttggtggtagtagcaaatattcaaacgagaactttgaaggccgaagtggagaagggttccatg

SEQ ID NO: 50416 - DNA, 120 bp, Homo sapiens
  misc_feature: 690 for SV(W|O) and 28S
cgagggcgcaccaccggcccgtctcgcccgccgcgccggggaggtggagcacgagcgcacgtgttaggacccgaaagatggtgaactatgcctgggcagggcgaagccagaggaaactct

SEQ ID NO: 50417 - DNA, 120 bp, Homo sapiens
  misc_feature: 690 for SV(W|O) and 28S
cccgcccacgccccgctccccgcccccggagccccgcggacgctacgccgcgacgagtaggagggccgctgcggtgagccttgaagcctagggcgcgggcccgggtggagccgccgcagg

SEQ ID NO: 50418 - DNA, 120 bp, Homo sapiens
  misc_feature: 690 for SV(W|O) and 28S
ccgccgccctccgacgcacaccacacgcgcgcgcgcgcgcgccgcccccgccgctcccgtccactctcgactgccggcgacggccgggtatgggcccgacgctccagcgccatccatttt

SEQ ID NO: 50419 - DNA, 120 bp, Homo sapiens
  misc_feature: 690 for SV(W|O) and 28S
acccagcccttagagccaatccttatcccgaagttacggatccggcttgccgacttcccttacctacattgttccaacatgccagaggctgttcaccttggagacctgctgcggatatgg

SEQ ID NO: 50420 - DNA, 120 bp, Homo sapiens
  misc_feature: 690 for SV(W|O) and 28S
atcagaccccagaaaaggtgttggttgatatagacagcaggacggtggccatggaagtcggaatccgctaaggagtgtgtaacaactcacctgccgaatcaactagccctgaaaatggat

SEQ ID NO: 50421 - DNA, 120 bp, Homo sapiens
  misc_feature: 689 for SV(W|O) and 28S
gttctctcggggccacgcgcgcgtcccccgaagagggggacggcggagcgagcgcacggggtcggcggcgacgtcggctacccacccgacccgtcttgaaacacggaccaaggagtctaa

SEQ ID NO: 50422 - DNA, 120 bp, Homo sapiens
  misc_feature: 689 for SV(W|O) and 28S
gcctcgatcagaaggacttgggccccccacgagcggcgccggggagcgggtcttccgtacgccacatgtcccgcgccccgccgcggggcggggattcggcgctgggctcttccctgttca

SEQ ID NO: 50423 - DNA, 120 bp, Homo sapiens
  misc_feature: 689 for SV(W|O) and 28S
agtcgggttgcttgggaatgcagcccaaagcgggtggtaaactccatctaaggctaaataccggcacgagaccgatagtcaacaagtaccgtaagggaaagttgaaaagaactttgaaga

SEQ ID NO: 50424 - DNA, 120 bp, Homo sapiens
  misc_feature: 689 for SV(W|O) and 28S
tctcatgtctcttcaccgtgccagactagagtcaagctcaacagggtcttctttccccgctgattccgccaagcccgttcccttggctgtggtttcgctggatagtaggtagggacagtg

SEQ ID NO: 50425 - DNA, 120 bp, Homo sapiens
  misc_feature: 689 for SV(W|O) and 28S
ggcctctccagtccgccgagggcgcaccaccggcccgtctcgcccgccgcgccggggaggtggagcacgagcgcacgtgttaggacccgaaagatggtgaactatgcctgggcagggcga

SEQ ID NO: 50426 - DNA, 120 bp, Homo sapiens
  misc_feature: 689 for SV(W|O) and 28S
cagcccttagagccaatccttatcccgaagttacggatccggcttgccgacttcccttacctacattgttccaacatgccagaggctgttcaccttggagacctgctgcggatatgggta

SEQ ID NO: 50427 - DNA, 120 bp, Homo sapiens
  misc_feature: 689 for SV(W|O) and 28S
gtaggtagggacagtgggaatctcgttcatccattcatgcgcgtcactaattagatgacgaggcatttggctaccttaagagagtcatagttactcccgccgtttacccgcgcttcattg

SEQ ID NO: 50428 - DNA, 120 bp, Homo sapiens
  misc_feature: 689 for SV(W|O) and 28S
ggacgaccgatttgcacgtcaggaccgctacggacctccaccagagtttcctctggcttcgccctgcccaggcatagttcaccatctttcgggtcctaacacgtgcgctcgtgctccacc

SEQ ID NO: 50429 - DNA, 120 bp, Homo sapiens
  misc_feature: 689 for SV(W|O) and 28S
ggtcttctttccccgctgattccgccaagcccgttcccttggctgtggtttcgctggatagtaggtagggacagtgggaatctcgttcatccattcatgcgcgtcactaattagatgacg

SEQ ID NO: 50430 - DNA, 120 bp, Homo sapiens
  misc_feature: 689 for SV(W|O) and 28S
ctgacccatgttcaactgctgttcacatggaacccttctccacttcggccttcaaagttctcgtttgaatatttgctactaccaccaagatctgcacctgcggcggctccacccgggccc

SEQ ID NO: 50431 - DNA, 120 bp, Homo sapiens
  misc_feature: 689 for SV(W|O) and 28S
ggatagtaggtagggacagtgggaatctcgttcatccattcatgcgcgtcactaattagatgacgaggcatttggctaccttaagagagtcatagttactcccgccgtttacccgcgctt

SEQ ID NO: 50432 - DNA, 120 bp, Homo sapiens
  misc_feature: 689 for SV(W|O) and 28S
gcccgggtggagccgccgcaggtgcagatcttggtggtagtagcaaatattcaaacgagaactttgaaggccgaagtggagaagggttccatgtgaacagcagttgaacatgggtcagtc

SEQ ID NO: 50433 - DNA, 120 bp, Homo sapiens
  misc_feature: 689 for SV(W|O) and 28S
cgggtggaggggtcgggaggaacggggggcgggaaagatccgccgggccgccgacacggccggacccgccgccgggttgaatcctccgggcggactgcgcggaccccacccgtttacctc

SEQ ID NO: 50434 - DNA, 120 bp, Homo sapiens
  misc_feature: 689 for SV(W|O) and 28S
cgatttgcacgtcaggaccgctacggacctccaccagagtttcctctggcttcgccctgcccaggcatagttcaccatctttcgggtcctaacacgtgcgctcgtgctccacctccccgg

SEQ ID NO: 50435 - DNA, 120 bp, Homo sapiens
  misc_feature: 688 for SV(W|O) and 28S
gggccgtacccatatccgcagcaggtctccaaggtgaacagcctctggcatgttggaacaatgtaggtaagggaagtcggcaagccggatccgtaacttcgggataaggattggctctaa

SEQ ID NO: 50436 - DNA, 120 bp, Homo sapiens
  misc_feature: 688 for SV(W|O) and 28S
tggggtccgcgcagtccgcccggaggattcaacccggcggcgggtccggccgtgtcggcggcccggcggatctttcccgccccccgttcctcccgacccctccacccgccctcccttccc

SEQ ID NO: 50437 - DNA, 120 bp, Homo sapiens
  misc_feature: 688 for SV(W|O) and 28S
tcgcggttccggcggcgtccggtgagctctcgctggcccttgaaaatccgggggagagggtgtaaatctcgcgccgggccgtacccatatccgcagcaggtctccaaggtgaacagcctc

SEQ ID NO: 50438 - DNA, 120 bp, Homo sapiens
  misc_feature: 688 for SV(W|O) and 28S
tcgatcagaaggacttgggccccccacgagcggcgccggggagcgggtcttccgtacgccacatgtcccgcgccccgccgcggggcggggattcggcgctgggctcttccctgttcactc

SEQ ID NO: 50439 - DNA, 120 bp, Homo sapiens
  misc_feature: 688 for SV(W|O) and 28S
cgggccgtacccatatccgcagcaggtctccaaggtgaacagcctctggcatgttggaacaatgtaggtaagggaagtcggcaagccggatccgtaacttcgggataaggattggctcta

SEQ ID NO: 50440 - DNA, 120 bp, Homo sapiens
  misc_feature: 688 for SV(W|O) and 28S
ggtgagctctcgctggcccttgaaaatccgggggagagggtgtaaatctcgcgccgggccgtacccatatccgcagcaggtctccaaggtgaacagcctctggcatgttggaacaatgta

SEQ ID NO: 50441 - DNA, 120 bp, Homo sapiens
  misc_feature: 688 for SV(W|O) and 28S
gtcgggttgcttgggaatgcagcccaaagcgggtggtaaactccatctaaggctaaataccggcacgagaccgatagtcaacaagtaccgtaagggaaagttgaaaagaactttgaagag

SEQ ID NO: 50442 - DNA, 120 bp, Homo sapiens
  misc_feature: 688 for SV(W|O) and 28S
gggtcttctttccccgctgattccgccaagcccgttcccttggctgtggtttcgctggatagtaggtagggacagtgggaatctcgttcatccattcatgcgcgtcactaattagatgac

SEQ ID NO: 50443 - DNA, 120 bp, Homo sapiens
  misc_feature: 688 for SV(W|O) and 28S
ggcctcgatcagaaggacttgggccccccacgagcggcgccggggagcgggtcttccgtacgccacatgtcccgcgccccgccgcggggcggggattcggcgctgggctcttccctgttc

SEQ ID NO: 50444 - DNA, 120 bp, Homo sapiens
  misc_feature: 688 for SV(W|O) and 28S
gatttgcacgtcaggaccgctacggacctccaccagagtttcctctggcttcgccctgcccaggcatagttcaccatctttcgggtcctaacacgtgcgctcgtgctccacctccccggc

SEQ ID NO: 50445 - DNA, 120 bp, Homo sapiens
  misc_feature: 688 for SV(W|O) and 28S
cgccgccctccgacgcacaccacacgcgcgcgcgcgcgcgccgcccccgccgctcccgtccactctcgactgccggcgacggccgggtatgggcccgacgctccagcgccatccattttc

SEQ ID NO: 50446 - DNA, 120 bp, Homo sapiens
  misc_feature: 688 for SV(W|O) and 28S
ccggagtcgggttgcttgggaatgcagcccaaagcgggtggtaaactccatctaaggctaaataccggcacgagaccgatagtcaacaagtaccgtaagggaaagttgaaaagaactttg

SEQ ID NO: 50447 - DNA, 120 bp, Homo sapiens
  misc_feature: 688 for SV(W|O) and 28S
acccttctccacttcggccttcaaagttctcgtttgaatatttgctactaccaccaagatctgcacctgcggcggctccacccgggcccgcgccctaggcttcaaggctcaccgcagcgg

SEQ ID NO: 50448 - DNA, 120 bp, Homo sapiens
  misc_feature: 688 for SV(W|O) and 28S
ccgcccccgccgctcccgtccactctcgactgccggcgacggccgggtatgggcccgacgctccagcgccatccattttcagggctagttgattcggcaggtgagttgttacacactcct

SEQ ID NO: 50449 - DNA, 120 bp, Homo sapiens
  misc_feature: 688 for SV(W|O) and 28S
agctactagatggttcgattagtctttcgcccctatacccaggtcggacgaccgatttgcacgtcaggaccgctacggacctccaccagagtttcctctggcttcgccctgcccaggcat

SEQ ID NO: 50450 - DNA, 120 bp, Homo sapiens
  misc_feature: 687 for SV(W|O) and 28S
ttctctcggggccacgcgcgcgtcccccgaagagggggacggcggagcgagcgcacggggtcggcggcgacgtcggctacccacccgacccgtcttgaaacacggaccaaggagtctaac

SEQ ID NO: 50451 - DNA, 120 bp, Homo sapiens
  misc_feature: 687 for SV(W|O) and 28S
acacctctcatgtctcttcaccgtgccagactagagtcaagctcaacagggtcttctttccccgctgattccgccaagcccgttcccttggctgtggtttcgctggatagtaggtaggga

SEQ ID NO: 50452 - DNA, 120 bp, Homo sapiens
  misc_feature: 687 for SV(W|O) and 28S
tcagaccccagaaaaggtgttggttgatatagacagcaggacggtggccatggaagtcggaatccgctaaggagtgtgtaacaactcacctgccgaatcaactagccctgaaaatggatg

SEQ ID NO: 50453 - DNA, 120 bp, Homo sapiens
  misc_feature: 687 for SV(W|O) and 28S
ggaatctcgttcatccattcatgcgcgtcactaattagatgacgaggcatttggctaccttaagagagtcatagttactcccgccgtttacccgcgcttcattgaatttcttcactttga

SEQ ID NO: 50454 - DNA, 120 bp, Homo sapiens
  misc_feature: 687 for SV(W|O) and 28S
tagtaggtagggacagtgggaatctcgttcatccattcatgcgcgtcactaattagatgacgaggcatttggctaccttaagagagtcatagttactcccgccgtttacccgcgcttcat

SEQ ID NO: 50455 - DNA, 120 bp, Homo sapiens
  misc_feature: 687 for SV(W|O) and 28S
ggtggggtccgcgcagtccgcccggaggattcaacccggcggcgggtccggccgtgtcggcggcccggcggatctttcccgccccccgttcctcccgacccctccacccgccctcccttc

SEQ ID NO: 50456 - DNA, 120 bp, Homo sapiens
  misc_feature: 687 for SV(W|O) and 28S
cggggtccgccggccctgcgggccgccggtgaaataccactactctgatcgttttttcactgacccggtgaggcgggggggcgagccccgaggggctctcgcttctggcgccaagcgccc

SEQ ID NO: 50457 - DNA, 120 bp, Homo sapiens
  misc_feature: 687 for SV(W|O) and 28S
ggcggcgtccggtgagctctcgctggcccttgaaaatccgggggagagggtgtaaatctcgcgccgggccgtacccatatccgcagcaggtctccaaggtgaacagcctctggcatgttg

SEQ ID NO: 50458 - DNA, 120 bp, Homo sapiens
  misc_feature: 687 for SV(W|O) and 28S
cccccgccgctcccgtccactctcgactgccggcgacggccgggtatgggcccgacgctccagcgccatccattttcagggctagttgattcggcaggtgagttgttacacactccttag

SEQ ID NO: 50459 - DNA, 120 bp, Homo sapiens
  misc_feature: 687 for SV(W|O) and 28S
cgtcaggaccgctacggacctccaccagagtttcctctggcttcgccctgcccaggcatagttcaccatctttcgggtcctaacacgtgcgctcgtgctccacctccccggcgcggcggg

SEQ ID NO: 50460 - DNA, 120 bp, Homo sapiens
  misc_feature: 687 for SV(W|O) and 28S
cgaggcctctccagtccgccgagggcgcaccaccggcccgtctcgcccgccgcgccggggaggtggagcacgagcgcacgtgttaggacccgaaagatggtgaactatgcctgggcaggg

SEQ ID NO: 50461 - DNA, 120 bp, Homo sapiens
  misc_feature: 687 for SV(W|O) and 28S
agggcgcaccaccggcccgtctcgcccgccgcgccggggaggtggagcacgagcgcacgtgttaggacccgaaagatggtgaactatgcctgggcagggcgaagccagaggaaactctgg

SEQ ID NO: 50462 - DNA, 120 bp, Homo sapiens
  misc_feature: 687 for SV(W|O) and 28S
agtaggtagggacagtgggaatctcgttcatccattcatgcgcgtcactaattagatgacgaggcatttggctaccttaagagagtcatagttactcccgccgtttacccgcgcttcatt

SEQ ID NO: 50463 - DNA, 120 bp, Homo sapiens
  misc_feature: 686 for SV(W|O) and 28S
tcttcccggagtcgggttgcttgggaatgcagcccaaagcgggtggtaaactccatctaaggctaaataccggcacgagaccgatagtcaacaagtaccgtaagggaaagttgaaaagaa

SEQ ID NO: 50464 - DNA, 120 bp, Homo sapiens
  misc_feature: 686 for SV(W|O) and 28S
ttcccggagtcgggttgcttgggaatgcagcccaaagcgggtggtaaactccatctaaggctaaataccggcacgagaccgatagtcaacaagtaccgtaagggaaagttgaaaagaact

SEQ ID NO: 50465 - DNA, 120 bp, Homo sapiens
  misc_feature: 686 for SV(W|O) and 28S
gccttgaagcctagggcgcgggcccgggtggagccgccgcaggtgcagatcttggtggtagtagcaaatattcaaacgagaactttgaaggccgaagtggagaagggttccatgtgaaca

SEQ ID NO: 50466 - DNA, 120 bp, Homo sapiens
  misc_feature: 686 for SV(W|O) and 28S
catcagaccccagaaaaggtgttggttgatatagacagcaggacggtggccatggaagtcggaatccgctaaggagtgtgtaacaactcacctgccgaatcaactagccctgaaaatgga

SEQ ID NO: 50467 - DNA, 120 bp, Homo sapiens
  misc_feature: 686 for SV(W|O) and 28S
ccgacccagcccttagagccaatccttatcccgaagttacggatccggcttgccgacttcccttacctacattgttccaacatgccagaggctgttcaccttggagacctgctgcggata

SEQ ID NO: 50468 - DNA, 120 bp, Homo sapiens
  misc_feature: 686 for SV(W|O) and 28S
tagccctgaaaatggatggcgctggagcgtcgggcccatacccggccgtcgccggcagtcgagagtggacgggagcggcgggggcggcgcgcgcgcgcgcgcgtgtggtgtgcgtcggag

SEQ ID NO: 50469 - DNA, 120 bp, Homo sapiens
  misc_feature: 686 for SV(W|O) and 28S
cctcgatcagaaggacttgggccccccacgagcggcgccggggagcgggtcttccgtacgccacatgtcccgcgccccgccgcggggcggggattcggcgctgggctcttccctgttcac

SEQ ID NO: 50470 - DNA, 120 bp, Homo sapiens
  misc_feature: 686 for SV(W|O) and 28S
ggcgggcgagacgggccggtggtgcgccctcggcggactggagaggcctcgggatcccacctcggccggcgagcgcgccggccttcaccttcattgcgccacggcggctttcgtgcgagc

SEQ ID NO: 50471 - DNA, 120 bp, Homo sapiens
  misc_feature: 686 for SV(W|O) and 28S
cgaccgatttgcacgtcaggaccgctacggacctccaccagagtttcctctggcttcgccctgcccaggcatagttcaccatctttcgggtcctaacacgtgcgctcgtgctccacctcc

SEQ ID NO: 50472 - DNA, 120 bp, Homo sapiens
  misc_feature: 686 for SV(W|O) and 28S
gcggcgtccggtgagctctcgctggcccttgaaaatccgggggagagggtgtaaatctcgcgccgggccgtacccatatccgcagcaggtctccaaggtgaacagcctctggcatgttgg

SEQ ID NO: 50473 - DNA, 120 bp, Homo sapiens
  misc_feature: 686 for SV(W|O) and 28S
cccttctccacttcggccttcaaagttctcgtttgaatatttgctactaccaccaagatctgcacctgcggcggctccacccgggcccgcgccctaggcttcaaggctcaccgcagcggc

SEQ ID NO: 50474 - DNA, 120 bp, Homo sapiens
  misc_feature: 686 for SV(W|O) and 28S
ccgagggcgcaccaccggcccgtctcgcccgccgcgccggggaggtggagcacgagcgcacgtgttaggacccgaaagatggtgaactatgcctgggcagggcgaagccagaggaaactc

SEQ ID NO: 50475 - DNA, 120 bp, Homo sapiens
  misc_feature: 686 for SV(W|O) and 28S
gacccgctccggggacagtgccaggtggggagtttgactggggcggtacacctgtcaaacggtaacgcaggtgtcctaaggcgagctcagggaggacagaaacctcccgtggagcagaag

SEQ ID NO: 50476 - DNA, 120 bp, Homo sapiens
  misc_feature: 686 for SV(W|O) and 28S
ctcgatcagaaggacttgggccccccacgagcggcgccggggagcgggtcttccgtacgccacatgtcccgcgccccgccgcggggcggggattcggcgctgggctcttccctgttcact

SEQ ID NO: 50477 - DNA, 120 bp, Homo sapiens
  misc_feature: 686 for SV(W|O) and 28S
accaccggcccgtctcgcccgccgcgccggggaggtggagcacgagcgcacgtgttaggacccgaaagatggtgaactatgcctgggcagggcgaagccagaggaaactctggtggaggt

SEQ ID NO: 50478 - DNA, 120 bp, Homo sapiens
  misc_feature: 685 for SV(W|O) and 28S
acagggaagagcccagcgccgaatccccgccccgcggcggggcgcgggacatgtggcgtacggaagacccgctccccggcgccgctcgtggggggcccaagtccttctgatcgaggccca

SEQ ID NO: 50479 - DNA, 120 bp, Homo sapiens
  misc_feature: 685 for SV(W|O) and 28S
ggggtccgccggccctgcgggccgccggtgaaataccactactctgatcgttttttcactgacccggtgaggcgggggggcgagccccgaggggctctcgcttctggcgccaagcgcccg

SEQ ID NO: 50480 - DNA, 120 bp, Homo sapiens
  misc_feature: 685 for SV(W|O) and 28S
actgacccatgttcaactgctgttcacatggaacccttctccacttcggccttcaaagttctcgtttgaatatttgctactaccaccaagatctgcacctgcggcggctccacccgggcc

SEQ ID NO: 50481 - DNA, 120 bp, Homo sapiens
  misc_feature: 685 for SV(W|O) and 28S
agcgtcgcggttccggcggcgtccggtgagctctcgctggcccttgaaaatccgggggagagggtgtaaatctcgcgccgggccgtacccatatccgcagcaggtctccaaggtgaacag

SEQ ID NO: 50482 - DNA, 120 bp, Homo sapiens
  misc_feature: 685 for SV(W|O) and 28S
cctctcatgtctcttcaccgtgccagactagagtcaagctcaacagggtcttctttccccgctgattccgccaagcccgttcccttggctgtggtttcgctggatagtaggtagggacag

SEQ ID NO: 50483 - DNA, 120 bp, Homo sapiens
  misc_feature: 685 for SV(W|O) and 28S
cgcgcggcgcctcgcctcggccggcgcctagcagccgacttagaactggtgcggaccaggggaatccgactgtttaattaaaacaaagcatcgcgaaggcccgcggcgggtgttgacgcg

SEQ ID NO: 50484 - DNA, 120 bp, Homo sapiens
  misc_feature: 685 for SV(W|O) and 28S
ccggcgcggcgggcgagacgggccggtggtgcgccctcggcggactggagaggcctcgggatcccacctcggccggcgagcgcgccggccttcaccttcattgcgccacggcggctttcg

SEQ ID NO: 50485 - DNA, 120 bp, Homo sapiens
  misc_feature: 685 for SV(W|O) and 28S
ccggcggcgtccggtgagctctcgctggcccttgaaaatccgggggagagggtgtaaatctcgcgccgggccgtacccatatccgcagcaggtctccaaggtgaacagcctctggcatgt

SEQ ID NO: 50486 - DNA, 120 bp, Homo sapiens
  misc_feature: 685 for SV(W|O) and 28S
cagaccccagaaaaggtgttggttgatatagacagcaggacggtggccatggaagtcggaatccgctaaggagtgtgtaacaactcacctgccgaatcaactagccctgaaaatggatgg

SEQ ID NO: 50487 - DNA, 120 bp, Homo sapiens
  misc_feature: 684 for SV(W|O) and 28S
gtcttcccggagtcgggttgcttgggaatgcagcccaaagcgggtggtaaactccatctaaggctaaataccggcacgagaccgatagtcaacaagtaccgtaagggaaagttgaaaaga

SEQ ID NO: 50488 - DNA, 120 bp, Homo sapiens
  misc_feature: 684 for SV(W|O) and 28S
tcggggccacgcgcgcgtcccccgaagagggggacggcggagcgagcgcacggggtcggcggcgacgtcggctacccacccgacccgtcttgaaacacggaccaaggagtctaacacgtg

SEQ ID NO: 50489 - DNA, 120 bp, Homo sapiens
  misc_feature: 684 for SV(W|O) and 28S
gtgggaatctcgttcatccattcatgcgcgtcactaattagatgacgaggcatttggctaccttaagagagtcatagttactcccgccgtttacccgcgcttcattgaatttcttcactt

SEQ ID NO: 50490 - DNA, 120 bp, Homo sapiens
  misc_feature: 684 for SV(W|O) and 28S
gtgagctctcgctggcccttgaaaatccgggggagagggtgtaaatctcgcgccgggccgtacccatatccgcagcaggtctccaaggtgaacagcctctggcatgttggaacaatgtag

SEQ ID NO: 50491 - DNA, 120 bp, Homo sapiens
  misc_feature: 684 for SV(W|O) and 28S
gaatctcgttcatccattcatgcgcgtcactaattagatgacgaggcatttggctaccttaagagagtcatagttactcccgccgtttacccgcgcttcattgaatttcttcactttgac

SEQ ID NO: 50492 - DNA, 120 bp, Homo sapiens
  misc_feature: 684 for SV(W|O) and 28S
gatagtaggtagggacagtgggaatctcgttcatccattcatgcgcgtcactaattagatgacgaggcatttggctaccttaagagagtcatagttactcccgccgtttacccgcgcttc

SEQ ID NO: 50493 - DNA, 120 bp, Homo sapiens
  misc_feature: 684 for SV(W|O) and 28S
cgggtggagccgccgcaggtgcagatcttggtggtagtagcaaatattcaaacgagaactttgaaggccgaagtggagaagggttccatgtgaacagcagttgaacatgggtcagtcggt

SEQ ID NO: 50494 - DNA, 120 bp, Homo sapiens
  misc_feature: 683 for SV(W|O) and 28S
ggcgtccggtgagctctcgctggcccttgaaaatccgggggagagggtgtaaatctcgcgccgggccgtacccatatccgcagcaggtctccaaggtgaacagcctctggcatgttggaa

SEQ ID NO: 50495 - DNA, 120 bp, Homo sapiens
  misc_feature: 683 for SV(W|O) and 28S
tctctcggggccacgcgcgcgtcccccgaagagggggacggcggagcgagcgcacggggtcggcggcgacgtcggctacccacccgacccgtcttgaaacacggaccaaggagtctaaca

SEQ ID NO: 50496 - DNA, 120 bp, Homo sapiens
  misc_feature: 683 for SV(W|O) and 28S
gccgccgccgccctccgacgcacaccacacgcgcgcgcgcgcgcgccgcccccgccgctcccgtccactctcgactgccggcgacggccgggtatgggcccgacgctccagcgccatcca

SEQ ID NO: 50497 - DNA, 120 bp, Homo sapiens
  misc_feature: 683 for SV(W|O) and 28S
tagtagctggttccctccgaagtttccctcaggatagctggcgctctcgcagacccgacgcacccccgccacgcagttttatccggtaaagcgaatgattagaggtcttggggccgaaac

SEQ ID NO: 50498 - DNA, 120 bp, Homo sapiens
  misc_feature: 683 for SV(W|O) and 28S
ggtggaggggtcgggaggaacggggggcgggaaagatccgccgggccgccgacacggccggacccgccgccgggttgaatcctccgggcggactgcgcggaccccacccgtttacctctt

SEQ ID NO: 50499 - DNA, 120 bp, Homo sapiens
  misc_feature: 683 for SV(W|O) and 28S
gacccatgttcaactgctgttcacatggaacccttctccacttcggccttcaaagttctcgtttgaatatttgctactaccaccaagatctgcacctgcggcggctccacccgggcccgc

SEQ ID NO: 50500 - DNA, 120 bp, Homo sapiens
  misc_feature: 683 for SV(W|O) and 28S
atgcctcgtcatctaattagtgacgcgcatgaatggatgaacgagattcccactgtccctacctactatccagcgaaaccacagccaagggaacgggcttggcggaatcagcggggaaag

SEQ ID NO: 50501 - DNA, 120 bp, Homo sapiens
  misc_feature: 683 for SV(W|O) and 28S
ccgccctccgacgcacaccacacgcgcgcgcgcgcgcgccgcccccgccgctcccgtccactctcgactgccggcgacggccgggtatgggcccgacgctccagcgccatccattttcag

SEQ ID NO: 50502 - DNA, 120 bp, Homo sapiens
  misc_feature: 683 for SV(W|O) and 28S
atttgcacgtcaggaccgctacggacctccaccagagtttcctctggcttcgccctgcccaggcatagttcaccatctttcgggtcctaacacgtgcgctcgtgctccacctccccggcg

SEQ ID NO: 50503 - DNA, 120 bp, Homo sapiens
  misc_feature: 683 for SV(W|O) and 28S
ccgcccacgccccgctccccgcccccggagccccgcggacgctacgccgcgacgagtaggagggccgctgcggtgagccttgaagcctagggcgcgggcccgggtggagccgccgcaggt

SEQ ID NO: 50504 - DNA, 120 bp, Homo sapiens
  misc_feature: 682 for SV(W|O) and 28S
tgagccttgaagcctagggcgcgggcccgggtggagccgccgcaggtgcagatcttggtggtagtagcaaatattcaaacgagaactttgaaggccgaagtggagaagggttccatgtga

SEQ ID NO: 50505 - DNA, 120 bp, Homo sapiens
  misc_feature: 682 for SV(W|O) and 28S
gggtggtaaactccatctaaggctaaataccggcacgagaccgatagtcaacaagtaccgtaagggaaagttgaaaagaactttgaagagagagttcaagagggcgtgaaaccgttaaga

SEQ ID NO: 50506 - DNA, 120 bp, Homo sapiens
  misc_feature: 682 for SV(W|O) and 28S
gcggcgggcgagacgggccggtggtgcgccctcggcggactggagaggcctcgggatcccacctcggccggcgagcgcgccggccttcaccttcattgcgccacggcggctttcgtgcga

SEQ ID NO: 50507 - DNA, 120 bp, Homo sapiens
  misc_feature: 682 for SV(W|O) and 28S
tccgcgcagtccgcccggaggattcaacccggcggcgggtccggccgtgtcggcggcccggcggatctttcccgccccccgttcctcccgacccctccacccgccctcccttcccccgcc

SEQ ID NO: 50508 - DNA, 120 bp, Homo sapiens
  misc_feature: 682 for SV(W|O) and 28S
gtggggtccgcgcagtccgcccggaggattcaacccggcggcgggtccggccgtgtcggcggcccggcggatctttcccgccccccgttcctcccgacccctccacccgccctcccttcc

SEQ ID NO: 50509 - DNA, 120 bp, Homo sapiens
  misc_feature: 682 for SV(W|O) and 28S
ggtcttcccggagtcgggttgcttgggaatgcagcccaaagcgggtggtaaactccatctaaggctaaataccggcacgagaccgatagtcaacaagtaccgtaagggaaagttgaaaag

SEQ ID NO: 50510 - DNA, 120 bp, Homo sapiens
  misc_feature: 682 for SV(W|O) and 28S
gggtggagccgccgcaggtgcagatcttggtggtagtagcaaatattcaaacgagaactttgaaggccgaagtggagaagggttccatgtgaacagcagttgaacatgggtcagtcggtc

SEQ ID NO: 50511 - DNA, 120 bp, Homo sapiens
  misc_feature: 682 for SV(W|O) and 28S
ggggtccgcgcagtccgcccggaggattcaacccggcggcgggtccggccgtgtcggcggcccggcggatctttcccgccccccgttcctcccgacccctccacccgccctcccttcccc

SEQ ID NO: 50512 - DNA, 120 bp, Homo sapiens
  misc_feature: 682 for SV(W|O) and 28S
gctgcggtgagccttgaagcctagggcgcgggcccgggtggagccgccgcaggtgcagatcttggtggtagtagcaaatattcaaacgagaactttgaaggccgaagtggagaagggttc

SEQ ID NO: 50513 - DNA, 120 bp, Homo sapiens
  misc_feature: 682 for SV(W|O) and 28S
ccccgccgctcccgtccactctcgactgccggcgacggccgggtatgggcccgacgctccagcgccatccattttcagggctagttgattcggcaggtgagttgttacacactccttagc

SEQ ID NO: 50514 - DNA, 120 bp, Homo sapiens
  misc_feature: 682 for SV(W|O) and 28S
cccgggtggagccgccgcaggtgcagatcttggtggtagtagcaaatattcaaacgagaactttgaaggccgaagtggagaagggttccatgtgaacagcagttgaacatgggtcagtcg

SEQ ID NO: 50515 - DNA, 120 bp, Homo sapiens
  misc_feature: 682 for SV(W|O) and 28S
ccgaggcctctccagtccgccgagggcgcaccaccggcccgtctcgcccgccgcgccggggaggtggagcacgagcgcacgtgttaggacccgaaagatggtgaactatgcctgggcagg

SEQ ID NO: 50516 - DNA, 120 bp, Homo sapiens
  misc_feature: 682 for SV(W|O) and 28S
acgtcaggaccgctacggacctccaccagagtttcctctggcttcgccctgcccaggcatagttcaccatctttcgggtcctaacacgtgcgctcgtgctccacctccccggcgcggcgg

SEQ ID NO: 50517 - DNA, 120 bp, Homo sapiens
  misc_feature: 682 for SV(W|O) and 28S
cccacttattctacacctctcatgtctcttcaccgtgccagactagagtcaagctcaacagggtcttctttccccgctgattccgccaagcccgttcccttggctgtggtttcgctggat

SEQ ID NO: 50518 - DNA, 120 bp, Homo sapiens
  misc_feature: 681 for SV(W|O) and 28S
gccgccctccgacgcacaccacacgcgcgcgcgcgcgcgccgcccccgccgctcccgtccactctcgactgccggcgacggccgggtatgggcccgacgctccagcgccatccattttca

SEQ ID NO: 50519 - DNA, 120 bp, Homo sapiens
  misc_feature: 681 for SV(W|O) and 28S
ggagccgccgcaggtgcagatcttggtggtagtagcaaatattcaaacgagaactttgaaggccgaagtggagaagggttccatgtgaacagcagttgaacatgggtcagtcggtcctga

SEQ ID NO: 50520 - DNA, 120 bp, Homo sapiens
  misc_feature: 681 for SV(W|O) and 28S
ccacttattctacacctctcatgtctcttcaccgtgccagactagagtcaagctcaacagggtcttctttccccgctgattccgccaagcccgttcccttggctgtggtttcgctggata

SEQ ID NO: 50521 - DNA, 120 bp, Homo sapiens
  misc_feature: 681 for SV(W|O) and 28S
gtggaggggtcgggaggaacggggggcgggaaagatccgccgggccgccgacacggccggacccgccgccgggttgaatcctccgggcggactgcgcggaccccacccgtttacctctta

SEQ ID NO: 50522 - DNA, 120 bp, Homo sapiens
  misc_feature: 681 for SV(W|O) and 28S
agccttgaagcctagggcgcgggcccgggtggagccgccgcaggtgcagatcttggtggtagtagcaaatattcaaacgagaactttgaaggccgaagtggagaagggttccatgtgaac

SEQ ID NO: 50523 - DNA, 120 bp, Homo sapiens
  misc_feature: 681 for SV(W|O) and 28S
gggaatctcgttcatccattcatgcgcgtcactaattagatgacgaggcatttggctaccttaagagagtcatagttactcccgccgtttacccgcgcttcattgaatttcttcactttg

SEQ ID NO: 50524 - DNA, 120 bp, Homo sapiens
  misc_feature: 681 for SV(W|O) and 28S
ggccgtacccatatccgcagcaggtctccaaggtgaacagcctctggcatgttggaacaatgtaggtaagggaagtcggcaagccggatccgtaacttcgggataaggattggctctaag

SEQ ID NO: 50525 - DNA, 120 bp, Homo sapiens
  misc_feature: 681 for SV(W|O) and 28S
gctggatagtaggtagggacagtgggaatctcgttcatccattcatgcgcgtcactaattagatgacgaggcatttggctaccttaagagagtcatagttactcccgccgtttacccgcg

SEQ ID NO: 50526 - DNA, 120 bp, Homo sapiens
  misc_feature: 681 for SV(W|O) and 28S
gcccgtctcgcccgccgcgccggggaggtggagcacgagcgcacgtgttaggacccgaaagatggtgaactatgcctgggcagggcgaagccagaggaaactctggtggaggtccgtagc

SEQ ID NO: 50527 - DNA, 120 bp, Homo sapiens
  misc_feature: 681 for SV(W|O) and 28S
gcgccccagcccgaccgacccagcccttagagccaatccttatcccgaagttacggatccggcttgccgacttcccttacctacattgttccaacatgccagaggctgttcaccttggag

SEQ ID NO: 50528 - DNA, 120 bp, Homo sapiens
  misc_feature: 681 for SV(W|O) and 28S
gccgtacccatatccgcagcaggtctccaaggtgaacagcctctggcatgttggaacaatgtaggtaagggaagtcggcaagccggatccgtaacttcgggataaggattggctctaagg

SEQ ID NO: 50529 - DNA, 120 bp, Homo sapiens
  misc_feature: 681 for SV(W|O) and 28S
gccgctcccgtccactctcgactgccggcgacggccgggtatgggcccgacgctccagcgccatccattttcagggctagttgattcggcaggtgagttgttacacactccttagcggat

SEQ ID NO: 50530 - DNA, 120 bp, Homo sapiens
  misc_feature: 681 for SV(W|O) and 28S
gccctccgacgcacaccacacgcgcgcgcgcgcgcgccgcccccgccgctcccgtccactctcgactgccggcgacggccgggtatgggcccgacgctccagcgccatccattttcaggg

SEQ ID NO: 50531 - DNA, 120 bp, Homo sapiens
  misc_feature: 681 for SV(W|O) and 28S
gacccagcccttagagccaatccttatcccgaagttacggatccggcttgccgacttcccttacctacattgttccaacatgccagaggctgttcaccttggagacctgctgcggatatg

SEQ ID NO: 50532 - DNA, 120 bp, Homo sapiens
  misc_feature: 681 for SV(W|O) and 28S
ccttgaagcctagggcgcgggcccgggtggagccgccgcaggtgcagatcttggtggtagtagcaaatattcaaacgagaactttgaaggccgaagtggagaagggttccatgtgaacag

SEQ ID NO: 50533 - DNA, 120 bp, Homo sapiens
  misc_feature: 681 for SV(W|O) and 28S
cagggaagagcccagcgccgaatccccgccccgcggcggggcgcgggacatgtggcgtacggaagacccgctccccggcgccgctcgtggggggcccaagtccttctgatcgaggcccag

SEQ ID NO: 50534 - DNA, 120 bp, Homo sapiens
  misc_feature: 681 for SV(W|O) and 28S
cccgaggcctctccagtccgccgagggcgcaccaccggcccgtctcgcccgccgcgccggggaggtggagcacgagcgcacgtgttaggacccgaaagatggtgaactatgcctgggcag

SEQ ID NO: 50535 - DNA, 120 bp, Homo sapiens
  misc_feature: 681 for SV(W|O) and 28S
ctcgctggcccttgaaaatccgggggagagggtgtaaatctcgcgccgggccgtacccatatccgcagcaggtctccaaggtgaacagcctctggcatgttggaacaatgtaggtaaggg

SEQ ID NO: 50536 - DNA, 120 bp, Homo sapiens
  misc_feature: 681 for SV(W|O) and 28S
cgctgcggtgagccttgaagcctagggcgcgggcccgggtggagccgccgcaggtgcagatcttggtggtagtagcaaatattcaaacgagaactttgaaggccgaagtggagaagggtt

SEQ ID NO: 50537 - DNA, 120 bp, Homo sapiens
  misc_feature: 681 for SV(W|O) and 28S
cccgccgctcccgtccactctcgactgccggcgacggccgggtatgggcccgacgctccagcgccatccattttcagggctagttgattcggcaggtgagttgttacacactccttagcg

SEQ ID NO: 50538 - DNA, 120 bp, Homo sapiens
  misc_feature: 681 for SV(W|O) and 28S
ccgccgctcccgtccactctcgactgccggcgacggccgggtatgggcccgacgctccagcgccatccattttcagggctagttgattcggcaggtgagttgttacacactccttagcgg

SEQ ID NO: 50539 - DNA, 120 bp, Homo sapiens
  misc_feature: 681 for SV(W|O) and 28S
atgttcaactgctgttcacatggaacccttctccacttcggccttcaaagttctcgtttgaatatttgctactaccaccaagatctgcacctgcggcggctccacccgggcccgcgccct

SEQ ID NO: 50540 - DNA, 120 bp, Homo sapiens
  misc_feature: 680 for SV(W|O) and 28S
gggtcttcccggagtcgggttgcttgggaatgcagcccaaagcgggtggtaaactccatctaaggctaaataccggcacgagaccgatagtcaacaagtaccgtaagggaaagttgaaaa

SEQ ID NO: 50541 - DNA, 120 bp, Homo sapiens
  misc_feature: 680 for SV(W|O) and 28S
tggagccgccgcaggtgcagatcttggtggtagtagcaaatattcaaacgagaactttgaaggccgaagtggagaagggttccatgtgaacagcagttgaacatgggtcagtcggtcctg

SEQ ID NO: 50542 - DNA, 120 bp, Homo sapiens
  misc_feature: 680 for SV(W|O) and 28S
tgacccatgttcaactgctgttcacatggaacccttctccacttcggccttcaaagttctcgtttgaatatttgctactaccaccaagatctgcacctgcggcggctccacccgggcccg

SEQ ID NO: 50543 - DNA, 120 bp, Homo sapiens
  misc_feature: 680 for SV(W|O) and 28S
tcgcgccccagcccgaccgacccagcccttagagccaatccttatcccgaagttacggatccggcttgccgacttcccttacctacattgttccaacatgccagaggctgttcaccttgg

SEQ ID NO: 50544 - DNA, 120 bp, Homo sapiens
  misc_feature: 680 for SV(W|O) and 28S
ggaggggtcgggaggaacggggggcgggaaagatccgccgggccgccgacacggccggacccgccgccgggttgaatcctccgggcggactgcgcggaccccacccgtttacctcttaac

SEQ ID NO: 50545 - DNA, 120 bp, Homo sapiens
  misc_feature: 680 for SV(W|O) and 28S
gggtccgcgcagtccgcccggaggattcaacccggcggcgggtccggccgtgtcggcggcccggcggatctttcccgccccccgttcctcccgacccctccacccgccctcccttccccc

SEQ ID NO: 50546 - DNA, 120 bp, Homo sapiens
  misc_feature: 680 for SV(W|O) and 28S
catgttcaactgctgttcacatggaacccttctccacttcggccttcaaagttctcgtttgaatatttgctactaccaccaagatctgcacctgcggcggctccacccgggcccgcgccc

SEQ ID NO: 50547 - DNA, 120 bp, Homo sapiens
  misc_feature: 680 for SV(W|O) and 28S
gcctgggcagggcgaagccagaggaaactctggtggaggtccgtagcggtcctgacgtgcaaatcggtcgtccgacctgggtataggggcgaaagactaatcgaaccatctagtagctgg

SEQ ID NO: 50548 - DNA, 120 bp, Homo sapiens
  misc_feature: 680 for SV(W|O) and 28S
cacttattctacacctctcatgtctcttcaccgtgccagactagagtcaagctcaacagggtcttctttccccgctgattccgccaagcccgttcccttggctgtggtttcgctggatag

SEQ ID NO: 50549 - DNA, 120 bp, Homo sapiens
  misc_feature: 680 for SV(W|O) and 28S
cgccctccgacgcacaccacacgcgcgcgcgcgcgcgccgcccccgccgctcccgtccactctcgactgccggcgacggccgggtatgggcccgacgctccagcgccatccattttcagg

SEQ ID NO: 50550 - DNA, 120 bp, Homo sapiens
  misc_feature: 680 for SV(W|O) and 28S
ccgggccgtacccatatccgcagcaggtctccaaggtgaacagcctctggcatgttggaacaatgtaggtaagggaagtcggcaagccggatccgtaacttcgggataaggattggctct

SEQ ID NO: 50551 - DNA, 120 bp, Homo sapiens
  misc_feature: 680 for SV(W|O) and 28S
agtgggaatctcgttcatccattcatgcgcgtcactaattagatgacgaggcatttggctaccttaagagagtcatagttactcccgccgtttacccgcgcttcattgaatttcttcact

SEQ ID NO: 50552 - DNA, 120 bp, Homo sapiens
  misc_feature: 679 for SV(W|O) and 28S
ctagtagctggttccctccgaagtttccctcaggatagctggcgctctcgcagacccgacgcacccccgccacgcagttttatccggtaaagcgaatgattagaggtcttggggccgaaa

SEQ ID NO: 50553 - DNA, 120 bp, Homo sapiens
  misc_feature: 679 for SV(W|O) and 28S
gagccttgaagcctagggcgcgggcccgggtggagccgccgcaggtgcagatcttggtggtagtagcaaatattcaaacgagaactttgaaggccgaagtggagaagggttccatgtgaa

SEQ ID NO: 50554 - DNA, 120 bp, Homo sapiens
  misc_feature: 679 for SV(W|O) and 28S
tcatcagaccccagaaaaggtgttggttgatatagacagcaggacggtggccatggaagtcggaatccgctaaggagtgtgtaacaactcacctgccgaatcaactagccctgaaaatgg

SEQ ID NO: 50555 - DNA, 120 bp, Homo sapiens
  misc_feature: 679 for SV(W|O) and 28S
agcccttagagccaatccttatcccgaagttacggatccggcttgccgacttcccttacctacattgttccaacatgccagaggctgttcaccttggagacctgctgcggatatgggtac

SEQ ID NO: 50556 - DNA, 120 bp, Homo sapiens
  misc_feature: 679 for SV(W|O) and 28S
ggcccgtctcgcccgccgcgccggggaggtggagcacgagcgcacgtgttaggacccgaaagatggtgaactatgcctgggcagggcgaagccagaggaaactctggtggaggtccgtag

SEQ ID NO: 50557 - DNA, 120 bp, Homo sapiens
  misc_feature: 679 for SV(W|O) and 28S
cttgaagcctagggcgcgggcccgggtggagccgccgcaggtgcagatcttggtggtagtagcaaatattcaaacgagaactttgaaggccgaagtggagaagggttccatgtgaacagc

SEQ ID NO: 50558 - DNA, 120 bp, Homo sapiens
  misc_feature: 679 for SV(W|O) and 28S
gcgcaccaccggcccgtctcgcccgccgcgccggggaggtggagcacgagcgcacgtgttaggacccgaaagatggtgaactatgcctgggcagggcgaagccagaggaaactctggtgg

SEQ ID NO: 50559 - DNA, 120 bp, Homo sapiens
  misc_feature: 679 for SV(W|O) and 28S
gccctgaaaatggatggcgctggagcgtcgggcccatacccggccgtcgccggcagtcgagagtggacgggagcggcgggggcggcgcgcgcgcgcgcgcgtgtggtgtgcgtcggaggg

SEQ ID NO: 50560 - DNA, 120 bp, Homo sapiens
  misc_feature: 678 for SV(W|O) and 28S
cgggtcttcccggagtcgggttgcttgggaatgcagcccaaagcgggtggtaaactccatctaaggctaaataccggcacgagaccgatagtcaacaagtaccgtaagggaaagttgaaa

SEQ ID NO: 50561 - DNA, 120 bp, Homo sapiens
  misc_feature: 678 for SV(W|O) and 28S
gaccgacccagcccttagagccaatccttatcccgaagttacggatccggcttgccgacttcccttacctacattgttccaacatgccagaggctgttcaccttggagacctgctgcgga

SEQ ID NO: 50562 - DNA, 120 bp, Homo sapiens
  misc_feature: 678 for SV(W|O) and 28S
cggcgtccggtgagctctcgctggcccttgaaaatccgggggagagggtgtaaatctcgcgccgggccgtacccatatccgcagcaggtctccaaggtgaacagcctctggcatgttgga

SEQ ID NO: 50563 - DNA, 120 bp, Homo sapiens
  misc_feature: 678 for SV(W|O) and 28S
ctctcggggccacgcgcgcgtcccccgaagagggggacggcggagcgagcgcacggggtcggcggcgacgtcggctacccacccgacccgtcttgaaacacggaccaaggagtctaacac

SEQ ID NO: 50564 - DNA, 120 bp, Homo sapiens
  misc_feature: 678 for SV(W|O) and 28S
cgggaggaacggggggcgggaaagatccgccgggccgccgacacggccggacccgccgccgggttgaatcctccgggcggactgcgcggaccccacccgtttacctcttaacggtttcac

SEQ ID NO: 50565 - DNA, 120 bp, Homo sapiens
  misc_feature: 678 for SV(W|O) and 28S
ggtggtaaactccatctaaggctaaataccggcacgagaccgatagtcaacaagtaccgtaagggaaagttgaaaagaactttgaagagagagttcaagagggcgtgaaaccgttaagag

SEQ ID NO: 50566 - DNA, 120 bp, Homo sapiens
  misc_feature: 678 for SV(W|O) and 28S
gggcgagacgggccggtggtgcgccctcggcggactggagaggcctcgggatcccacctcggccggcgagcgcgccggccttcaccttcattgcgccacggcggctttcgtgcgagcccc

SEQ ID NO: 50567 - DNA, 120 bp, Homo sapiens
  misc_feature: 678 for SV(W|O) and 28S
cggcgggcgagacgggccggtggtgcgccctcggcggactggagaggcctcgggatcccacctcggccggcgagcgcgccggccttcaccttcattgcgccacggcggctttcgtgcgag

SEQ ID NO: 50568 - DNA, 120 bp, Homo sapiens
  misc_feature: 678 for SV(W|O) and 28S
cggcggcgtccggtgagctctcgctggcccttgaaaatccgggggagagggtgtaaatctcgcgccgggccgtacccatatccgcagcaggtctccaaggtgaacagcctctggcatgtt

SEQ ID NO: 50569 - DNA, 120 bp, Homo sapiens
  misc_feature: 678 for SV(W|O) and 28S
cgccgccgccctccgacgcacaccacacgcgcgcgcgcgcgcgccgcccccgccgctcccgtccactctcgactgccggcgacggccgggtatgggcccgacgctccagcgccatccatt

SEQ ID NO: 50570 - DNA, 120 bp, Homo sapiens
  misc_feature: 677 for SV(W|O) and 28S
cagctactagatggttcgattagtctttcgcccctatacccaggtcggacgaccgatttgcacgtcaggaccgctacggacctccaccagagtttcctctggcttcgccctgcccaggca

SEQ ID NO: 50571 - DNA, 120 bp, Homo sapiens
  misc_feature: 677 for SV(W|O) and 28S
tgagctctcgctggcccttgaaaatccgggggagagggtgtaaatctcgcgccgggccgtacccatatccgcagcaggtctccaaggtgaacagcctctggcatgttggaacaatgtagg

SEQ ID NO: 50572 - DNA, 120 bp, Homo sapiens
  misc_feature: 677 for SV(W|O) and 28S
tctacacctctcatgtctcttcaccgtgccagactagagtcaagctcaacagggtcttctttccccgctgattccgccaagcccgttcccttggctgtggtttcgctggatagtaggtag

SEQ ID NO: 50573 - DNA, 120 bp, Homo sapiens
  misc_feature: 677 for SV(W|O) and 28S
ctagccctgaaaatggatggcgctggagcgtcgggcccatacccggccgtcgccggcagtcgagagtggacgggagcggcgggggcggcgcgcgcgcgcgcgcgtgtggtgtgcgtcgga

SEQ ID NO: 50574 - DNA, 120 bp, Homo sapiens
  misc_feature: 677 for SV(W|O) and 28S
cgcaccaccggcccgtctcgcccgccgcgccggggaggtggagcacgagcgcacgtgttaggacccgaaagatggtgaactatgcctgggcagggcgaagccagaggaaactctggtgga

SEQ ID NO: 50575 - DNA, 120 bp, Homo sapiens
  misc_feature: 677 for SV(W|O) and 28S
gtccgcgcagtccgcccggaggattcaacccggcggcgggtccggccgtgtcggcggcccggcggatctttcccgccccccgttcctcccgacccctccacccgccctcccttcccccgc

SEQ ID NO: 50576 - DNA, 120 bp, Homo sapiens
  misc_feature: 677 for SV(W|O) and 28S
ggtccgcgcagtccgcccggaggattcaacccggcggcgggtccggccgtgtcggcggcccggcggatctttcccgccccccgttcctcccgacccctccacccgccctcccttcccccg

SEQ ID NO: 50577 - DNA, 120 bp, Homo sapiens
  misc_feature: 677 for SV(W|O) and 28S
gcgggcgagacgggccggtggtgcgccctcggcggactggagaggcctcgggatcccacctcggccggcgagcgcgccggccttcaccttcattgcgccacggcggctttcgtgcgagcc

SEQ ID NO: 50578 - DNA, 120 bp, Homo sapiens
  misc_feature: 677 for SV(W|O) and 28S
ctcccacttattctacacctctcatgtctcttcaccgtgccagactagagtcaagctcaacagggtcttctttccccgctgattccgccaagcccgttcccttggctgtggtttcgctgg

SEQ ID NO: 50579 - DNA, 120 bp, Homo sapiens
  misc_feature: 677 for SV(W|O) and 28S
ccgcgcagtccgcccggaggattcaacccggcggcgggtccggccgtgtcggcggcccggcggatctttcccgccccccgttcctcccgacccctccacccgccctcccttcccccgccg

SEQ ID NO: 50580 - DNA, 120 bp, Homo sapiens
  misc_feature: 677 for SV(W|O) and 28S
cccgtctcgcccgccgcgccggggaggtggagcacgagcgcacgtgttaggacccgaaagatggtgaactatgcctgggcagggcgaagccagaggaaactctggtggaggtccgtagcg

SEQ ID NO: 50581 - DNA, 120 bp, Homo sapiens
  misc_feature: 677 for SV(W|O) and 28S
ccgccgccgccctccgacgcacaccacacgcgcgcgcgcgcgcgccgcccccgccgctcccgtccactctcgactgccggcgacggccgggtatgggcccgacgctccagcgccatccat

SEQ ID NO: 50582 - DNA, 120 bp, Homo sapiens
  misc_feature: 677 for SV(W|O) and 28S
acttattctacacctctcatgtctcttcaccgtgccagactagagtcaagctcaacagggtcttctttccccgctgattccgccaagcccgttcccttggctgtggtttcgctggatagt

SEQ ID NO: 50583 - DNA, 120 bp, Homo sapiens
  misc_feature: 676 for SV(W|O) and 28S
tctagtagctggttccctccgaagtttccctcaggatagctggcgctctcgcagacccgacgcacccccgccacgcagttttatccggtaaagcgaatgattagaggtcttggggccgaa

SEQ ID NO: 50584 - DNA, 120 bp, Homo sapiens
  misc_feature: 676 for SV(W|O) and 28S
tggaggggtcgggaggaacggggggcgggaaagatccgccgggccgccgacacggccggacccgccgccgggttgaatcctccgggcggactgcgcggaccccacccgtttacctcttaa

SEQ ID NO: 50585 - DNA, 120 bp, Homo sapiens
  misc_feature: 676 for SV(W|O) and 28S
cgtccggtgagctctcgctggcccttgaaaatccgggggagagggtgtaaatctcgcgccgggccgtacccatatccgcagcaggtctccaaggtgaacagcctctggcatgttggaaca

SEQ ID NO: 50586 - DNA, 120 bp, Homo sapiens
  misc_feature: 676 for SV(W|O) and 28S
tccgcgcggcgcctcgcctcggccggcgcctagcagccgacttagaactggtgcggaccaggggaatccgactgtttaattaaaacaaagcatcgcgaaggcccgcggcgggtgttgacg

SEQ ID NO: 50587 - DNA, 120 bp, Homo sapiens
  misc_feature: 676 for SV(W|O) and 28S
gtggagccgccgcaggtgcagatcttggtggtagtagcaaatattcaaacgagaactttgaaggccgaagtggagaagggttccatgtgaacagcagttgaacatgggtcagtcggtcct

SEQ ID NO: 50588 - DNA, 120 bp, Homo sapiens
  misc_feature: 676 for SV(W|O) and 28S
ccatctagtagctggttccctccgaagtttccctcaggatagctggcgctctcgcagacccgacgcacccccgccacgcagttttatccggtaaagcgaatgattagaggtcttggggcc

SEQ ID NO: 50589 - DNA, 120 bp, Homo sapiens
  misc_feature: 676 for SV(W|O) and 28S
gccgcggttccgcgcggcgcctcgcctcggccggcgcctagcagccgacttagaactggtgcggaccaggggaatccgactgtttaattaaaacaaagcatcgcgaaggcccgcggcggg

SEQ ID NO: 50590 - DNA, 120 bp, Homo sapiens
  misc_feature: 676 for SV(W|O) and 28S
aggggtcgggaggaacggggggcgggaaagatccgccgggccgccgacacggccggacccgccgccgggttgaatcctccgggcggactgcgcggaccccacccgtttacctcttaacgg

SEQ ID NO: 50591 - DNA, 120 bp, Homo sapiens
  misc_feature: 675 for SV(W|O) and 28S
gaaagcgtcgcggttccggcggcgtccggtgagctctcgctggcccttgaaaatccgggggagagggtgtaaatctcgcgccgggccgtacccatatccgcagcaggtctccaaggtgaa

SEQ ID NO: 50592 - DNA, 120 bp, Homo sapiens
  misc_feature: 675 for SV(W|O) and 28S
aagcgtcgcggttccggcggcgtccggtgagctctcgctggcccttgaaaatccgggggagagggtgtaaatctcgcgccgggccgtacccatatccgcagcaggtctccaaggtgaaca

SEQ ID NO: 50593 - DNA, 120 bp, Homo sapiens
  misc_feature: 675 for SV(W|O) and 28S
agctctcgctggcccttgaaaatccgggggagagggtgtaaatctcgcgccgggccgtacccatatccgcagcaggtctccaaggtgaacagcctctggcatgttggaacaatgtaggta

SEQ ID NO: 50594 - DNA, 120 bp, Homo sapiens
  misc_feature: 675 for SV(W|O) and 28S
gtgagccttgaagcctagggcgcgggcccgggtggagccgccgcaggtgcagatcttggtggtagtagcaaatattcaaacgagaactttgaaggccgaagtggagaagggttccatgtg

SEQ ID NO: 50595 - DNA, 120 bp, Homo sapiens
  misc_feature: 675 for SV(W|O) and 28S
cgggcgagacgggccggtggtgcgccctcggcggactggagaggcctcgggatcccacctcggccggcgagcgcgccggccttcaccttcattgcgccacggcggctttcgtgcgagccc

SEQ ID NO: 50596 - DNA, 120 bp, Homo sapiens
  misc_feature: 675 for SV(W|O) and 28S
ggaccccacccgtttacctcttaacggtttcacgccctcttgaactctctcttcaaagttcttttcaactttcccttacggtacttgttgactatcggtctcgtgccggtatttagcctt

SEQ ID NO: 50597 - DNA, 120 bp, Homo sapiens
  misc_feature: 675 for SV(W|O) and 28S
agaccccagaaaaggtgttggttgatatagacagcaggacggtggccatggaagtcggaatccgctaaggagtgtgtaacaactcacctgccgaatcaactagccctgaaaatggatggc

SEQ ID NO: 50598 - DNA, 120 bp, Homo sapiens
  misc_feature: 675 for SV(W|O) and 28S
agaagcgagagcccctcggggctcgcccccccgcctcaccgggtcagtgaaaaaacgatcagagtagtggtatttcaccggcggcccgcagggccggcggaccccgccccgggcccctcg

SEQ ID NO: 50599 - DNA, 120 bp, Homo sapiens
  misc_feature: 675 for SV(W|O) and 28S
cgacccagcccttagagccaatccttatcccgaagttacggatccggcttgccgacttcccttacctacattgttccaacatgccagaggctgttcaccttggagacctgctgcggatat

SEQ ID NO: 50600 - DNA, 120 bp, Homo sapiens
  misc_feature: 675 for SV(W|O) and 28S
cccttagagccaatccttatcccgaagttacggatccggcttgccgacttcccttacctacattgttccaacatgccagaggctgttcaccttggagacctgctgcggatatgggtacgg

SEQ ID NO: 50601 - DNA, 120 bp, Homo sapiens
  misc_feature: 675 for SV(W|O) and 28S
ccgggtggagccgccgcaggtgcagatcttggtggtagtagcaaatattcaaacgagaactttgaaggccgaagtggagaagggttccatgtgaacagcagttgaacatgggtcagtcgg

SEQ ID NO: 50602 - DNA, 120 bp, Homo sapiens
  misc_feature: 675 for SV(W|O) and 28S
accgacccagcccttagagccaatccttatcccgaagttacggatccggcttgccgacttcccttacctacattgttccaacatgccagaggctgttcaccttggagacctgctgcggat

SEQ ID NO: 50603 - DNA, 120 bp, Homo sapiens
  misc_feature: 674 for SV(W|O) and 28S
tggcccttgaaaatccgggggagagggtgtaaatctcgcgccgggccgtacccatatccgcagcaggtctccaaggtgaacagcctctggcatgttggaacaatgtaggtaagggaagtc

SEQ ID NO: 50604 - DNA, 120 bp, Homo sapiens
  misc_feature: 674 for SV(W|O) and 28S
acagtgggaatctcgttcatccattcatgcgcgtcactaattagatgacgaggcatttggctaccttaagagagtcatagttactcccgccgtttacccgcgcttcattgaatttcttca

SEQ ID NO: 50605 - DNA, 120 bp, Homo sapiens
  misc_feature: 674 for SV(W|O) and 28S
ggaccgctacggacctccaccagagtttcctctggcttcgccctgcccaggcatagttcaccatctttcgggtcctaacacgtgcgctcgtgctccacctccccggcgcggcgggcgaga

SEQ ID NO: 50606 - DNA, 120 bp, Homo sapiens
  misc_feature: 674 for SV(W|O) and 28S
cgccccagcccgaccgacccagcccttagagccaatccttatcccgaagttacggatccggcttgccgacttcccttacctacattgttccaacatgccagaggctgttcaccttggaga

SEQ ID NO: 50607 - DNA, 120 bp, Homo sapiens
  misc_feature: 674 for SV(W|O) and 28S
cacctctcatgtctcttcaccgtgccagactagagtcaagctcaacagggtcttctttccccgctgattccgccaagcccgttcccttggctgtggtttcgctggatagtaggtagggac

SEQ ID NO: 50608 - DNA, 120 bp, Homo sapiens
  misc_feature: 674 for SV(W|O) and 28S
gtcaggaccgctacggacctccaccagagtttcctctggcttcgccctgcccaggcatagttcaccatctttcgggtcctaacacgtgcgctcgtgctccacctccccggcgcggcgggc

SEQ ID NO: 50609 - DNA, 120 bp, Homo sapiens
  misc_feature: 674 for SV(W|O) and 28S
ggtggagccgccgcaggtgcagatcttggtggtagtagcaaatattcaaacgagaactttgaaggccgaagtggagaagggttccatgtgaacagcagttgaacatgggtcagtcggtcc

SEQ ID NO: 50610 - DNA, 120 bp, Homo sapiens
  misc_feature: 674 for SV(W|O) and 28S
ggcgagacgggccggtggtgcgccctcggcggactggagaggcctcgggatcccacctcggccggcgagcgcgccggccttcaccttcattgcgccacggcggctttcgtgcgagccccc

SEQ ID NO: 50611 - DNA, 120 bp, Homo sapiens
  misc_feature: 674 for SV(W|O) and 28S
cgccgccgccgccctccgacgcacaccacacgcgcgcgcgcgcgcgccgcccccgccgctcccgtccactctcgactgccggcgacggccgggtatgggcccgacgctccagcgccatcc

SEQ ID NO: 50612 - DNA, 120 bp, Homo sapiens
  misc_feature: 674 for SV(W|O) and 28S
accccagaaaaggtgttggttgatatagacagcaggacggtggccatggaagtcggaatccgctaaggagtgtgtaacaactcacctgccgaatcaactagccctgaaaatggatggcgc

SEQ ID NO: 50613 - DNA, 120 bp, Homo sapiens
  misc_feature: 674 for SV(W|O) and 28S
aggaccgctacggacctccaccagagtttcctctggcttcgccctgcccaggcatagttcaccatctttcgggtcctaacacgtgcgctcgtgctccacctccccggcgcggcgggcgag

SEQ ID NO: 50614 - DNA, 120 bp, Homo sapiens
  misc_feature: 674 for SV(W|O) and 28S
ctacacctctcatgtctcttcaccgtgccagactagagtcaagctcaacagggtcttctttccccgctgattccgccaagcccgttcccttggctgtggtttcgctggatagtaggtagg

SEQ ID NO: 50615 - DNA, 120 bp, Homo sapiens
  misc_feature: 674 for SV(W|O) and 28S
cctcccacttattctacacctctcatgtctcttcaccgtgccagactagagtcaagctcaacagggtcttctttccccgctgattccgccaagcccgttcccttggctgtggtttcgctg

SEQ ID NO: 50616 - DNA, 120 bp, Homo sapiens
  misc_feature: 673 for SV(W|O) and 28S
tgttcaactgctgttcacatggaacccttctccacttcggccttcaaagttctcgtttgaatatttgctactaccaccaagatctgcacctgcggcggctccacccgggcccgcgcccta

SEQ ID NO: 50617 - DNA, 120 bp, Homo sapiens
  misc_feature: 673 for SV(W|O) and 28S
tctcggggccacgcgcgcgtcccccgaagagggggacggcggagcgagcgcacggggtcggcggcgacgtcggctacccacccgacccgtcttgaaacacggaccaaggagtctaacacg

SEQ ID NO: 50618 - DNA, 120 bp, Homo sapiens
  misc_feature: 673 for SV(W|O) and 28S
atctagtagctggttccctccgaagtttccctcaggatagctggcgctctcgcagacccgacgcacccccgccacgcagttttatccggtaaagcgaatgattagaggtcttggggccga

SEQ ID NO: 50619 - DNA, 120 bp, Homo sapiens
  misc_feature: 673 for SV(W|O) and 28S
taacggtttcacgccctcttgaactctctcttcaaagttcttttcaactttcccttacggtacttgttgactatcggtctcgtgccggtatttagccttagatggagtttaccacccgct

SEQ ID NO: 50620 - DNA, 120 bp, Homo sapiens
  misc_feature: 673 for SV(W|O) and 28S
gccccagcccgaccgacccagcccttagagccaatccttatcccgaagttacggatccggcttgccgacttcccttacctacattgttccaacatgccagaggctgttcaccttggagac

SEQ ID NO: 50621 - DNA, 120 bp, Homo sapiens
  misc_feature: 673 for SV(W|O) and 28S
ggtgagccttgaagcctagggcgcgggcccgggtggagccgccgcaggtgcagatcttggtggtagtagcaaatattcaaacgagaactttgaaggccgaagtggagaagggttccatgt

SEQ ID NO: 50622 - DNA, 120 bp, Homo sapiens
  misc_feature: 673 for SV(W|O) and 28S
ggtcgggaggaacggggggcgggaaagatccgccgggccgccgacacggccggacccgccgccgggttgaatcctccgggcggactgcgcggaccccacccgtttacctcttaacggttt

SEQ ID NO: 50623 - DNA, 120 bp, Homo sapiens
  misc_feature: 673 for SV(W|O) and 28S
ggtccgccggccctgcgggccgccggtgaaataccactactctgatcgttttttcactgacccggtgaggcgggggggcgagccccgaggggctctcgcttctggcgccaagcgcccggc

SEQ ID NO: 50624 - DNA, 120 bp, Homo sapiens
  misc_feature: 673 for SV(W|O) and 28S
ggggtcgggaggaacggggggcgggaaagatccgccgggccgccgacacggccggacccgccgccgggttgaatcctccgggcggactgcgcggaccccacccgtttacctcttaacggt

SEQ ID NO: 50625 - DNA, 120 bp, Homo sapiens
  misc_feature: 673 for SV(W|O) and 28S
gctggttccctccgaagtttccctcaggatagctggcgctctcgcagacccgacgcacccccgccacgcagttttatccggtaaagcgaatgattagaggtcttggggccgaaacgatct

SEQ ID NO: 50626 - DNA, 120 bp, Homo sapiens
  misc_feature: 673 for SV(W|O) and 28S
atcccgaggcctctccagtccgccgagggcgcaccaccggcccgtctcgcccgccgcgccggggaggtggagcacgagcgcacgtgttaggacccgaaagatggtgaactatgcctgggc

SEQ ID NO: 50627 - DNA, 120 bp, Homo sapiens
  misc_feature: 673 for SV(W|O) and 28S
agctggttccctccgaagtttccctcaggatagctggcgctctcgcagacccgacgcacccccgccacgcagttttatccggtaaagcgaatgattagaggtcttggggccgaaacgatc

SEQ ID NO: 50628 - DNA, 120 bp, Homo sapiens
  misc_feature: 673 for SV(W|O) and 28S
gatcccgaggcctctccagtccgccgagggcgcaccaccggcccgtctcgcccgccgcgccggggaggtggagcacgagcgcacgtgttaggacccgaaagatggtgaactatgcctggg

SEQ ID NO: 50629 - DNA, 120 bp, Homo sapiens
  misc_feature: 673 for SV(W|O) and 28S
ccccggggccgcggttccgcgcggcgcctcgcctcggccggcgcctagcagccgacttagaactggtgcggaccaggggaatccgactgtttaattaaaacaaagcatcgcgaaggcccg

SEQ ID NO: 50630 - DNA, 120 bp, Homo sapiens
  misc_feature: 673 for SV(W|O) and 28S
cctgggcagggcgaagccagaggaaactctggtggaggtccgtagcggtcctgacgtgcaaatcggtcgtccgacctgggtataggggcgaaagactaatcgaaccatctagtagctggt

SEQ ID NO: 50631 - DNA, 120 bp, Homo sapiens
  misc_feature: 672 for SV(W|O) and 28S
cgccgctcccgtccactctcgactgccggcgacggccgggtatgggcccgacgctccagcgccatccattttcagggctagttgattcggcaggtgagttgttacacactccttagcgga

SEQ ID NO: 50632 - DNA, 120 bp, Homo sapiens
  misc_feature: 672 for SV(W|O) and 28S
aaagcgtcgcggttccggcggcgtccggtgagctctcgctggcccttgaaaatccgggggagagggtgtaaatctcgcgccgggccgtacccatatccgcagcaggtctccaaggtgaac

SEQ ID NO: 50633 - DNA, 120 bp, Homo sapiens
  misc_feature: 672 for SV(W|O) and 28S
gtggtaaactccatctaaggctaaataccggcacgagaccgatagtcaacaagtaccgtaagggaaagttgaaaagaactttgaagagagagttcaagagggcgtgaaaccgttaagagg

SEQ ID NO: 50634 - DNA, 120 bp, Homo sapiens
  misc_feature: 672 for SV(W|O) and 28S
cagtgggaatctcgttcatccattcatgcgcgtcactaattagatgacgaggcatttggctaccttaagagagtcatagttactcccgccgtttacccgcgcttcattgaatttcttcac

SEQ ID NO: 50635 - DNA, 120 bp, Homo sapiens
  misc_feature: 672 for SV(W|O) and 28S
ccccagcccgaccgacccagcccttagagccaatccttatcccgaagttacggatccggcttgccgacttcccttacctacattgttccaacatgccagaggctgttcaccttggagacc

SEQ ID NO: 50636 - DNA, 120 bp, Homo sapiens
  misc_feature: 672 for SV(W|O) and 28S
ccgggggagagggtgtaaatctcgcgccgggccgtacccatatccgcagcaggtctccaaggtgaacagcctctggcatgttggaacaatgtaggtaagggaagtcggcaagccggatcc

SEQ ID NO: 50637 - DNA, 120 bp, Homo sapiens
  misc_feature: 672 for SV(W|O) and 28S
ccgcgcggcgcctcgcctcggccggcgcctagcagccgacttagaactggtgcggaccaggggaatccgactgtttaattaaaacaaagcatcgcgaaggcccgcggcgggtgttgacgc

SEQ ID NO: 50638 - DNA, 120 bp, Homo sapiens
  misc_feature: 672 for SV(W|O) and 28S
ctggcccttgaaaatccgggggagagggtgtaaatctcgcgccgggccgtacccatatccgcagcaggtctccaaggtgaacagcctctggcatgttggaacaatgtaggtaagggaagt

SEQ ID NO: 50639 - DNA, 120 bp, Homo sapiens
  misc_feature: 671 for SV(W|O) and 28S
ttccgcgcggcgcctcgcctcggccggcgcctagcagccgacttagaactggtgcggaccaggggaatccgactgtttaattaaaacaaagcatcgcgaaggcccgcggcgggtgttgac

SEQ ID NO: 50640 - DNA, 120 bp, Homo sapiens
  misc_feature: 671 for SV(W|O) and 28S
ccgggtcttcccggagtcgggttgcttgggaatgcagcccaaagcgggtggtaaactccatctaaggctaaataccggcacgagaccgatagtcaacaagtaccgtaagggaaagttgaa

SEQ ID NO: 50641 - DNA, 120 bp, Homo sapiens
  misc_feature: 671 for SV(W|O) and 28S
tggttccctccgaagtttccctcaggatagctggcgctctcgcagacccgacgcacccccgccacgcagttttatccggtaaagcgaatgattagaggtcttggggccgaaacgatctca

SEQ ID NO: 50642 - DNA, 120 bp, Homo sapiens
  misc_feature: 671 for SV(W|O) and 28S
cccgggtcttcccggagtcgggttgcttgggaatgcagcccaaagcgggtggtaaactccatctaaggctaaataccggcacgagaccgatagtcaacaagtaccgtaagggaaagttga

SEQ ID NO: 50643 - DNA, 120 bp, Homo sapiens
  misc_feature: 671 for SV(W|O) and 28S
gcccttagagccaatccttatcccgaagttacggatccggcttgccgacttcccttacctacattgttccaacatgccagaggctgttcaccttggagacctgctgcggatatgggtacg

SEQ ID NO: 50644 - DNA, 120 bp, Homo sapiens
  misc_feature: 671 for SV(W|O) and 28S
gaggggtcgggaggaacggggggcgggaaagatccgccgggccgccgacacggccggacccgccgccgggttgaatcctccgggcggactgcgcggaccccacccgtttacctcttaacg

SEQ ID NO: 50645 - DNA, 120 bp, Homo sapiens
  misc_feature: 671 for SV(W|O) and 28S
acctacattgttccaacatgccagaggctgttcaccttggagacctgctgcggatatgggtacggcccggcgcgagatttacaccctctcccccggattttcaagggccagcgagagctc

SEQ ID NO: 50646 - DNA, 120 bp, Homo sapiens
  misc_feature: 671 for SV(W|O) and 28S
gaccccagaaaaggtgttggttgatatagacagcaggacggtggccatggaagtcggaatccgctaaggagtgtgtaacaactcacctgccgaatcaactagccctgaaaatggatggcg

SEQ ID NO: 50647 - DNA, 120 bp, Homo sapiens
  misc_feature: 670 for SV(W|O) and 28S
tattctacacctctcatgtctcttcaccgtgccagactagagtcaagctcaacagggtcttctttccccgctgattccgccaagcccgttcccttggctgtggtttcgctggatagtagg

SEQ ID NO: 50648 - DNA, 120 bp, Homo sapiens
  misc_feature: 670 for SV(W|O) and 28S
ccctccgaagtttccctcaggatagctggcgctctcgcagacccgacgcacccccgccacgcagttttatccggtaaagcgaatgattagaggtcttggggccgaaacgatctcaaccta

SEQ ID NO: 50649 - DNA, 120 bp, Homo sapiens
  misc_feature: 670 for SV(W|O) and 28S
gtagggacagtgggaatctcgttcatccattcatgcgcgtcactaattagatgacgaggcatttggctaccttaagagagtcatagttactcccgccgtttacccgcgcttcattgaatt

SEQ ID NO: 50650 - DNA, 120 bp, Homo sapiens
  misc_feature: 670 for SV(W|O) and 28S
gggaagagcccagcgccgaatccccgccccgcggcggggcgcgggacatgtggcgtacggaagacccgctccccggcgccgctcgtggggggcccaagtccttctgatcgaggcccagcc

SEQ ID NO: 50651 - DNA, 120 bp, Homo sapiens
  misc_feature: 670 for SV(W|O) and 28S
cccatgttcaactgctgttcacatggaacccttctccacttcggccttcaaagttctcgtttgaatatttgctactaccaccaagatctgcacctgcggcggctccacccgggcccgcgc

SEQ ID NO: 50652 - DNA, 120 bp, Homo sapiens
  misc_feature: 670 for SV(W|O) and 28S
gccgccgccctccgacgcacaccacacgcgcgcgcgcgcgcgccgcccccgccgctcccgtccactctcgactgccggcgacggccgggtatgggcccgacgctccagcgccatccattt

SEQ ID NO: 50653 - DNA, 120 bp, Homo sapiens
  misc_feature: 670 for SV(W|O) and 28S
agggaaagttgaaaagaactttgaagagagagttcaagagggcgtgaaaccgttaagaggtaaacgggtggggtccgcgcagtccgcccggaggattcaacccggcggcgggtccggccg

SEQ ID NO: 50654 - DNA, 120 bp, Homo sapiens
  misc_feature: 670 for SV(W|O) and 28S
cgaccgacccagcccttagagccaatccttatcccgaagttacggatccggcttgccgacttcccttacctacattgttccaacatgccagaggctgttcaccttggagacctgctgcgg

SEQ ID NO: 50655 - DNA, 120 bp, Homo sapiens
  misc_feature: 669 for SV(W|O) and 28S
ggttccctccgaagtttccctcaggatagctggcgctctcgcagacccgacgcacccccgccacgcagttttatccggtaaagcgaatgattagaggtcttggggccgaaacgatctcaa

SEQ ID NO: 50656 - DNA, 120 bp, Homo sapiens
  misc_feature: 669 for SV(W|O) and 28S
ttgaagcctagggcgcgggcccgggtggagccgccgcaggtgcagatcttggtggtagtagcaaatattcaaacgagaactttgaaggccgaagtggagaagggttccatgtgaacagca

SEQ ID NO: 50657 - DNA, 120 bp, Homo sapiens
  misc_feature: 669 for SV(W|O) and 28S
ttattctacacctctcatgtctcttcaccgtgccagactagagtcaagctcaacagggtcttctttccccgctgattccgccaagcccgttcccttggctgtggtttcgctggatagtag

SEQ ID NO: 50658 - DNA, 120 bp, Homo sapiens
  misc_feature: 669 for SV(W|O) and 28S
tgaagcctagggcgcgggcccgggtggagccgccgcaggtgcagatcttggtggtagtagcaaatattcaaacgagaactttgaaggccgaagtggagaagggttccatgtgaacagcag

SEQ ID NO: 50659 - DNA, 120 bp, Homo sapiens
  misc_feature: 669 for SV(W|O) and 28S
tcgctggcccttgaaaatccgggggagagggtgtaaatctcgcgccgggccgtacccatatccgcagcaggtctccaaggtgaacagcctctggcatgttggaacaatgtaggtaaggga

SEQ ID NO: 50660 - DNA, 120 bp, Homo sapiens
  misc_feature: 669 for SV(W|O) and 28S
tagggacagtgggaatctcgttcatccattcatgcgcgtcactaattagatgacgaggcatttggctaccttaagagagtcatagttactcccgccgtttacccgcgcttcattgaattt

SEQ ID NO: 50661 - DNA, 120 bp, Homo sapiens
  misc_feature: 669 for SV(W|O) and 28S
ggtaaactccatctaaggctaaataccggcacgagaccgatagtcaacaagtaccgtaagggaaagttgaaaagaactttgaagagagagttcaagagggcgtgaaaccgttaagaggta

SEQ ID NO: 50662 - DNA, 120 bp, Homo sapiens
  misc_feature: 669 for SV(W|O) and 28S
gcgtccggtgagctctcgctggcccttgaaaatccgggggagagggtgtaaatctcgcgccgggccgtacccatatccgcagcaggtctccaaggtgaacagcctctggcatgttggaac

SEQ ID NO: 50663 - DNA, 120 bp, Homo sapiens
  misc_feature: 669 for SV(W|O) and 28S
gtctcgcccgccgcgccggggaggtggagcacgagcgcacgtgttaggacccgaaagatggtgaactatgcctgggcagggcgaagccagaggaaactctggtggaggtccgtagcggtc

SEQ ID NO: 50664 - DNA, 120 bp, Homo sapiens
  misc_feature: 669 for SV(W|O) and 28S
gggtccgccggccctgcgggccgccggtgaaataccactactctgatcgttttttcactgacccggtgaggcgggggggcgagccccgaggggctctcgcttctggcgccaagcgcccgg

SEQ ID NO: 50665 - DNA, 120 bp, Homo sapiens
  misc_feature: 669 for SV(W|O) and 28S
gggtccgcccccggggccgcggttccgcgcggcgcctcgcctcggccggcgcctagcagccgacttagaactggtgcggaccaggggaatccgactgtttaattaaaacaaagcatcgcg

SEQ ID NO: 50666 - DNA, 120 bp, Homo sapiens
  misc_feature: 669 for SV(W|O) and 28S
agggaagagcccagcgccgaatccccgccccgcggcggggcgcgggacatgtggcgtacggaagacccgctccccggcgccgctcgtggggggcccaagtccttctgatcgaggcccagc

SEQ ID NO: 50667 - DNA, 120 bp, Homo sapiens
  misc_feature: 669 for SV(W|O) and 28S
ccgaccgacccagcccttagagccaatccttatcccgaagttacggatccggcttgccgacttcccttacctacattgttccaacatgccagaggctgttcaccttggagacctgctgcg

SEQ ID NO: 50668 - DNA, 120 bp, Homo sapiens
  misc_feature: 669 for SV(W|O) and 28S
cccagcccgaccgacccagcccttagagccaatccttatcccgaagttacggatccggcttgccgacttcccttacctacattgttccaacatgccagaggctgttcaccttggagacct

SEQ ID NO: 50669 - DNA, 120 bp, Homo sapiens
  misc_feature: 669 for SV(W|O) and 28S
agcccgaccgacccagcccttagagccaatccttatcccgaagttacggatccggcttgccgacttcccttacctacattgttccaacatgccagaggctgttcaccttggagacctgct

SEQ ID NO: 50670 - DNA, 120 bp, Homo sapiens
  misc_feature: 668 for SV(W|O) and 28S
ttctacacctctcatgtctcttcaccgtgccagactagagtcaagctcaacagggtcttctttccccgctgattccgccaagcccgttcccttggctgtggtttcgctggatagtaggta

SEQ ID NO: 50671 - DNA, 120 bp, Homo sapiens
  misc_feature: 668 for SV(W|O) and 28S
ttaacggtttcacgccctcttgaactctctcttcaaagttcttttcaactttcccttacggtacttgttgactatcggtctcgtgccggtatttagccttagatggagtttaccacccgc

SEQ ID NO: 50672 - DNA, 120 bp, Homo sapiens
  misc_feature: 668 for SV(W|O) and 28S
tcccgaggcctctccagtccgccgagggcgcaccaccggcccgtctcgcccgccgcgccggggaggtggagcacgagcgcacgtgttaggacccgaaagatggtgaactatgcctgggca

SEQ ID NO: 50673 - DNA, 120 bp, Homo sapiens
  misc_feature: 668 for SV(W|O) and 28S
gtagctggttccctccgaagtttccctcaggatagctggcgctctcgcagacccgacgcacccccgccacgcagttttatccggtaaagcgaatgattagaggtcttggggccgaaacga

SEQ ID NO: 50674 - DNA, 120 bp, Homo sapiens
  misc_feature: 668 for SV(W|O) and 28S
tcaggaccgctacggacctccaccagagtttcctctggcttcgccctgcccaggcatagttcaccatctttcgggtcctaacacgtgcgctcgtgctccacctccccggcgcggcgggcg

SEQ ID NO: 50675 - DNA, 120 bp, Homo sapiens
  misc_feature: 668 for SV(W|O) and 28S
cttattctacacctctcatgtctcttcaccgtgccagactagagtcaagctcaacagggtcttctttccccgctgattccgccaagcccgttcccttggctgtggtttcgctggatagta

SEQ ID NO: 50676 - DNA, 120 bp, Homo sapiens
  misc_feature: 668 for SV(W|O) and 28S
gtccgccggccctgcgggccgccggtgaaataccactactctgatcgttttttcactgacccggtgaggcgggggggcgagccccgaggggctctcgcttctggcgccaagcgcccggcc

SEQ ID NO: 50677 - DNA, 120 bp, Homo sapiens
  misc_feature: 668 for SV(W|O) and 28S
ccatgttcaactgctgttcacatggaacccttctccacttcggccttcaaagttctcgtttgaatatttgctactaccaccaagatctgcacctgcggcggctccacccgggcccgcgcc

SEQ ID NO: 50678 - DNA, 120 bp, Homo sapiens
  misc_feature: 668 for SV(W|O) and 28S
gcccccggggccgcggttccgcgcggcgcctcgcctcggccggcgcctagcagccgacttagaactggtgcggaccaggggaatccgactgtttaattaaaacaaagcatcgcgaaggcc

SEQ ID NO: 50679 - DNA, 120 bp, Homo sapiens
  misc_feature: 668 for SV(W|O) and 28S
ggacagtgggaatctcgttcatccattcatgcgcgtcactaattagatgacgaggcatttggctaccttaagagagtcatagttactcccgccgtttacccgcgcttcattgaatttctt

SEQ ID NO: 50680 - DNA, 120 bp, Homo sapiens
  misc_feature: 668 for SV(W|O) and 28S
ctggttccctccgaagtttccctcaggatagctggcgctctcgcagacccgacgcacccccgccacgcagttttatccggtaaagcgaatgattagaggtcttggggccgaaacgatctc

SEQ ID NO: 50681 - DNA, 120 bp, Homo sapiens
  misc_feature: 668 for SV(W|O) and 28S
ccggggccgcggttccgcgcggcgcctcgcctcggccggcgcctagcagccgacttagaactggtgcggaccaggggaatccgactgtttaattaaaacaaagcatcgcgaaggcccgcg

SEQ ID NO: 50682 - DNA, 120 bp, Homo sapiens
  misc_feature: 668 for SV(W|O) and 28S
ccgtctcgcccgccgcgccggggaggtggagcacgagcgcacgtgttaggacccgaaagatggtgaactatgcctgggcagggcgaagccagaggaaactctggtggaggtccgtagcgg

SEQ ID NO: 50683 - DNA, 120 bp, Homo sapiens
  misc_feature: 667 for SV(W|O) and 28S
ttcgcgccccagcccgaccgacccagcccttagagccaatccttatcccgaagttacggatccggcttgccgacttcccttacctacattgttccaacatgccagaggctgttcaccttg

SEQ ID NO: 50684 - DNA, 120 bp, Homo sapiens
  misc_feature: 667 for SV(W|O) and 28S
ttccctccgaagtttccctcaggatagctggcgctctcgcagacccgacgcacccccgccacgcagttttatccggtaaagcgaatgattagaggtcttggggccgaaacgatctcaacc

SEQ ID NO: 50685 - DNA, 120 bp, Homo sapiens
  misc_feature: 667 for SV(W|O) and 28S
cgcggaccccacccgtttacctcttaacggtttcacgccctcttgaactctctcttcaaagttcttttcaactttcccttacggtacttgttgactatcggtctcgtgccggtatttagc

SEQ ID NO: 50686 - DNA, 120 bp, Homo sapiens
  misc_feature: 667 for SV(W|O) and 28S
cccggggccgcggttccgcgcggcgcctcgcctcggccggcgcctagcagccgacttagaactggtgcggaccaggggaatccgactgtttaattaaaacaaagcatcgcgaaggcccgc

SEQ ID NO: 50687 - DNA, 120 bp, Homo sapiens
  misc_feature: 667 for SV(W|O) and 28S
ctctcgctggcccttgaaaatccgggggagagggtgtaaatctcgcgccgggccgtacccatatccgcagcaggtctccaaggtgaacagcctctggcatgttggaacaatgtaggtaag

SEQ ID NO: 50688 - DNA, 120 bp, Homo sapiens
  misc_feature: 667 for SV(W|O) and 28S
agtagctggttccctccgaagtttccctcaggatagctggcgctctcgcagacccgacgcacccccgccacgcagttttatccggtaaagcgaatgattagaggtcttggggccgaaacg

SEQ ID NO: 50689 - DNA, 120 bp, Homo sapiens
  misc_feature: 667 for SV(W|O) and 28S
acccatgttcaactgctgttcacatggaacccttctccacttcggccttcaaagttctcgtttgaatatttgctactaccaccaagatctgcacctgcggcggctccacccgggcccgcg

SEQ ID NO: 50690 - DNA, 120 bp, Homo sapiens
  misc_feature: 667 for SV(W|O) and 28S
ccagcccgaccgacccagcccttagagccaatccttatcccgaagttacggatccggcttgccgacttcccttacctacattgttccaacatgccagaggctgttcaccttggagacctg

SEQ ID NO: 50691 - DNA, 120 bp, Homo sapiens
  misc_feature: 666 for SV(W|O) and 28S
gctctcgctggcccttgaaaatccgggggagagggtgtaaatctcgcgccgggccgtacccatatccgcagcaggtctccaaggtgaacagcctctggcatgttggaacaatgtaggtaa

SEQ ID NO: 50692 - DNA, 120 bp, Homo sapiens
  misc_feature: 666 for SV(W|O) and 28S
tccctccgaagtttccctcaggatagctggcgctctcgcagacccgacgcacccccgccacgcagttttatccggtaaagcgaatgattagaggtcttggggccgaaacgatctcaacct

SEQ ID NO: 50693 - DNA, 120 bp, Homo sapiens
  misc_feature: 666 for SV(W|O) and 28S
ggttccgcgcggcgcctcgcctcggccggcgcctagcagccgacttagaactggtgcggaccaggggaatccgactgtttaattaaaacaaagcatcgcgaaggcccgcggcgggtgttg

SEQ ID NO: 50694 - DNA, 120 bp, Homo sapiens
  misc_feature: 666 for SV(W|O) and 28S
gggtcgggaggaacggggggcgggaaagatccgccgggccgccgacacggccggacccgccgccgggttgaatcctccgggcggactgcgcggaccccacccgtttacctcttaacggtt

SEQ ID NO: 50695 - DNA, 120 bp, Homo sapiens
  misc_feature: 666 for SV(W|O) and 28S
cccccggggccgcggttccgcgcggcgcctcgcctcggccggcgcctagcagccgacttagaactggtgcggaccaggggaatccgactgtttaattaaaacaaagcatcgcgaaggccc

SEQ ID NO: 50696 - DNA, 120 bp, Homo sapiens
  misc_feature: 666 for SV(W|O) and 28S
gaagcgagagcccctcggggctcgcccccccgcctcaccgggtcagtgaaaaaacgatcagagtagtggtatttcaccggcggcccgcagggccggcggaccccgccccgggcccctcgc

SEQ ID NO: 50697 - DNA, 120 bp, Homo sapiens
  misc_feature: 666 for SV(W|O) and 28S
gcccgaccgacccagcccttagagccaatccttatcccgaagttacggatccggcttgccgacttcccttacctacattgttccaacatgccagaggctgttcaccttggagacctgctg

SEQ ID NO: 50698 - DNA, 120 bp, Homo sapiens
  misc_feature: 666 for SV(W|O) and 28S
cagcccgaccgacccagcccttagagccaatccttatcccgaagttacggatccggcttgccgacttcccttacctacattgttccaacatgccagaggctgttcaccttggagacctgc

SEQ ID NO: 50699 - DNA, 120 bp, Homo sapiens
  misc_feature: 666 for SV(W|O) and 28S
attctacacctctcatgtctcttcaccgtgccagactagagtcaagctcaacagggtcttctttccccgctgattccgccaagcccgttcccttggctgtggtttcgctggatagtaggt

SEQ ID NO: 50700 - DNA, 120 bp, Homo sapiens
  misc_feature: 665 for SV(W|O) and 28S
acctctcatgtctcttcaccgtgccagactagagtcaagctcaacagggtcttctttccccgctgattccgccaagcccgttcccttggctgtggtttcgctggatagtaggtagggaca

SEQ ID NO: 50701 - DNA, 120 bp, Homo sapiens
  misc_feature: 665 for SV(W|O) and 28S
tggtaaactccatctaaggctaaataccggcacgagaccgatagtcaacaagtaccgtaagggaaagttgaaaagaactttgaagagagagttcaagagggcgtgaaaccgttaagaggt

SEQ ID NO: 50702 - DNA, 120 bp, Homo sapiens
  misc_feature: 665 for SV(W|O) and 28S
gtcgggaggaacggggggcgggaaagatccgccgggccgccgacacggccggacccgccgccgggttgaatcctccgggcggactgcgcggaccccacccgtttacctcttaacggtttc

SEQ ID NO: 50703 - DNA, 120 bp, Homo sapiens
  misc_feature: 665 for SV(W|O) and 28S
ggggccgcggttccgcgcggcgcctcgcctcggccggcgcctagcagccgacttagaactggtgcggaccaggggaatccgactgtttaattaaaacaaagcatcgcgaaggcccgcggc

SEQ ID NO: 50704 - DNA, 120 bp, Homo sapiens
  misc_feature: 665 for SV(W|O) and 28S
aagggaaagttgaaaagaactttgaagagagagttcaagagggcgtgaaaccgttaagaggtaaacgggtggggtccgcgcagtccgcccggaggattcaacccggcggcgggtccggcc

SEQ ID NO: 50705 - DNA, 120 bp, Homo sapiens
  misc_feature: 665 for SV(W|O) and 28S
ggcccttgaaaatccgggggagagggtgtaaatctcgcgccgggccgtacccatatccgcagcaggtctccaaggtgaacagcctctggcatgttggaacaatgtaggtaagggaagtcg

SEQ ID NO: 50706 - DNA, 120 bp, Homo sapiens
  misc_feature: 665 for SV(W|O) and 28S
cgcccccggggccgcggttccgcgcggcgcctcgcctcggccggcgcctagcagccgacttagaactggtgcggaccaggggaatccgactgtttaattaaaacaaagcatcgcgaaggc

SEQ ID NO: 50707 - DNA, 120 bp, Homo sapiens
  misc_feature: 665 for SV(W|O) and 28S
agggacagtgggaatctcgttcatccattcatgcgcgtcactaattagatgacgaggcatttggctaccttaagagagtcatagttactcccgccgtttacccgcgcttcattgaatttc

SEQ ID NO: 50708 - DNA, 120 bp, Homo sapiens
  misc_feature: 665 for SV(W|O) and 28S
cgtctcgcccgccgcgccggggaggtggagcacgagcgcacgtgttaggacccgaaagatggtgaactatgcctgggcagggcgaagccagaggaaactctggtggaggtccgtagcggt

SEQ ID NO: 50709 - DNA, 120 bp, Homo sapiens
  misc_feature: 665 for SV(W|O) and 28S
catctagtagctggttccctccgaagtttccctcaggatagctggcgctctcgcagacccgacgcacccccgccacgcagttttatccggtaaagcgaatgattagaggtcttggggccg

SEQ ID NO: 50710 - DNA, 120 bp, Homo sapiens
  misc_feature: 665 for SV(W|O) and 28S
aacggtttcacgccctcttgaactctctcttcaaagttcttttcaactttcccttacggtacttgttgactatcggtctcgtgccggtatttagccttagatggagtttaccacccgctt

SEQ ID NO: 50711 - DNA, 120 bp, Homo sapiens
  misc_feature: 664 for SV(W|O) and 28S
cgacccgctccggggacagtgccaggtggggagtttgactggggcggtacacctgtcaaacggtaacgcaggtgtcctaaggcgagctcagggaggacagaaacctcccgtggagcagaa

SEQ ID NO: 50712 - DNA, 120 bp, Homo sapiens
  misc_feature: 664 for SV(W|O) and 28S
gtccgcccccggggccgcggttccgcgcggcgcctcgcctcggccggcgcctagcagccgacttagaactggtgcggaccaggggaatccgactgtttaattaaaacaaagcatcgcgaa

SEQ ID NO: 50713 - DNA, 120 bp, Homo sapiens
  misc_feature: 664 for SV(W|O) and 28S
tcgggaggaacggggggcgggaaagatccgccgggccgccgacacggccggacccgccgccgggttgaatcctccgggcggactgcgcggaccccacccgtttacctcttaacggtttca

SEQ ID NO: 50714 - DNA, 120 bp, Homo sapiens
  misc_feature: 664 for SV(W|O) and 28S
tctcgctggcccttgaaaatccgggggagagggtgtaaatctcgcgccgggccgtacccatatccgcagcaggtctccaaggtgaacagcctctggcatgttggaacaatgtaggtaagg

SEQ ID NO: 50715 - DNA, 120 bp, Homo sapiens
  misc_feature: 664 for SV(W|O) and 28S
ggtccgcccccggggccgcggttccgcgcggcgcctcgcctcggccggcgcctagcagccgacttagaactggtgcggaccaggggaatccgactgtttaattaaaacaaagcatcgcga

SEQ ID NO: 50716 - DNA, 120 bp, Homo sapiens
  misc_feature: 664 for SV(W|O) and 28S
caggaccgctacggacctccaccagagtttcctctggcttcgccctgcccaggcatagttcaccatctttcgggtcctaacacgtgcgctcgtgctccacctccccggcgcggcgggcga

SEQ ID NO: 50717 - DNA, 120 bp, Homo sapiens
  misc_feature: 664 for SV(W|O) and 28S
tcccacttattctacacctctcatgtctcttcaccgtgccagactagagtcaagctcaacagggtcttctttccccgctgattccgccaagcccgttcccttggctgtggtttcgctgga

SEQ ID NO: 50718 - DNA, 120 bp, Homo sapiens
  misc_feature: 664 for SV(W|O) and 28S
tagctggttccctccgaagtttccctcaggatagctggcgctctcgcagacccgacgcacccccgccacgcagttttatccggtaaagcgaatgattagaggtcttggggccgaaacgat

SEQ ID NO: 50719 - DNA, 120 bp, Homo sapiens
  misc_feature: 664 for SV(W|O) and 28S
ggcctcccacttattctacacctctcatgtctcttcaccgtgccagactagagtcaagctcaacagggtcttctttccccgctgattccgccaagcccgttcccttggctgtggtttcgc

SEQ ID NO: 50720 - DNA, 120 bp, Homo sapiens
  misc_feature: 664 for SV(W|O) and 28S
ctcatcagaccccagaaaaggtgttggttgatatagacagcaggacggtggccatggaagtcggaatccgctaaggagtgtgtaacaactcacctgccgaatcaactagccctgaaaatg

SEQ ID NO: 50721 - DNA, 120 bp, Homo sapiens
  misc_feature: 664 for SV(W|O) and 28S
ccgcccccggggccgcggttccgcgcggcgcctcgcctcggccggcgcctagcagccgacttagaactggtgcggaccaggggaatccgactgtttaattaaaacaaagcatcgcgaagg

SEQ ID NO: 50722 - DNA, 120 bp, Homo sapiens
  misc_feature: 663 for SV(W|O) and 28S
cgctggcccttgaaaatccgggggagagggtgtaaatctcgcgccgggccgtacccatatccgcagcaggtctccaaggtgaacagcctctggcatgttggaacaatgtaggtaagggaa

SEQ ID NO: 50723 - DNA, 120 bp, Homo sapiens
  misc_feature: 663 for SV(W|O) and 28S
tccgcccccggggccgcggttccgcgcggcgcctcgcctcggccggcgcctagcagccgacttagaactggtgcggaccaggggaatccgactgtttaattaaaacaaagcatcgcgaag

SEQ ID NO: 50724 - DNA, 120 bp, Homo sapiens
  misc_feature: 663 for SV(W|O) and 28S
gggacagtgggaatctcgttcatccattcatgcgcgtcactaattagatgacgaggcatttggctaccttaagagagtcatagttactcccgccgtttacccgcgcttcattgaatttct

SEQ ID NO: 50725 - DNA, 120 bp, Homo sapiens
  misc_feature: 663 for SV(W|O) and 28S
gcggaccccacccgtttacctcttaacggtttcacgccctcttgaactctctcttcaaagttcttttcaactttcccttacggtacttgttgactatcggtctcgtgccggtatttagcc

SEQ ID NO: 50726 - DNA, 120 bp, Homo sapiens
  misc_feature: 663 for SV(W|O) and 28S
gcctcccacttattctacacctctcatgtctcttcaccgtgccagactagagtcaagctcaacagggtcttctttccccgctgattccgccaagcccgttcccttggctgtggtttcgct

SEQ ID NO: 50727 - DNA, 120 bp, Homo sapiens
  misc_feature: 663 for SV(W|O) and 28S
cgggtggtaaactccatctaaggctaaataccggcacgagaccgatagtcaacaagtaccgtaagggaaagttgaaaagaactttgaagagagagttcaagagggcgtgaaaccgttaag

SEQ ID NO: 50728 - DNA, 120 bp, Homo sapiens
  misc_feature: 663 for SV(W|O) and 28S
actaatcgaaccatctagtagctggttccctccgaagtttccctcaggatagctggcgctctcgcagacccgacgcacccccgccacgcagttttatccggtaaagcgaatgattagagg

SEQ ID NO: 50729 - DNA, 120 bp, Homo sapiens
  misc_feature: 662 for SV(W|O) and 28S
tcccgcccacgccccgctccccgcccccggagccccgcggacgctacgccgcgacgagtaggagggccgctgcggtgagccttgaagcctagggcgcgggcccgggtggagccgccgcag

SEQ ID NO: 50730 - DNA, 120 bp, Homo sapiens
  misc_feature: 662 for SV(W|O) and 28S
gttccgcgcggcgcctcgcctcggccggcgcctagcagccgacttagaactggtgcggaccaggggaatccgactgtttaattaaaacaaagcatcgcgaaggcccgcggcgggtgttga

SEQ ID NO: 50731 - DNA, 120 bp, Homo sapiens
  misc_feature: 662 for SV(W|O) and 28S
cccgaccgacccagcccttagagccaatccttatcccgaagttacggatccggcttgccgacttcccttacctacattgttccaacatgccagaggctgttcaccttggagacctgctgc

SEQ ID NO: 50732 - DNA, 120 bp, Homo sapiens
  misc_feature: 662 for SV(W|O) and 28S
accccacccgtttacctcttaacggtttcacgccctcttgaactctctcttcaaagttcttttcaactttcccttacggtacttgttgactatcggtctcgtgccggtatttagccttag

SEQ ID NO: 50733 - DNA, 120 bp, Homo sapiens
  misc_feature: 662 for SV(W|O) and 28S
cggaccccacccgtttacctcttaacggtttcacgccctcttgaactctctcttcaaagttcttttcaactttcccttacggtacttgttgactatcggtctcgtgccggtatttagcct

SEQ ID NO: 50734 - DNA, 120 bp, Homo sapiens
  misc_feature: 662 for SV(W|O) and 28S
atctaaggctaaataccggcacgagaccgatagtcaacaagtaccgtaagggaaagttgaaaagaactttgaagagagagttcaagagggcgtgaaaccgttaagaggtaaacgggtggg

SEQ ID NO: 50735 - DNA, 120 bp, Homo sapiens
  misc_feature: 661 for SV(W|O) and 28S
tgcgcggaccccacccgtttacctcttaacggtttcacgccctcttgaactctctcttcaaagttcttttcaactttcccttacggtacttgttgactatcggtctcgtgccggtattta

SEQ ID NO: 50736 - DNA, 120 bp, Homo sapiens
  misc_feature: 661 for SV(W|O) and 28S
tccgggggagagggtgtaaatctcgcgccgggccgtacccatatccgcagcaggtctccaaggtgaacagcctctggcatgttggaacaatgtaggtaagggaagtcggcaagccggatc

SEQ ID NO: 50737 - DNA, 120 bp, Homo sapiens
  misc_feature: 661 for SV(W|O) and 28S
ggatcccgaggcctctccagtccgccgagggcgcaccaccggcccgtctcgcccgccgcgccggggaggtggagcacgagcgcacgtgttaggacccgaaagatggtgaactatgcctgg

SEQ ID NO: 50738 - DNA, 120 bp, Homo sapiens
  misc_feature: 661 for SV(W|O) and 28S
gctggcccttgaaaatccgggggagagggtgtaaatctcgcgccgggccgtacccatatccgcagcaggtctccaaggtgaacagcctctggcatgttggaacaatgtaggtaagggaag

SEQ ID NO: 50739 - DNA, 120 bp, Homo sapiens
  misc_feature: 661 for SV(W|O) and 28S
gcccttgaaaatccgggggagagggtgtaaatctcgcgccgggccgtacccatatccgcagcaggtctccaaggtgaacagcctctggcatgttggaacaatgtaggtaagggaagtcgg

SEQ ID NO: 50740 - DNA, 120 bp, Homo sapiens
  misc_feature: 661 for SV(W|O) and 28S
accatctagtagctggttccctccgaagtttccctcaggatagctggcgctctcgcagacccgacgcacccccgccacgcagttttatccggtaaagcgaatgattagaggtcttggggc

SEQ ID NO: 50741 - DNA, 120 bp, Homo sapiens
  misc_feature: 661 for SV(W|O) and 28S
cttcgcgccccagcccgaccgacccagcccttagagccaatccttatcccgaagttacggatccggcttgccgacttcccttacctacattgttccaacatgccagaggctgttcacctt

SEQ ID NO: 50742 - DNA, 120 bp, Homo sapiens
  misc_feature: 661 for SV(W|O) and 28S
cgcggttccgcgcggcgcctcgcctcggccggcgcctagcagccgacttagaactggtgcggaccaggggaatccgactgtttaattaaaacaaagcatcgcgaaggcccgcggcgggtg

SEQ ID NO: 50743 - DNA, 120 bp, Homo sapiens
  misc_feature: 661 for SV(W|O) and 28S
cctccgaagtttccctcaggatagctggcgctctcgcagacccgacgcacccccgccacgcagttttatccggtaaagcgaatgattagaggtcttggggccgaaacgatctcaacctat

SEQ ID NO: 50744 - DNA, 120 bp, Homo sapiens
  misc_feature: 660 for SV(W|O) and 28S
gcgcgacccgctccggggacagtgccaggtggggagtttgactggggcggtacacctgtcaaacggtaacgcaggtgtcctaaggcgagctcagggaggacagaaacctcccgtggagca

SEQ ID NO: 50745 - DNA, 120 bp, Homo sapiens
  misc_feature: 660 for SV(W|O) and 28S
gaccccacccgtttacctcttaacggtttcacgccctcttgaactctctcttcaaagttcttttcaactttcccttacggtacttgttgactatcggtctcgtgccggtatttagcctta

SEQ ID NO: 50746 - DNA, 120 bp, Homo sapiens
  misc_feature: 660 for SV(W|O) and 28S
ggtttcacgccctcttgaactctctcttcaaagttcttttcaactttcccttacggtacttgttgactatcggtctcgtgccggtatttagccttagatggagtttaccacccgctttgg

SEQ ID NO: 50747 - DNA, 120 bp, Homo sapiens
  misc_feature: 660 for SV(W|O) and 28S
gggatcccgaggcctctccagtccgccgagggcgcaccaccggcccgtctcgcccgccgcgccggggaggtggagcacgagcgcacgtgttaggacccgaaagatggtgaactatgcctg

SEQ ID NO: 50748 - DNA, 120 bp, Homo sapiens
  misc_feature: 659 for SV(W|O) and 28S
tggaaagcgtcgcggttccggcggcgtccggtgagctctcgctggcccttgaaaatccgggggagagggtgtaaatctcgcgccgggccgtacccatatccgcagcaggtctccaaggtg

SEQ ID NO: 50749 - DNA, 120 bp, Homo sapiens
  misc_feature: 659 for SV(W|O) and 28S
tcaactgctgttcacatggaacccttctccacttcggccttcaaagttctcgtttgaatatttgctactaccaccaagatctgcacctgcggcggctccacccgggcccgcgccctaggc

SEQ ID NO: 50750 - DNA, 120 bp, Homo sapiens
  misc_feature: 659 for SV(W|O) and 28S
gttccctccgaagtttccctcaggatagctggcgctctcgcagacccgacgcacccccgccacgcagttttatccggtaaagcgaatgattagaggtcttggggccgaaacgatctcaac

SEQ ID NO: 50751 - DNA, 120 bp, Homo sapiens
  misc_feature: 659 for SV(W|O) and 28S
gggccgcggttccgcgcggcgcctcgcctcggccggcgcctagcagccgacttagaactggtgcggaccaggggaatccgactgtttaattaaaacaaagcatcgcgaaggcccgcggcg

SEQ ID NO: 50752 - DNA, 120 bp, Homo sapiens
  misc_feature: 658 for SV(W|O) and 28S
ggccgcggttccgcgcggcgcctcgcctcggccggcgcctagcagccgacttagaactggtgcggaccaggggaatccgactgtttaattaaaacaaagcatcgcgaaggcccgcggcgg

SEQ ID NO: 50753 - DNA, 120 bp, Homo sapiens
  misc_feature: 658 for SV(W|O) and 28S
gcgcggaccccacccgtttacctcttaacggtttcacgccctcttgaactctctcttcaaagttcttttcaactttcccttacggtacttgttgactatcggtctcgtgccggtatttag

SEQ ID NO: 50754 - DNA, 120 bp, Homo sapiens
  misc_feature: 658 for SV(W|O) and 28S
cgggccggtggtgcgccctcggcggactggagaggcctcgggatcccacctcggccggcgagcgcgccggccttcaccttcattgcgccacggcggctttcgtgcgagcccccgactcgc

SEQ ID NO: 50755 - DNA, 120 bp, Homo sapiens
  misc_feature: 658 for SV(W|O) and 28S
gcgagacgggccggtggtgcgccctcggcggactggagaggcctcgggatcccacctcggccggcgagcgcgccggccttcaccttcattgcgccacggcggctttcgtgcgagcccccg

SEQ ID NO: 50756 - DNA, 120 bp, Homo sapiens
  misc_feature: 658 for SV(W|O) and 28S
gacagtgggaatctcgttcatccattcatgcgcgtcactaattagatgacgaggcatttggctaccttaagagagtcatagttactcccgccgtttacccgcgcttcattgaatttcttc

SEQ ID NO: 50757 - DNA, 120 bp, Homo sapiens
  misc_feature: 658 for SV(W|O) and 28S
actgctgttcacatggaacccttctccacttcggccttcaaagttctcgtttgaatatttgctactaccaccaagatctgcacctgcggcggctccacccgggcccgcgccctaggcttc

SEQ ID NO: 50758 - DNA, 120 bp, Homo sapiens
  misc_feature: 658 for SV(W|O) and 28S
cgcgacccgctccggggacagtgccaggtggggagtttgactggggcggtacacctgtcaaacggtaacgcaggtgtcctaaggcgagctcagggaggacagaaacctcccgtggagcag

SEQ ID NO: 50759 - DNA, 120 bp, Homo sapiens
  misc_feature: 658 for SV(W|O) and 28S
cggtttcacgccctcttgaactctctcttcaaagttcttttcaactttcccttacggtacttgttgactatcggtctcgtgccggtatttagccttagatggagtttaccacccgctttg

SEQ ID NO: 50760 - DNA, 120 bp, Homo sapiens
  misc_feature: 658 for SV(W|O) and 28S
cggggccgcggttccgcgcggcgcctcgcctcggccggcgcctagcagccgacttagaactggtgcggaccaggggaatccgactgtttaattaaaacaaagcatcgcgaaggcccgcgg

SEQ ID NO: 50761 - DNA, 120 bp, Homo sapiens
  misc_feature: 658 for SV(W|O) and 28S
acggtttcacgccctcttgaactctctcttcaaagttcttttcaactttcccttacggtacttgttgactatcggtctcgtgccggtatttagccttagatggagtttaccacccgcttt

SEQ ID NO: 50762 - DNA, 120 bp, Homo sapiens
  misc_feature: 657 for SV(W|O) and 28S
gcgacccgctccggggacagtgccaggtggggagtttgactggggcggtacacctgtcaaacggtaacgcaggtgtcctaaggcgagctcagggaggacagaaacctcccgtggagcaga

SEQ ID NO: 50763 - DNA, 120 bp, Homo sapiens
  misc_feature: 657 for SV(W|O) and 28S
tctaaggctaaataccggcacgagaccgatagtcaacaagtaccgtaagggaaagttgaaaagaactttgaagagagagttcaagagggcgtgaaaccgttaagaggtaaacgggtgggg

SEQ ID NO: 50764 - DNA, 120 bp, Homo sapiens
  misc_feature: 657 for SV(W|O) and 28S
ggaaagcgtcgcggttccggcggcgtccggtgagctctcgctggcccttgaaaatccgggggagagggtgtaaatctcgcgccgggccgtacccatatccgcagcaggtctccaaggtga

SEQ ID NO: 50765 - DNA, 120 bp, Homo sapiens
  misc_feature: 657 for SV(W|O) and 28S
ccgcccggaggattcaacccggcggcgggtccggccgtgtcggcggcccggcggatctttcccgccccccgttcctcccgacccctccacccgccctcccttcccccgccgcccctcctc

SEQ ID NO: 50766 - DNA, 120 bp, Homo sapiens
  misc_feature: 657 for SV(W|O) and 28S
gactaatcgaaccatctagtagctggttccctccgaagtttccctcaggatagctggcgctctcgcagacccgacgcacccccgccacgcagttttatccggtaaagcgaatgattagag

SEQ ID NO: 50767 - DNA, 120 bp, Homo sapiens
  misc_feature: 657 for SV(W|O) and 28S
ctgggcagggcgaagccagaggaaactctggtggaggtccgtagcggtcctgacgtgcaaatcggtcgtccgacctgggtataggggcgaaagactaatcgaaccatctagtagctggtt

SEQ ID NO: 50768 - DNA, 120 bp, Homo sapiens
  misc_feature: 657 for SV(W|O) and 28S
ctccgaagtttccctcaggatagctggcgctctcgcagacccgacgcacccccgccacgcagttttatccggtaaagcgaatgattagaggtcttggggccgaaacgatctcaacctatt

SEQ ID NO: 50769 - DNA, 120 bp, Homo sapiens
  misc_feature: 656 for SV(W|O) and 28S
tttccctcaggatagctggcgctctcgcagacccgacgcacccccgccacgcagttttatccggtaaagcgaatgattagaggtcttggggccgaaacgatctcaacctattctcaaact

SEQ ID NO: 50770 - DNA, 120 bp, Homo sapiens
  misc_feature: 656 for SV(W|O) and 28S
gacgggccggtggtgcgccctcggcggactggagaggcctcgggatcccacctcggccggcgagcgcgccggccttcaccttcattgcgccacggcggctttcgtgcgagcccccgactc

SEQ ID NO: 50771 - DNA, 120 bp, Homo sapiens
  misc_feature: 656 for SV(W|O) and 28S
ccttggaaagcgtcgcggttccggcggcgtccggtgagctctcgctggcccttgaaaatccgggggagagggtgtaaatctcgcgccgggccgtacccatatccgcagcaggtctccaag

SEQ ID NO: 50772 - DNA, 120 bp, Homo sapiens
  misc_feature: 656 for SV(W|O) and 28S
aactgctgttcacatggaacccttctccacttcggccttcaaagttctcgtttgaatatttgctactaccaccaagatctgcacctgcggcggctccacccgggcccgcgccctaggctt

SEQ ID NO: 50773 - DNA, 120 bp, Homo sapiens
  misc_feature: 655 for SV(W|O) and 28S
gtttccctcaggatagctggcgctctcgcagacccgacgcacccccgccacgcagttttatccggtaaagcgaatgattagaggtcttggggccgaaacgatctcaacctattctcaaac

SEQ ID NO: 50774 - DNA, 120 bp, Homo sapiens
  misc_feature: 655 for SV(W|O) and 28S
gagacgggccggtggtgcgccctcggcggactggagaggcctcgggatcccacctcggccggcgagcgcgccggccttcaccttcattgcgccacggcggctttcgtgcgagcccccgac

SEQ ID NO: 50775 - DNA, 120 bp, Homo sapiens
  misc_feature: 655 for SV(W|O) and 28S
gggcctcccacttattctacacctctcatgtctcttcaccgtgccagactagagtcaagctcaacagggtcttctttccccgctgattccgccaagcccgttcccttggctgtggtttcg

SEQ ID NO: 50776 - DNA, 120 bp, Homo sapiens
  misc_feature: 655 for SV(W|O) and 28S
gcccgggtcttcccggagtcgggttgcttgggaatgcagcccaaagcgggtggtaaactccatctaaggctaaataccggcacgagaccgatagtcaacaagtaccgtaagggaaagttg

SEQ ID NO: 50777 - DNA, 120 bp, Homo sapiens
  misc_feature: 655 for SV(W|O) and 28S
cgggcccgggtcttcccggagtcgggttgcttgggaatgcagcccaaagcgggtggtaaactccatctaaggctaaataccggcacgagaccgatagtcaacaagtaccgtaagggaaag

SEQ ID NO: 50778 - DNA, 120 bp, Homo sapiens
  misc_feature: 655 for SV(W|O) and 28S
ctgcgcggaccccacccgtttacctcttaacggtttcacgccctcttgaactctctcttcaaagttcttttcaactttcccttacggtacttgttgactatcggtctcgtgccggtattt

SEQ ID NO: 50779 - DNA, 120 bp, Homo sapiens
  misc_feature: 655 for SV(W|O) and 28S
ccggccctgcgggccgccggtgaaataccactactctgatcgttttttcactgacccggtgaggcgggggggcgagccccgaggggctctcgcttctggcgccaagcgcccggccgcgcg

SEQ ID NO: 50780 - DNA, 120 bp, Homo sapiens
  misc_feature: 655 for SV(W|O) and 28S
caactgctgttcacatggaacccttctccacttcggccttcaaagttctcgtttgaatatttgctactaccaccaagatctgcacctgcggcggctccacccgggcccgcgccctaggct

SEQ ID NO: 50781 - DNA, 120 bp, Homo sapiens
  misc_feature: 654 for SV(W|O) and 28S
gtttcacgccctcttgaactctctcttcaaagttcttttcaactttcccttacggtacttgttgactatcggtctcgtgccggtatttagccttagatggagtttaccacccgctttggg

SEQ ID NO: 50782 - DNA, 120 bp, Homo sapiens
  misc_feature: 654 for SV(W|O) and 28S
gttcaactgctgttcacatggaacccttctccacttcggccttcaaagttctcgtttgaatatttgctactaccaccaagatctgcacctgcggcggctccacccgggcccgcgccctag

SEQ ID NO: 50783 - DNA, 120 bp, Homo sapiens
  misc_feature: 654 for SV(W|O) and 28S
ggaagagcccagcgccgaatccccgccccgcggcggggcgcgggacatgtggcgtacggaagacccgctccccggcgccgctcgtggggggcccaagtccttctgatcgaggcccagccc

SEQ ID NO: 50784 - DNA, 120 bp, Homo sapiens
  misc_feature: 654 for SV(W|O) and 28S
gggctgactttcaatagatcgcagcgagggagctgctctgctacgtacgaaaccccgacccagaagcaggtcgtctacgaatggtttagcgccaggttccccacgaacgtgcggtgcgtg

SEQ ID NO: 50785 - DNA, 120 bp, Homo sapiens
  misc_feature: 654 for SV(W|O) and 28S
gcggttccgcgcggcgcctcgcctcggccggcgcctagcagccgacttagaactggtgcggaccaggggaatccgactgtttaattaaaacaaagcatcgcgaaggcccgcggcgggtgt

SEQ ID NO: 50786 - DNA, 120 bp, Homo sapiens
  misc_feature: 654 for SV(W|O) and 28S
cgggggagagggtgtaaatctcgcgccgggccgtacccatatccgcagcaggtctccaaggtgaacagcctctggcatgttggaacaatgtaggtaagggaagtcggcaagccggatccg

SEQ ID NO: 50787 - DNA, 120 bp, Homo sapiens
  misc_feature: 654 for SV(W|O) and 28S
ccgaagtttccctcaggatagctggcgctctcgcagacccgacgcacccccgccacgcagttttatccggtaaagcgaatgattagaggtcttggggccgaaacgatctcaacctattct

SEQ ID NO: 50788 - DNA, 120 bp, Homo sapiens
  misc_feature: 653 for SV(W|O) and 28S
ttcaactgctgttcacatggaacccttctccacttcggccttcaaagttctcgtttgaatatttgctactaccaccaagatctgcacctgcggcggctccacccgggcccgcgccctagg

SEQ ID NO: 50789 - DNA, 120 bp, Homo sapiens
  misc_feature: 652 for SV(W|O) and 28S
tgggatcccgaggcctctccagtccgccgagggcgcaccaccggcccgtctcgcccgccgcgccggggaggtggagcacgagcgcacgtgttaggacccgaaagatggtgaactatgcct

SEQ ID NO: 50790 - DNA, 120 bp, Homo sapiens
  misc_feature: 652 for SV(W|O) and 28S
gaagtttccctcaggatagctggcgctctcgcagacccgacgcacccccgccacgcagttttatccggtaaagcgaatgattagaggtcttggggccgaaacgatctcaacctattctca

SEQ ID NO: 50791 - DNA, 120 bp, Homo sapiens
  misc_feature: 652 for SV(W|O) and 28S
ccgcttcgcgccccagcccgaccgacccagcccttagagccaatccttatcccgaagttacggatccggcttgccgacttcccttacctacattgttccaacatgccagaggctgttcac

SEQ ID NO: 50792 - DNA, 120 bp, Homo sapiens
  misc_feature: 652 for SV(W|O) and 28S
ggtgtaaatctcgcgccgggccgtacccatatccgcagcaggtctccaaggtgaacagcctctggcatgttggaacaatgtaggtaagggaagtcggcaagccggatccgtaacttcggg

SEQ ID NO: 50793 - DNA, 120 bp, Homo sapiens
  misc_feature: 652 for SV(W|O) and 28S
atccgggggagagggtgtaaatctcgcgccgggccgtacccatatccgcagcaggtctccaaggtgaacagcctctggcatgttggaacaatgtaggtaagggaagtcggcaagccggat

SEQ ID NO: 50794 - DNA, 120 bp, Homo sapiens
  misc_feature: 651 for SV(W|O) and 28S
gtaaactccatctaaggctaaataccggcacgagaccgatagtcaacaagtaccgtaagggaaagttgaaaagaactttgaagagagagttcaagagggcgtgaaaccgttaagaggtaa

SEQ ID NO: 50795 - DNA, 120 bp, Homo sapiens
  misc_feature: 651 for SV(W|O) and 28S
gtgggatcccgaggcctctccagtccgccgagggcgcaccaccggcccgtctcgcccgccgcgccggggaggtggagcacgagcgcacgtgttaggacccgaaagatggtgaactatgcc

SEQ ID NO: 50796 - DNA, 120 bp, Homo sapiens
  misc_feature: 651 for SV(W|O) and 28S
ggggcctcccacttattctacacctctcatgtctcttcaccgtgccagactagagtcaagctcaacagggtcttctttccccgctgattccgccaagcccgttcccttggctgtggtttc

SEQ ID NO: 50797 - DNA, 120 bp, Homo sapiens
  misc_feature: 651 for SV(W|O) and 28S
cgcccggaggattcaacccggcggcgggtccggccgtgtcggcggcccggcggatctttcccgccccccgttcctcccgacccctccacccgccctcccttcccccgccgcccctcctcc

SEQ ID NO: 50798 - DNA, 120 bp, Homo sapiens
  misc_feature: 651 for SV(W|O) and 28S
gccggccctgcgggccgccggtgaaataccactactctgatcgttttttcactgacccggtgaggcgggggggcgagccccgaggggctctcgcttctggcgccaagcgcccggccgcgc

SEQ ID NO: 50799 - DNA, 120 bp, Homo sapiens
  misc_feature: 651 for SV(W|O) and 28S
gcgccgggcccgggtcttcccggagtcgggttgcttgggaatgcagcccaaagcgggtggtaaactccatctaaggctaaataccggcacgagaccgatagtcaacaagtaccgtaaggg

SEQ ID NO: 50800 - DNA, 120 bp, Homo sapiens
  misc_feature: 651 for SV(W|O) and 28S
cccttgaaaatccgggggagagggtgtaaatctcgcgccgggccgtacccatatccgcagcaggtctccaaggtgaacagcctctggcatgttggaacaatgtaggtaagggaagtcggc

SEQ ID NO: 50801 - DNA, 120 bp, Homo sapiens
  misc_feature: 651 for SV(W|O) and 28S
catctaaggctaaataccggcacgagaccgatagtcaacaagtaccgtaagggaaagttgaaaagaactttgaagagagagttcaagagggcgtgaaaccgttaagaggtaaacgggtgg

SEQ ID NO: 50802 - DNA, 120 bp, Homo sapiens
  misc_feature: 650 for SV(W|O) and 28S
taaactccatctaaggctaaataccggcacgagaccgatagtcaacaagtaccgtaagggaaagttgaaaagaactttgaagagagagttcaagagggcgtgaaaccgttaagaggtaaa

SEQ ID NO: 50803 - DNA, 120 bp, Homo sapiens
  misc_feature: 650 for SV(W|O) and 28S
gcttcgcgccccagcccgaccgacccagcccttagagccaatccttatcccgaagttacggatccggcttgccgacttcccttacctacattgttccaacatgccagaggctgttcacct

SEQ ID NO: 50804 - DNA, 120 bp, Homo sapiens
  misc_feature: 650 for SV(W|O) and 28S
cccgtgccttggaaagcgtcgcggttccggcggcgtccggtgagctctcgctggcccttgaaaatccgggggagagggtgtaaatctcgcgccgggccgtacccatatccgcagcaggtc

SEQ ID NO: 50805 - DNA, 120 bp, Homo sapiens
  misc_feature: 650 for SV(W|O) and 28S
cggttccgcgcggcgcctcgcctcggccggcgcctagcagccgacttagaactggtgcggaccaggggaatccgactgtttaattaaaacaaagcatcgcgaaggcccgcggcgggtgtt

SEQ ID NO: 50806 - DNA, 120 bp, Homo sapiens
  misc_feature: 650 for SV(W|O) and 28S
agagggtgtaaatctcgcgccgggccgtacccatatccgcagcaggtctccaaggtgaacagcctctggcatgttggaacaatgtaggtaagggaagtcggcaagccggatccgtaactt

SEQ ID NO: 50807 - DNA, 120 bp, Homo sapiens
  misc_feature: 649 for SV(W|O) and 28S
tttcacgccctcttgaactctctcttcaaagttcttttcaactttcccttacggtacttgttgactatcggtctcgtgccggtatttagccttagatggagtttaccacccgctttgggc

SEQ ID NO: 50808 - DNA, 120 bp, Homo sapiens
  misc_feature: 649 for SV(W|O) and 28S
cttgaaaatccgggggagagggtgtaaatctcgcgccgggccgtacccatatccgcagcaggtctccaaggtgaacagcctctggcatgttggaacaatgtaggtaagggaagtcggcaa

SEQ ID NO: 50809 - DNA, 120 bp, Homo sapiens
  misc_feature: 649 for SV(W|O) and 28S
ttcacgccctcttgaactctctcttcaaagttcttttcaactttcccttacggtacttgttgactatcggtctcgtgccggtatttagccttagatggagtttaccacccgctttgggct

SEQ ID NO: 50810 - DNA, 120 bp, Homo sapiens
  misc_feature: 649 for SV(W|O) and 28S
agactaatcgaaccatctagtagctggttccctccgaagtttccctcaggatagctggcgctctcgcagacccgacgcacccccgccacgcagttttatccggtaaagcgaatgattaga

SEQ ID NO: 50811 - DNA, 120 bp, Homo sapiens
  misc_feature: 649 for SV(W|O) and 28S
aaactccatctaaggctaaataccggcacgagaccgatagtcaacaagtaccgtaagggaaagttgaaaagaactttgaagagagagttcaagagggcgtgaaaccgttaagaggtaaac

SEQ ID NO: 50812 - DNA, 120 bp, Homo sapiens
  misc_feature: 649 for SV(W|O) and 28S
gggggcctcccacttattctacacctctcatgtctcttcaccgtgccagactagagtcaagctcaacagggtcttctttccccgctgattccgccaagcccgttcccttggctgtggttt

SEQ ID NO: 50813 - DNA, 120 bp, Homo sapiens
  misc_feature: 649 for SV(W|O) and 28S
agacgggccggtggtgcgccctcggcggactggagaggcctcgggatcccacctcggccggcgagcgcgccggccttcaccttcattgcgccacggcggctttcgtgcgagcccccgact

SEQ ID NO: 50814 - DNA, 120 bp, Homo sapiens
  misc_feature: 648 for SV(W|O) and 28S
ccgggcccgggtcttcccggagtcgggttgcttgggaatgcagcccaaagcgggtggtaaactccatctaaggctaaataccggcacgagaccgatagtcaacaagtaccgtaagggaaa

SEQ ID NO: 50815 - DNA, 120 bp, Homo sapiens
  misc_feature: 648 for SV(W|O) and 28S
aagtttccctcaggatagctggcgctctcgcagacccgacgcacccccgccacgcagttttatccggtaaagcgaatgattagaggtcttggggccgaaacgatctcaacctattctcaa

SEQ ID NO: 50816 - DNA, 120 bp, Homo sapiens
  misc_feature: 648 for SV(W|O) and 28S
gccggtggtgcgccctcggcggactggagaggcctcgggatcccacctcggccggcgagcgcgccggccttcaccttcattgcgccacggcggctttcgtgcgagcccccgactcgcgca

SEQ ID NO: 50817 - DNA, 120 bp, Homo sapiens
  misc_feature: 648 for SV(W|O) and 28S
taagggaaagttgaaaagaactttgaagagagagttcaagagggcgtgaaaccgttaagaggtaaacgggtggggtccgcgcagtccgcccggaggattcaacccggcggcgggtccggc

SEQ ID NO: 50818 - DNA, 120 bp, Homo sapiens
  misc_feature: 648 for SV(W|O) and 28S
ccggtggtgcgccctcggcggactggagaggcctcgggatcccacctcggccggcgagcgcgccggccttcaccttcattgcgccacggcggctttcgtgcgagcccccgactcgcgcac

SEQ ID NO: 50819 - DNA, 120 bp, Homo sapiens
  misc_feature: 648 for SV(W|O) and 28S
gggcgcgacccgctccggggacagtgccaggtggggagtttgactggggcggtacacctgtcaaacggtaacgcaggtgtcctaaggcgagctcagggaggacagaaacctcccgtggag

SEQ ID NO: 50820 - DNA, 120 bp, Homo sapiens
  misc_feature: 648 for SV(W|O) and 28S
ctaatcgaaccatctagtagctggttccctccgaagtttccctcaggatagctggcgctctcgcagacccgacgcacccccgccacgcagttttatccggtaaagcgaatgattagaggt

SEQ ID NO: 50821 - DNA, 120 bp, Homo sapiens
  misc_feature: 648 for SV(W|O) and 28S
ccgcggttccgcgcggcgcctcgcctcggccggcgcctagcagccgacttagaactggtgcggaccaggggaatccgactgtttaattaaaacaaagcatcgcgaaggcccgcggcgggt

SEQ ID NO: 50822 - DNA, 120 bp, Homo sapiens
  misc_feature: 648 for SV(W|O) and 28S
agggctgactttcaatagatcgcagcgagggagctgctctgctacgtacgaaaccccgacccagaagcaggtcgtctacgaatggtttagcgccaggttccccacgaacgtgcggtgcgt

SEQ ID NO: 50823 - DNA, 120 bp, Homo sapiens
  misc_feature: 647 for SV(W|O) and 28S
agtttccctcaggatagctggcgctctcgcagacccgacgcacccccgccacgcagttttatccggtaaagcgaatgattagaggtcttggggccgaaacgatctcaacctattctcaaa

SEQ ID NO: 50824 - DNA, 120 bp, Homo sapiens
  misc_feature: 647 for SV(W|O) and 28S
gccttggaaagcgtcgcggttccggcggcgtccggtgagctctcgctggcccttgaaaatccgggggagagggtgtaaatctcgcgccgggccgtacccatatccgcagcaggtctccaa

SEQ ID NO: 50825 - DNA, 120 bp, Homo sapiens
  misc_feature: 647 for SV(W|O) and 28S
ttccctcaggatagctggcgctctcgcagacccgacgcacccccgccacgcagttttatccggtaaagcgaatgattagaggtcttggggccgaaacgatctcaacctattctcaaactt

SEQ ID NO: 50826 - DNA, 120 bp, Homo sapiens
  misc_feature: 647 for SV(W|O) and 28S
aatccgggggagagggtgtaaatctcgcgccgggccgtacccatatccgcagcaggtctccaaggtgaacagcctctggcatgttggaacaatgtaggtaagggaagtcggcaagccgga

SEQ ID NO: 50827 - DNA, 120 bp, Homo sapiens
  misc_feature: 647 for SV(W|O) and 28S
ggggagagggtgtaaatctcgcgccgggccgtacccatatccgcagcaggtctccaaggtgaacagcctctggcatgttggaacaatgtaggtaagggaagtcggcaagccggatccgta

SEQ ID NO: 50828 - DNA, 120 bp, Homo sapiens
  misc_feature: 647 for SV(W|O) and 28S
gagggtgtaaatctcgcgccgggccgtacccatatccgcagcaggtctccaaggtgaacagcctctggcatgttggaacaatgtaggtaagggaagtcggcaagccggatccgtaacttc

SEQ ID NO: 50829 - DNA, 120 bp, Homo sapiens
  misc_feature: 647 for SV(W|O) and 28S
gaagagcccagcgccgaatccccgccccgcggcggggcgcgggacatgtggcgtacggaagacccgctccccggcgccgctcgtggggggcccaagtccttctgatcgaggcccagcccg

SEQ ID NO: 50830 - DNA, 120 bp, Homo sapiens
  misc_feature: 647 for SV(W|O) and 28S
cttggaaagcgtcgcggttccggcggcgtccggtgagctctcgctggcccttgaaaatccgggggagagggtgtaaatctcgcgccgggccgtacccatatccgcagcaggtctccaagg

SEQ ID NO: 50831 - DNA, 120 bp, Homo sapiens
  misc_feature: 647 for SV(W|O) and 28S
cgggggcctcccacttattctacacctctcatgtctcttcaccgtgccagactagagtcaagctcaacagggtcttctttccccgctgattccgccaagcccgttcccttggctgtggtt

SEQ ID NO: 50832 - DNA, 120 bp, Homo sapiens
  misc_feature: 646 for SV(W|O) and 28S
ttggaaagcgtcgcggttccggcggcgtccggtgagctctcgctggcccttgaaaatccgggggagagggtgtaaatctcgcgccgggccgtacccatatccgcagcaggtctccaaggt

SEQ ID NO: 50833 - DNA, 120 bp, Homo sapiens
  misc_feature: 646 for SV(W|O) and 28S
ctcccgcccacgccccgctccccgcccccggagccccgcggacgctacgccgcgacgagtaggagggccgctgcggtgagccttgaagcctagggcgcgggcccgggtggagccgccgca

SEQ ID NO: 50834 - DNA, 120 bp, Homo sapiens
  misc_feature: 646 for SV(W|O) and 28S
ccttgaaaatccgggggagagggtgtaaatctcgcgccgggccgtacccatatccgcagcaggtctccaaggtgaacagcctctggcatgttggaacaatgtaggtaagggaagtcggca

SEQ ID NO: 50835 - DNA, 120 bp, Homo sapiens
  misc_feature: 646 for SV(W|O) and 28S
cccgcttcgcgccccagcccgaccgacccagcccttagagccaatccttatcccgaagttacggatccggcttgccgacttcccttacctacattgttccaacatgccagaggctgttca

SEQ ID NO: 50836 - DNA, 120 bp, Homo sapiens
  misc_feature: 646 for SV(W|O) and 28S
cgagacgggccggtggtgcgccctcggcggactggagaggcctcgggatcccacctcggccggcgagcgcgccggccttcaccttcattgcgccacggcggctttcgtgcgagcccccga

SEQ ID NO: 50837 - DNA, 120 bp, Homo sapiens
  misc_feature: 646 for SV(W|O) and 28S
gggggagagggtgtaaatctcgcgccgggccgtacccatatccgcagcaggtctccaaggtgaacagcctctggcatgttggaacaatgtaggtaagggaagtcggcaagccggatccgt

SEQ ID NO: 50838 - DNA, 120 bp, Homo sapiens
  misc_feature: 646 for SV(W|O) and 28S
ccgccggccctgcgggccgccggtgaaataccactactctgatcgttttttcactgacccggtgaggcgggggggcgagccccgaggggctctcgcttctggcgccaagcgcccggccgc

SEQ ID NO: 50839 - DNA, 120 bp, Homo sapiens
  misc_feature: 646 for SV(W|O) and 28S
aaccatctagtagctggttccctccgaagtttccctcaggatagctggcgctctcgcagacccgacgcacccccgccacgcagttttatccggtaaagcgaatgattagaggtcttgggg

SEQ ID NO: 50840 - DNA, 120 bp, Homo sapiens
  misc_feature: 645 for SV(W|O) and 28S
tccgccggccctgcgggccgccggtgaaataccactactctgatcgttttttcactgacccggtgaggcgggggggcgagccccgaggggctctcgcttctggcgccaagcgcccggccg

SEQ ID NO: 50841 - DNA, 120 bp, Homo sapiens
  misc_feature: 645 for SV(W|O) and 28S
gggcccgggtcttcccggagtcgggttgcttgggaatgcagcccaaagcgggtggtaaactccatctaaggctaaataccggcacgagaccgatagtcaacaagtaccgtaagggaaagt

SEQ ID NO: 50842 - DNA, 120 bp, Homo sapiens
  misc_feature: 645 for SV(W|O) and 28S
ggcccgggtcttcccggagtcgggttgcttgggaatgcagcccaaagcgggtggtaaactccatctaaggctaaataccggcacgagaccgatagtcaacaagtaccgtaagggaaagtt

SEQ ID NO: 50843 - DNA, 120 bp, Homo sapiens
  misc_feature: 645 for SV(W|O) and 28S
gcgcgccgggcccgggtcttcccggagtcgggttgcttgggaatgcagcccaaagcgggtggtaaactccatctaaggctaaataccggcacgagaccgatagtcaacaagtaccgtaag

SEQ ID NO: 50844 - DNA, 120 bp, Homo sapiens
  misc_feature: 645 for SV(W|O) and 28S
gagagggtgtaaatctcgcgccgggccgtacccatatccgcagcaggtctccaaggtgaacagcctctggcatgttggaacaatgtaggtaagggaagtcggcaagccggatccgtaact

SEQ ID NO: 50845 - DNA, 120 bp, Homo sapiens
  misc_feature: 645 for SV(W|O) and 28S
gagaccgatagtcaacaagtaccgtaagggaaagttgaaaagaactttgaagagagagttcaagagggcgtgaaaccgttaagaggtaaacgggtggggtccgcgcagtccgcccggagg

SEQ ID NO: 50846 - DNA, 120 bp, Homo sapiens
  misc_feature: 645 for SV(W|O) and 28S
cgtaagggaaagttgaaaagaactttgaagagagagttcaagagggcgtgaaaccgttaagaggtaaacgggtggggtccgcgcagtccgcccggaggattcaacccggcggcgggtccg

SEQ ID NO: 50847 - DNA, 120 bp, Homo sapiens
  misc_feature: 645 for SV(W|O) and 28S
cgccggccctgcgggccgccggtgaaataccactactctgatcgttttttcactgacccggtgaggcgggggggcgagccccgaggggctctcgcttctggcgccaagcgcccggccgcg

SEQ ID NO: 50848 - DNA, 120 bp, Homo sapiens
  misc_feature: 645 for SV(W|O) and 28S
aggtgggatcccgaggcctctccagtccgccgagggcgcaccaccggcccgtctcgcccgccgcgccggggaggtggagcacgagcgcacgtgttaggacccgaaagatggtgaactatg

SEQ ID NO: 50849 - DNA, 120 bp, Homo sapiens
  misc_feature: 644 for SV(W|O) and 28S
cgggcgcgacccgctccggggacagtgccaggtggggagtttgactggggcggtacacctgtcaaacggtaacgcaggtgtcctaaggcgagctcagggaggacagaaacctcccgtgga

SEQ ID NO: 50850 - DNA, 120 bp, Homo sapiens
  misc_feature: 644 for SV(W|O) and 28S
gtaagggaaagttgaaaagaactttgaagagagagttcaagagggcgtgaaaccgttaagaggtaaacgggtggggtccgcgcagtccgcccggaggattcaacccggcggcgggtccgg

SEQ ID NO: 50851 - DNA, 120 bp, Homo sapiens
  misc_feature: 644 for SV(W|O) and 28S
ggtgggatcccgaggcctctccagtccgccgagggcgcaccaccggcccgtctcgcccgccgcgccggggaggtggagcacgagcgcacgtgttaggacccgaaagatggtgaactatgc

SEQ ID NO: 50852 - DNA, 120 bp, Homo sapiens
  misc_feature: 644 for SV(W|O) and 28S
ggcgcgacccgctccggggacagtgccaggtggggagtttgactggggcggtacacctgtcaaacggtaacgcaggtgtcctaaggcgagctcagggaggacagaaacctcccgtggagc

SEQ ID NO: 50853 - DNA, 120 bp, Homo sapiens
  misc_feature: 644 for SV(W|O) and 28S
ggccggtggtgcgccctcggcggactggagaggcctcgggatcccacctcggccggcgagcgcgccggccttcaccttcattgcgccacggcggctttcgtgcgagcccccgactcgcgc

SEQ ID NO: 50854 - DNA, 120 bp, Homo sapiens
  misc_feature: 644 for SV(W|O) and 28S
ccgtaagggaaagttgaaaagaactttgaagagagagttcaagagggcgtgaaaccgttaagaggtaaacgggtggggtccgcgcagtccgcccggaggattcaacccggcggcgggtcc

SEQ ID NO: 50855 - DNA, 120 bp, Homo sapiens
  misc_feature: 644 for SV(W|O) and 28S
cggccctgcgggccgccggtgaaataccactactctgatcgttttttcactgacccggtgaggcgggggggcgagccccgaggggctctcgcttctggcgccaagcgcccggccgcgcgc

SEQ ID NO: 50856 - DNA, 120 bp, Homo sapiens
  misc_feature: 644 for SV(W|O) and 28S
aagactaatcgaaccatctagtagctggttccctccgaagtttccctcaggatagctggcgctctcgcagacccgacgcacccccgccacgcagttttatccggtaaagcgaatgattag

SEQ ID NO: 50857 - DNA, 120 bp, Homo sapiens
  misc_feature: 644 for SV(W|O) and 28S
cgcgccgggcccgggtcttcccggagtcgggttgcttgggaatgcagcccaaagcgggtggtaaactccatctaaggctaaataccggcacgagaccgatagtcaacaagtaccgtaagg

SEQ ID NO: 50858 - DNA, 120 bp, Homo sapiens
  misc_feature: 644 for SV(W|O) and 28S
agggtgtaaatctcgcgccgggccgtacccatatccgcagcaggtctccaaggtgaacagcctctggcatgttggaacaatgtaggtaagggaagtcggcaagccggatccgtaacttcg

SEQ ID NO: 50859 - DNA, 120 bp, Homo sapiens
  misc_feature: 643 for SV(W|O) and 28S
gccgggcccgggtcttcccggagtcgggttgcttgggaatgcagcccaaagcgggtggtaaactccatctaaggctaaataccggcacgagaccgatagtcaacaagtaccgtaagggaa

SEQ ID NO: 50860 - DNA, 120 bp, Homo sapiens
  misc_feature: 643 for SV(W|O) and 28S
acgccctcttgaactctctcttcaaagttcttttcaactttcccttacggtacttgttgactatcggtctcgtgccggtatttagccttagatggagtttaccacccgctttgggctgca

SEQ ID NO: 50861 - DNA, 120 bp, Homo sapiens
  misc_feature: 643 for SV(W|O) and 28S
tgaaaatccgggggagagggtgtaaatctcgcgccgggccgtacccatatccgcagcaggtctccaaggtgaacagcctctggcatgttggaacaatgtaggtaagggaagtcggcaagc

SEQ ID NO: 50862 - DNA, 120 bp, Homo sapiens
  misc_feature: 643 for SV(W|O) and 28S
cgccgggcccgggtcttcccggagtcgggttgcttgggaatgcagcccaaagcgggtggtaaactccatctaaggctaaataccggcacgagaccgatagtcaacaagtaccgtaaggga

SEQ ID NO: 50863 - DNA, 120 bp, Homo sapiens
  misc_feature: 643 for SV(W|O) and 28S
gggtgtaaatctcgcgccgggccgtacccatatccgcagcaggtctccaaggtgaacagcctctggcatgttggaacaatgtaggtaagggaagtcggcaagccggatccgtaacttcgg

SEQ ID NO: 50864 - DNA, 120 bp, Homo sapiens
  misc_feature: 643 for SV(W|O) and 28S
gggccggtggtgcgccctcggcggactggagaggcctcgggatcccacctcggccggcgagcgcgccggccttcaccttcattgcgccacggcggctttcgtgcgagcccccgactcgcg

SEQ ID NO: 50865 - DNA, 120 bp, Homo sapiens
  misc_feature: 643 for SV(W|O) and 28S
gctcatcagaccccagaaaaggtgttggttgatatagacagcaggacggtggccatggaagtcggaatccgctaaggagtgtgtaacaactcacctgccgaatcaactagccctgaaaat

SEQ ID NO: 50866 - DNA, 120 bp, Homo sapiens
  misc_feature: 643 for SV(W|O) and 28S
aacagcctctggcatgttggaacaatgtaggtaagggaagtcggcaagccggatccgtaacttcgggataaggattggctctaagggctgggtcggtcgggctggggcgcgaagcggggc

SEQ ID NO: 50867 - DNA, 120 bp, Homo sapiens
  misc_feature: 643 for SV(W|O) and 28S
cgaagtttccctcaggatagctggcgctctcgcagacccgacgcacccccgccacgcagttttatccggtaaagcgaatgattagaggtcttggggccgaaacgatctcaacctattctc

SEQ ID NO: 50868 - DNA, 120 bp, Homo sapiens
  misc_feature: 643 for SV(W|O) and 28S
aaatccgggggagagggtgtaaatctcgcgccgggccgtacccatatccgcagcaggtctccaaggtgaacagcctctggcatgttggaacaatgtaggtaagggaagtcggcaagccgg

SEQ ID NO: 50869 - DNA, 120 bp, Homo sapiens
  misc_feature: 642 for SV(W|O) and 28S
tccgaagtttccctcaggatagctggcgctctcgcagacccgacgcacccccgccacgcagttttatccggtaaagcgaatgattagaggtcttggggccgaaacgatctcaacctattc

SEQ ID NO: 50870 - DNA, 120 bp, Homo sapiens
  misc_feature: 642 for SV(W|O) and 28S
ggccggcgagcgcgccggccttcaccttcattgcgccacggcggctttcgtgcgagcccccgactcgcgcacgtgttagactccttggtccgtgtttcaagacgggtcgggtgggtagcc

SEQ ID NO: 50871 - DNA, 120 bp, Homo sapiens
  misc_feature: 642 for SV(W|O) and 28S
cacgccctcttgaactctctcttcaaagttcttttcaactttcccttacggtacttgttgactatcggtctcgtgccggtatttagccttagatggagtttaccacccgctttgggctgc

SEQ ID NO: 50872 - DNA, 120 bp, Homo sapiens
  misc_feature: 642 for SV(W|O) and 28S
gaacagcctctggcatgttggaacaatgtaggtaagggaagtcggcaagccggatccgtaacttcgggataaggattggctctaagggctgggtcggtcgggctggggcgcgaagcgggg

SEQ ID NO: 50873 - DNA, 120 bp, Homo sapiens
  misc_feature: 641 for SV(W|O) and 28S
ggcgcgccgggcccgggtcttcccggagtcgggttgcttgggaatgcagcccaaagcgggtggtaaactccatctaaggctaaataccggcacgagaccgatagtcaacaagtaccgtaa

SEQ ID NO: 50874 - DNA, 120 bp, Homo sapiens
  misc_feature: 641 for SV(W|O) and 28S
gggagagggtgtaaatctcgcgccgggccgtacccatatccgcagcaggtctccaaggtgaacagcctctggcatgttggaacaatgtaggtaagggaagtcggcaagccggatccgtaa

SEQ ID NO: 50875 - DNA, 120 bp, Homo sapiens
  misc_feature: 641 for SV(W|O) and 28S
tcgaaccatctagtagctggttccctccgaagtttccctcaggatagctggcgctctcgcagacccgacgcacccccgccacgcagttttatccggtaaagcgaatgattagaggtcttg

SEQ ID NO: 50876 - DNA, 120 bp, Homo sapiens
  misc_feature: 641 for SV(W|O) and 28S
gtgtaaatctcgcgccgggccgtacccatatccgcagcaggtctccaaggtgaacagcctctggcatgttggaacaatgtaggtaagggaagtcggcaagccggatccgtaacttcggga

SEQ ID NO: 50877 - DNA, 120 bp, Homo sapiens
  misc_feature: 641 for SV(W|O) and 28S
ggccctgcgggccgccggtgaaataccactactctgatcgttttttcactgacccggtgaggcgggggggcgagccccgaggggctctcgcttctggcgccaagcgcccggccgcgcgcc

SEQ ID NO: 50878 - DNA, 120 bp, Homo sapiens
  misc_feature: 641 for SV(W|O) and 28S
gaaccatctagtagctggttccctccgaagtttccctcaggatagctggcgctctcgcagacccgacgcacccccgccacgcagttttatccggtaaagcgaatgattagaggtcttggg

SEQ ID NO: 50879 - DNA, 120 bp, Homo sapiens
  misc_feature: 640 for SV(W|O) and 28S
tgtaaatctcgcgccgggccgtacccatatccgcagcaggtctccaaggtgaacagcctctggcatgttggaacaatgtaggtaagggaagtcggcaagccggatccgtaacttcgggat

SEQ ID NO: 50880 - DNA, 120 bp, Homo sapiens
  misc_feature: 640 for SV(W|O) and 28S
tgccttggaaagcgtcgcggttccggcggcgtccggtgagctctcgctggcccttgaaaatccgggggagagggtgtaaatctcgcgccgggccgtacccatatccgcagcaggtctcca

SEQ ID NO: 50881 - DNA, 120 bp, Homo sapiens
  misc_feature: 640 for SV(W|O) and 28S
ggctgactttcaatagatcgcagcgagggagctgctctgctacgtacgaaaccccgacccagaagcaggtcgtctacgaatggtttagcgccaggttccccacgaacgtgcggtgcgtga

SEQ ID NO: 50882 - DNA, 120 bp, Homo sapiens
  misc_feature: 640 for SV(W|O) and 28S
atagtcaacaagtaccgtaagggaaagttgaaaagaactttgaagagagagttcaagagggcgtgaaaccgttaagaggtaaacgggtggggtccgcgcagtccgcccggaggattcaac

SEQ ID NO: 50883 - DNA, 120 bp, Homo sapiens
  misc_feature: 640 for SV(W|O) and 28S
ggagagggtgtaaatctcgcgccgggccgtacccatatccgcagcaggtctccaaggtgaacagcctctggcatgttggaacaatgtaggtaagggaagtcggcaagccggatccgtaac

SEQ ID NO: 50884 - DNA, 120 bp, Homo sapiens
  misc_feature: 640 for SV(W|O) and 28S
cgcttcgcgccccagcccgaccgacccagcccttagagccaatccttatcccgaagttacggatccggcttgccgacttcccttacctacattgttccaacatgccagaggctgttcacc

SEQ ID NO: 50885 - DNA, 120 bp, Homo sapiens
  misc_feature: 640 for SV(W|O) and 28S
aaatctcgcgccgggccgtacccatatccgcagcaggtctccaaggtgaacagcctctggcatgttggaacaatgtaggtaagggaagtcggcaagccggatccgtaacttcgggataag

SEQ ID NO: 50886 - DNA, 120 bp, Homo sapiens
  misc_feature: 640 for SV(W|O) and 28S
acgggccggtggtgcgccctcggcggactggagaggcctcgggatcccacctcggccggcgagcgcgccggccttcaccttcattgcgccacggcggctttcgtgcgagcccccgactcg

SEQ ID NO: 50887 - DNA, 120 bp, Homo sapiens
  misc_feature: 639 for SV(W|O) and 28S
tcacgccctcttgaactctctcttcaaagttcttttcaactttcccttacggtacttgttgactatcggtctcgtgccggtatttagccttagatggagtttaccacccgctttgggctg

SEQ ID NO: 50888 - DNA, 120 bp, Homo sapiens
  misc_feature: 639 for SV(W|O) and 28S
tagtcaacaagtaccgtaagggaaagttgaaaagaactttgaagagagagttcaagagggcgtgaaaccgttaagaggtaaacgggtggggtccgcgcagtccgcccggaggattcaacc

SEQ ID NO: 50889 - DNA, 120 bp, Homo sapiens
  misc_feature: 639 for SV(W|O) and 28S
taatcgaaccatctagtagctggttccctccgaagtttccctcaggatagctggcgctctcgcagacccgacgcacccccgccacgcagttttatccggtaaagcgaatgattagaggtc

SEQ ID NO: 50890 - DNA, 120 bp, Homo sapiens
  misc_feature: 639 for SV(W|O) and 28S
agtcaacaagtaccgtaagggaaagttgaaaagaactttgaagagagagttcaagagggcgtgaaaccgttaagaggtaaacgggtggggtccgcgcagtccgcccggaggattcaaccc

SEQ ID NO: 50891 - DNA, 120 bp, Homo sapiens
  misc_feature: 639 for SV(W|O) and 28S
gggcgaagccagaggaaactctggtggaggtccgtagcggtcctgacgtgcaaatcggtcgtccgacctgggtataggggcgaaagactaatcgaaccatctagtagctggttccctccg

SEQ ID NO: 50892 - DNA, 120 bp, Homo sapiens
  misc_feature: 639 for SV(W|O) and 28S
ggcggactgcgcggaccccacccgtttacctcttaacggtttcacgccctcttgaactctctcttcaaagttcttttcaactttcccttacggtacttgttgactatcggtctcgtgccg

SEQ ID NO: 50893 - DNA, 120 bp, Homo sapiens
  misc_feature: 639 for SV(W|O) and 28S
gaggtgggatcccgaggcctctccagtccgccgagggcgcaccaccggcccgtctcgcccgccgcgccggggaggtggagcacgagcgcacgtgttaggacccgaaagatggtgaactat

SEQ ID NO: 50894 - DNA, 120 bp, Homo sapiens
  misc_feature: 639 for SV(W|O) and 28S
aaaatccgggggagagggtgtaaatctcgcgccgggccgtacccatatccgcagcaggtctccaaggtgaacagcctctggcatgttggaacaatgtaggtaagggaagtcggcaagccg

SEQ ID NO: 50895 - DNA, 120 bp, Homo sapiens
  misc_feature: 639 for SV(W|O) and 28S
ccgtgccttggaaagcgtcgcggttccggcggcgtccggtgagctctcgctggcccttgaaaatccgggggagagggtgtaaatctcgcgccgggccgtacccatatccgcagcaggtct

SEQ ID NO: 50896 - DNA, 120 bp, Homo sapiens
  misc_feature: 639 for SV(W|O) and 28S
aatcgaaccatctagtagctggttccctccgaagtttccctcaggatagctggcgctctcgcagacccgacgcacccccgccacgcagttttatccggtaaagcgaatgattagaggtct

SEQ ID NO: 50897 - DNA, 120 bp, Homo sapiens
  misc_feature: 639 for SV(W|O) and 28S
aagagcccagcgccgaatccccgccccgcggcggggcgcgggacatgtggcgtacggaagacccgctccccggcgccgctcgtggggggcccaagtccttctgatcgaggcccagcccgt

SEQ ID NO: 50898 - DNA, 120 bp, Homo sapiens
  misc_feature: 638 for SV(W|O) and 28S
tggagaggcctcgggatcccacctcggccggcgagcgcgccggccttcaccttcattgcgccacggcggctttcgtgcgagcccccgactcgcgcacgtgttagactccttggtccgtgt

SEQ ID NO: 50899 - DNA, 120 bp, Homo sapiens
  misc_feature: 638 for SV(W|O) and 28S
cggcgcgccgggcccgggtcttcccggagtcgggttgcttgggaatgcagcccaaagcgggtggtaaactccatctaaggctaaataccggcacgagaccgatagtcaacaagtaccgta

SEQ ID NO: 50900 - DNA, 120 bp, Homo sapiens
  misc_feature: 638 for SV(W|O) and 28S
aaagactaatcgaaccatctagtagctggttccctccgaagtttccctcaggatagctggcgctctcgcagacccgacgcacccccgccacgcagttttatccggtaaagcgaatgatta

SEQ ID NO: 50901 - DNA, 120 bp, Homo sapiens
  misc_feature: 638 for SV(W|O) and 28S
cccccggcgcgccgggcccgggtcttcccggagtcgggttgcttgggaatgcagcccaaagcgggtggtaaactccatctaaggctaaataccggcacgagaccgatagtcaacaagtac

SEQ ID NO: 50902 - DNA, 120 bp, Homo sapiens
  misc_feature: 638 for SV(W|O) and 28S
ccttcattgcgccacggcggctttcgtgcgagcccccgactcgcgcacgtgttagactccttggtccgtgtttcaagacgggtcgggtgggtagccgacgtcgccgccgaccccgtgcgc

SEQ ID NO: 50903 - DNA, 120 bp, Homo sapiens
  misc_feature: 638 for SV(W|O) and 28S
gccggcgagcgcgccggccttcaccttcattgcgccacggcggctttcgtgcgagcccccgactcgcgcacgtgttagactccttggtccgtgtttcaagacgggtcgggtgggtagccg

SEQ ID NO: 50904 - DNA, 120 bp, Homo sapiens
  misc_feature: 638 for SV(W|O) and 28S
gcccggaggattcaacccggcggcgggtccggccgtgtcggcggcccggcggatctttcccgccccccgttcctcccgacccctccacccgccctcccttcccccgccgcccctcctcct

SEQ ID NO: 50905 - DNA, 120 bp, Homo sapiens
  misc_feature: 638 for SV(W|O) and 28S
gagggctgactttcaatagatcgcagcgagggagctgctctgctacgtacgaaaccccgacccagaagcaggtcgtctacgaatggtttagcgccaggttccccacgaacgtgcggtgcg

SEQ ID NO: 50906 - DNA, 120 bp, Homo sapiens
  misc_feature: 638 for SV(W|O) and 28S
atcgaaccatctagtagctggttccctccgaagtttccctcaggatagctggcgctctcgcagacccgacgcacccccgccacgcagttttatccggtaaagcgaatgattagaggtctt

SEQ ID NO: 50907 - DNA, 120 bp, Homo sapiens
  misc_feature: 638 for SV(W|O) and 28S
actgcgcggaccccacccgtttacctcttaacggtttcacgccctcttgaactctctcttcaaagttcttttcaactttcccttacggtacttgttgactatcggtctcgtgccggtatt

SEQ ID NO: 50908 - DNA, 120 bp, Homo sapiens
  misc_feature: 637 for SV(W|O) and 28S
acgagaccgatagtcaacaagtaccgtaagggaaagttgaaaagaactttgaagagagagttcaagagggcgtgaaaccgttaagaggtaaacgggtggggtccgcgcagtccgcccgga

SEQ ID NO: 50909 - DNA, 120 bp, Homo sapiens
  misc_feature: 637 for SV(W|O) and 28S
cgaggtgggatcccgaggcctctccagtccgccgagggcgcaccaccggcccgtctcgcccgccgcgccggggaggtggagcacgagcgcacgtgttaggacccgaaagatggtgaacta

SEQ ID NO: 50910 - DNA, 120 bp, Homo sapiens
  misc_feature: 637 for SV(W|O) and 28S
gctgactttcaatagatcgcagcgagggagctgctctgctacgtacgaaaccccgacccagaagcaggtcgtctacgaatggtttagcgccaggttccccacgaacgtgcggtgcgtgac

SEQ ID NO: 50911 - DNA, 120 bp, Homo sapiens
  misc_feature: 637 for SV(W|O) and 28S
gaaaatccgggggagagggtgtaaatctcgcgccgggccgtacccatatccgcagcaggtctccaaggtgaacagcctctggcatgttggaacaatgtaggtaagggaagtcggcaagcc

SEQ ID NO: 50912 - DNA, 120 bp, Homo sapiens
  misc_feature: 637 for SV(W|O) and 28S
ggcccgtgccttggaaagcgtcgcggttccggcggcgtccggtgagctctcgctggcccttgaaaatccgggggagagggtgtaaatctcgcgccgggccgtacccatatccgcagcagg

SEQ ID NO: 50913 - DNA, 120 bp, Homo sapiens
  misc_feature: 637 for SV(W|O) and 28S
ctgactttcaatagatcgcagcgagggagctgctctgctacgtacgaaaccccgacccagaagcaggtcgtctacgaatggtttagcgccaggttccccacgaacgtgcggtgcgtgacg

SEQ ID NO: 50914 - DNA, 120 bp, Homo sapiens
  misc_feature: 637 for SV(W|O) and 28S
cgaaccatctagtagctggttccctccgaagtttccctcaggatagctggcgctctcgcagacccgacgcacccccgccacgcagttttatccggtaaagcgaatgattagaggtcttgg

SEQ ID NO: 50915 - DNA, 120 bp, Homo sapiens
  misc_feature: 636 for SV(W|O) and 28S
taaatctcgcgccgggccgtacccatatccgcagcaggtctccaaggtgaacagcctctggcatgttggaacaatgtaggtaagggaagtcggcaagccggatccgtaacttcgggataa

SEQ ID NO: 50916 - DNA, 120 bp, Homo sapiens
  misc_feature: 636 for SV(W|O) and 28S
gtgccttggaaagcgtcgcggttccggcggcgtccggtgagctctcgctggcccttgaaaatccgggggagagggtgtaaatctcgcgccgggccgtacccatatccgcagcaggtctcc

SEQ ID NO: 50917 - DNA, 120 bp, Homo sapiens
  misc_feature: 636 for SV(W|O) and 28S
gggcccgtgccttggaaagcgtcgcggttccggcggcgtccggtgagctctcgctggcccttgaaaatccgggggagagggtgtaaatctcgcgccgggccgtacccatatccgcagcag

SEQ ID NO: 50918 - DNA, 120 bp, Homo sapiens
  misc_feature: 636 for SV(W|O) and 28S
agggcgaagccagaggaaactctggtggaggtccgtagcggtcctgacgtgcaaatcggtcgtccgacctgggtataggggcgaaagactaatcgaaccatctagtagctggttccctcc

SEQ ID NO: 50919 - DNA, 120 bp, Homo sapiens
  misc_feature: 636 for SV(W|O) and 28S
gcccgtgccttggaaagcgtcgcggttccggcggcgtccggtgagctctcgctggcccttgaaaatccgggggagagggtgtaaatctcgcgccgggccgtacccatatccgcagcaggt

SEQ ID NO: 50920 - DNA, 120 bp, Homo sapiens
  misc_feature: 636 for SV(W|O) and 28S
cggtggtgcgccctcggcggactggagaggcctcgggatcccacctcggccggcgagcgcgccggccttcaccttcattgcgccacggcggctttcgtgcgagcccccgactcgcgcacg

SEQ ID NO: 50921 - DNA, 120 bp, Homo sapiens
  misc_feature: 635 for SV(W|O) and 28S
tgggcagggcgaagccagaggaaactctggtggaggtccgtagcggtcctgacgtgcaaatcggtcgtccgacctgggtataggggcgaaagactaatcgaaccatctagtagctggttc

SEQ ID NO: 50922 - DNA, 120 bp, Homo sapiens
  misc_feature: 635 for SV(W|O) and 28S
gtaaatctcgcgccgggccgtacccatatccgcagcaggtctccaaggtgaacagcctctggcatgttggaacaatgtaggtaagggaagtcggcaagccggatccgtaacttcgggata

SEQ ID NO: 50923 - DNA, 120 bp, Homo sapiens
  misc_feature: 635 for SV(W|O) and 28S
cggcgagcgcgccggccttcaccttcattgcgccacggcggctttcgtgcgagcccccgactcgcgcacgtgttagactccttggtccgtgtttcaagacgggtcgggtgggtagccgac

SEQ ID NO: 50924 - DNA, 120 bp, Homo sapiens
  misc_feature: 635 for SV(W|O) and 28S
gggcggactgcgcggaccccacccgtttacctcttaacggtttcacgccctcttgaactctctcttcaaagttcttttcaactttcccttacggtacttgttgactatcggtctcgtgcc

SEQ ID NO: 50925 - DNA, 120 bp, Homo sapiens
  misc_feature: 635 for SV(W|O) and 28S
gggcagggcgaagccagaggaaactctggtggaggtccgtagcggtcctgacgtgcaaatcggtcgtccgacctgggtataggggcgaaagactaatcgaaccatctagtagctggttcc

SEQ ID NO: 50926 - DNA, 120 bp, Homo sapiens
  misc_feature: 635 for SV(W|O) and 28S
ccggaggattcaacccggcggcgggtccggccgtgtcggcggcccggcggatctttcccgccccccgttcctcccgacccctccacccgccctcccttcccccgccgcccctcctcctcc

SEQ ID NO: 50927 - DNA, 120 bp, Homo sapiens
  misc_feature: 635 for SV(W|O) and 28S
aactccatctaaggctaaataccggcacgagaccgatagtcaacaagtaccgtaagggaaagttgaaaagaactttgaagagagagttcaagagggcgtgaaaccgttaagaggtaaacg

SEQ ID NO: 50928 - DNA, 120 bp, Homo sapiens
  misc_feature: 635 for SV(W|O) and 28S
ccctgcgggccgccggtgaaataccactactctgatcgttttttcactgacccggtgaggcgggggggcgagccccgaggggctctcgcttctggcgccaagcgcccggccgcgcgccgg

SEQ ID NO: 50929 - DNA, 120 bp, Homo sapiens
  misc_feature: 635 for SV(W|O) and 28S
agttcaccatctttcgggtcctaacacgtgcgctcgtgctccacctccccggcgcggcgggcgagacgggccggtggtgcgccctcggcggactggagaggcctcgggatcccacctcgg

SEQ ID NO: 50930 - DNA, 120 bp, Homo sapiens
  misc_feature: 634 for SV(W|O) and 28S
tgactttcaatagatcgcagcgagggagctgctctgctacgtacgaaaccccgacccagaagcaggtcgtctacgaatggtttagcgccaggttccccacgaacgtgcggtgcgtgacgg

SEQ ID NO: 50931 - DNA, 120 bp, Homo sapiens
  misc_feature: 634 for SV(W|O) and 28S
agaccgatagtcaacaagtaccgtaagggaaagttgaaaagaactttgaagagagagttcaagagggcgtgaaaccgttaagaggtaaacgggtggggtccgcgcagtccgcccggagga

SEQ ID NO: 50932 - DNA, 120 bp, Homo sapiens
  misc_feature: 634 for SV(W|O) and 28S
gccgggggcctcccacttattctacacctctcatgtctcttcaccgtgccagactagagtcaagctcaacagggtcttctttccccgctgattccgccaagcccgttcccttggctgtgg

SEQ ID NO: 50933 - DNA, 120 bp, Homo sapiens
  misc_feature: 634 for SV(W|O) and 28S
cttcattgcgccacggcggctttcgtgcgagcccccgactcgcgcacgtgttagactccttggtccgtgtttcaagacgggtcgggtgggtagccgacgtcgccgccgaccccgtgcgct

SEQ ID NO: 50934 - DNA, 120 bp, Homo sapiens
  misc_feature: 634 for SV(W|O) and 28S
ctccatctaaggctaaataccggcacgagaccgatagtcaacaagtaccgtaagggaaagttgaaaagaactttgaagagagagttcaagagggcgtgaaaccgttaagaggtaaacggg

SEQ ID NO: 50935 - DNA, 120 bp, Homo sapiens
  misc_feature: 634 for SV(W|O) and 28S
cggactgcgcggaccccacccgtttacctcttaacggtttcacgccctcttgaactctctcttcaaagttcttttcaactttcccttacggtacttgttgactatcggtctcgtgccggt

SEQ ID NO: 50936 - DNA, 120 bp, Homo sapiens
  misc_feature: 634 for SV(W|O) and 28S
ccgggcgcgacccgctccggggacagtgccaggtggggagtttgactggggcggtacacctgtcaaacggtaacgcaggtgtcctaaggcgagctcagggaggacagaaacctcccgtgg

SEQ ID NO: 50937 - DNA, 120 bp, Homo sapiens
  misc_feature: 634 for SV(W|O) and 28S
agagcccagcgccgaatccccgccccgcggcggggcgcgggacatgtggcgtacggaagacccgctccccggcgccgctcgtggggggcccaagtccttctgatcgaggcccagcccgtg

SEQ ID NO: 50938 - DNA, 120 bp, Homo sapiens
  misc_feature: 633 for SV(W|O) and 28S
cgctcatcagaccccagaaaaggtgttggttgatatagacagcaggacggtggccatggaagtcggaatccgctaaggagtgtgtaacaactcacctgccgaatcaactagccctgaaaa

SEQ ID NO: 50939 - DNA, 120 bp, Homo sapiens
  misc_feature: 633 for SV(W|O) and 28S
gatagtcaacaagtaccgtaagggaaagttgaaaagaactttgaagagagagttcaagagggcgtgaaaccgttaagaggtaaacgggtggggtccgcgcagtccgcccggaggattcaa

SEQ ID NO: 50940 - DNA, 120 bp, Homo sapiens
  misc_feature: 633 for SV(W|O) and 28S
ttgaaaatccgggggagagggtgtaaatctcgcgccgggccgtacccatatccgcagcaggtctccaaggtgaacagcctctggcatgttggaacaatgtaggtaagggaagtcggcaag

SEQ ID NO: 50941 - DNA, 120 bp, Homo sapiens
  misc_feature: 633 for SV(W|O) and 28S
ggggcccgtgccttggaaagcgtcgcggttccggcggcgtccggtgagctctcgctggcccttgaaaatccgggggagagggtgtaaatctcgcgccgggccgtacccatatccgcagca

SEQ ID NO: 50942 - DNA, 120 bp, Homo sapiens
  misc_feature: 633 for SV(W|O) and 28S
ggcgaagccagaggaaactctggtggaggtccgtagcggtcctgacgtgcaaatcggtcgtccgacctgggtataggggcgaaagactaatcgaaccatctagtagctggttccctccga

SEQ ID NO: 50943 - DNA, 120 bp, Homo sapiens
  misc_feature: 633 for SV(W|O) and 28S
ggagaggcctcgggatcccacctcggccggcgagcgcgccggccttcaccttcattgcgccacggcggctttcgtgcgagcccccgactcgcgcacgtgttagactccttggtccgtgtt

SEQ ID NO: 50944 - DNA, 120 bp, Homo sapiens
  misc_feature: 633 for SV(W|O) and 28S
aggggcccgtgccttggaaagcgtcgcggttccggcggcgtccggtgagctctcgctggcccttgaaaatccgggggagagggtgtaaatctcgcgccgggccgtacccatatccgcagc

SEQ ID NO: 50945 - DNA, 120 bp, Homo sapiens
  misc_feature: 633 for SV(W|O) and 28S
cgtgccttggaaagcgtcgcggttccggcggcgtccggtgagctctcgctggcccttgaaaatccgggggagagggtgtaaatctcgcgccgggccgtacccatatccgcagcaggtctc

SEQ ID NO: 50946 - DNA, 120 bp, Homo sapiens
  misc_feature: 633 for SV(W|O) and 28S
gaaagactaatcgaaccatctagtagctggttccctccgaagtttccctcaggatagctggcgctctcgcagacccgacgcacccccgccacgcagttttatccggtaaagcgaatgatt

SEQ ID NO: 50947 - DNA, 120 bp, Homo sapiens
  misc_feature: 633 for SV(W|O) and 28S
aatctcgcgccgggccgtacccatatccgcagcaggtctccaaggtgaacagcctctggcatgttggaacaatgtaggtaagggaagtcggcaagccggatccgtaacttcgggataagg

SEQ ID NO: 50948 - DNA, 120 bp, Homo sapiens
  misc_feature: 633 for SV(W|O) and 28S
ccatctaaggctaaataccggcacgagaccgatagtcaacaagtaccgtaagggaaagttgaaaagaactttgaagagagagttcaagagggcgtgaaaccgttaagaggtaaacgggtg

SEQ ID NO: 50949 - DNA, 120 bp, Homo sapiens
  misc_feature: 632 for SV(W|O) and 28S
cgatagtcaacaagtaccgtaagggaaagttgaaaagaactttgaagagagagttcaagagggcgtgaaaccgttaagaggtaaacgggtggggtccgcgcagtccgcccggaggattca

SEQ ID NO: 50950 - DNA, 120 bp, Homo sapiens
  misc_feature: 632 for SV(W|O) and 28S
tccctcaggatagctggcgctctcgcagacccgacgcacccccgccacgcagttttatccggtaaagcgaatgattagaggtcttggggccgaaacgatctcaacctattctcaaacttt

SEQ ID NO: 50951 - DNA, 120 bp, Homo sapiens
  misc_feature: 632 for SV(W|O) and 28S
cgagggctgactttcaatagatcgcagcgagggagctgctctgctacgtacgaaaccccgacccagaagcaggtcgtctacgaatggtttagcgccaggttccccacgaacgtgcggtgc

SEQ ID NO: 50952 - DNA, 120 bp, Homo sapiens
  misc_feature: 632 for SV(W|O) and 28S
gactgcgcggaccccacccgtttacctcttaacggtttcacgccctcttgaactctctcttcaaagttcttttcaactttcccttacggtacttgttgactatcggtctcgtgccggtat

SEQ ID NO: 50953 - DNA, 120 bp, Homo sapiens
  misc_feature: 632 for SV(W|O) and 28S
accgtaagggaaagttgaaaagaactttgaagagagagttcaagagggcgtgaaaccgttaagaggtaaacgggtggggtccgcgcagtccgcccggaggattcaacccggcggcgggtc

SEQ ID NO: 50954 - DNA, 120 bp, Homo sapiens
  misc_feature: 632 for SV(W|O) and 28S
cccgtcttgaaacacggaccaaggagtctaacacgtgcgcgagtcgggggctcgcacgaaagccgccgtggcgcaatgaaggtgaaggccggcgcgctcgccggccgaggtgggatcccg

SEQ ID NO: 50955 - DNA, 120 bp, Homo sapiens
  misc_feature: 631 for SV(W|O) and 28S
ttcattgcgccacggcggctttcgtgcgagcccccgactcgcgcacgtgttagactccttggtccgtgtttcaagacgggtcgggtgggtagccgacgtcgccgccgaccccgtgcgctc

SEQ ID NO: 50956 - DNA, 120 bp, Homo sapiens
  misc_feature: 631 for SV(W|O) and 28S
ttcaccatctttcgggtcctaacacgtgcgctcgtgctccacctccccggcgcggcgggcgagacgggccggtggtgcgccctcggcggactggagaggcctcgggatcccacctcggcc

SEQ ID NO: 50957 - DNA, 120 bp, Homo sapiens
  misc_feature: 631 for SV(W|O) and 28S
ccctcaggatagctggcgctctcgcagacccgacgcacccccgccacgcagttttatccggtaaagcgaatgattagaggtcttggggccgaaacgatctcaacctattctcaaacttta

SEQ ID NO: 50958 - DNA, 120 bp, Homo sapiens
  misc_feature: 631 for SV(W|O) and 28S
ggcagggcgaagccagaggaaactctggtggaggtccgtagcggtcctgacgtgcaaatcggtcgtccgacctgggtataggggcgaaagactaatcgaaccatctagtagctggttccc

SEQ ID NO: 50959 - DNA, 120 bp, Homo sapiens
  misc_feature: 631 for SV(W|O) and 28S
ggcgagcgcgccggccttcaccttcattgcgccacggcggctttcgtgcgagcccccgactcgcgcacgtgttagactccttggtccgtgtttcaagacgggtcgggtgggtagccgacg

SEQ ID NO: 50960 - DNA, 120 bp, Homo sapiens
  misc_feature: 631 for SV(W|O) and 28S
cgagaccgatagtcaacaagtaccgtaagggaaagttgaaaagaactttgaagagagagttcaagagggcgtgaaaccgttaagaggtaaacgggtggggtccgcgcagtccgcccggag

SEQ ID NO: 50961 - DNA, 120 bp, Homo sapiens
  misc_feature: 631 for SV(W|O) and 28S
cgccgggggcctcccacttattctacacctctcatgtctcttcaccgtgccagactagagtcaagctcaacagggtcttctttccccgctgattccgccaagcccgttcccttggctgtg

SEQ ID NO: 50962 - DNA, 120 bp, Homo sapiens
  misc_feature: 630 for SV(W|O) and 28S
ccgtcttgaaacacggaccaaggagtctaacacgtgcgcgagtcgggggctcgcacgaaagccgccgtggcgcaatgaaggtgaaggccggcgcgctcgccggccgaggtgggatcccga

SEQ ID NO: 50963 - DNA, 120 bp, Homo sapiens
  misc_feature: 630 for SV(W|O) and 28S
ccccggcgcgccgggcccgggtcttcccggagtcgggttgcttgggaatgcagcccaaagcgggtggtaaactccatctaaggctaaataccggcacgagaccgatagtcaacaagtacc

SEQ ID NO: 50964 - DNA, 120 bp, Homo sapiens
  misc_feature: 630 for SV(W|O) and 28S
gcgccgggggcctcccacttattctacacctctcatgtctcttcaccgtgccagactagagtcaagctcaacagggtcttctttccccgctgattccgccaagcccgttcccttggctgt

SEQ ID NO: 50965 - DNA, 120 bp, Homo sapiens
  misc_feature: 630 for SV(W|O) and 28S
cccggaggattcaacccggcggcgggtccggccgtgtcggcggcccggcggatctttcccgccccccgttcctcccgacccctccacccgccctcccttcccccgccgcccctcctcctc

SEQ ID NO: 50966 - DNA, 120 bp, Homo sapiens
  misc_feature: 630 for SV(W|O) and 28S
agcgagggagctgctctgctacgtacgaaaccccgacccagaagcaggtcgtctacgaatggtttagcgccaggttccccacgaacgtgcggtgcgtgacgggcgagggggcggccgcct

SEQ ID NO: 50967 - DNA, 120 bp, Homo sapiens
  misc_feature: 629 for SV(W|O) and 28S
gtcaacaagtaccgtaagggaaagttgaaaagaactttgaagagagagttcaagagggcgtgaaaccgttaagaggtaaacgggtggggtccgcgcagtccgcccggaggattcaacccg

SEQ ID NO: 50968 - DNA, 120 bp, Homo sapiens
  misc_feature: 629 for SV(W|O) and 28S
cgcgccggccgggcgcgacccgctccggggacagtgccaggtggggagtttgactggggcggtacacctgtcaaacggtaacgcaggtgtcctaaggcgagctcagggaggacagaaacc

SEQ ID NO: 50969 - DNA, 120 bp, Homo sapiens
  misc_feature: 629 for SV(W|O) and 28S
gccgggcgcgacccgctccggggacagtgccaggtggggagtttgactggggcggtacacctgtcaaacggtaacgcaggtgtcctaaggcgagctcagggaggacagaaacctcccgtg

SEQ ID NO: 50970 - DNA, 120 bp, Homo sapiens
  misc_feature: 629 for SV(W|O) and 28S
gccctgcgggccgccggtgaaataccactactctgatcgttttttcactgacccggtgaggcgggggggcgagccccgaggggctctcgcttctggcgccaagcgcccggccgcgcgccg

SEQ ID NO: 50971 - DNA, 120 bp, Homo sapiens
  misc_feature: 629 for SV(W|O) and 28S
gactttcaatagatcgcagcgagggagctgctctgctacgtacgaaaccccgacccagaagcaggtcgtctacgaatggtttagcgccaggttccccacgaacgtgcggtgcgtgacggg

SEQ ID NO: 50972 - DNA, 120 bp, Homo sapiens
  misc_feature: 629 for SV(W|O) and 28S
ctttcgtgcgagcccccgactcgcgcacgtgttagactccttggtccgtgtttcaagacgggtcgggtgggtagccgacgtcgccgccgaccccgtgcgctcgctccgccgtccccctct

SEQ ID NO: 50973 - DNA, 120 bp, Homo sapiens
  misc_feature: 629 for SV(W|O) and 28S
cacgagaccgatagtcaacaagtaccgtaagggaaagttgaaaagaactttgaagagagagttcaagagggcgtgaaaccgttaagaggtaaacgggtggggtccgcgcagtccgcccgg

SEQ ID NO: 50974 - DNA, 120 bp, Homo sapiens
  misc_feature: 628 for SV(W|O) and 28S
tcaacaagtaccgtaagggaaagttgaaaagaactttgaagagagagttcaagagggcgtgaaaccgttaagaggtaaacgggtggggtccgcgcagtccgcccggaggattcaacccgg

SEQ ID NO: 50975 - DNA, 120 bp, Homo sapiens
  misc_feature: 628 for SV(W|O) and 28S
ggactgcgcggaccccacccgtttacctcttaacggtttcacgccctcttgaactctctcttcaaagttcttttcaactttcccttacggtacttgttgactatcggtctcgtgccggta

SEQ ID NO: 50976 - DNA, 120 bp, Homo sapiens
  misc_feature: 628 for SV(W|O) and 28S
gccgaggtgggatcccgaggcctctccagtccgccgagggcgcaccaccggcccgtctcgcccgccgcgccggggaggtggagcacgagcgcacgtgttaggacccgaaagatggtgaac

SEQ ID NO: 50977 - DNA, 120 bp, Homo sapiens
  misc_feature: 628 for SV(W|O) and 28S
ggtgcgccctcggcggactggagaggcctcgggatcccacctcggccggcgagcgcgccggccttcaccttcattgcgccacggcggctttcgtgcgagcccccgactcgcgcacgtgtt

SEQ ID NO: 50978 - DNA, 120 bp, Homo sapiens
  misc_feature: 628 for SV(W|O) and 28S
cttgaaacacggaccaaggagtctaacacgtgcgcgagtcgggggctcgcacgaaagccgccgtggcgcaatgaaggtgaaggccggcgcgctcgccggccgaggtgggatcccgaggcc

SEQ ID NO: 50979 - DNA, 120 bp, Homo sapiens
  misc_feature: 628 for SV(W|O) and 28S
cctgcgggccgccggtgaaataccactactctgatcgttttttcactgacccggtgaggcgggggggcgagccccgaggggctctcgcttctggcgccaagcgcccggccgcgcgccggc

SEQ ID NO: 50980 - DNA, 120 bp, Homo sapiens
  misc_feature: 628 for SV(W|O) and 28S
cgccggccgggcgcgacccgctccggggacagtgccaggtggggagtttgactggggcggtacacctgtcaaacggtaacgcaggtgtcctaaggcgagctcagggaggacagaaacctc

SEQ ID NO: 50981 - DNA, 120 bp, Homo sapiens
  misc_feature: 628 for SV(W|O) and 28S
gaccgatagtcaacaagtaccgtaagggaaagttgaaaagaactttgaagagagagttcaagagggcgtgaaaccgttaagaggtaaacgggtggggtccgcgcagtccgcccggaggat

SEQ ID NO: 50982 - DNA, 120 bp, Homo sapiens
  misc_feature: 628 for SV(W|O) and 28S
accgatagtcaacaagtaccgtaagggaaagttgaaaagaactttgaagagagagttcaagagggcgtgaaaccgttaagaggtaaacgggtggggtccgcgcagtccgcccggaggatt

SEQ ID NO: 50983 - DNA, 120 bp, Homo sapiens
  misc_feature: 627 for SV(W|O) and 28S
ttgcgccacggcggctttcgtgcgagcccccgactcgcgcacgtgttagactccttggtccgtgtttcaagacgggtcgggtgggtagccgacgtcgccgccgaccccgtgcgctcgctc

SEQ ID NO: 50984 - DNA, 120 bp, Homo sapiens
  misc_feature: 627 for SV(W|O) and 28S
ggtggtgcgccctcggcggactggagaggcctcgggatcccacctcggccggcgagcgcgccggccttcaccttcattgcgccacggcggctttcgtgcgagcccccgactcgcgcacgt

SEQ ID NO: 50985 - DNA, 120 bp, Homo sapiens
  misc_feature: 627 for SV(W|O) and 28S
ggccgggcgcgacccgctccggggacagtgccaggtggggagtttgactggggcggtacacctgtcaaacggtaacgcaggtgtcctaaggcgagctcagggaggacagaaacctcccgt

SEQ ID NO: 50986 - DNA, 120 bp, Homo sapiens
  misc_feature: 627 for SV(W|O) and 28S
gcggactgcgcggaccccacccgtttacctcttaacggtttcacgccctcttgaactctctcttcaaagttcttttcaactttcccttacggtacttgttgactatcggtctcgtgccgg

SEQ ID NO: 50987 - DNA, 120 bp, Homo sapiens
  misc_feature: 627 for SV(W|O) and 28S
ctttcaatagatcgcagcgagggagctgctctgctacgtacgaaaccccgacccagaagcaggtcgtctacgaatggtttagcgccaggttccccacgaacgtgcggtgcgtgacgggcg

SEQ ID NO: 50988 - DNA, 120 bp, Homo sapiens
  misc_feature: 627 for SV(W|O) and 28S
ctggagaggcctcgggatcccacctcggccggcgagcgcgccggccttcaccttcattgcgccacggcggctttcgtgcgagcccccgactcgcgcacgtgttagactccttggtccgtg

SEQ ID NO: 50989 - DNA, 120 bp, Homo sapiens
  misc_feature: 627 for SV(W|O) and 28S
aagtaccgtaagggaaagttgaaaagaactttgaagagagagttcaagagggcgtgaaaccgttaagaggtaaacgggtggggtccgcgcagtccgcccggaggattcaacccggcggcg

SEQ ID NO: 50990 - DNA, 120 bp, Homo sapiens
  misc_feature: 627 for SV(W|O) and 28S
actccatctaaggctaaataccggcacgagaccgatagtcaacaagtaccgtaagggaaagttgaaaagaactttgaagagagagttcaagagggcgtgaaaccgttaagaggtaaacgg

SEQ ID NO: 50991 - DNA, 120 bp, Homo sapiens
  misc_feature: 627 for SV(W|O) and 28S
ccggcgcgccgggcccgggtcttcccggagtcgggttgcttgggaatgcagcccaaagcgggtggtaaactccatctaaggctaaataccggcacgagaccgatagtcaacaagtaccgt

SEQ ID NO: 50992 - DNA, 120 bp, Homo sapiens
  misc_feature: 626 for SV(W|O) and 28S
cctcaggatagctggcgctctcgcagacccgacgcacccccgccacgcagttttatccggtaaagcgaatgattagaggtcttggggccgaaacgatctcaacctattctcaaactttaa

SEQ ID NO: 50993 - DNA, 120 bp, Homo sapiens
  misc_feature: 626 for SV(W|O) and 28S
gtgcgccctcggcggactggagaggcctcgggatcccacctcggccggcgagcgcgccggccttcaccttcattgcgccacggcggctttcgtgcgagcccccgactcgcgcacgtgtta

SEQ ID NO: 50994 - DNA, 120 bp, Homo sapiens
  misc_feature: 626 for SV(W|O) and 28S
gcgccggccgggcgcgacccgctccggggacagtgccaggtggggagtttgactggggcggtacacctgtcaaacggtaacgcaggtgtcctaaggcgagctcagggaggacagaaacct

SEQ ID NO: 50995 - DNA, 120 bp, Homo sapiens
  misc_feature: 626 for SV(W|O) and 28S
cgtcttgaaacacggaccaaggagtctaacacgtgcgcgagtcgggggctcgcacgaaagccgccgtggcgcaatgaaggtgaaggccggcgcgctcgccggccgaggtgggatcccgag

SEQ ID NO: 50996 - DNA, 120 bp, Homo sapiens
  misc_feature: 626 for SV(W|O) and 28S
cccggcgcgccgggcccgggtcttcccggagtcgggttgcttgggaatgcagcccaaagcgggtggtaaactccatctaaggctaaataccggcacgagaccgatagtcaacaagtaccg

SEQ ID NO: 50997 - DNA, 120 bp, Homo sapiens
  misc_feature: 625 for SV(W|O) and 28S
tttcgtgcgagcccccgactcgcgcacgtgttagactccttggtccgtgtttcaagacgggtcgggtgggtagccgacgtcgccgccgaccccgtgcgctcgctccgccgtccccctctt

SEQ ID NO: 50998 - DNA, 120 bp, Homo sapiens
  misc_feature: 625 for SV(W|O) and 28S
ttcgtgcgagcccccgactcgcgcacgtgttagactccttggtccgtgtttcaagacgggtcgggtgggtagccgacgtcgccgccgaccccgtgcgctcgctccgccgtccccctcttc

SEQ ID NO: 50999 - DNA, 120 bp, Homo sapiens
  misc_feature: 625 for SV(W|O) and 28S
gcgaagccagaggaaactctggtggaggtccgtagcggtcctgacgtgcaaatcggtcgtccgacctgggtataggggcgaaagactaatcgaaccatctagtagctggttccctccgaa

SEQ ID NO: 51000 - DNA, 120 bp, Homo sapiens
  misc_feature: 625 for SV(W|O) and 28S
tgcgccctcggcggactggagaggcctcgggatcccacctcggccggcgagcgcgccggccttcaccttcattgcgccacggcggctttcgtgcgagcccccgactcgcgcacgtgttag

SEQ ID NO: 51001 - DNA, 120 bp, Homo sapiens
  misc_feature: 625 for SV(W|O) and 28S
ccggcgagcgcgccggccttcaccttcattgcgccacggcggctttcgtgcgagcccccgactcgcgcacgtgttagactccttggtccgtgtttcaagacgggtcgggtgggtagccga

SEQ ID NO: 51002 - DNA, 120 bp, Homo sapiens
  misc_feature: 625 for SV(W|O) and 28S
gcgagcgcgccggccttcaccttcattgcgccacggcggctttcgtgcgagcccccgactcgcgcacgtgttagactccttggtccgtgtttcaagacgggtcgggtgggtagccgacgt

SEQ ID NO: 51003 - DNA, 120 bp, Homo sapiens
  misc_feature: 624 for SV(W|O) and 28S
tgcgccacggcggctttcgtgcgagcccccgactcgcgcacgtgttagactccttggtccgtgtttcaagacgggtcgggtgggtagccgacgtcgccgccgaccccgtgcgctcgctcc

SEQ ID NO: 51004 - DNA, 120 bp, Homo sapiens
  misc_feature: 624 for SV(W|O) and 28S
tcgagggctgactttcaatagatcgcagcgagggagctgctctgctacgtacgaaaccccgacccagaagcaggtcgtctacgaatggtttagcgccaggttccccacgaacgtgcggtg

SEQ ID NO: 51005 - DNA, 120 bp, Homo sapiens
  misc_feature: 624 for SV(W|O) and 28S
ggcgaaagactaatcgaaccatctagtagctggttccctccgaagtttccctcaggatagctggcgctctcgcagacccgacgcacccccgccacgcagttttatccggtaaagcgaatg

SEQ ID NO: 51006 - DNA, 120 bp, Homo sapiens
  misc_feature: 624 for SV(W|O) and 28S
gctttcgtgcgagcccccgactcgcgcacgtgttagactccttggtccgtgtttcaagacgggtcgggtgggtagccgacgtcgccgccgaccccgtgcgctcgctccgccgtccccctc

SEQ ID NO: 51007 - DNA, 120 bp, Homo sapiens
  misc_feature: 624 for SV(W|O) and 28S
actttcaatagatcgcagcgagggagctgctctgctacgtacgaaaccccgacccagaagcaggtcgtctacgaatggtttagcgccaggttccccacgaacgtgcggtgcgtgacgggc

SEQ ID NO: 51008 - DNA, 120 bp, Homo sapiens
  misc_feature: 624 for SV(W|O) and 28S
gcagggcgaagccagaggaaactctggtggaggtccgtagcggtcctgacgtgcaaatcggtcgtccgacctgggtataggggcgaaagactaatcgaaccatctagtagctggttccct

SEQ ID NO: 51009 - DNA, 120 bp, Homo sapiens
  misc_feature: 624 for SV(W|O) and 28S
atgttggaacaatgtaggtaagggaagtcggcaagccggatccgtaacttcgggataaggattggctctaagggctgggtcggtcgggctggggcgcgaagcggggctgggcgcgcgccg

SEQ ID NO: 51010 - DNA, 120 bp, Homo sapiens
  misc_feature: 623 for SV(W|O) and 28S
acgctcatcagaccccagaaaaggtgttggttgatatagacagcaggacggtggccatggaagtcggaatccgctaaggagtgtgtaacaactcacctgccgaatcaactagccctgaaa

SEQ ID NO: 51011 - DNA, 120 bp, Homo sapiens
  misc_feature: 623 for SV(W|O) and 28S
tggtgcgccctcggcggactggagaggcctcgggatcccacctcggccggcgagcgcgccggccttcaccttcattgcgccacggcggctttcgtgcgagcccccgactcgcgcacgtgt

SEQ ID NO: 51012 - DNA, 120 bp, Homo sapiens
  misc_feature: 623 for SV(W|O) and 28S
taccgtaagggaaagttgaaaagaactttgaagagagagttcaagagggcgtgaaaccgttaagaggtaaacgggtggggtccgcgcagtccgcccggaggattcaacccggcggcgggt

SEQ ID NO: 51013 - DNA, 120 bp, Homo sapiens
  misc_feature: 623 for SV(W|O) and 28S
caagtaccgtaagggaaagttgaaaagaactttgaagagagagttcaagagggcgtgaaaccgttaagaggtaaacgggtggggtccgcgcagtccgcccggaggattcaacccggcggc

SEQ ID NO: 51014 - DNA, 120 bp, Homo sapiens
  misc_feature: 623 for SV(W|O) and 28S
acagcctctggcatgttggaacaatgtaggtaagggaagtcggcaagccggatccgtaacttcgggataaggattggctctaagggctgggtcggtcgggctggggcgcgaagcggggct

SEQ ID NO: 51015 - DNA, 120 bp, Homo sapiens
  misc_feature: 622 for SV(W|O) and 28S
ttcagggctagttgattcggcaggtgagttgttacacactccttagcggattccgacttccatggccaccgtcctgctgtctatatcaaccaacaccttttctggggtctgatgagcgtc

SEQ ID NO: 51016 - DNA, 120 bp, Homo sapiens
  misc_feature: 622 for SV(W|O) and 28S
gcgaaagactaatcgaaccatctagtagctggttccctccgaagtttccctcaggatagctggcgctctcgcagacccgacgcacccccgccacgcagttttatccggtaaagcgaatga

SEQ ID NO: 51017 - DNA, 120 bp, Homo sapiens
  misc_feature: 622 for SV(W|O) and 28S
gtggtgcgccctcggcggactggagaggcctcgggatcccacctcggccggcgagcgcgccggccttcaccttcattgcgccacggcggctttcgtgcgagcccccgactcgcgcacgtg

SEQ ID NO: 51018 - DNA, 120 bp, Homo sapiens
  misc_feature: 622 for SV(W|O) and 28S
ctgcgggccgccggtgaaataccactactctgatcgttttttcactgacccggtgaggcgggggggcgagccccgaggggctctcgcttctggcgccaagcgcccggccgcgcgccggcc

SEQ ID NO: 51019 - DNA, 120 bp, Homo sapiens
  misc_feature: 622 for SV(W|O) and 28S
cagggcgaagccagaggaaactctggtggaggtccgtagcggtcctgacgtgcaaatcggtcgtccgacctgggtataggggcgaaagactaatcgaaccatctagtagctggttccctc

SEQ ID NO: 51020 - DNA, 120 bp, Homo sapiens
  misc_feature: 621 for SV(W|O) and 28S
gtaccgtaagggaaagttgaaaagaactttgaagagagagttcaagagggcgtgaaaccgttaagaggtaaacgggtggggtccgcgcagtccgcccggaggattcaacccggcggcggg

SEQ ID NO: 51021 - DNA, 120 bp, Homo sapiens
  misc_feature: 621 for SV(W|O) and 28S
gaggattcaacccggcggcgggtccggccgtgtcggcggcccggcggatctttcccgccccccgttcctcccgacccctccacccgccctcccttcccccgccgcccctcctcctcctcc

SEQ ID NO: 51022 - DNA, 120 bp, Homo sapiens
  misc_feature: 621 for SV(W|O) and 28S
gaggggcccgtgccttggaaagcgtcgcggttccggcggcgtccggtgagctctcgctggcccttgaaaatccgggggagagggtgtaaatctcgcgccgggccgtacccatatccgcag

SEQ ID NO: 51023 - DNA, 120 bp, Homo sapiens
  misc_feature: 621 for SV(W|O) and 28S
gagcccagcgccgaatccccgccccgcggcggggcgcgggacatgtggcgtacggaagacccgctccccggcgccgctcgtggggggcccaagtccttctgatcgaggcccagcccgtgg

SEQ ID NO: 51024 - DNA, 120 bp, Homo sapiens
  misc_feature: 621 for SV(W|O) and 28S
ccgatagtcaacaagtaccgtaagggaaagttgaaaagaactttgaagagagagttcaagagggcgtgaaaccgttaagaggtaaacgggtggggtccgcgcagtccgcccggaggattc

SEQ ID NO: 51025 - DNA, 120 bp, Homo sapiens
  misc_feature: 620 for SV(W|O) and 28S
cccgacccgtcttgaaacacggaccaaggagtctaacacgtgcgcgagtcgggggctcgcacgaaagccgccgtggcgcaatgaaggtgaaggccggcgcgctcgccggccgaggtggga

SEQ ID NO: 51026 - DNA, 120 bp, Homo sapiens
  misc_feature: 620 for SV(W|O) and 28S
gcggctttcgtgcgagcccccgactcgcgcacgtgttagactccttggtccgtgtttcaagacgggtcgggtgggtagccgacgtcgccgccgaccccgtgcgctcgctccgccgtcccc

SEQ ID NO: 51027 - DNA, 120 bp, Homo sapiens
  misc_feature: 620 for SV(W|O) and 28S
gggcgaaagactaatcgaaccatctagtagctggttccctccgaagtttccctcaggatagctggcgctctcgcagacccgacgcacccccgccacgcagttttatccggtaaagcgaat

SEQ ID NO: 51028 - DNA, 120 bp, Homo sapiens
  misc_feature: 620 for SV(W|O) and 28S
cagcgagggagctgctctgctacgtacgaaaccccgacccagaagcaggtcgtctacgaatggtttagcgccaggttccccacgaacgtgcggtgcgtgacgggcgagggggcggccgcc

SEQ ID NO: 51029 - DNA, 120 bp, Homo sapiens
  misc_feature: 620 for SV(W|O) and 28S
gacccgtcttgaaacacggaccaaggagtctaacacgtgcgcgagtcgggggctcgcacgaaagccgccgtggcgcaatgaaggtgaaggccggcgcgctcgccggccgaggtgggatcc

SEQ ID NO: 51030 - DNA, 120 bp, Homo sapiens
  misc_feature: 620 for SV(W|O) and 28S
cctcccgcccacgccccgctccccgcccccggagccccgcggacgctacgccgcgacgagtaggagggccgctgcggtgagccttgaagcctagggcgcgggcccgggtggagccgccgc

SEQ ID NO: 51031 - DNA, 120 bp, Homo sapiens
  misc_feature: 620 for SV(W|O) and 28S
cattgcgccacggcggctttcgtgcgagcccccgactcgcgcacgtgttagactccttggtccgtgtttcaagacgggtcgggtgggtagccgacgtcgccgccgaccccgtgcgctcgc

SEQ ID NO: 51032 - DNA, 120 bp, Homo sapiens
  misc_feature: 620 for SV(W|O) and 28S
gcacgagaccgatagtcaacaagtaccgtaagggaaagttgaaaagaactttgaagagagagttcaagagggcgtgaaaccgttaagaggtaaacgggtggggtccgcgcagtccgcccg

SEQ ID NO: 51033 - DNA, 120 bp, Homo sapiens
  misc_feature: 620 for SV(W|O) and 28S
aaacacggaccaaggagtctaacacgtgcgcgagtcgggggctcgcacgaaagccgccgtggcgcaatgaaggtgaaggccggcgcgctcgccggccgaggtgggatcccgaggcctctc

SEQ ID NO: 51034 - DNA, 120 bp, Homo sapiens
  misc_feature: 620 for SV(W|O) and 28S
ccatctttcgggtcctaacacgtgcgctcgtgctccacctccccggcgcggcgggcgagacgggccggtggtgcgccctcggcggactggagaggcctcgggatcccacctcggccggcg

SEQ ID NO: 51035 - DNA, 120 bp, Homo sapiens
  misc_feature: 619 for SV(W|O) and 28S
tgaaacacggaccaaggagtctaacacgtgcgcgagtcgggggctcgcacgaaagccgccgtggcgcaatgaaggtgaaggccggcgcgctcgccggccgaggtgggatcccgaggcctc

SEQ ID NO: 51036 - DNA, 120 bp, Homo sapiens
  misc_feature: 619 for SV(W|O) and 28S
acccgtcttgaaacacggaccaaggagtctaacacgtgcgcgagtcgggggctcgcacgaaagccgccgtggcgcaatgaaggtgaaggccggcgcgctcgccggccgaggtgggatccc

SEQ ID NO: 51037 - DNA, 120 bp, Homo sapiens
  misc_feature: 619 for SV(W|O) and 28S
caccttcattgcgccacggcggctttcgtgcgagcccccgactcgcgcacgtgttagactccttggtccgtgtttcaagacgggtcgggtgggtagccgacgtcgccgccgaccccgtgc

SEQ ID NO: 51038 - DNA, 120 bp, Homo sapiens
  misc_feature: 619 for SV(W|O) and 28S
cgacccgtcttgaaacacggaccaaggagtctaacacgtgcgcgagtcgggggctcgcacgaaagccgccgtggcgcaatgaaggtgaaggccggcgcgctcgccggccgaggtgggatc

SEQ ID NO: 51039 - DNA, 120 bp, Homo sapiens
  misc_feature: 619 for SV(W|O) and 28S
ccgggggcctcccacttattctacacctctcatgtctcttcaccgtgccagactagagtcaagctcaacagggtcttctttccccgctgattccgccaagcccgttcccttggctgtggt

SEQ ID NO: 51040 - DNA, 120 bp, Homo sapiens
  misc_feature: 619 for SV(W|O) and 28S
attgcgccacggcggctttcgtgcgagcccccgactcgcgcacgtgttagactccttggtccgtgtttcaagacgggtcgggtgggtagccgacgtcgccgccgaccccgtgcgctcgct

SEQ ID NO: 51041 - DNA, 120 bp, Homo sapiens
  misc_feature: 618 for SV(W|O) and 28S
ggggcgaaagactaatcgaaccatctagtagctggttccctccgaagtttccctcaggatagctggcgctctcgcagacccgacgcacccccgccacgcagttttatccggtaaagcgaa

SEQ ID NO: 51042 - DNA, 120 bp, Homo sapiens
  misc_feature: 618 for SV(W|O) and 28S
atcgcagcgagggagctgctctgctacgtacgaaaccccgacccagaagcaggtcgtctacgaatggtttagcgccaggttccccacgaacgtgcggtgcgtgacgggcgagggggcggc

SEQ ID NO: 51043 - DNA, 120 bp, Homo sapiens
  misc_feature: 618 for SV(W|O) and 28S
cggccgggcgcgacccgctccggggacagtgccaggtggggagtttgactggggcggtacacctgtcaaacggtaacgcaggtgtcctaaggcgagctcagggaggacagaaacctcccg

SEQ ID NO: 51044 - DNA, 120 bp, Homo sapiens
  misc_feature: 618 for SV(W|O) and 28S
cgaaagactaatcgaaccatctagtagctggttccctccgaagtttccctcaggatagctggcgctctcgcagacccgacgcacccccgccacgcagttttatccggtaaagcgaatgat

SEQ ID NO: 51045 - DNA, 120 bp, Homo sapiens
  misc_feature: 618 for SV(W|O) and 28S
agtaccgtaagggaaagttgaaaagaactttgaagagagagttcaagagggcgtgaaaccgttaagaggtaaacgggtggggtccgcgcagtccgcccggaggattcaacccggcggcgg

SEQ ID NO: 51046 - DNA, 120 bp, Homo sapiens
  misc_feature: 618 for SV(W|O) and 28S
cagcctctggcatgttggaacaatgtaggtaagggaagtcggcaagccggatccgtaacttcgggataaggattggctctaagggctgggtcggtcgggctggggcgcgaagcggggctg

SEQ ID NO: 51047 - DNA, 120 bp, Homo sapiens
  misc_feature: 617 for SV(W|O) and 28S
tcaatagatcgcagcgagggagctgctctgctacgtacgaaaccccgacccagaagcaggtcgtctacgaatggtttagcgccaggttccccacgaacgtgcggtgcgtgacgggcgagg

SEQ ID NO: 51048 - DNA, 120 bp, Homo sapiens
  misc_feature: 617 for SV(W|O) and 28S
gcgcgccggccgggcgcgacccgctccggggacagtgccaggtggggagtttgactggggcggtacacctgtcaaacggtaacgcaggtgtcctaaggcgagctcagggaggacagaaac

SEQ ID NO: 51049 - DNA, 120 bp, Homo sapiens
  misc_feature: 617 for SV(W|O) and 28S
gccggccgggcgcgacccgctccggggacagtgccaggtggggagtttgactggggcggtacacctgtcaaacggtaacgcaggtgtcctaaggcgagctcagggaggacagaaacctcc

SEQ ID NO: 51050 - DNA, 120 bp, Homo sapiens
  misc_feature: 617 for SV(W|O) and 28S
accttcattgcgccacggcggctttcgtgcgagcccccgactcgcgcacgtgttagactccttggtccgtgtttcaagacgggtcgggtgggtagccgacgtcgccgccgaccccgtgcg

SEQ ID NO: 51051 - DNA, 120 bp, Homo sapiens
  misc_feature: 617 for SV(W|O) and 28S
caatagatcgcagcgagggagctgctctgctacgtacgaaaccccgacccagaagcaggtcgtctacgaatggtttagcgccaggttccccacgaacgtgcggtgcgtgacgggcgaggg

SEQ ID NO: 51052 - DNA, 120 bp, Homo sapiens
  misc_feature: 617 for SV(W|O) and 28S
aatagatcgcagcgagggagctgctctgctacgtacgaaaccccgacccagaagcaggtcgtctacgaatggtttagcgccaggttccccacgaacgtgcggtgcgtgacgggcgagggg

SEQ ID NO: 51053 - DNA, 120 bp, Homo sapiens
  misc_feature: 616 for SV(W|O) and 28S
tcattgcgccacggcggctttcgtgcgagcccccgactcgcgcacgtgttagactccttggtccgtgtttcaagacgggtcgggtgggtagccgacgtcgccgccgaccccgtgcgctcg

SEQ ID NO: 51054 - DNA, 120 bp, Homo sapiens
  misc_feature: 616 for SV(W|O) and 28S
ggctttcgtgcgagcccccgactcgcgcacgtgttagactccttggtccgtgtttcaagacgggtcgggtgggtagccgacgtcgccgccgaccccgtgcgctcgctccgccgtccccct

SEQ ID NO: 51055 - DNA, 120 bp, Homo sapiens
  misc_feature: 616 for SV(W|O) and 28S
cttcaccttcattgcgccacggcggctttcgtgcgagcccccgactcgcgcacgtgttagactccttggtccgtgtttcaagacgggtcgggtgggtagccgacgtcgccgccgaccccg

SEQ ID NO: 51056 - DNA, 120 bp, Homo sapiens
  misc_feature: 616 for SV(W|O) and 28S
ccgacccgtcttgaaacacggaccaaggagtctaacacgtgcgcgagtcgggggctcgcacgaaagccgccgtggcgcaatgaaggtgaaggccggcgcgctcgccggccgaggtgggat

SEQ ID NO: 51057 - DNA, 120 bp, Homo sapiens
  misc_feature: 615 for SV(W|O) and 28S
tcttgaaacacggaccaaggagtctaacacgtgcgcgagtcgggggctcgcacgaaagccgccgtggcgcaatgaaggtgaaggccggcgcgctcgccggccgaggtgggatcccgaggc

SEQ ID NO: 51058 - DNA, 120 bp, Homo sapiens
  misc_feature: 615 for SV(W|O) and 28S
cgagcgcgccggccttcaccttcattgcgccacggcggctttcgtgcgagcccccgactcgcgcacgtgttagactccttggtccgtgtttcaagacgggtcgggtgggtagccgacgtc

SEQ ID NO: 51059 - DNA, 120 bp, Homo sapiens
  misc_feature: 615 for SV(W|O) and 28S
gaaacacggaccaaggagtctaacacgtgcgcgagtcgggggctcgcacgaaagccgccgtggcgcaatgaaggtgaaggccggcgcgctcgccggccgaggtgggatcccgaggcctct

SEQ ID NO: 51060 - DNA, 120 bp, Homo sapiens
  misc_feature: 615 for SV(W|O) and 28S
caccatctttcgggtcctaacacgtgcgctcgtgctccacctccccggcgcggcgggcgagacgggccggtggtgcgccctcggcggactggagaggcctcgggatcccacctcggccgg

SEQ ID NO: 51061 - DNA, 120 bp, Homo sapiens
  misc_feature: 615 for SV(W|O) and 28S
agcctctggcatgttggaacaatgtaggtaagggaagtcggcaagccggatccgtaacttcgggataaggattggctctaagggctgggtcggtcgggctggggcgcgaagcggggctgg

SEQ ID NO: 51062 - DNA, 120 bp, Homo sapiens
  misc_feature: 614 for SV(W|O) and 28S
tggaacaatgtaggtaagggaagtcggcaagccggatccgtaacttcgggataaggattggctctaagggctgggtcggtcgggctggggcgcgaagcggggctgggcgcgcgccgcggc

SEQ ID NO: 51063 - DNA, 120 bp, Homo sapiens
  misc_feature: 614 for SV(W|O) and 28S
agaggggcccgtgccttggaaagcgtcgcggttccggcggcgtccggtgagctctcgctggcccttgaaaatccgggggagagggtgtaaatctcgcgccgggccgtacccatatccgca

SEQ ID NO: 51064 - DNA, 120 bp, Homo sapiens
  misc_feature: 614 for SV(W|O) and 28S
tccatctaaggctaaataccggcacgagaccgatagtcaacaagtaccgtaagggaaagttgaaaagaactttgaagagagagttcaagagggcgtgaaaccgttaagaggtaaacgggt

SEQ ID NO: 51065 - DNA, 120 bp, Homo sapiens
  misc_feature: 614 for SV(W|O) and 28S
ggcggctttcgtgcgagcccccgactcgcgcacgtgttagactccttggtccgtgtttcaagacgggtcgggtgggtagccgacgtcgccgccgaccccgtgcgctcgctccgccgtccc

SEQ ID NO: 51066 - DNA, 120 bp, Homo sapiens
  misc_feature: 614 for SV(W|O) and 28S
gagaggggcccgtgccttggaaagcgtcgcggttccggcggcgtccggtgagctctcgctggcccttgaaaatccgggggagagggtgtaaatctcgcgccgggccgtacccatatccgc

SEQ ID NO: 51067 - DNA, 120 bp, Homo sapiens
  misc_feature: 614 for SV(W|O) and 28S
acaagtaccgtaagggaaagttgaaaagaactttgaagagagagttcaagagggcgtgaaaccgttaagaggtaaacgggtggggtccgcgcagtccgcccggaggattcaacccggcgg

SEQ ID NO: 51068 - DNA, 120 bp, Homo sapiens
  misc_feature: 613 for SV(W|O) and 28S
ttgaaacacggaccaaggagtctaacacgtgcgcgagtcgggggctcgcacgaaagccgccgtggcgcaatgaaggtgaaggccggcgcgctcgccggccgaggtgggatcccgaggcct

SEQ ID NO: 51069 - DNA, 120 bp, Homo sapiens
  misc_feature: 613 for SV(W|O) and 28S
ttcaatagatcgcagcgagggagctgctctgctacgtacgaaaccccgacccagaagcaggtcgtctacgaatggtttagcgccaggttccccacgaacgtgcggtgcgtgacgggcgag

SEQ ID NO: 51070 - DNA, 120 bp, Homo sapiens
  misc_feature: 613 for SV(W|O) and 28S
gcagcgagggagctgctctgctacgtacgaaaccccgacccagaagcaggtcgtctacgaatggtttagcgccaggttccccacgaacgtgcggtgcgtgacgggcgagggggcggccgc

SEQ ID NO: 51071 - DNA, 120 bp, Homo sapiens
  misc_feature: 612 for SV(W|O) and 28S
gcgccctcggcggactggagaggcctcgggatcccacctcggccggcgagcgcgccggccttcaccttcattgcgccacggcggctttcgtgcgagcccccgactcgcgcacgtgttaga

SEQ ID NO: 51072 - DNA, 120 bp, Homo sapiens
  misc_feature: 612 for SV(W|O) and 28S
tcaccttcattgcgccacggcggctttcgtgcgagcccccgactcgcgcacgtgttagactccttggtccgtgtttcaagacgggtcgggtgggtagccgacgtcgccgccgaccccgtg

SEQ ID NO: 51073 - DNA, 120 bp, Homo sapiens
  misc_feature: 611 for SV(W|O) and 28S
tcgtgcgagcccccgactcgcgcacgtgttagactccttggtccgtgtttcaagacgggtcgggtgggtagccgacgtcgccgccgaccccgtgcgctcgctccgccgtccccctcttcg

SEQ ID NO: 51074 - DNA, 120 bp, Homo sapiens
  misc_feature: 611 for SV(W|O) and 28S
gtgcgagcccccgactcgcgcacgtgttagactccttggtccgtgtttcaagacgggtcgggtgggtagccgacgtcgccgccgaccccgtgcgctcgctccgccgtccccctcttcggg

SEQ ID NO: 51075 - DNA, 120 bp, Homo sapiens
  misc_feature: 611 for SV(W|O) and 28S
gcccagcgccgaatccccgccccgcggcggggcgcgggacatgtggcgtacggaagacccgctccccggcgccgctcgtggggggcccaagtccttctgatcgaggcccagcccgtggac

SEQ ID NO: 51076 - DNA, 120 bp, Homo sapiens
  misc_feature: 611 for SV(W|O) and 28S
ccggccgggcgcgacccgctccggggacagtgccaggtggggagtttgactggggcggtacacctgtcaaacggtaacgcaggtgtcctaaggcgagctcagggaggacagaaacctccc

SEQ ID NO: 51077 - DNA, 120 bp, Homo sapiens
  misc_feature: 611 for SV(W|O) and 28S
atctttcgggtcctaacacgtgcgctcgtgctccacctccccggcgcggcgggcgagacgggccggtggtgcgccctcggcggactggagaggcctcgggatcccacctcggccggcgag

SEQ ID NO: 51078 - DNA, 120 bp, Homo sapiens
  misc_feature: 611 for SV(W|O) and 28S
agagaggggcccgtgccttggaaagcgtcgcggttccggcggcgtccggtgagctctcgctggcccttgaaaatccgggggagagggtgtaaatctcgcgccgggccgtacccatatccg

SEQ ID NO: 51079 - DNA, 120 bp, Homo sapiens
  misc_feature: 611 for SV(W|O) and 28S
cggaggattcaacccggcggcgggtccggccgtgtcggcggcccggcggatctttcccgccccccgttcctcccgacccctccacccgccctcccttcccccgccgcccctcctcctcct

SEQ ID NO: 51080 - DNA, 120 bp, Homo sapiens
  misc_feature: 611 for SV(W|O) and 28S
aggtaagggaagtcggcaagccggatccgtaacttcgggataaggattggctctaagggctgggtcggtcgggctggggcgcgaagcggggctgggcgcgcgccgcggctggacgaggcg

SEQ ID NO: 51081 - DNA, 120 bp, Homo sapiens
  misc_feature: 610 for SV(W|O) and 28S
cgcgcgccggccgggcgcgacccgctccggggacagtgccaggtggggagtttgactggggcggtacacctgtcaaacggtaacgcaggtgtcctaaggcgagctcagggaggacagaaa

SEQ ID NO: 51082 - DNA, 120 bp, Homo sapiens
  misc_feature: 610 for SV(W|O) and 28S
tgtcgagggctgactttcaatagatcgcagcgagggagctgctctgctacgtacgaaaccccgacccagaagcaggtcgtctacgaatggtttagcgccaggttccccacgaacgtgcgg

SEQ ID NO: 51083 - DNA, 120 bp, Homo sapiens
  misc_feature: 610 for SV(W|O) and 28S
tctttcgggtcctaacacgtgcgctcgtgctccacctccccggcgcggcgggcgagacgggccggtggtgcgccctcggcggactggagaggcctcgggatcccacctcggccggcgagc

SEQ ID NO: 51084 - DNA, 120 bp, Homo sapiens
  misc_feature: 610 for SV(W|O) and 28S
ggccgccccctcgcccgtcacgcaccgcacgttcgtggggaacctggcgctaaaccattcgtagacgacctgcttctgggtcggggtttcgtacgtagcagagcagctccctcgctgcga

SEQ ID NO: 51085 - DNA, 120 bp, Homo sapiens
  misc_feature: 610 for SV(W|O) and 28S
agcccagcgccgaatccccgccccgcggcggggcgcgggacatgtggcgtacggaagacccgctccccggcgccgctcgtggggggcccaagtccttctgatcgaggcccagcccgtgga

SEQ ID NO: 51086 - DNA, 120 bp, Homo sapiens
  misc_feature: 610 for SV(W|O) and 28S
taggtaagggaagtcggcaagccggatccgtaacttcgggataaggattggctctaagggctgggtcggtcgggctggggcgcgaagcggggctgggcgcgcgccgcggctggacgaggc

SEQ ID NO: 51087 - DNA, 120 bp, Homo sapiens
  misc_feature: 610 for SV(W|O) and 28S
gtcttgaaacacggaccaaggagtctaacacgtgcgcgagtcgggggctcgcacgaaagccgccgtggcgcaatgaaggtgaaggccggcgcgctcgccggccgaggtgggatcccgagg

SEQ ID NO: 51088 - DNA, 120 bp, Homo sapiens
  misc_feature: 610 for SV(W|O) and 28S
cggctttcgtgcgagcccccgactcgcgcacgtgttagactccttggtccgtgtttcaagacgggtcgggtgggtagccgacgtcgccgccgaccccgtgcgctcgctccgccgtccccc

SEQ ID NO: 51089 - DNA, 120 bp, Homo sapiens
  misc_feature: 610 for SV(W|O) and 28S
gagagaggggcccgtgccttggaaagcgtcgcggttccggcggcgtccggtgagctctcgctggcccttgaaaatccgggggagagggtgtaaatctcgcgccgggccgtacccatatcc

SEQ ID NO: 51090 - DNA, 120 bp, Homo sapiens
  misc_feature: 610 for SV(W|O) and 28S
ggaggattcaacccggcggcgggtccggccgtgtcggcggcccggcggatctttcccgccccccgttcctcccgacccctccacccgccctcccttcccccgccgcccctcctcctcctc

SEQ ID NO: 51091 - DNA, 120 bp, Homo sapiens
  misc_feature: 610 for SV(W|O) and 28S
cgccacggcggctttcgtgcgagcccccgactcgcgcacgtgttagactccttggtccgtgtttcaagacgggtcgggtgggtagccgacgtcgccgccgaccccgtgcgctcgctccgc

SEQ ID NO: 51092 - DNA, 120 bp, Homo sapiens
  misc_feature: 610 for SV(W|O) and 28S
gcgccacggcggctttcgtgcgagcccccgactcgcgcacgtgttagactccttggtccgtgtttcaagacgggtcgggtgggtagccgacgtcgccgccgaccccgtgcgctcgctccg

SEQ ID NO: 51093 - DNA, 120 bp, Homo sapiens
  misc_feature: 610 for SV(W|O) and 28S
caacaagtaccgtaagggaaagttgaaaagaactttgaagagagagttcaagagggcgtgaaaccgttaagaggtaaacgggtggggtccgcgcagtccgcccggaggattcaacccggc

SEQ ID NO: 51094 - DNA, 120 bp, Homo sapiens
  misc_feature: 610 for SV(W|O) and 28S
cgagagaggggcccgtgccttggaaagcgtcgcggttccggcggcgtccggtgagctctcgctggcccttgaaaatccgggggagagggtgtaaatctcgcgccgggccgtacccatatc

SEQ ID NO: 51095 - DNA, 120 bp, Homo sapiens
  misc_feature: 610 for SV(W|O) and 28S
cgcagcgagggagctgctctgctacgtacgaaaccccgacccagaagcaggtcgtctacgaatggtttagcgccaggttccccacgaacgtgcggtgcgtgacgggcgagggggcggccg

SEQ ID NO: 51096 - DNA, 120 bp, Homo sapiens
  misc_feature: 610 for SV(W|O) and 28S
aacaagtaccgtaagggaaagttgaaaagaactttgaagagagagttcaagagggcgtgaaaccgttaagaggtaaacgggtggggtccgcgcagtccgcccggaggattcaacccggcg

SEQ ID NO: 51097 - DNA, 120 bp, Homo sapiens
  misc_feature: 609 for SV(W|O) and 28S
ccgcgcgccggccgggcgcgacccgctccggggacagtgccaggtggggagtttgactggggcggtacacctgtcaaacggtaacgcaggtgtcctaaggcgagctcagggaggacagaa

SEQ ID NO: 51098 - DNA, 120 bp, Homo sapiens
  misc_feature: 609 for SV(W|O) and 28S
ccttcaccttcattgcgccacggcggctttcgtgcgagcccccgactcgcgcacgtgttagactccttggtccgtgtttcaagacgggtcgggtgggtagccgacgtcgccgccgacccc

SEQ ID NO: 51099 - DNA, 120 bp, Homo sapiens
  misc_feature: 609 for SV(W|O) and 28S
cggcggctttcgtgcgagcccccgactcgcgcacgtgttagactccttggtccgtgtttcaagacgggtcgggtgggtagccgacgtcgccgccgaccccgtgcgctcgctccgccgtcc

SEQ ID NO: 51100 - DNA, 120 bp, Homo sapiens
  misc_feature: 609 for SV(W|O) and 28S
cccagccccgcttcgcgccccagcccgaccgacccagcccttagagccaatccttatcccgaagttacggatccggcttgccgacttcccttacctacattgttccaacatgccagaggc

SEQ ID NO: 51101 - DNA, 120 bp, Homo sapiens
  misc_feature: 609 for SV(W|O) and 28S
cgaagccagaggaaactctggtggaggtccgtagcggtcctgacgtgcaaatcggtcgtccgacctgggtataggggcgaaagactaatcgaaccatctagtagctggttccctccgaag

SEQ ID NO: 51102 - DNA, 120 bp, Homo sapiens
  misc_feature: 608 for SV(W|O) and 28S
ttcaccttcattgcgccacggcggctttcgtgcgagcccccgactcgcgcacgtgttagactccttggtccgtgtttcaagacgggtcgggtgggtagccgacgtcgccgccgaccccgt

SEQ ID NO: 51103 - DNA, 120 bp, Homo sapiens
  misc_feature: 608 for SV(W|O) and 28S
tgttggaacaatgtaggtaagggaagtcggcaagccggatccgtaacttcgggataaggattggctctaagggctgggtcggtcgggctggggcgcgaagcggggctgggcgcgcgccgc

SEQ ID NO: 51104 - DNA, 120 bp, Homo sapiens
  misc_feature: 608 for SV(W|O) and 28S
tgtaggtaagggaagtcggcaagccggatccgtaacttcgggataaggattggctctaagggctgggtcggtcgggctggggcgcgaagcggggctgggcgcgcgccgcggctggacgag

SEQ ID NO: 51105 - DNA, 120 bp, Homo sapiens
  misc_feature: 608 for SV(W|O) and 28S
tgcgggccgccggtgaaataccactactctgatcgttttttcactgacccggtgaggcgggggggcgagccccgaggggctctcgcttctggcgccaagcgcccggccgcgcgccggccg

SEQ ID NO: 51106 - DNA, 120 bp, Homo sapiens
  misc_feature: 608 for SV(W|O) and 28S
tgcgagcccccgactcgcgcacgtgttagactccttggtccgtgtttcaagacgggtcgggtgggtagccgacgtcgccgccgaccccgtgcgctcgctccgccgtccccctcttcgggg

SEQ ID NO: 51107 - DNA, 120 bp, Homo sapiens
  misc_feature: 608 for SV(W|O) and 28S
gctggcgtggagccgggcgtggaatgcgagtgcctagtgggccacttttggtaagcagaactggcgctgcgggatgaaccgaacgccgggttaaggcgcccgatgccgacgctcatcaga

SEQ ID NO: 51108 - DNA, 120 bp, Homo sapiens
  misc_feature: 608 for SV(W|O) and 28S
aggggcgaaagactaatcgaaccatctagtagctggttccctccgaagtttccctcaggatagctggcgctctcgcagacccgacgcacccccgccacgcagttttatccggtaaagcga

SEQ ID NO: 51109 - DNA, 120 bp, Homo sapiens
  misc_feature: 608 for SV(W|O) and 28S
cccgagagaggggcccgtgccttggaaagcgtcgcggttccggcggcgtccggtgagctctcgctggcccttgaaaatccgggggagagggtgtaaatctcgcgccgggccgtacccata

SEQ ID NO: 51110 - DNA, 120 bp, Homo sapiens
  misc_feature: 608 for SV(W|O) and 28S
gtaggtaagggaagtcggcaagccggatccgtaacttcgggataaggattggctctaagggctgggtcggtcgggctggggcgcgaagcggggctgggcgcgcgccgcggctggacgagg

SEQ ID NO: 51111 - DNA, 120 bp, Homo sapiens
  misc_feature: 607 for SV(W|O) and 28S
tttcaatagatcgcagcgagggagctgctctgctacgtacgaaaccccgacccagaagcaggtcgtctacgaatggtttagcgccaggttccccacgaacgtgcggtgcgtgacgggcga

SEQ ID NO: 51112 - DNA, 120 bp, Homo sapiens
  misc_feature: 607 for SV(W|O) and 28S
tggcgtggagccgggcgtggaatgcgagtgcctagtgggccacttttggtaagcagaactggcgctgcgggatgaaccgaacgccgggttaaggcgcccgatgccgacgctcatcagacc

SEQ ID NO: 51113 - DNA, 120 bp, Homo sapiens
  misc_feature: 607 for SV(W|O) and 28S
cgccctcggcggactggagaggcctcgggatcccacctcggccggcgagcgcgccggccttcaccttcattgcgccacggcggctttcgtgcgagcccccgactcgcgcacgtgttagac

SEQ ID NO: 51114 - DNA, 120 bp, Homo sapiens
  misc_feature: 607 for SV(W|O) and 28S
gccacggcggctttcgtgcgagcccccgactcgcgcacgtgttagactccttggtccgtgtttcaagacgggtcgggtgggtagccgacgtcgccgccgaccccgtgcgctcgctccgcc

SEQ ID NO: 51115 - DNA, 120 bp, Homo sapiens
  misc_feature: 607 for SV(W|O) and 28S
cagggctagttgattcggcaggtgagttgttacacactccttagcggattccgacttccatggccaccgtcctgctgtctatatcaaccaacaccttttctggggtctgatgagcgtcgg

SEQ ID NO: 51116 - DNA, 120 bp, Homo sapiens
  misc_feature: 607 for SV(W|O) and 28S
atagatcgcagcgagggagctgctctgctacgtacgaaaccccgacccagaagcaggtcgtctacgaatggtttagcgccaggttccccacgaacgtgcggtgcgtgacgggcgaggggg

SEQ ID NO: 51117 - DNA, 120 bp, Homo sapiens
  misc_feature: 607 for SV(W|O) and 28S
actggagaggcctcgggatcccacctcggccggcgagcgcgccggccttcaccttcattgcgccacggcggctttcgtgcgagcccccgactcgcgcacgtgttagactccttggtccgt

SEQ ID NO: 51118 - DNA, 120 bp, Homo sapiens
  misc_feature: 606 for SV(W|O) and 28S
ttggaacaatgtaggtaagggaagtcggcaagccggatccgtaacttcgggataaggattggctctaagggctgggtcggtcgggctggggcgcgaagcggggctgggcgcgcgccgcgg

SEQ ID NO: 51119 - DNA, 120 bp, Homo sapiens
  misc_feature: 606 for SV(W|O) and 28S
catctttcgggtcctaacacgtgcgctcgtgctccacctccccggcgcggcgggcgagacgggccggtggtgcgccctcggcggactggagaggcctcgggatcccacctcggccggcga

SEQ ID NO: 51120 - DNA, 120 bp, Homo sapiens
  misc_feature: 606 for SV(W|O) and 28S
tcagggctagttgattcggcaggtgagttgttacacactccttagcggattccgacttccatggccaccgtcctgctgtctatatcaaccaacaccttttctggggtctgatgagcgtcg

SEQ ID NO: 51121 - DNA, 120 bp, Homo sapiens
  misc_feature: 606 for SV(W|O) and 28S
gtcgagggctgactttcaatagatcgcagcgagggagctgctctgctacgtacgaaaccccgacccagaagcaggtcgtctacgaatggtttagcgccaggttccccacgaacgtgcggt

SEQ ID NO: 51122 - DNA, 120 bp, Homo sapiens
  misc_feature: 606 for SV(W|O) and 28S
ggcgtggagccgggcgtggaatgcgagtgcctagtgggccacttttggtaagcagaactggcgctgcgggatgaaccgaacgccgggttaaggcgcccgatgccgacgctcatcagaccc

SEQ ID NO: 51123 - DNA, 120 bp, Homo sapiens
  misc_feature: 606 for SV(W|O) and 28S
ggcggactggagaggcctcgggatcccacctcggccggcgagcgcgccggccttcaccttcattgcgccacggcggctttcgtgcgagcccccgactcgcgcacgtgttagactccttgg

SEQ ID NO: 51124 - DNA, 120 bp, Homo sapiens
  misc_feature: 606 for SV(W|O) and 28S
gcgagcccccgactcgcgcacgtgttagactccttggtccgtgtttcaagacgggtcgggtgggtagccgacgtcgccgccgaccccgtgcgctcgctccgccgtccccctcttcggggg

SEQ ID NO: 51125 - DNA, 120 bp, Homo sapiens
  misc_feature: 606 for SV(W|O) and 28S
accatctttcgggtcctaacacgtgcgctcgtgctccacctccccggcgcggcgggcgagacgggccggtggtgcgccctcggcggactggagaggcctcgggatcccacctcggccggc

SEQ ID NO: 51126 - DNA, 120 bp, Homo sapiens
  misc_feature: 606 for SV(W|O) and 28S
gatcgcagcgagggagctgctctgctacgtacgaaaccccgacccagaagcaggtcgtctacgaatggtttagcgccaggttccccacgaacgtgcggtgcgtgacgggcgagggggcgg

SEQ ID NO: 51127 - DNA, 120 bp, Homo sapiens
  misc_feature: 606 for SV(W|O) and 28S
acggcggctttcgtgcgagcccccgactcgcgcacgtgttagactccttggtccgtgtttcaagacgggtcgggtgggtagccgacgtcgccgccgaccccgtgcgctcgctccgccgtc

SEQ ID NO: 51128 - DNA, 120 bp, Homo sapiens
  misc_feature: 606 for SV(W|O) and 28S
ctttcgggtcctaacacgtgcgctcgtgctccacctccccggcgcggcgggcgagacgggccggtggtgcgccctcggcggactggagaggcctcgggatcccacctcggccggcgagcg

SEQ ID NO: 51129 - DNA, 120 bp, Homo sapiens
  misc_feature: 606 for SV(W|O) and 28S
ctaacacgtgcgctcgtgctccacctccccggcgcggcgggcgagacgggccggtggtgcgccctcggcggactggagaggcctcgggatcccacctcggccggcgagcgcgccggcctt

SEQ ID NO: 51130 - DNA, 120 bp, Homo sapiens
  misc_feature: 606 for SV(W|O) and 28S
cgtgcgagcccccgactcgcgcacgtgttagactccttggtccgtgtttcaagacgggtcgggtgggtagccgacgtcgccgccgaccccgtgcgctcgctccgccgtccccctcttcgg

SEQ ID NO: 51131 - DNA, 120 bp, Homo sapiens
  misc_feature: 605 for SV(W|O) and 28S
tcaccatctttcgggtcctaacacgtgcgctcgtgctccacctccccggcgcggcgggcgagacgggccggtggtgcgccctcggcggactggagaggcctcgggatcccacctcggccg

SEQ ID NO: 51132 - DNA, 120 bp, Homo sapiens
  misc_feature: 605 for SV(W|O) and 28S
ggactggagaggcctcgggatcccacctcggccggcgagcgcgccggccttcaccttcattgcgccacggcggctttcgtgcgagcccccgactcgcgcacgtgttagactccttggtcc

SEQ ID NO: 51133 - DNA, 120 bp, Homo sapiens
  misc_feature: 605 for SV(W|O) and 28S
gactggagaggcctcgggatcccacctcggccggcgagcgcgccggccttcaccttcattgcgccacggcggctttcgtgcgagcccccgactcgcgcacgtgttagactccttggtccg

SEQ ID NO: 51134 - DNA, 120 bp, Homo sapiens
  misc_feature: 605 for SV(W|O) and 28S
cgcgccggccttcaccttcattgcgccacggcggctttcgtgcgagcccccgactcgcgcacgtgttagactccttggtccgtgtttcaagacgggtcgggtgggtagccgacgtcgccg

SEQ ID NO: 51135 - DNA, 120 bp, Homo sapiens
  misc_feature: 605 for SV(W|O) and 28S
ccagcgccgaatccccgccccgcggcggggcgcgggacatgtggcgtacggaagacccgctccccggcgccgctcgtggggggcccaagtccttctgatcgaggcccagcccgtggacgg

SEQ ID NO: 51136 - DNA, 120 bp, Homo sapiens
  misc_feature: 604 for SV(W|O) and 28S
ggatagctggcgctctcgcagacccgacgcacccccgccacgcagttttatccggtaaagcgaatgattagaggtcttggggccgaaacgatctcaacctattctcaaactttaaatggg

SEQ ID NO: 51137 - DNA, 120 bp, Homo sapiens
  misc_feature: 604 for SV(W|O) and 28S
cccagcgccgaatccccgccccgcggcggggcgcgggacatgtggcgtacggaagacccgctccccggcgccgctcgtggggggcccaagtccttctgatcgaggcccagcccgtggacg

SEQ ID NO: 51138 - DNA, 120 bp, Homo sapiens
  misc_feature: 603 for SV(W|O) and 28S
ctcaggatagctggcgctctcgcagacccgacgcacccccgccacgcagttttatccggtaaagcgaatgattagaggtcttggggccgaaacgatctcaacctattctcaaactttaaa

SEQ ID NO: 51139 - DNA, 120 bp, Homo sapiens
  misc_feature: 603 for SV(W|O) and 28S
tagatcgcagcgagggagctgctctgctacgtacgaaaccccgacccagaagcaggtcgtctacgaatggtttagcgccaggttccccacgaacgtgcggtgcgtgacgggcgagggggc

SEQ ID NO: 51140 - DNA, 120 bp, Homo sapiens
  misc_feature: 603 for SV(W|O) and 28S
cggccttcaccttcattgcgccacggcggctttcgtgcgagcccccgactcgcgcacgtgttagactccttggtccgtgtttcaagacgggtcgggtgggtagccgacgtcgccgccgac

SEQ ID NO: 51141 - DNA, 120 bp, Homo sapiens
  misc_feature: 603 for SV(W|O) and 28S
catgttggaacaatgtaggtaagggaagtcggcaagccggatccgtaacttcgggataaggattggctctaagggctgggtcggtcgggctggggcgcgaagcggggctgggcgcgcgcc

SEQ ID NO: 51142 - DNA, 120 bp, Homo sapiens
  misc_feature: 603 for SV(W|O) and 28S
ggcatgttggaacaatgtaggtaagggaagtcggcaagccggatccgtaacttcgggataaggattggctctaagggctgggtcggtcgggctggggcgcgaagcggggctgggcgcgcg

SEQ ID NO: 51143 - DNA, 120 bp, Homo sapiens
  misc_feature: 603 for SV(W|O) and 28S
aatgtaggtaagggaagtcggcaagccggatccgtaacttcgggataaggattggctctaagggctgggtcggtcgggctggggcgcgaagcggggctgggcgcgcgccgcggctggacg

SEQ ID NO: 51144 - DNA, 120 bp, Homo sapiens
  misc_feature: 603 for SV(W|O) and 28S
ccacggcggctttcgtgcgagcccccgactcgcgcacgtgttagactccttggtccgtgtttcaagacgggtcgggtgggtagccgacgtcgccgccgaccccgtgcgctcgctccgccg

SEQ ID NO: 51145 - DNA, 120 bp, Homo sapiens
  misc_feature: 602 for SV(W|O) and 28S
ggtcctaacacgtgcgctcgtgctccacctccccggcgcggcgggcgagacgggccggtggtgcgccctcggcggactggagaggcctcgggatcccacctcggccggcgagcgcgccgg

SEQ ID NO: 51146 - DNA, 120 bp, Homo sapiens
  misc_feature: 602 for SV(W|O) and 28S
gcgcgccggccttcaccttcattgcgccacggcggctttcgtgcgagcccccgactcgcgcacgtgttagactccttggtccgtgtttcaagacgggtcgggtgggtagccgacgtcgcc

SEQ ID NO: 51147 - DNA, 120 bp, Homo sapiens
  misc_feature: 602 for SV(W|O) and 28S
ggaacaatgtaggtaagggaagtcggcaagccggatccgtaacttcgggataaggattggctctaagggctgggtcggtcgggctggggcgcgaagcggggctgggcgcgcgccgcggct

SEQ ID NO: 51148 - DNA, 120 bp, Homo sapiens
  misc_feature: 602 for SV(W|O) and 28S
gcgccggccttcaccttcattgcgccacggcggctttcgtgcgagcccccgactcgcgcacgtgttagactccttggtccgtgtttcaagacgggtcgggtgggtagccgacgtcgccgc

SEQ ID NO: 51149 - DNA, 120 bp, Homo sapiens
  misc_feature: 602 for SV(W|O) and 28S
gagcgcgccggccttcaccttcattgcgccacggcggctttcgtgcgagcccccgactcgcgcacgtgttagactccttggtccgtgtttcaagacgggtcgggtgggtagccgacgtcg

SEQ ID NO: 51150 - DNA, 120 bp, Homo sapiens
  misc_feature: 602 for SV(W|O) and 28S
ccgagagaggggcccgtgccttggaaagcgtcgcggttccggcggcgtccggtgagctctcgctggcccttgaaaatccgggggagagggtgtaaatctcgcgccgggccgtacccatat

SEQ ID NO: 51151 - DNA, 120 bp, Homo sapiens
  misc_feature: 601 for SV(W|O) and 28S
tttcgggtcctaacacgtgcgctcgtgctccacctccccggcgcggcgggcgagacgggccggtggtgcgccctcggcggactggagaggcctcgggatcccacctcggccggcgagcgc

SEQ ID NO: 51152 - DNA, 120 bp, Homo sapiens
  misc_feature: 601 for SV(W|O) and 28S
cgtggagccgggcgtggaatgcgagtgcctagtgggccacttttggtaagcagaactggcgctgcgggatgaaccgaacgccgggttaaggcgcccgatgccgacgctcatcagacccca

SEQ ID NO: 51153 - DNA, 120 bp, Homo sapiens
  misc_feature: 601 for SV(W|O) and 28S
gccgcgcgccggccgggcgcgacccgctccggggacagtgccaggtggggagtttgactggggcggtacacctgtcaaacggtaacgcaggtgtcctaaggcgagctcagggaggacaga

SEQ ID NO: 51154 - DNA, 120 bp, Homo sapiens
  misc_feature: 601 for SV(W|O) and 28S
gttggaacaatgtaggtaagggaagtcggcaagccggatccgtaacttcgggataaggattggctctaagggctgggtcggtcgggctggggcgcgaagcggggctgggcgcgcgccgcg

SEQ ID NO: 51155 - DNA, 120 bp, Homo sapiens
  misc_feature: 601 for SV(W|O) and 28S
gggtcctaacacgtgcgctcgtgctccacctccccggcgcggcgggcgagacgggccggtggtgcgccctcggcggactggagaggcctcgggatcccacctcggccggcgagcgcgccg

SEQ ID NO: 51156 - DNA, 120 bp, Homo sapiens
  misc_feature: 601 for SV(W|O) and 28S
gcgtggagccgggcgtggaatgcgagtgcctagtgggccacttttggtaagcagaactggcgctgcgggatgaaccgaacgccgggttaaggcgcccgatgccgacgctcatcagacccc

SEQ ID NO: 51157 - DNA, 120 bp, Homo sapiens
  misc_feature: 601 for SV(W|O) and 28S
ctcctcccgcccacgccccgctccccgcccccggagccccgcggacgctacgccgcgacgagtaggagggccgctgcggtgagccttgaagcctagggcgcgggcccgggtggagccgcc

SEQ ID NO: 51158 - DNA, 120 bp, Homo sapiens
  misc_feature: 601 for SV(W|O) and 28S
agggctagttgattcggcaggtgagttgttacacactccttagcggattccgacttccatggccaccgtcctgctgtctatatcaaccaacaccttttctggggtctgatgagcgtcggc

SEQ ID NO: 51159 - DNA, 120 bp, Homo sapiens
  misc_feature: 601 for SV(W|O) and 28S
agatcgcagcgagggagctgctctgctacgtacgaaaccccgacccagaagcaggtcgtctacgaatggtttagcgccaggttccccacgaacgtgcggtgcgtgacgggcgagggggcg

SEQ ID NO: 51160 - DNA, 120 bp, Homo sapiens
  misc_feature: 601 for SV(W|O) and 28S
caggatagctggcgctctcgcagacccgacgcacccccgccacgcagttttatccggtaaagcgaatgattagaggtcttggggccgaaacgatctcaacctattctcaaactttaaatg

SEQ ID NO: 51161 - DNA, 120 bp, Homo sapiens
  misc_feature: 600 for SV(W|O) and 28S
tggcatgttggaacaatgtaggtaagggaagtcggcaagccggatccgtaacttcgggataaggattggctctaagggctgggtcggtcgggctggggcgcgaagcggggctgggcgcgc

SEQ ID NO: 51162 - DNA, 120 bp, Homo sapiens
  misc_feature: 600 for SV(W|O) and 28S
atgtaggtaagggaagtcggcaagccggatccgtaacttcgggataaggattggctctaagggctgggtcggtcgggctggggcgcgaagcggggctgggcgcgcgccgcggctggacga

SEQ ID NO: 51163 - DNA, 120 bp, Homo sapiens
  misc_feature: 600 for SV(W|O) and 28S
tcctaacacgtgcgctcgtgctccacctccccggcgcggcgggcgagacgggccggtggtgcgccctcggcggactggagaggcctcgggatcccacctcggccggcgagcgcgccggcc

SEQ ID NO: 51164 - DNA, 120 bp, Homo sapiens
  misc_feature: 600 for SV(W|O) and 28S
ctggcgtggagccgggcgtggaatgcgagtgcctagtgggccacttttggtaagcagaactggcgctgcgggatgaaccgaacgccgggttaaggcgcccgatgccgacgctcatcagac

SEQ ID NO: 51165 - DNA, 120 bp, Homo sapiens
  misc_feature: 600 for SV(W|O) and 28S
gtaagggaagtcggcaagccggatccgtaacttcgggataaggattggctctaagggctgggtcggtcgggctggggcgcgaagcggggctgggcgcgcgccgcggctggacgaggcgcc

SEQ ID NO: 51166 - DNA, 120 bp, Homo sapiens
  misc_feature: 600 for SV(W|O) and 28S
ggtaagggaagtcggcaagccggatccgtaacttcgggataaggattggctctaagggctgggtcggtcgggctggggcgcgaagcggggctgggcgcgcgccgcggctggacgaggcgc

SEQ ID NO: 51167 - DNA, 120 bp, Homo sapiens
  misc_feature: 600 for SV(W|O) and 28S
cgccggccttcaccttcattgcgccacggcggctttcgtgcgagcccccgactcgcgcacgtgttagactccttggtccgtgtttcaagacgggtcgggtgggtagccgacgtcgccgcc

SEQ ID NO: 51168 - DNA, 120 bp, Homo sapiens
  misc_feature: 600 for SV(W|O) and 28S
gcgggccgccggtgaaataccactactctgatcgttttttcactgacccggtgaggcgggggggcgagccccgaggggctctcgcttctggcgccaagcgcccggccgcgcgccggccgg

SEQ ID NO: 51169 - DNA, 120 bp, Homo sapiens
  misc_feature: 600 for SV(W|O) and 28S
gccggccttcaccttcattgcgccacggcggctttcgtgcgagcccccgactcgcgcacgtgttagactccttggtccgtgtttcaagacgggtcgggtgggtagccgacgtcgccgccg

SEQ ID NO: 51170 - DNA, 120 bp, Homo sapiens
  misc_feature: 600 for SV(W|O) and 28S
gccctcggcggactggagaggcctcgggatcccacctcggccggcgagcgcgccggccttcaccttcattgcgccacggcggctttcgtgcgagcccccgactcgcgcacgtgttagact

SEQ ID NO: 51171 - DNA, 120 bp, Homo sapiens
  misc_feature: 600 for SV(W|O) and 28S
cggactggagaggcctcgggatcccacctcggccggcgagcgcgccggccttcaccttcattgcgccacggcggctttcgtgcgagcccccgactcgcgcacgtgttagactccttggtc

SEQ ID NO: 51172 - DNA, 120 bp, Homo sapiens
  misc_feature: 600 for SV(W|O) and 28S
cggcggactggagaggcctcgggatcccacctcggccggcgagcgcgccggccttcaccttcattgcgccacggcggctttcgtgcgagcccccgactcgcgcacgtgttagactccttg

SEQ ID NO: 51173 - DNA, 120 bp, Homo sapiens
  misc_feature: 599 for SV(W|O) and 28S
cgggtcctaacacgtgcgctcgtgctccacctccccggcgcggcgggcgagacgggccggtggtgcgccctcggcggactggagaggcctcgggatcccacctcggccggcgagcgcgcc

SEQ ID NO: 51174 - DNA, 120 bp, Homo sapiens
  misc_feature: 599 for SV(W|O) and 28S
cctctggcatgttggaacaatgtaggtaagggaagtcggcaagccggatccgtaacttcgggataaggattggctctaagggctgggtcggtcgggctggggcgcgaagcggggctgggc

SEQ ID NO: 51175 - DNA, 120 bp, Homo sapiens
  misc_feature: 598 for SV(W|O) and 28S
tcgggtcctaacacgtgcgctcgtgctccacctccccggcgcggcgggcgagacgggccggtggtgcgccctcggcggactggagaggcctcgggatcccacctcggccggcgagcgcgc

SEQ ID NO: 51176 - DNA, 120 bp, Homo sapiens
  misc_feature: 598 for SV(W|O) and 28S
ccggccttcaccttcattgcgccacggcggctttcgtgcgagcccccgactcgcgcacgtgttagactccttggtccgtgtttcaagacgggtcgggtgggtagccgacgtcgccgccga

SEQ ID NO: 51177 - DNA, 120 bp, Homo sapiens
  misc_feature: 598 for SV(W|O) and 28S
tcctcccgcccacgccccgctccccgcccccggagccccgcggacgctacgccgcgacgagtaggagggccgctgcggtgagccttgaagcctagggcgcgggcccgggtggagccgccg

SEQ ID NO: 51178 - DNA, 120 bp, Homo sapiens
  misc_feature: 598 for SV(W|O) and 28S
tcaggatagctggcgctctcgcagacccgacgcacccccgccacgcagttttatccggtaaagcgaatgattagaggtcttggggccgaaacgatctcaacctattctcaaactttaaat

SEQ ID NO: 51179 - DNA, 120 bp, Homo sapiens
  misc_feature: 598 for SV(W|O) and 28S
caatgtaggtaagggaagtcggcaagccggatccgtaacttcgggataaggattggctctaagggctgggtcggtcgggctggggcgcgaagcggggctgggcgcgcgccgcggctggac

SEQ ID NO: 51180 - DNA, 120 bp, Homo sapiens
  misc_feature: 598 for SV(W|O) and 28S
gcgtcggcatcgggcgccttaacccggcgttcggttcatcccgcagcgccagttctgcttaccaaaagtggcccactaggcactcgcattccacgcccggctccacgccagcgagccggg

SEQ ID NO: 51181 - DNA, 120 bp, Homo sapiens
  misc_feature: 598 for SV(W|O) and 28S
aggatagctggcgctctcgcagacccgacgcacccccgccacgcagttttatccggtaaagcgaatgattagaggtcttggggccgaaacgatctcaacctattctcaaactttaaatgg

SEQ ID NO: 51182 - DNA, 120 bp, Homo sapiens
  misc_feature: 597 for SV(W|O) and 28S
tctggcatgttggaacaatgtaggtaagggaagtcggcaagccggatccgtaacttcgggataaggattggctctaagggctgggtcggtcgggctggggcgcgaagcggggctgggcgc

SEQ ID NO: 51183 - DNA, 120 bp, Homo sapiens
  misc_feature: 597 for SV(W|O) and 28S
ataggggcgaaagactaatcgaaccatctagtagctggttccctccgaagtttccctcaggatagctggcgctctcgcagacccgacgcacccccgccacgcagttttatccggtaaagc

SEQ ID NO: 51184 - DNA, 120 bp, Homo sapiens
  misc_feature: 597 for SV(W|O) and 28S
gaacaatgtaggtaagggaagtcggcaagccggatccgtaacttcgggataaggattggctctaagggctgggtcggtcgggctggggcgcgaagcggggctgggcgcgcgccgcggctg

SEQ ID NO: 51185 - DNA, 120 bp, Homo sapiens
  misc_feature: 597 for SV(W|O) and 28S
ctctggcatgttggaacaatgtaggtaagggaagtcggcaagccggatccgtaacttcgggataaggattggctctaagggctgggtcggtcgggctggggcgcgaagcggggctgggcg

SEQ ID NO: 51186 - DNA, 120 bp, Homo sapiens
  misc_feature: 596 for SV(W|O) and 28S
ggtataggggcgaaagactaatcgaaccatctagtagctggttccctccgaagtttccctcaggatagctggcgctctcgcagacccgacgcacccccgccacgcagttttatccggtaa

SEQ ID NO: 51187 - DNA, 120 bp, Homo sapiens
  misc_feature: 596 for SV(W|O) and 28S
tcgctggcgtggagccgggcgtggaatgcgagtgcctagtgggccacttttggtaagcagaactggcgctgcgggatgaaccgaacgccgggttaaggcgcccgatgccgacgctcatca

SEQ ID NO: 51188 - DNA, 120 bp, Homo sapiens
  misc_feature: 596 for SV(W|O) and 28S
tcctccctgagctcgccttaggacacctgcgttaccgtttgacaggtgtaccgccccagtcaaactccccacctggcactgtccccggagcgggtcgcgcccggccggcgcgcggccggg

SEQ ID NO: 51189 - DNA, 120 bp, Homo sapiens
  misc_feature: 596 for SV(W|O) and 28S
gcatgttggaacaatgtaggtaagggaagtcggcaagccggatccgtaacttcgggataaggattggctctaagggctgggtcggtcgggctggggcgcgaagcggggctgggcgcgcgc

SEQ ID NO: 51190 - DNA, 120 bp, Homo sapiens
  misc_feature: 596 for SV(W|O) and 28S
ctcgctggcgtggagccgggcgtggaatgcgagtgcctagtgggccacttttggtaagcagaactggcgctgcgggatgaaccgaacgccgggttaaggcgcccgatgccgacgctcatc

SEQ ID NO: 51191 - DNA, 120 bp, Homo sapiens
  misc_feature: 596 for SV(W|O) and 28S
gaagccagaggaaactctggtggaggtccgtagcggtcctgacgtgcaaatcggtcgtccgacctgggtataggggcgaaagactaatcgaaccatctagtagctggttccctccgaagt

SEQ ID NO: 51192 - DNA, 120 bp, Homo sapiens
  misc_feature: 596 for SV(W|O) and 28S
agcgtcggcatcgggcgccttaacccggcgttcggttcatcccgcagcgccagttctgcttaccaaaagtggcccactaggcactcgcattccacgcccggctccacgccagcgagccgg

SEQ ID NO: 51193 - DNA, 120 bp, Homo sapiens
  misc_feature: 596 for SV(W|O) and 28S
cacggcggctttcgtgcgagcccccgactcgcgcacgtgttagactccttggtccgtgtttcaagacgggtcgggtgggtagccgacgtcgccgccgaccccgtgcgctcgctccgccgt

SEQ ID NO: 51194 - DNA, 120 bp, Homo sapiens
  misc_feature: 595 for SV(W|O) and 28S
cccttgtgtcgagggctgactttcaatagatcgcagcgagggagctgctctgctacgtacgaaaccccgacccagaagcaggtcgtctacgaatggtttagcgccaggttccccacgaac

SEQ ID NO: 51195 - DNA, 120 bp, Homo sapiens
  misc_feature: 595 for SV(W|O) and 28S
ctggcatgttggaacaatgtaggtaagggaagtcggcaagccggatccgtaacttcgggataaggattggctctaagggctgggtcggtcgggctggggcgcgaagcggggctgggcgcg

SEQ ID NO: 51196 - DNA, 120 bp, Homo sapiens
  misc_feature: 595 for SV(W|O) and 28S
aagccagaggaaactctggtggaggtccgtagcggtcctgacgtgcaaatcggtcgtccgacctgggtataggggcgaaagactaatcgaaccatctagtagctggttccctccgaagtt

SEQ ID NO: 51197 - DNA, 120 bp, Homo sapiens
  misc_feature: 594 for SV(W|O) and 28S
tataggggcgaaagactaatcgaaccatctagtagctggttccctccgaagtttccctcaggatagctggcgctctcgcagacccgacgcacccccgccacgcagttttatccggtaaag

SEQ ID NO: 51198 - DNA, 120 bp, Homo sapiens
  misc_feature: 594 for SV(W|O) and 28S
gggtataggggcgaaagactaatcgaaccatctagtagctggttccctccgaagtttccctcaggatagctggcgctctcgcagacccgacgcacccccgccacgcagttttatccggta

SEQ ID NO: 51199 - DNA, 120 bp, Homo sapiens
  misc_feature: 594 for SV(W|O) and 28S
gccttcaccttcattgcgccacggcggctttcgtgcgagcccccgactcgcgcacgtgttagactccttggtccgtgtttcaagacgggtcgggtgggtagccgacgtcgccgccgaccc

SEQ ID NO: 51200 - DNA, 120 bp, Homo sapiens
  misc_feature: 594 for SV(W|O) and 28S
ggccgcgcgccggccgggcgcgacccgctccggggacagtgccaggtggggagtttgactggggcggtacacctgtcaaacggtaacgcaggtgtcctaaggcgagctcagggaggacag

SEQ ID NO: 51201 - DNA, 120 bp, Homo sapiens
  misc_feature: 594 for SV(W|O) and 28S
gctcgctggcgtggagccgggcgtggaatgcgagtgcctagtgggccacttttggtaagcagaactggcgctgcgggatgaaccgaacgccgggttaaggcgcccgatgccgacgctcat

SEQ ID NO: 51202 - DNA, 120 bp, Homo sapiens
  misc_feature: 594 for SV(W|O) and 28S
agcgcgccggccttcaccttcattgcgccacggcggctttcgtgcgagcccccgactcgcgcacgtgttagactccttggtccgtgtttcaagacgggtcgggtgggtagccgacgtcgc

SEQ ID NO: 51203 - DNA, 120 bp, Homo sapiens
  misc_feature: 594 for SV(W|O) and 28S
cctaacacgtgcgctcgtgctccacctccccggcgcggcgggcgagacgggccggtggtgcgccctcggcggactggagaggcctcgggatcccacctcggccggcgagcgcgccggcct

SEQ ID NO: 51204 - DNA, 120 bp, Homo sapiens
  misc_feature: 593 for SV(W|O) and 28S
acaaacccttgtgtcgagggctgactttcaatagatcgcagcgagggagctgctctgctacgtacgaaaccccgacccagaagcaggtcgtctacgaatggtttagcgccaggttcccca

SEQ ID NO: 51205 - DNA, 120 bp, Homo sapiens
  misc_feature: 593 for SV(W|O) and 28S
ggctcgctggcgtggagccgggcgtggaatgcgagtgcctagtgggccacttttggtaagcagaactggcgctgcgggatgaaccgaacgccgggttaaggcgcccgatgccgacgctca

SEQ ID NO: 51206 - DNA, 120 bp, Homo sapiens
  misc_feature: 593 for SV(W|O) and 28S
taggggcgaaagactaatcgaaccatctagtagctggttccctccgaagtttccctcaggatagctggcgctctcgcagacccgacgcacccccgccacgcagttttatccggtaaagcg

SEQ ID NO: 51207 - DNA, 120 bp, Homo sapiens
  misc_feature: 593 for SV(W|O) and 28S
gtcctccctgagctcgccttaggacacctgcgttaccgtttgacaggtgtaccgccccagtcaaactccccacctggcactgtccccggagcgggtcgcgcccggccggcgcgcggccgg

SEQ ID NO: 51208 - DNA, 120 bp, Homo sapiens
  misc_feature: 593 for SV(W|O) and 28S
ggccttcaccttcattgcgccacggcggctttcgtgcgagcccccgactcgcgcacgtgttagactccttggtccgtgtttcaagacgggtcgggtgggtagccgacgtcgccgccgacc

SEQ ID NO: 51209 - DNA, 120 bp, Homo sapiens
  misc_feature: 593 for SV(W|O) and 28S
ccctcggcggactggagaggcctcgggatcccacctcggccggcgagcgcgccggccttcaccttcattgcgccacggcggctttcgtgcgagcccccgactcgcgcacgtgttagactc

SEQ ID NO: 51210 - DNA, 120 bp, Homo sapiens
  misc_feature: 593 for SV(W|O) and 28S
aacaatgtaggtaagggaagtcggcaagccggatccgtaacttcgggataaggattggctctaagggctgggtcggtcgggctggggcgcgaagcggggctgggcgcgcgccgcggctgg

SEQ ID NO: 51211 - DNA, 120 bp, Homo sapiens
  misc_feature: 592 for SV(W|O) and 28S
ttcgggtcctaacacgtgcgctcgtgctccacctccccggcgcggcgggcgagacgggccggtggtgcgccctcggcggactggagaggcctcgggatcccacctcggccggcgagcgcg

SEQ ID NO: 51212 - DNA, 120 bp, Homo sapiens
  misc_feature: 592 for SV(W|O) and 28S
tgtgtcgagggctgactttcaatagatcgcagcgagggagctgctctgctacgtacgaaaccccgacccagaagcaggtcgtctacgaatggtttagcgccaggttccccacgaacgtgc

SEQ ID NO: 51213 - DNA, 120 bp, Homo sapiens
  misc_feature: 592 for SV(W|O) and 28S
acaatgtaggtaagggaagtcggcaagccggatccgtaacttcgggataaggattggctctaagggctgggtcggtcgggctggggcgcgaagcggggctgggcgcgcgccgcggctgga

SEQ ID NO: 51214 - DNA, 120 bp, Homo sapiens
  misc_feature: 592 for SV(W|O) and 28S
gtgtcgagggctgactttcaatagatcgcagcgagggagctgctctgctacgtacgaaaccccgacccagaagcaggtcgtctacgaatggtttagcgccaggttccccacgaacgtgcg

SEQ ID NO: 51215 - DNA, 120 bp, Homo sapiens
  misc_feature: 592 for SV(W|O) and 28S
caaacccttgtgtcgagggctgactttcaatagatcgcagcgagggagctgctctgctacgtacgaaaccccgacccagaagcaggtcgtctacgaatggtttagcgccaggttccccac

SEQ ID NO: 51216 - DNA, 120 bp, Homo sapiens
  misc_feature: 592 for SV(W|O) and 28S
gcggactggagaggcctcgggatcccacctcggccggcgagcgcgccggccttcaccttcattgcgccacggcggctttcgtgcgagcccccgactcgcgcacgtgttagactccttggt

SEQ ID NO: 51217 - DNA, 120 bp, Homo sapiens
  misc_feature: 592 for SV(W|O) and 28S
cggctcgctggcgtggagccgggcgtggaatgcgagtgcctagtgggccacttttggtaagcagaactggcgctgcgggatgaaccgaacgccgggttaaggcgcccgatgccgacgctc

SEQ ID NO: 51218 - DNA, 120 bp, Homo sapiens
  misc_feature: 592 for SV(W|O) and 28S
cgctggcgtggagccgggcgtggaatgcgagtgcctagtgggccacttttggtaagcagaactggcgctgcgggatgaaccgaacgccgggttaaggcgcccgatgccgacgctcatcag

SEQ ID NO: 51219 - DNA, 120 bp, Homo sapiens
  misc_feature: 591 for SV(W|O) and 28S
ttgtgtcgagggctgactttcaatagatcgcagcgagggagctgctctgctacgtacgaaaccccgacccagaagcaggtcgtctacgaatggtttagcgccaggttccccacgaacgtg

SEQ ID NO: 51220 - DNA, 120 bp, Homo sapiens
  misc_feature: 591 for SV(W|O) and 28S
cggccgcgcgccggccgggcgcgacccgctccggggacagtgccaggtggggagtttgactggggcggtacacctgtcaaacggtaacgcaggtgtcctaaggcgagctcagggaggaca

SEQ ID NO: 51221 - DNA, 120 bp, Homo sapiens
  misc_feature: 591 for SV(W|O) and 28S
gctagttgattcggcaggtgagttgttacacactccttagcggattccgacttccatggccaccgtcctgctgtctatatcaaccaacaccttttctggggtctgatgagcgtcggcatc

SEQ ID NO: 51222 - DNA, 120 bp, Homo sapiens
  misc_feature: 591 for SV(W|O) and 28S
ccttgtgtcgagggctgactttcaatagatcgcagcgagggagctgctctgctacgtacgaaaccccgacccagaagcaggtcgtctacgaatggtttagcgccaggttccccacgaacg

SEQ ID NO: 51223 - DNA, 120 bp, Homo sapiens
  misc_feature: 590 for SV(W|O) and 28S
acccttgtgtcgagggctgactttcaatagatcgcagcgagggagctgctctgctacgtacgaaaccccgacccagaagcaggtcgtctacgaatggtttagcgccaggttccccacgaa

SEQ ID NO: 51224 - DNA, 120 bp, Homo sapiens
  misc_feature: 590 for SV(W|O) and 28S
gcgcccgatgccgacgctcatcagaccccagaaaaggtgttggttgatatagacagcaggacggtggccatggaagtcggaatccgctaaggagtgtgtaacaactcacctgccgaatca

SEQ ID NO: 51225 - DNA, 120 bp, Homo sapiens
  misc_feature: 590 for SV(W|O) and 28S
gtcctaacacgtgcgctcgtgctccacctccccggcgcggcgggcgagacgggccggtggtgcgccctcggcggactggagaggcctcgggatcccacctcggccggcgagcgcgccggc

SEQ ID NO: 51226 - DNA, 120 bp, Homo sapiens
  misc_feature: 589 for SV(W|O) and 28S
gtcccccgaagagggggacggcggagcgagcgcacggggtcggcggcgacgtcggctacccacccgacccgtcttgaaacacggaccaaggagtctaacacgtgcgcgagtcgggggctc

SEQ ID NO: 51227 - DNA, 120 bp, Homo sapiens
  misc_feature: 589 for SV(W|O) and 28S
ggcgcccgatgccgacgctcatcagaccccagaaaaggtgttggttgatatagacagcaggacggtggccatggaagtcggaatccgctaaggagtgtgtaacaactcacctgccgaatc

SEQ ID NO: 51228 - DNA, 120 bp, Homo sapiens
  misc_feature: 589 for SV(W|O) and 28S
cctcctcccgcccacgccccgctccccgcccccggagccccgcggacgctacgccgcgacgagtaggagggccgctgcggtgagccttgaagcctagggcgcgggcccgggtggagccgc

SEQ ID NO: 51229 - DNA, 120 bp, Homo sapiens
  misc_feature: 589 for SV(W|O) and 28S
cttgtgtcgagggctgactttcaatagatcgcagcgagggagctgctctgctacgtacgaaaccccgacccagaagcaggtcgtctacgaatggtttagcgccaggttccccacgaacgt

SEQ ID NO: 51230 - DNA, 120 bp, Homo sapiens
  misc_feature: 589 for SV(W|O) and 28S
cagcgccgaatccccgccccgcggcggggcgcgggacatgtggcgtacggaagacccgctccccggcgccgctcgtggggggcccaagtccttctgatcgaggcccagcccgtggacggt

SEQ ID NO: 51231 - DNA, 120 bp, Homo sapiens
  misc_feature: 588 for SV(W|O) and 28S
gtataggggcgaaagactaatcgaaccatctagtagctggttccctccgaagtttccctcaggatagctggcgctctcgcagacccgacgcacccccgccacgcagttttatccggtaaa

SEQ ID NO: 51232 - DNA, 120 bp, Homo sapiens
  misc_feature: 588 for SV(W|O) and 28S
cctccctgagctcgccttaggacacctgcgttaccgtttgacaggtgtaccgccccagtcaaactccccacctggcactgtccccggagcgggtcgcgcccggccggcgcgcggccgggc

SEQ ID NO: 51233 - DNA, 120 bp, Homo sapiens
  misc_feature: 587 for SV(W|O) and 28S
cgtcggcatcgggcgccttaacccggcgttcggttcatcccgcagcgccagttctgcttaccaaaagtggcccactaggcactcgcattccacgcccggctccacgccagcgagccgggc

SEQ ID NO: 51234 - DNA, 120 bp, Homo sapiens
  misc_feature: 587 for SV(W|O) and 28S
gatagctggcgctctcgcagacccgacgcacccccgccacgcagttttatccggtaaagcgaatgattagaggtcttggggccgaaacgatctcaacctattctcaaactttaaatgggt

SEQ ID NO: 51235 - DNA, 120 bp, Homo sapiens
  misc_feature: 587 for SV(W|O) and 28S
cgtcccccgaagagggggacggcggagcgagcgcacggggtcggcggcgacgtcggctacccacccgacccgtcttgaaacacggaccaaggagtctaacacgtgcgcgagtcgggggct

SEQ ID NO: 51236 - DNA, 120 bp, Homo sapiens
  misc_feature: 586 for SV(W|O) and 28S
cgagcccccgactcgcgcacgtgttagactccttggtccgtgtttcaagacgggtcgggtgggtagccgacgtcgccgccgaccccgtgcgctcgctccgccgtccccctcttcggggga

SEQ ID NO: 51237 - DNA, 120 bp, Homo sapiens
  misc_feature: 586 for SV(W|O) and 28S
gtcggcatcgggcgccttaacccggcgttcggttcatcccgcagcgccagttctgcttaccaaaagtggcccactaggcactcgcattccacgcccggctccacgccagcgagccgggct

SEQ ID NO: 51238 - DNA, 120 bp, Homo sapiens
  misc_feature: 586 for SV(W|O) and 28S
ctagttgattcggcaggtgagttgttacacactccttagcggattccgacttccatggccaccgtcctgctgtctatatcaaccaacaccttttctggggtctgatgagcgtcggcatcg

SEQ ID NO: 51239 - DNA, 120 bp, Homo sapiens
  misc_feature: 586 for SV(W|O) and 28S
cgggccgccggtgaaataccactactctgatcgttttttcactgacccggtgaggcgggggggcgagccccgaggggctctcgcttctggcgccaagcgcccggccgcgcgccggccggg

SEQ ID NO: 51240 - DNA, 120 bp, Homo sapiens
  misc_feature: 585 for SV(W|O) and 28S
cgcccgatgccgacgctcatcagaccccagaaaaggtgttggttgatatagacagcaggacggtggccatggaagtcggaatccgctaaggagtgtgtaacaactcacctgccgaatcaa

SEQ ID NO: 51241 - DNA, 120 bp, Homo sapiens
  misc_feature: 585 for SV(W|O) and 28S
gggctagttgattcggcaggtgagttgttacacactccttagcggattccgacttccatggccaccgtcctgctgtctatatcaaccaacaccttttctggggtctgatgagcgtcggca

SEQ ID NO: 51242 - DNA, 120 bp, Homo sapiens
  misc_feature: 585 for SV(W|O) and 28S
cctcggcggactggagaggcctcgggatcccacctcggccggcgagcgcgccggccttcaccttcattgcgccacggcggctttcgtgcgagcccccgactcgcgcacgtgttagactcc

SEQ ID NO: 51243 - DNA, 120 bp, Homo sapiens
  misc_feature: 585 for SV(W|O) and 28S
gcatcgggcgccttaacccggcgttcggttcatcccgcagcgccagttctgcttaccaaaagtggcccactaggcactcgcattccacgcccggctccacgccagcgagccgggcttctt

SEQ ID NO: 51244 - DNA, 120 bp, Homo sapiens
  misc_feature: 584 for SV(W|O) and 28S
tagttgattcggcaggtgagttgttacacactccttagcggattccgacttccatggccaccgtcctgctgtctatatcaaccaacaccttttctggggtctgatgagcgtcggcatcgg

SEQ ID NO: 51245 - DNA, 120 bp, Homo sapiens
  misc_feature: 584 for SV(W|O) and 28S
gttgattcggcaggtgagttgttacacactccttagcggattccgacttccatggccaccgtcctgctgtctatatcaaccaacaccttttctggggtctgatgagcgtcggcatcgggc

SEQ ID NO: 51246 - DNA, 120 bp, Homo sapiens
  misc_feature: 583 for SV(W|O) and 28S
gtggagccgggcgtggaatgcgagtgcctagtgggccacttttggtaagcagaactggcgctgcgggatgaaccgaacgccgggttaaggcgcccgatgccgacgctcatcagaccccag

SEQ ID NO: 51247 - DNA, 120 bp, Homo sapiens
  misc_feature: 583 for SV(W|O) and 28S
ctcggcggactggagaggcctcgggatcccacctcggccggcgagcgcgccggccttcaccttcattgcgccacggcggctttcgtgcgagcccccgactcgcgcacgtgttagactcct

SEQ ID NO: 51248 - DNA, 120 bp, Homo sapiens
  misc_feature: 583 for SV(W|O) and 28S
agcgccgaatccccgccccgcggcggggcgcgggacatgtggcgtacggaagacccgctccccggcgccgctcgtggggggcccaagtccttctgatcgaggcccagcccgtggacggtg

SEQ ID NO: 51249 - DNA, 120 bp, Homo sapiens
  misc_feature: 582 for SV(W|O) and 28S
tgcgggatgaaccgaacgccgggttaaggcgcccgatgccgacgctcatcagaccccagaaaaggtgttggttgatatagacagcaggacggtggccatggaagtcggaatccgctaagg

SEQ ID NO: 51250 - DNA, 120 bp, Homo sapiens
  misc_feature: 582 for SV(W|O) and 28S
taccactactctgatcgttttttcactgacccggtgaggcgggggggcgagccccgaggggctctcgcttctggcgccaagcgcccggccgcgcgccggccgggcgcgacccgctccggg

SEQ ID NO: 51251 - DNA, 120 bp, Homo sapiens
  misc_feature: 582 for SV(W|O) and 28S
gacaaacccttgtgtcgagggctgactttcaatagatcgcagcgagggagctgctctgctacgtacgaaaccccgacccagaagcaggtcgtctacgaatggtttagcgccaggttcccc

SEQ ID NO: 51252 - DNA, 120 bp, Homo sapiens
  misc_feature: 582 for SV(W|O) and 28S
gacctgggtataggggcgaaagactaatcgaaccatctagtagctggttccctccgaagtttccctcaggatagctggcgctctcgcagacccgacgcacccccgccacgcagttttatc

SEQ ID NO: 51253 - DNA, 120 bp, Homo sapiens
  misc_feature: 582 for SV(W|O) and 28S
agccagaggaaactctggtggaggtccgtagcggtcctgacgtgcaaatcggtcgtccgacctgggtataggggcgaaagactaatcgaaccatctagtagctggttccctccgaagttt

SEQ ID NO: 51254 - DNA, 120 bp, Homo sapiens
  misc_feature: 581 for SV(W|O) and 28S
tcggcggactggagaggcctcgggatcccacctcggccggcgagcgcgccggccttcaccttcattgcgccacggcggctttcgtgcgagcccccgactcgcgcacgtgttagactcctt

SEQ ID NO: 51255 - DNA, 120 bp, Homo sapiens
  misc_feature: 581 for SV(W|O) and 28S
cgggttaaggcgcccgatgccgacgctcatcagaccccagaaaaggtgttggttgatatagacagcaggacggtggccatggaagtcggaatccgctaaggagtgtgtaacaactcacct

SEQ ID NO: 51256 - DNA, 120 bp, Homo sapiens
  misc_feature: 580 for SV(W|O) and 28S
tagctggcgctctcgcagacccgacgcacccccgccacgcagttttatccggtaaagcgaatgattagaggtcttggggccgaaacgatctcaacctattctcaaactttaaatgggtaa

SEQ ID NO: 51257 - DNA, 120 bp, Homo sapiens
  misc_feature: 580 for SV(W|O) and 28S
aacccttgtgtcgagggctgactttcaatagatcgcagcgagggagctgctctgctacgtacgaaaccccgacccagaagcaggtcgtctacgaatggtttagcgccaggttccccacga

SEQ ID NO: 51258 - DNA, 120 bp, Homo sapiens
  misc_feature: 580 for SV(W|O) and 28S
tccctgagctcgccttaggacacctgcgttaccgtttgacaggtgtaccgccccagtcaaactccccacctggcactgtccccggagcgggtcgcgcccggccggcgcgcggccgggcgc

SEQ ID NO: 51259 - DNA, 120 bp, Homo sapiens
  misc_feature: 580 for SV(W|O) and 28S
ctgcgggatgaaccgaacgccgggttaaggcgcccgatgccgacgctcatcagaccccagaaaaggtgttggttgatatagacagcaggacggtggccatggaagtcggaatccgctaag

SEQ ID NO: 51260 - DNA, 120 bp, Homo sapiens
  misc_feature: 580 for SV(W|O) and 28S
ccctcctcccgcccacgccccgctccccgcccccggagccccgcggacgctacgccgcgacgagtaggagggccgctgcggtgagccttgaagcctagggcgcgggcccgggtggagccg

SEQ ID NO: 51261 - DNA, 120 bp, Homo sapiens
  misc_feature: 579 for SV(W|O) and 28S
tggcgctgcgggatgaaccgaacgccgggttaaggcgcccgatgccgacgctcatcagaccccagaaaaggtgttggttgatatagacagcaggacggtggccatggaagtcggaatccg

SEQ ID NO: 51262 - DNA, 120 bp, Homo sapiens
  misc_feature: 579 for SV(W|O) and 28S
atagctggcgctctcgcagacccgacgcacccccgccacgcagttttatccggtaaagcgaatgattagaggtcttggggccgaaacgatctcaacctattctcaaactttaaatgggta

SEQ ID NO: 51263 - DNA, 120 bp, Homo sapiens
  misc_feature: 579 for SV(W|O) and 28S
agttgattcggcaggtgagttgttacacactccttagcggattccgacttccatggccaccgtcctgctgtctatatcaaccaacaccttttctggggtctgatgagcgtcggcatcggg

SEQ ID NO: 51264 - DNA, 120 bp, Homo sapiens
  misc_feature: 579 for SV(W|O) and 28S
aggcgcccgatgccgacgctcatcagaccccagaaaaggtgttggttgatatagacagcaggacggtggccatggaagtcggaatccgctaaggagtgtgtaacaactcacctgccgaat

SEQ ID NO: 51265 - DNA, 120 bp, Homo sapiens
  misc_feature: 578 for SV(W|O) and 28S
ggctagttgattcggcaggtgagttgttacacactccttagcggattccgacttccatggccaccgtcctgctgtctatatcaaccaacaccttttctggggtctgatgagcgtcggcat

SEQ ID NO: 51266 - DNA, 120 bp, Homo sapiens
  misc_feature: 578 for SV(W|O) and 28S
actggcgctgcgggatgaaccgaacgccgggttaaggcgcccgatgccgacgctcatcagaccccagaaaaggtgttggttgatatagacagcaggacggtggccatggaagtcggaatc

SEQ ID NO: 51267 - DNA, 120 bp, Homo sapiens
  misc_feature: 577 for SV(W|O) and 28S
aaggcgcccgatgccgacgctcatcagaccccagaaaaggtgttggttgatatagacagcaggacggtggccatggaagtcggaatccgctaaggagtgtgtaacaactcacctgccgaa

SEQ ID NO: 51268 - DNA, 120 bp, Homo sapiens
  misc_feature: 577 for SV(W|O) and 28S
ggacaaacccttgtgtcgagggctgactttcaatagatcgcagcgagggagctgctctgctacgtacgaaaccccgacccagaagcaggtcgtctacgaatggtttagcgccaggttccc

SEQ ID NO: 51269 - DNA, 120 bp, Homo sapiens
  misc_feature: 577 for SV(W|O) and 28S
gcgccgaatccccgccccgcggcggggcgcgggacatgtggcgtacggaagacccgctccccggcgccgctcgtggggggcccaagtccttctgatcgaggcccagcccgtggacggtgt

SEQ ID NO: 51270 - DNA, 120 bp, Homo sapiens
  misc_feature: 576 for SV(W|O) and 28S
tggagccgggcgtggaatgcgagtgcctagtgggccacttttggtaagcagaactggcgctgcgggatgaaccgaacgccgggttaaggcgcccgatgccgacgctcatcagaccccaga

SEQ ID NO: 51271 - DNA, 120 bp, Homo sapiens
  misc_feature: 576 for SV(W|O) and 28S
tcggcatcgggcgccttaacccggcgttcggttcatcccgcagcgccagttctgcttaccaaaagtggcccactaggcactcgcattccacgcccggctccacgccagcgagccgggctt

SEQ ID NO: 51272 - DNA, 120 bp, Homo sapiens
  misc_feature: 576 for SV(W|O) and 28S
taagaagcccggctcgctggcgtggagccgggcgtggaatgcgagtgcctagtgggccacttttggtaagcagaactggcgctgcgggatgaaccgaacgccgggttaaggcgcccgatg

SEQ ID NO: 51273 - DNA, 120 bp, Homo sapiens
  misc_feature: 575 for SV(W|O) and 28S
gcgggatgaaccgaacgccgggttaaggcgcccgatgccgacgctcatcagaccccagaaaaggtgttggttgatatagacagcaggacggtggccatggaagtcggaatccgctaagga

SEQ ID NO: 51274 - DNA, 120 bp, Homo sapiens
  misc_feature: 575 for SV(W|O) and 28S
gggttaaggcgcccgatgccgacgctcatcagaccccagaaaaggtgttggttgatatagacagcaggacggtggccatggaagtcggaatccgctaaggagtgtgtaacaactcacctg

SEQ ID NO: 51275 - DNA, 120 bp, Homo sapiens
  misc_feature: 575 for SV(W|O) and 28S
gccagaggaaactctggtggaggtccgtagcggtcctgacgtgcaaatcggtcgtccgacctgggtataggggcgaaagactaatcgaaccatctagtagctggttccctccgaagtttc

SEQ ID NO: 51276 - DNA, 120 bp, Homo sapiens
  misc_feature: 575 for SV(W|O) and 28S
cctgggtataggggcgaaagactaatcgaaccatctagtagctggttccctccgaagtttccctcaggatagctggcgctctcgcagacccgacgcacccccgccacgcagttttatccg

SEQ ID NO: 51277 - DNA, 120 bp, Homo sapiens
  misc_feature: 574 for SV(W|O) and 28S
tgggtataggggcgaaagactaatcgaaccatctagtagctggttccctccgaagtttccctcaggatagctggcgctctcgcagacccgacgcacccccgccacgcagttttatccggt

SEQ ID NO: 51278 - DNA, 120 bp, Homo sapiens
  misc_feature: 574 for SV(W|O) and 28S
tggcgctctcgcagacccgacgcacccccgccacgcagttttatccggtaaagcgaatgattagaggtcttggggccgaaacgatctcaacctattctcaaactttaaatgggtaagaag

SEQ ID NO: 51279 - DNA, 120 bp, Homo sapiens
  misc_feature: 574 for SV(W|O) and 28S
cagaggaaactctggtggaggtccgtagcggtcctgacgtgcaaatcggtcgtccgacctgggtataggggcgaaagactaatcgaaccatctagtagctggttccctccgaagtttccc

SEQ ID NO: 51280 - DNA, 120 bp, Homo sapiens
  misc_feature: 574 for SV(W|O) and 28S
cccctcctcccgcccacgccccgctccccgcccccggagccccgcggacgctacgccgcgacgagtaggagggccgctgcggtgagccttgaagcctagggcgcgggcccgggtggagcc

SEQ ID NO: 51281 - DNA, 120 bp, Homo sapiens
  misc_feature: 574 for SV(W|O) and 28S
ctggcgctgcgggatgaaccgaacgccgggttaaggcgcccgatgccgacgctcatcagaccccagaaaaggtgttggttgatatagacagcaggacggtggccatggaagtcggaatcc

SEQ ID NO: 51282 - DNA, 120 bp, Homo sapiens
  misc_feature: 574 for SV(W|O) and 28S
aaataccactactctgatcgttttttcactgacccggtgaggcgggggggcgagccccgaggggctctcgcttctggcgccaagcgcccggccgcgcgccggccgggcgcgacccgctcc

SEQ ID NO: 51283 - DNA, 120 bp, Homo sapiens
  misc_feature: 574 for SV(W|O) and 28S
agctggcgctctcgcagacccgacgcacccccgccacgcagttttatccggtaaagcgaatgattagaggtcttggggccgaaacgatctcaacctattctcaaactttaaatgggtaag

SEQ ID NO: 51284 - DNA, 120 bp, Homo sapiens
  misc_feature: 574 for SV(W|O) and 28S
ctccctgagctcgccttaggacacctgcgttaccgtttgacaggtgtaccgccccagtcaaactccccacctggcactgtccccggagcgggtcgcgcccggccggcgcgcggccgggcg

SEQ ID NO: 51285 - DNA, 120 bp, Homo sapiens
  misc_feature: 574 for SV(W|O) and 28S
aaacccttgtgtcgagggctgactttcaatagatcgcagcgagggagctgctctgctacgtacgaaaccccgacccagaagcaggtcgtctacgaatggtttagcgccaggttccccacg

SEQ ID NO: 51286 - DNA, 120 bp, Homo sapiens
  misc_feature: 574 for SV(W|O) and 28S
agaggaaactctggtggaggtccgtagcggtcctgacgtgcaaatcggtcgtccgacctgggtataggggcgaaagactaatcgaaccatctagtagctggttccctccgaagtttccct

SEQ ID NO: 51287 - DNA, 120 bp, Homo sapiens
  misc_feature: 573 for SV(W|O) and 28S
acctgggtataggggcgaaagactaatcgaaccatctagtagctggttccctccgaagtttccctcaggatagctggcgctctcgcagacccgacgcacccccgccacgcagttttatcc

SEQ ID NO: 51288 - DNA, 120 bp, Homo sapiens
  misc_feature: 573 for SV(W|O) and 28S
aataccactactctgatcgttttttcactgacccggtgaggcgggggggcgagccccgaggggctctcgcttctggcgccaagcgcccggccgcgcgccggccgggcgcgacccgctccg

SEQ ID NO: 51289 - DNA, 120 bp, Homo sapiens
  misc_feature: 572 for SV(W|O) and 28S
aatgggtaagaagcccggctcgctggcgtggagccgggcgtggaatgcgagtgcctagtgggccacttttggtaagcagaactggcgctgcgggatgaaccgaacgccgggttaaggcgc

SEQ ID NO: 51290 - DNA, 120 bp, Homo sapiens
  misc_feature: 571 for SV(W|O) and 28S
ggagccgggcgtggaatgcgagtgcctagtgggccacttttggtaagcagaactggcgctgcgggatgaaccgaacgccgggttaaggcgcccgatgccgacgctcatcagaccccagaa

SEQ ID NO: 51291 - DNA, 120 bp, Homo sapiens
  misc_feature: 571 for SV(W|O) and 28S
gctgcgggatgaaccgaacgccgggttaaggcgcccgatgccgacgctcatcagaccccagaaaaggtgttggttgatatagacagcaggacggtggccatggaagtcggaatccgctaa

SEQ ID NO: 51292 - DNA, 120 bp, Homo sapiens
  misc_feature: 571 for SV(W|O) and 28S
ggcgctgcgggatgaaccgaacgccgggttaaggcgcccgatgccgacgctcatcagaccccagaaaaggtgttggttgatatagacagcaggacggtggccatggaagtcggaatccgc

SEQ ID NO: 51293 - DNA, 120 bp, Homo sapiens
  misc_feature: 571 for SV(W|O) and 28S
ctgggtataggggcgaaagactaatcgaaccatctagtagctggttccctccgaagtttccctcaggatagctggcgctctcgcagacccgacgcacccccgccacgcagttttatccgg

SEQ ID NO: 51294 - DNA, 120 bp, Homo sapiens
  misc_feature: 571 for SV(W|O) and 28S
aactggcgctgcgggatgaaccgaacgccgggttaaggcgcccgatgccgacgctcatcagaccccagaaaaggtgttggttgatatagacagcaggacggtggccatggaagtcggaat

SEQ ID NO: 51295 - DNA, 120 bp, Homo sapiens
  misc_feature: 570 for SV(W|O) and 28S
gccgaatccccgccccgcggcggggcgcgggacatgtggcgtacggaagacccgctccccggcgccgctcgtggggggcccaagtccttctgatcgaggcccagcccgtggacggtgtga

SEQ ID NO: 51296 - DNA, 120 bp, Homo sapiens
  misc_feature: 570 for SV(W|O) and 28S
ccgggttaaggcgcccgatgccgacgctcatcagaccccagaaaaggtgttggttgatatagacagcaggacggtggccatggaagtcggaatccgctaaggagtgtgtaacaactcacc

SEQ ID NO: 51297 - DNA, 120 bp, Homo sapiens
  misc_feature: 570 for SV(W|O) and 28S
gggcgggggcgcggggaggaggggtgggagagcggtcgcgccgtgggaggggtggcccggcccccccacgaggagacgccggcgcgcccccgcgggggagacccccctcgcgggggattc

SEQ ID NO: 51298 - DNA, 120 bp, Homo sapiens
  misc_feature: 569 for SV(W|O) and 28S
gttaaggcgcccgatgccgacgctcatcagaccccagaaaaggtgttggttgatatagacagcaggacggtggccatggaagtcggaatccgctaaggagtgtgtaacaactcacctgcc

SEQ ID NO: 51299 - DNA, 120 bp, Homo sapiens
  misc_feature: 569 for SV(W|O) and 28S
ggttaaggcgcccgatgccgacgctcatcagaccccagaaaaggtgttggttgatatagacagcaggacggtggccatggaagtcggaatccgctaaggagtgtgtaacaactcacctgc

SEQ ID NO: 51300 - DNA, 120 bp, Homo sapiens
  misc_feature: 569 for SV(W|O) and 28S
cggggaatcccccgcgaggggggtctcccccgcgggggcgcgccggcgtctcctcgtgggggggccgggccacccctcccacggcgcgaccgctctcccacccctcctccccgcgccccc

SEQ ID NO: 51301 - DNA, 120 bp, Homo sapiens
  misc_feature: 569 for SV(W|O) and 28S
gcggggaatcccccgcgaggggggtctcccccgcgggggcgcgccggcgtctcctcgtgggggggccgggccacccctcccacggcgcgaccgctctcccacccctcctccccgcgcccc

SEQ ID NO: 51302 - DNA, 120 bp, Homo sapiens
  misc_feature: 569 for SV(W|O) and 28S
gaatccccgccccgcggcggggcgcgggacatgtggcgtacggaagacccgctccccggcgccgctcgtggggggcccaagtccttctgatcgaggcccagcccgtggacggtgtgaggc

SEQ ID NO: 51303 - DNA, 120 bp, Homo sapiens
  misc_feature: 569 for SV(W|O) and 28S
ccgaatccccgccccgcggcggggcgcgggacatgtggcgtacggaagacccgctccccggcgccgctcgtggggggcccaagtccttctgatcgaggcccagcccgtggacggtgtgag

SEQ ID NO: 51304 - DNA, 120 bp, Homo sapiens
  misc_feature: 568 for SV(W|O) and 28S
agaactggcgctgcgggatgaaccgaacgccgggttaaggcgcccgatgccgacgctcatcagaccccagaaaaggtgttggttgatatagacagcaggacggtggccatggaagtcgga

SEQ ID NO: 51305 - DNA, 120 bp, Homo sapiens
  misc_feature: 568 for SV(W|O) and 28S
ccggtgaaataccactactctgatcgttttttcactgacccggtgaggcgggggggcgagccccgaggggctctcgcttctggcgccaagcgcccggccgcgcgccggccgggcgcgacc

SEQ ID NO: 51306 - DNA, 120 bp, Homo sapiens
  misc_feature: 567 for SV(W|O) and 28S
agccgggcgtggaatgcgagtgcctagtgggccacttttggtaagcagaactggcgctgcgggatgaaccgaacgccgggttaaggcgcccgatgccgacgctcatcagaccccagaaaa

SEQ ID NO: 51307 - DNA, 120 bp, Homo sapiens
  misc_feature: 567 for SV(W|O) and 28S
gagccgggcgtggaatgcgagtgcctagtgggccacttttggtaagcagaactggcgctgcgggatgaaccgaacgccgggttaaggcgcccgatgccgacgctcatcagaccccagaaa

SEQ ID NO: 51308 - DNA, 120 bp, Homo sapiens
  misc_feature: 567 for SV(W|O) and 28S
cggtgaaataccactactctgatcgttttttcactgacccggtgaggcgggggggcgagccccgaggggctctcgcttctggcgccaagcgcccggccgcgcgccggccgggcgcgaccc

SEQ ID NO: 51309 - DNA, 120 bp, Homo sapiens
  misc_feature: 567 for SV(W|O) and 28S
ggggcgggggcgcggggaggaggggtgggagagcggtcgcgccgtgggaggggtggcccggcccccccacgaggagacgccggcgcgcccccgcgggggagacccccctcgcgggggatt

SEQ ID NO: 51310 - DNA, 120 bp, Homo sapiens
  misc_feature: 567 for SV(W|O) and 28S
gaaataccactactctgatcgttttttcactgacccggtgaggcgggggggcgagccccgaggggctctcgcttctggcgccaagcgcccggccgcgcgccggccgggcgcgacccgctc

SEQ ID NO: 51311 - DNA, 120 bp, Homo sapiens
  misc_feature: 567 for SV(W|O) and 28S
ccgggcgtggaatgcgagtgcctagtgggccacttttggtaagcagaactggcgctgcgggatgaaccgaacgccgggttaaggcgcccgatgccgacgctcatcagaccccagaaaagg

SEQ ID NO: 51312 - DNA, 120 bp, Homo sapiens
  misc_feature: 567 for SV(W|O) and 28S
ataccactactctgatcgttttttcactgacccggtgaggcgggggggcgagccccgaggggctctcgcttctggcgccaagcgcccggccgcgcgccggccgggcgcgacccgctccgg

SEQ ID NO: 51313 - DNA, 120 bp, Homo sapiens
  misc_feature: 566 for SV(W|O) and 28S
taaggcgcccgatgccgacgctcatcagaccccagaaaaggtgttggttgatatagacagcaggacggtggccatggaagtcggaatccgctaaggagtgtgtaacaactcacctgccga

SEQ ID NO: 51314 - DNA, 120 bp, Homo sapiens
  misc_feature: 566 for SV(W|O) and 28S
gggccgccggtgaaataccactactctgatcgttttttcactgacccggtgaggcgggggggcgagccccgaggggctctcgcttctggcgccaagcgcccggccgcgcgccggccgggc

SEQ ID NO: 51315 - DNA, 120 bp, Homo sapiens
  misc_feature: 565 for SV(W|O) and 28S
ggcatcgggcgccttaacccggcgttcggttcatcccgcagcgccagttctgcttaccaaaagtggcccactaggcactcgcattccacgcccggctccacgccagcgagccgggcttct

SEQ ID NO: 51316 - DNA, 120 bp, Homo sapiens
  misc_feature: 565 for SV(W|O) and 28S
cgccgaatccccgccccgcggcggggcgcgggacatgtggcgtacggaagacccgctccccggcgccgctcgtggggggcccaagtccttctgatcgaggcccagcccgtggacggtgtg

SEQ ID NO: 51317 - DNA, 120 bp, Homo sapiens
  misc_feature: 565 for SV(W|O) and 28S
cgacctgggtataggggcgaaagactaatcgaaccatctagtagctggttccctccgaagtttccctcaggatagctggcgctctcgcagacccgacgcacccccgccacgcagttttat

SEQ ID NO: 51318 - DNA, 120 bp, Homo sapiens
  misc_feature: 564 for SV(W|O) and 28S
ttaaggcgcccgatgccgacgctcatcagaccccagaaaaggtgttggttgatatagacagcaggacggtggccatggaagtcggaatccgctaaggagtgtgtaacaactcacctgccg

SEQ ID NO: 51319 - DNA, 120 bp, Homo sapiens
  misc_feature: 564 for SV(W|O) and 28S
cgaatccccgccccgcggcggggcgcgggacatgtggcgtacggaagacccgctccccggcgccgctcgtggggggcccaagtccttctgatcgaggcccagcccgtggacggtgtgagg

SEQ ID NO: 51320 - DNA, 120 bp, Homo sapiens
  misc_feature: 564 for SV(W|O) and 28S
accactactctgatcgttttttcactgacccggtgaggcgggggggcgagccccgaggggctctcgcttctggcgccaagcgcccggccgcgcgccggccgggcgcgacccgctccgggg

SEQ ID NO: 51321 - DNA, 120 bp, Homo sapiens
  misc_feature: 563 for SV(W|O) and 28S
gaactggcgctgcgggatgaaccgaacgccgggttaaggcgcccgatgccgacgctcatcagaccccagaaaaggtgttggttgatatagacagcaggacggtggccatggaagtcggaa

SEQ ID NO: 51322 - DNA, 120 bp, Homo sapiens
  misc_feature: 563 for SV(W|O) and 28S
gctggcgctctcgcagacccgacgcacccccgccacgcagttttatccggtaaagcgaatgattagaggtcttggggccgaaacgatctcaacctattctcaaactttaaatgggtaaga

SEQ ID NO: 51323 - DNA, 120 bp, Homo sapiens
  misc_feature: 563 for SV(W|O) and 28S
ggtgaaataccactactctgatcgttttttcactgacccggtgaggcgggggggcgagccccgaggggctctcgcttctggcgccaagcgcccggccgcgcgccggccgggcgcgacccg

SEQ ID NO: 51324 - DNA, 120 bp, Homo sapiens
  misc_feature: 563 for SV(W|O) and 28S
cgcggggaatcccccgcgaggggggtctcccccgcgggggcgcgccggcgtctcctcgtgggggggccgggccacccctcccacggcgcgaccgctctcccacccctcctccccgcgccc

SEQ ID NO: 51325 - DNA, 120 bp, Homo sapiens
  misc_feature: 563 for SV(W|O) and 28S
cagaactggcgctgcgggatgaaccgaacgccgggttaaggcgcccgatgccgacgctcatcagaccccagaaaaggtgttggttgatatagacagcaggacggtggccatggaagtcgg

SEQ ID NO: 51326 - DNA, 120 bp, Homo sapiens
  misc_feature: 562 for SV(W|O) and 28S
aaatgggtaagaagcccggctcgctggcgtggagccgggcgtggaatgcgagtgcctagtgggccacttttggtaagcagaactggcgctgcgggatgaaccgaacgccgggttaaggcg

SEQ ID NO: 51327 - DNA, 120 bp, Homo sapiens
  misc_feature: 561 for SV(W|O) and 28S
cgctgcgggatgaaccgaacgccgggttaaggcgcccgatgccgacgctcatcagaccccagaaaaggtgttggttgatatagacagcaggacggtggccatggaagtcggaatccgcta

SEQ ID NO: 51328 - DNA, 120 bp, Homo sapiens
  misc_feature: 561 for SV(W|O) and 28S
gtaagaagcccggctcgctggcgtggagccgggcgtggaatgcgagtgcctagtgggccacttttggtaagcagaactggcgctgcgggatgaaccgaacgccgggttaaggcgcccgat

SEQ ID NO: 51329 - DNA, 120 bp, Homo sapiens
  misc_feature: 561 for SV(W|O) and 28S
cggcatcgggcgccttaacccggcgttcggttcatcccgcagcgccagttctgcttaccaaaagtggcccactaggcactcgcattccacgcccggctccacgccagcgagccgggcttc

SEQ ID NO: 51330 - DNA, 120 bp, Homo sapiens
  misc_feature: 560 for SV(W|O) and 28S
tgggtaagaagcccggctcgctggcgtggagccgggcgtggaatgcgagtgcctagtgggccacttttggtaagcagaactggcgctgcgggatgaaccgaacgccgggttaaggcgccc

SEQ ID NO: 51331 - DNA, 120 bp, Homo sapiens
  misc_feature: 559 for SV(W|O) and 28S
ggggaatcccccgcgaggggggtctcccccgcgggggcgcgccggcgtctcctcgtgggggggccgggccacccctcccacggcgcgaccgctctcccacccctcctccccgcgcccccg

SEQ ID NO: 51332 - DNA, 120 bp, Homo sapiens
  misc_feature: 559 for SV(W|O) and 28S
cggacaaacccttgtgtcgagggctgactttcaatagatcgcagcgagggagctgctctgctacgtacgaaaccccgacccagaagcaggtcgtctacgaatggtttagcgccaggttcc

SEQ ID NO: 51333 - DNA, 120 bp, Homo sapiens
  misc_feature: 559 for SV(W|O) and 28S
ccagaggaaactctggtggaggtccgtagcggtcctgacgtgcaaatcggtcgtccgacctgggtataggggcgaaagactaatcgaaccatctagtagctggttccctccgaagtttcc

SEQ ID NO: 51334 - DNA, 120 bp, Homo sapiens
  misc_feature: 559 for SV(W|O) and 28S
cgggatgaaccgaacgccgggttaaggcgcccgatgccgacgctcatcagaccccagaaaaggtgttggttgatatagacagcaggacggtggccatggaagtcggaatccgctaaggag

SEQ ID NO: 51335 - DNA, 120 bp, Homo sapiens
  misc_feature: 558 for SV(W|O) and 28S
gcgggggcgcggggaggaggggtgggagagcggtcgcgccgtgggaggggtggcccggcccccccacgaggagacgccggcgcgcccccgcgggggagacccccctcgcgggggattccc

SEQ ID NO: 51336 - DNA, 120 bp, Homo sapiens
  misc_feature: 558 for SV(W|O) and 28S
ggcgggggcgcggggaggaggggtgggagagcggtcgcgccgtgggaggggtggcccggcccccccacgaggagacgccggcgcgcccccgcgggggagacccccctcgcgggggattcc

SEQ ID NO: 51337 - DNA, 120 bp, Homo sapiens
  misc_feature: 558 for SV(W|O) and 28S
gcgctgcgggatgaaccgaacgccgggttaaggcgcccgatgccgacgctcatcagaccccagaaaaggtgttggttgatatagacagcaggacggtggccatggaagtcggaatccgct

SEQ ID NO: 51338 - DNA, 120 bp, Homo sapiens
  misc_feature: 558 for SV(W|O) and 28S
gccgggcgtggaatgcgagtgcctagtgggccacttttggtaagcagaactggcgctgcgggatgaaccgaacgccgggttaaggcgcccgatgccgacgctcatcagaccccagaaaag

SEQ ID NO: 51339 - DNA, 120 bp, Homo sapiens
  misc_feature: 557 for SV(W|O) and 28S
gggatgaaccgaacgccgggttaaggcgcccgatgccgacgctcatcagaccccagaaaaggtgttggttgatatagacagcaggacggtggccatggaagtcggaatccgctaaggagt

SEQ ID NO: 51340 - DNA, 120 bp, Homo sapiens
  misc_feature: 557 for SV(W|O) and 28S
ggcgctctcgcagacccgacgcacccccgccacgcagttttatccggtaaagcgaatgattagaggtcttggggccgaaacgatctcaacctattctcaaactttaaatgggtaagaagc

SEQ ID NO: 51341 - DNA, 120 bp, Homo sapiens
  misc_feature: 556 for SV(W|O) and 28S
gccgtcgggcccgggggaggttctctcggggccacgcgcgcgtcccccgaagagggggacggcggagcgagcgcacggggtcggcggcgacgtcggctacccacccgacccgtcttgaaa

SEQ ID NO: 51342 - DNA, 120 bp, Homo sapiens
  misc_feature: 555 for SV(W|O) and 28S
ctggcgctctcgcagacccgacgcacccccgccacgcagttttatccggtaaagcgaatgattagaggtcttggggccgaaacgatctcaacctattctcaaactttaaatgggtaagaa

SEQ ID NO: 51343 - DNA, 120 bp, Homo sapiens
  misc_feature: 555 for SV(W|O) and 28S
gggcgtggaatgcgagtgcctagtgggccacttttggtaagcagaactggcgctgcgggatgaaccgaacgccgggttaaggcgcccgatgccgacgctcatcagaccccagaaaaggtg

SEQ ID NO: 51344 - DNA, 120 bp, Homo sapiens
  misc_feature: 555 for SV(W|O) and 28S
gaggaaactctggtggaggtccgtagcggtcctgacgtgcaaatcggtcgtccgacctgggtataggggcgaaagactaatcgaaccatctagtagctggttccctccgaagtttccctc

SEQ ID NO: 51345 - DNA, 120 bp, Homo sapiens
  misc_feature: 554 for SV(W|O) and 28S
ccgacctgggtataggggcgaaagactaatcgaaccatctagtagctggttccctccgaagtttccctcaggatagctggcgctctcgcagacccgacgcacccccgccacgcagtttta

SEQ ID NO: 51346 - DNA, 120 bp, Homo sapiens
  misc_feature: 554 for SV(W|O) and 28S
gccgggttaaggcgcccgatgccgacgctcatcagaccccagaaaaggtgttggttgatatagacagcaggacggtggccatggaagtcggaatccgctaaggagtgtgtaacaactcac

SEQ ID NO: 51347 - DNA, 120 bp, Homo sapiens
  misc_feature: 554 for SV(W|O) and 28S
gtgaaataccactactctgatcgttttttcactgacccggtgaggcgggggggcgagccccgaggggctctcgcttctggcgccaagcgcccggccgcgcgccggccgggcgcgacccgc

SEQ ID NO: 51348 - DNA, 120 bp, Homo sapiens
  misc_feature: 554 for SV(W|O) and 28S
gggtaagaagcccggctcgctggcgtggagccgggcgtggaatgcgagtgcctagtgggccacttttggtaagcagaactggcgctgcgggatgaaccgaacgccgggttaaggcgcccg

SEQ ID NO: 51349 - DNA, 120 bp, Homo sapiens
  misc_feature: 554 for SV(W|O) and 28S
gcgctctcgcagacccgacgcacccccgccacgcagttttatccggtaaagcgaatgattagaggtcttggggccgaaacgatctcaacctattctcaaactttaaatgggtaagaagcc

SEQ ID NO: 51350 - DNA, 120 bp, Homo sapiens
  misc_feature: 554 for SV(W|O) and 28S
atgggtaagaagcccggctcgctggcgtggagccgggcgtggaatgcgagtgcctagtgggccacttttggtaagcagaactggcgctgcgggatgaaccgaacgccgggttaaggcgcc

SEQ ID NO: 51351 - DNA, 120 bp, Homo sapiens
  misc_feature: 554 for SV(W|O) and 28S
aagcagaactggcgctgcgggatgaaccgaacgccgggttaaggcgcccgatgccgacgctcatcagaccccagaaaaggtgttggttgatatagacagcaggacggtggccatggaagt

SEQ ID NO: 51352 - DNA, 120 bp, Homo sapiens
  misc_feature: 553 for SV(W|O) and 28S
tgaaataccactactctgatcgttttttcactgacccggtgaggcgggggggcgagccccgaggggctctcgcttctggcgccaagcgcccggccgcgcgccggccgggcgcgacccgct

SEQ ID NO: 51353 - DNA, 120 bp, Homo sapiens
  misc_feature: 553 for SV(W|O) and 28S
tcccctcctcccgcccacgccccgctccccgcccccggagccccgcggacgctacgccgcgacgagtaggagggccgctgcggtgagccttgaagcctagggcgcgggcccgggtggagc

SEQ ID NO: 51354 - DNA, 120 bp, Homo sapiens
  misc_feature: 553 for SV(W|O) and 28S
gaaccgaacgccgggttaaggcgcccgatgccgacgctcatcagaccccagaaaaggtgttggttgatatagacagcaggacggtggccatggaagtcggaatccgctaaggagtgtgta

SEQ ID NO: 51355 - DNA, 120 bp, Homo sapiens
  misc_feature: 553 for SV(W|O) and 28S
gccggtgaaataccactactctgatcgttttttcactgacccggtgaggcgggggggcgagccccgaggggctctcgcttctggcgccaagcgcccggccgcgcgccggccgggcgcgac

SEQ ID NO: 51356 - DNA, 120 bp, Homo sapiens
  misc_feature: 552 for SV(W|O) and 28S
ccgaacgccgggttaaggcgcccgatgccgacgctcatcagaccccagaaaaggtgttggttgatatagacagcaggacggtggccatggaagtcggaatccgctaaggagtgtgtaaca

SEQ ID NO: 51357 - DNA, 120 bp, Homo sapiens
  misc_feature: 552 for SV(W|O) and 28S
tgaaccgaacgccgggttaaggcgcccgatgccgacgctcatcagaccccagaaaaggtgttggttgatatagacagcaggacggtggccatggaagtcggaatccgctaaggagtgtgt

SEQ ID NO: 51358 - DNA, 120 bp, Homo sapiens
  misc_feature: 552 for SV(W|O) and 28S
gccgccggtgaaataccactactctgatcgttttttcactgacccggtgaggcgggggggcgagccccgaggggctctcgcttctggcgccaagcgcccggccgcgcgccggccgggcgc

SEQ ID NO: 51359 - DNA, 120 bp, Homo sapiens
  misc_feature: 552 for SV(W|O) and 28S
ctcccctcctcccgcccacgccccgctccccgcccccggagccccgcggacgctacgccgcgacgagtaggagggccgctgcggtgagccttgaagcctagggcgcgggcccgggtggag

SEQ ID NO: 51360 - DNA, 120 bp, Homo sapiens
  misc_feature: 552 for SV(W|O) and 28S
ccgccggtgaaataccactactctgatcgttttttcactgacccggtgaggcgggggggcgagccccgaggggctctcgcttctggcgccaagcgcccggccgcgcgccggccgggcgcg

SEQ ID NO: 51361 - DNA, 120 bp, Homo sapiens
  misc_feature: 551 for SV(W|O) and 28S
aaccgaacgccgggttaaggcgcccgatgccgacgctcatcagaccccagaaaaggtgttggttgatatagacagcaggacggtggccatggaagtcggaatccgctaaggagtgtgtaa

SEQ ID NO: 51362 - DNA, 120 bp, Homo sapiens
  misc_feature: 551 for SV(W|O) and 28S
ggtaagaagcccggctcgctggcgtggagccgggcgtggaatgcgagtgcctagtgggccacttttggtaagcagaactggcgctgcgggatgaaccgaacgccgggttaaggcgcccga

SEQ ID NO: 51363 - DNA, 120 bp, Homo sapiens
  misc_feature: 551 for SV(W|O) and 28S
taaatgggtaagaagcccggctcgctggcgtggagccgggcgtggaatgcgagtgcctagtgggccacttttggtaagcagaactggcgctgcgggatgaaccgaacgccgggttaaggc

SEQ ID NO: 51364 - DNA, 120 bp, Homo sapiens
  misc_feature: 551 for SV(W|O) and 28S
ccgtcgggcccgggggaggttctctcggggccacgcgcgcgtcccccgaagagggggacggcggagcgagcgcacggggtcggcggcgacgtcggctacccacccgacccgtcttgaaac

SEQ ID NO: 51365 - DNA, 120 bp, Homo sapiens
  misc_feature: 551 for SV(W|O) and 28S
ggatgaaccgaacgccgggttaaggcgcccgatgccgacgctcatcagaccccagaaaaggtgttggttgatatagacagcaggacggtggccatggaagtcggaatccgctaaggagtg

SEQ ID NO: 51366 - DNA, 120 bp, Homo sapiens
  misc_feature: 549 for SV(W|O) and 28S
cgccgtcgggcccgggggaggttctctcggggccacgcgcgcgtcccccgaagagggggacggcggagcgagcgcacggggtcggcggcgacgtcggctacccacccgacccgtcttgaa

SEQ ID NO: 51367 - DNA, 120 bp, Homo sapiens
  misc_feature: 549 for SV(W|O) and 28S
accgaacgccgggttaaggcgcccgatgccgacgctcatcagaccccagaaaaggtgttggttgatatagacagcaggacggtggccatggaagtcggaatccgctaaggagtgtgtaac

SEQ ID NO: 51368 - DNA, 120 bp, Homo sapiens
  misc_feature: 549 for SV(W|O) and 28S
ggccgccggtgaaataccactactctgatcgttttttcactgacccggtgaggcgggggggcgagccccgaggggctctcgcttctggcgccaagcgcccggccgcgcgccggccgggcg

SEQ ID NO: 51369 - DNA, 120 bp, Homo sapiens
  misc_feature: 549 for SV(W|O) and 28S
gatgaaccgaacgccgggttaaggcgcccgatgccgacgctcatcagaccccagaaaaggtgttggttgatatagacagcaggacggtggccatggaagtcggaatccgctaaggagtgt

SEQ ID NO: 51370 - DNA, 120 bp, Homo sapiens
  misc_feature: 548 for SV(W|O) and 28S
gggcttcttacccatttaaagtttgagaataggttgagatcgtttcggccccaagacctctaatcattcgctttaccggataaaactgcgtggcgggggtgcgtcgggtctgcgagagcg

SEQ ID NO: 51371 - DNA, 120 bp, Homo sapiens
  misc_feature: 548 for SV(W|O) and 28S
agcagaactggcgctgcgggatgaaccgaacgccgggttaaggcgcccgatgccgacgctcatcagaccccagaaaaggtgttggttgatatagacagcaggacggtggccatggaagtc

SEQ ID NO: 51372 - DNA, 120 bp, Homo sapiens
  misc_feature: 547 for SV(W|O) and 28S
gtaagcagaactggcgctgcgggatgaaccgaacgccgggttaaggcgcccgatgccgacgctcatcagaccccagaaaaggtgttggttgatatagacagcaggacggtggccatggaa

SEQ ID NO: 51373 - DNA, 120 bp, Homo sapiens
  misc_feature: 547 for SV(W|O) and 28S
tggtaagcagaactggcgctgcgggatgaaccgaacgccgggttaaggcgcccgatgccgacgctcatcagaccccagaaaaggtgttggttgatatagacagcaggacggtggccatgg

SEQ ID NO: 51374 - DNA, 120 bp, Homo sapiens
  misc_feature: 547 for SV(W|O) and 28S
ctctgatcgttttttcactgacccggtgaggcgggggggcgagccccgaggggctctcgcttctggcgccaagcgcccggccgcgcgccggccgggcgcgacccgctccggggacagtgc

SEQ ID NO: 51375 - DNA, 120 bp, Homo sapiens
  misc_feature: 547 for SV(W|O) and 28S
aacgccgggttaaggcgcccgatgccgacgctcatcagaccccagaaaaggtgttggttgatatagacagcaggacggtggccatggaagtcggaatccgctaaggagtgtgtaacaact

SEQ ID NO: 51376 - DNA, 120 bp, Homo sapiens
  misc_feature: 545 for SV(W|O) and 28S
cgaacgccgggttaaggcgcccgatgccgacgctcatcagaccccagaaaaggtgttggttgatatagacagcaggacggtggccatggaagtcggaatccgctaaggagtgtgtaacaa

SEQ ID NO: 51377 - DNA, 120 bp, Homo sapiens
  misc_feature: 545 for SV(W|O) and 28S
tccgacctgggtataggggcgaaagactaatcgaaccatctagtagctggttccctccgaagtttccctcaggatagctggcgctctcgcagacccgacgcacccccgccacgcagtttt

SEQ ID NO: 51378 - DNA, 120 bp, Homo sapiens
  misc_feature: 545 for SV(W|O) and 28S
ccactactctgatcgttttttcactgacccggtgaggcgggggggcgagccccgaggggctctcgcttctggcgccaagcgcccggccgcgcgccggccgggcgcgacccgctccgggga

SEQ ID NO: 51379 - DNA, 120 bp, Homo sapiens
  misc_feature: 545 for SV(W|O) and 28S
ggtaagcagaactggcgctgcgggatgaaccgaacgccgggttaaggcgcccgatgccgacgctcatcagaccccagaaaaggtgttggttgatatagacagcaggacggtggccatgga

SEQ ID NO: 51380 - DNA, 120 bp, Homo sapiens
  misc_feature: 545 for SV(W|O) and 28S
taagcagaactggcgctgcgggatgaaccgaacgccgggttaaggcgcccgatgccgacgctcatcagaccccagaaaaggtgttggttgatatagacagcaggacggtggccatggaag

SEQ ID NO: 51381 - DNA, 120 bp, Homo sapiens
  misc_feature: 545 for SV(W|O) and 28S
gccgcgaccggctccgggacggctgggaaggcccggcggggaaggtggctcggggggccccgtccgtccgtccgtccgtcctcctcctcccccgtctccgccccccggccccgcgtcctc

SEQ ID NO: 51382 - DNA, 120 bp, Homo sapiens
  misc_feature: 545 for SV(W|O) and 28S
cgcgccgtcgggcccgggggaggttctctcggggccacgcgcgcgtcccccgaagagggggacggcggagcgagcgcacggggtcggcggcgacgtcggctacccacccgacccgtcttg

SEQ ID NO: 51383 - DNA, 120 bp, Homo sapiens
  misc_feature: 544 for SV(W|O) and 28S
cgccgggttaaggcgcccgatgccgacgctcatcagaccccagaaaaggtgttggttgatatagacagcaggacggtggccatggaagtcggaatccgctaaggagtgtgtaacaactca

SEQ ID NO: 51384 - DNA, 120 bp, Homo sapiens
  misc_feature: 544 for SV(W|O) and 28S
aggaaactctggtggaggtccgtagcggtcctgacgtgcaaatcggtcgtccgacctgggtataggggcgaaagactaatcgaaccatctagtagctggttccctccgaagtttccctca

SEQ ID NO: 51385 - DNA, 120 bp, Homo sapiens
  misc_feature: 544 for SV(W|O) and 28S
gcagaactggcgctgcgggatgaaccgaacgccgggttaaggcgcccgatgccgacgctcatcagaccccagaaaaggtgttggttgatatagacagcaggacggtggccatggaagtcg

SEQ ID NO: 51386 - DNA, 120 bp, Homo sapiens
  misc_feature: 544 for SV(W|O) and 28S
ctactctgatcgttttttcactgacccggtgaggcgggggggcgagccccgaggggctctcgcttctggcgccaagcgcccggccgcgcgccggccgggcgcgacccgctccggggacag

SEQ ID NO: 51387 - DNA, 120 bp, Homo sapiens
  misc_feature: 543 for SV(W|O) and 28S
tccacccgggcccgcgccctaggcttcaaggctcaccgcagcggccctcctactcgtcgcggcgtagcgtccgcggggctccgggggcggggagcggggcgtgggcgggaggaggggagg

SEQ ID NO: 51388 - DNA, 120 bp, Homo sapiens
  misc_feature: 543 for SV(W|O) and 28S
gcgccgtcgggcccgggggaggttctctcggggccacgcgcgcgtcccccgaagagggggacggcggagcgagcgcacggggtcggcggcgacgtcggctacccacccgacccgtcttga

SEQ ID NO: 51389 - DNA, 120 bp, Homo sapiens
  misc_feature: 543 for SV(W|O) and 28S
cccccgagccaccttccccgccgggccttcccagccgtcccggagccggtcgcggcgcaccgccgcggtggaaatgcgcccggcggcggccggtcgccggtcgggggacggtcccccgcc

SEQ ID NO: 51390 - DNA, 120 bp, Homo sapiens
  misc_feature: 542 for SV(W|O) and 28S
ttaaatgggtaagaagcccggctcgctggcgtggagccgggcgtggaatgcgagtgcctagtgggccacttttggtaagcagaactggcgctgcgggatgaaccgaacgccgggttaagg

SEQ ID NO: 51391 - DNA, 120 bp, Homo sapiens
  misc_feature: 542 for SV(W|O) and 28S
cgccggtgaaataccactactctgatcgttttttcactgacccggtgaggcgggggggcgagccccgaggggctctcgcttctggcgccaagcgcccggccgcgcgccggccgggcgcga

SEQ ID NO: 51392 - DNA, 120 bp, Homo sapiens
  misc_feature: 542 for SV(W|O) and 28S
cactactctgatcgttttttcactgacccggtgaggcgggggggcgagccccgaggggctctcgcttctggcgccaagcgcccggccgcgcgccggccgggcgcgacccgctccggggac

SEQ ID NO: 51393 - DNA, 120 bp, Homo sapiens
  misc_feature: 542 for SV(W|O) and 28S
acgccgggttaaggcgcccgatgccgacgctcatcagaccccagaaaaggtgttggttgatatagacagcaggacggtggccatggaagtcggaatccgctaaggagtgtgtaacaactc

SEQ ID NO: 51394 - DNA, 120 bp, Homo sapiens
  misc_feature: 542 for SV(W|O) and 28S
cgggcgtggaatgcgagtgcctagtgggccacttttggtaagcagaactggcgctgcgggatgaaccgaacgccgggttaaggcgcccgatgccgacgctcatcagaccccagaaaaggt

SEQ ID NO: 51395 - DNA, 120 bp, Homo sapiens
  misc_feature: 542 for SV(W|O) and 28S
atgaaccgaacgccgggttaaggcgcccgatgccgacgctcatcagaccccagaaaaggtgttggttgatatagacagcaggacggtggccatggaagtcggaatccgctaaggagtgtg

SEQ ID NO: 51396 - DNA, 120 bp, Homo sapiens
  misc_feature: 541 for SV(W|O) and 28S
acaccttttctggggtctgatgagcgtcggcatcgggcgccttaacccggcgttcggttcatcccgcagcgccagttctgcttaccaaaagtggcccactaggcactcgcattccacgcc

SEQ ID NO: 51397 - DNA, 120 bp, Homo sapiens
  misc_feature: 541 for SV(W|O) and 28S
ccgcgaccggctccgggacggctgggaaggcccggcggggaaggtggctcggggggccccgtccgtccgtccgtccgtcctcctcctcccccgtctccgccccccggccccgcgtcctcc

SEQ ID NO: 51398 - DNA, 120 bp, Homo sapiens
  misc_feature: 541 for SV(W|O) and 28S
ccccgagccaccttccccgccgggccttcccagccgtcccggagccggtcgcggcgcaccgccgcggtggaaatgcgcccggcggcggccggtcgccggtcgggggacggtcccccgccg

SEQ ID NO: 51399 - DNA, 120 bp, Homo sapiens
  misc_feature: 540 for SV(W|O) and 28S
actactctgatcgttttttcactgacccggtgaggcgggggggcgagccccgaggggctctcgcttctggcgccaagcgcccggccgcgcgccggccgggcgcgacccgctccggggaca

SEQ ID NO: 51400 - DNA, 120 bp, Homo sapiens
  misc_feature: 540 for SV(W|O) and 28S
gtccgtagcggtcctgacgtgcaaatcggtcgtccgacctgggtataggggcgaaagactaatcgaaccatctagtagctggttccctccgaagtttccctcaggatagctggcgctctc

SEQ ID NO: 51401 - DNA, 120 bp, Homo sapiens
  misc_feature: 540 for SV(W|O) and 28S
gtccgacctgggtataggggcgaaagactaatcgaaccatctagtagctggttccctccgaagtttccctcaggatagctggcgctctcgcagacccgacgcacccccgccacgcagttt

SEQ ID NO: 51402 - DNA, 120 bp, Homo sapiens
  misc_feature: 540 for SV(W|O) and 28S
gcggacaaacccttgtgtcgagggctgactttcaatagatcgcagcgagggagctgctctgctacgtacgaaaccccgacccagaagcaggtcgtctacgaatggtttagcgccaggttc

SEQ ID NO: 51403 - DNA, 120 bp, Homo sapiens
  misc_feature: 539 for SV(W|O) and 28S
gtcgggtgggtagccgacgtcgccgccgaccccgtgcgctcgctccgccgtccccctcttcgggggacgcgcgcgtggccccgagagaacctcccccgggcccgacggcgcgacccgccc

SEQ ID NO: 51404 - DNA, 120 bp, Homo sapiens
  misc_feature: 539 for SV(W|O) and 28S
gcgccgcgaccggctccgggacggctgggaaggcccggcggggaaggtggctcggggggccccgtccgtccgtccgtccgtcctcctcctcccccgtctccgccccccggccccgcgtcc

SEQ ID NO: 51405 - DNA, 120 bp, Homo sapiens
  misc_feature: 539 for SV(W|O) and 28S
cgccgcgaccggctccgggacggctgggaaggcccggcggggaaggtggctcggggggccccgtccgtccgtccgtccgtcctcctcctcccccgtctccgccccccggccccgcgtcct

SEQ ID NO: 51406 - DNA, 120 bp, Homo sapiens
  misc_feature: 538 for SV(W|O) and 28S
gaaactctggtggaggtccgtagcggtcctgacgtgcaaatcggtcgtccgacctgggtataggggcgaaagactaatcgaaccatctagtagctggttccctccgaagtttccctcagg

SEQ ID NO: 51407 - DNA, 120 bp, Homo sapiens
  misc_feature: 537 for SV(W|O) and 28S
tcgcgccgtcgggcccgggggaggttctctcggggccacgcgcgcgtcccccgaagagggggacggcggagcgagcgcacggggtcggcggcgacgtcggctacccacccgacccgtctt

SEQ ID NO: 51408 - DNA, 120 bp, Homo sapiens
  misc_feature: 537 for SV(W|O) and 28S
gaacgccgggttaaggcgcccgatgccgacgctcatcagaccccagaaaaggtgttggttgatatagacagcaggacggtggccatggaagtcggaatccgctaaggagtgtgtaacaac

SEQ ID NO: 51409 - DNA, 120 bp, Homo sapiens
  misc_feature: 537 for SV(W|O) and 28S
ggtcgggtgggtagccgacgtcgccgccgaccccgtgcgctcgctccgccgtccccctcttcgggggacgcgcgcgtggccccgagagaacctcccccgggcccgacggcgcgacccgcc

SEQ ID NO: 51410 - DNA, 120 bp, Homo sapiens
  misc_feature: 537 for SV(W|O) and 28S
ggtcgcgccgtcgggcccgggggaggttctctcggggccacgcgcgcgtcccccgaagagggggacggcggagcgagcgcacggggtcggcggcgacgtcggctacccacccgacccgtc

SEQ ID NO: 51411 - DNA, 120 bp, Homo sapiens
  misc_feature: 537 for SV(W|O) and 28S
cgggcttcttacccatttaaagtttgagaataggttgagatcgtttcggccccaagacctctaatcattcgctttaccggataaaactgcgtggcgggggtgcgtcgggtctgcgagagc

SEQ ID NO: 51412 - DNA, 120 bp, Homo sapiens
  misc_feature: 536 for SV(W|O) and 28S
ggaaactctggtggaggtccgtagcggtcctgacgtgcaaatcggtcgtccgacctgggtataggggcgaaagactaatcgaaccatctagtagctggttccctccgaagtttccctcag

SEQ ID NO: 51413 - DNA, 120 bp, Homo sapiens
  misc_feature: 535 for SV(W|O) and 28S
gtcgcgccgtcgggcccgggggaggttctctcggggccacgcgcgcgtcccccgaagagggggacggcggagcgagcgcacggggtcggcggcgacgtcggctacccacccgacccgtct

SEQ ID NO: 51414 - DNA, 120 bp, Homo sapiens
  misc_feature: 535 for SV(W|O) and 28S
actctgatcgttttttcactgacccggtgaggcgggggggcgagccccgaggggctctcgcttctggcgccaagcgcccggccgcgcgccggccgggcgcgacccgctccggggacagtg

SEQ ID NO: 51415 - DNA, 120 bp, Homo sapiens
  misc_feature: 534 for SV(W|O) and 28S
ttggtaagcagaactggcgctgcgggatgaaccgaacgccgggttaaggcgcccgatgccgacgctcatcagaccccagaaaaggtgttggttgatatagacagcaggacggtggccatg

SEQ ID NO: 51416 - DNA, 120 bp, Homo sapiens
  misc_feature: 534 for SV(W|O) and 28S
cgcgaccggctccgggacggctgggaaggcccggcggggaaggtggctcggggggccccgtccgtccgtccgtccgtcctcctcctcccccgtctccgccccccggccccgcgtcctccc

SEQ ID NO: 51417 - DNA, 120 bp, Homo sapiens
  misc_feature: 533 for SV(W|O) and 28S
caccttccccgccgggccttcccagccgtcccggagccggtcgcggcgcaccgccgcggtggaaatgcgcccggcggcggccggtcgccggtcgggggacggtcccccgccgaccccacc

SEQ ID NO: 51418 - DNA, 120 bp, Homo sapiens
  misc_feature: 533 for SV(W|O) and 28S
gggtcgggtgggtagccgacgtcgccgccgaccccgtgcgctcgctccgccgtccccctcttcgggggacgcgcgcgtggccccgagagaacctcccccgggcccgacggcgcgacccgc

SEQ ID NO: 51419 - DNA, 120 bp, Homo sapiens
  misc_feature: 533 for SV(W|O) and 28S
cttttggtaagcagaactggcgctgcgggatgaaccgaacgccgggttaaggcgcccgatgccgacgctcatcagaccccagaaaaggtgttggttgatatagacagcaggacggtggcc

SEQ ID NO: 51420 - DNA, 120 bp, Homo sapiens
  misc_feature: 532 for SV(W|O) and 28S
tttaaatgggtaagaagcccggctcgctggcgtggagccgggcgtggaatgcgagtgcctagtgggccacttttggtaagcagaactggcgctgcgggatgaaccgaacgccgggttaag

SEQ ID NO: 51421 - DNA, 120 bp, Homo sapiens
  misc_feature: 532 for SV(W|O) and 28S
aaactctggtggaggtccgtagcggtcctgacgtgcaaatcggtcgtccgacctgggtataggggcgaaagactaatcgaaccatctagtagctggttccctccgaagtttccctcagga

SEQ ID NO: 51422 - DNA, 120 bp, Homo sapiens
  misc_feature: 532 for SV(W|O) and 28S
gaggggggtctcccccgcgggggcgcgccggcgtctcctcgtgggggggccgggccacccctcccacggcgcgaccgctctcccacccctcctccccgcgcccccgccccggcgacgggg

SEQ ID NO: 51423 - DNA, 120 bp, Homo sapiens
  misc_feature: 532 for SV(W|O) and 28S
ctctggtggaggtccgtagcggtcctgacgtgcaaatcggtcgtccgacctgggtataggggcgaaagactaatcgaaccatctagtagctggttccctccgaagtttccctcaggatag

SEQ ID NO: 51424 - DNA, 120 bp, Homo sapiens
  misc_feature: 532 for SV(W|O) and 28S
cgggtcgcgccgtcgggcccgggggaggttctctcggggccacgcgcgcgtcccccgaagagggggacggcggagcgagcgcacggggtcggcggcgacgtcggctacccacccgacccg

SEQ ID NO: 51425 - DNA, 120 bp, Homo sapiens
  misc_feature: 532 for SV(W|O) and 28S
cgcggacaaacccttgtgtcgagggctgactttcaatagatcgcagcgagggagctgctctgctacgtacgaaaccccgacccagaagcaggtcgtctacgaatggtttagcgccaggtt

SEQ ID NO: 51426 - DNA, 120 bp, Homo sapiens
  misc_feature: 532 for SV(W|O) and 28S
aactctggtggaggtccgtagcggtcctgacgtgcaaatcggtcgtccgacctgggtataggggcgaaagactaatcgaaccatctagtagctggttccctccgaagtttccctcaggat

SEQ ID NO: 51427 - DNA, 120 bp, Homo sapiens
  misc_feature: 531 for SV(W|O) and 28S
actctggtggaggtccgtagcggtcctgacgtgcaaatcggtcgtccgacctgggtataggggcgaaagactaatcgaaccatctagtagctggttccctccgaagtttccctcaggata

SEQ ID NO: 51428 - DNA, 120 bp, Homo sapiens
  misc_feature: 531 for SV(W|O) and 28S
acttttggtaagcagaactggcgctgcgggatgaaccgaacgccgggttaaggcgcccgatgccgacgctcatcagaccccagaaaaggtgttggttgatatagacagcaggacggtggc

SEQ ID NO: 51429 - DNA, 120 bp, Homo sapiens
  misc_feature: 531 for SV(W|O) and 28S
ctctcgcagacccgacgcacccccgccacgcagttttatccggtaaagcgaatgattagaggtcttggggccgaaacgatctcaacctattctcaaactttaaatgggtaagaagcccgg

SEQ ID NO: 51430 - DNA, 120 bp, Homo sapiens
  misc_feature: 530 for SV(W|O) and 28S
ttttggtaagcagaactggcgctgcgggatgaaccgaacgccgggttaaggcgcccgatgccgacgctcatcagaccccagaaaaggtgttggttgatatagacagcaggacggtggcca

SEQ ID NO: 51431 - DNA, 120 bp, Homo sapiens
  misc_feature: 530 for SV(W|O) and 28S
tccgtagcggtcctgacgtgcaaatcggtcgtccgacctgggtataggggcgaaagactaatcgaaccatctagtagctggttccctccgaagtttccctcaggatagctggcgctctcg

SEQ ID NO: 51432 - DNA, 120 bp, Homo sapiens
  misc_feature: 530 for SV(W|O) and 28S
tactctgatcgttttttcactgacccggtgaggcgggggggcgagccccgaggggctctcgcttctggcgccaagcgcccggccgcgcgccggccgggcgcgacccgctccggggacagt

SEQ ID NO: 51433 - DNA, 120 bp, Homo sapiens
  misc_feature: 530 for SV(W|O) and 28S
gaatgattagaggtcttggggccgaaacgatctcaacctattctcaaactttaaatgggtaagaagcccggctcgctggcgtggagccgggcgtggaatgcgagtgcctagtgggccact

SEQ ID NO: 51434 - DNA, 120 bp, Homo sapiens
  misc_feature: 530 for SV(W|O) and 28S
ctggtggaggtccgtagcggtcctgacgtgcaaatcggtcgtccgacctgggtataggggcgaaagactaatcgaaccatctagtagctggttccctccgaagtttccctcaggatagct

SEQ ID NO: 51435 - DNA, 120 bp, Homo sapiens
  misc_feature: 530 for SV(W|O) and 28S
ccacttttggtaagcagaactggcgctgcgggatgaaccgaacgccgggttaaggcgcccgatgccgacgctcatcagaccccagaaaaggtgttggttgatatagacagcaggacggtg

SEQ ID NO: 51436 - DNA, 120 bp, Homo sapiens
  misc_feature: 529 for SV(W|O) and 28S
gtgcgccgcgaccggctccgggacggctgggaaggcccggcggggaaggtggctcggggggccccgtccgtccgtccgtccgtcctcctcctcccccgtctccgccccccggccccgcgt

SEQ ID NO: 51437 - DNA, 120 bp, Homo sapiens
  misc_feature: 529 for SV(W|O) and 28S
agcggtcctgacgtgcaaatcggtcgtccgacctgggtataggggcgaaagactaatcgaaccatctagtagctggttccctccgaagtttccctcaggatagctggcgctctcgcagac

SEQ ID NO: 51438 - DNA, 120 bp, Homo sapiens
  misc_feature: 529 for SV(W|O) and 28S
gggtcgcgccgtcgggcccgggggaggttctctcggggccacgcgcgcgtcccccgaagagggggacggcggagcgagcgcacggggtcggcggcgacgtcggctacccacccgacccgt

SEQ ID NO: 51439 - DNA, 120 bp, Homo sapiens
  misc_feature: 529 for SV(W|O) and 28S
gcgaccggctccgggacggctgggaaggcccggcggggaaggtggctcggggggccccgtccgtccgtccgtccgtcctcctcctcccccgtctccgccccccggccccgcgtcctccct

SEQ ID NO: 51440 - DNA, 120 bp, Homo sapiens
  misc_feature: 528 for SV(W|O) and 28S
accttccccgccgggccttcccagccgtcccggagccggtcgcggcgcaccgccgcggtggaaatgcgcccggcggcggccggtcgccggtcgggggacggtcccccgccgaccccaccc

SEQ ID NO: 51441 - DNA, 120 bp, Homo sapiens
  misc_feature: 528 for SV(W|O) and 28S
cgcgcggacaaacccttgtgtcgagggctgactttcaatagatcgcagcgagggagctgctctgctacgtacgaaaccccgacccagaagcaggtcgtctacgaatggtttagcgccagg

SEQ ID NO: 51442 - DNA, 120 bp, Homo sapiens
  misc_feature: 527 for SV(W|O) and 28S
ccaccttccccgccgggccttcccagccgtcccggagccggtcgcggcgcaccgccgcggtggaaatgcgcccggcggcggccggtcgccggtcgggggacggtcccccgccgaccccac

SEQ ID NO: 51443 - DNA, 120 bp, Homo sapiens
  misc_feature: 527 for SV(W|O) and 28S
gggtgggtagccgacgtcgccgccgaccccgtgcgctcgctccgccgtccccctcttcgggggacgcgcgcgtggccccgagagaacctcccccgggcccgacggcgcgacccgcccggg

SEQ ID NO: 51444 - DNA, 120 bp, Homo sapiens
  misc_feature: 527 for SV(W|O) and 28S
aacaccttttctggggtctgatgagcgtcggcatcgggcgccttaacccggcgttcggttcatcccgcagcgccagttctgcttaccaaaagtggcccactaggcactcgcattccacgc

SEQ ID NO: 51445 - DNA, 120 bp, Homo sapiens
  misc_feature: 527 for SV(W|O) and 28S
cacttttggtaagcagaactggcgctgcgggatgaaccgaacgccgggttaaggcgcccgatgccgacgctcatcagaccccagaaaaggtgttggttgatatagacagcaggacggtgg

SEQ ID NO: 51446 - DNA, 120 bp, Homo sapiens
  misc_feature: 526 for SV(W|O) and 28S
tctggtggaggtccgtagcggtcctgacgtgcaaatcggtcgtccgacctgggtataggggcgaaagactaatcgaaccatctagtagctggttccctccgaagtttccctcaggatagc

SEQ ID NO: 51447 - DNA, 120 bp, Homo sapiens
  misc_feature: 526 for SV(W|O) and 28S
tagcggtcctgacgtgcaaatcggtcgtccgacctgggtataggggcgaaagactaatcgaaccatctagtagctggttccctccgaagtttccctcaggatagctggcgctctcgcaga

SEQ ID NO: 51448 - DNA, 120 bp, Homo sapiens
  misc_feature: 525 for SV(W|O) and 28S
ggtgcgccgcgaccggctccgggacggctgggaaggcccggcggggaaggtggctcggggggccccgtccgtccgtccgtccgtcctcctcctcccccgtctccgccccccggccccgcg

SEQ ID NO: 51449 - DNA, 120 bp, Homo sapiens
  misc_feature: 525 for SV(W|O) and 28S
gcgcggacaaacccttgtgtcgagggctgactttcaatagatcgcagcgagggagctgctctgctacgtacgaaaccccgacccagaagcaggtcgtctacgaatggtttagcgccaggt

SEQ ID NO: 51450 - DNA, 120 bp, Homo sapiens
  misc_feature: 524 for SV(W|O) and 28S
tttggtaagcagaactggcgctgcgggatgaaccgaacgccgggttaaggcgcccgatgccgacgctcatcagaccccagaaaaggtgttggttgatatagacagcaggacggtggccat

SEQ ID NO: 51451 - DNA, 120 bp, Homo sapiens
  misc_feature: 524 for SV(W|O) and 28S
gattagaggtcttggggccgaaacgatctcaacctattctcaaactttaaatgggtaagaagcccggctcgctggcgtggagccgggcgtggaatgcgagtgcctagtgggccacttttg

SEQ ID NO: 51452 - DNA, 120 bp, Homo sapiens
  misc_feature: 524 for SV(W|O) and 28S
cgaccggctccgggacggctgggaaggcccggcggggaaggtggctcggggggccccgtccgtccgtccgtccgtcctcctcctcccccgtctccgccccccggccccgcgtcctccctc

SEQ ID NO: 51453 - DNA, 120 bp, Homo sapiens
  misc_feature: 524 for SV(W|O) and 28S
ctcgcagacccgacgcacccccgccacgcagttttatccggtaaagcgaatgattagaggtcttggggccgaaacgatctcaacctattctcaaactttaaatgggtaagaagcccggct

SEQ ID NO: 51454 - DNA, 120 bp, Homo sapiens
  misc_feature: 524 for SV(W|O) and 28S
attagaggtcttggggccgaaacgatctcaacctattctcaaactttaaatgggtaagaagcccggctcgctggcgtggagccgggcgtggaatgcgagtgcctagtgggccacttttgg

SEQ ID NO: 51455 - DNA, 120 bp, Homo sapiens
  misc_feature: 523 for SV(W|O) and 28S
tcgggtgggtagccgacgtcgccgccgaccccgtgcgctcgctccgccgtccccctcttcgggggacgcgcgcgtggccccgagagaacctcccccgggcccgacggcgcgacccgcccg

SEQ ID NO: 51456 - DNA, 120 bp, Homo sapiens
  misc_feature: 523 for SV(W|O) and 28S
agccaccttccccgccgggccttcccagccgtcccggagccggtcgcggcgcaccgccgcggtggaaatgcgcccggcggcggccggtcgccggtcgggggacggtcccccgccgacccc

SEQ ID NO: 51457 - DNA, 120 bp, Homo sapiens
  misc_feature: 522 for SV(W|O) and 28S
ttagaggtcttggggccgaaacgatctcaacctattctcaaactttaaatgggtaagaagcccggctcgctggcgtggagccgggcgtggaatgcgagtgcctagtgggccacttttggt

SEQ ID NO: 51458 - DNA, 120 bp, Homo sapiens
  misc_feature: 522 for SV(W|O) and 28S
aaagcgaatgattagaggtcttggggccgaaacgatctcaacctattctcaaactttaaatgggtaagaagcccggctcgctggcgtggagccgggcgtggaatgcgagtgcctagtggg

SEQ ID NO: 51459 - DNA, 120 bp, Homo sapiens
  misc_feature: 522 for SV(W|O) and 28S
aatgattagaggtcttggggccgaaacgatctcaacctattctcaaactttaaatgggtaagaagcccggctcgctggcgtggagccgggcgtggaatgcgagtgcctagtgggccactt

SEQ ID NO: 51460 - DNA, 120 bp, Homo sapiens
  misc_feature: 521 for SV(W|O) and 28S
tctcgcagacccgacgcacccccgccacgcagttttatccggtaaagcgaatgattagaggtcttggggccgaaacgatctcaacctattctcaaactttaaatgggtaagaagcccggc

SEQ ID NO: 51461 - DNA, 120 bp, Homo sapiens
  misc_feature: 521 for SV(W|O) and 28S
cccgagccaccttccccgccgggccttcccagccgtcccggagccggtcgcggcgcaccgccgcggtggaaatgcgcccggcggcggccggtcgccggtcgggggacggtcccccgccga

SEQ ID NO: 51462 - DNA, 120 bp, Homo sapiens
  misc_feature: 521 for SV(W|O) and 28S
gtcgtccgacctgggtataggggcgaaagactaatcgaaccatctagtagctggttccctccgaagtttccctcaggatagctggcgctctcgcagacccgacgcacccccgccacgcag

SEQ ID NO: 51463 - DNA, 120 bp, Homo sapiens
  misc_feature: 520 for SV(W|O) and 28S
tgattagaggtcttggggccgaaacgatctcaacctattctcaaactttaaatgggtaagaagcccggctcgctggcgtggagccgggcgtggaatgcgagtgcctagtgggccactttt

SEQ ID NO: 51464 - DNA, 120 bp, Homo sapiens
  misc_feature: 520 for SV(W|O) and 28S
gtagcggtcctgacgtgcaaatcggtcgtccgacctgggtataggggcgaaagactaatcgaaccatctagtagctggttccctccgaagtttccctcaggatagctggcgctctcgcag

SEQ ID NO: 51465 - DNA, 120 bp, Homo sapiens
  misc_feature: 520 for SV(W|O) and 28S
gaccggctccgggacggctgggaaggcccggcggggaaggtggctcggggggccccgtccgtccgtccgtccgtcctcctcctcccccgtctccgccccccggccccgcgtcctccctcg

SEQ ID NO: 51466 - DNA, 120 bp, Homo sapiens
  misc_feature: 520 for SV(W|O) and 28S
cgtccgacctgggtataggggcgaaagactaatcgaaccatctagtagctggttccctccgaagtttccctcaggatagctggcgctctcgcagacccgacgcacccccgccacgcagtt

SEQ ID NO: 51467 - DNA, 120 bp, Homo sapiens
  misc_feature: 520 for SV(W|O) and 28S
cgcagacccgacgcacccccgccacgcagttttatccggtaaagcgaatgattagaggtcttggggccgaaacgatctcaacctattctcaaactttaaatgggtaagaagcccggctcg

SEQ ID NO: 51468 - DNA, 120 bp, Homo sapiens
  misc_feature: 519 for SV(W|O) and 28S
gccaccttccccgccgggccttcccagccgtcccggagccggtcgcggcgcaccgccgcggtggaaatgcgcccggcggcggccggtcgccggtcgggggacggtcccccgccgacccca

SEQ ID NO: 51469 - DNA, 120 bp, Homo sapiens
  misc_feature: 519 for SV(W|O) and 28S
tcgcagacccgacgcacccccgccacgcagttttatccggtaaagcgaatgattagaggtcttggggccgaaacgatctcaacctattctcaaactttaaatgggtaagaagcccggctc

SEQ ID NO: 51470 - DNA, 120 bp, Homo sapiens
  misc_feature: 519 for SV(W|O) and 28S
taaagcgaatgattagaggtcttggggccgaaacgatctcaacctattctcaaactttaaatgggtaagaagcccggctcgctggcgtggagccgggcgtggaatgcgagtgcctagtgg

SEQ ID NO: 51471 - DNA, 120 bp, Homo sapiens
  misc_feature: 519 for SV(W|O) and 28S
gagccaccttccccgccgggccttcccagccgtcccggagccggtcgcggcgcaccgccgcggtggaaatgcgcccggcggcggccggtcgccggtcgggggacggtcccccgccgaccc

SEQ ID NO: 51472 - DNA, 120 bp, Homo sapiens
  misc_feature: 519 for SV(W|O) and 28S
gggccacttttggtaagcagaactggcgctgcgggatgaaccgaacgccgggttaaggcgcccgatgccgacgctcatcagaccccagaaaaggtgttggttgatatagacagcaggacg

SEQ ID NO: 51473 - DNA, 120 bp, Homo sapiens
  misc_feature: 519 for SV(W|O) and 28S
ccgtagcggtcctgacgtgcaaatcggtcgtccgacctgggtataggggcgaaagactaatcgaaccatctagtagctggttccctccgaagtttccctcaggatagctggcgctctcgc

SEQ ID NO: 51474 - DNA, 120 bp, Homo sapiens
  misc_feature: 519 for SV(W|O) and 28S
gacccgacgcacccccgccacgcagttttatccggtaaagcgaatgattagaggtcttggggccgaaacgatctcaacctattctcaaactttaaatgggtaagaagcccggctcgctgg

SEQ ID NO: 51475 - DNA, 120 bp, Homo sapiens
  misc_feature: 519 for SV(W|O) and 28S
agacccgacgcacccccgccacgcagttttatccggtaaagcgaatgattagaggtcttggggccgaaacgatctcaacctattctcaaactttaaatgggtaagaagcccggctcgctg

SEQ ID NO: 51476 - DNA, 120 bp, Homo sapiens
  misc_feature: 519 for SV(W|O) and 28S
atgattagaggtcttggggccgaaacgatctcaacctattctcaaactttaaatgggtaagaagcccggctcgctggcgtggagccgggcgtggaatgcgagtgcctagtgggccacttt

SEQ ID NO: 51477 - DNA, 120 bp, Homo sapiens
  misc_feature: 518 for SV(W|O) and 28S
tgcgccgcgaccggctccgggacggctgggaaggcccggcggggaaggtggctcggggggccccgtccgtccgtccgtccgtcctcctcctcccccgtctccgccccccggccccgcgtc

SEQ ID NO: 51478 - DNA, 120 bp, Homo sapiens
  misc_feature: 518 for SV(W|O) and 28S
ccacccgggcccgcgccctaggcttcaaggctcaccgcagcggccctcctactcgtcgcggcgtagcgtccgcggggctccgggggcggggagcggggcgtgggcgggaggaggggagga

SEQ ID NO: 51479 - DNA, 120 bp, Homo sapiens
  misc_feature: 518 for SV(W|O) and 28S
acccgacgcacccccgccacgcagttttatccggtaaagcgaatgattagaggtcttggggccgaaacgatctcaacctattctcaaactttaaatgggtaagaagcccggctcgctggc

SEQ ID NO: 51480 - DNA, 120 bp, Homo sapiens
  misc_feature: 517 for SV(W|O) and 28S
cggtgcgccgcgaccggctccgggacggctgggaaggcccggcggggaaggtggctcggggggccccgtccgtccgtccgtccgtcctcctcctcccccgtctccgccccccggccccgc

SEQ ID NO: 51481 - DNA, 120 bp, Homo sapiens
  misc_feature: 517 for SV(W|O) and 28S
gccacttttggtaagcagaactggcgctgcgggatgaaccgaacgccgggttaaggcgcccgatgccgacgctcatcagaccccagaaaaggtgttggttgatatagacagcaggacggt

SEQ ID NO: 51482 - DNA, 120 bp, Homo sapiens
  misc_feature: 517 for SV(W|O) and 28S
cgggtgggtagccgacgtcgccgccgaccccgtgcgctcgctccgccgtccccctcttcgggggacgcgcgcgtggccccgagagaacctcccccgggcccgacggcgcgacccgcccgg

SEQ ID NO: 51483 - DNA, 120 bp, Homo sapiens
  misc_feature: 516 for SV(W|O) and 28S
ggtcgtccgacctgggtataggggcgaaagactaatcgaaccatctagtagctggttccctccgaagtttccctcaggatagctggcgctctcgcagacccgacgcacccccgccacgca

SEQ ID NO: 51484 - DNA, 120 bp, Homo sapiens
  misc_feature: 516 for SV(W|O) and 28S
ccgagccaccttccccgccgggccttcccagccgtcccggagccggtcgcggcgcaccgccgcggtggaaatgcgcccggcggcggccggtcgccggtcgggggacggtcccccgccgac

SEQ ID NO: 51485 - DNA, 120 bp, Homo sapiens
  misc_feature: 516 for SV(W|O) and 28S
aaatcggtcgtccgacctgggtataggggcgaaagactaatcgaaccatctagtagctggttccctccgaagtttccctcaggatagctggcgctctcgcagacccgacgcacccccgcc

SEQ ID NO: 51486 - DNA, 120 bp, Homo sapiens
  misc_feature: 516 for SV(W|O) and 28S
caacaccttttctggggtctgatgagcgtcggcatcgggcgccttaacccggcgttcggttcatcccgcagcgccagttctgcttaccaaaagtggcccactaggcactcgcattccacg

SEQ ID NO: 51487 - DNA, 120 bp, Homo sapiens
  misc_feature: 516 for SV(W|O) and 28S
cagacccgacgcacccccgccacgcagttttatccggtaaagcgaatgattagaggtcttggggccgaaacgatctcaacctattctcaaactttaaatgggtaagaagcccggctcgct

SEQ ID NO: 51488 - DNA, 120 bp, Homo sapiens
  misc_feature: 515 for SV(W|O) and 28S
cccctcttcgggggacgcgcgcgtggccccgagagaacctcccccgggcccgacggcgcgacccgcccggggcgcactggggacagtccgccccgccccccgacccgcgcgcggcacccc

SEQ ID NO: 51489 - DNA, 120 bp, Homo sapiens
  misc_feature: 515 for SV(W|O) and 28S
gcgcgcggacaaacccttgtgtcgagggctgactttcaatagatcgcagcgagggagctgctctgctacgtacgaaaccccgacccagaagcaggtcgtctacgaatggtttagcgccag

SEQ ID NO: 51490 - DNA, 120 bp, Homo sapiens
  misc_feature: 514 for SV(W|O) and 28S
tgggccacttttggtaagcagaactggcgctgcgggatgaaccgaacgccgggttaaggcgcccgatgccgacgctcatcagaccccagaaaaggtgttggttgatatagacagcaggac

SEQ ID NO: 51491 - DNA, 120 bp, Homo sapiens
  misc_feature: 514 for SV(W|O) and 28S
cgaatgattagaggtcttggggccgaaacgatctcaacctattctcaaactttaaatgggtaagaagcccggctcgctggcgtggagccgggcgtggaatgcgagtgcctagtgggccac

SEQ ID NO: 51492 - DNA, 120 bp, Homo sapiens
  misc_feature: 514 for SV(W|O) and 28S
ggcggtgcgccgcgaccggctccgggacggctgggaaggcccggcggggaaggtggctcggggggccccgtccgtccgtccgtccgtcctcctcctcccccgtctccgccccccggcccc

SEQ ID NO: 51493 - DNA, 120 bp, Homo sapiens
  misc_feature: 514 for SV(W|O) and 28S
cggcggtgcgccgcgaccggctccgggacggctgggaaggcccggcggggaaggtggctcggggggccccgtccgtccgtccgtccgtcctcctcctcccccgtctccgccccccggccc

SEQ ID NO: 51494 - DNA, 120 bp, Homo sapiens
  misc_feature: 514 for SV(W|O) and 28S
ggccacttttggtaagcagaactggcgctgcgggatgaaccgaacgccgggttaaggcgcccgatgccgacgctcatcagaccccagaaaaggtgttggttgatatagacagcaggacgg

SEQ ID NO: 51495 - DNA, 120 bp, Homo sapiens
  misc_feature: 513 for SV(W|O) and 28S
ggtgggtagccgacgtcgccgccgaccccgtgcgctcgctccgccgtccccctcttcgggggacgcgcgcgtggccccgagagaacctcccccgggcccgacggcgcgacccgcccgggg

SEQ ID NO: 51496 - DNA, 120 bp, Homo sapiens
  misc_feature: 513 for SV(W|O) and 28S
gcggtcctgacgtgcaaatcggtcgtccgacctgggtataggggcgaaagactaatcgaaccatctagtagctggttccctccgaagtttccctcaggatagctggcgctctcgcagacc

SEQ ID NO: 51497 - DNA, 120 bp, Homo sapiens
  misc_feature: 513 for SV(W|O) and 28S
cgagccaccttccccgccgggccttcccagccgtcccggagccggtcgcggcgcaccgccgcggtggaaatgcgcccggcggcggccggtcgccggtcgggggacggtcccccgccgacc

SEQ ID NO: 51498 - DNA, 120 bp, Homo sapiens
  misc_feature: 513 for SV(W|O) and 28S
caaatcggtcgtccgacctgggtataggggcgaaagactaatcgaaccatctagtagctggttccctccgaagtttccctcaggatagctggcgctctcgcagacccgacgcacccccgc

SEQ ID NO: 51499 - DNA, 120 bp, Homo sapiens
  misc_feature: 512 for SV(W|O) and 28S
ccggtaaagcgaatgattagaggtcttggggccgaaacgatctcaacctattctcaaactttaaatgggtaagaagcccggctcgctggcgtggagccgggcgtggaatgcgagtgccta

SEQ ID NO: 51500 - DNA, 120 bp, Homo sapiens
  misc_feature: 512 for SV(W|O) and 28S
tagaggtcttggggccgaaacgatctcaacctattctcaaactttaaatgggtaagaagcccggctcgctggcgtggagccgggcgtggaatgcgagtgcctagtgggccacttttggta

SEQ ID NO: 51501 - DNA, 120 bp, Homo sapiens
  misc_feature: 512 for SV(W|O) and 28S
cgcggcggtgcgccgcgaccggctccgggacggctgggaaggcccggcggggaaggtggctcggggggccccgtccgtccgtccgtccgtcctcctcctcccccgtctccgccccccggc

SEQ ID NO: 51502 - DNA, 120 bp, Homo sapiens
  misc_feature: 511 for SV(W|O) and 28S
aatcggtcgtccgacctgggtataggggcgaaagactaatcgaaccatctagtagctggttccctccgaagtttccctcaggatagctggcgctctcgcagacccgacgcacccccgcca

SEQ ID NO: 51503 - DNA, 120 bp, Homo sapiens
  misc_feature: 511 for SV(W|O) and 28S
tggcgctaaaccattcgtagacgacctgcttctgggtcggggtttcgtacgtagcagagcagctccctcgctgcgatctattgaaagtcagccctcgacacaagggtttgtccgcgcgcg

SEQ ID NO: 51504 - DNA, 120 bp, Homo sapiens
  misc_feature: 511 for SV(W|O) and 28S
accaacaccttttctggggtctgatgagcgtcggcatcgggcgccttaacccggcgttcggttcatcccgcagcgccagttctgcttaccaaaagtggcccactaggcactcgcattcca

SEQ ID NO: 51505 - DNA, 120 bp, Homo sapiens
  misc_feature: 511 for SV(W|O) and 28S
cgtagcggtcctgacgtgcaaatcggtcgtccgacctgggtataggggcgaaagactaatcgaaccatctagtagctggttccctccgaagtttccctcaggatagctggcgctctcgca

SEQ ID NO: 51506 - DNA, 120 bp, Homo sapiens
  misc_feature: 511 for SV(W|O) and 28S
gtgggtagccgacgtcgccgccgaccccgtgcgctcgctccgccgtccccctcttcgggggacgcgcgcgtggccccgagagaacctcccccgggcccgacggcgcgacccgcccggggc

SEQ ID NO: 51507 - DNA, 120 bp, Homo sapiens
  misc_feature: 511 for SV(W|O) and 28S
ggtcctgacgtgcaaatcggtcgtccgacctgggtataggggcgaaagactaatcgaaccatctagtagctggttccctccgaagtttccctcaggatagctggcgctctcgcagacccg

SEQ ID NO: 51508 - DNA, 120 bp, Homo sapiens
  misc_feature: 511 for SV(W|O) and 28S
gaggagaagaaactaaccaggattccctcagtaacggcgagtgaacagggaagagcccagcgccgaatccccgccccgcggcggggcgcgggacatgtggcgtacggaagacccgctccc

SEQ ID NO: 51509 - DNA, 120 bp, Homo sapiens
  misc_feature: 511 for SV(W|O) and 28S
atccggtaaagcgaatgattagaggtcttggggccgaaacgatctcaacctattctcaaactttaaatgggtaagaagcccggctcgctggcgtggagccgggcgtggaatgcgagtgcc

SEQ ID NO: 51510 - DNA, 120 bp, Homo sapiens
  misc_feature: 511 for SV(W|O) and 28S
gcagacccgacgcacccccgccacgcagttttatccggtaaagcgaatgattagaggtcttggggccgaaacgatctcaacctattctcaaactttaaatgggtaagaagcccggctcgc

SEQ ID NO: 51511 - DNA, 120 bp, Homo sapiens
  misc_feature: 511 for SV(W|O) and 28S
cccgacgcacccccgccacgcagttttatccggtaaagcgaatgattagaggtcttggggccgaaacgatctcaacctattctcaaactttaaatgggtaagaagcccggctcgctggcg

SEQ ID NO: 51512 - DNA, 120 bp, Homo sapiens
  misc_feature: 511 for SV(W|O) and 28S
ccggctccgggacggctgggaaggcccggcggggaaggtggctcggggggccccgtccgtccgtccgtccgtcctcctcctcccccgtctccgccccccggccccgcgtcctccctcggg

SEQ ID NO: 51513 - DNA, 120 bp, Homo sapiens
  misc_feature: 511 for SV(W|O) and 28S
accggctccgggacggctgggaaggcccggcggggaaggtggctcggggggccccgtccgtccgtccgtccgtcctcctcctcccccgtctccgccccccggccccgcgtcctccctcgg

SEQ ID NO: 51514 - DNA, 120 bp, Homo sapiens
  misc_feature: 510 for SV(W|O) and 28S
tgcaaatcggtcgtccgacctgggtataggggcgaaagactaatcgaaccatctagtagctggttccctccgaagtttccctcaggatagctggcgctctcgcagacccgacgcaccccc

SEQ ID NO: 51515 - DNA, 120 bp, Homo sapiens
  misc_feature: 510 for SV(W|O) and 28S
tcgtccgacctgggtataggggcgaaagactaatcgaaccatctagtagctggttccctccgaagtttccctcaggatagctggcgctctcgcagacccgacgcacccccgccacgcagt

SEQ ID NO: 51516 - DNA, 120 bp, Homo sapiens
  misc_feature: 510 for SV(W|O) and 28S
ccaacaccttttctggggtctgatgagcgtcggcatcgggcgccttaacccggcgttcggttcatcccgcagcgccagttctgcttaccaaaagtggcccactaggcactcgcattccac

SEQ ID NO: 51517 - DNA, 120 bp, Homo sapiens
  misc_feature: 510 for SV(W|O) and 28S
ccccctcttcgggggacgcgcgcgtggccccgagagaacctcccccgggcccgacggcgcgacccgcccggggcgcactggggacagtccgccccgccccccgacccgcgcgcggcaccc

SEQ ID NO: 51518 - DNA, 120 bp, Homo sapiens
  misc_feature: 510 for SV(W|O) and 28S
ggagaagaaactaaccaggattccctcagtaacggcgagtgaacagggaagagcccagcgccgaatccccgccccgcggcggggcgcgggacatgtggcgtacggaagacccgctccccg

SEQ ID NO: 51519 - DNA, 120 bp, Homo sapiens
  misc_feature: 510 for SV(W|O) and 28S
aaacgatctcaacctattctcaaactttaaatgggtaagaagcccggctcgctggcgtggagccgggcgtggaatgcgagtgcctagtgggccacttttggtaagcagaactggcgctgc

SEQ ID NO: 51520 - DNA, 120 bp, Homo sapiens
  misc_feature: 510 for SV(W|O) and 28S
cgaggggggtctcccccgcgggggcgcgccggcgtctcctcgtgggggggccgggccacccctcccacggcgcgaccgctctcccacccctcctccccgcgcccccgccccggcgacggg

SEQ ID NO: 51521 - DNA, 120 bp, Homo sapiens
  misc_feature: 509 for SV(W|O) and 28S
gcgaatgattagaggtcttggggccgaaacgatctcaacctattctcaaactttaaatgggtaagaagcccggctcgctggcgtggagccgggcgtggaatgcgagtgcctagtgggcca

SEQ ID NO: 51522 - DNA, 120 bp, Homo sapiens
  misc_feature: 509 for SV(W|O) and 28S
tccggtaaagcgaatgattagaggtcttggggccgaaacgatctcaacctattctcaaactttaaatgggtaagaagcccggctcgctggcgtggagccgggcgtggaatgcgagtgcct

SEQ ID NO: 51523 - DNA, 120 bp, Homo sapiens
  misc_feature: 509 for SV(W|O) and 28S
atcggtcgtccgacctgggtataggggcgaaagactaatcgaaccatctagtagctggttccctccgaagtttccctcaggatagctggcgctctcgcagacccgacgcacccccgccac

SEQ ID NO: 51524 - DNA, 120 bp, Homo sapiens
  misc_feature: 509 for SV(W|O) and 28S
gtaaagcgaatgattagaggtcttggggccgaaacgatctcaacctattctcaaactttaaatgggtaagaagcccggctcgctggcgtggagccgggcgtggaatgcgagtgcctagtg

SEQ ID NO: 51525 - DNA, 120 bp, Homo sapiens
  misc_feature: 509 for SV(W|O) and 28S
aggagaagaaactaaccaggattccctcagtaacggcgagtgaacagggaagagcccagcgccgaatccccgccccgcggcggggcgcgggacatgtggcgtacggaagacccgctcccc

SEQ ID NO: 51526 - DNA, 120 bp, Homo sapiens
  misc_feature: 509 for SV(W|O) and 28S
gcggcggtgcgccgcgaccggctccgggacggctgggaaggcccggcggggaaggtggctcggggggccccgtccgtccgtccgtccgtcctcctcctcccccgtctccgccccccggcc

SEQ ID NO: 51527 - DNA, 120 bp, Homo sapiens
  misc_feature: 509 for SV(W|O) and 28S
agcgaatgattagaggtcttggggccgaaacgatctcaacctattctcaaactttaaatgggtaagaagcccggctcgctggcgtggagccgggcgtggaatgcgagtgcctagtgggcc

SEQ ID NO: 51528 - DNA, 120 bp, Homo sapiens
  misc_feature: 509 for SV(W|O) and 28S
ggaggagaagaaactaaccaggattccctcagtaacggcgagtgaacagggaagagcccagcgccgaatccccgccccgcggcggggcgcgggacatgtggcgtacggaagacccgctcc

SEQ ID NO: 51529 - DNA, 120 bp, Homo sapiens
  misc_feature: 509 for SV(W|O) and 28S
cggtcgtccgacctgggtataggggcgaaagactaatcgaaccatctagtagctggttccctccgaagtttccctcaggatagctggcgctctcgcagacccgacgcacccccgccacgc

SEQ ID NO: 51530 - DNA, 120 bp, Homo sapiens
  misc_feature: 509 for SV(W|O) and 28S
cggtaaagcgaatgattagaggtcttggggccgaaacgatctcaacctattctcaaactttaaatgggtaagaagcccggctcgctggcgtggagccgggcgtggaatgcgagtgcctag

SEQ ID NO: 51531 - DNA, 120 bp, Homo sapiens
  misc_feature: 509 for SV(W|O) and 28S
acccccgccacgcagttttatccggtaaagcgaatgattagaggtcttggggccgaaacgatctcaacctattctcaaactttaaatgggtaagaagcccggctcgctggcgtggagccg

SEQ ID NO: 51532 - DNA, 120 bp, Homo sapiens
  misc_feature: 509 for SV(W|O) and 28S
ccgcggcggtgcgccgcgaccggctccgggacggctgggaaggcccggcggggaaggtggctcggggggccccgtccgtccgtccgtccgtcctcctcctcccccgtctccgccccccgg

SEQ ID NO: 51533 - DNA, 120 bp, Homo sapiens
  misc_feature: 508 for SV(W|O) and 28S
aagcgaatgattagaggtcttggggccgaaacgatctcaacctattctcaaactttaaatgggtaagaagcccggctcgctggcgtggagccgggcgtggaatgcgagtgcctagtgggc

SEQ ID NO: 51534 - DNA, 120 bp, Homo sapiens
  misc_feature: 508 for SV(W|O) and 28S
gcaaatcggtcgtccgacctgggtataggggcgaaagactaatcgaaccatctagtagctggttccctccgaagtttccctcaggatagctggcgctctcgcagacccgacgcacccccg

SEQ ID NO: 51535 - DNA, 120 bp, Homo sapiens
  misc_feature: 507 for SV(W|O) and 28S
acgcagttttatccggtaaagcgaatgattagaggtcttggggccgaaacgatctcaacctattctcaaactttaaatgggtaagaagcccggctcgctggcgtggagccgggcgtggaa

SEQ ID NO: 51536 - DNA, 120 bp, Homo sapiens
  misc_feature: 507 for SV(W|O) and 28S
ctagtgggccacttttggtaagcagaactggcgctgcgggatgaaccgaacgccgggttaaggcgcccgatgccgacgctcatcagaccccagaaaaggtgttggttgatatagacagca

SEQ ID NO: 51537 - DNA, 120 bp, Homo sapiens
  misc_feature: 507 for SV(W|O) and 28S
agcatattagtcagcggaggagaagaaactaaccaggattccctcagtaacggcgagtgaacagggaagagcccagcgccgaatccccgccccgcggcggggcgcgggacatgtggcgta

SEQ ID NO: 51538 - DNA, 120 bp, Homo sapiens
  misc_feature: 507 for SV(W|O) and 28S
cgcagttttatccggtaaagcgaatgattagaggtcttggggccgaaacgatctcaacctattctcaaactttaaatgggtaagaagcccggctcgctggcgtggagccgggcgtggaat

SEQ ID NO: 51539 - DNA, 120 bp, Homo sapiens
  misc_feature: 506 for SV(W|O) and 28S
gtgcaaatcggtcgtccgacctgggtataggggcgaaagactaatcgaaccatctagtagctggttccctccgaagtttccctcaggatagctggcgctctcgcagacccgacgcacccc

SEQ ID NO: 51540 - DNA, 120 bp, Homo sapiens
  misc_feature: 506 for SV(W|O) and 28S
ctcttcgggggacgcgcgcgtggccccgagagaacctcccccgggcccgacggcgcgacccgcccggggcgcactggggacagtccgccccgccccccgacccgcgcgcggcaccccccc

SEQ ID NO: 51541 - DNA, 120 bp, Homo sapiens
  misc_feature: 505 for SV(W|O) and 28S
cggtcctgacgtgcaaatcggtcgtccgacctgggtataggggcgaaagactaatcgaaccatctagtagctggttccctccgaagtttccctcaggatagctggcgctctcgcagaccc

SEQ ID NO: 51542 - DNA, 120 bp, Homo sapiens
  misc_feature: 505 for SV(W|O) and 28S
ccctcttcgggggacgcgcgcgtggccccgagagaacctcccccgggcccgacggcgcgacccgcccggggcgcactggggacagtccgccccgccccccgacccgcgcgcggcaccccc

SEQ ID NO: 51543 - DNA, 120 bp, Homo sapiens
  misc_feature: 505 for SV(W|O) and 28S
cctcttcgggggacgcgcgcgtggccccgagagaacctcccccgggcccgacggcgcgacccgcccggggcgcactggggacagtccgccccgccccccgacccgcgcgcggcacccccc

SEQ ID NO: 51544 - DNA, 120 bp, Homo sapiens
  misc_feature: 505 for SV(W|O) and 28S
gcctagtgggccacttttggtaagcagaactggcgctgcgggatgaaccgaacgccgggttaaggcgcccgatgccgacgctcatcagaccccagaaaaggtgttggttgatatagacag

SEQ ID NO: 51545 - DNA, 120 bp, Homo sapiens
  misc_feature: 505 for SV(W|O) and 28S
gccggcgcccgccgggctccccgggggcggccgcgacgcccgccgcagctggggcgatccacgggaagggcccggctcgcgtccagagtcgccgccgccgccggccccccgggtgcccgg

SEQ ID NO: 51546 - DNA, 120 bp, Homo sapiens
  misc_feature: 505 for SV(W|O) and 28S
gacgcacccccgccacgcagttttatccggtaaagcgaatgattagaggtcttggggccgaaacgatctcaacctattctcaaactttaaatgggtaagaagcccggctcgctggcgtgg

SEQ ID NO: 51547 - DNA, 120 bp, Homo sapiens
  misc_feature: 505 for SV(W|O) and 28S
cttcgggggacgcgcgcgtggccccgagagaacctcccccgggcccgacggcgcgacccgcccggggcgcactggggacagtccgccccgccccccgacccgcgcgcggcaccccccccg

SEQ ID NO: 51548 - DNA, 120 bp, Homo sapiens
  misc_feature: 505 for SV(W|O) and 28S
aacgatctcaacctattctcaaactttaaatgggtaagaagcccggctcgctggcgtggagccgggcgtggaatgcgagtgcctagtgggccacttttggtaagcagaactggcgctgcg

SEQ ID NO: 51549 - DNA, 120 bp, Homo sapiens
  misc_feature: 504 for SV(W|O) and 28S
tctcaacctattctcaaactttaaatgggtaagaagcccggctcgctggcgtggagccgggcgtggaatgcgagtgcctagtgggccacttttggtaagcagaactggcgctgcgggatg

SEQ ID NO: 51550 - DNA, 120 bp, Homo sapiens
  misc_feature: 504 for SV(W|O) and 28S
gtcctgacgtgcaaatcggtcgtccgacctgggtataggggcgaaagactaatcgaaccatctagtagctggttccctccgaagtttccctcaggatagctggcgctctcgcagacccga

SEQ ID NO: 51551 - DNA, 120 bp, Homo sapiens
  misc_feature: 503 for SV(W|O) and 28S
ggtaaagcgaatgattagaggtcttggggccgaaacgatctcaacctattctcaaactttaaatgggtaagaagcccggctcgctggcgtggagccgggcgtggaatgcgagtgcctagt

SEQ ID NO: 51552 - DNA, 120 bp, Homo sapiens
  misc_feature: 503 for SV(W|O) and 28S
gcggtgcgccgcgaccggctccgggacggctgggaaggcccggcggggaaggtggctcggggggccccgtccgtccgtccgtccgtcctcctcctcccccgtctccgccccccggccccg

SEQ ID NO: 51553 - DNA, 120 bp, Homo sapiens
  misc_feature: 502 for SV(W|O) and 28S
ttttatccggtaaagcgaatgattagaggtcttggggccgaaacgatctcaacctattctcaaactttaaatgggtaagaagcccggctcgctggcgtggagccgggcgtggaatgcgag

SEQ ID NO: 51554 - DNA, 120 bp, Homo sapiens
  misc_feature: 502 for SV(W|O) and 28S
ttagtcagcggaggagaagaaactaaccaggattccctcagtaacggcgagtgaacagggaagagcccagcgccgaatccccgccccgcggcggggcgcgggacatgtggcgtacggaag

SEQ ID NO: 51555 - DNA, 120 bp, Homo sapiens
  misc_feature: 502 for SV(W|O) and 28S
acgcacccccgccacgcagttttatccggtaaagcgaatgattagaggtcttggggccgaaacgatctcaacctattctcaaactttaaatgggtaagaagcccggctcgctggcgtgga

SEQ ID NO: 51556 - DNA, 120 bp, Homo sapiens
  misc_feature: 502 for SV(W|O) and 28S
gggtagccgacgtcgccgccgaccccgtgcgctcgctccgccgtccccctcttcgggggacgcgcgcgtggccccgagagaacctcccccgggcccgacggcgcgacccgcccggggcgc

SEQ ID NO: 51557 - DNA, 120 bp, Homo sapiens
  misc_feature: 502 for SV(W|O) and 28S
aaccaacaccttttctggggtctgatgagcgtcggcatcgggcgccttaacccggcgttcggttcatcccgcagcgccagttctgcttaccaaaagtggcccactaggcactcgcattcc

SEQ ID NO: 51558 - DNA, 120 bp, Homo sapiens
  misc_feature: 501 for SV(W|O) and 28S
tttatccggtaaagcgaatgattagaggtcttggggccgaaacgatctcaacctattctcaaactttaaatgggtaagaagcccggctcgctggcgtggagccgggcgtggaatgcgagt

SEQ ID NO: 51559 - DNA, 120 bp, Homo sapiens
  misc_feature: 501 for SV(W|O) and 28S
agaggtcttggggccgaaacgatctcaacctattctcaaactttaaatgggtaagaagcccggctcgctggcgtggagccgggcgtggaatgcgagtgcctagtgggccacttttggtaa

SEQ ID NO: 51560 - DNA, 120 bp, Homo sapiens
  misc_feature: 501 for SV(W|O) and 28S
tcggtcgtccgacctgggtataggggcgaaagactaatcgaaccatctagtagctggttccctccgaagtttccctcaggatagctggcgctctcgcagacccgacgcacccccgccacg

SEQ ID NO: 51561 - DNA, 120 bp, Homo sapiens
  misc_feature: 501 for SV(W|O) and 28S
tcctgacgtgcaaatcggtcgtccgacctgggtataggggcgaaagactaatcgaaccatctagtagctggttccctccgaagtttccctcaggatagctggcgctctcgcagacccgac

SEQ ID NO: 51562 - DNA, 120 bp, Homo sapiens
  misc_feature: 501 for SV(W|O) and 28S
cgtgcaaatcggtcgtccgacctgggtataggggcgaaagactaatcgaaccatctagtagctggttccctccgaagtttccctcaggatagctggcgctctcgcagacccgacgcaccc

SEQ ID NO: 51563 - DNA, 120 bp, Homo sapiens
  misc_feature: 501 for SV(W|O) and 28S
gagaagaaactaaccaggattccctcagtaacggcgagtgaacagggaagagcccagcgccgaatccccgccccgcggcggggcgcgggacatgtggcgtacggaagacccgctccccgg

SEQ ID NO: 51564 - DNA, 120 bp, Homo sapiens
  misc_feature: 500 for SV(W|O) and 28S
tatccggtaaagcgaatgattagaggtcttggggccgaaacgatctcaacctattctcaaactttaaatgggtaagaagcccggctcgctggcgtggagccgggcgtggaatgcgagtgc

SEQ ID NO: 51565 - DNA, 120 bp, Homo sapiens
  misc_feature: 499 for SV(W|O) and 28S
gttttatccggtaaagcgaatgattagaggtcttggggccgaaacgatctcaacctattctcaaactttaaatgggtaagaagcccggctcgctggcgtggagccgggcgtggaatgcga

SEQ ID NO: 51566 - DNA, 120 bp, Homo sapiens
  misc_feature: 499 for SV(W|O) and 28S
gtgggccacttttggtaagcagaactggcgctgcgggatgaaccgaacgccgggttaaggcgcccgatgccgacgctcatcagaccccagaaaaggtgttggttgatatagacagcagga

SEQ ID NO: 51567 - DNA, 120 bp, Homo sapiens
  misc_feature: 499 for SV(W|O) and 28S
gcatattagtcagcggaggagaagaaactaaccaggattccctcagtaacggcgagtgaacagggaagagcccagcgccgaatccccgccccgcggcggggcgcgggacatgtggcgtac

SEQ ID NO: 51568 - DNA, 120 bp, Homo sapiens
  misc_feature: 499 for SV(W|O) and 28S
cctagtgggccacttttggtaagcagaactggcgctgcgggatgaaccgaacgccgggttaaggcgcccgatgccgacgctcatcagaccccagaaaaggtgttggttgatatagacagc

SEQ ID NO: 51569 - DNA, 120 bp, Homo sapiens
  misc_feature: 499 for SV(W|O) and 28S
ccgcgcgcgggtcggggggcggggcggactgtccccagtgcgccccgggcgggtcgcgccgtcgggcccgggggaggttctctcggggccacgcgcgcgtcccccgaagagggggacggc

SEQ ID NO: 51570 - DNA, 120 bp, Homo sapiens
  misc_feature: 499 for SV(W|O) and 28S
caaccaacaccttttctggggtctgatgagcgtcggcatcgggcgccttaacccggcgttcggttcatcccgcagcgccagttctgcttaccaaaagtggcccactaggcactcgcattc

SEQ ID NO: 51571 - DNA, 120 bp, Homo sapiens
  misc_feature: 499 for SV(W|O) and 28S
catattagtcagcggaggagaagaaactaaccaggattccctcagtaacggcgagtgaacagggaagagcccagcgccgaatccccgccccgcggcggggcgcgggacatgtggcgtacg

SEQ ID NO: 51572 - DNA, 120 bp, Homo sapiens
  misc_feature: 498 for SV(W|O) and 28S
ttatccggtaaagcgaatgattagaggtcttggggccgaaacgatctcaacctattctcaaactttaaatgggtaagaagcccggctcgctggcgtggagccgggcgtggaatgcgagtg

SEQ ID NO: 51573 - DNA, 120 bp, Homo sapiens
  misc_feature: 498 for SV(W|O) and 28S
tgggtagccgacgtcgccgccgaccccgtgcgctcgctccgccgtccccctcttcgggggacgcgcgcgtggccccgagagaacctcccccgggcccgacggcgcgacccgcccggggcg

SEQ ID NO: 51574 - DNA, 120 bp, Homo sapiens
  misc_feature: 498 for SV(W|O) and 28S
tcttcgggggacgcgcgcgtggccccgagagaacctcccccgggcccgacggcgcgacccgcccggggcgcactggggacagtccgccccgccccccgacccgcgcgcggcacccccccc

SEQ ID NO: 51575 - DNA, 120 bp, Homo sapiens
  misc_feature: 498 for SV(W|O) and 28S
tagtcagcggaggagaagaaactaaccaggattccctcagtaacggcgagtgaacagggaagagcccagcgccgaatccccgccccgcggcggggcgcgggacatgtggcgtacggaaga

SEQ ID NO: 51576 - DNA, 120 bp, Homo sapiens
  misc_feature: 498 for SV(W|O) and 28S
aatgcgagtgcctagtgggccacttttggtaagcagaactggcgctgcgggatgaaccgaacgccgggttaaggcgcccgatgccgacgctcatcagaccccagaaaaggtgttggttga

SEQ ID NO: 51577 - DNA, 120 bp, Homo sapiens
  misc_feature: 498 for SV(W|O) and 28S
cacccccgccacgcagttttatccggtaaagcgaatgattagaggtcttggggccgaaacgatctcaacctattctcaaactttaaatgggtaagaagcccggctcgctggcgtggagcc

SEQ ID NO: 51578 - DNA, 120 bp, Homo sapiens
  misc_feature: 498 for SV(W|O) and 28S
agaagaaactaaccaggattccctcagtaacggcgagtgaacagggaagagcccagcgccgaatccccgccccgcggcggggcgcgggacatgtggcgtacggaagacccgctccccggc

SEQ ID NO: 51579 - DNA, 120 bp, Homo sapiens
  misc_feature: 498 for SV(W|O) and 28S
agtgggccacttttggtaagcagaactggcgctgcgggatgaaccgaacgccgggttaaggcgcccgatgccgacgctcatcagaccccagaaaaggtgttggttgatatagacagcagg

SEQ ID NO: 51580 - DNA, 120 bp, Homo sapiens
  misc_feature: 497 for SV(W|O) and 28S
ttctcaaactttaaatgggtaagaagcccggctcgctggcgtggagccgggcgtggaatgcgagtgcctagtgggccacttttggtaagcagaactggcgctgcgggatgaaccgaacgc

SEQ ID NO: 51581 - DNA, 120 bp, Homo sapiens
  misc_feature: 497 for SV(W|O) and 28S
attagtcagcggaggagaagaaactaaccaggattccctcagtaacggcgagtgaacagggaagagcccagcgccgaatccccgccccgcggcggggcgcgggacatgtggcgtacggaa

SEQ ID NO: 51582 - DNA, 120 bp, Homo sapiens
  misc_feature: 497 for SV(W|O) and 28S
acgtgcaaatcggtcgtccgacctgggtataggggcgaaagactaatcgaaccatctagtagctggttccctccgaagtttccctcaggatagctggcgctctcgcagacccgacgcacc

SEQ ID NO: 51583 - DNA, 120 bp, Homo sapiens
  misc_feature: 497 for SV(W|O) and 28S
gcacccccgccacgcagttttatccggtaaagcgaatgattagaggtcttggggccgaaacgatctcaacctattctcaaactttaaatgggtaagaagcccggctcgctggcgtggagc

SEQ ID NO: 51584 - DNA, 120 bp, Homo sapiens
  misc_feature: 497 for SV(W|O) and 28S
agcggaggagaagaaactaaccaggattccctcagtaacggcgagtgaacagggaagagcccagcgccgaatccccgccccgcggcggggcgcgggacatgtggcgtacggaagacccgc

SEQ ID NO: 51585 - DNA, 120 bp, Homo sapiens
  misc_feature: 497 for SV(W|O) and 28S
gcggaggagaagaaactaaccaggattccctcagtaacggcgagtgaacagggaagagcccagcgccgaatccccgccccgcggcggggcgcgggacatgtggcgtacggaagacccgct

SEQ ID NO: 51586 - DNA, 120 bp, Homo sapiens
  misc_feature: 496 for SV(W|O) and 28S
cttggggccgaaacgatctcaacctattctcaaactttaaatgggtaagaagcccggctcgctggcgtggagccgggcgtggaatgcgagtgcctagtgggccacttttggtaagcagaa

SEQ ID NO: 51587 - DNA, 120 bp, Homo sapiens
  misc_feature: 496 for SV(W|O) and 28S
ctcaacctattctcaaactttaaatgggtaagaagcccggctcgctggcgtggagccgggcgtggaatgcgagtgcctagtgggccacttttggtaagcagaactggcgctgcgggatga

SEQ ID NO: 51588 - DNA, 120 bp, Homo sapiens
  misc_feature: 496 for SV(W|O) and 28S
cgagtgcctagtgggccacttttggtaagcagaactggcgctgcgggatgaaccgaacgccgggttaaggcgcccgatgccgacgctcatcagaccccagaaaaggtgttggttgatata

SEQ ID NO: 51589 - DNA, 120 bp, Homo sapiens
  misc_feature: 496 for SV(W|O) and 28S
ggcgctaaaccattcgtagacgacctgcttctgggtcggggtttcgtacgtagcagagcagctccctcgctgcgatctattgaaagtcagccctcgacacaagggtttgtccgcgcgcgc

SEQ ID NO: 51590 - DNA, 120 bp, Homo sapiens
  misc_feature: 496 for SV(W|O) and 28S
gccgcgcgcgggtcggggggcggggcggactgtccccagtgcgccccgggcgggtcgcgccgtcgggcccgggggaggttctctcggggccacgcgcgcgtcccccgaagagggggacgg

SEQ ID NO: 51591 - DNA, 120 bp, Homo sapiens
  misc_feature: 496 for SV(W|O) and 28S
cggaggagaagaaactaaccaggattccctcagtaacggcgagtgaacagggaagagcccagcgccgaatccccgccccgcggcggggcgcgggacatgtggcgtacggaagacccgctc

SEQ ID NO: 51592 - DNA, 120 bp, Homo sapiens
  misc_feature: 496 for SV(W|O) and 28S
agttttatccggtaaagcgaatgattagaggtcttggggccgaaacgatctcaacctattctcaaactttaaatgggtaagaagcccggctcgctggcgtggagccgggcgtggaatgcg

SEQ ID NO: 51593 - DNA, 120 bp, Homo sapiens
  misc_feature: 496 for SV(W|O) and 28S
atgcgagtgcctagtgggccacttttggtaagcagaactggcgctgcgggatgaaccgaacgccgggttaaggcgcccgatgccgacgctcatcagaccccagaaaaggtgttggttgat

SEQ ID NO: 51594 - DNA, 120 bp, Homo sapiens
  misc_feature: 496 for SV(W|O) and 28S
atctcaacctattctcaaactttaaatgggtaagaagcccggctcgctggcgtggagccgggcgtggaatgcgagtgcctagtgggccacttttggtaagcagaactggcgctgcgggat

SEQ ID NO: 51595 - DNA, 120 bp, Homo sapiens
  misc_feature: 495 for SV(W|O) and 28S
tcttggggccgaaacgatctcaacctattctcaaactttaaatgggtaagaagcccggctcgctggcgtggagccgggcgtggaatgcgagtgcctagtgggccacttttggtaagcaga

SEQ ID NO: 51596 - DNA, 120 bp, Homo sapiens
  misc_feature: 495 for SV(W|O) and 28S
tagtgggccacttttggtaagcagaactggcgctgcgggatgaaccgaacgccgggttaaggcgcccgatgccgacgctcatcagaccccagaaaaggtgttggttgatatagacagcag

SEQ ID NO: 51597 - DNA, 120 bp, Homo sapiens
  misc_feature: 495 for SV(W|O) and 28S
cggcgcccgccgggctccccgggggcggccgcgacgcccgccgcagctggggcgatccacgggaagggcccggctcgcgtccagagtcgccgccgccgccggccccccgggtgcccgggc

SEQ ID NO: 51598 - DNA, 120 bp, Homo sapiens
  misc_feature: 495 for SV(W|O) and 28S
gcagttttatccggtaaagcgaatgattagaggtcttggggccgaaacgatctcaacctattctcaaactttaaatgggtaagaagcccggctcgctggcgtggagccgggcgtggaatg

SEQ ID NO: 51599 - DNA, 120 bp, Homo sapiens
  misc_feature: 495 for SV(W|O) and 28S
gaaacgatctcaacctattctcaaactttaaatgggtaagaagcccggctcgctggcgtggagccgggcgtggaatgcgagtgcctagtgggccacttttggtaagcagaactggcgctg

SEQ ID NO: 51600 - DNA, 120 bp, Homo sapiens
  misc_feature: 495 for SV(W|O) and 28S
cacccgggcccgcgccctaggcttcaaggctcaccgcagcggccctcctactcgtcgcggcgtagcgtccgcggggctccgggggcggggagcggggcgtgggcgggaggaggggaggag

SEQ ID NO: 51601 - DNA, 120 bp, Homo sapiens
  misc_feature: 495 for SV(W|O) and 28S
cgcacccccgccacgcagttttatccggtaaagcgaatgattagaggtcttggggccgaaacgatctcaacctattctcaaactttaaatgggtaagaagcccggctcgctggcgtggag

SEQ ID NO: 51602 - DNA, 120 bp, Homo sapiens
  misc_feature: 495 for SV(W|O) and 28S
atattagtcagcggaggagaagaaactaaccaggattccctcagtaacggcgagtgaacagggaagagcccagcgccgaatccccgccccgcggcggggcgcgggacatgtggcgtacgg

SEQ ID NO: 51603 - DNA, 120 bp, Homo sapiens
  misc_feature: 494 for SV(W|O) and 28S
tgcctagtgggccacttttggtaagcagaactggcgctgcgggatgaaccgaacgccgggttaaggcgcccgatgccgacgctcatcagaccccagaaaaggtgttggttgatatagaca

SEQ ID NO: 51604 - DNA, 120 bp, Homo sapiens
  misc_feature: 494 for SV(W|O) and 28S
gcgccggcgcccgccgggctccccgggggcggccgcgacgcccgccgcagctggggcgatccacgggaagggcccggctcgcgtccagagtcgccgccgccgccggccccccgggtgccc

SEQ ID NO: 51605 - DNA, 120 bp, Homo sapiens
  misc_feature: 493 for SV(W|O) and 28S
tattagtcagcggaggagaagaaactaaccaggattccctcagtaacggcgagtgaacagggaagagcccagcgccgaatccccgccccgcggcggggcgcgggacatgtggcgtacgga

SEQ ID NO: 51606 - DNA, 120 bp, Homo sapiens
  misc_feature: 493 for SV(W|O) and 28S
gatctcaacctattctcaaactttaaatgggtaagaagcccggctcgctggcgtggagccgggcgtggaatgcgagtgcctagtgggccacttttggtaagcagaactggcgctgcggga

SEQ ID NO: 51607 - DNA, 120 bp, Homo sapiens
  misc_feature: 493 for SV(W|O) and 28S
cgacgcacccccgccacgcagttttatccggtaaagcgaatgattagaggtcttggggccgaaacgatctcaacctattctcaaactttaaatgggtaagaagcccggctcgctggcgtg

SEQ ID NO: 51608 - DNA, 120 bp, Homo sapiens
  misc_feature: 493 for SV(W|O) and 28S
acgatctcaacctattctcaaactttaaatgggtaagaagcccggctcgctggcgtggagccgggcgtggaatgcgagtgcctagtgggccacttttggtaagcagaactggcgctgcgg

SEQ ID NO: 51609 - DNA, 120 bp, Homo sapiens
  misc_feature: 493 for SV(W|O) and 28S
ccgacgcacccccgccacgcagttttatccggtaaagcgaatgattagaggtcttggggccgaaacgatctcaacctattctcaaactttaaatgggtaagaagcccggctcgctggcgt

SEQ ID NO: 51610 - DNA, 120 bp, Homo sapiens
  misc_feature: 492 for SV(W|O) and 28S
gagtgcctagtgggccacttttggtaagcagaactggcgctgcgggatgaaccgaacgccgggttaaggcgcccgatgccgacgctcatcagaccccagaaaaggtgttggttgatatag

SEQ ID NO: 51611 - DNA, 120 bp, Homo sapiens
  misc_feature: 492 for SV(W|O) and 28S
gaagaaactaaccaggattccctcagtaacggcgagtgaacagggaagagcccagcgccgaatccccgccccgcggcggggcgcgggacatgtggcgtacggaagacccgctccccggcg

SEQ ID NO: 51612 - DNA, 120 bp, Homo sapiens
  misc_feature: 492 for SV(W|O) and 28S
cgccggcgcccgccgggctccccgggggcggccgcgacgcccgccgcagctggggcgatccacgggaagggcccggctcgcgtccagagtcgccgccgccgccggccccccgggtgcccg

SEQ ID NO: 51613 - DNA, 120 bp, Homo sapiens
  misc_feature: 492 for SV(W|O) and 28S
cgatctcaacctattctcaaactttaaatgggtaagaagcccggctcgctggcgtggagccgggcgtggaatgcgagtgcctagtgggccacttttggtaagcagaactggcgctgcggg

SEQ ID NO: 51614 - DNA, 120 bp, Homo sapiens
  misc_feature: 492 for SV(W|O) and 28S
ccggcgcccgccgggctccccgggggcggccgcgacgcccgccgcagctggggcgatccacgggaagggcccggctcgcgtccagagtcgccgccgccgccggccccccgggtgcccggg

SEQ ID NO: 51615 - DNA, 120 bp, Homo sapiens
  misc_feature: 491 for SV(W|O) and 28S
tgcgagtgcctagtgggccacttttggtaagcagaactggcgctgcgggatgaaccgaacgccgggttaaggcgcccgatgccgacgctcatcagaccccagaaaaggtgttggttgata

SEQ ID NO: 51616 - DNA, 120 bp, Homo sapiens
  misc_feature: 491 for SV(W|O) and 28S
gtcttggggccgaaacgatctcaacctattctcaaactttaaatgggtaagaagcccggctcgctggcgtggagccgggcgtggaatgcgagtgcctagtgggccacttttggtaagcag

SEQ ID NO: 51617 - DNA, 120 bp, Homo sapiens
  misc_feature: 491 for SV(W|O) and 28S
gcgagtgcctagtgggccacttttggtaagcagaactggcgctgcgggatgaaccgaacgccgggttaaggcgcccgatgccgacgctcatcagaccccagaaaaggtgttggttgatat

SEQ ID NO: 51618 - DNA, 120 bp, Homo sapiens
  misc_feature: 491 for SV(W|O) and 28S
gccgacgtcgccgccgaccccgtgcgctcgctccgccgtccccctcttcgggggacgcgcgcgtggccccgagagaacctcccccgggcccgacggcgcgacccgcccggggcgcactgg

SEQ ID NO: 51619 - DNA, 120 bp, Homo sapiens
  misc_feature: 491 for SV(W|O) and 28S
cagttttatccggtaaagcgaatgattagaggtcttggggccgaaacgatctcaacctattctcaaactttaaatgggtaagaagcccggctcgctggcgtggagccgggcgtggaatgc

SEQ ID NO: 51620 - DNA, 120 bp, Homo sapiens
  misc_feature: 491 for SV(W|O) and 28S
cagcggaggagaagaaactaaccaggattccctcagtaacggcgagtgaacagggaagagcccagcgccgaatccccgccccgcggcggggcgcgggacatgtggcgtacggaagacccg

SEQ ID NO: 51621 - DNA, 120 bp, Homo sapiens
  misc_feature: 491 for SV(W|O) and 28S
ccgacgtcgccgccgaccccgtgcgctcgctccgccgtccccctcttcgggggacgcgcgcgtggccccgagagaacctcccccgggcccgacggcgcgacccgcccggggcgcactggg

SEQ ID NO: 51622 - DNA, 120 bp, Homo sapiens
  misc_feature: 490 for SV(W|O) and 28S
agtgcctagtgggccacttttggtaagcagaactggcgctgcgggatgaaccgaacgccgggttaaggcgcccgatgccgacgctcatcagaccccagaaaaggtgttggttgatataga

SEQ ID NO: 51623 - DNA, 120 bp, Homo sapiens
  misc_feature: 490 for SV(W|O) and 28S
gtgcctagtgggccacttttggtaagcagaactggcgctgcgggatgaaccgaacgccgggttaaggcgcccgatgccgacgctcatcagaccccagaaaaggtgttggttgatatagac

SEQ ID NO: 51624 - DNA, 120 bp, Homo sapiens
  misc_feature: 490 for SV(W|O) and 28S
gcgcccgccgggctccccgggggcggccgcgacgcccgccgcagctggggcgatccacgggaagggcccggctcgcgtccagagtcgccgccgccgccggccccccgggtgcccgggccc

SEQ ID NO: 51625 - DNA, 120 bp, Homo sapiens
  misc_feature: 490 for SV(W|O) and 28S
attctcaaactttaaatgggtaagaagcccggctcgctggcgtggagccgggcgtggaatgcgagtgcctagtgggccacttttggtaagcagaactggcgctgcgggatgaaccgaacg

SEQ ID NO: 51626 - DNA, 120 bp, Homo sapiens
  misc_feature: 490 for SV(W|O) and 28S
cgcgcgcgggtcggggggcggggcggactgtccccagtgcgccccgggcgggtcgcgccgtcgggcccgggggaggttctctcggggccacgcgcgcgtcccccgaagagggggacggcg

SEQ ID NO: 51627 - DNA, 120 bp, Homo sapiens
  misc_feature: 489 for SV(W|O) and 28S
gggccgaaacgatctcaacctattctcaaactttaaatgggtaagaagcccggctcgctggcgtggagccgggcgtggaatgcgagtgcctagtgggccacttttggtaagcagaactgg

SEQ ID NO: 51628 - DNA, 120 bp, Homo sapiens
  misc_feature: 489 for SV(W|O) and 28S
cctgacgtgcaaatcggtcgtccgacctgggtataggggcgaaagactaatcgaaccatctagtagctggttccctccgaagtttccctcaggatagctggcgctctcgcagacccgacg

SEQ ID NO: 51629 - DNA, 120 bp, Homo sapiens
  misc_feature: 488 for SV(W|O) and 28S
tccccctcttcgggggacgcgcgcgtggccccgagagaacctcccccgggcccgacggcgcgacccgcccggggcgcactggggacagtccgccccgccccccgacccgcgcgcggcacc

SEQ ID NO: 51630 - DNA, 120 bp, Homo sapiens
  misc_feature: 488 for SV(W|O) and 28S
gacgtgcaaatcggtcgtccgacctgggtataggggcgaaagactaatcgaaccatctagtagctggttccctccgaagtttccctcaggatagctggcgctctcgcagacccgacgcac

SEQ ID NO: 51631 - DNA, 120 bp, Homo sapiens
  misc_feature: 488 for SV(W|O) and 28S
ggctccgggacggctgggaaggcccggcggggaaggtggctcggggggccccgtccgtccgtccgtccgtcctcctcctcccccgtctccgccccccggccccgcgtcctccctcgggag

SEQ ID NO: 51632 - DNA, 120 bp, Homo sapiens
  misc_feature: 487 for SV(W|O) and 28S
tgacgtgcaaatcggtcgtccgacctgggtataggggcgaaagactaatcgaaccatctagtagctggttccctccgaagtttccctcaggatagctggcgctctcgcagacccgacgca

SEQ ID NO: 51633 - DNA, 120 bp, Homo sapiens
  misc_feature: 487 for SV(W|O) and 28S
cgtccccctcttcgggggacgcgcgcgtggccccgagagaacctcccccgggcccgacggcgcgacccgcccggggcgcactggggacagtccgccccgccccccgacccgcgcgcggca

SEQ ID NO: 51634 - DNA, 120 bp, Homo sapiens
  misc_feature: 487 for SV(W|O) and 28S
tattctcaaactttaaatgggtaagaagcccggctcgctggcgtggagccgggcgtggaatgcgagtgcctagtgggccacttttggtaagcagaactggcgctgcgggatgaaccgaac

SEQ ID NO: 51635 - DNA, 120 bp, Homo sapiens
  misc_feature: 487 for SV(W|O) and 28S
ggcgcccgccgggctccccgggggcggccgcgacgcccgccgcagctggggcgatccacgggaagggcccggctcgcgtccagagtcgccgccgccgccggccccccgggtgcccgggcc

SEQ ID NO: 51636 - DNA, 120 bp, Homo sapiens
  misc_feature: 487 for SV(W|O) and 28S
ggccgaaacgatctcaacctattctcaaactttaaatgggtaagaagcccggctcgctggcgtggagccgggcgtggaatgcgagtgcctagtgggccacttttggtaagcagaactggc

SEQ ID NO: 51637 - DNA, 120 bp, Homo sapiens
  misc_feature: 487 for SV(W|O) and 28S
gcgcgcgggtcggggggcggggcggactgtccccagtgcgccccgggcgggtcgcgccgtcgggcccgggggaggttctctcggggccacgcgcgcgtcccccgaagagggggacggcgg

SEQ ID NO: 51638 - DNA, 120 bp, Homo sapiens
  misc_feature: 487 for SV(W|O) and 28S
acgcgacctcagatcagacgtggcgacccgctgaatttaagcatattagtcagcggaggagaagaaactaaccaggattccctcagtaacggcgagtgaacagggaagagcccagcgccg

SEQ ID NO: 51639 - DNA, 120 bp, Homo sapiens
  misc_feature: 487 for SV(W|O) and 28S
agccgacgtcgccgccgaccccgtgcgctcgctccgccgtccccctcttcgggggacgcgcgcgtggccccgagagaacctcccccgggcccgacggcgcgacccgcccggggcgcactg

SEQ ID NO: 51640 - DNA, 120 bp, Homo sapiens
  misc_feature: 486 for SV(W|O) and 28S
ggtcttggggccgaaacgatctcaacctattctcaaactttaaatgggtaagaagcccggctcgctggcgtggagccgggcgtggaatgcgagtgcctagtgggccacttttggtaagca

SEQ ID NO: 51641 - DNA, 120 bp, Homo sapiens
  misc_feature: 486 for SV(W|O) and 28S
ggtagccgacgtcgccgccgaccccgtgcgctcgctccgccgtccccctcttcgggggacgcgcgcgtggccccgagagaacctcccccgggcccgacggcgcgacccgcccggggcgca

SEQ ID NO: 51642 - DNA, 120 bp, Homo sapiens
  misc_feature: 486 for SV(W|O) and 28S
gtagccgacgtcgccgccgaccccgtgcgctcgctccgccgtccccctcttcgggggacgcgcgcgtggccccgagagaacctcccccgggcccgacggcgcgacccgcccggggcgcac

SEQ ID NO: 51643 - DNA, 120 bp, Homo sapiens
  misc_feature: 486 for SV(W|O) and 28S
caccgcggcggtgcgccgcgaccggctccgggacggctgggaaggcccggcggggaaggtggctcggggggccccgtccgtccgtccgtccgtcctcctcctcccccgtctccgcccccc

SEQ ID NO: 51644 - DNA, 120 bp, Homo sapiens
  misc_feature: 486 for SV(W|O) and 28S
cgctccgccgtccccctcttcgggggacgcgcgcgtggccccgagagaacctcccccgggcccgacggcgcgacccgcccggggcgcactggggacagtccgccccgccccccgacccgc

SEQ ID NO: 51645 - DNA, 120 bp, Homo sapiens
  misc_feature: 485 for SV(W|O) and 28S
ttggggccgaaacgatctcaacctattctcaaactttaaatgggtaagaagcccggctcgctggcgtggagccgggcgtggaatgcgagtgcctagtgggccacttttggtaagcagaac

SEQ ID NO: 51646 - DNA, 120 bp, Homo sapiens
  misc_feature: 485 for SV(W|O) and 28S
tggggccgaaacgatctcaacctattctcaaactttaaatgggtaagaagcccggctcgctggcgtggagccgggcgtggaatgcgagtgcctagtgggccacttttggtaagcagaact

SEQ ID NO: 51647 - DNA, 120 bp, Homo sapiens
  misc_feature: 485 for SV(W|O) and 28S
gtccccctcttcgggggacgcgcgcgtggccccgagagaacctcccccgggcccgacggcgcgacccgcccggggcgcactggggacagtccgccccgccccccgacccgcgcgcggcac

SEQ ID NO: 51648 - DNA, 120 bp, Homo sapiens
  misc_feature: 485 for SV(W|O) and 28S
agtcagcggaggagaagaaactaaccaggattccctcagtaacggcgagtgaacagggaagagcccagcgccgaatccccgccccgcggcggggcgcgggacatgtggcgtacggaagac

SEQ ID NO: 51649 - DNA, 120 bp, Homo sapiens
  misc_feature: 485 for SV(W|O) and 28S
cgcccgccgggctccccgggggcggccgcgacgcccgccgcagctggggcgatccacgggaagggcccggctcgcgtccagagtcgccgccgccgccggccccccgggtgcccgggcccc

SEQ ID NO: 51650 - DNA, 120 bp, Homo sapiens
  misc_feature: 485 for SV(W|O) and 28S
ctgacgtgcaaatcggtcgtccgacctgggtataggggcgaaagactaatcgaaccatctagtagctggttccctccgaagtttccctcaggatagctggcgctctcgcagacccgacgc

SEQ ID NO: 51651 - DNA, 120 bp, Homo sapiens
  misc_feature: 485 for SV(W|O) and 28S
gaggtcttggggccgaaacgatctcaacctattctcaaactttaaatgggtaagaagcccggctcgctggcgtggagccgggcgtggaatgcgagtgcctagtgggccacttttggtaag

SEQ ID NO: 51652 - DNA, 120 bp, Homo sapiens
  misc_feature: 485 for SV(W|O) and 28S
cgacgtcgccgccgaccccgtgcgctcgctccgccgtccccctcttcgggggacgcgcgcgtggccccgagagaacctcccccgggcccgacggcgcgacccgcccggggcgcactgggg

SEQ ID NO: 51653 - DNA, 120 bp, Homo sapiens
  misc_feature: 485 for SV(W|O) and 28S
cgaaacgatctcaacctattctcaaactttaaatgggtaagaagcccggctcgctggcgtggagccgggcgtggaatgcgagtgcctagtgggccacttttggtaagcagaactggcgct

SEQ ID NO: 51654 - DNA, 120 bp, Homo sapiens
  misc_feature: 484 for SV(W|O) and 28S
gcccgccgggctccccgggggcggccgcgacgcccgccgcagctggggcgatccacgggaagggcccggctcgcgtccagagtcgccgccgccgccggccccccgggtgcccgggccccc

SEQ ID NO: 51655 - DNA, 120 bp, Homo sapiens
  misc_feature: 484 for SV(W|O) and 28S
ggggccgaaacgatctcaacctattctcaaactttaaatgggtaagaagcccggctcgctggcgtggagccgggcgtggaatgcgagtgcctagtgggccacttttggtaagcagaactg

SEQ ID NO: 51656 - DNA, 120 bp, Homo sapiens
  misc_feature: 483 for SV(W|O) and 28S
tccgggacggctgggaaggcccggcggggaaggtggctcggggggccccgtccgtccgtccgtccgtcctcctcctcccccgtctccgccccccggccccgcgtcctccctcgggagggc

SEQ ID NO: 51657 - DNA, 120 bp, Homo sapiens
  misc_feature: 483 for SV(W|O) and 28S
cggctccgggacggctgggaaggcccggcggggaaggtggctcggggggccccgtccgtccgtccgtccgtcctcctcctcccccgtctccgccccccggccccgcgtcctccctcggga

SEQ ID NO: 51658 - DNA, 120 bp, Homo sapiens
  misc_feature: 483 for SV(W|O) and 28S
gtcagcggaggagaagaaactaaccaggattccctcagtaacggcgagtgaacagggaagagcccagcgccgaatccccgccccgcggcggggcgcgggacatgtggcgtacggaagacc

SEQ ID NO: 51659 - DNA, 120 bp, Homo sapiens
  misc_feature: 483 for SV(W|O) and 28S
gctccgggacggctgggaaggcccggcggggaaggtggctcggggggccccgtccgtccgtccgtccgtcctcctcctcccccgtctccgccccccggccccgcgtcctccctcgggagg

SEQ ID NO: 51660 - DNA, 120 bp, Homo sapiens
  misc_feature: 483 for SV(W|O) and 28S
gcgctaaaccattcgtagacgacctgcttctgggtcggggtttcgtacgtagcagagcagctccctcgctgcgatctattgaaagtcagccctcgacacaagggtttgtccgcgcgcgcg

SEQ ID NO: 51661 - DNA, 120 bp, Homo sapiens
  misc_feature: 483 for SV(W|O) and 28S
gcgcgggtcggggggcggggcggactgtccccagtgcgccccgggcgggtcgcgccgtcgggcccgggggaggttctctcggggccacgcgcgcgtcccccgaagagggggacggcggag

SEQ ID NO: 51662 - DNA, 120 bp, Homo sapiens
  misc_feature: 483 for SV(W|O) and 28S
ctccgggacggctgggaaggcccggcggggaaggtggctcggggggccccgtccgtccgtccgtccgtcctcctcctcccccgtctccgccccccggccccgcgtcctccctcgggaggg

SEQ ID NO: 51663 - DNA, 120 bp, Homo sapiens
  misc_feature: 482 for SV(W|O) and 28S
tagccgacgtcgccgccgaccccgtgcgctcgctccgccgtccccctcttcgggggacgcgcgcgtggccccgagagaacctcccccgggcccgacggcgcgacccgcccggggcgcact

SEQ ID NO: 51664 - DNA, 120 bp, Homo sapiens
  misc_feature: 481 for SV(W|O) and 28S
ctattctcaaactttaaatgggtaagaagcccggctcgctggcgtggagccgggcgtggaatgcgagtgcctagtgggccacttttggtaagcagaactggcgctgcgggatgaaccgaa

SEQ ID NO: 51665 - DNA, 120 bp, Homo sapiens
  misc_feature: 480 for SV(W|O) and 28S
gccgaaacgatctcaacctattctcaaactttaaatgggtaagaagcccggctcgctggcgtggagccgggcgtggaatgcgagtgcctagtgggccacttttggtaagcagaactggcg

SEQ ID NO: 51666 - DNA, 120 bp, Homo sapiens
  misc_feature: 479 for SV(W|O) and 28S
tcagcggaggagaagaaactaaccaggattccctcagtaacggcgagtgaacagggaagagcccagcgccgaatccccgccccgcggcggggcgcgggacatgtggcgtacggaagaccc

SEQ ID NO: 51667 - DNA, 120 bp, Homo sapiens
  misc_feature: 479 for SV(W|O) and 28S
aggtcttggggccgaaacgatctcaacctattctcaaactttaaatgggtaagaagcccggctcgctggcgtggagccgggcgtggaatgcgagtgcctagtgggccacttttggtaagc

SEQ ID NO: 51668 - DNA, 120 bp, Homo sapiens
  misc_feature: 479 for SV(W|O) and 28S
ccgggacggctgggaaggcccggcggggaaggtggctcggggggccccgtccgtccgtccgtccgtcctcctcctcccccgtctccgccccccggccccgcgtcctccctcgggagggcg

SEQ ID NO: 51669 - DNA, 120 bp, Homo sapiens
  misc_feature: 478 for SV(W|O) and 28S
ccaccgcggcggtgcgccgcgaccggctccgggacggctgggaaggcccggcggggaaggtggctcggggggccccgtccgtccgtccgtccgtcctcctcctcccccgtctccgccccc

SEQ ID NO: 51670 - DNA, 120 bp, Homo sapiens
  misc_feature: 478 for SV(W|O) and 28S
cgccgggctccccgggggcggccgcgacgcccgccgcagctggggcgatccacgggaagggcccggctcgcgtccagagtcgccgccgccgccggccccccgggtgcccgggcccccctc

SEQ ID NO: 51671 - DNA, 120 bp, Homo sapiens
  misc_feature: 477 for SV(W|O) and 28S
cgcgggtcggggggcggggcggactgtccccagtgcgccccgggcgggtcgcgccgtcgggcccgggggaggttctctcggggccacgcgcgcgtcccccgaagagggggacggcggagc

SEQ ID NO: 51672 - DNA, 120 bp, Homo sapiens
  misc_feature: 476 for SV(W|O) and 28S
tcaacctattctcaaactttaaatgggtaagaagcccggctcgctggcgtggagccgggcgtggaatgcgagtgcctagtgggccacttttggtaagcagaactggcgctgcgggatgaa

SEQ ID NO: 51673 - DNA, 120 bp, Homo sapiens
  misc_feature: 476 for SV(W|O) and 28S
accgcggcggtgcgccgcgaccggctccgggacggctgggaaggcccggcggggaaggtggctcggggggccccgtccgtccgtccgtccgtcctcctcctcccccgtctccgccccccg

SEQ ID NO: 51674 - DNA, 120 bp, Homo sapiens
  misc_feature: 475 for SV(W|O) and 28S
acccgggcccgcgccctaggcttcaaggctcaccgcagcggccctcctactcgtcgcggcgtagcgtccgcggggctccgggggcggggagcggggcgtgggcgggaggaggggaggagg

SEQ ID NO: 51675 - DNA, 120 bp, Homo sapiens
  misc_feature: 474 for SV(W|O) and 28S
cctattctcaaactttaaatgggtaagaagcccggctcgctggcgtggagccgggcgtggaatgcgagtgcctagtgggccacttttggtaagcagaactggcgctgcgggatgaaccga

SEQ ID NO: 51676 - DNA, 120 bp, Homo sapiens
  misc_feature: 473 for SV(W|O) and 28S
cgcgcgggtcggggggcggggcggactgtccccagtgcgccccgggcgggtcgcgccgtcgggcccgggggaggttctctcggggccacgcgcgcgtcccccgaagagggggacggcgga

SEQ ID NO: 51677 - DNA, 120 bp, Homo sapiens
  misc_feature: 473 for SV(W|O) and 28S
cgggacggctgggaaggcccggcggggaaggtggctcggggggccccgtccgtccgtccgtccgtcctcctcctcccccgtctccgccccccggccccgcgtcctccctcgggagggcgc

SEQ ID NO: 51678 - DNA, 120 bp, Homo sapiens
  misc_feature: 1934 for SV(W|O) and mtDNA
tgggcctgtccttgtagtataaactaatacaccagtcttgtaaaccggagatgaaaacctttttccaaggacaaatcagagaaaaagtctttaactccaccattagcacccaaagctaag

SEQ ID NO: 51679 - DNA, 120 bp, Homo sapiens
  misc_feature: 1931 for SV(W|O) and mtDNA
atgggcctgtccttgtagtataaactaatacaccagtcttgtaaaccggagatgaaaacctttttccaaggacaaatcagagaaaaagtctttaactccaccattagcacccaaagctaa

SEQ ID NO: 51680 - DNA, 120 bp, Homo sapiens
  misc_feature: 1922 for SV(W|O) and mtDNA
gggcctgtccttgtagtataaactaatacaccagtcttgtaaaccggagatgaaaacctttttccaaggacaaatcagagaaaaagtctttaactccaccattagcacccaaagctaaga

SEQ ID NO: 51681 - DNA, 120 bp, Homo sapiens
  misc_feature: 1907 for SV(W|O) and mtDNA
aatgggcctgtccttgtagtataaactaatacaccagtcttgtaaaccggagatgaaaacctttttccaaggacaaatcagagaaaaagtctttaactccaccattagcacccaaagcta

SEQ ID NO: 51682 - DNA, 120 bp, Homo sapiens
  misc_feature: 1904 for SV(W|O) and mtDNA
ggcctgtccttgtagtataaactaatacaccagtcttgtaaaccggagatgaaaacctttttccaaggacaaatcagagaaaaagtctttaactccaccattagcacccaaagctaagat

SEQ ID NO: 51683 - DNA, 120 bp, Homo sapiens
  misc_feature: 1889 for SV(W|O) and mtDNA
gcctgtccttgtagtataaactaatacaccagtcttgtaaaccggagatgaaaacctttttccaaggacaaatcagagaaaaagtctttaactccaccattagcacccaaagctaagatt

SEQ ID NO: 51684 - DNA, 120 bp, Homo sapiens
  misc_feature: 1889 for SV(W|O) and mtDNA
aaatgggcctgtccttgtagtataaactaatacaccagtcttgtaaaccggagatgaaaacctttttccaaggacaaatcagagaaaaagtctttaactccaccattagcacccaaagct

SEQ ID NO: 51685 - DNA, 120 bp, Homo sapiens
  misc_feature: 1886 for SV(W|O) and mtDNA
tccttgtagtataaactaatacaccagtcttgtaaaccggagatgaaaacctttttccaaggacaaatcagagaaaaagtctttaactccaccattagcacccaaagctaagattctaat

SEQ ID NO: 51686 - DNA, 120 bp, Homo sapiens
  misc_feature: 1877 for SV(W|O) and mtDNA
tgtccttgtagtataaactaatacaccagtcttgtaaaccggagatgaaaacctttttccaaggacaaatcagagaaaaagtctttaactccaccattagcacccaaagctaagattcta

SEQ ID NO: 51687 - DNA, 120 bp, Homo sapiens
  misc_feature: 1873 for SV(W|O) and mtDNA
gtccttgtagtataaactaatacaccagtcttgtaaaccggagatgaaaacctttttccaaggacaaatcagagaaaaagtctttaactccaccattagcacccaaagctaagattctaa

SEQ ID NO: 51688 - DNA, 120 bp, Homo sapiens
  misc_feature: 1867 for SV(W|O) and mtDNA
ctgtccttgtagtataaactaatacaccagtcttgtaaaccggagatgaaaacctttttccaaggacaaatcagagaaaaagtctttaactccaccattagcacccaaagctaagattct

SEQ ID NO: 51689 - DNA, 120 bp, Homo sapiens
  misc_feature: 1866 for SV(W|O) and mtDNA
cctgtccttgtagtataaactaatacaccagtcttgtaaaccggagatgaaaacctttttccaaggacaaatcagagaaaaagtctttaactccaccattagcacccaaagctaagattc

SEQ ID NO: 51690 - DNA, 120 bp, Homo sapiens
  misc_feature: 1860 for SV(W|O) and mtDNA
caaatgggcctgtccttgtagtataaactaatacaccagtcttgtaaaccggagatgaaaacctttttccaaggacaaatcagagaaaaagtctttaactccaccattagcacccaaagc

SEQ ID NO: 51691 - DNA, 120 bp, Homo sapiens
  misc_feature: 1856 for SV(W|O) and mtDNA
ctcaaatgggcctgtccttgtagtataaactaatacaccagtcttgtaaaccggagatgaaaacctttttccaaggacaaatcagagaaaaagtctttaactccaccattagcacccaaa

SEQ ID NO: 51692 - DNA, 120 bp, Homo sapiens
  misc_feature: 1856 for SV(W|O) and mtDNA
ccttgtagtataaactaatacaccagtcttgtaaaccggagatgaaaacctttttccaaggacaaatcagagaaaaagtctttaactccaccattagcacccaaagctaagattctaatt

SEQ ID NO: 51693 - DNA, 120 bp, Homo sapiens
  misc_feature: 1854 for SV(W|O) and mtDNA
tcaaatgggcctgtccttgtagtataaactaatacaccagtcttgtaaaccggagatgaaaacctttttccaaggacaaatcagagaaaaagtctttaactccaccattagcacccaaag

SEQ ID NO: 51694 - DNA, 120 bp, Homo sapiens
  misc_feature: 1850 for SV(W|O) and mtDNA
cttgtagtataaactaatacaccagtcttgtaaaccggagatgaaaacctttttccaaggacaaatcagagaaaaagtctttaactccaccattagcacccaaagctaagattctaattt

SEQ ID NO: 51695 - DNA, 120 bp, Homo sapiens
  misc_feature: 1850 for SV(W|O) and mtDNA
aaactagttaattggaagttaacggtactatttatactaaaagagtaagaccctcatcaatagatggagacatacagaaatagtcaaaccacatctacaaaatgccagtatcaggcggcg

SEQ ID NO: 51696 - DNA, 120 bp, Homo sapiens
  misc_feature: 1849 for SV(W|O) and mtDNA
aaaactagttaattggaagttaacggtactatttatactaaaagagtaagaccctcatcaatagatggagacatacagaaatagtcaaaccacatctacaaaatgccagtatcaggcggc

SEQ ID NO: 51697 - DNA, 120 bp, Homo sapiens
  misc_feature: 1849 for SV(W|O) and mtDNA
aactagttaattggaagttaacggtactatttatactaaaagagtaagaccctcatcaatagatggagacatacagaaatagtcaaaccacatctacaaaatgccagtatcaggcggcgg

SEQ ID NO: 51698 - DNA, 120 bp, Homo sapiens
  misc_feature: 1841 for SV(W|O) and mtDNA
tagttaattggaagttaacggtactatttatactaaaagagtaagaccctcatcaatagatggagacatacagaaatagtcaaaccacatctacaaaatgccagtatcaggcggcggctt

SEQ ID NO: 51699 - DNA, 120 bp, Homo sapiens
  misc_feature: 1841 for SV(W|O) and mtDNA
ctagttaattggaagttaacggtactatttatactaaaagagtaagaccctcatcaatagatggagacatacagaaatagtcaaaccacatctacaaaatgccagtatcaggcggcggct

SEQ ID NO: 51700 - DNA, 120 bp, Homo sapiens
  misc_feature: 1840 for SV(W|O) and mtDNA
agttaattggaagttaacggtactatttatactaaaagagtaagaccctcatcaatagatggagacatacagaaatagtcaaaccacatctacaaaatgccagtatcaggcggcggcttc

SEQ ID NO: 51701 - DNA, 120 bp, Homo sapiens
  misc_feature: 1836 for SV(W|O) and mtDNA
actagttaattggaagttaacggtactatttatactaaaagagtaagaccctcatcaatagatggagacatacagaaatagtcaaaccacatctacaaaatgccagtatcaggcggcggc

SEQ ID NO: 51702 - DNA, 120 bp, Homo sapiens
  misc_feature: 1824 for SV(W|O) and mtDNA
tgtagtataaactaatacaccagtcttgtaaaccggagatgaaaacctttttccaaggacaaatcagagaaaaagtctttaactccaccattagcacccaaagctaagattctaatttaa

SEQ ID NO: 51703 - DNA, 120 bp, Homo sapiens
  misc_feature: 1822 for SV(W|O) and mtDNA
gtagtataaactaatacaccagtcttgtaaaccggagatgaaaacctttttccaaggacaaatcagagaaaaagtctttaactccaccattagcacccaaagctaagattctaatttaaa

SEQ ID NO: 51704 - DNA, 120 bp, Homo sapiens
  misc_feature: 1819 for SV(W|O) and mtDNA
ttgtagtataaactaatacaccagtcttgtaaaccggagatgaaaacctttttccaaggacaaatcagagaaaaagtctttaactccaccattagcacccaaagctaagattctaattta

SEQ ID NO: 51705 - DNA, 120 bp, Homo sapiens
  misc_feature: 1813 for SV(W|O) and mtDNA
actcaaatgggcctgtccttgtagtataaactaatacaccagtcttgtaaaccggagatgaaaacctttttccaaggacaaatcagagaaaaagtctttaactccaccattagcacccaa

SEQ ID NO: 51706 - DNA, 120 bp, Homo sapiens
  misc_feature: 1813 for SV(W|O) and mtDNA
tactcaaatgggcctgtccttgtagtataaactaatacaccagtcttgtaaaccggagatgaaaacctttttccaaggacaaatcagagaaaaagtctttaactccaccattagcaccca

SEQ ID NO: 51707 - DNA, 120 bp, Homo sapiens
  misc_feature: 1805 for SV(W|O) and mtDNA
atactcaaatgggcctgtccttgtagtataaactaatacaccagtcttgtaaaccggagatgaaaacctttttccaaggacaaatcagagaaaaagtctttaactccaccattagcaccc

SEQ ID NO: 51708 - DNA, 120 bp, Homo sapiens
  misc_feature: 1804 for SV(W|O) and mtDNA
ataatgaattaactagaaataactttgcaaggagagccaaagctaagacccccgaaaccagacgagctacctaagaacagctaaaagagcacacccgtctatgtagcaaaatagtgggaa

SEQ ID NO: 51709 - DNA, 120 bp, Homo sapiens
  misc_feature: 1804 for SV(W|O) and mtDNA
gttaattggaagttaacggtactatttatactaaaagagtaagaccctcatcaatagatggagacatacagaaatagtcaaaccacatctacaaaatgccagtatcaggcggcggcttcg

SEQ ID NO: 51710 - DNA, 120 bp, Homo sapiens
  misc_feature: 1803 for SV(W|O) and mtDNA
caaaatactcaaatgggcctgtccttgtagtataaactaatacaccagtcttgtaaaccggagatgaaaacctttttccaaggacaaatcagagaaaaagtctttaactccaccattagc

SEQ ID NO: 51711 - DNA, 120 bp, Homo sapiens
  misc_feature: 1802 for SV(W|O) and mtDNA
tctttcttttcaccgtaggtggcctgactggcattgtattagcaaactcatcactagacatcgtactacacgacacgtactacgttgtagcccacttccactatgtcctatcaataggag

SEQ ID NO: 51712 - DNA, 120 bp, Homo sapiens
  misc_feature: 1801 for SV(W|O) and mtDNA
ttgtcaaaactagttaattggaagttaacggtactatttatactaaaagagtaagaccctcatcaatagatggagacatacagaaatagtcaaaccacatctacaaaatgccagtatcag

SEQ ID NO: 51713 - DNA, 120 bp, Homo sapiens
  misc_feature: 1801 for SV(W|O) and mtDNA
ttctgcataatgaattaactagaaataactttgcaaggagagccaaagctaagacccccgaaaccagacgagctacctaagaacagctaaaagagcacacccgtctatgtagcaaaatag

SEQ ID NO: 51714 - DNA, 120 bp, Homo sapiens
  misc_feature: 1800 for SV(W|O) and mtDNA
tcccactattttgctacatagacgggtgtgctcttttagctgttcttaggtagctcgtctggtttcgggggtcttagctttggctctccttgcaaagttatttctagttaattcattatg

SEQ ID NO: 51715 - DNA, 120 bp, Homo sapiens
  misc_feature: 1800 for SV(W|O) and mtDNA
caaaactagttaattggaagttaacggtactatttatactaaaagagtaagaccctcatcaatagatggagacatacagaaatagtcaaaccacatctacaaaatgccagtatcaggcgg

SEQ ID NO: 51716 - DNA, 120 bp, Homo sapiens
  misc_feature: 1799 for SV(W|O) and mtDNA
aaaatactcaaatgggcctgtccttgtagtataaactaatacaccagtcttgtaaaccggagatgaaaacctttttccaaggacaaatcagagaaaaagtctttaactccaccattagca

SEQ ID NO: 51717 - DNA, 120 bp, Homo sapiens
  misc_feature: 1798 for SV(W|O) and mtDNA
atctttcttttcaccgtaggtggcctgactggcattgtattagcaaactcatcactagacatcgtactacacgacacgtactacgttgtagcccacttccactatgtcctatcaatagga

SEQ ID NO: 51718 - DNA, 120 bp, Homo sapiens
  misc_feature: 1798 for SV(W|O) and mtDNA
cactattttgctacatagacgggtgtgctcttttagctgttcttaggtagctcgtctggtttcgggggtcttagctttggctctccttgcaaagttatttctagttaattcattatgcag

SEQ ID NO: 51719 - DNA, 120 bp, Homo sapiens
  misc_feature: 1796 for SV(W|O) and mtDNA
cccactattttgctacatagacgggtgtgctcttttagctgttcttaggtagctcgtctggtttcgggggtcttagctttggctctccttgcaaagttatttctagttaattcattatgc

SEQ ID NO: 51720 - DNA, 120 bp, Homo sapiens
  misc_feature: 1795 for SV(W|O) and mtDNA
gttgtcaaaactagttaattggaagttaacggtactatttatactaaaagagtaagaccctcatcaatagatggagacatacagaaatagtcaaaccacatctacaaaatgccagtatca

SEQ ID NO: 51721 - DNA, 120 bp, Homo sapiens
  misc_feature: 1795 for SV(W|O) and mtDNA
cttctgcataatgaattaactagaaataactttgcaaggagagccaaagctaagacccccgaaaccagacgagctacctaagaacagctaaaagagcacacccgtctatgtagcaaaata

SEQ ID NO: 51722 - DNA, 120 bp, Homo sapiens
  misc_feature: 1794 for SV(W|O) and mtDNA
tcaaaactagttaattggaagttaacggtactatttatactaaaagagtaagaccctcatcaatagatggagacatacagaaatagtcaaaccacatctacaaaatgccagtatcaggcg

SEQ ID NO: 51723 - DNA, 120 bp, Homo sapiens
  misc_feature: 1794 for SV(W|O) and mtDNA
tagtataaactaatacaccagtcttgtaaaccggagatgaaaacctttttccaaggacaaatcagagaaaaagtctttaactccaccattagcacccaaagctaagattctaatttaaac

SEQ ID NO: 51724 - DNA, 120 bp, Homo sapiens
  misc_feature: 1792 for SV(W|O) and mtDNA
tgtcaaaactagttaattggaagttaacggtactatttatactaaaagagtaagaccctcatcaatagatggagacatacagaaatagtcaaaccacatctacaaaatgccagtatcagg

SEQ ID NO: 51725 - DNA, 120 bp, Homo sapiens
  misc_feature: 1792 for SV(W|O) and mtDNA
aaatactcaaatgggcctgtccttgtagtataaactaatacaccagtcttgtaaaccggagatgaaaacctttttccaaggacaaatcagagaaaaagtctttaactccaccattagcac

SEQ ID NO: 51726 - DNA, 120 bp, Homo sapiens
  misc_feature: 1792 for SV(W|O) and mtDNA
gtcaaaactagttaattggaagttaacggtactatttatactaaaagagtaagaccctcatcaatagatggagacatacagaaatagtcaaaccacatctacaaaatgccagtatcaggc

SEQ ID NO: 51727 - DNA, 120 bp, Homo sapiens
  misc_feature: 1791 for SV(W|O) and mtDNA
ttaattggaagttaacggtactatttatactaaaagagtaagaccctcatcaatagatggagacatacagaaatagtcaaaccacatctacaaaatgccagtatcaggcggcggcttcga

SEQ ID NO: 51728 - DNA, 120 bp, Homo sapiens
  misc_feature: 1791 for SV(W|O) and mtDNA
taatgaattaactagaaataactttgcaaggagagccaaagctaagacccccgaaaccagacgagctacctaagaacagctaaaagagcacacccgtctatgtagcaaaatagtgggaag

SEQ ID NO: 51729 - DNA, 120 bp, Homo sapiens
  misc_feature: 1791 for SV(W|O) and mtDNA
aatactcaaatgggcctgtccttgtagtataaactaatacaccagtcttgtaaaccggagatgaaaacctttttccaaggacaaatcagagaaaaagtctttaactccaccattagcacc

SEQ ID NO: 51730 - DNA, 120 bp, Homo sapiens
  misc_feature: 1790 for SV(W|O) and mtDNA
tctgcataatgaattaactagaaataactttgcaaggagagccaaagctaagacccccgaaaccagacgagctacctaagaacagctaaaagagcacacccgtctatgtagcaaaatagt

SEQ ID NO: 51731 - DNA, 120 bp, Homo sapiens
  misc_feature: 1790 for SV(W|O) and mtDNA
catctttcttttcaccgtaggtggcctgactggcattgtattagcaaactcatcactagacatcgtactacacgacacgtactacgttgtagcccacttccactatgtcctatcaatagg

SEQ ID NO: 51732 - DNA, 120 bp, Homo sapiens
  misc_feature: 1787 for SV(W|O) and mtDNA
taattggaagttaacggtactatttatactaaaagagtaagaccctcatcaatagatggagacatacagaaatagtcaaaccacatctacaaaatgccagtatcaggcggcggcttcgaa

SEQ ID NO: 51733 - DNA, 120 bp, Homo sapiens
  misc_feature: 1785 for SV(W|O) and mtDNA
ccttctgcataatgaattaactagaaataactttgcaaggagagccaaagctaagacccccgaaaccagacgagctacctaagaacagctaaaagagcacacccgtctatgtagcaaaat

SEQ ID NO: 51734 - DNA, 120 bp, Homo sapiens
  misc_feature: 1784 for SV(W|O) and mtDNA
gttgattattaaaattaaggcgaagtttattactcttttttgaatgttgtcaaaactagttaattggaagttaacggtactatttatactaaaagagtaagaccctcatcaatagatgga

SEQ ID NO: 51735 - DNA, 120 bp, Homo sapiens
  misc_feature: 1784 for SV(W|O) and mtDNA
aatgttgtcaaaactagttaattggaagttaacggtactatttatactaaaagagtaagaccctcatcaatagatggagacatacagaaatagtcaaaccacatctacaaaatgccagta

SEQ ID NO: 51736 - DNA, 120 bp, Homo sapiens
  misc_feature: 1783 for SV(W|O) and mtDNA
aatgaattaactagaaataactttgcaaggagagccaaagctaagacccccgaaaccagacgagctacctaagaacagctaaaagagcacacccgtctatgtagcaaaatagtgggaaga

SEQ ID NO: 51737 - DNA, 120 bp, Homo sapiens
  misc_feature: 1783 for SV(W|O) and mtDNA
tcatctttcttttcaccgtaggtggcctgactggcattgtattagcaaactcatcactagacatcgtactacacgacacgtactacgttgtagcccacttccactatgtcctatcaatag

SEQ ID NO: 51738 - DNA, 120 bp, Homo sapiens
  misc_feature: 1782 for SV(W|O) and mtDNA
atgttgtcaaaactagttaattggaagttaacggtactatttatactaaaagagtaagaccctcatcaatagatggagacatacagaaatagtcaaaccacatctacaaaatgccagtat

SEQ ID NO: 51739 - DNA, 120 bp, Homo sapiens
  misc_feature: 1781 for SV(W|O) and mtDNA
ctttcttttcaccgtaggtggcctgactggcattgtattagcaaactcatcactagacatcgtactacacgacacgtactacgttgtagcccacttccactatgtcctatcaataggagc

SEQ ID NO: 51740 - DNA, 120 bp, Homo sapiens
  misc_feature: 1780 for SV(W|O) and mtDNA
ttcatctttcttttcaccgtaggtggcctgactggcattgtattagcaaactcatcactagacatcgtactacacgacacgtactacgttgtagcccacttccactatgtcctatcaata

SEQ ID NO: 51741 - DNA, 120 bp, Homo sapiens
  misc_feature: 1778 for SV(W|O) and mtDNA
tgttgattattaaaattaaggcgaagtttattactcttttttgaatgttgtcaaaactagttaattggaagttaacggtactatttatactaaaagagtaagaccctcatcaatagatgg

SEQ ID NO: 51742 - DNA, 120 bp, Homo sapiens
  misc_feature: 1778 for SV(W|O) and mtDNA
aacaaaatactcaaatgggcctgtccttgtagtataaactaatacaccagtcttgtaaaccggagatgaaaacctttttccaaggacaaatcagagaaaaagtctttaactccaccatta

SEQ ID NO: 51743 - DNA, 120 bp, Homo sapiens
  misc_feature: 1778 for SV(W|O) and mtDNA
attcatctttcttttcaccgtaggtggcctgactggcattgtattagcaaactcatcactagacatcgtactacacgacacgtactacgttgtagcccacttccactatgtcctatcaat

SEQ ID NO: 51744 - DNA, 120 bp, Homo sapiens
  misc_feature: 1777 for SV(W|O) and mtDNA
agtataaactaatacaccagtcttgtaaaccggagatgaaaacctttttccaaggacaaatcagagaaaaagtctttaactccaccattagcacccaaagctaagattctaatttaaact

SEQ ID NO: 51745 - DNA, 120 bp, Homo sapiens
  misc_feature: 1777 for SV(W|O) and mtDNA
aaacaaaatactcaaatgggcctgtccttgtagtataaactaatacaccagtcttgtaaaccggagatgaaaacctttttccaaggacaaatcagagaaaaagtctttaactccaccatt

SEQ ID NO: 51746 - DNA, 120 bp, Homo sapiens
  misc_feature: 1776 for SV(W|O) and mtDNA
tgttgtcaaaactagttaattggaagttaacggtactatttatactaaaagagtaagaccctcatcaatagatggagacatacagaaatagtcaaaccacatctacaaaatgccagtatc

SEQ ID NO: 51747 - DNA, 120 bp, Homo sapiens
  misc_feature: 1776 for SV(W|O) and mtDNA
tgattattaaaattaaggcgaagtttattactcttttttgaatgttgtcaaaactagttaattggaagttaacggtactatttatactaaaagagtaagaccctcatcaatagatggaga

SEQ ID NO: 51748 - DNA, 120 bp, Homo sapiens
  misc_feature: 1775 for SV(W|O) and mtDNA
ggatgaagcagatagtgaggaaagttgagccaataatgacgtgaagtccgtggaagcctgtggctacaaaaaatgttgagccgtagatgccgtcggaaatggtgaagggagactcgaagt

SEQ ID NO: 51749 - DNA, 120 bp, Homo sapiens
  misc_feature: 1774 for SV(W|O) and mtDNA
ttggaagttaacggtactatttatactaaaagagtaagaccctcatcaatagatggagacatacagaaatagtcaaaccacatctacaaaatgccagtatcaggcggcggcttcgaagcc

SEQ ID NO: 51750 - DNA, 120 bp, Homo sapiens
  misc_feature: 1773 for SV(W|O) and mtDNA
aattggaagttaacggtactatttatactaaaagagtaagaccctcatcaatagatggagacatacagaaatagtcaaaccacatctacaaaatgccagtatcaggcggcggcttcgaag

SEQ ID NO: 51751 - DNA, 120 bp, Homo sapiens
  misc_feature: 1772 for SV(W|O) and mtDNA
gatgaagcagatagtgaggaaagttgagccaataatgacgtgaagtccgtggaagcctgtggctacaaaaaatgttgagccgtagatgccgtcggaaatggtgaagggagactcgaagta

SEQ ID NO: 51752 - DNA, 120 bp, Homo sapiens
  misc_feature: 1771 for SV(W|O) and mtDNA
ccactattttgctacatagacgggtgtgctcttttagctgttcttaggtagctcgtctggtttcgggggtcttagctttggctctccttgcaaagttatttctagttaattcattatgca

SEQ ID NO: 51753 - DNA, 120 bp, Homo sapiens
  misc_feature: 1771 for SV(W|O) and mtDNA
tattaaaattaaggcgaagtttattactcttttttgaatgttgtcaaaactagttaattggaagttaacggtactatttatactaaaagagtaagaccctcatcaatagatggagacata

SEQ ID NO: 51754 - DNA, 120 bp, Homo sapiens
  misc_feature: 1771 for SV(W|O) and mtDNA
tataaactaatacaccagtcttgtaaaccggagatgaaaacctttttccaaggacaaatcagagaaaaagtctttaactccaccattagcacccaaagctaagattctaatttaaactat

SEQ ID NO: 51755 - DNA, 120 bp, Homo sapiens
  misc_feature: 1769 for SV(W|O) and mtDNA
aattaaggcgaagtttattactcttttttgaatgttgtcaaaactagttaattggaagttaacggtactatttatactaaaagagtaagaccctcatcaatagatggagacatacagaaa

SEQ ID NO: 51756 - DNA, 120 bp, Homo sapiens
  misc_feature: 1769 for SV(W|O) and mtDNA
gattcatctttcttttcaccgtaggtggcctgactggcattgtattagcaaactcatcactagacatcgtactacacgacacgtactacgttgtagcccacttccactatgtcctatcaa

SEQ ID NO: 51757 - DNA, 120 bp, Homo sapiens
  misc_feature: 1769 for SV(W|O) and mtDNA
ccctataccttctgcataatgaattaactagaaataactttgcaaggagagccaaagctaagacccccgaaaccagacgagctacctaagaacagctaaaagagcacacccgtctatgta

SEQ ID NO: 51758 - DNA, 120 bp, Homo sapiens
  misc_feature: 1767 for SV(W|O) and mtDNA
tgaatgttgtcaaaactagttaattggaagttaacggtactatttatactaaaagagtaagaccctcatcaatagatggagacatacagaaatagtcaaaccacatctacaaaatgccag

SEQ ID NO: 51759 - DNA, 120 bp, Homo sapiens
  misc_feature: 1767 for SV(W|O) and mtDNA
attggaagttaacggtactatttatactaaaagagtaagaccctcatcaatagatggagacatacagaaatagtcaaaccacatctacaaaatgccagtatcaggcggcggcttcgaagc

SEQ ID NO: 51760 - DNA, 120 bp, Homo sapiens
  misc_feature: 1767 for SV(W|O) and mtDNA
cggatgaagcagatagtgaggaaagttgagccaataatgacgtgaagtccgtggaagcctgtggctacaaaaaatgttgagccgtagatgccgtcggaaatggtgaagggagactcgaag

SEQ ID NO: 51761 - DNA, 120 bp, Homo sapiens
  misc_feature: 1767 for SV(W|O) and mtDNA
acaaaatactcaaatgggcctgtccttgtagtataaactaatacaccagtcttgtaaaccggagatgaaaacctttttccaaggacaaatcagagaaaaagtctttaactccaccattag

SEQ ID NO: 51762 - DNA, 120 bp, Homo sapiens
  misc_feature: 1766 for SV(W|O) and mtDNA
ttttgaatgttgtcaaaactagttaattggaagttaacggtactatttatactaaaagagtaagaccctcatcaatagatggagacatacagaaatagtcaaaccacatctacaaaatgc

SEQ ID NO: 51763 - DNA, 120 bp, Homo sapiens
  misc_feature: 1765 for SV(W|O) and mtDNA
agcagatagtgaggaaagttgagccaataatgacgtgaagtccgtggaagcctgtggctacaaaaaatgttgagccgtagatgccgtcggaaatggtgaagggagactcgaagtactctg

SEQ ID NO: 51764 - DNA, 120 bp, Homo sapiens
  misc_feature: 1763 for SV(W|O) and mtDNA
tttgaatgttgtcaaaactagttaattggaagttaacggtactatttatactaaaagagtaagaccctcatcaatagatggagacatacagaaatagtcaaaccacatctacaaaatgcc

SEQ ID NO: 51765 - DNA, 120 bp, Homo sapiens
  misc_feature: 1762 for SV(W|O) and mtDNA
tttcttttcaccgtaggtggcctgactggcattgtattagcaaactcatcactagacatcgtactacacgacacgtactacgttgtagcccacttccactatgtcctatcaataggagct

SEQ ID NO: 51766 - DNA, 120 bp, Homo sapiens
  misc_feature: 1762 for SV(W|O) and mtDNA
gcagatagtgaggaaagttgagccaataatgacgtgaagtccgtggaagcctgtggctacaaaaaatgttgagccgtagatgccgtcggaaatggtgaagggagactcgaagtactctga

SEQ ID NO: 51767 - DNA, 120 bp, Homo sapiens
  misc_feature: 1761 for SV(W|O) and mtDNA
accttctgcataatgaattaactagaaataactttgcaaggagagccaaagctaagacccccgaaaccagacgagctacctaagaacagctaaaagagcacacccgtctatgtagcaaaa

SEQ ID NO: 51768 - DNA, 120 bp, Homo sapiens
  misc_feature: 1761 for SV(W|O) and mtDNA
ttcggcgcatgagctggagtcctaggcacagctctaagcctccttattcgagccgagctgggccagccaggcaaccttctaggtaacgaccacatctacaacgttatcgtcacagcccat

SEQ ID NO: 51769 - DNA, 120 bp, Homo sapiens
  misc_feature: 1761 for SV(W|O) and mtDNA
gtataaactaatacaccagtcttgtaaaccggagatgaaaacctttttccaaggacaaatcagagaaaaagtctttaactccaccattagcacccaaagctaagattctaatttaaacta

SEQ ID NO: 51770 - DNA, 120 bp, Homo sapiens
  misc_feature: 1760 for SV(W|O) and mtDNA
gagggtgttgattattaaaattaaggcgaagtttattactcttttttgaatgttgtcaaaactagttaattggaagttaacggtactatttatactaaaagagtaagaccctcatcaata

SEQ ID NO: 51771 - DNA, 120 bp, Homo sapiens
  misc_feature: 1759 for SV(W|O) and mtDNA
tttttgaatgttgtcaaaactagttaattggaagttaacggtactatttatactaaaagagtaagaccctcatcaatagatggagacatacagaaatagtcaaaccacatctacaaaatg

SEQ ID NO: 51772 - DNA, 120 bp, Homo sapiens
  misc_feature: 1759 for SV(W|O) and mtDNA
tgaagcagatagtgaggaaagttgagccaataatgacgtgaagtccgtggaagcctgtggctacaaaaaatgttgagccgtagatgccgtcggaaatggtgaagggagactcgaagtact

SEQ ID NO: 51773 - DNA, 120 bp, Homo sapiens
  misc_feature: 1759 for SV(W|O) and mtDNA
tctttcatggggaagcagatttgggtaccacccaagtattgactcacccatcaacaaccgctatgtatttcgtacattactgccagccaccatgaatattgtacggtaccataaatactt

SEQ ID NO: 51774 - DNA, 120 bp, Homo sapiens
  misc_feature: 1759 for SV(W|O) and mtDNA
gtgttgattattaaaattaaggcgaagtttattactcttttttgaatgttgtcaaaactagttaattggaagttaacggtactatttatactaaaagagtaagaccctcatcaatagatg

SEQ ID NO: 51775 - DNA, 120 bp, Homo sapiens
  misc_feature: 1758 for SV(W|O) and mtDNA
taccttctgcataatgaattaactagaaataactttgcaaggagagccaaagctaagacccccgaaaccagacgagctacctaagaacagctaaaagagcacacccgtctatgtagcaaa

SEQ ID NO: 51776 - DNA, 120 bp, Homo sapiens
  misc_feature: 1758 for SV(W|O) and mtDNA
atgaagcagatagtgaggaaagttgagccaataatgacgtgaagtccgtggaagcctgtggctacaaaaaatgttgagccgtagatgccgtcggaaatggtgaagggagactcgaagtac

SEQ ID NO: 51777 - DNA, 120 bp, Homo sapiens
  misc_feature: 1758 for SV(W|O) and mtDNA
gaatgttgtcaaaactagttaattggaagttaacggtactatttatactaaaagagtaagaccctcatcaatagatggagacatacagaaatagtcaaaccacatctacaaaatgccagt

SEQ ID NO: 51778 - DNA, 120 bp, Homo sapiens
  misc_feature: 1758 for SV(W|O) and mtDNA
catcactttggcttcgaagccgccgcctgatactggcattttgtagatgtggtttgactatttctgtatgtctccatctattgatgagggtcttactcttttagtataaatagtaccgtt

SEQ ID NO: 51779 - DNA, 120 bp, Homo sapiens
  misc_feature: 1757 for SV(W|O) and mtDNA
aagcagatagtgaggaaagttgagccaataatgacgtgaagtccgtggaagcctgtggctacaaaaaatgttgagccgtagatgccgtcggaaatggtgaagggagactcgaagtactct

SEQ ID NO: 51780 - DNA, 120 bp, Homo sapiens
  misc_feature: 1756 for SV(W|O) and mtDNA
ttgaatgttgtcaaaactagttaattggaagttaacggtactatttatactaaaagagtaagaccctcatcaatagatggagacatacagaaatagtcaaaccacatctacaaaatgcca

SEQ ID NO: 51781 - DNA, 120 bp, Homo sapiens
  misc_feature: 1756 for SV(W|O) and mtDNA
aaaacaaaatactcaaatgggcctgtccttgtagtataaactaatacaccagtcttgtaaaccggagatgaaaacctttttccaaggacaaatcagagaaaaagtctttaactccaccat

SEQ ID NO: 51782 - DNA, 120 bp, Homo sapiens
  misc_feature: 1755 for SV(W|O) and mtDNA
aaattaaggcgaagtttattactcttttttgaatgttgtcaaaactagttaattggaagttaacggtactatttatactaaaagagtaagaccctcatcaatagatggagacatacagaa

SEQ ID NO: 51783 - DNA, 120 bp, Homo sapiens
  misc_feature: 1755 for SV(W|O) and mtDNA
ttattaaaattaaggcgaagtttattactcttttttgaatgttgtcaaaactagttaattggaagttaacggtactatttatactaaaagagtaagaccctcatcaatagatggagacat

SEQ ID NO: 51784 - DNA, 120 bp, Homo sapiens
  misc_feature: 1755 for SV(W|O) and mtDNA
agggtgttgattattaaaattaaggcgaagtttattactcttttttgaatgttgtcaaaactagttaattggaagttaacggtactatttatactaaaagagtaagaccctcatcaatag

SEQ ID NO: 51785 - DNA, 120 bp, Homo sapiens
  misc_feature: 1754 for SV(W|O) and mtDNA
aggagggtgttgattattaaaattaaggcgaagtttattactcttttttgaatgttgtcaaaactagttaattggaagttaacggtactatttatactaaaagagtaagaccctcatcaa

SEQ ID NO: 51786 - DNA, 120 bp, Homo sapiens
  misc_feature: 1753 for SV(W|O) and mtDNA
ttgattattaaaattaaggcgaagtttattactcttttttgaatgttgtcaaaactagttaattggaagttaacggtactatttatactaaaagagtaagaccctcatcaatagatggag

SEQ ID NO: 51787 - DNA, 120 bp, Homo sapiens
  misc_feature: 1753 for SV(W|O) and mtDNA
tataccttctgcataatgaattaactagaaataactttgcaaggagagccaaagctaagacccccgaaaccagacgagctacctaagaacagctaaaagagcacacccgtctatgtagca

SEQ ID NO: 51788 - DNA, 120 bp, Homo sapiens
  misc_feature: 1752 for SV(W|O) and mtDNA
aaaattaaggcgaagtttattactcttttttgaatgttgtcaaaactagttaattggaagttaacggtactatttatactaaaagagtaagaccctcatcaatagatggagacatacaga

SEQ ID NO: 51789 - DNA, 120 bp, Homo sapiens
  misc_feature: 1751 for SV(W|O) and mtDNA
tttcatggggaagcagatttgggtaccacccaagtattgactcacccatcaacaaccgctatgtatttcgtacattactgccagccaccatgaatattgtacggtaccataaatacttga

SEQ ID NO: 51790 - DNA, 120 bp, Homo sapiens
  misc_feature: 1751 for SV(W|O) and mtDNA
aagtttattactcttttttgaatgttgtcaaaactagttaattggaagttaacggtactatttatactaaaagagtaagaccctcatcaatagatggagacatacagaaatagtcaaacc

SEQ ID NO: 51791 - DNA, 120 bp, Homo sapiens
  misc_feature: 1751 for SV(W|O) and mtDNA
ctttcatggggaagcagatttgggtaccacccaagtattgactcacccatcaacaaccgctatgtatttcgtacattactgccagccaccatgaatattgtacggtaccataaatacttg

SEQ ID NO: 51792 - DNA, 120 bp, Homo sapiens
  misc_feature: 1751 for SV(W|O) and mtDNA
cagatagtgaggaaagttgagccaataatgacgtgaagtccgtggaagcctgtggctacaaaaaatgttgagccgtagatgccgtcggaaatggtgaagggagactcgaagtactctgag

SEQ ID NO: 51793 - DNA, 120 bp, Homo sapiens
  misc_feature: 1751 for SV(W|O) and mtDNA
cctataccttctgcataatgaattaactagaaataactttgcaaggagagccaaagctaagacccccgaaaccagacgagctacctaagaacagctaaaagagcacacccgtctatgtag

SEQ ID NO: 51794 - DNA, 120 bp, Homo sapiens
  misc_feature: 1750 for SV(W|O) and mtDNA
ggcggatgaagcagatagtgaggaaagttgagccaataatgacgtgaagtccgtggaagcctgtggctacaaaaaatgttgagccgtagatgccgtcggaaatggtgaagggagactcga

SEQ ID NO: 51795 - DNA, 120 bp, Homo sapiens
  misc_feature: 1750 for SV(W|O) and mtDNA
ataaactaatacaccagtcttgtaaaccggagatgaaaacctttttccaaggacaaatcagagaaaaagtctttaactccaccattagcacccaaagctaagattctaatttaaactatt

SEQ ID NO: 51796 - DNA, 120 bp, Homo sapiens
  misc_feature: 1749 for SV(W|O) and mtDNA
ttgaagcttagggagagctgggttgtttgggttgtggctcagtgtcagttcgagataataacttcttggtctaggcacatgaatattgttgtggggaagagactgataataaaggtggat

SEQ ID NO: 51797 - DNA, 120 bp, Homo sapiens
  misc_feature: 1749 for SV(W|O) and mtDNA
cctcagagtacttcgagtctcccttcaccatttccgacggcatctacggctcaacattttttgtagccacaggcttccacggacttcacgtcattattggctcaactttcctcactatct

SEQ ID NO: 51798 - DNA, 120 bp, Homo sapiens
  misc_feature: 1749 for SV(W|O) and mtDNA
cccctataccttctgcataatgaattaactagaaataactttgcaaggagagccaaagctaagacccccgaaaccagacgagctacctaagaacagctaaaagagcacacccgtctatgt

SEQ ID NO: 51799 - DNA, 120 bp, Homo sapiens
  misc_feature: 1749 for SV(W|O) and mtDNA
atgaattaactagaaataactttgcaaggagagccaaagctaagacccccgaaaccagacgagctacctaagaacagctaaaagagcacacccgtctatgtagcaaaatagtgggaagat

SEQ ID NO: 51800 - DNA, 120 bp, Homo sapiens
  misc_feature: 1748 for SV(W|O) and mtDNA
gcggatgaagcagatagtgaggaaagttgagccaataatgacgtgaagtccgtggaagcctgtggctacaaaaaatgttgagccgtagatgccgtcggaaatggtgaagggagactcgaa

SEQ ID NO: 51801 - DNA, 120 bp, Homo sapiens
  misc_feature: 1748 for SV(W|O) and mtDNA
gcctcagagtacttcgagtctcccttcaccatttccgacggcatctacggctcaacattttttgtagccacaggcttccacggacttcacgtcattattggctcaactttcctcactatc

SEQ ID NO: 51802 - DNA, 120 bp, Homo sapiens
  misc_feature: 1747 for SV(W|O) and mtDNA
ttttttgaatgttgtcaaaactagttaattggaagttaacggtactatttatactaaaagagtaagaccctcatcaatagatggagacatacagaaatagtcaaaccacatctacaaaat

SEQ ID NO: 51803 - DNA, 120 bp, Homo sapiens
  misc_feature: 1746 for SV(W|O) and mtDNA
ttaaaattaaggcgaagtttattactcttttttgaatgttgtcaaaactagttaattggaagttaacggtactatttatactaaaagagtaagaccctcatcaatagatggagacataca

SEQ ID NO: 51804 - DNA, 120 bp, Homo sapiens
  misc_feature: 1746 for SV(W|O) and mtDNA
tcggcgcatgagctggagtcctaggcacagctctaagcctccttattcgagccgagctgggccagccaggcaaccttctaggtaacgaccacatctacaacgttatcgtcacagcccatg

SEQ ID NO: 51805 - DNA, 120 bp, Homo sapiens
  misc_feature: 1745 for SV(W|O) and mtDNA
gaagcagatagtgaggaaagttgagccaataatgacgtgaagtccgtggaagcctgtggctacaaaaaatgttgagccgtagatgccgtcggaaatggtgaagggagactcgaagtactc

SEQ ID NO: 51806 - DNA, 120 bp, Homo sapiens
  misc_feature: 1744 for SV(W|O) and mtDNA
ataccttctgcataatgaattaactagaaataactttgcaaggagagccaaagctaagacccccgaaaccagacgagctacctaagaacagctaaaagagcacacccgtctatgtagcaa

SEQ ID NO: 51807 - DNA, 120 bp, Homo sapiens
  misc_feature: 1744 for SV(W|O) and mtDNA
taaaattaaggcgaagtttattactcttttttgaatgttgtcaaaactagttaattggaagttaacggtactatttatactaaaagagtaagaccctcatcaatagatggagacatacag

SEQ ID NO: 51808 - DNA, 120 bp, Homo sapiens
  misc_feature: 1743 for SV(W|O) and mtDNA
agcatgcctgtgttgggttgacagtgagggtaataatgacttgttggttgattgtagatattgggctgttaattgtcagttcagtgttttaatctgacgcaggcttatgcggaggagaat

SEQ ID NO: 51809 - DNA, 120 bp, Homo sapiens
  misc_feature: 1743 for SV(W|O) and mtDNA
aaactaatacaccagtcttgtaaaccggagatgaaaacctttttccaaggacaaatcagagaaaaagtctttaactccaccattagcacccaaagctaagattctaatttaaactattct

SEQ ID NO: 51810 - DNA, 120 bp, Homo sapiens
  misc_feature: 1741 for SV(W|O) and mtDNA
tttccttatgagcatgcctgtgttgggttgacagtgagggtaataatgacttgttggttgattgtagatattgggctgttaattgtcagttcagtgttttaatctgacgcaggcttatgc

SEQ ID NO: 51811 - DNA, 120 bp, Homo sapiens
  misc_feature: 1741 for SV(W|O) and mtDNA
ttactcttttttgaatgttgtcaaaactagttaattggaagttaacggtactatttatactaaaagagtaagaccctcatcaatagatggagacatacagaaatagtcaaaccacatcta

SEQ ID NO: 51812 - DNA, 120 bp, Homo sapiens
  misc_feature: 1741 for SV(W|O) and mtDNA
gattattaaaattaaggcgaagtttattactcttttttgaatgttgtcaaaactagttaattggaagttaacggtactatttatactaaaagagtaagaccctcatcaatagatggagac

SEQ ID NO: 51813 - DNA, 120 bp, Homo sapiens
  misc_feature: 1741 for SV(W|O) and mtDNA
ggtgttgattattaaaattaaggcgaagtttattactcttttttgaatgttgtcaaaactagttaattggaagttaacggtactatttatactaaaagagtaagaccctcatcaatagat

SEQ ID NO: 51814 - DNA, 120 bp, Homo sapiens
  misc_feature: 1740 for SV(W|O) and mtDNA
ctataccttctgcataatgaattaactagaaataactttgcaaggagagccaaagctaagacccccgaaaccagacgagctacctaagaacagctaaaagagcacacccgtctatgtagc

SEQ ID NO: 51815 - DNA, 120 bp, Homo sapiens
  misc_feature: 1739 for SV(W|O) and mtDNA
tttattactcttttttgaatgttgtcaaaactagttaattggaagttaacggtactatttatactaaaagagtaagaccctcatcaatagatggagacatacagaaatagtcaaaccaca

SEQ ID NO: 51816 - DNA, 120 bp, Homo sapiens
  misc_feature: 1738 for SV(W|O) and mtDNA
ttcttttcaccgtaggtggcctgactggcattgtattagcaaactcatcactagacatcgtactacacgacacgtactacgttgtagcccacttccactatgtcctatcaataggagctg

SEQ ID NO: 51817 - DNA, 120 bp, Homo sapiens
  misc_feature: 1737 for SV(W|O) and mtDNA
gggtgttgattattaaaattaaggcgaagtttattactcttttttgaatgttgtcaaaactagttaattggaagttaacggtactatttatactaaaagagtaagaccctcatcaataga

SEQ ID NO: 51818 - DNA, 120 bp, Homo sapiens
  misc_feature: 1737 for SV(W|O) and mtDNA
aaggcgaagtttattactcttttttgaatgttgtcaaaactagttaattggaagttaacggtactatttatactaaaagagtaagaccctcatcaatagatggagacatacagaaatagt

SEQ ID NO: 51819 - DNA, 120 bp, Homo sapiens
  misc_feature: 1736 for SV(W|O) and mtDNA
catggggaagcagatttgggtaccacccaagtattgactcacccatcaacaaccgctatgtatttcgtacattactgccagccaccatgaatattgtacggtaccataaatacttgacca

SEQ ID NO: 51820 - DNA, 120 bp, Homo sapiens
  misc_feature: 1736 for SV(W|O) and mtDNA
tgaagcttagggagagctgggttgtttgggttgtggctcagtgtcagttcgagataataacttcttggtctaggcacatgaatattgttgtggggaagagactgataataaaggtggatg

SEQ ID NO: 51821 - DNA, 120 bp, Homo sapiens
  misc_feature: 1736 for SV(W|O) and mtDNA
gaagtttattactcttttttgaatgttgtcaaaactagttaattggaagttaacggtactatttatactaaaagagtaagaccctcatcaatagatggagacatacagaaatagtcaaac

SEQ ID NO: 51822 - DNA, 120 bp, Homo sapiens
  misc_feature: 1736 for SV(W|O) and mtDNA
gcgatagtattattccttctaggcatagtagggaggatatgaggtgtgagcgatatactagtattcctagaagtgagatggtaaatgctagtataatatttatgtaaatgaggggcattt

SEQ ID NO: 51823 - DNA, 120 bp, Homo sapiens
  misc_feature: 1736 for SV(W|O) and mtDNA
acatcactttggcttcgaagccgccgcctgatactggcattttgtagatgtggtttgactatttctgtatgtctccatctattgatgagggtcttactcttttagtataaatagtaccgt

SEQ ID NO: 51824 - DNA, 120 bp, Homo sapiens
  misc_feature: 1735 for SV(W|O) and mtDNA
aaatattagttggcggatgaagcagatagtgaggaaagttgagccaataatgacgtgaagtccgtggaagcctgtggctacaaaaaatgttgagccgtagatgccgtcggaaatggtgaa

SEQ ID NO: 51825 - DNA, 120 bp, Homo sapiens
  misc_feature: 1735 for SV(W|O) and mtDNA
attattaaaattaaggcgaagtttattactcttttttgaatgttgtcaaaactagttaattggaagttaacggtactatttatactaaaagagtaagaccctcatcaatagatggagaca

SEQ ID NO: 51826 - DNA, 120 bp, Homo sapiens
  misc_feature: 1735 for SV(W|O) and mtDNA
gaaaacaaaatactcaaatgggcctgtccttgtagtataaactaatacaccagtcttgtaaaccggagatgaaaacctttttccaaggacaaatcagagaaaaagtctttaactccacca

SEQ ID NO: 51827 - DNA, 120 bp, Homo sapiens
  misc_feature: 1735 for SV(W|O) and mtDNA
ctttccttatgagcatgcctgtgttgggttgacagtgagggtaataatgacttgttggttgattgtagatattgggctgttaattgtcagttcagtgttttaatctgacgcaggcttatg

SEQ ID NO: 51828 - DNA, 120 bp, Homo sapiens
  misc_feature: 1734 for SV(W|O) and mtDNA
tcggcgaacatcagtgggggtgaggtaaaatggctgagtgaagcattggactgtaaatctaaagacaggggttaggcctctttttaccagctccgaggtgattttcatattgaattgcaa

SEQ ID NO: 51829 - DNA, 120 bp, Homo sapiens
  misc_feature: 1734 for SV(W|O) and mtDNA
ttctttcatggggaagcagatttgggtaccacccaagtattgactcacccatcaacaaccgctatgtatttcgtacattactgccagccaccatgaatattgtacggtaccataaatact

SEQ ID NO: 51830 - DNA, 120 bp, Homo sapiens
  misc_feature: 1734 for SV(W|O) and mtDNA
catgcctgtgttgggttgacagtgagggtaataatgacttgttggttgattgtagatattgggctgttaattgtcagttcagtgttttaatctgacgcaggcttatgcggaggagaatgt

SEQ ID NO: 51831 - DNA, 120 bp, Homo sapiens
  misc_feature: 1733 for SV(W|O) and mtDNA
attaaggcgaagtttattactcttttttgaatgttgtcaaaactagttaattggaagttaacggtactatttatactaaaagagtaagaccctcatcaatagatggagacatacagaaat

SEQ ID NO: 51832 - DNA, 120 bp, Homo sapiens
  misc_feature: 1732 for SV(W|O) and mtDNA
gtcggcgaacatcagtgggggtgaggtaaaatggctgagtgaagcattggactgtaaatctaaagacaggggttaggcctctttttaccagctccgaggtgattttcatattgaattgca

SEQ ID NO: 51833 - DNA, 120 bp, Homo sapiens
  misc_feature: 1732 for SV(W|O) and mtDNA
aactaatacaccagtcttgtaaaccggagatgaaaacctttttccaaggacaaatcagagaaaaagtctttaactccaccattagcacccaaagctaagattctaatttaaactattctc

SEQ ID NO: 51834 - DNA, 120 bp, Homo sapiens
  misc_feature: 1732 for SV(W|O) and mtDNA
cctttccttatgagcatgcctgtgttgggttgacagtgagggtaataatgacttgttggttgattgtagatattgggctgttaattgtcagttcagtgttttaatctgacgcaggcttat

SEQ ID NO: 51835 - DNA, 120 bp, Homo sapiens
  misc_feature: 1731 for SV(W|O) and mtDNA
tttgaagcttagggagagctgggttgtttgggttgtggctcagtgtcagttcgagataataacttcttggtctaggcacatgaatattgttgtggggaagagactgataataaaggtgga

SEQ ID NO: 51836 - DNA, 120 bp, Homo sapiens
  misc_feature: 1731 for SV(W|O) and mtDNA
attaaaattaaggcgaagtttattactcttttttgaatgttgtcaaaactagttaattggaagttaacggtactatttatactaaaagagtaagaccctcatcaatagatggagacatac

SEQ ID NO: 51837 - DNA, 120 bp, Homo sapiens
  misc_feature: 1730 for SV(W|O) and mtDNA
cggcgaacatcagtgggggtgaggtaaaatggctgagtgaagcattggactgtaaatctaaagacaggggttaggcctctttttaccagctccgaggtgattttcatattgaattgcaaa

SEQ ID NO: 51838 - DNA, 120 bp, Homo sapiens
  misc_feature: 1730 for SV(W|O) and mtDNA
cgaagtttattactcttttttgaatgttgtcaaaactagttaattggaagttaacggtactatttatactaaaagagtaagaccctcatcaatagatggagacatacagaaatagtcaaa

SEQ ID NO: 51839 - DNA, 120 bp, Homo sapiens
  misc_feature: 1730 for SV(W|O) and mtDNA
ttgttagcggtaactaagattagtatggtaattaggaagatgagtagatatttgaagaactgattaatgtttgggtctgagtttatatatcacagtgagaattctatgatggaccatgta

SEQ ID NO: 51840 - DNA, 120 bp, Homo sapiens
  misc_feature: 1730 for SV(W|O) and mtDNA
ctcttttttgaatgttgtcaaaactagttaattggaagttaacggtactatttatactaaaagagtaagaccctcatcaatagatggagacatacagaaatagtcaaaccacatctacaa

SEQ ID NO: 51841 - DNA, 120 bp, Homo sapiens
  misc_feature: 1730 for SV(W|O) and mtDNA
ttcatggggaagcagatttgggtaccacccaagtattgactcacccatcaacaaccgctatgtatttcgtacattactgccagccaccatgaatattgtacggtaccataaatacttgac

SEQ ID NO: 51842 - DNA, 120 bp, Homo sapiens
  misc_feature: 1730 for SV(W|O) and mtDNA
taacccctataccttctgcataatgaattaactagaaataactttgcaaggagagccaaagctaagacccccgaaaccagacgagctacctaagaacagctaaaagagcacacccgtcta

SEQ ID NO: 51843 - DNA, 120 bp, Homo sapiens
  misc_feature: 1730 for SV(W|O) and mtDNA
cggcgcatgagctggagtcctaggcacagctctaagcctccttattcgagccgagctgggccagccaggcaaccttctaggtaacgaccacatctacaacgttatcgtcacagcccatgc

SEQ ID NO: 51844 - DNA, 120 bp, Homo sapiens
  misc_feature: 1730 for SV(W|O) and mtDNA
gagtcctaggcacagctctaagcctccttattcgagccgagctgggccagccaggcaaccttctaggtaacgaccacatctacaacgttatcgtcacagcccatgcatttgtaataatct

SEQ ID NO: 51845 - DNA, 120 bp, Homo sapiens
  misc_feature: 1729 for SV(W|O) and mtDNA
attcggcgcatgagctggagtcctaggcacagctctaagcctccttattcgagccgagctgggccagccaggcaaccttctaggtaacgaccacatctacaacgttatcgtcacagccca

SEQ ID NO: 51846 - DNA, 120 bp, Homo sapiens
  misc_feature: 1729 for SV(W|O) and mtDNA
ccaaacatcactttggcttcgaagccgccgcctgatactggcattttgtagatgtggtttgactatttctgtatgtctccatctattgatgagggtcttactcttttagtataaatagta

SEQ ID NO: 51847 - DNA, 120 bp, Homo sapiens
  misc_feature: 1729 for SV(W|O) and mtDNA
taaggcgaagtttattactcttttttgaatgttgtcaaaactagttaattggaagttaacggtactatttatactaaaagagtaagaccctcatcaatagatggagacatacagaaatag

SEQ ID NO: 51848 - DNA, 120 bp, Homo sapiens
  misc_feature: 1729 for SV(W|O) and mtDNA
aatattagttggcggatgaagcagatagtgaggaaagttgagccaataatgacgtgaagtccgtggaagcctgtggctacaaaaaatgttgagccgtagatgccgtcggaaatggtgaag

SEQ ID NO: 51849 - DNA, 120 bp, Homo sapiens
  misc_feature: 1729 for SV(W|O) and mtDNA
attactaccactgacatgactttccaaaaaacacataatttgaatcaacacaaccacccacagcctaattattagcatcatccctctactattttttaaccaaatcaacaacaacctatt

SEQ ID NO: 51850 - DNA, 120 bp, Homo sapiens
  misc_feature: 1728 for SV(W|O) and mtDNA
tcttttttgaatgttgtcaaaactagttaattggaagttaacggtactatttatactaaaagagtaagaccctcatcaatagatggagacatacagaaatagtcaaaccacatctacaaa

SEQ ID NO: 51851 - DNA, 120 bp, Homo sapiens
  misc_feature: 1727 for SV(W|O) and mtDNA
tgttagcggtaactaagattagtatggtaattaggaagatgagtagatatttgaagaactgattaatgtttgggtctgagtttatatatcacagtgagaattctatgatggaccatgtaa

SEQ ID NO: 51852 - DNA, 120 bp, Homo sapiens
  misc_feature: 1727 for SV(W|O) and mtDNA
tcttttcaccgtaggtggcctgactggcattgtattagcaaactcatcactagacatcgtactacacgacacgtactacgttgtagcccacttccactatgtcctatcaataggagctgt

SEQ ID NO: 51853 - DNA, 120 bp, Homo sapiens
  misc_feature: 1727 for SV(W|O) and mtDNA
gtttgaagcttagggagagctgggttgtttgggttgtggctcagtgtcagttcgagataataacttcttggtctaggcacatgaatattgttgtggggaagagactgataataaaggtgg

SEQ ID NO: 51854 - DNA, 120 bp, Homo sapiens
  misc_feature: 1727 for SV(W|O) and mtDNA
aggcgaagtttattactcttttttgaatgttgtcaaaactagttaattggaagttaacggtactatttatactaaaagagtaagaccctcatcaatagatggagacatacagaaatagtc

SEQ ID NO: 51855 - DNA, 120 bp, Homo sapiens
  misc_feature: 1726 for SV(W|O) and mtDNA
tggagtcctaggcacagctctaagcctccttattcgagccgagctgggccagccaggcaaccttctaggtaacgaccacatctacaacgttatcgtcacagcccatgcatttgtaataat

SEQ ID NO: 51856 - DNA, 120 bp, Homo sapiens
  misc_feature: 1726 for SV(W|O) and mtDNA
acccctataccttctgcataatgaattaactagaaataactttgcaaggagagccaaagctaagacccccgaaaccagacgagctacctaagaacagctaaaagagcacacccgtctatg

SEQ ID NO: 51857 - DNA, 120 bp, Homo sapiens
  misc_feature: 1725 for SV(W|O) and mtDNA
agtttattactcttttttgaatgttgtcaaaactagttaattggaagttaacggtactatttatactaaaagagtaagaccctcatcaatagatggagacatacagaaatagtcaaacca

SEQ ID NO: 51858 - DNA, 120 bp, Homo sapiens
  misc_feature: 1725 for SV(W|O) and mtDNA
tactcttttttgaatgttgtcaaaactagttaattggaagttaacggtactatttatactaaaagagtaagaccctcatcaatagatggagacatacagaaatagtcaaaccacatctac

SEQ ID NO: 51859 - DNA, 120 bp, Homo sapiens
  misc_feature: 1725 for SV(W|O) and mtDNA
atgcctgtgttgggttgacagtgagggtaataatgacttgttggttgattgtagatattgggctgttaattgtcagttcagtgttttaatctgacgcaggcttatgcggaggagaatgtt

SEQ ID NO: 51860 - DNA, 120 bp, Homo sapiens
  misc_feature: 1724 for SV(W|O) and mtDNA
tggcggatgaagcagatagtgaggaaagttgagccaataatgacgtgaagtccgtggaagcctgtggctacaaaaaatgttgagccgtagatgccgtcggaaatggtgaagggagactcg

SEQ ID NO: 51861 - DNA, 120 bp, Homo sapiens
  misc_feature: 1724 for SV(W|O) and mtDNA
ggagtcctaggcacagctctaagcctccttattcgagccgagctgggccagccaggcaaccttctaggtaacgaccacatctacaacgttatcgtcacagcccatgcatttgtaataatc

SEQ ID NO: 51862 - DNA, 120 bp, Homo sapiens
  misc_feature: 1724 for SV(W|O) and mtDNA
agtttgaagcttagggagagctgggttgtttgggttgtggctcagtgtcagttcgagataataacttcttggtctaggcacatgaatattgttgtggggaagagactgataataaaggtg

SEQ ID NO: 51863 - DNA, 120 bp, Homo sapiens
  misc_feature: 1724 for SV(W|O) and mtDNA
attgttgtgaagtatagtacggatgctacttgtccaatgatggtaaaagggtagcttactggttgtcctccgattcaggttagaatgaggaggtctgcggctaggagtcaataaagtgat

SEQ ID NO: 51864 - DNA, 120 bp, Homo sapiens
  misc_feature: 1723 for SV(W|O) and mtDNA
ttatagaaatttaggttaaatacagaccaagagccttcaaagccctcagtaagttgcaatacttaatttctgtaacagctaaggactgcaaaaccccactctgcatcaactgaacgcaaa

SEQ ID NO: 51865 - DNA, 120 bp, Homo sapiens
  misc_feature: 1723 for SV(W|O) and mtDNA
ttccttatgagcatgcctgtgttgggttgacagtgagggtaataatgacttgttggttgattgtagatattgggctgttaattgtcagttcagtgttttaatctgacgcaggcttatgcg

SEQ ID NO: 51866 - DNA, 120 bp, Homo sapiens
  misc_feature: 1723 for SV(W|O) and mtDNA
ctttgtcaaagttaaattataggctaaatcctatatatcttaatggcacatgcagcgcaagtaggtctacaagacgctacttcccctatcatagaagagcttatcacctttcatgatcac

SEQ ID NO: 51867 - DNA, 120 bp, Homo sapiens
  misc_feature: 1723 for SV(W|O) and mtDNA
ggcgaacatcagtgggggtgaggtaaaatggctgagtgaagcattggactgtaaatctaaagacaggggttaggcctctttttaccagctccgaggtgattttcatattgaattgcaaat

SEQ ID NO: 51868 - DNA, 120 bp, Homo sapiens
  misc_feature: 1723 for SV(W|O) and mtDNA
attactcttttttgaatgttgtcaaaactagttaattggaagttaacggtactatttatactaaaagagtaagaccctcatcaatagatggagacatacagaaatagtcaaaccacatct

SEQ ID NO: 51869 - DNA, 120 bp, Homo sapiens
  misc_feature: 1723 for SV(W|O) and mtDNA
aacccctataccttctgcataatgaattaactagaaataactttgcaaggagagccaaagctaagacccccgaaaccagacgagctacctaagaacagctaaaagagcacacccgtctat

SEQ ID NO: 51870 - DNA, 120 bp, Homo sapiens
  misc_feature: 1722 for SV(W|O) and mtDNA
ctagtttgaagcttagggagagctgggttgtttgggttgtggctcagtgtcagttcgagataataacttcttggtctaggcacatgaatattgttgtggggaagagactgataataaagg

SEQ ID NO: 51871 - DNA, 120 bp, Homo sapiens
  misc_feature: 1721 for SV(W|O) and mtDNA
taggagggtgttgattattaaaattaaggcgaagtttattactcttttttgaatgttgtcaaaactagttaattggaagttaacggtactatttatactaaaagagtaagaccctcatca

SEQ ID NO: 51872 - DNA, 120 bp, Homo sapiens
  misc_feature: 1721 for SV(W|O) and mtDNA
taaactaatacaccagtcttgtaaaccggagatgaaaacctttttccaaggacaaatcagagaaaaagtctttaactccaccattagcacccaaagctaagattctaatttaaactattc

SEQ ID NO: 51873 - DNA, 120 bp, Homo sapiens
  misc_feature: 1720 for SV(W|O) and mtDNA
gagctggagtcctaggcacagctctaagcctccttattcgagccgagctgggccagccaggcaaccttctaggtaacgaccacatctacaacgttatcgtcacagcccatgcatttgtaa

SEQ ID NO: 51874 - DNA, 120 bp, Homo sapiens
  misc_feature: 1720 for SV(W|O) and mtDNA
gaagcttagggagagctgggttgtttgggttgtggctcagtgtcagttcgagataataacttcttggtctaggcacatgaatattgttgtggggaagagactgataataaaggtggatgc

SEQ ID NO: 51875 - DNA, 120 bp, Homo sapiens
  misc_feature: 1720 for SV(W|O) and mtDNA
gagaaatgaatgagcctacagatgataggatgtttcatgtggtgtatgcatcggggtagtccgagtaacgtcggggcattccggataggccgagaaagtgttgtgggaagaaagttagat

SEQ ID NO: 51876 - DNA, 120 bp, Homo sapiens
  misc_feature: 1720 for SV(W|O) and mtDNA
catgagctggagtcctaggcacagctctaagcctccttattcgagccgagctgggccagccaggcaaccttctaggtaacgaccacatctacaacgttatcgtcacagcccatgcatttg

SEQ ID NO: 51877 - DNA, 120 bp, Homo sapiens
  misc_feature: 1719 for SV(W|O) and mtDNA
ggcgaagtttattactcttttttgaatgttgtcaaaactagttaattggaagttaacggtactatttatactaaaagagtaagaccctcatcaatagatggagacatacagaaatagtca

SEQ ID NO: 51878 - DNA, 120 bp, Homo sapiens
  misc_feature: 1719 for SV(W|O) and mtDNA
agagaaatgaatgagcctacagatgataggatgtttcatgtggtgtatgcatcggggtagtccgagtaacgtcggggcattccggataggccgagaaagtgttgtgggaagaaagttaga

SEQ ID NO: 51879 - DNA, 120 bp, Homo sapiens
  misc_feature: 1719 for SV(W|O) and mtDNA
catccaaacatcactttggcttcgaagccgccgcctgatactggcattttgtagatgtggtttgactatttctgtatgtctccatctattgatgagggtcttactcttttagtataaata

SEQ ID NO: 51880 - DNA, 120 bp, Homo sapiens
  misc_feature: 1719 for SV(W|O) and mtDNA
atggggaagcagatttgggtaccacccaagtattgactcacccatcaacaaccgctatgtatttcgtacattactgccagccaccatgaatattgtacggtaccataaatacttgaccac

SEQ ID NO: 51881 - DNA, 120 bp, Homo sapiens
  misc_feature: 1718 for SV(W|O) and mtDNA
gattgttgtgaagtatagtacggatgctacttgtccaatgatggtaaaagggtagcttactggttgtcctccgattcaggttagaatgaggaggtctgcggctaggagtcaataaagtga

SEQ ID NO: 51882 - DNA, 120 bp, Homo sapiens
  misc_feature: 1717 for SV(W|O) and mtDNA
aacatcactttggcttcgaagccgccgcctgatactggcattttgtagatgtggtttgactatttctgtatgtctccatctattgatgagggtcttactcttttagtataaatagtaccg

SEQ ID NO: 51883 - DNA, 120 bp, Homo sapiens
  misc_feature: 1717 for SV(W|O) and mtDNA
agcgatagtattattccttctaggcatagtagggaggatatgaggtgtgagcgatatactagtattcctagaagtgagatggtaaatgctagtataatatttatgtaaatgaggggcatt

SEQ ID NO: 51884 - DNA, 120 bp, Homo sapiens
  misc_feature: 1716 for SV(W|O) and mtDNA
taggttgttagcggtaactaagattagtatggtaattaggaagatgagtagatatttgaagaactgattaatgtttgggtctgagtttatatatcacagtgagaattctatgatggacca

SEQ ID NO: 51885 - DNA, 120 bp, Homo sapiens
  misc_feature: 1716 for SV(W|O) and mtDNA
tattactcttttttgaatgttgtcaaaactagttaattggaagttaacggtactatttatactaaaagagtaagaccctcatcaatagatggagacatacagaaatagtcaaaccacatc

SEQ ID NO: 51886 - DNA, 120 bp, Homo sapiens
  misc_feature: 1716 for SV(W|O) and mtDNA
tatagaaatttaggttaaatacagaccaagagccttcaaagccctcagtaagttgcaatacttaatttctgtaacagctaaggactgcaaaaccccactctgcatcaactgaacgcaaat

SEQ ID NO: 51887 - DNA, 120 bp, Homo sapiens
  misc_feature: 1716 for SV(W|O) and mtDNA
agctggagtcctaggcacagctctaagcctccttattcgagccgagctgggccagccaggcaaccttctaggtaacgaccacatctacaacgttatcgtcacagcccatgcatttgtaat

SEQ ID NO: 51888 - DNA, 120 bp, Homo sapiens
  misc_feature: 1716 for SV(W|O) and mtDNA
aggttgttagcggtaactaagattagtatggtaattaggaagatgagtagatatttgaagaactgattaatgtttgggtctgagtttatatatcacagtgagaattctatgatggaccat

SEQ ID NO: 51889 - DNA, 120 bp, Homo sapiens
  misc_feature: 1715 for SV(W|O) and mtDNA
tgaattaactagaaataactttgcaaggagagccaaagctaagacccccgaaaccagacgagctacctaagaacagctaaaagagcacacccgtctatgtagcaaaatagtgggaagatt

SEQ ID NO: 51890 - DNA, 120 bp, Homo sapiens
  misc_feature: 1715 for SV(W|O) and mtDNA
gctggagtcctaggcacagctctaagcctccttattcgagccgagctgggccagccaggcaaccttctaggtaacgaccacatctacaacgttatcgtcacagcccatgcatttgtaata

SEQ ID NO: 51891 - DNA, 120 bp, Homo sapiens
  misc_feature: 1715 for SV(W|O) and mtDNA
aggactaacccctataccttctgcataatgaattaactagaaataactttgcaaggagagccaaagctaagacccccgaaaccagacgagctacctaagaacagctaaaagagcacaccc

SEQ ID NO: 51892 - DNA, 120 bp, Homo sapiens
  misc_feature: 1715 for SV(W|O) and mtDNA
atagaaatttaggttaaatacagaccaagagccttcaaagccctcagtaagttgcaatacttaatttctgtaacagctaaggactgcaaaaccccactctgcatcaactgaacgcaaatc

SEQ ID NO: 51893 - DNA, 120 bp, Homo sapiens
  misc_feature: 1715 for SV(W|O) and mtDNA
aggtggcctgactggcattgtattagcaaactcatcactagacatcgtactacacgacacgtactacgttgtagcccacttccactatgtcctatcaataggagctgtatttgccatcat

SEQ ID NO: 51894 - DNA, 120 bp, Homo sapiens
  misc_feature: 1714 for SV(W|O) and mtDNA
cttttttgaatgttgtcaaaactagttaattggaagttaacggtactatttatactaaaagagtaagaccctcatcaatagatggagacatacagaaatagtcaaaccacatctacaaaa

SEQ ID NO: 51895 - DNA, 120 bp, Homo sapiens
  misc_feature: 1714 for SV(W|O) and mtDNA
ttgggttgacagtgagggtaataatgacttgttggttgattgtagatattgggctgttaattgtcagttcagtgttttaatctgacgcaggcttatgcggaggagaatgttttcatgtta

SEQ ID NO: 51896 - DNA, 120 bp, Homo sapiens
  misc_feature: 1714 for SV(W|O) and mtDNA
cttatagaaatttaggttaaatacagaccaagagccttcaaagccctcagtaagttgcaatacttaatttctgtaacagctaaggactgcaaaaccccactctgcatcaactgaacgcaa

SEQ ID NO: 51897 - DNA, 120 bp, Homo sapiens
  misc_feature: 1714 for SV(W|O) and mtDNA
ttaaggcgaagtttattactcttttttgaatgttgtcaaaactagttaattggaagttaacggtactatttatactaaaagagtaagaccctcatcaatagatggagacatacagaaata

SEQ ID NO: 51898 - DNA, 120 bp, Homo sapiens
  misc_feature: 1714 for SV(W|O) and mtDNA
aacaaacccacaggtcctaaactaccaaacctgcattaaaaatttcggttggggcgacctcggagcagaacccaacctccgagcagtacatgctaagacttcaccagtcaaagcgaacta

SEQ ID NO: 51899 - DNA, 120 bp, Homo sapiens
  misc_feature: 1714 for SV(W|O) and mtDNA
gtttattactcttttttgaatgttgtcaaaactagttaattggaagttaacggtactatttatactaaaagagtaagaccctcatcaatagatggagacatacagaaatagtcaaaccac

SEQ ID NO: 51900 - DNA, 120 bp, Homo sapiens
  misc_feature: 1714 for SV(W|O) and mtDNA
caaacatcactttggcttcgaagccgccgcctgatactggcattttgtagatgtggtttgactatttctgtatgtctccatctattgatgagggtcttactcttttagtataaatagtac

SEQ ID NO: 51901 - DNA, 120 bp, Homo sapiens
  misc_feature: 1714 for SV(W|O) and mtDNA
ggttgttagcggtaactaagattagtatggtaattaggaagatgagtagatatttgaagaactgattaatgtttgggtctgagtttatatatcacagtgagaattctatgatggaccatg

SEQ ID NO: 51902 - DNA, 120 bp, Homo sapiens
  misc_feature: 1714 for SV(W|O) and mtDNA
ctaacccctataccttctgcataatgaattaactagaaataactttgcaaggagagccaaagctaagacccccgaaaccagacgagctacctaagaacagctaaaagagcacacccgtct

SEQ ID NO: 51903 - DNA, 120 bp, Homo sapiens
  misc_feature: 1714 for SV(W|O) and mtDNA
cagcgatagtattattccttctaggcatagtagggaggatatgaggtgtgagcgatatactagtattcctagaagtgagatggtaaatgctagtataatatttatgtaaatgaggggcat

SEQ ID NO: 51904 - DNA, 120 bp, Homo sapiens
  misc_feature: 1712 for SV(W|O) and mtDNA
tgcctgtgttgggttgacagtgagggtaataatgacttgttggttgattgtagatattgggctgttaattgtcagttcagtgttttaatctgacgcaggcttatgcggaggagaatgttt

SEQ ID NO: 51905 - DNA, 120 bp, Homo sapiens
  misc_feature: 1712 for SV(W|O) and mtDNA
tgagctggagtcctaggcacagctctaagcctccttattcgagccgagctgggccagccaggcaaccttctaggtaacgaccacatctacaacgttatcgtcacagcccatgcatttgta

SEQ ID NO: 51906 - DNA, 120 bp, Homo sapiens
  misc_feature: 1712 for SV(W|O) and mtDNA
tcatggggaagcagatttgggtaccacccaagtattgactcacccatcaacaaccgctatgtatttcgtacattactgccagccaccatgaatattgtacggtaccataaatacttgacc

SEQ ID NO: 51907 - DNA, 120 bp, Homo sapiens
  misc_feature: 1712 for SV(W|O) and mtDNA
cttttcaccgtaggtggcctgactggcattgtattagcaaactcatcactagacatcgtactacacgacacgtactacgttgtagcccacttccactatgtcctatcaataggagctgta

SEQ ID NO: 51908 - DNA, 120 bp, Homo sapiens
  misc_feature: 1712 for SV(W|O) and mtDNA
gttgttagcggtaactaagattagtatggtaattaggaagatgagtagatatttgaagaactgattaatgtttgggtctgagtttatatatcacagtgagaattctatgatggaccatgt

SEQ ID NO: 51909 - DNA, 120 bp, Homo sapiens
  misc_feature: 1712 for SV(W|O) and mtDNA
gaattaactagaaataactttgcaaggagagccaaagctaagacccccgaaaccagacgagctacctaagaacagctaaaagagcacacccgtctatgtagcaaaatagtgggaagattt

SEQ ID NO: 51910 - DNA, 120 bp, Homo sapiens
  misc_feature: 1712 for SV(W|O) and mtDNA
cgcatgagctggagtcctaggcacagctctaagcctccttattcgagccgagctgggccagccaggcaaccttctaggtaacgaccacatctacaacgttatcgtcacagcccatgcatt

SEQ ID NO: 51911 - DNA, 120 bp, Homo sapiens
  misc_feature: 1711 for SV(W|O) and mtDNA
tattagttggcggatgaagcagatagtgaggaaagttgagccaataatgacgtgaagtccgtggaagcctgtggctacaaaaaatgttgagccgtagatgccgtcggaaatggtgaaggg

SEQ ID NO: 51912 - DNA, 120 bp, Homo sapiens
  misc_feature: 1711 for SV(W|O) and mtDNA
tagtttgaagcttagggagagctgggttgtttgggttgtggctcagtgtcagttcgagataataacttcttggtctaggcacatgaatattgttgtggggaagagactgataataaaggt

SEQ ID NO: 51913 - DNA, 120 bp, Homo sapiens
  misc_feature: 1711 for SV(W|O) and mtDNA
ggagggtgttgattattaaaattaaggcgaagtttattactcttttttgaatgttgtcaaaactagttaattggaagttaacggtactatttatactaaaagagtaagaccctcatcaat

SEQ ID NO: 51914 - DNA, 120 bp, Homo sapiens
  misc_feature: 1711 for SV(W|O) and mtDNA
gcgaacatcagtgggggtgaggtaaaatggctgagtgaagcattggactgtaaatctaaagacaggggttaggcctctttttaccagctccgaggtgattttcatattgaattgcaaatt

SEQ ID NO: 51915 - DNA, 120 bp, Homo sapiens
  misc_feature: 1711 for SV(W|O) and mtDNA
agcctcagagtacttcgagtctcccttcaccatttccgacggcatctacggctcaacattttttgtagccacaggcttccacggacttcacgtcattattggctcaactttcctcactat

SEQ ID NO: 51916 - DNA, 120 bp, Homo sapiens
  misc_feature: 1710 for SV(W|O) and mtDNA
actttgtcaaagttaaattataggctaaatcctatatatcttaatggcacatgcagcgcaagtaggtctacaagacgctacttcccctatcatagaagagcttatcacctttcatgatca

SEQ ID NO: 51917 - DNA, 120 bp, Homo sapiens
  misc_feature: 1710 for SV(W|O) and mtDNA
ggtggcctgactggcattgtattagcaaactcatcactagacatcgtactacacgacacgtactacgttgtagcccacttccactatgtcctatcaataggagctgtatttgccatcata

SEQ ID NO: 51918 - DNA, 120 bp, Homo sapiens
  misc_feature: 1710 for SV(W|O) and mtDNA
gttgggttgacagtgagggtaataatgacttgttggttgattgtagatattgggctgttaattgtcagttcagtgttttaatctgacgcaggcttatgcggaggagaatgttttcatgtt

SEQ ID NO: 51919 - DNA, 120 bp, Homo sapiens
  misc_feature: 1710 for SV(W|O) and mtDNA
gcatgcctgtgttgggttgacagtgagggtaataatgacttgttggttgattgtagatattgggctgttaattgtcagttcagtgttttaatctgacgcaggcttatgcggaggagaatg

SEQ ID NO: 51920 - DNA, 120 bp, Homo sapiens
  misc_feature: 1710 for SV(W|O) and mtDNA
atgagctggagtcctaggcacagctctaagcctccttattcgagccgagctgggccagccaggcaaccttctaggtaacgaccacatctacaacgttatcgtcacagcccatgcatttgt

SEQ ID NO: 51921 - DNA, 120 bp, Homo sapiens
  misc_feature: 1709 for SV(W|O) and mtDNA
tgttgggttgacagtgagggtaataatgacttgttggttgattgtagatattgggctgttaattgtcagttcagtgttttaatctgacgcaggcttatgcggaggagaatgttttcatgt

SEQ ID NO: 51922 - DNA, 120 bp, Homo sapiens
  misc_feature: 1709 for SV(W|O) and mtDNA
cttagggagagctgggttgtttgggttgtggctcagtgtcagttcgagataataacttcttggtctaggcacatgaatattgttgtggggaagagactgataataaaggtggatgcgaca

SEQ ID NO: 51923 - DNA, 120 bp, Homo sapiens
  misc_feature: 1709 for SV(W|O) and mtDNA
atattagttggcggatgaagcagatagtgaggaaagttgagccaataatgacgtgaagtccgtggaagcctgtggctacaaaaaatgttgagccgtagatgccgtcggaaatggtgaagg

SEQ ID NO: 51924 - DNA, 120 bp, Homo sapiens
  misc_feature: 1709 for SV(W|O) and mtDNA
actaatacaccagtcttgtaaaccggagatgaaaacctttttccaaggacaaatcagagaaaaagtctttaactccaccattagcacccaaagctaagattctaatttaaactattctct

SEQ ID NO: 51925 - DNA, 120 bp, Homo sapiens
  misc_feature: 1707 for SV(W|O) and mtDNA
tttaacctttccttatgagcatgcctgtgttgggttgacagtgagggtaataatgacttgttggttgattgtagatattgggctgttaattgtcagttcagtgttttaatctgacgcagg

SEQ ID NO: 51926 - DNA, 120 bp, Homo sapiens
  misc_feature: 1707 for SV(W|O) and mtDNA
ttattactcttttttgaatgttgtcaaaactagttaattggaagttaacggtactatttatactaaaagagtaagaccctcatcaatagatggagacatacagaaatagtcaaaccacat

SEQ ID NO: 51927 - DNA, 120 bp, Homo sapiens
  misc_feature: 1707 for SV(W|O) and mtDNA
tcttatagaaatttaggttaaatacagaccaagagccttcaaagccctcagtaagttgcaatacttaatttctgtaacagctaaggactgcaaaaccccactctgcatcaactgaacgca

SEQ ID NO: 51928 - DNA, 120 bp, Homo sapiens
  misc_feature: 1707 for SV(W|O) and mtDNA
attagttggcggatgaagcagatagtgaggaaagttgagccaataatgacgtgaagtccgtggaagcctgtggctacaaaaaatgttgagccgtagatgccgtcggaaatggtgaaggga

SEQ ID NO: 51929 - DNA, 120 bp, Homo sapiens
  misc_feature: 1707 for SV(W|O) and mtDNA
tccaaacatcactttggcttcgaagccgccgcctgatactggcattttgtagatgtggtttgactatttctgtatgtctccatctattgatgagggtcttactcttttagtataaatagt

SEQ ID NO: 51930 - DNA, 120 bp, Homo sapiens
  misc_feature: 1707 for SV(W|O) and mtDNA
atattactaccactgacatgactttccaaaaaacacataatttgaatcaacacaaccacccacagcctaattattagcatcatccctctactattttttaaccaaatcaacaacaaccta

SEQ ID NO: 51931 - DNA, 120 bp, Homo sapiens
  misc_feature: 1707 for SV(W|O) and mtDNA
acctttccttatgagcatgcctgtgttgggttgacagtgagggtaataatgacttgttggttgattgtagatattgggctgttaattgtcagttcagtgttttaatctgacgcaggctta

SEQ ID NO: 51932 - DNA, 120 bp, Homo sapiens
  misc_feature: 1707 for SV(W|O) and mtDNA
aataggttgttagcggtaactaagattagtatggtaattaggaagatgagtagatatttgaagaactgattaatgtttgggtctgagtttatatatcacagtgagaattctatgatggac

SEQ ID NO: 51933 - DNA, 120 bp, Homo sapiens
  misc_feature: 1706 for SV(W|O) and mtDNA
tttttaacctttccttatgagcatgcctgtgttgggttgacagtgagggtaataatgacttgttggttgattgtagatattgggctgttaattgtcagttcagtgttttaatctgacgca

SEQ ID NO: 51934 - DNA, 120 bp, Homo sapiens
  misc_feature: 1706 for SV(W|O) and mtDNA
tttgtcaaagttaaattataggctaaatcctatatatcttaatggcacatgcagcgcaagtaggtctacaagacgctacttcccctatcatagaagagcttatcacctttcatgatcacg

SEQ ID NO: 51935 - DNA, 120 bp, Homo sapiens
  misc_feature: 1706 for SV(W|O) and mtDNA
ttactaccactgacatgactttccaaaaaacacataatttgaatcaacacaaccacccacagcctaattattagcatcatccctctactattttttaaccaaatcaacaacaacctattt

SEQ ID NO: 51936 - DNA, 120 bp, Homo sapiens
  misc_feature: 1706 for SV(W|O) and mtDNA
ggcgcatgagctggagtcctaggcacagctctaagcctccttattcgagccgagctgggccagccaggcaaccttctaggtaacgaccacatctacaacgttatcgtcacagcccatgca

SEQ ID NO: 51937 - DNA, 120 bp, Homo sapiens
  misc_feature: 1706 for SV(W|O) and mtDNA
tctagtttgaagcttagggagagctgggttgtttgggttgtggctcagtgtcagttcgagataataacttcttggtctaggcacatgaatattgttgtggggaagagactgataataaag

SEQ ID NO: 51938 - DNA, 120 bp, Homo sapiens
  misc_feature: 1706 for SV(W|O) and mtDNA
gaaatattagttggcggatgaagcagatagtgaggaaagttgagccaataatgacgtgaagtccgtggaagcctgtggctacaaaaaatgttgagccgtagatgccgtcggaaatggtga

SEQ ID NO: 51939 - DNA, 120 bp, Homo sapiens
  misc_feature: 1706 for SV(W|O) and mtDNA
ggggaagcagatttgggtaccacccaagtattgactcacccatcaacaaccgctatgtatttcgtacattactgccagccaccatgaatattgtacggtaccataaatacttgaccacct

SEQ ID NO: 51940 - DNA, 120 bp, Homo sapiens
  misc_feature: 1705 for SV(W|O) and mtDNA
tactaccactgacatgactttccaaaaaacacataatttgaatcaacacaaccacccacagcctaattattagcatcatccctctactattttttaaccaaatcaacaacaacctattta

SEQ ID NO: 51941 - DNA, 120 bp, Homo sapiens
  misc_feature: 1705 for SV(W|O) and mtDNA
ataggttgttagcggtaactaagattagtatggtaattaggaagatgagtagatatttgaagaactgattaatgtttgggtctgagtttatatatcacagtgagaattctatgatggacc

SEQ ID NO: 51942 - DNA, 120 bp, Homo sapiens
  misc_feature: 1705 for SV(W|O) and mtDNA
aacagcgatagtattattccttctaggcatagtagggaggatatgaggtgtgagcgatatactagtattcctagaagtgagatggtaaatgctagtataatatttatgtaaatgaggggc

SEQ ID NO: 51943 - DNA, 120 bp, Homo sapiens
  misc_feature: 1705 for SV(W|O) and mtDNA
gcatgagctggagtcctaggcacagctctaagcctccttattcgagccgagctgggccagccaggcaaccttctaggtaacgaccacatctacaacgttatcgtcacagcccatgcattt

SEQ ID NO: 51944 - DNA, 120 bp, Homo sapiens
  misc_feature: 1704 for SV(W|O) and mtDNA
ttttaacctttccttatgagcatgcctgtgttgggttgacagtgagggtaataatgacttgttggttgattgtagatattgggctgttaattgtcagttcagtgttttaatctgacgcag

SEQ ID NO: 51945 - DNA, 120 bp, Homo sapiens
  misc_feature: 1704 for SV(W|O) and mtDNA
gcgaagtttattactcttttttgaatgttgtcaaaactagttaattggaagttaacggtactatttatactaaaagagtaagaccctcatcaatagatggagacatacagaaatagtcaa

SEQ ID NO: 51946 - DNA, 120 bp, Homo sapiens
  misc_feature: 1704 for SV(W|O) and mtDNA
tggaataggttgttagcggtaactaagattagtatggtaattaggaagatgagtagatatttgaagaactgattaatgtttgggtctgagtttatatatcacagtgagaattctatgatg

SEQ ID NO: 51947 - DNA, 120 bp, Homo sapiens
  misc_feature: 1704 for SV(W|O) and mtDNA
gaataggttgttagcggtaactaagattagtatggtaattaggaagatgagtagatatttgaagaactgattaatgtttgggtctgagtttatatatcacagtgagaattctatgatgga

SEQ ID NO: 51948 - DNA, 120 bp, Homo sapiens
  misc_feature: 1704 for SV(W|O) and mtDNA
aaacatcactttggcttcgaagccgccgcctgatactggcattttgtagatgtggtttgactatttctgtatgtctccatctattgatgagggtcttactcttttagtataaatagtacc

SEQ ID NO: 51949 - DNA, 120 bp, Homo sapiens
  misc_feature: 1704 for SV(W|O) and mtDNA
agggagagctgggttgtttgggttgtggctcagtgtcagttcgagataataacttcttggtctaggcacatgaatattgttgtggggaagagactgataataaaggtggatgcgacaatg

SEQ ID NO: 51950 - DNA, 120 bp, Homo sapiens
  misc_feature: 1703 for SV(W|O) and mtDNA
ttagggagagctgggttgtttgggttgtggctcagtgtcagttcgagataataacttcttggtctaggcacatgaatattgttgtggggaagagactgataataaaggtggatgcgacaa

SEQ ID NO: 51951 - DNA, 120 bp, Homo sapiens
  misc_feature: 1703 for SV(W|O) and mtDNA
ttggcggatgaagcagatagtgaggaaagttgagccaataatgacgtgaagtccgtggaagcctgtggctacaaaaaatgttgagccgtagatgccgtcggaaatggtgaagggagactc

SEQ ID NO: 51952 - DNA, 120 bp, Homo sapiens
  misc_feature: 1703 for SV(W|O) and mtDNA
tagagaaatgaatgagcctacagatgataggatgtttcatgtggtgtatgcatcggggtagtccgagtaacgtcggggcattccggataggccgagaaagtgttgtgggaagaaagttag

SEQ ID NO: 51953 - DNA, 120 bp, Homo sapiens
  misc_feature: 1703 for SV(W|O) and mtDNA
gttagcggtaactaagattagtatggtaattaggaagatgagtagatatttgaagaactgattaatgtttgggtctgagtttatatatcacagtgagaattctatgatggaccatgtaac

SEQ ID NO: 51954 - DNA, 120 bp, Homo sapiens
  misc_feature: 1703 for SV(W|O) and mtDNA
gtagtctagtttgaagcttagggagagctgggttgtttgggttgtggctcagtgtcagttcgagataataacttcttggtctaggcacatgaatattgttgtggggaagagactgataat

SEQ ID NO: 51955 - DNA, 120 bp, Homo sapiens
  misc_feature: 1703 for SV(W|O) and mtDNA
ggaataggttgttagcggtaactaagattagtatggtaattaggaagatgagtagatatttgaagaactgattaatgtttgggtctgagtttatatatcacagtgagaattctatgatgg

SEQ ID NO: 51956 - DNA, 120 bp, Homo sapiens
  misc_feature: 1703 for SV(W|O) and mtDNA
actaacccctataccttctgcataatgaattaactagaaataactttgcaaggagagccaaagctaagacccccgaaaccagacgagctacctaagaacagctaaaagagcacacccgtc

SEQ ID NO: 51957 - DNA, 120 bp, Homo sapiens
  misc_feature: 1703 for SV(W|O) and mtDNA
aactggaataaaagctagcatgtttatttctaggcctactcaggtaaaaaatcagtgcgagcttagcgctgtgatgagtgtgcctgcaaagatggtagagtagatgacgggttgggccag

SEQ ID NO: 51958 - DNA, 120 bp, Homo sapiens
  misc_feature: 1703 for SV(W|O) and mtDNA
agaaatgaatgagcctacagatgataggatgtttcatgtggtgtatgcatcggggtagtccgagtaacgtcggggcattccggataggccgagaaagtgttgtgggaagaaagttagatt

SEQ ID NO: 51959 - DNA, 120 bp, Homo sapiens
  misc_feature: 1702 for SV(W|O) and mtDNA
aaggactaacccctataccttctgcataatgaattaactagaaataactttgcaaggagagccaaagctaagacccccgaaaccagacgagctacctaagaacagctaaaagagcacacc

SEQ ID NO: 51960 - DNA, 120 bp, Homo sapiens
  misc_feature: 1702 for SV(W|O) and mtDNA
gcgcatgagctggagtcctaggcacagctctaagcctccttattcgagccgagctgggccagccaggcaaccttctaggtaacgaccacatctacaacgttatcgtcacagcccatgcat

SEQ ID NO: 51961 - DNA, 120 bp, Homo sapiens
  misc_feature: 1702 for SV(W|O) and mtDNA
gaaatgaatgagcctacagatgataggatgtttcatgtggtgtatgcatcggggtagtccgagtaacgtcggggcattccggataggccgagaaagtgttgtgggaagaaagttagattt

SEQ ID NO: 51962 - DNA, 120 bp, Homo sapiens
  misc_feature: 1702 for SV(W|O) and mtDNA
acatccaaacatcactttggcttcgaagccgccgcctgatactggcattttgtagatgtggtttgactatttctgtatgtctccatctattgatgagggtcttactcttttagtataaat

SEQ ID NO: 51963 - DNA, 120 bp, Homo sapiens
  misc_feature: 1701 for SV(W|O) and mtDNA
ctggagtcctaggcacagctctaagcctccttattcgagccgagctgggccagccaggcaaccttctaggtaacgaccacatctacaacgttatcgtcacagcccatgcatttgtaataa

SEQ ID NO: 51964 - DNA, 120 bp, Homo sapiens
  misc_feature: 1701 for SV(W|O) and mtDNA
tggggaagcagatttgggtaccacccaagtattgactcacccatcaacaaccgctatgtatttcgtacattactgccagccaccatgaatattgtacggtaccataaatacttgaccacc

SEQ ID NO: 51965 - DNA, 120 bp, Homo sapiens
  misc_feature: 1701 for SV(W|O) and mtDNA
tggcctgactggcattgtattagcaaactcatcactagacatcgtactacacgacacgtactacgttgtagcccacttccactatgtcctatcaataggagctgtatttgccatcatagg

SEQ ID NO: 51966 - DNA, 120 bp, Homo sapiens
  misc_feature: 1701 for SV(W|O) and mtDNA
tattactaccactgacatgactttccaaaaaacacataatttgaatcaacacaaccacccacagcctaattattagcatcatccctctactattttttaaccaaatcaacaacaacctat

SEQ ID NO: 51967 - DNA, 120 bp, Homo sapiens
  misc_feature: 1701 for SV(W|O) and mtDNA
atccaaacatcactttggcttcgaagccgccgcctgatactggcattttgtagatgtggtttgactatttctgtatgtctccatctattgatgagggtcttactcttttagtataaatag

SEQ ID NO: 51968 - DNA, 120 bp, Homo sapiens
  misc_feature: 1700 for SV(W|O) and mtDNA
actcttttttgaatgttgtcaaaactagttaattggaagttaacggtactatttatactaaaagagtaagaccctcatcaatagatggagacatacagaaatagtcaaaccacatctaca

SEQ ID NO: 51969 - DNA, 120 bp, Homo sapiens
  misc_feature: 1700 for SV(W|O) and mtDNA
tgaaaacaaaatactcaaatgggcctgtccttgtagtataaactaatacaccagtcttgtaaaccggagatgaaaacctttttccaaggacaaatcagagaaaaagtctttaactccacc

SEQ ID NO: 51970 - DNA, 120 bp, Homo sapiens
  misc_feature: 1700 for SV(W|O) and mtDNA
ggtcggcgaacatcagtgggggtgaggtaaaatggctgagtgaagcattggactgtaaatctaaagacaggggttaggcctctttttaccagctccgaggtgattttcatattgaattgc

SEQ ID NO: 51971 - DNA, 120 bp, Homo sapiens
  misc_feature: 1700 for SV(W|O) and mtDNA
gcctgtgttgggttgacagtgagggtaataatgacttgttggttgattgtagatattgggctgttaattgtcagttcagtgttttaatctgacgcaggcttatgcggaggagaatgtttt

SEQ ID NO: 51972 - DNA, 120 bp, Homo sapiens
  misc_feature: 1699 for SV(W|O) and mtDNA
ttggaataggttgttagcggtaactaagattagtatggtaattaggaagatgagtagatatttgaagaactgattaatgtttgggtctgagtttatatatcacagtgagaattctatgat

SEQ ID NO: 51973 - DNA, 120 bp, Homo sapiens
  misc_feature: 1699 for SV(W|O) and mtDNA
acagcgatagtattattccttctaggcatagtagggaggatatgaggtgtgagcgatatactagtattcctagaagtgagatggtaaatgctagtataatatttatgtaaatgaggggca

SEQ ID NO: 51974 - DNA, 120 bp, Homo sapiens
  misc_feature: 1699 for SV(W|O) and mtDNA
tagtctagtttgaagcttagggagagctgggttgtttgggttgtggctcagtgtcagttcgagataataacttcttggtctaggcacatgaatattgttgtggggaagagactgataata

SEQ ID NO: 51975 - DNA, 120 bp, Homo sapiens
  misc_feature: 1699 for SV(W|O) and mtDNA
agtcctaggcacagctctaagcctccttattcgagccgagctgggccagccaggcaaccttctaggtaacgaccacatctacaacgttatcgtcacagcccatgcatttgtaataatctt

SEQ ID NO: 51976 - DNA, 120 bp, Homo sapiens
  misc_feature: 1698 for SV(W|O) and mtDNA
ttgttgtgaagtatagtacggatgctacttgtccaatgatggtaaaagggtagcttactggttgtcctccgattcaggttagaatgaggaggtctgcggctaggagtcaataaagtgatt

SEQ ID NO: 51977 - DNA, 120 bp, Homo sapiens
  misc_feature: 1698 for SV(W|O) and mtDNA
ctcttgtaaatatagtttaaccaaaacatcagattgtgaatctgacaacagaggcttacgaccccttatttaccgagaaagctcacaagaactgctaactcatgcccccatgtctaacaa

SEQ ID NO: 51978 - DNA, 120 bp, Homo sapiens
  misc_feature: 1698 for SV(W|O) and mtDNA
agtagtctagtttgaagcttagggagagctgggttgtttgggttgtggctcagtgtcagttcgagataataacttcttggtctaggcacatgaatattgttgtggggaagagactgataa

SEQ ID NO: 51979 - DNA, 120 bp, Homo sapiens
  misc_feature: 1698 for SV(W|O) and mtDNA
agcttagggagagctgggttgtttgggttgtggctcagtgtcagttcgagataataacttcttggtctaggcacatgaatattgttgtggggaagagactgataataaaggtggatgcga

SEQ ID NO: 51980 - DNA, 120 bp, Homo sapiens
  misc_feature: 1698 for SV(W|O) and mtDNA
aaacccacaggtcctaaactaccaaacctgcattaaaaatttcggttggggcgacctcggagcagaacccaacctccgagcagtacatgctaagacttcaccagtcaaagcgaactacta

SEQ ID NO: 51981 - DNA, 120 bp, Homo sapiens
  misc_feature: 1698 for SV(W|O) and mtDNA
taaatctaactttcttcccacaacactttctcggcctatccggaatgccccgacgttactcggactaccccgatgcatacaccacatgaaacatcctatcatctgtaggctcattcattt

SEQ ID NO: 51982 - DNA, 120 bp, Homo sapiens
  misc_feature: 1698 for SV(W|O) and mtDNA
ctaacaaacccacaggtcctaaactaccaaacctgcattaaaaatttcggttggggcgacctcggagcagaacccaacctccgagcagtacatgctaagacttcaccagtcaaagcgaac

SEQ ID NO: 51983 - DNA, 120 bp, Homo sapiens
  misc_feature: 1697 for SV(W|O) and mtDNA
ttagttggcggatgaagcagatagtgaggaaagttgagccaataatgacgtgaagtccgtggaagcctgtggctacaaaaaatgttgagccgtagatgccgtcggaaatggtgaagggag

SEQ ID NO: 51984 - DNA, 120 bp, Homo sapiens
  misc_feature: 1697 for SV(W|O) and mtDNA
tagttggcggatgaagcagatagtgaggaaagttgagccaataatgacgtgaagtccgtggaagcctgtggctacaaaaaatgttgagccgtagatgccgtcggaaatggtgaagggaga

SEQ ID NO: 51985 - DNA, 120 bp, Homo sapiens
  misc_feature: 1697 for SV(W|O) and mtDNA
taacaaacccacaggtcctaaactaccaaacctgcattaaaaatttcggttggggcgacctcggagcagaacccaacctccgagcagtacatgctaagacttcaccagtcaaagcgaact

SEQ ID NO: 51986 - DNA, 120 bp, Homo sapiens
  misc_feature: 1697 for SV(W|O) and mtDNA
gagagtagctataatgaacagcgatagtattattccttctaggcatagtagggaggatatgaggtgtgagcgatatactagtattcctagaagtgagatggtaaatgctagtataatatt

SEQ ID NO: 51987 - DNA, 120 bp, Homo sapiens
  misc_feature: 1697 for SV(W|O) and mtDNA
aaatatagtttaaccaaaacatcagattgtgaatctgacaacagaggcttacgaccccttatttaccgagaaagctcacaagaactgctaactcatgcccccatgtctaacaacatggct

SEQ ID NO: 51988 - DNA, 120 bp, Homo sapiens
  misc_feature: 1696 for SV(W|O) and mtDNA
tgtaaatatagtttaaccaaaacatcagattgtgaatctgacaacagaggcttacgaccccttatttaccgagaaagctcacaagaactgctaactcatgcccccatgtctaacaacatg

SEQ ID NO: 51989 - DNA, 120 bp, Homo sapiens
  misc_feature: 1695 for SV(W|O) and mtDNA
gcgtgatcatgaaaggtgataagctcttctatgataggggaagtagcgtcttgtagacctacttgcgctgcatgtgccattaagatatataggatttagcctataatttaactttgacaa

SEQ ID NO: 51990 - DNA, 120 bp, Homo sapiens
  misc_feature: 1695 for SV(W|O) and mtDNA
tagggagagctgggttgtttgggttgtggctcagtgtcagttcgagataataacttcttggtctaggcacatgaatattgttgtggggaagagactgataataaaggtggatgcgacaat

SEQ ID NO: 51991 - DNA, 120 bp, Homo sapiens
  misc_feature: 1695 for SV(W|O) and mtDNA
gttggcggatgaagcagatagtgaggaaagttgagccaataatgacgtgaagtccgtggaagcctgtggctacaaaaaatgttgagccgtagatgccgtcggaaatggtgaagggagact

SEQ ID NO: 51992 - DNA, 120 bp, Homo sapiens
  misc_feature: 1695 for SV(W|O) and mtDNA
gatagtattattccttctaggcatagtagggaggatatgaggtgtgagcgatatactagtattcctagaagtgagatggtaaatgctagtataatatttatgtaaatgaggggcatttgg

SEQ ID NO: 51993 - DNA, 120 bp, Homo sapiens
  misc_feature: 1694 for SV(W|O) and mtDNA
aattaactagaaataactttgcaaggagagccaaagctaagacccccgaaaccagacgagctacctaagaacagctaaaagagcacacccgtctatgtagcaaaatagtgggaagattta

SEQ ID NO: 51994 - DNA, 120 bp, Homo sapiens
  misc_feature: 1694 for SV(W|O) and mtDNA
gaggtgtgagcgatatactagtattcctagaagtgagatggtaaatgctagtataatatttatgtaaatgaggggcatttggtaaatatgattatcataatttaatgagtcgaaatcatt

SEQ ID NO: 51995 - DNA, 120 bp, Homo sapiens
  misc_feature: 1694 for SV(W|O) and mtDNA
aagcttagggagagctgggttgtttgggttgtggctcagtgtcagttcgagataataacttcttggtctaggcacatgaatattgttgtggggaagagactgataataaaggtggatgcg

SEQ ID NO: 51996 - DNA, 120 bp, Homo sapiens
  misc_feature: 1693 for SV(W|O) and mtDNA
agcggtaactaagattagtatggtaattaggaagatgagtagatatttgaagaactgattaatgtttgggtctgagtttatatatcacagtgagaattctatgatggaccatgtaacgaa

SEQ ID NO: 51997 - DNA, 120 bp, Homo sapiens
  misc_feature: 1693 for SV(W|O) and mtDNA
gggcgtgatcatgaaaggtgataagctcttctatgataggggaagtagcgtcttgtagacctacttgcgctgcatgtgccattaagatatataggatttagcctataatttaactttgac

SEQ ID NO: 51998 - DNA, 120 bp, Homo sapiens
  misc_feature: 1693 for SV(W|O) and mtDNA
gtagctataatgaacagcgatagtattattccttctaggcatagtagggaggatatgaggtgtgagcgatatactagtattcctagaagtgagatggtaaatgctagtataatatttatg

SEQ ID NO: 51999 - DNA, 120 bp, Homo sapiens
  misc_feature: 1693 for SV(W|O) and mtDNA
atgaacagcgatagtattattccttctaggcatagtagggaggatatgaggtgtgagcgatatactagtattcctagaagtgagatggtaaatgctagtataatatttatgtaaatgagg

SEQ ID NO: 52000 - DNA, 120 bp, Homo sapiens
  misc_feature: 1693 for SV(W|O) and mtDNA
catttcataactttgtcaaagttaaattataggctaaatcctatatatcttaatggcacatgcagcgcaagtaggtctacaagacgctacttcccctatcatagaagagcttatcacctt

SEQ ID NO: 52001 - DNA, 120 bp, Homo sapiens
  misc_feature: 1693 for SV(W|O) and mtDNA
agtagctataatgaacagcgatagtattattccttctaggcatagtagggaggatatgaggtgtgagcgatatactagtattcctagaagtgagatggtaaatgctagtataatatttat

SEQ ID NO: 52002 - DNA, 120 bp, Homo sapiens
  misc_feature: 1692 for SV(W|O) and mtDNA
cctaacaaacccacaggtcctaaactaccaaacctgcattaaaaatttcggttggggcgacctcggagcagaacccaacctccgagcagtacatgctaagacttcaccagtcaaagcgaa

SEQ ID NO: 52003 - DNA, 120 bp, Homo sapiens
  misc_feature: 1692 for SV(W|O) and mtDNA
ggagagctgggttgtttgggttgtggctcagtgtcagttcgagataataacttcttggtctaggcacatgaatattgttgtggggaagagactgataataaaggtggatgcgacaatgga

SEQ ID NO: 52004 - DNA, 120 bp, Homo sapiens
  misc_feature: 1692 for SV(W|O) and mtDNA
taacctttccttatgagcatgcctgtgttgggttgacagtgagggtaataatgacttgttggttgattgtagatattgggctgttaattgtcagttcagtgttttaatctgacgcaggct

SEQ ID NO: 52005 - DNA, 120 bp, Homo sapiens
  misc_feature: 1692 for SV(W|O) and mtDNA
gtaaatatgattatcataatttaatgagtcgaaatcattcgttttgtttaaactatataccaattcggttcagtctaatcctttttgtagtcactcataggccagacttagggctaggat

SEQ ID NO: 52006 - DNA, 120 bp, Homo sapiens
  misc_feature: 1692 for SV(W|O) and mtDNA
gctaggagggtgttgattattaaaattaaggcgaagtttattactcttttttgaatgttgtcaaaactagttaattggaagttaacggtactatttatactaaaagagtaagaccctcat

SEQ ID NO: 52007 - DNA, 120 bp, Homo sapiens
  misc_feature: 1692 for SV(W|O) and mtDNA
gaaaattattaatattactgctgttagagaaatgaatgagcctacagatgataggatgtttcatgtggtgtatgcatcggggtagtccgagtaacgtcggggcattccggataggccgag

SEQ ID NO: 52008 - DNA, 120 bp, Homo sapiens
  misc_feature: 1692 for SV(W|O) and mtDNA
atttcataactttgtcaaagttaaattataggctaaatcctatatatcttaatggcacatgcagcgcaagtaggtctacaagacgctacttcccctatcatagaagagcttatcaccttt

SEQ ID NO: 52009 - DNA, 120 bp, Homo sapiens
  misc_feature: 1692 for SV(W|O) and mtDNA
atagtattattccttctaggcatagtagggaggatatgaggtgtgagcgatatactagtattcctagaagtgagatggtaaatgctagtataatatttatgtaaatgaggggcatttggt

SEQ ID NO: 52010 - DNA, 120 bp, Homo sapiens
  misc_feature: 1691 for SV(W|O) and mtDNA
tttcaccgtaggtggcctgactggcattgtattagcaaactcatcactagacatcgtactacacgacacgtactacgttgtagcccacttccactatgtcctatcaataggagctgtatt

SEQ ID NO: 52011 - DNA, 120 bp, Homo sapiens
  misc_feature: 1691 for SV(W|O) and mtDNA
tgttagagaaatgaatgagcctacagatgataggatgtttcatgtggtgtatgcatcggggtagtccgagtaacgtcggggcattccggataggccgagaaagtgttgtgggaagaaagt

SEQ ID NO: 52012 - DNA, 120 bp, Homo sapiens
  misc_feature: 1691 for SV(W|O) and mtDNA
cctcttgtaaatatagtttaaccaaaacatcagattgtgaatctgacaacagaggcttacgaccccttatttaccgagaaagctcacaagaactgctaactcatgcccccatgtctaaca

SEQ ID NO: 52013 - DNA, 120 bp, Homo sapiens
  misc_feature: 1691 for SV(W|O) and mtDNA
tattggatcaattgagtatagtagttcgctttgactggtgaagtcttagcatgtactgctcggaggttgggttctgctccgaggtcgccccaaccgaaatttttaatgcaggtttggtag

SEQ ID NO: 52014 - DNA, 120 bp, Homo sapiens
  misc_feature: 1691 for SV(W|O) and mtDNA
gggaagcagatttgggtaccacccaagtattgactcacccatcaacaaccgctatgtatttcgtacattactgccagccaccatgaatattgtacggtaccataaatacttgaccacctg

SEQ ID NO: 52015 - DNA, 120 bp, Homo sapiens
  misc_feature: 1691 for SV(W|O) and mtDNA
attactgctgttagagaaatgaatgagcctacagatgataggatgtttcatgtggtgtatgcatcggggtagtccgagtaacgtcggggcattccggataggccgagaaagtgttgtggg

SEQ ID NO: 52016 - DNA, 120 bp, Homo sapiens
  misc_feature: 1690 for SV(W|O) and mtDNA
ttgaaaacaaaatactcaaatgggcctgtccttgtagtataaactaatacaccagtcttgtaaaccggagatgaaaacctttttccaaggacaaatcagagaaaaagtctttaactccac

SEQ ID NO: 52017 - DNA, 120 bp, Homo sapiens
  misc_feature: 1690 for SV(W|O) and mtDNA
ttagcggtaactaagattagtatggtaattaggaagatgagtagatatttgaagaactgattaatgtttgggtctgagtttatatatcacagtgagaattctatgatggaccatgtaacg

SEQ ID NO: 52018 - DNA, 120 bp, Homo sapiens
  misc_feature: 1690 for SV(W|O) and mtDNA
tgtgttgggttgacagtgagggtaataatgacttgttggttgattgtagatattgggctgttaattgtcagttcagtgttttaatctgacgcaggcttatgcggaggagaatgttttcat

SEQ ID NO: 52019 - DNA, 120 bp, Homo sapiens
  misc_feature: 1690 for SV(W|O) and mtDNA
ggcgtgatcatgaaaggtgataagctcttctatgataggggaagtagcgtcttgtagacctacttgcgctgcatgtgccattaagatatataggatttagcctataatttaactttgaca

SEQ ID NO: 52020 - DNA, 120 bp, Homo sapiens
  misc_feature: 1690 for SV(W|O) and mtDNA
tgggttgacagtgagggtaataatgacttgttggttgattgtagatattgggctgttaattgtcagttcagtgttttaatctgacgcaggcttatgcggaggagaatgttttcatgttac

SEQ ID NO: 52021 - DNA, 120 bp, Homo sapiens
  misc_feature: 1690 for SV(W|O) and mtDNA
tgaggtgtgagcgatatactagtattcctagaagtgagatggtaaatgctagtataatatttatgtaaatgaggggcatttggtaaatatgattatcataatttaatgagtcgaaatcat

SEQ ID NO: 52022 - DNA, 120 bp, Homo sapiens
  misc_feature: 1690 for SV(W|O) and mtDNA
acccacaggtcctaaactaccaaacctgcattaaaaatttcggttggggcgacctcggagcagaacccaacctccgagcagtacatgctaagacttcaccagtcaaagcgaactactata

SEQ ID NO: 52023 - DNA, 120 bp, Homo sapiens
  misc_feature: 1690 for SV(W|O) and mtDNA
gtgttgggttgacagtgagggtaataatgacttgttggttgattgtagatattgggctgttaattgtcagttcagtgttttaatctgacgcaggcttatgcggaggagaatgttttcatg

SEQ ID NO: 52024 - DNA, 120 bp, Homo sapiens
  misc_feature: 1690 for SV(W|O) and mtDNA
gcttagggagagctgggttgtttgggttgtggctcagtgtcagttcgagataataacttcttggtctaggcacatgaatattgttgtggggaagagactgataataaaggtggatgcgac

SEQ ID NO: 52025 - DNA, 120 bp, Homo sapiens
  misc_feature: 1690 for SV(W|O) and mtDNA
gactaacccctataccttctgcataatgaattaactagaaataactttgcaaggagagccaaagctaagacccccgaaaccagacgagctacctaagaacagctaaaagagcacacccgt

SEQ ID NO: 52026 - DNA, 120 bp, Homo sapiens
  misc_feature: 1689 for SV(W|O) and mtDNA
tgagagtagctataatgaacagcgatagtattattccttctaggcatagtagggaggatatgaggtgtgagcgatatactagtattcctagaagtgagatggtaaatgctagtataatat

SEQ ID NO: 52027 - DNA, 120 bp, Homo sapiens
  misc_feature: 1689 for SV(W|O) and mtDNA
gttggaataggttgttagcggtaactaagattagtatggtaattaggaagatgagtagatatttgaagaactgattaatgtttgggtctgagtttatatatcacagtgagaattctatga

SEQ ID NO: 52028 - DNA, 120 bp, Homo sapiens
  misc_feature: 1689 for SV(W|O) and mtDNA
tagtattattccttctaggcatagtagggaggatatgaggtgtgagcgatatactagtattcctagaagtgagatggtaaatgctagtataatatttatgtaaatgaggggcatttggta

SEQ ID NO: 52029 - DNA, 120 bp, Homo sapiens
  misc_feature: 1688 for SV(W|O) and mtDNA
ttttcaccgtaggtggcctgactggcattgtattagcaaactcatcactagacatcgtactacacgacacgtactacgttgtagcccacttccactatgtcctatcaataggagctgtat

SEQ ID NO: 52030 - DNA, 120 bp, Homo sapiens
  misc_feature: 1688 for SV(W|O) and mtDNA
ttaacctttccttatgagcatgcctgtgttgggttgacagtgagggtaataatgacttgttggttgattgtagatattgggctgttaattgtcagttcagtgttttaatctgacgcaggc

SEQ ID NO: 52031 - DNA, 120 bp, Homo sapiens
  misc_feature: 1688 for SV(W|O) and mtDNA
tagcggtaactaagattagtatggtaattaggaagatgagtagatatttgaagaactgattaatgtttgggtctgagtttatatatcacagtgagaattctatgatggaccatgtaacga

SEQ ID NO: 52032 - DNA, 120 bp, Homo sapiens
  misc_feature: 1688 for SV(W|O) and mtDNA
tattcggcgcatgagctggagtcctaggcacagctctaagcctccttattcgagccgagctgggccagccaggcaaccttctaggtaacgaccacatctacaacgttatcgtcacagccc

SEQ ID NO: 52033 - DNA, 120 bp, Homo sapiens
  misc_feature: 1688 for SV(W|O) and mtDNA
taaatatagtttaaccaaaacatcagattgtgaatctgacaacagaggcttacgaccccttatttaccgagaaagctcacaagaactgctaactcatgcccccatgtctaacaacatggc

SEQ ID NO: 52034 - DNA, 120 bp, Homo sapiens
  misc_feature: 1688 for SV(W|O) and mtDNA
agagtagctataatgaacagcgatagtattattccttctaggcatagtagggaggatatgaggtgtgagcgatatactagtattcctagaagtgagatggtaaatgctagtataatattt

SEQ ID NO: 52035 - DNA, 120 bp, Homo sapiens
  misc_feature: 1687 for SV(W|O) and mtDNA
ctataatgaacagcgatagtattattccttctaggcatagtagggaggatatgaggtgtgagcgatatactagtattcctagaagtgagatggtaaatgctagtataatatttatgtaaa

SEQ ID NO: 52036 - DNA, 120 bp, Homo sapiens
  misc_feature: 1687 for SV(W|O) and mtDNA
ggtaactaagattagtatggtaattaggaagatgagtagatatttgaagaactgattaatgtttgggtctgagtttatatatcacagtgagaattctatgatggaccatgtaacgaacaa

SEQ ID NO: 52037 - DNA, 120 bp, Homo sapiens
  misc_feature: 1687 for SV(W|O) and mtDNA
cggtaactaagattagtatggtaattaggaagatgagtagatatttgaagaactgattaatgtttgggtctgagtttatatatcacagtgagaattctatgatggaccatgtaacgaaca

SEQ ID NO: 52038 - DNA, 120 bp, Homo sapiens
  misc_feature: 1687 for SV(W|O) and mtDNA
agggcgtgatcatgaaaggtgataagctcttctatgataggggaagtagcgtcttgtagacctacttgcgctgcatgtgccattaagatatataggatttagcctataatttaactttga

SEQ ID NO: 52039 - DNA, 120 bp, Homo sapiens
  misc_feature: 1687 for SV(W|O) and mtDNA
ccatttcataactttgtcaaagttaaattataggctaaatcctatatatcttaatggcacatgcagcgcaagtaggtctacaagacgctacttcccctatcatagaagagcttatcacct

SEQ ID NO: 52040 - DNA, 120 bp, Homo sapiens
  misc_feature: 1686 for SV(W|O) and mtDNA
ttgtaaatatagtttaaccaaaacatcagattgtgaatctgacaacagaggcttacgaccccttatttaccgagaaagctcacaagaactgctaactcatgcccccatgtctaacaacat

SEQ ID NO: 52041 - DNA, 120 bp, Homo sapiens
  misc_feature: 1686 for SV(W|O) and mtDNA
tgctgttagagaaatgaatgagcctacagatgataggatgtttcatgtggtgtatgcatcggggtagtccgagtaacgtcggggcattccggataggccgagaaagtgttgtgggaagaa

SEQ ID NO: 52042 - DNA, 120 bp, Homo sapiens
  misc_feature: 1686 for SV(W|O) and mtDNA
ttattggatcaattgagtatagtagttcgctttgactggtgaagtcttagcatgtactgctcggaggttgggttctgctccgaggtcgccccaaccgaaatttttaatgcaggtttggta

SEQ ID NO: 52043 - DNA, 120 bp, Homo sapiens
  misc_feature: 1686 for SV(W|O) and mtDNA
agtattattccttctaggcatagtagggaggatatgaggtgtgagcgatatactagtattcctagaagtgagatggtaaatgctagtataatatttatgtaaatgaggggcatttggtaa

SEQ ID NO: 52044 - DNA, 120 bp, Homo sapiens
  misc_feature: 1686 for SV(W|O) and mtDNA
tggtaattaggaagatgagtagatatttgaagaactgattaatgtttgggtctgagtttatatatcacagtgagaattctatgatggaccatgtaacgaacaatgctacagggatgaata

SEQ ID NO: 52045 - DNA, 120 bp, Homo sapiens
  misc_feature: 1686 for SV(W|O) and mtDNA
tataatgaacagcgatagtattattccttctaggcatagtagggaggatatgaggtgtgagcgatatactagtattcctagaagtgagatggtaaatgctagtataatatttatgtaaat

SEQ ID NO: 52046 - DNA, 120 bp, Homo sapiens
  misc_feature: 1686 for SV(W|O) and mtDNA
tagctataatgaacagcgatagtattattccttctaggcatagtagggaggatatgaggtgtgagcgatatactagtattcctagaagtgagatggtaaatgctagtataatatttatgt

SEQ ID NO: 52047 - DNA, 120 bp, Homo sapiens
  misc_feature: 1686 for SV(W|O) and mtDNA
gcggtaactaagattagtatggtaattaggaagatgagtagatatttgaagaactgattaatgtttgggtctgagtttatatatcacagtgagaattctatgatggaccatgtaacgaac

SEQ ID NO: 52048 - DNA, 120 bp, Homo sapiens
  misc_feature: 1686 for SV(W|O) and mtDNA
gttagagaaatgaatgagcctacagatgataggatgtttcatgtggtgtatgcatcggggtagtccgagtaacgtcggggcattccggataggccgagaaagtgttgtgggaagaaagtt

SEQ ID NO: 52049 - DNA, 120 bp, Homo sapiens
  misc_feature: 1686 for SV(W|O) and mtDNA
gggagagctgggttgtttgggttgtggctcagtgtcagttcgagataataacttcttggtctaggcacatgaatattgttgtggggaagagactgataataaaggtggatgcgacaatgg

SEQ ID NO: 52050 - DNA, 120 bp, Homo sapiens
  misc_feature: 1686 for SV(W|O) and mtDNA
cgatagtattattccttctaggcatagtagggaggatatgaggtgtgagcgatatactagtattcctagaagtgagatggtaaatgctagtataatatttatgtaaatgaggggcatttg

SEQ ID NO: 52051 - DNA, 120 bp, Homo sapiens
  misc_feature: 1686 for SV(W|O) and mtDNA
agggtcttactcttttagtataaatagtaccgttaacttccaattaactagttttgacaacattcaaaaaagagtaataaacttcgccttaattttaataatcaacaccctcctagcctt

SEQ ID NO: 52052 - DNA, 120 bp, Homo sapiens
  misc_feature: 1686 for SV(W|O) and mtDNA
aacctttccttatgagcatgcctgtgttgggttgacagtgagggtaataatgacttgttggttgattgtagatattgggctgttaattgtcagttcagtgttttaatctgacgcaggctt

SEQ ID NO: 52053 - DNA, 120 bp, Homo sapiens
  misc_feature: 1685 for SV(W|O) and mtDNA
tacatccaaacatcactttggcttcgaagccgccgcctgatactggcattttgtagatgtggtttgactatttctgtatgtctccatctattgatgagggtcttactcttttagtataaa

SEQ ID NO: 52054 - DNA, 120 bp, Homo sapiens
  misc_feature: 1685 for SV(W|O) and mtDNA
tgttgtgaagtatagtacggatgctacttgtccaatgatggtaaaagggtagcttactggttgtcctccgattcaggttagaatgaggaggtctgcggctaggagtcaataaagtgattg

SEQ ID NO: 52055 - DNA, 120 bp, Homo sapiens
  misc_feature: 1685 for SV(W|O) and mtDNA
attgaaaacaaaatactcaaatgggcctgtccttgtagtataaactaatacaccagtcttgtaaaccggagatgaaaacctttttccaaggacaaatcagagaaaaagtctttaactcca

SEQ ID NO: 52056 - DNA, 120 bp, Homo sapiens
  misc_feature: 1685 for SV(W|O) and mtDNA
tgaacagcgatagtattattccttctaggcatagtagggaggatatgaggtgtgagcgatatactagtattcctagaagtgagatggtaaatgctagtataatatttatgtaaatgaggg

SEQ ID NO: 52057 - DNA, 120 bp, Homo sapiens
  misc_feature: 1685 for SV(W|O) and mtDNA
aaatatgattatcataatttaatgagtcgaaatcattcgttttgtttaaactatataccaattcggttcagtctaatcctttttgtagtcactcataggccagacttagggctaggatga

SEQ ID NO: 52058 - DNA, 120 bp, Homo sapiens
  misc_feature: 1685 for SV(W|O) and mtDNA
gttgacagtgagggtaataatgacttgttggttgattgtagatattgggctgttaattgtcagttcagtgttttaatctgacgcaggcttatgcggaggagaatgttttcatgttactta

SEQ ID NO: 52059 - DNA, 120 bp, Homo sapiens
  misc_feature: 1685 for SV(W|O) and mtDNA
taaatatgattatcataatttaatgagtcgaaatcattcgttttgtttaaactatataccaattcggttcagtctaatcctttttgtagtcactcataggccagacttagggctaggatg

SEQ ID NO: 52060 - DNA, 120 bp, Homo sapiens
  misc_feature: 1684 for SV(W|O) and mtDNA
ttagagaaatgaatgagcctacagatgataggatgtttcatgtggtgtatgcatcggggtagtccgagtaacgtcggggcattccggataggccgagaaagtgttgtgggaagaaagtta

SEQ ID NO: 52061 - DNA, 120 bp, Homo sapiens
  misc_feature: 1684 for SV(W|O) and mtDNA
agctaagacccccgaaaccagacgagctacctaagaacagctaaaagagcacacccgtctatgtagcaaaatagtgggaagatttataggtagaggcgacaaacctaccgagcctggtga

SEQ ID NO: 52062 - DNA, 120 bp, Homo sapiens
  misc_feature: 1684 for SV(W|O) and mtDNA
caaacccacaggtcctaaactaccaaacctgcattaaaaatttcggttggggcgacctcggagcagaacccaacctccgagcagtacatgctaagacttcaccagtcaaagcgaactact

SEQ ID NO: 52063 - DNA, 120 bp, Homo sapiens
  misc_feature: 1684 for SV(W|O) and mtDNA
aacccacaggtcctaaactaccaaacctgcattaaaaatttcggttggggcgacctcggagcagaacccaacctccgagcagtacatgctaagacttcaccagtcaaagcgaactactat

SEQ ID NO: 52064 - DNA, 120 bp, Homo sapiens
  misc_feature: 1683 for SV(W|O) and mtDNA
ttggatcaattgagtatagtagttcgctttgactggtgaagtcttagcatgtactgctcggaggttgggttctgctccgaggtcgccccaaccgaaatttttaatgcaggtttggtagtt

SEQ ID NO: 52065 - DNA, 120 bp, Homo sapiens
  misc_feature: 1683 for SV(W|O) and mtDNA
atgaggtgtgagcgatatactagtattcctagaagtgagatggtaaatgctagtataatatttatgtaaatgaggggcatttggtaaatatgattatcataatttaatgagtcgaaatca

SEQ ID NO: 52066 - DNA, 120 bp, Homo sapiens
  misc_feature: 1683 for SV(W|O) and mtDNA
tatcatattcatcggcgtaaatctaactttcttcccacaacactttctcggcctatccggaatgccccgacgttactcggactaccccgatgcatacaccacatgaaacatcctatcatc

SEQ ID NO: 52067 - DNA, 120 bp, Homo sapiens
  misc_feature: 1683 for SV(W|O) and mtDNA
tatattactaccactgacatgactttccaaaaaacacataatttgaatcaacacaaccacccacagcctaattattagcatcatccctctactattttttaaccaaatcaacaacaacct

SEQ ID NO: 52068 - DNA, 120 bp, Homo sapiens
  misc_feature: 1683 for SV(W|O) and mtDNA
gagtagctataatgaacagcgatagtattattccttctaggcatagtagggaggatatgaggtgtgagcgatatactagtattcctagaagtgagatggtaaatgctagtataatattta

SEQ ID NO: 52069 - DNA, 120 bp, Homo sapiens
  misc_feature: 1683 for SV(W|O) and mtDNA
gtaaatatagtttaaccaaaacatcagattgtgaatctgacaacagaggcttacgaccccttatttaccgagaaagctcacaagaactgctaactcatgcccccatgtctaacaacatgg

SEQ ID NO: 52070 - DNA, 120 bp, Homo sapiens
  misc_feature: 1683 for SV(W|O) and mtDNA
ctaggagggtgttgattattaaaattaaggcgaagtttattactcttttttgaatgttgtcaaaactagttaattggaagttaacggtactatttatactaaaagagtaagaccctcatc

SEQ ID NO: 52071 - DNA, 120 bp, Homo sapiens
  misc_feature: 1682 for SV(W|O) and mtDNA
gtctagtttgaagcttagggagagctgggttgtttgggttgtggctcagtgtcagttcgagataataacttcttggtctaggcacatgaatattgttgtggggaagagactgataataaa

SEQ ID NO: 52072 - DNA, 120 bp, Homo sapiens
  misc_feature: 1682 for SV(W|O) and mtDNA
tgaaatattagttggcggatgaagcagatagtgaggaaagttgagccaataatgacgtgaagtccgtggaagcctgtggctacaaaaaatgttgagccgtagatgccgtcggaaatggtg

SEQ ID NO: 52073 - DNA, 120 bp, Homo sapiens
  misc_feature: 1682 for SV(W|O) and mtDNA
actttttttaacctttccttatgagcatgcctgtgttgggttgacagtgagggtaataatgacttgttggttgattgtagatattgggctgttaattgtcagttcagtgttttaatctga

SEQ ID NO: 52074 - DNA, 120 bp, Homo sapiens
  misc_feature: 1682 for SV(W|O) and mtDNA
gtcctaggcacagctctaagcctccttattcgagccgagctgggccagccaggcaaccttctaggtaacgaccacatctacaacgttatcgtcacagcccatgcatttgtaataatcttc

SEQ ID NO: 52075 - DNA, 120 bp, Homo sapiens
  misc_feature: 1682 for SV(W|O) and mtDNA
ggattgttgtgaagtatagtacggatgctacttgtccaatgatggtaaaagggtagcttactggttgtcctccgattcaggttagaatgaggaggtctgcggctaggagtcaataaagtg

SEQ ID NO: 52076 - DNA, 120 bp, Homo sapiens
  misc_feature: 1681 for SV(W|O) and mtDNA
gctgttagagaaatgaatgagcctacagatgataggatgtttcatgtggtgtatgcatcggggtagtccgagtaacgtcggggcattccggataggccgagaaagtgttgtgggaagaaa

SEQ ID NO: 52077 - DNA, 120 bp, Homo sapiens
  misc_feature: 1681 for SV(W|O) and mtDNA
tgaagtatagtacggatgctacttgtccaatgatggtaaaagggtagcttactggttgtcctccgattcaggttagaatgaggaggtctgcggctaggagtcaataaagtgattggctta

SEQ ID NO: 52078 - DNA, 120 bp, Homo sapiens
  misc_feature: 1681 for SV(W|O) and mtDNA
tactttttttaacctttccttatgagcatgcctgtgttgggttgacagtgagggtaataatgacttgttggttgattgtagatattgggctgttaattgtcagttcagtgttttaatctg

SEQ ID NO: 52079 - DNA, 120 bp, Homo sapiens
  misc_feature: 1681 for SV(W|O) and mtDNA
agctataatgaacagcgatagtattattccttctaggcatagtagggaggatatgaggtgtgagcgatatactagtattcctagaagtgagatggtaaatgctagtataatatttatgta

SEQ ID NO: 52080 - DNA, 120 bp, Homo sapiens
  misc_feature: 1681 for SV(W|O) and mtDNA
aagcagatttgggtaccacccaagtattgactcacccatcaacaaccgctatgtatttcgtacattactgccagccaccatgaatattgtacggtaccataaatacttgaccacctgtag

SEQ ID NO: 52081 - DNA, 120 bp, Homo sapiens
  misc_feature: 1681 for SV(W|O) and mtDNA
aagccatgttgttagacatgggggcatgagttagcagttcttgtgagctttctcggtaaataaggggtcgtaagcctctgttgtcagattcacaatctgatgttttggttaaactatatt

SEQ ID NO: 52082 - DNA, 120 bp, Homo sapiens
  misc_feature: 1680 for SV(W|O) and mtDNA
tttacaagactggtgtattagtttatactacaaggacaggcccatttgagtattttgttttcaattagggagatagttggtattaggattaggattgttgtgaagtatagtacggatgct

SEQ ID NO: 52083 - DNA, 120 bp, Homo sapiens
  misc_feature: 1680 for SV(W|O) and mtDNA
ttagggttgtacggtagaactgctattattcatcctatgtgggtaattgaggagtatgctaagattttgcgtagctgggtttggtttaatccacctcaactgcctgctatgatggataag

SEQ ID NO: 52084 - DNA, 120 bp, Homo sapiens
  misc_feature: 1680 for SV(W|O) and mtDNA
ctgctgttagagaaatgaatgagcctacagatgataggatgtttcatgtggtgtatgcatcggggtagtccgagtaacgtcggggcattccggataggccgagaaagtgttgtgggaaga

SEQ ID NO: 52085 - DNA, 120 bp, Homo sapiens
  misc_feature: 1680 for SV(W|O) and mtDNA
agccgcagacctcctcattctaacctgaatcggaggacaaccagtaagctacccttttaccatcattggacaagtagcatccgtactatacttcacaacaatcctaatcctaataccaac

SEQ ID NO: 52086 - DNA, 120 bp, Homo sapiens
  misc_feature: 1680 for SV(W|O) and mtDNA
agcaaggactaacccctataccttctgcataatgaattaactagaaataactttgcaaggagagccaaagctaagacccccgaaaccagacgagctacctaagaacagctaaaagagcac

SEQ ID NO: 52087 - DNA, 120 bp, Homo sapiens
  misc_feature: 1680 for SV(W|O) and mtDNA
gaacagcgatagtattattccttctaggcatagtagggaggatatgaggtgtgagcgatatactagtattcctagaagtgagatggtaaatgctagtataatatttatgtaaatgagggg

SEQ ID NO: 52088 - DNA, 120 bp, Homo sapiens
  misc_feature: 1680 for SV(W|O) and mtDNA
actgctgttagagaaatgaatgagcctacagatgataggatgtttcatgtggtgtatgcatcggggtagtccgagtaacgtcggggcattccggataggccgagaaagtgttgtgggaag

SEQ ID NO: 52089 - DNA, 120 bp, Homo sapiens
  misc_feature: 1680 for SV(W|O) and mtDNA
atggtaattaggaagatgagtagatatttgaagaactgattaatgtttgggtctgagtttatatatcacagtgagaattctatgatggaccatgtaacgaacaatgctacagggatgaat

SEQ ID NO: 52090 - DNA, 120 bp, Homo sapiens
  misc_feature: 1679 for SV(W|O) and mtDNA
tgttagggttgtacggtagaactgctattattcatcctatgtgggtaattgaggagtatgctaagattttgcgtagctgggtttggtttaatccacctcaactgcctgctatgatggata

SEQ ID NO: 52091 - DNA, 120 bp, Homo sapiens
  misc_feature: 1679 for SV(W|O) and mtDNA
tatttcactttacatccaaacatcactttggcttcgaagccgccgcctgatactggcattttgtagatgtggtttgactatttctgtatgtctccatctattgatgagggtcttactctt

SEQ ID NO: 52092 - DNA, 120 bp, Homo sapiens
  misc_feature: 1678 for SV(W|O) and mtDNA
cttgtaaatatagtttaaccaaaacatcagattgtgaatctgacaacagaggcttacgaccccttatttaccgagaaagctcacaagaactgctaactcatgcccccatgtctaacaaca

SEQ ID NO: 52093 - DNA, 120 bp, Homo sapiens
  misc_feature: 1678 for SV(W|O) and mtDNA
tatgaggtgtgagcgatatactagtattcctagaagtgagatggtaaatgctagtataatatttatgtaaatgaggggcatttggtaaatatgattatcataatttaatgagtcgaaatc

SEQ ID NO: 52094 - DNA, 120 bp, Homo sapiens
  misc_feature: 1678 for SV(W|O) and mtDNA
gccgcagacctcctcattctaacctgaatcggaggacaaccagtaagctacccttttaccatcattggacaagtagcatccgtactatacttcacaacaatcctaatcctaataccaact

SEQ ID NO: 52095 - DNA, 120 bp, Homo sapiens
  misc_feature: 1678 for SV(W|O) and mtDNA
gagagctgggttgtttgggttgtggctcagtgtcagttcgagataataacttcttggtctaggcacatgaatattgttgtggggaagagactgataataaaggtggatgcgacaatggat

SEQ ID NO: 52096 - DNA, 120 bp, Homo sapiens
  misc_feature: 1678 for SV(W|O) and mtDNA
cctgtgttgggttgacagtgagggtaataatgacttgttggttgattgtagatattgggctgttaattgtcagttcagtgttttaatctgacgcaggcttatgcggaggagaatgttttc

SEQ ID NO: 52097 - DNA, 120 bp, Homo sapiens
  misc_feature: 1678 for SV(W|O) and mtDNA
ccactgacatgactttccaaaaaacacataatttgaatcaacacaaccacccacagcctaattattagcatcatccctctactattttttaaccaaatcaacaacaacctatttagctgt

SEQ ID NO: 52098 - DNA, 120 bp, Homo sapiens
  misc_feature: 1678 for SV(W|O) and mtDNA
attaggaagatgagtagatatttgaagaactgattaatgtttgggtctgagtttatatatcacagtgagaattctatgatggaccatgtaacgaacaatgctacagggatgaatattatg

SEQ ID NO: 52099 - DNA, 120 bp, Homo sapiens
  misc_feature: 1678 for SV(W|O) and mtDNA
cagacctcctcattctaacctgaatcggaggacaaccagtaagctacccttttaccatcattggacaagtagcatccgtactatacttcacaacaatcctaatcctaataccaactatct

SEQ ID NO: 52100 - DNA, 120 bp, Homo sapiens
  misc_feature: 1678 for SV(W|O) and mtDNA
atttggtaaatatgattatcataatttaatgagtcgaaatcattcgttttgtttaaactatataccaattcggttcagtctaatcctttttgtagtcactcataggccagacttagggct

SEQ ID NO: 52101 - DNA, 120 bp, Homo sapiens
  misc_feature: 1678 for SV(W|O) and mtDNA
atatgaggtgtgagcgatatactagtattcctagaagtgagatggtaaatgctagtataatatttatgtaaatgaggggcatttggtaaatatgattatcataatttaatgagtcgaaat

SEQ ID NO: 52102 - DNA, 120 bp, Homo sapiens
  misc_feature: 1677 for SV(W|O) and mtDNA
ttggtaaatatgattatcataatttaatgagtcgaaatcattcgttttgtttaaactatataccaattcggttcagtctaatcctttttgtagtcactcataggccagacttagggctag

SEQ ID NO: 52103 - DNA, 120 bp, Homo sapiens
  misc_feature: 1677 for SV(W|O) and mtDNA
agtctagtttgaagcttagggagagctgggttgtttgggttgtggctcagtgtcagttcgagataataacttcttggtctaggcacatgaatattgttgtggggaagagactgataataa

SEQ ID NO: 52104 - DNA, 120 bp, Homo sapiens
  misc_feature: 1677 for SV(W|O) and mtDNA
tgagggtcttactcttttagtataaatagtaccgttaacttccaattaactagttttgacaacattcaaaaaagagtaataaacttcgccttaattttaataatcaacaccctcctagcc

SEQ ID NO: 52105 - DNA, 120 bp, Homo sapiens
  misc_feature: 1677 for SV(W|O) and mtDNA
ggcctgactggcattgtattagcaaactcatcactagacatcgtactacacgacacgtactacgttgtagcccacttccactatgtcctatcaataggagctgtatttgccatcatagga

SEQ ID NO: 52106 - DNA, 120 bp, Homo sapiens
  misc_feature: 1677 for SV(W|O) and mtDNA
tatgttagggttgtacggtagaactgctattattcatcctatgtgggtaattgaggagtatgctaagattttgcgtagctgggtttggtttaatccacctcaactgcctgctatgatgga

SEQ ID NO: 52107 - DNA, 120 bp, Homo sapiens
  misc_feature: 1677 for SV(W|O) and mtDNA
tagtgaggaaagttgagccaataatgacgtgaagtccgtggaagcctgtggctacaaaaaatgttgagccgtagatgccgtcggaaatggtgaagggagactcgaagtactctgaggctt

SEQ ID NO: 52108 - DNA, 120 bp, Homo sapiens
  misc_feature: 1677 for SV(W|O) and mtDNA
atattcatcggcgtaaatctaactttcttcccacaacactttctcggcctatccggaatgccccgacgttactcggactaccccgatgcatacaccacatgaaacatcctatcatctgta

SEQ ID NO: 52109 - DNA, 120 bp, Homo sapiens
  misc_feature: 1677 for SV(W|O) and mtDNA
gtggcctgactggcattgtattagcaaactcatcactagacatcgtactacacgacacgtactacgttgtagcccacttccactatgtcctatcaataggagctgtatttgccatcatag

SEQ ID NO: 52110 - DNA, 120 bp, Homo sapiens
  misc_feature: 1677 for SV(W|O) and mtDNA
gtaaatctaactttcttcccacaacactttctcggcctatccggaatgccccgacgttactcggactaccccgatgcatacaccacatgaaacatcctatcatctgtaggctcattcatt

SEQ ID NO: 52111 - DNA, 120 bp, Homo sapiens
  misc_feature: 1677 for SV(W|O) and mtDNA
aatgaacagcgatagtattattccttctaggcatagtagggaggatatgaggtgtgagcgatatactagtattcctagaagtgagatggtaaatgctagtataatatttatgtaaatgag

SEQ ID NO: 52112 - DNA, 120 bp, Homo sapiens
  misc_feature: 1677 for SV(W|O) and mtDNA
aagtgaaatattagttggcggatgaagcagatagtgaggaaagttgagccaataatgacgtgaagtccgtggaagcctgtggctacaaaaaatgttgagccgtagatgccgtcggaaatg

SEQ ID NO: 52113 - DNA, 120 bp, Homo sapiens
  misc_feature: 1677 for SV(W|O) and mtDNA
attggatcaattgagtatagtagttcgctttgactggtgaagtcttagcatgtactgctcggaggttgggttctgctccgaggtcgccccaaccgaaatttttaatgcaggtttggtagt

SEQ ID NO: 52114 - DNA, 120 bp, Homo sapiens
  misc_feature: 1677 for SV(W|O) and mtDNA
atatttcactttacatccaaacatcactttggcttcgaagccgccgcctgatactggcattttgtagatgtggtttgactatttctgtatgtctccatctattgatgagggtcttactct

SEQ ID NO: 52115 - DNA, 120 bp, Homo sapiens
  misc_feature: 1676 for SV(W|O) and mtDNA
ttttttaacctttccttatgagcatgcctgtgttgggttgacagtgagggtaataatgacttgttggttgattgtagatattgggctgttaattgtcagttcagtgttttaatctgacgc

SEQ ID NO: 52116 - DNA, 120 bp, Homo sapiens
  misc_feature: 1676 for SV(W|O) and mtDNA
agctggttgtccaagatagaatcttagttcaactttaaatttgcccacagaaccctctaaatccccttgtaaatttaactgttagtccaaagaggaacagctctttggacactaggaaaa

SEQ ID NO: 52117 - DNA, 120 bp, Homo sapiens
  misc_feature: 1676 for SV(W|O) and mtDNA
ttattcggcgcatgagctggagtcctaggcacagctctaagcctccttattcgagccgagctgggccagccaggcaaccttctaggtaacgaccacatctacaacgttatcgtcacagcc

SEQ ID NO: 52118 - DNA, 120 bp, Homo sapiens
  misc_feature: 1676 for SV(W|O) and mtDNA
ttagtttatactacaaggacaggcccatttgagtattttgttttcaattagggagatagttggtattaggattaggattgttgtgaagtatagtacggatgctacttgtccaatgatggt

SEQ ID NO: 52119 - DNA, 120 bp, Homo sapiens
  misc_feature: 1676 for SV(W|O) and mtDNA
ctgtgttgggttgacagtgagggtaataatgacttgttggttgattgtagatattgggctgttaattgtcagttcagtgttttaatctgacgcaggcttatgcggaggagaatgttttca

SEQ ID NO: 52120 - DNA, 120 bp, Homo sapiens
  misc_feature: 1676 for SV(W|O) and mtDNA
tcttgtaaatatagtttaaccaaaacatcagattgtgaatctgacaacagaggcttacgaccccttatttaccgagaaagctcacaagaactgctaactcatgcccccatgtctaacaac

SEQ ID NO: 52121 - DNA, 120 bp, Homo sapiens
  misc_feature: 1676 for SV(W|O) and mtDNA
taactagaaataactttgcaaggagagccaaagctaagacccccgaaaccagacgagctacctaagaacagctaaaagagcacacccgtctatgtagcaaaatagtgggaagatttatag

SEQ ID NO: 52122 - DNA, 120 bp, Homo sapiens
  misc_feature: 1676 for SV(W|O) and mtDNA
ggttgacagtgagggtaataatgacttgttggttgattgtagatattgggctgttaattgtcagttcagtgttttaatctgacgcaggcttatgcggaggagaatgttttcatgttactt

SEQ ID NO: 52123 - DNA, 120 bp, Homo sapiens
  misc_feature: 1676 for SV(W|O) and mtDNA
ggcgtaaatctaactttcttcccacaacactttctcggcctatccggaatgccccgacgttactcggactaccccgatgcatacaccacatgaaacatcctatcatctgtaggctcattc

SEQ ID NO: 52124 - DNA, 120 bp, Homo sapiens
  misc_feature: 1676 for SV(W|O) and mtDNA
attagtttatactacaaggacaggcccatttgagtattttgttttcaattagggagatagttggtattaggattaggattgttgtgaagtatagtacggatgctacttgtccaatgatgg

SEQ ID NO: 52125 - DNA, 120 bp, Homo sapiens
  misc_feature: 1676 for SV(W|O) and mtDNA
agttggaataggttgttagcggtaactaagattagtatggtaattaggaagatgagtagatatttgaagaactgattaatgtttgggtctgagtttatatatcacagtgagaattctatg

SEQ ID NO: 52126 - DNA, 120 bp, Homo sapiens
  misc_feature: 1675 for SV(W|O) and mtDNA
tatactagtattcctagaagtgagatggtaaatgctagtataatatttatgtaaatgaggggcatttggtaaatatgattatcataatttaatgagtcgaaatcattcgttttgtttaaa

SEQ ID NO: 52127 - DNA, 120 bp, Homo sapiens
  misc_feature: 1675 for SV(W|O) and mtDNA
tatggtaattaggaagatgagtagatatttgaagaactgattaatgtttgggtctgagtttatatatcacagtgagaattctatgatggaccatgtaacgaacaatgctacagggatgaa

SEQ ID NO: 52128 - DNA, 120 bp, Homo sapiens
  misc_feature: 1675 for SV(W|O) and mtDNA
ttactttttttaacctttccttatgagcatgcctgtgttgggttgacagtgagggtaataatgacttgttggttgattgtagatattgggctgttaattgtcagttcagtgttttaatct

SEQ ID NO: 52129 - DNA, 120 bp, Homo sapiens
  misc_feature: 1675 for SV(W|O) and mtDNA
gctataatgaacagcgatagtattattccttctaggcatagtagggaggatatgaggtgtgagcgatatactagtattcctagaagtgagatggtaaatgctagtataatatttatgtaa

SEQ ID NO: 52130 - DNA, 120 bp, Homo sapiens
  misc_feature: 1675 for SV(W|O) and mtDNA
tgagggcgtgatcatgaaaggtgataagctcttctatgataggggaagtagcgtcttgtagacctacttgcgctgcatgtgccattaagatatataggatttagcctataatttaacttt

SEQ ID NO: 52131 - DNA, 120 bp, Homo sapiens
  misc_feature: 1675 for SV(W|O) and mtDNA
acagttggaataggttgttagcggtaactaagattagtatggtaattaggaagatgagtagatatttgaagaactgattaatgtttgggtctgagtttatatatcacagtgagaattcta

SEQ ID NO: 52132 - DNA, 120 bp, Homo sapiens
  misc_feature: 1675 for SV(W|O) and mtDNA
atgactttccaaaaaacacataatttgaatcaacacaaccacccacagcctaattattagcatcatccctctactattttttaaccaaatcaacaacaacctatttagctgttccccaac

SEQ ID NO: 52133 - DNA, 120 bp, Homo sapiens
  misc_feature: 1675 for SV(W|O) and mtDNA
gtgaagtatagtacggatgctacttgtccaatgatggtaaaagggtagcttactggttgtcctccgattcaggttagaatgaggaggtctgcggctaggagtcaataaagtgattggctt

SEQ ID NO: 52134 - DNA, 120 bp, Homo sapiens
  misc_feature: 1675 for SV(W|O) and mtDNA
acaaacccacaggtcctaaactaccaaacctgcattaaaaatttcggttggggcgacctcggagcagaacccaacctccgagcagtacatgctaagacttcaccagtcaaagcgaactac

SEQ ID NO: 52135 - DNA, 120 bp, Homo sapiens
  misc_feature: 1675 for SV(W|O) and mtDNA
agaaagccatgttgttagacatgggggcatgagttagcagttcttgtgagctttctcggtaaataaggggtcgtaagcctctgttgtcagattcacaatctgatgttttggttaaactat

SEQ ID NO: 52136 - DNA, 120 bp, Homo sapiens
  misc_feature: 1674 for SV(W|O) and mtDNA
ttgacagtgagggtaataatgacttgttggttgattgtagatattgggctgttaattgtcagttcagtgttttaatctgacgcaggcttatgcggaggagaatgttttcatgttacttat

SEQ ID NO: 52137 - DNA, 120 bp, Homo sapiens
  misc_feature: 1674 for SV(W|O) and mtDNA
gcgtaaatctaactttcttcccacaacactttctcggcctatccggaatgccccgacgttactcggactaccccgatgcatacaccacatgaaacatcctatcatctgtaggctcattca

SEQ ID NO: 52138 - DNA, 120 bp, Homo sapiens
  misc_feature: 1674 for SV(W|O) and mtDNA
taggaagatgagtagatatttgaagaactgattaatgtttgggtctgagtttatatatcacagtgagaattctatgatggaccatgtaacgaacaatgctacagggatgaatattatgga

SEQ ID NO: 52139 - DNA, 120 bp, Homo sapiens
  misc_feature: 1674 for SV(W|O) and mtDNA
tattcatcggcgtaaatctaactttcttcccacaacactttctcggcctatccggaatgccccgacgttactcggactaccccgatgcatacaccacatgaaacatcctatcatctgtag

SEQ ID NO: 52140 - DNA, 120 bp, Homo sapiens
  misc_feature: 1674 for SV(W|O) and mtDNA
ggactaacccctataccttctgcataatgaattaactagaaataactttgcaaggagagccaaagctaagacccccgaaaccagacgagctacctaagaacagctaaaagagcacacccg

SEQ ID NO: 52141 - DNA, 120 bp, Homo sapiens
  misc_feature: 1674 for SV(W|O) and mtDNA
gagggtcttactcttttagtataaatagtaccgttaacttccaattaactagttttgacaacattcaaaaaagagtaataaacttcgccttaattttaataatcaacaccctcctagcct

SEQ ID NO: 52142 - DNA, 120 bp, Homo sapiens
  misc_feature: 1674 for SV(W|O) and mtDNA
aggtgtgagcgatatactagtattcctagaagtgagatggtaaatgctagtataatatttatgtaaatgaggggcatttggtaaatatgattatcataatttaatgagtcgaaatcattc

SEQ ID NO: 52143 - DNA, 120 bp, Homo sapiens
  misc_feature: 1674 for SV(W|O) and mtDNA
atgaaaattattaatattactgctgttagagaaatgaatgagcctacagatgataggatgtttcatgtggtgtatgcatcggggtagtccgagtaacgtcggggcattccggataggccg

SEQ ID NO: 52144 - DNA, 120 bp, Homo sapiens
  misc_feature: 1674 for SV(W|O) and mtDNA
cagttggaataggttgttagcggtaactaagattagtatggtaattaggaagatgagtagatatttgaagaactgattaatgtttgggtctgagtttatatatcacagtgagaattctat

SEQ ID NO: 52145 - DNA, 120 bp, Homo sapiens
  misc_feature: 1674 for SV(W|O) and mtDNA
atgttagggttgtacggtagaactgctattattcatcctatgtgggtaattgaggagtatgctaagattttgcgtagctgggtttggtttaatccacctcaactgcctgctatgatggat

SEQ ID NO: 52146 - DNA, 120 bp, Homo sapiens
  misc_feature: 1674 for SV(W|O) and mtDNA
acaagactggtgtattagtttatactacaaggacaggcccatttgagtattttgttttcaattagggagatagttggtattaggattaggattgttgtgaagtatagtacggatgctact

SEQ ID NO: 52147 - DNA, 120 bp, Homo sapiens
  misc_feature: 1673 for SV(W|O) and mtDNA
caacggtcggcgaacatcagtgggggtgaggtaaaatggctgagtgaagcattggactgtaaatctaaagacaggggttaggcctctttttaccagctccgaggtgattttcatattgaa

SEQ ID NO: 52148 - DNA, 120 bp, Homo sapiens
  misc_feature: 1673 for SV(W|O) and mtDNA
ttaggaagatgagtagatatttgaagaactgattaatgtttgggtctgagtttatatatcacagtgagaattctatgatggaccatgtaacgaacaatgctacagggatgaatattatgg

SEQ ID NO: 52149 - DNA, 120 bp, Homo sapiens
  misc_feature: 1673 for SV(W|O) and mtDNA
tggtaaatatgattatcataatttaatgagtcgaaatcattcgttttgtttaaactatataccaattcggttcagtctaatcctttttgtagtcactcataggccagacttagggctagg

SEQ ID NO: 52150 - DNA, 120 bp, Homo sapiens
  misc_feature: 1673 for SV(W|O) and mtDNA
ggtaaatatgattatcataatttaatgagtcgaaatcattcgttttgtttaaactatataccaattcggttcagtctaatcctttttgtagtcactcataggccagacttagggctagga

SEQ ID NO: 52151 - DNA, 120 bp, Homo sapiens
  misc_feature: 1673 for SV(W|O) and mtDNA
taatgaacagcgatagtattattccttctaggcatagtagggaggatatgaggtgtgagcgatatactagtattcctagaagtgagatggtaaatgctagtataatatttatgtaaatga

SEQ ID NO: 52152 - DNA, 120 bp, Homo sapiens
  misc_feature: 1673 for SV(W|O) and mtDNA
tattagtttatactacaaggacaggcccatttgagtattttgttttcaattagggagatagttggtattaggattaggattgttgtgaagtatagtacggatgctacttgtccaatgatg

SEQ ID NO: 52153 - DNA, 120 bp, Homo sapiens
  misc_feature: 1673 for SV(W|O) and mtDNA
ccgcagacctcctcattctaacctgaatcggaggacaaccagtaagctacccttttaccatcattggacaagtagcatccgtactatacttcacaacaatcctaatcctaataccaacta

SEQ ID NO: 52154 - DNA, 120 bp, Homo sapiens
  misc_feature: 1673 for SV(W|O) and mtDNA
gaagcagatttgggtaccacccaagtattgactcacccatcaacaaccgctatgtatttcgtacattactgccagccaccatgaatattgtacggtaccataaatacttgaccacctgta

SEQ ID NO: 52155 - DNA, 120 bp, Homo sapiens
  misc_feature: 1673 for SV(W|O) and mtDNA
taactaagattagtatggtaattaggaagatgagtagatatttgaagaactgattaatgtttgggtctgagtttatatatcacagtgagaattctatgatggaccatgtaacgaacaatg

SEQ ID NO: 52156 - DNA, 120 bp, Homo sapiens
  misc_feature: 1673 for SV(W|O) and mtDNA
gttgtgaagtatagtacggatgctacttgtccaatgatggtaaaagggtagcttactggttgtcctccgattcaggttagaatgaggaggtctgcggctaggagtcaataaagtgattgg

SEQ ID NO: 52157 - DNA, 120 bp, Homo sapiens
  misc_feature: 1673 for SV(W|O) and mtDNA
gttattggatcaattgagtatagtagttcgctttgactggtgaagtcttagcatgtactgctcggaggttgggttctgctccgaggtcgccccaaccgaaatttttaatgcaggtttggt

SEQ ID NO: 52158 - DNA, 120 bp, Homo sapiens
  misc_feature: 1673 for SV(W|O) and mtDNA
agttggcggatgaagcagatagtgaggaaagttgagccaataatgacgtgaagtccgtggaagcctgtggctacaaaaaatgttgagccgtagatgccgtcggaaatggtgaagggagac

SEQ ID NO: 52159 - DNA, 120 bp, Homo sapiens
  misc_feature: 1673 for SV(W|O) and mtDNA
ctttttttaacctttccttatgagcatgcctgtgttgggttgacagtgagggtaataatgacttgttggttgattgtagatattgggctgttaattgtcagttcagtgttttaatctgac

SEQ ID NO: 52160 - DNA, 120 bp, Homo sapiens
  misc_feature: 1673 for SV(W|O) and mtDNA
gggttgacagtgagggtaataatgacttgttggttgattgtagatattgggctgttaattgtcagttcagtgttttaatctgacgcaggcttatgcggaggagaatgttttcatgttact

SEQ ID NO: 52161 - DNA, 120 bp, Homo sapiens
  misc_feature: 1673 for SV(W|O) and mtDNA
cctaggcacagctctaagcctccttattcgagccgagctgggccagccaggcaaccttctaggtaacgaccacatctacaacgttatcgtcacagcccatgcatttgtaataatcttctt

SEQ ID NO: 52162 - DNA, 120 bp, Homo sapiens
  misc_feature: 1673 for SV(W|O) and mtDNA
agtgaaatattagttggcggatgaagcagatagtgaggaaagttgagccaataatgacgtgaagtccgtggaagcctgtggctacaaaaaatgttgagccgtagatgccgtcggaaatgg

SEQ ID NO: 52163 - DNA, 120 bp, Homo sapiens
  misc_feature: 1673 for SV(W|O) and mtDNA
ataatgaacagcgatagtattattccttctaggcatagtagggaggatatgaggtgtgagcgatatactagtattcctagaagtgagatggtaaatgctagtataatatttatgtaaatg

SEQ ID NO: 52164 - DNA, 120 bp, Homo sapiens
  misc_feature: 1673 for SV(W|O) and mtDNA
atcatattcatcggcgtaaatctaactttcttcccacaacactttctcggcctatccggaatgccccgacgttactcggactaccccgatgcatacaccacatgaaacatcctatcatct

SEQ ID NO: 52165 - DNA, 120 bp, Homo sapiens
  misc_feature: 1672 for SV(W|O) and mtDNA
tttcactttacatccaaacatcactttggcttcgaagccgccgcctgatactggcattttgtagatgtggtttgactatttctgtatgtctccatctattgatgagggtcttactctttt

SEQ ID NO: 52166 - DNA, 120 bp, Homo sapiens
  misc_feature: 1672 for SV(W|O) and mtDNA
tagccgcagacctcctcattctaacctgaatcggaggacaaccagtaagctacccttttaccatcattggacaagtagcatccgtactatacttcacaacaatcctaatcctaataccaa

SEQ ID NO: 52167 - DNA, 120 bp, Homo sapiens
  misc_feature: 1672 for SV(W|O) and mtDNA
tggtgtattagtttatactacaaggacaggcccatttgagtattttgttttcaattagggagatagttggtattaggattaggattgttgtgaagtatagtacggatgctacttgtccaa

SEQ ID NO: 52168 - DNA, 120 bp, Homo sapiens
  misc_feature: 1672 for SV(W|O) and mtDNA
tgtgaagtatagtacggatgctacttgtccaatgatggtaaaagggtagcttactggttgtcctccgattcaggttagaatgaggaggtctgcggctaggagtcaataaagtgattggct

SEQ ID NO: 52169 - DNA, 120 bp, Homo sapiens
  misc_feature: 1672 for SV(W|O) and mtDNA
tgactggcattgtattagcaaactcatcactagacatcgtactacacgacacgtactacgttgtagcccacttccactatgtcctatcaataggagctgtatttgccatcataggaggct

SEQ ID NO: 52170 - DNA, 120 bp, Homo sapiens
  misc_feature: 1672 for SV(W|O) and mtDNA
tcctctttggactaacagttaaatttacaaggggatttagagggttctgtgggcaaatttaaagttgaactaagattctatcttggacaaccagctatcaccaggctcggtaggtttgtc

SEQ ID NO: 52171 - DNA, 120 bp, Homo sapiens
  misc_feature: 1672 for SV(W|O) and mtDNA
taattaggaagatgagtagatatttgaagaactgattaatgtttgggtctgagtttatatatcacagtgagaattctatgatggaccatgtaacgaacaatgctacagggatgaatatta

SEQ ID NO: 52172 - DNA, 120 bp, Homo sapiens
  misc_feature: 1672 for SV(W|O) and mtDNA
aggagagccaaagctaagacccccgaaaccagacgagctacctaagaacagctaaaagagcacacccgtctatgtagcaaaatagtgggaagatttataggtagaggcgacaaacctacc

SEQ ID NO: 52173 - DNA, 120 bp, Homo sapiens
  misc_feature: 1672 for SV(W|O) and mtDNA
aactttgtcaaagttaaattataggctaaatcctatatatcttaatggcacatgcagcgcaagtaggtctacaagacgctacttcccctatcatagaagagcttatcacctttcatgatc

SEQ ID NO: 52174 - DNA, 120 bp, Homo sapiens
  misc_feature: 1672 for SV(W|O) and mtDNA
aacggtcggcgaacatcagtgggggtgaggtaaaatggctgagtgaagcattggactgtaaatctaaagacaggggttaggcctctttttaccagctccgaggtgattttcatattgaat

SEQ ID NO: 52175 - DNA, 120 bp, Homo sapiens
  misc_feature: 1672 for SV(W|O) and mtDNA
aaagccatgttgttagacatgggggcatgagttagcagttcttgtgagctttctcggtaaataaggggtcgtaagcctctgttgtcagattcacaatctgatgttttggttaaactatat

SEQ ID NO: 52176 - DNA, 120 bp, Homo sapiens
  misc_feature: 1672 for SV(W|O) and mtDNA
aattaggaagatgagtagatatttgaagaactgattaatgtttgggtctgagtttatatatcacagtgagaattctatgatggaccatgtaacgaacaatgctacagggatgaatattat

SEQ ID NO: 52177 - DNA, 120 bp, Homo sapiens
  misc_feature: 1671 for SV(W|O) and mtDNA
ttcctctttggactaacagttaaatttacaaggggatttagagggttctgtgggcaaatttaaagttgaactaagattctatcttggacaaccagctatcaccaggctcggtaggtttgt

SEQ ID NO: 52178 - DNA, 120 bp, Homo sapiens
  misc_feature: 1671 for SV(W|O) and mtDNA
tggatcaattgagtatagtagttcgctttgactggtgaagtcttagcatgtactgctcggaggttgggttctgctccgaggtcgccccaaccgaaatttttaatgcaggtttggtagttt

SEQ ID NO: 52179 - DNA, 120 bp, Homo sapiens
  misc_feature: 1671 for SV(W|O) and mtDNA
ctggtgtattagtttatactacaaggacaggcccatttgagtattttgttttcaattagggagatagttggtattaggattaggattgttgtgaagtatagtacggatgctacttgtcca

SEQ ID NO: 52180 - DNA, 120 bp, Homo sapiens
  misc_feature: 1671 for SV(W|O) and mtDNA
aaaacgaatgatttcgactcattaaattatgataatcatatttaccaaatgcccctcatttacataaatattatactagcatttaccatctcacttctaggaatactagtatatcgctca

SEQ ID NO: 52181 - DNA, 120 bp, Homo sapiens
  misc_feature: 1671 for SV(W|O) and mtDNA
tgaaaattattaatattactgctgttagagaaatgaatgagcctacagatgataggatgtttcatgtggtgtatgcatcggggtagtccgagtaacgtcggggcattccggataggccga

SEQ ID NO: 52182 - DNA, 120 bp, Homo sapiens
  misc_feature: 1671 for SV(W|O) and mtDNA
taccactgacatgactttccaaaaaacacataatttgaatcaacacaaccacccacagcctaattattagcatcatccctctactattttttaaccaaatcaacaacaacctatttagct

SEQ ID NO: 52183 - DNA, 120 bp, Homo sapiens
  misc_feature: 1671 for SV(W|O) and mtDNA
caaggactaacccctataccttctgcataatgaattaactagaaataactttgcaaggagagccaaagctaagacccccgaaaccagacgagctacctaagaacagctaaaagagcacac

SEQ ID NO: 52184 - DNA, 120 bp, Homo sapiens
  misc_feature: 1671 for SV(W|O) and mtDNA
aaggagagccaaagctaagacccccgaaaccagacgagctacctaagaacagctaaaagagcacacccgtctatgtagcaaaatagtgggaagatttataggtagaggcgacaaacctac

SEQ ID NO: 52185 - DNA, 120 bp, Homo sapiens
  misc_feature: 1671 for SV(W|O) and mtDNA
gtaactaagattagtatggtaattaggaagatgagtagatatttgaagaactgattaatgtttgggtctgagtttatatatcacagtgagaattctatgatggaccatgtaacgaacaat

SEQ ID NO: 52186 - DNA, 120 bp, Homo sapiens
  misc_feature: 1671 for SV(W|O) and mtDNA
actaccactgacatgactttccaaaaaacacataatttgaatcaacacaaccacccacagcctaattattagcatcatccctctactattttttaaccaaatcaacaacaacctatttag

SEQ ID NO: 52187 - DNA, 120 bp, Homo sapiens
  misc_feature: 1671 for SV(W|O) and mtDNA
cggtcggcgaacatcagtgggggtgaggtaaaatggctgagtgaagcattggactgtaaatctaaagacaggggttaggcctctttttaccagctccgaggtgattttcatattgaattg

SEQ ID NO: 52188 - DNA, 120 bp, Homo sapiens
  misc_feature: 1671 for SV(W|O) and mtDNA
aagctaagacccccgaaaccagacgagctacctaagaacagctaaaagagcacacccgtctatgtagcaaaatagtgggaagatttataggtagaggcgacaaacctaccgagcctggtg

SEQ ID NO: 52189 - DNA, 120 bp, Homo sapiens
  misc_feature: 1670 for SV(W|O) and mtDNA
ttcagttgatgcagagtggggttttgcagtccttagctgttacagaaattaagtattgcaacttactgagggctttgaaggctcttggtctgtatttaacctaaatttctataagattat

SEQ ID NO: 52190 - DNA, 120 bp, Homo sapiens
  misc_feature: 1670 for SV(W|O) and mtDNA
cttttagtataaatagtaccgttaacttccaattaactagttttgacaacattcaaaaaagagtaataaacttcgccttaattttaataatcaacaccctcctagccttactactaataa

SEQ ID NO: 52191 - DNA, 120 bp, Homo sapiens
  misc_feature: 1670 for SV(W|O) and mtDNA
tagggttgtacggtagaactgctattattcatcctatgtgggtaattgaggagtatgctaagattttgcgtagctgggtttggtttaatccacctcaactgcctgctatgatggataaga

SEQ ID NO: 52192 - DNA, 120 bp, Homo sapiens
  misc_feature: 1670 for SV(W|O) and mtDNA
acctaacaaacccacaggtcctaaactaccaaacctgcattaaaaatttcggttggggcgacctcggagcagaacccaacctccgagcagtacatgctaagacttcaccagtcaaagcga

SEQ ID NO: 52193 - DNA, 120 bp, Homo sapiens
  misc_feature: 1670 for SV(W|O) and mtDNA
ctaagacccccgaaaccagacgagctacctaagaacagctaaaagagcacacccgtctatgtagcaaaatagtgggaagatttataggtagaggcgacaaacctaccgagcctggtgata

SEQ ID NO: 52194 - DNA, 120 bp, Homo sapiens
  misc_feature: 1670 for SV(W|O) and mtDNA
gagaaagccatgttgttagacatgggggcatgagttagcagttcttgtgagctttctcggtaaataaggggtcgtaagcctctgttgtcagattcacaatctgatgttttggttaaacta

SEQ ID NO: 52195 - DNA, 120 bp, Homo sapiens
  misc_feature: 1670 for SV(W|O) and mtDNA
caaggagagccaaagctaagacccccgaaaccagacgagctacctaagaacagctaaaagagcacacccgtctatgtagcaaaatagtgggaagatttataggtagaggcgacaaaccta

SEQ ID NO: 52196 - DNA, 120 bp, Homo sapiens
  misc_feature: 1670 for SV(W|O) and mtDNA
gtgaaatattagttggcggatgaagcagatagtgaggaaagttgagccaataatgacgtgaagtccgtggaagcctgtggctacaaaaaatgttgagccgtagatgccgtcggaaatggt

SEQ ID NO: 52197 - DNA, 120 bp, Homo sapiens
  misc_feature: 1670 for SV(W|O) and mtDNA
ggaagcagatttgggtaccacccaagtattgactcacccatcaacaaccgctatgtatttcgtacattactgccagccaccatgaatattgtacggtaccataaatacttgaccacctgt

SEQ ID NO: 52198 - DNA, 120 bp, Homo sapiens
  misc_feature: 1670 for SV(W|O) and mtDNA
gactggcattgtattagcaaactcatcactagacatcgtactacacgacacgtactacgttgtagcccacttccactatgtcctatcaataggagctgtatttgccatcataggaggctt

SEQ ID NO: 52199 - DNA, 120 bp, Homo sapiens
  misc_feature: 1670 for SV(W|O) and mtDNA
cgtaaatctaactttcttcccacaacactttctcggcctatccggaatgccccgacgttactcggactaccccgatgcatacaccacatgaaacatcctatcatctgtaggctcattcat

SEQ ID NO: 52200 - DNA, 120 bp, Homo sapiens
  misc_feature: 1670 for SV(W|O) and mtDNA
accactgacatgactttccaaaaaacacataatttgaatcaacacaaccacccacagcctaattattagcatcatccctctactattttttaaccaaatcaacaacaacctatttagctg

SEQ ID NO: 52201 - DNA, 120 bp, Homo sapiens
  misc_feature: 1670 for SV(W|O) and mtDNA
caagactggtgtattagtttatactacaaggacaggcccatttgagtattttgttttcaattagggagatagttggtattaggattaggattgttgtgaagtatagtacggatgctactt

SEQ ID NO: 52202 - DNA, 120 bp, Homo sapiens
  misc_feature: 1669 for SV(W|O) and mtDNA
ttgtgaagtatagtacggatgctacttgtccaatgatggtaaaagggtagcttactggttgtcctccgattcaggttagaatgaggaggtctgcggctaggagtcaataaagtgattggc

SEQ ID NO: 52203 - DNA, 120 bp, Homo sapiens
  misc_feature: 1669 for SV(W|O) and mtDNA
tcataactttgtcaaagttaaattataggctaaatcctatatatcttaatggcacatgcagcgcaagtaggtctacaagacgctacttcccctatcatagaagagcttatcacctttcat

SEQ ID NO: 52204 - DNA, 120 bp, Homo sapiens
  misc_feature: 1669 for SV(W|O) and mtDNA
atgagagtagctataatgaacagcgatagtattattccttctaggcatagtagggaggatatgaggtgtgagcgatatactagtattcctagaagtgagatggtaaatgctagtataata

SEQ ID NO: 52205 - DNA, 120 bp, Homo sapiens
  misc_feature: 1669 for SV(W|O) and mtDNA
atactagtattcctagaagtgagatggtaaatgctagtataatatttatgtaaatgaggggcatttggtaaatatgattatcataatttaatgagtcgaaatcattcgttttgtttaaac

SEQ ID NO: 52206 - DNA, 120 bp, Homo sapiens
  misc_feature: 1669 for SV(W|O) and mtDNA
gacatgactttccaaaaaacacataatttgaatcaacacaaccacccacagcctaattattagcatcatccctctactattttttaaccaaatcaacaacaacctatttagctgttcccc

SEQ ID NO: 52207 - DNA, 120 bp, Homo sapiens
  misc_feature: 1669 for SV(W|O) and mtDNA
ctaccactgacatgactttccaaaaaacacataatttgaatcaacacaaccacccacagcctaattattagcatcatccctctactattttttaaccaaatcaacaacaacctatttagc

SEQ ID NO: 52208 - DNA, 120 bp, Homo sapiens
  misc_feature: 1669 for SV(W|O) and mtDNA
caaaacgaatgatttcgactcattaaattatgataatcatatttaccaaatgcccctcatttacataaatattatactagcatttaccatctcacttctaggaatactagtatatcgctc

SEQ ID NO: 52209 - DNA, 120 bp, Homo sapiens
  misc_feature: 1669 for SV(W|O) and mtDNA
cgaacatcagtgggggtgaggtaaaatggctgagtgaagcattggactgtaaatctaaagacaggggttaggcctctttttaccagctccgaggtgattttcatattgaattgcaaattc

SEQ ID NO: 52210 - DNA, 120 bp, Homo sapiens
  misc_feature: 1669 for SV(W|O) and mtDNA
cactgacatgactttccaaaaaacacataatttgaatcaacacaaccacccacagcctaattattagcatcatccctctactattttttaaccaaatcaacaacaacctatttagctgtt

SEQ ID NO: 52211 - DNA, 120 bp, Homo sapiens
  misc_feature: 1669 for SV(W|O) and mtDNA
acggtcggcgaacatcagtgggggtgaggtaaaatggctgagtgaagcattggactgtaaatctaaagacaggggttaggcctctttttaccagctccgaggtgattttcatattgaatt

SEQ ID NO: 52212 - DNA, 120 bp, Homo sapiens
  misc_feature: 1668 for SV(W|O) and mtDNA
tttggtaaatatgattatcataatttaatgagtcgaaatcattcgttttgtttaaactatataccaattcggttcagtctaatcctttttgtagtcactcataggccagacttagggcta

SEQ ID NO: 52213 - DNA, 120 bp, Homo sapiens
  misc_feature: 1668 for SV(W|O) and mtDNA
ttgtccaagatagaatcttagttcaactttaaatttgcccacagaaccctctaaatccccttgtaaatttaactgttagtccaaagaggaacagctctttggacactaggaaaaaacctt

SEQ ID NO: 52214 - DNA, 120 bp, Homo sapiens
  misc_feature: 1668 for SV(W|O) and mtDNA
ttatgttagggttgtacggtagaactgctattattcatcctatgtgggtaattgaggagtatgctaagattttgcgtagctgggtttggtttaatccacctcaactgcctgctatgatgg

SEQ ID NO: 52215 - DNA, 120 bp, Homo sapiens
  misc_feature: 1668 for SV(W|O) and mtDNA
tgacagtgagggtaataatgacttgttggttgattgtagatattgggctgttaattgtcagttcagtgttttaatctgacgcaggcttatgcggaggagaatgttttcatgttacttata

SEQ ID NO: 52216 - DNA, 120 bp, Homo sapiens
  misc_feature: 1668 for SV(W|O) and mtDNA
tcggcgtaaatctaactttcttcccacaacactttctcggcctatccggaatgccccgacgttactcggactaccccgatgcatacaccacatgaaacatcctatcatctgtaggctcat

SEQ ID NO: 52217 - DNA, 120 bp, Homo sapiens
  misc_feature: 1668 for SV(W|O) and mtDNA
tcctaggcacagctctaagcctccttattcgagccgagctgggccagccaggcaaccttctaggtaacgaccacatctacaacgttatcgtcacagcccatgcatttgtaataatcttct

SEQ ID NO: 52218 - DNA, 120 bp, Homo sapiens
  misc_feature: 1668 for SV(W|O) and mtDNA
tcatcggcgtaaatctaactttcttcccacaacactttctcggcctatccggaatgccccgacgttactcggactaccccgatgcatacaccacatgaaacatcctatcatctgtaggct

SEQ ID NO: 52219 - DNA, 120 bp, Homo sapiens
  misc_feature: 1668 for SV(W|O) and mtDNA
gcctgactggcattgtattagcaaactcatcactagacatcgtactacacgacacgtactacgttgtagcccacttccactatgtcctatcaataggagctgtatttgccatcataggag

SEQ ID NO: 52220 - DNA, 120 bp, Homo sapiens
  misc_feature: 1668 for SV(W|O) and mtDNA
ctatcatattcatcggcgtaaatctaactttcttcccacaacactttctcggcctatccggaatgccccgacgttactcggactaccccgatgcatacaccacatgaaacatcctatcat

SEQ ID NO: 52221 - DNA, 120 bp, Homo sapiens
  misc_feature: 1668 for SV(W|O) and mtDNA
atttcactttacatccaaacatcactttggcttcgaagccgccgcctgatactggcattttgtagatgtggtttgactatttctgtatgtctccatctattgatgagggtcttactcttt

SEQ ID NO: 52222 - DNA, 120 bp, Homo sapiens
  misc_feature: 1668 for SV(W|O) and mtDNA
agggagaggagggtggatggaattaagggtgttagtcatgttagcttgtttcaggtgcgagatagtagtagggtcgtggtgctggagtttaagttgagtagtaggaatgcggtagtagtt

SEQ ID NO: 52223 - DNA, 120 bp, Homo sapiens
  misc_feature: 1667 for SV(W|O) and mtDNA
gatatgaggtgtgagcgatatactagtattcctagaagtgagatggtaaatgctagtataatatttatgtaaatgaggggcatttggtaaatatgattatcataatttaatgagtcgaaa

SEQ ID NO: 52224 - DNA, 120 bp, Homo sapiens
  misc_feature: 1667 for SV(W|O) and mtDNA
tttcataactttgtcaaagttaaattataggctaaatcctatatatcttaatggcacatgcagcgcaagtaggtctacaagacgctacttcccctatcatagaagagcttatcacctttc

SEQ ID NO: 52225 - DNA, 120 bp, Homo sapiens
  misc_feature: 1667 for SV(W|O) and mtDNA
gtattattccttctaggcatagtagggaggatatgaggtgtgagcgatatactagtattcctagaagtgagatggtaaatgctagtataatatttatgtaaatgaggggcatttggtaaa

SEQ ID NO: 52226 - DNA, 120 bp, Homo sapiens
  misc_feature: 1667 for SV(W|O) and mtDNA
tttacatccaaacatcactttggcttcgaagccgccgcctgatactggcattttgtagatgtggtttgactatttctgtatgtctccatctattgatgagggtcttactcttttagtata

SEQ ID NO: 52227 - DNA, 120 bp, Homo sapiens
  misc_feature: 1667 for SV(W|O) and mtDNA
ctgagttgtaaaaaactccagttgacacaaaatagactacgaaagtggctttaacatatctgaacacacaatagctaagacccaaactgggattagataccccactatgcttagccctaa

SEQ ID NO: 52228 - DNA, 120 bp, Homo sapiens
  misc_feature: 1667 for SV(W|O) and mtDNA
tagcaaggactaacccctataccttctgcataatgaattaactagaaataactttgcaaggagagccaaagctaagacccccgaaaccagacgagctacctaagaacagctaaaagagca

SEQ ID NO: 52229 - DNA, 120 bp, Homo sapiens
  misc_feature: 1667 for SV(W|O) and mtDNA
atcggcgtaaatctaactttcttcccacaacactttctcggcctatccggaatgccccgacgttactcggactaccccgatgcatacaccacatgaaacatcctatcatctgtaggctca

SEQ ID NO: 52230 - DNA, 120 bp, Homo sapiens
  misc_feature: 1667 for SV(W|O) and mtDNA
tgacatgactttccaaaaaacacataatttgaatcaacacaaccacccacagcctaattattagcatcatccctctactattttttaaccaaatcaacaacaacctatttagctgttccc

SEQ ID NO: 52231 - DNA, 120 bp, Homo sapiens
  misc_feature: 1667 for SV(W|O) and mtDNA
ctaagattagtatggtaattaggaagatgagtagatatttgaagaactgattaatgtttgggtctgagtttatatatcacagtgagaattctatgatggaccatgtaacgaacaatgcta

SEQ ID NO: 52232 - DNA, 120 bp, Homo sapiens
  misc_feature: 1667 for SV(W|O) and mtDNA
ggggcatttggtaaatatgattatcataatttaatgagtcgaaatcattcgttttgtttaaactatataccaattcggttcagtctaatcctttttgtagtcactcataggccagactta

SEQ ID NO: 52233 - DNA, 120 bp, Homo sapiens
  misc_feature: 1667 for SV(W|O) and mtDNA
gtattagtttatactacaaggacaggcccatttgagtattttgttttcaattagggagatagttggtattaggattaggattgttgtgaagtatagtacggatgctacttgtccaatgat

SEQ ID NO: 52234 - DNA, 120 bp, Homo sapiens
  misc_feature: 1667 for SV(W|O) and mtDNA
atgcaaacagtacctaacaaacccacaggtcctaaactaccaaacctgcattaaaaatttcggttggggcgacctcggagcagaacccaacctccgagcagtacatgctaagacttcacc

SEQ ID NO: 52235 - DNA, 120 bp, Homo sapiens
  misc_feature: 1667 for SV(W|O) and mtDNA
cctcctcattctaacctgaatcggaggacaaccagtaagctacccttttaccatcattggacaagtagcatccgtactatacttcacaacaatcctaatcctaataccaactatctccct

SEQ ID NO: 52236 - DNA, 120 bp, Homo sapiens
  misc_feature: 1667 for SV(W|O) and mtDNA
aatatgattatcataatttaatgagtcgaaatcattcgttttgtttaaactatataccaattcggttcagtctaatcctttttgtagtcactcataggccagacttagggctaggatgat

SEQ ID NO: 52237 - DNA, 120 bp, Homo sapiens
  misc_feature: 1667 for SV(W|O) and mtDNA
aggattgttgtgaagtatagtacggatgctacttgtccaatgatggtaaaagggtagcttactggttgtcctccgattcaggttagaatgaggaggtctgcggctaggagtcaataaagt

SEQ ID NO: 52238 - DNA, 120 bp, Homo sapiens
  misc_feature: 1666 for SV(W|O) and mtDNA
gttagggttgtacggtagaactgctattattcatcctatgtgggtaattgaggagtatgctaagattttgcgtagctgggtttggtttaatccacctcaactgcctgctatgatggataa

SEQ ID NO: 52239 - DNA, 120 bp, Homo sapiens
  misc_feature: 1666 for SV(W|O) and mtDNA
ttacaagactggtgtattagtttatactacaaggacaggcccatttgagtattttgttttcaattagggagatagttggtattaggattaggattgttgtgaagtatagtacggatgcta

SEQ ID NO: 52240 - DNA, 120 bp, Homo sapiens
  misc_feature: 1666 for SV(W|O) and mtDNA
tgggttgtttgggttgtggctcagtgtcagttcgagataataacttcttggtctaggcacatgaatattgttgtggggaagagactgataataaaggtggatgcgacaatggattttaca

SEQ ID NO: 52241 - DNA, 120 bp, Homo sapiens
  misc_feature: 1666 for SV(W|O) and mtDNA
acatgactttccaaaaaacacataatttgaatcaacacaaccacccacagcctaattattagcatcatccctctactattttttaaccaaatcaacaacaacctatttagctgttcccca

SEQ ID NO: 52242 - DNA, 120 bp, Homo sapiens
  misc_feature: 1666 for SV(W|O) and mtDNA
taccgcggccgttaaacatgtgtcactgggcaggcggtgcctctaatactggtgatgctagaggtgatgtttttggtaaacaggcggggtaagatttgccgagttccttttacttttttt

SEQ ID NO: 52243 - DNA, 120 bp, Homo sapiens
  misc_feature: 1666 for SV(W|O) and mtDNA
gggcatttggtaaatatgattatcataatttaatgagtcgaaatcattcgttttgtttaaactatataccaattcggttcagtctaatcctttttgtagtcactcataggccagacttag

SEQ ID NO: 52244 - DNA, 120 bp, Homo sapiens
  misc_feature: 1666 for SV(W|O) and mtDNA
agacctcctcattctaacctgaatcggaggacaaccagtaagctacccttttaccatcattggacaagtagcatccgtactatacttcacaacaatcctaatcctaataccaactatctc

SEQ ID NO: 52245 - DNA, 120 bp, Homo sapiens
  misc_feature: 1666 for SV(W|O) and mtDNA
ctcttttagtataaatagtaccgttaacttccaattaactagttttgacaacattcaaaaaagagtaataaacttcgccttaattttaataatcaacaccctcctagccttactactaat

SEQ ID NO: 52246 - DNA, 120 bp, Homo sapiens
  misc_feature: 1666 for SV(W|O) and mtDNA
cgcagacctcctcattctaacctgaatcggaggacaaccagtaagctacccttttaccatcattggacaagtagcatccgtactatacttcacaacaatcctaatcctaataccaactat

SEQ ID NO: 52247 - DNA, 120 bp, Homo sapiens
  misc_feature: 1666 for SV(W|O) and mtDNA
attaactagaaataactttgcaaggagagccaaagctaagacccccgaaaccagacgagctacctaagaacagctaaaagagcacacccgtctatgtagcaaaatagtgggaagatttat

SEQ ID NO: 52248 - DNA, 120 bp, Homo sapiens
  misc_feature: 1665 for SV(W|O) and mtDNA
tttttttaacctttccttatgagcatgcctgtgttgggttgacagtgagggtaataatgacttgttggttgattgtagatattgggctgttaattgtcagttcagtgttttaatctgacg

SEQ ID NO: 52249 - DNA, 120 bp, Homo sapiens
  misc_feature: 1665 for SV(W|O) and mtDNA
tagctggttgtccaagatagaatcttagttcaactttaaatttgcccacagaaccctctaaatccccttgtaaatttaactgttagtccaaagaggaacagctctttggacactaggaaa

SEQ ID NO: 52250 - DNA, 120 bp, Homo sapiens
  misc_feature: 1665 for SV(W|O) and mtDNA
ctattattcggcgcatgagctggagtcctaggcacagctctaagcctccttattcgagccgagctgggccagccaggcaaccttctaggtaacgaccacatctacaacgttatcgtcaca

SEQ ID NO: 52251 - DNA, 120 bp, Homo sapiens
  misc_feature: 1665 for SV(W|O) and mtDNA
tgactttccaaaaaacacataatttgaatcaacacaaccacccacagcctaattattagcatcatccctctactattttttaaccaaatcaacaacaacctatttagctgttccccaacc

SEQ ID NO: 52252 - DNA, 120 bp, Homo sapiens
  misc_feature: 1665 for SV(W|O) and mtDNA
aagtagtctagtttgaagcttagggagagctgggttgtttgggttgtggctcagtgtcagttcgagataataacttcttggtctaggcacatgaatattgttgtggggaagagactgata

SEQ ID NO: 52253 - DNA, 120 bp, Homo sapiens
  misc_feature: 1665 for SV(W|O) and mtDNA
taggattgttgtgaagtatagtacggatgctacttgtccaatgatggtaaaagggtagcttactggttgtcctccgattcaggttagaatgaggaggtctgcggctaggagtcaataaag

SEQ ID NO: 52254 - DNA, 120 bp, Homo sapiens
  misc_feature: 1665 for SV(W|O) and mtDNA
gttgtccaagatagaatcttagttcaactttaaatttgcccacagaaccctctaaatccccttgtaaatttaactgttagtccaaagaggaacagctctttggacactaggaaaaaacct

SEQ ID NO: 52255 - DNA, 120 bp, Homo sapiens
  misc_feature: 1665 for SV(W|O) and mtDNA
catctcacttctaggaatactagtatatcgctcacacctcatatcctccctactatgcctagaaggaataatactatcgctgttcattatagctactctcataaccctcaacacccactc

SEQ ID NO: 52256 - DNA, 120 bp, Homo sapiens
  misc_feature: 1665 for SV(W|O) and mtDNA
gagggcgtgatcatgaaaggtgataagctcttctatgataggggaagtagcgtcttgtagacctacttgcgctgcatgtgccattaagatatataggatttagcctataatttaactttg

SEQ ID NO: 52257 - DNA, 120 bp, Homo sapiens
  misc_feature: 1665 for SV(W|O) and mtDNA
gaacatcagtgggggtgaggtaaaatggctgagtgaagcattggactgtaaatctaaagacaggggttaggcctctttttaccagctccgaggtgattttcatattgaattgcaaattcg

SEQ ID NO: 52258 - DNA, 120 bp, Homo sapiens
  misc_feature: 1665 for SV(W|O) and mtDNA
ctgttagagaaatgaatgagcctacagatgataggatgtttcatgtggtgtatgcatcggggtagtccgagtaacgtcggggcattccggataggccgagaaagtgttgtgggaagaaag

SEQ ID NO: 52259 - DNA, 120 bp, Homo sapiens
  misc_feature: 1664 for SV(W|O) and mtDNA
gttgagaaagccatgttgttagacatgggggcatgagttagcagttcttgtgagctttctcggtaaataaggggtcgtaagcctctgttgtcagattcacaatctgatgttttggttaaa

SEQ ID NO: 52260 - DNA, 120 bp, Homo sapiens
  misc_feature: 1664 for SV(W|O) and mtDNA
catgactttccaaaaaacacataatttgaatcaacacaaccacccacagcctaattattagcatcatccctctactattttttaaccaaatcaacaacaacctatttagctgttccccaa

SEQ ID NO: 52261 - DNA, 120 bp, Homo sapiens
  misc_feature: 1664 for SV(W|O) and mtDNA
gaagatgagtagatatttgaagaactgattaatgtttgggtctgagtttatatatcacagtgagaattctatgatggaccatgtaacgaacaatgctacagggatgaatattatggagaa

SEQ ID NO: 52262 - DNA, 120 bp, Homo sapiens
  misc_feature: 1664 for SV(W|O) and mtDNA
tgtgagcgatatactagtattcctagaagtgagatggtaaatgctagtataatatttatgtaaatgaggggcatttggtaaatatgattatcataatttaatgagtcgaaatcattcgtt

SEQ ID NO: 52263 - DNA, 120 bp, Homo sapiens
  misc_feature: 1664 for SV(W|O) and mtDNA
tatgagtgactacaaaaaggattagactgaaccgaattggtatatagtttaaacaaaacgaatgatttcgactcattaaattatgataatcatatttaccaaatgcccctcatttacata

SEQ ID NO: 52264 - DNA, 120 bp, Homo sapiens
  misc_feature: 1664 for SV(W|O) and mtDNA
gttcagttgatgcagagtggggttttgcagtccttagctgttacagaaattaagtattgcaacttactgagggctttgaaggctcttggtctgtatttaacctaaatttctataagatta

SEQ ID NO: 52265 - DNA, 120 bp, Homo sapiens
  misc_feature: 1664 for SV(W|O) and mtDNA
gtgtgagcgatatactagtattcctagaagtgagatggtaaatgctagtataatatttatgtaaatgaggggcatttggtaaatatgattatcataatttaatgagtcgaaatcattcgt

SEQ ID NO: 52266 - DNA, 120 bp, Homo sapiens
  misc_feature: 1664 for SV(W|O) and mtDNA
accatttcataactttgtcaaagttaaattataggctaaatcctatatatcttaatggcacatgcagcgcaagtaggtctacaagacgctacttcccctatcatagaagagcttatcacc

SEQ ID NO: 52267 - DNA, 120 bp, Homo sapiens
  misc_feature: 1664 for SV(W|O) and mtDNA
aattgaaaacaaaatactcaaatgggcctgtccttgtagtataaactaatacaccagtcttgtaaaccggagatgaaaacctttttccaaggacaaatcagagaaaaagtctttaactcc

SEQ ID NO: 52268 - DNA, 120 bp, Homo sapiens
  misc_feature: 1664 for SV(W|O) and mtDNA
atagcaaggactaacccctataccttctgcataatgaattaactagaaataactttgcaaggagagccaaagctaagacccccgaaaccagacgagctacctaagaacagctaaaagagc

SEQ ID NO: 52269 - DNA, 120 bp, Homo sapiens
  misc_feature: 1663 for SV(W|O) and mtDNA
ttaggattgttgtgaagtatagtacggatgctacttgtccaatgatggtaaaagggtagcttactggttgtcctccgattcaggttagaatgaggaggtctgcggctaggagtcaataaa

SEQ ID NO: 52270 - DNA, 120 bp, Homo sapiens
  misc_feature: 1663 for SV(W|O) and mtDNA
tttaccatctcacttctaggaatactagtatatcgctcacacctcatatcctccctactatgcctagaaggaataatactatcgctgttcattatagctactctcataaccctcaacacc

SEQ ID NO: 52271 - DNA, 120 bp, Homo sapiens
  misc_feature: 1663 for SV(W|O) and mtDNA
gttgtttgggttgtggctcagtgtcagttcgagataataacttcttggtctaggcacatgaatattgttgtggggaagagactgataataaaggtggatgcgacaatggattttacataa

SEQ ID NO: 52272 - DNA, 120 bp, Homo sapiens
  misc_feature: 1663 for SV(W|O) and mtDNA
ttatattactaccactgacatgactttccaaaaaacacataatttgaatcaacacaaccacccacagcctaattattagcatcatccctctactattttttaaccaaatcaacaacaacc

SEQ ID NO: 52273 - DNA, 120 bp, Homo sapiens
  misc_feature: 1663 for SV(W|O) and mtDNA
tgcaaacagtacctaacaaacccacaggtcctaaactaccaaacctgcattaaaaatttcggttggggcgacctcggagcagaacccaacctccgagcagtacatgctaagacttcacca

SEQ ID NO: 52274 - DNA, 120 bp, Homo sapiens
  misc_feature: 1663 for SV(W|O) and mtDNA
aaaccatttcataactttgtcaaagttaaattataggctaaatcctatatatcttaatggcacatgcagcgcaagtaggtctacaagacgctacttcccctatcatagaagagcttatca

SEQ ID NO: 52275 - DNA, 120 bp, Homo sapiens
  misc_feature: 1663 for SV(W|O) and mtDNA
taatgcaaacagtacctaacaaacccacaggtcctaaactaccaaacctgcattaaaaatttcggttggggcgacctcggagcagaacccaacctccgagcagtacatgctaagacttca

SEQ ID NO: 52276 - DNA, 120 bp, Homo sapiens
  misc_feature: 1663 for SV(W|O) and mtDNA
tcttttagtataaatagtaccgttaacttccaattaactagttttgacaacattcaaaaaagagtaataaacttcgccttaattttaataatcaacaccctcctagccttactactaata

SEQ ID NO: 52277 - DNA, 120 bp, Homo sapiens
  misc_feature: 1663 for SV(W|O) and mtDNA
tcctcttgtaaatatagtttaaccaaaacatcagattgtgaatctgacaacagaggcttacgaccccttatttaccgagaaagctcacaagaactgctaactcatgcccccatgtctaac

SEQ ID NO: 52278 - DNA, 120 bp, Homo sapiens
  misc_feature: 1663 for SV(W|O) and mtDNA
tcactttacatccaaacatcactttggcttcgaagccgccgcctgatactggcattttgtagatgtggtttgactatttctgtatgtctccatctattgatgagggtcttactcttttag

SEQ ID NO: 52279 - DNA, 120 bp, Homo sapiens
  misc_feature: 1663 for SV(W|O) and mtDNA
ggatcaattgagtatagtagttcgctttgactggtgaagtcttagcatgtactgctcggaggttgggttctgctccgaggtcgccccaaccgaaatttttaatgcaggtttggtagttta

SEQ ID NO: 52280 - DNA, 120 bp, Homo sapiens
  misc_feature: 1663 for SV(W|O) and mtDNA
gatcaattgagtatagtagttcgctttgactggtgaagtcttagcatgtactgctcggaggttgggttctgctccgaggtcgccccaaccgaaatttttaatgcaggtttggtagtttag

SEQ ID NO: 52281 - DNA, 120 bp, Homo sapiens
  misc_feature: 1663 for SV(W|O) and mtDNA
gaagtatagtacggatgctacttgtccaatgatggtaaaagggtagcttactggttgtcctccgattcaggttagaatgaggaggtctgcggctaggagtcaataaagtgattggcttag

SEQ ID NO: 52282 - DNA, 120 bp, Homo sapiens
  misc_feature: 1663 for SV(W|O) and mtDNA
ctttacatccaaacatcactttggcttcgaagccgccgcctgatactggcattttgtagatgtggtttgactatttctgtatgtctccatctattgatgagggtcttactcttttagtat

SEQ ID NO: 52283 - DNA, 120 bp, Homo sapiens
  misc_feature: 1663 for SV(W|O) and mtDNA
aactagaaataactttgcaaggagagccaaagctaagacccccgaaaccagacgagctacctaagaacagctaaaagagcacacccgtctatgtagcaaaatagtgggaagatttatagg

SEQ ID NO: 52284 - DNA, 120 bp, Homo sapiens
  misc_feature: 1663 for SV(W|O) and mtDNA
agggtgatagattggtccaattgggtatgaggagttcagttatatgtttgggattttttaggtagtgggtgttgagcttgaacgctttcttaattggtggctgcttttaggcctactatg

SEQ ID NO: 52285 - DNA, 120 bp, Homo sapiens
  misc_feature: 1662 for SV(W|O) and mtDNA
tgtattagtttatactacaaggacaggcccatttgagtattttgttttcaattagggagatagttggtattaggattaggattgttgtgaagtatagtacggatgctacttgtccaatga

SEQ ID NO: 52286 - DNA, 120 bp, Homo sapiens
  misc_feature: 1662 for SV(W|O) and mtDNA
ctagccgcagacctcctcattctaacctgaatcggaggacaaccagtaagctacccttttaccatcattggacaagtagcatccgtactatacttcacaacaatcctaatcctaatacca

SEQ ID NO: 52287 - DNA, 120 bp, Homo sapiens
  misc_feature: 1662 for SV(W|O) and mtDNA
agcctggtgatagctggttgtccaagatagaatcttagttcaactttaaatttgcccacagaaccctctaaatccccttgtaaatttaactgttagtccaaagaggaacagctctttgga

SEQ ID NO: 52288 - DNA, 120 bp, Homo sapiens
  misc_feature: 1662 for SV(W|O) and mtDNA
tattattccttctaggcatagtagggaggatatgaggtgtgagcgatatactagtattcctagaagtgagatggtaaatgctagtataatatttatgtaaatgaggggcatttggtaaat

SEQ ID NO: 52289 - DNA, 120 bp, Homo sapiens
  misc_feature: 1662 for SV(W|O) and mtDNA
taggattcatctttcttttcaccgtaggtggcctgactggcattgtattagcaaactcatcactagacatcgtactacacgacacgtactacgttgtagcccacttccactatgtcctat

SEQ ID NO: 52290 - DNA, 120 bp, Homo sapiens
  misc_feature: 1662 for SV(W|O) and mtDNA
tacaagactggtgtattagtttatactacaaggacaggcccatttgagtattttgttttcaattagggagatagttggtattaggattaggattgttgtgaagtatagtacggatgctac

SEQ ID NO: 52291 - DNA, 120 bp, Homo sapiens
  misc_feature: 1662 for SV(W|O) and mtDNA
taatatttcactttacatccaaacatcactttggcttcgaagccgccgcctgatactggcattttgtagatgtggtttgactatttctgtatgtctccatctattgatgagggtcttact

SEQ ID NO: 52292 - DNA, 120 bp, Homo sapiens
  misc_feature: 1662 for SV(W|O) and mtDNA
taagacccccgaaaccagacgagctacctaagaacagctaaaagagcacacccgtctatgtagcaaaatagtgggaagatttataggtagaggcgacaaacctaccgagcctggtgatag

SEQ ID NO: 52293 - DNA, 120 bp, Homo sapiens
  misc_feature: 1662 for SV(W|O) and mtDNA
taactttgtcaaagttaaattataggctaaatcctatatatcttaatggcacatgcagcgcaagtaggtctacaagacgctacttcccctatcatagaagagcttatcacctttcatgat

SEQ ID NO: 52294 - DNA, 120 bp, Homo sapiens
  misc_feature: 1662 for SV(W|O) and mtDNA
catccgtactatacttcacaacaatcctaatcctaataccaactatctccctaattgaaaacaaaatactcaaatgggcctgtccttgtagtataaactaatacaccagtcttgtaaacc

SEQ ID NO: 52295 - DNA, 120 bp, Homo sapiens
  misc_feature: 1662 for SV(W|O) and mtDNA
ggtaattaggaagatgagtagatatttgaagaactgattaatgtttgggtctgagtttatatatcacagtgagaattctatgatggaccatgtaacgaacaatgctacagggatgaatat

SEQ ID NO: 52296 - DNA, 120 bp, Homo sapiens
  misc_feature: 1662 for SV(W|O) and mtDNA
actggtgtattagtttatactacaaggacaggcccatttgagtattttgttttcaattagggagatagttggtattaggattaggattgttgtgaagtatagtacggatgctacttgtcc

SEQ ID NO: 52297 - DNA, 120 bp, Homo sapiens
  misc_feature: 1662 for SV(W|O) and mtDNA
gctaagacccccgaaaccagacgagctacctaagaacagctaaaagagcacacccgtctatgtagcaaaatagtgggaagatttataggtagaggcgacaaacctaccgagcctggtgat

SEQ ID NO: 52298 - DNA, 120 bp, Homo sapiens
  misc_feature: 1662 for SV(W|O) and mtDNA
aggaagatgagtagatatttgaagaactgattaatgtttgggtctgagtttatatatcacagtgagaattctatgatggaccatgtaacgaacaatgctacagggatgaatattatggag

SEQ ID NO: 52299 - DNA, 120 bp, Homo sapiens
  misc_feature: 1662 for SV(W|O) and mtDNA
cctgactggcattgtattagcaaactcatcactagacatcgtactacacgacacgtactacgttgtagcccacttccactatgtcctatcaataggagctgtatttgccatcataggagg

SEQ ID NO: 52300 - DNA, 120 bp, Homo sapiens
  misc_feature: 1662 for SV(W|O) and mtDNA
ccacaggcttccacggacttcacgtcattattggctcaactttcctcactatctgcttcatccgccaactaatatttcactttacatccaaacatcactttggcttcgaagccgccgcct

SEQ ID NO: 52301 - DNA, 120 bp, Homo sapiens
  misc_feature: 1662 for SV(W|O) and mtDNA
aaagctaagacccccgaaaccagacgagctacctaagaacagctaaaagagcacacccgtctatgtagcaaaatagtgggaagatttataggtagaggcgacaaacctaccgagcctggt

SEQ ID NO: 52302 - DNA, 120 bp, Homo sapiens
  misc_feature: 1661 for SV(W|O) and mtDNA
tgagttgtaaaaaactccagttgacacaaaatagactacgaaagtggctttaacatatctgaacacacaatagctaagacccaaactgggattagataccccactatgcttagccctaaa

SEQ ID NO: 52303 - DNA, 120 bp, Homo sapiens
  misc_feature: 1661 for SV(W|O) and mtDNA
ttgtttgggttgtggctcagtgtcagttcgagataataacttcttggtctaggcacatgaatattgttgtggggaagagactgataataaaggtggatgcgacaatggattttacataat

SEQ ID NO: 52304 - DNA, 120 bp, Homo sapiens
  misc_feature: 1661 for SV(W|O) and mtDNA
ttaaggttgtggatgatggacccggagcacataaatagtatggctttgaagaaggcgtgggtgcagatgtgcaggaatgctaggtgtggttggttgatgccgattgtaactattatgagt

SEQ ID NO: 52305 - DNA, 120 bp, Homo sapiens
  misc_feature: 1661 for SV(W|O) and mtDNA
agttgagaaagccatgttgttagacatgggggcatgagttagcagttcttgtgagctttctcggtaaataaggggtcgtaagcctctgttgtcagattcacaatctgatgttttggttaa

SEQ ID NO: 52306 - DNA, 120 bp, Homo sapiens
  misc_feature: 1661 for SV(W|O) and mtDNA
tgtggtttgtagagaatagtcaacggtcggcgaacatcagtgggggtgaggtaaaatggctgagtgaagcattggactgtaaatctaaagacaggggttaggcctctttttaccagctcc

SEQ ID NO: 52307 - DNA, 120 bp, Homo sapiens
  misc_feature: 1661 for SV(W|O) and mtDNA
aacatcagtgggggtgaggtaaaatggctgagtgaagcattggactgtaaatctaaagacaggggttaggcctctttttaccagctccgaggtgattttcatattgaattgcaaattcga

SEQ ID NO: 52308 - DNA, 120 bp, Homo sapiens
  misc_feature: 1661 for SV(W|O) and mtDNA
gaaagccatgttgttagacatgggggcatgagttagcagttcttgtgagctttctcggtaaataaggggtcgtaagcctctgttgtcagattcacaatctgatgttttggttaaactata

SEQ ID NO: 52309 - DNA, 120 bp, Homo sapiens
  misc_feature: 1661 for SV(W|O) and mtDNA
tactagtattcctagaagtgagatggtaaatgctagtataatatttatgtaaatgaggggcatttggtaaatatgattatcataatttaatgagtcgaaatcattcgttttgtttaaact

SEQ ID NO: 52310 - DNA, 120 bp, Homo sapiens
  misc_feature: 1661 for SV(W|O) and mtDNA
gcatccgtactatacttcacaacaatcctaatcctaataccaactatctccctaattgaaaacaaaatactcaaatgggcctgtccttgtagtataaactaatacaccagtcttgtaaac

SEQ ID NO: 52311 - DNA, 120 bp, Homo sapiens
  misc_feature: 1661 for SV(W|O) and mtDNA
ggtgtattagtttatactacaaggacaggcccatttgagtattttgttttcaattagggagatagttggtattaggattaggattgttgtgaagtatagtacggatgctacttgtccaat

SEQ ID NO: 52312 - DNA, 120 bp, Homo sapiens
  misc_feature: 1661 for SV(W|O) and mtDNA
aggattcatctttcttttcaccgtaggtggcctgactggcattgtattagcaaactcatcactagacatcgtactacacgacacgtactacgttgtagcccacttccactatgtcctatc

SEQ ID NO: 52313 - DNA, 120 bp, Homo sapiens
  misc_feature: 1661 for SV(W|O) and mtDNA
atccgtactatacttcacaacaatcctaatcctaataccaactatctccctaattgaaaacaaaatactcaaatgggcctgtccttgtagtataaactaatacaccagtcttgtaaaccg

SEQ ID NO: 52314 - DNA, 120 bp, Homo sapiens
  misc_feature: 1661 for SV(W|O) and mtDNA
cggcgtaaatctaactttcttcccacaacactttctcggcctatccggaatgccccgacgttactcggactaccccgatgcatacaccacatgaaacatcctatcatctgtaggctcatt

SEQ ID NO: 52315 - DNA, 120 bp, Homo sapiens
  misc_feature: 1661 for SV(W|O) and mtDNA
cataactttgtcaaagttaaattataggctaaatcctatatatcttaatggcacatgcagcgcaagtaggtctacaagacgctacttcccctatcatagaagagcttatcacctttcatg

SEQ ID NO: 52316 - DNA, 120 bp, Homo sapiens
  misc_feature: 1660 for SV(W|O) and mtDNA
aattatattactaccactgacatgactttccaaaaaacacataatttgaatcaacacaaccacccacagcctaattattagcatcatccctctactattttttaaccaaatcaacaacaa

SEQ ID NO: 52317 - DNA, 120 bp, Homo sapiens
  misc_feature: 1660 for SV(W|O) and mtDNA
tcacaattctaattctactgactatcctagaaatcgctgtcgccttaatccaagcctacgttttcacacttctagtaagcctctacctgcacgacaacacataatgacccaccaatcaca

SEQ ID NO: 52318 - DNA, 120 bp, Homo sapiens
  misc_feature: 1660 for SV(W|O) and mtDNA
tcttactcttttagtataaatagtaccgttaacttccaattaactagttttgacaacattcaaaaaagagtaataaacttcgccttaattttaataatcaacaccctcctagccttacta

SEQ ID NO: 52319 - DNA, 120 bp, Homo sapiens
  misc_feature: 1660 for SV(W|O) and mtDNA
tatagtacggatgctacttgtccaatgatggtaaaagggtagcttactggttgtcctccgattcaggttagaatgaggaggtctgcggctaggagtcaataaagtgattggcttagtggg

SEQ ID NO: 52320 - DNA, 120 bp, Homo sapiens
  misc_feature: 1660 for SV(W|O) and mtDNA
accgcggccgttaaacatgtgtcactgggcaggcggtgcctctaatactggtgatgctagaggtgatgtttttggtaaacaggcggggtaagatttgccgagttccttttacttttttta

SEQ ID NO: 52321 - DNA, 120 bp, Homo sapiens
  misc_feature: 1660 for SV(W|O) and mtDNA
gcctggtgatagctggttgtccaagatagaatcttagttcaactttaaatttgcccacagaaccctctaaatccccttgtaaatttaactgttagtccaaagaggaacagctctttggac

SEQ ID NO: 52322 - DNA, 120 bp, Homo sapiens
  misc_feature: 1660 for SV(W|O) and mtDNA
gctagcatgtttatttctaggcctactcaggtaaaaaatcagtgcgagcttagcgctgtgatgagtgtgcctgcaaagatggtagagtagatgacgggttgggccaggggattaattagt

SEQ ID NO: 52323 - DNA, 120 bp, Homo sapiens
  misc_feature: 1660 for SV(W|O) and mtDNA
aatatttcactttacatccaaacatcactttggcttcgaagccgccgcctgatactggcattttgtagatgtggtttgactatttctgtatgtctccatctattgatgagggtcttactc

SEQ ID NO: 52324 - DNA, 120 bp, Homo sapiens
  misc_feature: 1660 for SV(W|O) and mtDNA
agattagtatggtaattaggaagatgagtagatatttgaagaactgattaatgtttgggtctgagtttatatatcacagtgagaattctatgatggaccatgtaacgaacaatgctacag

SEQ ID NO: 52325 - DNA, 120 bp, Homo sapiens
  misc_feature: 1660 for SV(W|O) and mtDNA
catattcatcggcgtaaatctaactttcttcccacaacactttctcggcctatccggaatgccccgacgttactcggactaccccgatgcatacaccacatgaaacatcctatcatctgt

SEQ ID NO: 52326 - DNA, 120 bp, Homo sapiens
  misc_feature: 1660 for SV(W|O) and mtDNA
aacagttggaataggttgttagcggtaactaagattagtatggtaattaggaagatgagtagatatttgaagaactgattaatgtttgggtctgagtttatatatcacagtgagaattct

SEQ ID NO: 52327 - DNA, 120 bp, Homo sapiens
  misc_feature: 1659 for SV(W|O) and mtDNA
tttttttggttagaactggaataaaagctagcatgtttatttctaggcctactcaggtaaaaaatcagtgcgagcttagcgctgtgatgagtgtgcctgcaaagatggtagagtagatga

SEQ ID NO: 52328 - DNA, 120 bp, Homo sapiens
  misc_feature: 1659 for SV(W|O) and mtDNA
ttcataactttgtcaaagttaaattataggctaaatcctatatatcttaatggcacatgcagcgcaagtaggtctacaagacgctacttcccctatcatagaagagcttatcacctttca

SEQ ID NO: 52329 - DNA, 120 bp, Homo sapiens
  misc_feature: 1659 for SV(W|O) and mtDNA
ttaccatctcacttctaggaatactagtatatcgctcacacctcatatcctccctactatgcctagaaggaataatactatcgctgttcattatagctactctcataaccctcaacaccc

SEQ ID NO: 52330 - DNA, 120 bp, Homo sapiens
  misc_feature: 1659 for SV(W|O) and mtDNA
agatttgggtaccacccaagtattgactcacccatcaacaaccgctatgtatttcgtacattactgccagccaccatgaatattgtacggtaccataaatacttgaccacctgtagtaca

SEQ ID NO: 52331 - DNA, 120 bp, Homo sapiens
  misc_feature: 1659 for SV(W|O) and mtDNA
tgaacagttggaataggttgttagcggtaactaagattagtatggtaattaggaagatgagtagatatttgaagaactgattaatgtttgggtctgagtttatatatcacagtgagaatt

SEQ ID NO: 52332 - DNA, 120 bp, Homo sapiens
  misc_feature: 1659 for SV(W|O) and mtDNA
ggttgtttgggttgtggctcagtgtcagttcgagataataacttcttggtctaggcacatgaatattgttgtggggaagagactgataataaaggtggatgcgacaatggattttacata

SEQ ID NO: 52333 - DNA, 120 bp, Homo sapiens
  misc_feature: 1659 for SV(W|O) and mtDNA
ctcctcattctaacctgaatcggaggacaaccagtaagctacccttttaccatcattggacaagtagcatccgtactatacttcacaacaatcctaatcctaataccaactatctcccta

SEQ ID NO: 52334 - DNA, 120 bp, Homo sapiens
  misc_feature: 1659 for SV(W|O) and mtDNA
gcagacctcctcattctaacctgaatcggaggacaaccagtaagctacccttttaccatcattggacaagtagcatccgtactatacttcacaacaatcctaatcctaataccaactatc

SEQ ID NO: 52335 - DNA, 120 bp, Homo sapiens
  misc_feature: 1659 for SV(W|O) and mtDNA
attcatcggcgtaaatctaactttcttcccacaacactttctcggcctatccggaatgccccgacgttactcggactaccccgatgcatacaccacatgaaacatcctatcatctgtagg

SEQ ID NO: 52336 - DNA, 120 bp, Homo sapiens
  misc_feature: 1659 for SV(W|O) and mtDNA
caaagctaagacccccgaaaccagacgagctacctaagaacagctaaaagagcacacccgtctatgtagcaaaatagtgggaagatttataggtagaggcgacaaacctaccgagcctgg

SEQ ID NO: 52337 - DNA, 120 bp, Homo sapiens
  misc_feature: 1659 for SV(W|O) and mtDNA
aagactggtgtattagtttatactacaaggacaggcccatttgagtattttgttttcaattagggagatagttggtattaggattaggattgttgtgaagtatagtacggatgctacttg

SEQ ID NO: 52338 - DNA, 120 bp, Homo sapiens
  misc_feature: 1659 for SV(W|O) and mtDNA
atgagggcgtgatcatgaaaggtgataagctcttctatgataggggaagtagcgtcttgtagacctacttgcgctgcatgtgccattaagatatataggatttagcctataatttaactt

SEQ ID NO: 52339 - DNA, 120 bp, Homo sapiens
  misc_feature: 1658 for SV(W|O) and mtDNA
tactgctgttagagaaatgaatgagcctacagatgataggatgtttcatgtggtgtatgcatcggggtagtccgagtaacgtcggggcattccggataggccgagaaagtgttgtgggaa

SEQ ID NO: 52340 - DNA, 120 bp, Homo sapiens
  misc_feature: 1658 for SV(W|O) and mtDNA
atgagtgactacaaaaaggattagactgaaccgaattggtatatagtttaaacaaaacgaatgatttcgactcattaaattatgataatcatatttaccaaatgcccctcatttacataa

SEQ ID NO: 52341 - DNA, 120 bp, Homo sapiens
  misc_feature: 1658 for SV(W|O) and mtDNA
ttacatccaaacatcactttggcttcgaagccgccgcctgatactggcattttgtagatgtggtttgactatttctgtatgtctccatctattgatgagggtcttactcttttagtataa

SEQ ID NO: 52342 - DNA, 120 bp, Homo sapiens
  misc_feature: 1658 for SV(W|O) and mtDNA
tgtttgggttgtggctcagtgtcagttcgagataataacttcttggtctaggcacatgaatattgttgtggggaagagactgataataaaggtggatgcgacaatggattttacataatg

SEQ ID NO: 52343 - DNA, 120 bp, Homo sapiens
  misc_feature: 1658 for SV(W|O) and mtDNA
tgagaaagccatgttgttagacatgggggcatgagttagcagttcttgtgagctttctcggtaaataaggggtcgtaagcctctgttgtcagattcacaatctgatgttttggttaaact

SEQ ID NO: 52344 - DNA, 120 bp, Homo sapiens
  misc_feature: 1658 for SV(W|O) and mtDNA
gttaaggttgtggatgatggacccggagcacataaatagtatggctttgaagaaggcgtgggtgcagatgtgcaggaatgctaggtgtggttggttgatgccgattgtaactattatgag

SEQ ID NO: 52345 - DNA, 120 bp, Homo sapiens
  misc_feature: 1658 for SV(W|O) and mtDNA
gtgatagattggtccaattgggtatgaggagttcagttatatgtttgggattttttaggtagtgggtgttgagcttgaacgctttcttaattggtggctgcttttaggcctactatgggt

SEQ ID NO: 52346 - DNA, 120 bp, Homo sapiens
  misc_feature: 1658 for SV(W|O) and mtDNA
attattcggcgcatgagctggagtcctaggcacagctctaagcctccttattcgagccgagctgggccagccaggcaaccttctaggtaacgaccacatctacaacgttatcgtcacagc

SEQ ID NO: 52347 - DNA, 120 bp, Homo sapiens
  misc_feature: 1658 for SV(W|O) and mtDNA
ctatgagtgactacaaaaaggattagactgaaccgaattggtatatagtttaaacaaaacgaatgatttcgactcattaaattatgataatcatatttaccaaatgcccctcatttacat

SEQ ID NO: 52348 - DNA, 120 bp, Homo sapiens
  misc_feature: 1658 for SV(W|O) and mtDNA
aaagtgaaatattagttggcggatgaagcagatagtgaggaaagttgagccaataatgacgtgaagtccgtggaagcctgtggctacaaaaaatgttgagccgtagatgccgtcggaaat

SEQ ID NO: 52349 - DNA, 120 bp, Homo sapiens
  misc_feature: 1658 for SV(W|O) and mtDNA
atgaacagttggaataggttgttagcggtaactaagattagtatggtaattaggaagatgagtagatatttgaagaactgattaatgtttgggtctgagtttatatatcacagtgagaat

SEQ ID NO: 52350 - DNA, 120 bp, Homo sapiens
  misc_feature: 1658 for SV(W|O) and mtDNA
agagctgggttgtttgggttgtggctcagtgtcagttcgagataataacttcttggtctaggcacatgaatattgttgtggggaagagactgataataaaggtggatgcgacaatggatt

SEQ ID NO: 52351 - DNA, 120 bp, Homo sapiens
  misc_feature: 1657 for SV(W|O) and mtDNA
ttcatcggcgtaaatctaactttcttcccacaacactttctcggcctatccggaatgccccgacgttactcggactaccccgatgcatacaccacatgaaacatcctatcatctgtaggc

SEQ ID NO: 52352 - DNA, 120 bp, Homo sapiens
  misc_feature: 1657 for SV(W|O) and mtDNA
ttatcataatttaatgagtcgaaatcattcgttttgtttaaactatataccaattcggttcagtctaatcctttttgtagtcactcataggccagacttagggctaggatgatgattaat

SEQ ID NO: 52353 - DNA, 120 bp, Homo sapiens
  misc_feature: 1657 for SV(W|O) and mtDNA
caacaattatattactaccactgacatgactttccaaaaaacacataatttgaatcaacacaaccacccacagcctaattattagcatcatccctctactattttttaaccaaatcaaca

SEQ ID NO: 52354 - DNA, 120 bp, Homo sapiens
  misc_feature: 1657 for SV(W|O) and mtDNA
tggtgatagctggttgtccaagatagaatcttagttcaactttaaatttgcccacagaaccctctaaatccccttgtaaatttaactgttagtccaaagaggaacagctctttggacact

SEQ ID NO: 52355 - DNA, 120 bp, Homo sapiens
  misc_feature: 1657 for SV(W|O) and mtDNA
tgatagctggttgtccaagatagaatcttagttcaactttaaatttgcccacagaaccctctaaatccccttgtaaatttaactgttagtccaaagaggaacagctctttggacactagg

SEQ ID NO: 52356 - DNA, 120 bp, Homo sapiens
  misc_feature: 1657 for SV(W|O) and mtDNA
gcagatttgggtaccacccaagtattgactcacccatcaacaaccgctatgtatttcgtacattactgccagccaccatgaatattgtacggtaccataaatacttgaccacctgtagta

SEQ ID NO: 52357 - DNA, 120 bp, Homo sapiens
  misc_feature: 1657 for SV(W|O) and mtDNA
taattgaaaacaaaatactcaaatgggcctgtccttgtagtataaactaatacaccagtcttgtaaaccggagatgaaaacctttttccaaggacaaatcagagaaaaagtctttaactc

SEQ ID NO: 52358 - DNA, 120 bp, Homo sapiens
  misc_feature: 1657 for SV(W|O) and mtDNA
gctgggttgtttgggttgtggctcagtgtcagttcgagataataacttcttggtctaggcacatgaatattgttgtggggaagagactgataataaaggtggatgcgacaatggatttta

SEQ ID NO: 52359 - DNA, 120 bp, Homo sapiens
  misc_feature: 1657 for SV(W|O) and mtDNA
gggttgtttgggttgtggctcagtgtcagttcgagataataacttcttggtctaggcacatgaatattgttgtggggaagagactgataataaaggtggatgcgacaatggattttacat

SEQ ID NO: 52360 - DNA, 120 bp, Homo sapiens
  misc_feature: 1657 for SV(W|O) and mtDNA
aaatagtagagggatgatgctaataattaggctgtgggtggttgtgttgattcaaattatgtgttttttggaaagtcatgtcagtggtagtaatataattgttgggacgattagttttag

SEQ ID NO: 52361 - DNA, 120 bp, Homo sapiens
  misc_feature: 1657 for SV(W|O) and mtDNA
atatgattatcataatttaatgagtcgaaatcattcgttttgtttaaactatataccaattcggttcagtctaatcctttttgtagtcactcataggccagacttagggctaggatgatg

SEQ ID NO: 52362 - DNA, 120 bp, Homo sapiens
  misc_feature: 1657 for SV(W|O) and mtDNA
aggttgtggatgatggacccggagcacataaatagtatggctttgaagaaggcgtgggtgcagatgtgcaggaatgctaggtgtggttggttgatgccgattgtaactattatgagtcct

SEQ ID NO: 52363 - DNA, 120 bp, Homo sapiens
  misc_feature: 1656 for SV(W|O) and mtDNA
ttttactttttttaacctttccttatgagcatgcctgtgttgggttgacagtgagggtaataatgacttgttggttgattgtagatattgggctgttaattgtcagttcagtgttttaat

SEQ ID NO: 52364 - DNA, 120 bp, Homo sapiens
  misc_feature: 1656 for SV(W|O) and mtDNA
cagtacctaacaaacccacaggtcctaaactaccaaacctgcattaaaaatttcggttggggcgacctcggagcagaacccaacctccgagcagtacatgctaagacttcaccagtcaaa

SEQ ID NO: 52365 - DNA, 120 bp, Homo sapiens
  misc_feature: 1656 for SV(W|O) and mtDNA
tggttgtccaagatagaatcttagttcaactttaaatttgcccacagaaccctctaaatccccttgtaaatttaactgttagtccaaagaggaacagctctttggacactaggaaaaaac

SEQ ID NO: 52366 - DNA, 120 bp, Homo sapiens
  misc_feature: 1656 for SV(W|O) and mtDNA
ggaagatgagtagatatttgaagaactgattaatgtttgggtctgagtttatatatcacagtgagaattctatgatggaccatgtaacgaacaatgctacagggatgaatattatggaga

SEQ ID NO: 52367 - DNA, 120 bp, Homo sapiens
  misc_feature: 1656 for SV(W|O) and mtDNA
tatgattatcataatttaatgagtcgaaatcattcgttttgtttaaactatataccaattcggttcagtctaatcctttttgtagtcactcataggccagacttagggctaggatgatga

SEQ ID NO: 52368 - DNA, 120 bp, Homo sapiens
  misc_feature: 1656 for SV(W|O) and mtDNA
tcatattcatcggcgtaaatctaactttcttcccacaacactttctcggcctatccggaatgccccgacgttactcggactaccccgatgcatacaccacatgaaacatcctatcatctg

SEQ ID NO: 52369 - DNA, 120 bp, Homo sapiens
  misc_feature: 1656 for SV(W|O) and mtDNA
acaagaactgctaactcatgcccccatgtctaacaacatggctttctcaacttttaaaggataacagctatccattggtcttaggccccaaaaattttggtgcaactccaaataaaagta

SEQ ID NO: 52370 - DNA, 120 bp, Homo sapiens
  misc_feature: 1656 for SV(W|O) and mtDNA
aactaagattagtatggtaattaggaagatgagtagatatttgaagaactgattaatgtttgggtctgagtttatatatcacagtgagaattctatgatggaccatgtaacgaacaatgc

SEQ ID NO: 52371 - DNA, 120 bp, Homo sapiens
  misc_feature: 1656 for SV(W|O) and mtDNA
cctgtagcattgttcgttacatggtccatcatagaattctcactgtgatatataaactcagacccaaacattaatcagttcttcaaatatctactcatcttcctaattaccatactaatc

SEQ ID NO: 52372 - DNA, 120 bp, Homo sapiens
  misc_feature: 1656 for SV(W|O) and mtDNA
catcagtgggggtgaggtaaaatggctgagtgaagcattggactgtaaatctaaagacaggggttaggcctctttttaccagctccgaggtgattttcatattgaattgcaaattcgaag

SEQ ID NO: 52373 - DNA, 120 bp, Homo sapiens
  misc_feature: 1656 for SV(W|O) and mtDNA
agtatggtaattaggaagatgagtagatatttgaagaactgattaatgtttgggtctgagtttatatatcacagtgagaattctatgatggaccatgtaacgaacaatgctacagggatg

SEQ ID NO: 52374 - DNA, 120 bp, Homo sapiens
  misc_feature: 1655 for SV(W|O) and mtDNA
atagctggttgtccaagatagaatcttagttcaactttaaatttgcccacagaaccctctaaatccccttgtaaatttaactgttagtccaaagaggaacagctctttggacactaggaa

SEQ ID NO: 52375 - DNA, 120 bp, Homo sapiens
  misc_feature: 1655 for SV(W|O) and mtDNA
attatcataatttaatgagtcgaaatcattcgttttgtttaaactatataccaattcggttcagtctaatcctttttgtagtcactcataggccagacttagggctaggatgatgattaa

SEQ ID NO: 52376 - DNA, 120 bp, Homo sapiens
  misc_feature: 1655 for SV(W|O) and mtDNA
ccgcggccgttaaacatgtgtcactgggcaggcggtgcctctaatactggtgatgctagaggtgatgtttttggtaaacaggcggggtaagatttgccgagttccttttactttttttaa

SEQ ID NO: 52377 - DNA, 120 bp, Homo sapiens
  misc_feature: 1655 for SV(W|O) and mtDNA
cctggtgatagctggttgtccaagatagaatcttagttcaactttaaatttgcccacagaaccctctaaatccccttgtaaatttaactgttagtccaaagaggaacagctctttggaca

SEQ ID NO: 52378 - DNA, 120 bp, Homo sapiens
  misc_feature: 1655 for SV(W|O) and mtDNA
tcaattgagtatagtagttcgctttgactggtgaagtcttagcatgtactgctcggaggttgggttctgctccgaggtcgccccaaccgaaatttttaatgcaggtttggtagtttagga

SEQ ID NO: 52379 - DNA, 120 bp, Homo sapiens
  misc_feature: 1655 for SV(W|O) and mtDNA
tatcataatttaatgagtcgaaatcattcgttttgtttaaactatataccaattcggttcagtctaatcctttttgtagtcactcataggccagacttagggctaggatgatgattaata

SEQ ID NO: 52380 - DNA, 120 bp, Homo sapiens
  misc_feature: 1655 for SV(W|O) and mtDNA
tagggtgatagattggtccaattgggtatgaggagttcagttatatgtttgggattttttaggtagtgggtgttgagcttgaacgctttcttaattggtggctgcttttaggcctactat

SEQ ID NO: 52381 - DNA, 120 bp, Homo sapiens
  misc_feature: 1655 for SV(W|O) and mtDNA
actaatatttcactttacatccaaacatcactttggcttcgaagccgccgcctgatactggcattttgtagatgtggtttgactatttctgtatgtctccatctattgatgagggtctta

SEQ ID NO: 52382 - DNA, 120 bp, Homo sapiens
  misc_feature: 1655 for SV(W|O) and mtDNA
ggtgtgagcgatatactagtattcctagaagtgagatggtaaatgctagtataatatttatgtaaatgaggggcatttggtaaatatgattatcataatttaatgagtcgaaatcattcg

SEQ ID NO: 52383 - DNA, 120 bp, Homo sapiens
  misc_feature: 1655 for SV(W|O) and mtDNA
catgaaaattattaatattactgctgttagagaaatgaatgagcctacagatgataggatgtttcatgtggtgtatgcatcggggtagtccgagtaacgtcggggcattccggataggcc

SEQ ID NO: 52384 - DNA, 120 bp, Homo sapiens
  misc_feature: 1655 for SV(W|O) and mtDNA
atcttatagaaatttaggttaaatacagaccaagagccttcaaagccctcagtaagttgcaatacttaatttctgtaacagctaaggactgcaaaaccccactctgcatcaactgaacgc

SEQ ID NO: 52385 - DNA, 120 bp, Homo sapiens
  misc_feature: 1655 for SV(W|O) and mtDNA
agggaggatatgaggtgtgagcgatatactagtattcctagaagtgagatggtaaatgctagtataatatttatgtaaatgaggggcatttggtaaatatgattatcataatttaatgag

SEQ ID NO: 52386 - DNA, 120 bp, Homo sapiens
  misc_feature: 1655 for SV(W|O) and mtDNA
agcagatttgggtaccacccaagtattgactcacccatcaacaaccgctatgtatttcgtacattactgccagccaccatgaatattgtacggtaccataaatacttgaccacctgtagt

SEQ ID NO: 52387 - DNA, 120 bp, Homo sapiens
  misc_feature: 1654 for SV(W|O) and mtDNA
ctggttgtccaagatagaatcttagttcaactttaaatttgcccacagaaccctctaaatccccttgtaaatttaactgttagtccaaagaggaacagctctttggacactaggaaaaaa

SEQ ID NO: 52388 - DNA, 120 bp, Homo sapiens
  misc_feature: 1654 for SV(W|O) and mtDNA
atagaaattgaaacctggcgcaatagatatagtaccgcaagggaaagatgaaaaattataaccaagcataatatagcaaggactaacccctataccttctgcataatgaattaactagaa

SEQ ID NO: 52389 - DNA, 120 bp, Homo sapiens
  misc_feature: 1654 for SV(W|O) and mtDNA
ttatgagagtagctataatgaacagcgatagtattattccttctaggcatagtagggaggatatgaggtgtgagcgatatactagtattcctagaagtgagatggtaaatgctagtataa

SEQ ID NO: 52390 - DNA, 120 bp, Homo sapiens
  misc_feature: 1654 for SV(W|O) and mtDNA
atatactagtattcctagaagtgagatggtaaatgctagtataatatttatgtaaatgaggggcatttggtaaatatgattatcataatttaatgagtcgaaatcattcgttttgtttaa

SEQ ID NO: 52391 - DNA, 120 bp, Homo sapiens
  misc_feature: 1654 for SV(W|O) and mtDNA
caattatattactaccactgacatgactttccaaaaaacacataatttgaatcaacacaaccacccacagcctaattattagcatcatccctctactattttttaaccaaatcaacaaca

SEQ ID NO: 52392 - DNA, 120 bp, Homo sapiens
  misc_feature: 1654 for SV(W|O) and mtDNA
gttgtacggtagaactgctattattcatcctatgtgggtaattgaggagtatgctaagattttgcgtagctgggtttggtttaatccacctcaactgcctgctatgatggataagattga

SEQ ID NO: 52393 - DNA, 120 bp, Homo sapiens
  misc_feature: 1654 for SV(W|O) and mtDNA
tatgagagtagctataatgaacagcgatagtattattccttctaggcatagtagggaggatatgaggtgtgagcgatatactagtattcctagaagtgagatggtaaatgctagtataat

SEQ ID NO: 52394 - DNA, 120 bp, Homo sapiens
  misc_feature: 1654 for SV(W|O) and mtDNA
tagtttatactacaaggacaggcccatttgagtattttgttttcaattagggagatagttggtattaggattaggattgttgtgaagtatagtacggatgctacttgtccaatgatggta

SEQ ID NO: 52395 - DNA, 120 bp, Homo sapiens
  misc_feature: 1654 for SV(W|O) and mtDNA
aatgcaaacagtacctaacaaacccacaggtcctaaactaccaaacctgcattaaaaatttcggttggggcgacctcggagcagaacccaacctccgagcagtacatgctaagacttcac

SEQ ID NO: 52396 - DNA, 120 bp, Homo sapiens
  misc_feature: 1654 for SV(W|O) and mtDNA
gagcctggtgatagctggttgtccaagatagaatcttagttcaactttaaatttgcccacagaaccctctaaatccccttgtaaatttaactgttagtccaaagaggaacagctctttgg

SEQ ID NO: 52397 - DNA, 120 bp, Homo sapiens
  misc_feature: 1654 for SV(W|O) and mtDNA
aagatgagtagatatttgaagaactgattaatgtttgggtctgagtttatatatcacagtgagaattctatgatggaccatgtaacgaacaatgctacagggatgaatattatggagaag

SEQ ID NO: 52398 - DNA, 120 bp, Homo sapiens
  misc_feature: 1654 for SV(W|O) and mtDNA
cgagcctggtgatagctggttgtccaagatagaatcttagttcaactttaaatttgcccacagaaccctctaaatccccttgtaaatttaactgttagtccaaagaggaacagctctttg

SEQ ID NO: 52399 - DNA, 120 bp, Homo sapiens
  misc_feature: 1654 for SV(W|O) and mtDNA
atcaattgagtatagtagttcgctttgactggtgaagtcttagcatgtactgctcggaggttgggttctgctccgaggtcgccccaaccgaaatttttaatgcaggtttggtagtttagg

SEQ ID NO: 52400 - DNA, 120 bp, Homo sapiens
  misc_feature: 1654 for SV(W|O) and mtDNA
atgtttggatgtaaagtgaaatattagttggcggatgaagcagatagtgaggaaagttgagccaataatgacgtgaagtccgtggaagcctgtggctacaaaaaatgttgagccgtagat

SEQ ID NO: 52401 - DNA, 120 bp, Homo sapiens
  misc_feature: 1653 for SV(W|O) and mtDNA
tgagtgactacaaaaaggattagactgaaccgaattggtatatagtttaaacaaaacgaatgatttcgactcattaaattatgataatcatatttaccaaatgcccctcatttacataaa

SEQ ID NO: 52402 - DNA, 120 bp, Homo sapiens
  misc_feature: 1653 for SV(W|O) and mtDNA
ttgttaaggttgtggatgatggacccggagcacataaatagtatggctttgaagaaggcgtgggtgcagatgtgcaggaatgctaggtgtggttggttgatgccgattgtaactattatg

SEQ ID NO: 52403 - DNA, 120 bp, Homo sapiens
  misc_feature: 1653 for SV(W|O) and mtDNA
ttgtggtttgtagagaatagtcaacggtcggcgaacatcagtgggggtgaggtaaaatggctgagtgaagcattggactgtaaatctaaagacaggggttaggcctctttttaccagctc

SEQ ID NO: 52404 - DNA, 120 bp, Homo sapiens
  misc_feature: 1653 for SV(W|O) and mtDNA
ttgtacggtagaactgctattattcatcctatgtgggtaattgaggagtatgctaagattttgcgtagctgggtttggtttaatccacctcaactgcctgctatgatggataagattgag

SEQ ID NO: 52405 - DNA, 120 bp, Homo sapiens
  misc_feature: 1653 for SV(W|O) and mtDNA
tgttaaggttgtggatgatggacccggagcacataaatagtatggctttgaagaaggcgtgggtgcagatgtgcaggaatgctaggtgtggttggttgatgccgattgtaactattatga

SEQ ID NO: 52406 - DNA, 120 bp, Homo sapiens
  misc_feature: 1653 for SV(W|O) and mtDNA
cgatgaacagttggaataggttgttagcggtaactaagattagtatggtaattaggaagatgagtagatatttgaagaactgattaatgtttgggtctgagtttatatatcacagtgaga

SEQ ID NO: 52407 - DNA, 120 bp, Homo sapiens
  misc_feature: 1653 for SV(W|O) and mtDNA
tattaatgcaaacagtacctaacaaacccacaggtcctaaactaccaaacctgcattaaaaatttcggttggggcgacctcggagcagaacccaacctccgagcagtacatgctaagact

SEQ ID NO: 52408 - DNA, 120 bp, Homo sapiens
  misc_feature: 1653 for SV(W|O) and mtDNA
tacctaacaaacccacaggtcctaaactaccaaacctgcattaaaaatttcggttggggcgacctcggagcagaacccaacctccgagcagtacatgctaagacttcaccagtcaaagcg

SEQ ID NO: 52409 - DNA, 120 bp, Homo sapiens
  misc_feature: 1653 for SV(W|O) and mtDNA
gtgagcgatatactagtattcctagaagtgagatggtaaatgctagtataatatttatgtaaatgaggggcatttggtaaatatgattatcataatttaatgagtcgaaatcattcgttt

SEQ ID NO: 52410 - DNA, 120 bp, Homo sapiens
  misc_feature: 1653 for SV(W|O) and mtDNA
cccacaggtcctaaactaccaaacctgcattaaaaatttcggttggggcgacctcggagcagaacccaacctccgagcagtacatgctaagacttcaccagtcaaagcgaactactatac

SEQ ID NO: 52411 - DNA, 120 bp, Homo sapiens
  misc_feature: 1653 for SV(W|O) and mtDNA
gtaattaggaagatgagtagatatttgaagaactgattaatgtttgggtctgagtttatatatcacagtgagaattctatgatggaccatgtaacgaacaatgctacagggatgaatatt

SEQ ID NO: 52412 - DNA, 120 bp, Homo sapiens
  misc_feature: 1653 for SV(W|O) and mtDNA
ggttgtacggtagaactgctattattcatcctatgtgggtaattgaggagtatgctaagattttgcgtagctgggtttggtttaatccacctcaactgcctgctatgatggataagattg

SEQ ID NO: 52413 - DNA, 120 bp, Homo sapiens
  misc_feature: 1653 for SV(W|O) and mtDNA
catcggcgtaaatctaactttcttcccacaacactttctcggcctatccggaatgccccgacgttactcggactaccccgatgcatacaccacatgaaacatcctatcatctgtaggctc

SEQ ID NO: 52414 - DNA, 120 bp, Homo sapiens
  misc_feature: 1653 for SV(W|O) and mtDNA
ccaaagctaagacccccgaaaccagacgagctacctaagaacagctaaaagagcacacccgtctatgtagcaaaatagtgggaagatttataggtagaggcgacaaacctaccgagcctg

SEQ ID NO: 52415 - DNA, 120 bp, Homo sapiens
  misc_feature: 1653 for SV(W|O) and mtDNA
atggttatgttagggttgtacggtagaactgctattattcatcctatgtgggtaattgaggagtatgctaagattttgcgtagctgggtttggtttaatccacctcaactgcctgctatg

SEQ ID NO: 52416 - DNA, 120 bp, Homo sapiens
  misc_feature: 1653 for SV(W|O) and mtDNA
agtatagtacggatgctacttgtccaatgatggtaaaagggtagcttactggttgtcctccgattcaggttagaatgaggaggtctgcggctaggagtcaataaagtgattggcttagtg

SEQ ID NO: 52417 - DNA, 120 bp, Homo sapiens
  misc_feature: 1653 for SV(W|O) and mtDNA
actaagattagtatggtaattaggaagatgagtagatatttgaagaactgattaatgtttgggtctgagtttatatatcacagtgagaattctatgatggaccatgtaacgaacaatgct

SEQ ID NO: 52418 - DNA, 120 bp, Homo sapiens
  misc_feature: 1653 for SV(W|O) and mtDNA
aactaatatttcactttacatccaaacatcactttggcttcgaagccgccgcctgatactggcattttgtagatgtggtttgactatttctgtatgtctccatctattgatgagggtctt

SEQ ID NO: 52419 - DNA, 120 bp, Homo sapiens
  misc_feature: 1652 for SV(W|O) and mtDNA
aacaattatattactaccactgacatgactttccaaaaaacacataatttgaatcaacacaaccacccacagcctaattattagcatcatccctctactattttttaaccaaatcaacaa

SEQ ID NO: 52420 - DNA, 120 bp, Homo sapiens
  misc_feature: 1652 for SV(W|O) and mtDNA
acatcagtgggggtgaggtaaaatggctgagtgaagcattggactgtaaatctaaagacaggggttaggcctctttttaccagctccgaggtgattttcatattgaattgcaaattcgaa

SEQ ID NO: 52421 - DNA, 120 bp, Homo sapiens
  misc_feature: 1652 for SV(W|O) and mtDNA
ggttgtggatgatggacccggagcacataaatagtatggctttgaagaaggcgtgggtgcagatgtgcaggaatgctaggtgtggttggttgatgccgattgtaactattatgagtccta

SEQ ID NO: 52422 - DNA, 120 bp, Homo sapiens
  misc_feature: 1652 for SV(W|O) and mtDNA
actttacatccaaacatcactttggcttcgaagccgccgcctgatactggcattttgtagatgtggtttgactatttctgtatgtctccatctattgatgagggtcttactcttttagta

SEQ ID NO: 52423 - DNA, 120 bp, Homo sapiens
  misc_feature: 1652 for SV(W|O) and mtDNA
cagatttgggtaccacccaagtattgactcacccatcaacaaccgctatgtatttcgtacattactgccagccaccatgaatattgtacggtaccataaatacttgaccacctgtagtac

SEQ ID NO: 52424 - DNA, 120 bp, Homo sapiens
  misc_feature: 1652 for SV(W|O) and mtDNA
gaagtagtctagtttgaagcttagggagagctgggttgtttgggttgtggctcagtgtcagttcgagataataacttcttggtctaggcacatgaatattgttgtggggaagagactgat

SEQ ID NO: 52425 - DNA, 120 bp, Homo sapiens
  misc_feature: 1652 for SV(W|O) and mtDNA
ctgtggctacaaaaaatgttgagccgtagatgccgtcggaaatggtgaagggagactcgaagtactctgaggcttgtaggagggtaaaatagagacccagtaaaattgtaataagcagtg

SEQ ID NO: 52426 - DNA, 120 bp, Homo sapiens
  misc_feature: 1652 for SV(W|O) and mtDNA
aggggcatttggtaaatatgattatcataatttaatgagtcgaaatcattcgttttgtttaaactatataccaattcggttcagtctaatcctttttgtagtcactcataggccagactt

SEQ ID NO: 52427 - DNA, 120 bp, Homo sapiens
  misc_feature: 1652 for SV(W|O) and mtDNA
aagtatagtacggatgctacttgtccaatgatggtaaaagggtagcttactggttgtcctccgattcaggttagaatgaggaggtctgcggctaggagtcaataaagtgattggcttagt

SEQ ID NO: 52428 - DNA, 120 bp, Homo sapiens
  misc_feature: 1651 for SV(W|O) and mtDNA
tccctgtagcattgttcgttacatggtccatcatagaattctcactgtgatatataaactcagacccaaacattaatcagttcttcaaatatctactcatcttcctaattaccatactaa

SEQ ID NO: 52429 - DNA, 120 bp, Homo sapiens
  misc_feature: 1651 for SV(W|O) and mtDNA
ggattcatctttcttttcaccgtaggtggcctgactggcattgtattagcaaactcatcactagacatcgtactacacgacacgtactacgttgtagcccacttccactatgtcctatca

SEQ ID NO: 52430 - DNA, 120 bp, Homo sapiens
  misc_feature: 1651 for SV(W|O) and mtDNA
tgatagattggtccaattgggtatgaggagttcagttatatgtttgggattttttaggtagtgggtgttgagcttgaacgctttcttaattggtggctgcttttaggcctactatgggtg

SEQ ID NO: 52431 - DNA, 120 bp, Homo sapiens
  misc_feature: 1651 for SV(W|O) and mtDNA
agtgactacaaaaaggattagactgaaccgaattggtatatagtttaaacaaaacgaatgatttcgactcattaaattatgataatcatatttaccaaatgcccctcatttacataaata

SEQ ID NO: 52432 - DNA, 120 bp, Homo sapiens
  misc_feature: 1651 for SV(W|O) and mtDNA
ggtgatagctggttgtccaagatagaatcttagttcaactttaaatttgcccacagaaccctctaaatccccttgtaaatttaactgttagtccaaagaggaacagctctttggacacta

SEQ ID NO: 52433 - DNA, 120 bp, Homo sapiens
  misc_feature: 1651 for SV(W|O) and mtDNA
atagggtgatagattggtccaattgggtatgaggagttcagttatatgtttgggattttttaggtagtgggtgttgagcttgaacgctttcttaattggtggctgcttttaggcctacta

SEQ ID NO: 52434 - DNA, 120 bp, Homo sapiens
  misc_feature: 1651 for SV(W|O) and mtDNA
gtgatagctggttgtccaagatagaatcttagttcaactttaaatttgcccacagaaccctctaaatccccttgtaaatttaactgttagtccaaagaggaacagctctttggacactag

SEQ ID NO: 52435 - DNA, 120 bp, Homo sapiens
  misc_feature: 1651 for SV(W|O) and mtDNA
aagacccccgaaaccagacgagctacctaagaacagctaaaagagcacacccgtctatgtagcaaaatagtgggaagatttataggtagaggcgacaaacctaccgagcctggtgatagc

SEQ ID NO: 52436 - DNA, 120 bp, Homo sapiens
  misc_feature: 1651 for SV(W|O) and mtDNA
agtacctaacaaacccacaggtcctaaactaccaaacctgcattaaaaatttcggttggggcgacctcggagcagaacccaacctccgagcagtacatgctaagacttcaccagtcaaag

SEQ ID NO: 52437 - DNA, 120 bp, Homo sapiens
  misc_feature: 1651 for SV(W|O) and mtDNA
cactttacatccaaacatcactttggcttcgaagccgccgcctgatactggcattttgtagatgtggtttgactatttctgtatgtctccatctattgatgagggtcttactcttttagt

SEQ ID NO: 52438 - DNA, 120 bp, Homo sapiens
  misc_feature: 1650 for SV(W|O) and mtDNA
ttttgcgtattggggtcattggtgttcttgtagttgaaatacaacgatggtttttcatatcattggtcgtggttgtagtccgtgcgagaataatgatgtatgctttgtttctgttgagtg

SEQ ID NO: 52439 - DNA, 120 bp, Homo sapiens
  misc_feature: 1650 for SV(W|O) and mtDNA
tttgtggtttgtagagaatagtcaacggtcggcgaacatcagtgggggtgaggtaaaatggctgagtgaagcattggactgtaaatctaaagacaggggttaggcctctttttaccagct

SEQ ID NO: 52440 - DNA, 120 bp, Homo sapiens
  misc_feature: 1650 for SV(W|O) and mtDNA
tttactttttttaacctttccttatgagcatgcctgtgttgggttgacagtgagggtaataatgacttgttggttgattgtagatattgggctgttaattgtcagttcagtgttttaatc

SEQ ID NO: 52441 - DNA, 120 bp, Homo sapiens
  misc_feature: 1650 for SV(W|O) and mtDNA
ttgagaaagccatgttgttagacatgggggcatgagttagcagttcttgtgagctttctcggtaaataaggggtcgtaagcctctgttgtcagattcacaatctgatgttttggttaaac

SEQ ID NO: 52442 - DNA, 120 bp, Homo sapiens
  misc_feature: 1650 for SV(W|O) and mtDNA
acaggtcctaaactaccaaacctgcattaaaaatttcggttggggcgacctcggagcagaacccaacctccgagcagtacatgctaagacttcaccagtcaaagcgaactactatactca

SEQ ID NO: 52443 - DNA, 120 bp, Homo sapiens
  misc_feature: 1650 for SV(W|O) and mtDNA
tccgtactatacttcacaacaatcctaatcctaataccaactatctccctaattgaaaacaaaatactcaaatgggcctgtccttgtagtataaactaatacaccagtcttgtaaaccgg

SEQ ID NO: 52444 - DNA, 120 bp, Homo sapiens
  misc_feature: 1650 for SV(W|O) and mtDNA
tcatccgccaactaatatttcactttacatccaaacatcactttggcttcgaagccgccgcctgatactggcattttgtagatgtggtttgactatttctgtatgtctccatctattgat

SEQ ID NO: 52445 - DNA, 120 bp, Homo sapiens
  misc_feature: 1650 for SV(W|O) and mtDNA
agaagctgccatcaagtatttcctcacgcaagcaaccgcatccataatccttctaatagctatcctcttcaacaatatactctccggacaatgaaccataaccaatactaccaatcagta

SEQ ID NO: 52446 - DNA, 120 bp, Homo sapiens
  misc_feature: 1650 for SV(W|O) and mtDNA
ctagcatgtttatttctaggcctactcaggtaaaaaatcagtgcgagcttagcgctgtgatgagtgtgcctgcaaagatggtagagtagatgacgggttgggccaggggattaattagta

SEQ ID NO: 52447 - DNA, 120 bp, Homo sapiens
  misc_feature: 1650 for SV(W|O) and mtDNA
ctagaaataactttgcaaggagagccaaagctaagacccccgaaaccagacgagctacctaagaacagctaaaagagcacacccgtctatgtagcaaaatagtgggaagatttataggta

SEQ ID NO: 52448 - DNA, 120 bp, Homo sapiens
  misc_feature: 1650 for SV(W|O) and mtDNA
taaggttgtggatgatggacccggagcacataaatagtatggctttgaagaaggcgtgggtgcagatgtgcaggaatgctaggtgtggttggttgatgccgattgtaactattatgagtc

SEQ ID NO: 52449 - DNA, 120 bp, Homo sapiens
  misc_feature: 1650 for SV(W|O) and mtDNA
aaccatttcataactttgtcaaagttaaattataggctaaatcctatatatcttaatggcacatgcagcgcaagtaggtctacaagacgctacttcccctatcatagaagagcttatcac

SEQ ID NO: 52450 - DNA, 120 bp, Homo sapiens
  misc_feature: 1650 for SV(W|O) and mtDNA
gtcttactcttttagtataaatagtaccgttaacttccaattaactagttttgacaacattcaaaaaagagtaataaacttcgccttaattttaataatcaacaccctcctagccttact

SEQ ID NO: 52451 - DNA, 120 bp, Homo sapiens
  misc_feature: 1650 for SV(W|O) and mtDNA
atagtacggatgctacttgtccaatgatggtaaaagggtagcttactggttgtcctccgattcaggttagaatgaggaggtctgcggctaggagtcaataaagtgattggcttagtgggc

SEQ ID NO: 52452 - DNA, 120 bp, Homo sapiens
  misc_feature: 1650 for SV(W|O) and mtDNA
gagctgggttgtttgggttgtggctcagtgtcagttcgagataataacttcttggtctaggcacatgaatattgttgtggggaagagactgataataaaggtggatgcgacaatggattt

SEQ ID NO: 52453 - DNA, 120 bp, Homo sapiens
  misc_feature: 1650 for SV(W|O) and mtDNA
agtgaggaaagttgagccaataatgacgtgaagtccgtggaagcctgtggctacaaaaaatgttgagccgtagatgccgtcggaaatggtgaagggagactcgaagtactctgaggcttg

SEQ ID NO: 52454 - DNA, 120 bp, Homo sapiens
  misc_feature: 1650 for SV(W|O) and mtDNA
attaatgcaaacagtacctaacaaacccacaggtcctaaactaccaaacctgcattaaaaatttcggttggggcgacctcggagcagaacccaacctccgagcagtacatgctaagactt

SEQ ID NO: 52455 - DNA, 120 bp, Homo sapiens
  misc_feature: 1649 for SV(W|O) and mtDNA
ttagtataaatagtaccgttaacttccaattaactagttttgacaacattcaaaaaagagtaataaacttcgccttaattttaataatcaacaccctcctagccttactactaataatta

SEQ ID NO: 52456 - DNA, 120 bp, Homo sapiens
  misc_feature: 1649 for SV(W|O) and mtDNA
gcaaggactaacccctataccttctgcataatgaattaactagaaataactttgcaaggagagccaaagctaagacccccgaaaccagacgagctacctaagaacagctaaaagagcaca

SEQ ID NO: 52457 - DNA, 120 bp, Homo sapiens
  misc_feature: 1649 for SV(W|O) and mtDNA
atagtagagggatgatgctaataattaggctgtgggtggttgtgttgattcaaattatgtgttttttggaaagtcatgtcagtggtagtaatataattgttgggacgattagttttagca

SEQ ID NO: 52458 - DNA, 120 bp, Homo sapiens
  misc_feature: 1649 for SV(W|O) and mtDNA
tgaggggcatttggtaaatatgattatcataatttaatgagtcgaaatcattcgttttgtttaaactatataccaattcggttcagtctaatcctttttgtagtcactcataggccagac

SEQ ID NO: 52459 - DNA, 120 bp, Homo sapiens
  misc_feature: 1649 for SV(W|O) and mtDNA
tctacggctcaacattttttgtagccacaggcttccacggacttcacgtcattattggctcaactttcctcactatctgcttcatccgccaactaatatttcactttacatccaaacatc

SEQ ID NO: 52460 - DNA, 120 bp, Homo sapiens
  misc_feature: 1649 for SV(W|O) and mtDNA
tcacaagaactgctaactcatgcccccatgtctaacaacatggctttctcaacttttaaaggataacagctatccattggtcttaggccccaaaaattttggtgcaactccaaataaaag

SEQ ID NO: 52461 - DNA, 120 bp, Homo sapiens
  misc_feature: 1649 for SV(W|O) and mtDNA
tcaacggtcggcgaacatcagtgggggtgaggtaaaatggctgagtgaagcattggactgtaaatctaaagacaggggttaggcctctttttaccagctccgaggtgattttcatattga

SEQ ID NO: 52462 - DNA, 120 bp, Homo sapiens
  misc_feature: 1649 for SV(W|O) and mtDNA
cattgttaaggttgtggatgatggacccggagcacataaatagtatggctttgaagaaggcgtgggtgcagatgtgcaggaatgctaggtgtggttggttgatgccgattgtaactatta

SEQ ID NO: 52463 - DNA, 120 bp, Homo sapiens
  misc_feature: 1649 for SV(W|O) and mtDNA
gggagaggagggtggatggaattaagggtgttagtcatgttagcttgtttcaggtgcgagatagtagtagggtcgtggtgctggagtttaagttgagtagtaggaatgcggtagtagtta

SEQ ID NO: 52464 - DNA, 120 bp, Homo sapiens
  misc_feature: 1649 for SV(W|O) and mtDNA
attatattactaccactgacatgactttccaaaaaacacataatttgaatcaacacaaccacccacagcctaattattagcatcatccctctactattttttaaccaaatcaacaacaac

SEQ ID NO: 52465 - DNA, 120 bp, Homo sapiens
  misc_feature: 1649 for SV(W|O) and mtDNA
gaggggcatttggtaaatatgattatcataatttaatgagtcgaaatcattcgttttgtttaaactatataccaattcggttcagtctaatcctttttgtagtcactcataggccagact

SEQ ID NO: 52466 - DNA, 120 bp, Homo sapiens
  misc_feature: 1649 for SV(W|O) and mtDNA
actgacatgactttccaaaaaacacataatttgaatcaacacaaccacccacagcctaattattagcatcatccctctactattttttaaccaaatcaacaacaacctatttagctgttc

SEQ ID NO: 52467 - DNA, 120 bp, Homo sapiens
  misc_feature: 1649 for SV(W|O) and mtDNA
ctttggactaacagttaaatttacaaggggatttagagggttctgtgggcaaatttaaagttgaactaagattctatcttggacaaccagctatcaccaggctcggtaggtttgtcgcct

SEQ ID NO: 52468 - DNA, 120 bp, Homo sapiens
  misc_feature: 1649 for SV(W|O) and mtDNA
ctaattgaaaacaaaatactcaaatgggcctgtccttgtagtataaactaatacaccagtcttgtaaaccggagatgaaaacctttttccaaggacaaatcagagaaaaagtctttaact

SEQ ID NO: 52469 - DNA, 120 bp, Homo sapiens
  misc_feature: 1649 for SV(W|O) and mtDNA
ccctgtagcattgttcgttacatggtccatcatagaattctcactgtgatatataaactcagacccaaacattaatcagttcttcaaatatctactcatcttcctaattaccatactaat

SEQ ID NO: 52470 - DNA, 120 bp, Homo sapiens
  misc_feature: 1649 for SV(W|O) and mtDNA
cacaagaactgctaactcatgcccccatgtctaacaacatggctttctcaacttttaaaggataacagctatccattggtcttaggccccaaaaattttggtgcaactccaaataaaagt

SEQ ID NO: 52471 - DNA, 120 bp, Homo sapiens
  misc_feature: 1648 for SV(W|O) and mtDNA
ttactgctgttagagaaatgaatgagcctacagatgataggatgtttcatgtggtgtatgcatcggggtagtccgagtaacgtcggggcattccggataggccgagaaagtgttgtggga

SEQ ID NO: 52472 - DNA, 120 bp, Homo sapiens
  misc_feature: 1648 for SV(W|O) and mtDNA
atcagtgggggtgaggtaaaatggctgagtgaagcattggactgtaaatctaaagacaggggttaggcctctttttaccagctccgaggtgattttcatattgaattgcaaattcgaaga

SEQ ID NO: 52473 - DNA, 120 bp, Homo sapiens
  misc_feature: 1648 for SV(W|O) and mtDNA
aagttgagaaagccatgttgttagacatgggggcatgagttagcagttcttgtgagctttctcggtaaataaggggtcgtaagcctctgttgtcagattcacaatctgatgttttggtta

SEQ ID NO: 52474 - DNA, 120 bp, Homo sapiens
  misc_feature: 1648 for SV(W|O) and mtDNA
gtgtattagtttatactacaaggacaggcccatttgagtattttgttttcaattagggagatagttggtattaggattaggattgttgtgaagtatagtacggatgctacttgtccaatg

SEQ ID NO: 52475 - DNA, 120 bp, Homo sapiens
  misc_feature: 1648 for SV(W|O) and mtDNA
ggttagttttgcgtattggggtcattggtgttcttgtagttgaaatacaacgatggtttttcatatcattggtcgtggttgtagtccgtgcgagaataatgatgtatgctttgtttctgt

SEQ ID NO: 52476 - DNA, 120 bp, Homo sapiens
  misc_feature: 1648 for SV(W|O) and mtDNA
ggtgatagattggtccaattgggtatgaggagttcagttatatgtttgggattttttaggtagtgggtgttgagcttgaacgctttcttaattggtggctgcttttaggcctactatggg

SEQ ID NO: 52477 - DNA, 120 bp, Homo sapiens
  misc_feature: 1648 for SV(W|O) and mtDNA
gggttagttttgcgtattggggtcattggtgttcttgtagttgaaatacaacgatggtttttcatatcattggtcgtggttgtagtccgtgcgagaataatgatgtatgctttgtttctg

SEQ ID NO: 52478 - DNA, 120 bp, Homo sapiens
  misc_feature: 1648 for SV(W|O) and mtDNA
gccacaggcttccacggacttcacgtcattattggctcaactttcctcactatctgcttcatccgccaactaatatttcactttacatccaaacatcactttggcttcgaagccgccgcc

SEQ ID NO: 52479 - DNA, 120 bp, Homo sapiens
  misc_feature: 1648 for SV(W|O) and mtDNA
aatagtagagggatgatgctaataattaggctgtgggtggttgtgttgattcaaattatgtgttttttggaaagtcatgtcagtggtagtaatataattgttgggacgattagttttagc

SEQ ID NO: 52480 - DNA, 120 bp, Homo sapiens
  misc_feature: 1648 for SV(W|O) and mtDNA
attgttaaggttgtggatgatggacccggagcacataaatagtatggctttgaagaaggcgtgggtgcagatgtgcaggaatgctaggtgtggttggttgatgccgattgtaactattat

SEQ ID NO: 52481 - DNA, 120 bp, Homo sapiens
  misc_feature: 1648 for SV(W|O) and mtDNA
agactggtgtattagtttatactacaaggacaggcccatttgagtattttgttttcaattagggagatagttggtattaggattaggattgttgtgaagtatagtacggatgctacttgt

SEQ ID NO: 52482 - DNA, 120 bp, Homo sapiens
  misc_feature: 1647 for SV(W|O) and mtDNA
aaccagacgagctacctaagaacagctaaaagagcacacccgtctatgtagcaaaatagtgggaagatttataggtagaggcgacaaacctaccgagcctggtgatagctggttgtccaa

SEQ ID NO: 52483 - DNA, 120 bp, Homo sapiens
  misc_feature: 1647 for SV(W|O) and mtDNA
ttcactttacatccaaacatcactttggcttcgaagccgccgcctgatactggcattttgtagatgtggtttgactatttctgtatgtctccatctattgatgagggtcttactctttta

SEQ ID NO: 52484 - DNA, 120 bp, Homo sapiens
  misc_feature: 1647 for SV(W|O) and mtDNA
ttaactagaaataactttgcaaggagagccaaagctaagacccccgaaaccagacgagctacctaagaacagctaaaagagcacacccgtctatgtagcaaaatagtgggaagatttata

SEQ ID NO: 52485 - DNA, 120 bp, Homo sapiens
  misc_feature: 1647 for SV(W|O) and mtDNA
tgttcctctttggactaacagttaaatttacaaggggatttagagggttctgtgggcaaatttaaagttgaactaagattctatcttggacaaccagctatcaccaggctcggtaggttt

SEQ ID NO: 52486 - DNA, 120 bp, Homo sapiens
  misc_feature: 1647 for SV(W|O) and mtDNA
aagattagtatggtaattaggaagatgagtagatatttgaagaactgattaatgtttgggtctgagtttatatatcacagtgagaattctatgatggaccatgtaacgaacaatgctaca

SEQ ID NO: 52487 - DNA, 120 bp, Homo sapiens
  misc_feature: 1647 for SV(W|O) and mtDNA
aaaccagacgagctacctaagaacagctaaaagagcacacccgtctatgtagcaaaatagtgggaagatttataggtagaggcgacaaacctaccgagcctggtgatagctggttgtcca

SEQ ID NO: 52488 - DNA, 120 bp, Homo sapiens
  misc_feature: 1647 for SV(W|O) and mtDNA
actatcatattcatcggcgtaaatctaactttcttcccacaacactttctcggcctatccggaatgccccgacgttactcggactaccccgatgcatacaccacatgaaacatcctatca

SEQ ID NO: 52489 - DNA, 120 bp, Homo sapiens
  misc_feature: 1647 for SV(W|O) and mtDNA
cataatttaatgagtcgaaatcattcgttttgtttaaactatataccaattcggttcagtctaatcctttttgtagtcactcataggccagacttagggctaggatgatgattaataaga

SEQ ID NO: 52490 - DNA, 120 bp, Homo sapiens
  misc_feature: 1647 for SV(W|O) and mtDNA
gatagctggttgtccaagatagaatcttagttcaactttaaatttgcccacagaaccctctaaatccccttgtaaatttaactgttagtccaaagaggaacagctctttggacactagga

SEQ ID NO: 52491 - DNA, 120 bp, Homo sapiens
  misc_feature: 1647 for SV(W|O) and mtDNA
tagttttgcgtattggggtcattggtgttcttgtagttgaaatacaacgatggtttttcatatcattggtcgtggttgtagtccgtgcgagaataatgatgtatgctttgtttctgttga

SEQ ID NO: 52492 - DNA, 120 bp, Homo sapiens
  misc_feature: 1647 for SV(W|O) and mtDNA
cctgagttgtaaaaaactccagttgacacaaaatagactacgaaagtggctttaacatatctgaacacacaatagctaagacccaaactgggattagataccccactatgcttagcccta

SEQ ID NO: 52493 - DNA, 120 bp, Homo sapiens
  misc_feature: 1647 for SV(W|O) and mtDNA
gttttgcgtattggggtcattggtgttcttgtagttgaaatacaacgatggtttttcatatcattggtcgtggttgtagtccgtgcgagaataatgatgtatgctttgtttctgttgagt

SEQ ID NO: 52494 - DNA, 120 bp, Homo sapiens
  misc_feature: 1647 for SV(W|O) and mtDNA
ctagcatttaccatctcacttctaggaatactagtatatcgctcacacctcatatcctccctactatgcctagaaggaataatactatcgctgttcattatagctactctcataaccctc

SEQ ID NO: 52495 - DNA, 120 bp, Homo sapiens
  misc_feature: 1647 for SV(W|O) and mtDNA
aaagagctgttcctctttggactaacagttaaatttacaaggggatttagagggttctgtgggcaaatttaaagttgaactaagattctatcttggacaaccagctatcaccaggctcgg

SEQ ID NO: 52496 - DNA, 120 bp, Homo sapiens
  misc_feature: 1647 for SV(W|O) and mtDNA
agggttgtacggtagaactgctattattcatcctatgtgggtaattgaggagtatgctaagattttgcgtagctgggtttggtttaatccacctcaactgcctgctatgatggataagat

SEQ ID NO: 52497 - DNA, 120 bp, Homo sapiens
  misc_feature: 1647 for SV(W|O) and mtDNA
actagaaataactttgcaaggagagccaaagctaagacccccgaaaccagacgagctacctaagaacagctaaaagagcacacccgtctatgtagcaaaatagtgggaagatttataggt

SEQ ID NO: 52498 - DNA, 120 bp, Homo sapiens
  misc_feature: 1646 for SV(W|O) and mtDNA
gctggttgtccaagatagaatcttagttcaactttaaatttgcccacagaaccctctaaatccccttgtaaatttaactgttagtccaaagaggaacagctctttggacactaggaaaaa

SEQ ID NO: 52499 - DNA, 120 bp, Homo sapiens
  misc_feature: 1646 for SV(W|O) and mtDNA
ttcctcttgtaaatatagtttaaccaaaacatcagattgtgaatctgacaacagaggcttacgaccccttatttaccgagaaagctcacaagaactgctaactcatgcccccatgtctaa

SEQ ID NO: 52500 - DNA, 120 bp, Homo sapiens
  misc_feature: 1646 for SV(W|O) and mtDNA
ttaatgcaaacagtacctaacaaacccacaggtcctaaactaccaaacctgcattaaaaatttcggttggggcgacctcggagcagaacccaacctccgagcagtacatgctaagacttc

SEQ ID NO: 52501 - DNA, 120 bp, Homo sapiens
  misc_feature: 1646 for SV(W|O) and mtDNA
tggttatgttagggttgtacggtagaactgctattattcatcctatgtgggtaattgaggagtatgctaagattttgcgtagctgggtttggtttaatccacctcaactgcctgctatga

SEQ ID NO: 52502 - DNA, 120 bp, Homo sapiens
  misc_feature: 1646 for SV(W|O) and mtDNA
gtgaggaaagttgagccaataatgacgtgaagtccgtggaagcctgtggctacaaaaaatgttgagccgtagatgccgtcggaaatggtgaagggagactcgaagtactctgaggcttgt

SEQ ID NO: 52503 - DNA, 120 bp, Homo sapiens
  misc_feature: 1646 for SV(W|O) and mtDNA
gtatagtacggatgctacttgtccaatgatggtaaaagggtagcttactggttgtcctccgattcaggttagaatgaggaggtctgcggctaggagtcaataaagtgattggcttagtgg

SEQ ID NO: 52504 - DNA, 120 bp, Homo sapiens
  misc_feature: 1646 for SV(W|O) and mtDNA
gggttgtacggtagaactgctattattcatcctatgtgggtaattgaggagtatgctaagattttgcgtagctgggtttggtttaatccacctcaactgcctgctatgatggataagatt

SEQ ID NO: 52505 - DNA, 120 bp, Homo sapiens
  misc_feature: 1646 for SV(W|O) and mtDNA
ctgacatgactttccaaaaaacacataatttgaatcaacacaaccacccacagcctaattattagcatcatccctctactattttttaaccaaatcaacaacaacctatttagctgttcc

SEQ ID NO: 52506 - DNA, 120 bp, Homo sapiens
  misc_feature: 1646 for SV(W|O) and mtDNA
ctaggcacagctctaagcctccttattcgagccgagctgggccagccaggcaaccttctaggtaacgaccacatctacaacgttatcgtcacagcccatgcatttgtaataatcttcttc

SEQ ID NO: 52507 - DNA, 120 bp, Homo sapiens
  misc_feature: 1646 for SV(W|O) and mtDNA
acccccgaaaccagacgagctacctaagaacagctaaaagagcacacccgtctatgtagcaaaatagtgggaagatttataggtagaggcgacaaacctaccgagcctggtgatagctgg

SEQ ID NO: 52508 - DNA, 120 bp, Homo sapiens
  misc_feature: 1646 for SV(W|O) and mtDNA
agttattggatcaattgagtatagtagttcgctttgactggtgaagtcttagcatgtactgctcggaggttgggttctgctccgaggtcgccccaaccgaaatttttaatgcaggtttgg

SEQ ID NO: 52509 - DNA, 120 bp, Homo sapiens
  misc_feature: 1646 for SV(W|O) and mtDNA
caactaatatttcactttacatccaaacatcactttggcttcgaagccgccgcctgatactggcattttgtagatgtggtttgactatttctgtatgtctccatctattgatgagggtct

SEQ ID NO: 52510 - DNA, 120 bp, Homo sapiens
  misc_feature: 1646 for SV(W|O) and mtDNA
acaaaacgaatgatttcgactcattaaattatgataatcatatttaccaaatgcccctcatttacataaatattatactagcatttaccatctcacttctaggaatactagtatatcgct

SEQ ID NO: 52511 - DNA, 120 bp, Homo sapiens
  misc_feature: 1645 for SV(W|O) and mtDNA
tttcgcccactaagccaatcactttattgactcctagccgcagacctcctcattctaacctgaatcggaggacaaccagtaagctacccttttaccatcattggacaagtagcatccgta

SEQ ID NO: 52512 - DNA, 120 bp, Homo sapiens
  misc_feature: 1645 for SV(W|O) and mtDNA
ggatatgaggtgtgagcgatatactagtattcctagaagtgagatggtaaatgctagtataatatttatgtaaatgaggggcatttggtaaatatgattatcataatttaatgagtcgaa

SEQ ID NO: 52513 - DNA, 120 bp, Homo sapiens
  misc_feature: 1645 for SV(W|O) and mtDNA
ttagttttgcgtattggggtcattggtgttcttgtagttgaaatacaacgatggtttttcatatcattggtcgtggttgtagtccgtgcgagaataatgatgtatgctttgtttctgttg

SEQ ID NO: 52514 - DNA, 120 bp, Homo sapiens
  misc_feature: 1645 for SV(W|O) and mtDNA
tgtacggtagaactgctattattcatcctatgtgggtaattgaggagtatgctaagattttgcgtagctgggtttggtttaatccacctcaactgcctgctatgatggataagattgaga

SEQ ID NO: 52515 - DNA, 120 bp, Homo sapiens
  misc_feature: 1645 for SV(W|O) and mtDNA
cctatgagtgactacaaaaaggattagactgaaccgaattggtatatagtttaaacaaaacgaatgatttcgactcattaaattatgataatcatatttaccaaatgcccctcatttaca

SEQ ID NO: 52516 - DNA, 120 bp, Homo sapiens
  misc_feature: 1645 for SV(W|O) and mtDNA
tgagtagatatttgaagaactgattaatgtttgggtctgagtttatatatcacagtgagaattctatgatggaccatgtaacgaacaatgctacagggatgaatattatggagaagtagt

SEQ ID NO: 52517 - DNA, 120 bp, Homo sapiens
  misc_feature: 1645 for SV(W|O) and mtDNA
tctttggactaacagttaaatttacaaggggatttagagggttctgtgggcaaatttaaagttgaactaagattctatcttggacaaccagctatcaccaggctcggtaggtttgtcgcc

SEQ ID NO: 52518 - DNA, 120 bp, Homo sapiens
  misc_feature: 1645 for SV(W|O) and mtDNA
aggatatgaggtgtgagcgatatactagtattcctagaagtgagatggtaaatgctagtataatatttatgtaaatgaggggcatttggtaaatatgattatcataatttaatgagtcga

SEQ ID NO: 52519 - DNA, 120 bp, Homo sapiens
  misc_feature: 1645 for SV(W|O) and mtDNA
tcataatttaatgagtcgaaatcattcgttttgtttaaactatataccaattcggttcagtctaatcctttttgtagtcactcataggccagacttagggctaggatgatgattaataag

SEQ ID NO: 52520 - DNA, 120 bp, Homo sapiens
  misc_feature: 1645 for SV(W|O) and mtDNA
tactagtatatcgctcacacctcatatcctccctactatgcctagaaggaataatactatcgctgttcattatagctactctcataaccctcaacacccactccctcttagccaatattg

SEQ ID NO: 52521 - DNA, 120 bp, Homo sapiens
  misc_feature: 1645 for SV(W|O) and mtDNA
gggtcttactcttttagtataaatagtaccgttaacttccaattaactagttttgacaacattcaaaaaagagtaataaacttcgccttaattttaataatcaacaccctcctagcctta

SEQ ID NO: 52522 - DNA, 120 bp, Homo sapiens
  misc_feature: 1645 for SV(W|O) and mtDNA
gggtgatagattggtccaattgggtatgaggagttcagttatatgtttgggattttttaggtagtgggtgttgagcttgaacgctttcttaattggtggctgcttttaggcctactatgg

SEQ ID NO: 52523 - DNA, 120 bp, Homo sapiens
  misc_feature: 1645 for SV(W|O) and mtDNA
atctcacttctaggaatactagtatatcgctcacacctcatatcctccctactatgcctagaaggaataatactatcgctgttcattatagctactctcataaccctcaacacccactcc

SEQ ID NO: 52524 - DNA, 120 bp, Homo sapiens
  misc_feature: 1645 for SV(W|O) and mtDNA
gacctcctcattctaacctgaatcggaggacaaccagtaagctacccttttaccatcattggacaagtagcatccgtactatacttcacaacaatcctaatcctaataccaactatctcc

SEQ ID NO: 52525 - DNA, 120 bp, Homo sapiens
  misc_feature: 1645 for SV(W|O) and mtDNA
gatttgggtaccacccaagtattgactcacccatcaacaaccgctatgtatttcgtacattactgccagccaccatgaatattgtacggtaccataaatacttgaccacctgtagtacat

SEQ ID NO: 52526 - DNA, 120 bp, Homo sapiens
  misc_feature: 1645 for SV(W|O) and mtDNA
gactggtgtattagtttatactacaaggacaggcccatttgagtattttgttttcaattagggagatagttggtattaggattaggattgttgtgaagtatagtacggatgctacttgtc

SEQ ID NO: 52527 - DNA, 120 bp, Homo sapiens
  misc_feature: 1645 for SV(W|O) and mtDNA
agagccaaagctaagacccccgaaaccagacgagctacctaagaacagctaaaagagcacacccgtctatgtagcaaaatagtgggaagatttataggtagaggcgacaaacctaccgag

SEQ ID NO: 52528 - DNA, 120 bp, Homo sapiens
  misc_feature: 1645 for SV(W|O) and mtDNA
aaagttgagccaataatgacgtgaagtccgtggaagcctgtggctacaaaaaatgttgagccgtagatgccgtcggaaatggtgaagggagactcgaagtactctgaggcttgtaggagg

SEQ ID NO: 52529 - DNA, 120 bp, Homo sapiens
  misc_feature: 1645 for SV(W|O) and mtDNA
aatactagtatatcgctcacacctcatatcctccctactatgcctagaaggaataatactatcgctgttcattatagctactctcataaccctcaacacccactccctcttagccaatat

SEQ ID NO: 52530 - DNA, 120 bp, Homo sapiens
  misc_feature: 1644 for SV(W|O) and mtDNA
agtttatactacaaggacaggcccatttgagtattttgttttcaattagggagatagttggtattaggattaggattgttgtgaagtatagtacggatgctacttgtccaatgatggtaa

SEQ ID NO: 52531 - DNA, 120 bp, Homo sapiens
  misc_feature: 1644 for SV(W|O) and mtDNA
tgtccaagatagaatcttagttcaactttaaatttgcccacagaaccctctaaatccccttgtaaatttaactgttagtccaaagaggaacagctctttggacactaggaaaaaaccttg

SEQ ID NO: 52532 - DNA, 120 bp, Homo sapiens
  misc_feature: 1644 for SV(W|O) and mtDNA
tatgagggcgtgatcatgaaaggtgataagctcttctatgataggggaagtagcgtcttgtagacctacttgcgctgcatgtgccattaagatatataggatttagcctataatttaact

SEQ ID NO: 52533 - DNA, 120 bp, Homo sapiens
  misc_feature: 1644 for SV(W|O) and mtDNA
tagtagagggatgatgctaataattaggctgtgggtggttgtgttgattcaaattatgtgttttttggaaagtcatgtcagtggtagtaatataattgttgggacgattagttttagcat

SEQ ID NO: 52534 - DNA, 120 bp, Homo sapiens
  misc_feature: 1644 for SV(W|O) and mtDNA
gattatcataatttaatgagtcgaaatcattcgttttgtttaaactatataccaattcggttcagtctaatcctttttgtagtcactcataggccagacttagggctaggatgatgatta

SEQ ID NO: 52535 - DNA, 120 bp, Homo sapiens
  misc_feature: 1644 for SV(W|O) and mtDNA
taaatgaggggcatttggtaaatatgattatcataatttaatgagtcgaaatcattcgttttgtttaaactatataccaattcggttcagtctaatcctttttgtagtcactcataggcc

SEQ ID NO: 52536 - DNA, 120 bp, Homo sapiens
  misc_feature: 1644 for SV(W|O) and mtDNA
atttaccatctcacttctaggaatactagtatatcgctcacacctcatatcctccctactatgcctagaaggaataatactatcgctgttcattatagctactctcataaccctcaacac

SEQ ID NO: 52537 - DNA, 120 bp, Homo sapiens
  misc_feature: 1644 for SV(W|O) and mtDNA
cttactcttttagtataaatagtaccgttaacttccaattaactagttttgacaacattcaaaaaagagtaataaacttcgccttaattttaataatcaacaccctcctagccttactac

SEQ ID NO: 52538 - DNA, 120 bp, Homo sapiens
  misc_feature: 1644 for SV(W|O) and mtDNA
aaggttgtggatgatggacccggagcacataaatagtatggctttgaagaaggcgtgggtgcagatgtgcaggaatgctaggtgtggttggttgatgccgattgtaactattatgagtcc

SEQ ID NO: 52539 - DNA, 120 bp, Homo sapiens
  misc_feature: 1644 for SV(W|O) and mtDNA
ccacaggtcctaaactaccaaacctgcattaaaaatttcggttggggcgacctcggagcagaacccaacctccgagcagtacatgctaagacttcaccagtcaaagcgaactactatact

SEQ ID NO: 52540 - DNA, 120 bp, Homo sapiens
  misc_feature: 1644 for SV(W|O) and mtDNA
cacaattctaattctactgactatcctagaaatcgctgtcgccttaatccaagcctacgttttcacacttctagtaagcctctacctgcacgacaacacataatgacccaccaatcacat

SEQ ID NO: 52541 - DNA, 120 bp, Homo sapiens
  misc_feature: 1644 for SV(W|O) and mtDNA
atgattatcataatttaatgagtcgaaatcattcgttttgtttaaactatataccaattcggttcagtctaatcctttttgtagtcactcataggccagacttagggctaggatgatgat

SEQ ID NO: 52542 - DNA, 120 bp, Homo sapiens
  misc_feature: 1644 for SV(W|O) and mtDNA
agatgagtagatatttgaagaactgattaatgtttgggtctgagtttatatatcacagtgagaattctatgatggaccatgtaacgaacaatgctacagggatgaatattatggagaagt

SEQ ID NO: 52543 - DNA, 120 bp, Homo sapiens
  misc_feature: 1644 for SV(W|O) and mtDNA
actagtatatcgctcacacctcatatcctccctactatgcctagaaggaataatactatcgctgttcattatagctactctcataaccctcaacacccactccctcttagccaatattgt

SEQ ID NO: 52544 - DNA, 120 bp, Homo sapiens
  misc_feature: 1644 for SV(W|O) and mtDNA
aaagttgagaaagccatgttgttagacatgggggcatgagttagcagttcttgtgagctttctcggtaaataaggggtcgtaagcctctgttgtcagattcacaatctgatgttttggtt

SEQ ID NO: 52545 - DNA, 120 bp, Homo sapiens
  misc_feature: 1644 for SV(W|O) and mtDNA
aaaaatagtagagggatgatgctaataattaggctgtgggtggttgtgttgattcaaattatgtgttttttggaaagtcatgtcagtggtagtaatataattgttgggacgattagtttt

SEQ ID NO: 52546 - DNA, 120 bp, Homo sapiens
  misc_feature: 1643 for SV(W|O) and mtDNA
tttatttctaggcctactcaggtaaaaaatcagtgcgagcttagcgctgtgatgagtgtgcctgcaaagatggtagagtagatgacgggttgggccaggggattaattagtacgggaagg

SEQ ID NO: 52547 - DNA, 120 bp, Homo sapiens
  misc_feature: 1643 for SV(W|O) and mtDNA
ataatatagcaaggactaacccctataccttctgcataatgaattaactagaaataactttgcaaggagagccaaagctaagacccccgaaaccagacgagctacctaagaacagctaaa

SEQ ID NO: 52548 - DNA, 120 bp, Homo sapiens
  misc_feature: 1643 for SV(W|O) and mtDNA
atcataatttaatgagtcgaaatcattcgttttgtttaaactatataccaattcggttcagtctaatcctttttgtagtcactcataggccagacttagggctaggatgatgattaataa

SEQ ID NO: 52549 - DNA, 120 bp, Homo sapiens
  misc_feature: 1643 for SV(W|O) and mtDNA
ctacggctcaacattttttgtagccacaggcttccacggacttcacgtcattattggctcaactttcctcactatctgcttcatccgccaactaatatttcactttacatccaaacatca

SEQ ID NO: 52550 - DNA, 120 bp, Homo sapiens
  misc_feature: 1643 for SV(W|O) and mtDNA
atgaggggcatttggtaaatatgattatcataatttaatgagtcgaaatcattcgttttgtttaaactatataccaattcggttcagtctaatcctttttgtagtcactcataggccaga

SEQ ID NO: 52551 - DNA, 120 bp, Homo sapiens
  misc_feature: 1643 for SV(W|O) and mtDNA
tccctaattgaaaacaaaatactcaaatgggcctgtccttgtagtataaactaatacaccagtcttgtaaaccggagatgaaaacctttttccaaggacaaatcagagaaaaagtcttta

SEQ ID NO: 52552 - DNA, 120 bp, Homo sapiens
  misc_feature: 1643 for SV(W|O) and mtDNA
ataactttgtcaaagttaaattataggctaaatcctatatatcttaatggcacatgcagcgcaagtaggtctacaagacgctacttcccctatcatagaagagcttatcacctttcatga

SEQ ID NO: 52553 - DNA, 120 bp, Homo sapiens
  misc_feature: 1643 for SV(W|O) and mtDNA
atccgccaactaatatttcactttacatccaaacatcactttggcttcgaagccgccgcctgatactggcattttgtagatgtggtttgactatttctgtatgtctccatctattgatga

SEQ ID NO: 52554 - DNA, 120 bp, Homo sapiens
  misc_feature: 1643 for SV(W|O) and mtDNA
gattaggattgttgtgaagtatagtacggatgctacttgtccaatgatggtaaaagggtagcttactggttgtcctccgattcaggttagaatgaggaggtctgcggctaggagtcaata

SEQ ID NO: 52555 - DNA, 120 bp, Homo sapiens
  misc_feature: 1643 for SV(W|O) and mtDNA
actagtattcctagaagtgagatggtaaatgctagtataatatttatgtaaatgaggggcatttggtaaatatgattatcataatttaatgagtcgaaatcattcgttttgtttaaacta

SEQ ID NO: 52556 - DNA, 120 bp, Homo sapiens
  misc_feature: 1643 for SV(W|O) and mtDNA
tagggagaggagggtggatggaattaagggtgttagtcatgttagcttgtttcaggtgcgagatagtagtagggtcgtggtgctggagtttaagttgagtagtaggaatgcggtagtagt

SEQ ID NO: 52557 - DNA, 120 bp, Homo sapiens
  misc_feature: 1643 for SV(W|O) and mtDNA
ccaacaattatattactaccactgacatgactttccaaaaaacacataatttgaatcaacacaaccacccacagcctaattattagcatcatccctctactattttttaaccaaatcaac

SEQ ID NO: 52558 - DNA, 120 bp, Homo sapiens
  misc_feature: 1643 for SV(W|O) and mtDNA
acctcctcattctaacctgaatcggaggacaaccagtaagctacccttttaccatcattggacaagtagcatccgtactatacttcacaacaatcctaatcctaataccaactatctccc

SEQ ID NO: 52559 - DNA, 120 bp, Homo sapiens
  misc_feature: 1643 for SV(W|O) and mtDNA
gacccccgaaaccagacgagctacctaagaacagctaaaagagcacacccgtctatgtagcaaaatagtgggaagatttataggtagaggcgacaaacctaccgagcctggtgatagctg

SEQ ID NO: 52560 - DNA, 120 bp, Homo sapiens
  misc_feature: 1643 for SV(W|O) and mtDNA
aatcttatagaaatttaggttaaatacagaccaagagccttcaaagccctcagtaagttgcaatacttaatttctgtaacagctaaggactgcaaaaccccactctgcatcaactgaacg

SEQ ID NO: 52561 - DNA, 120 bp, Homo sapiens
  misc_feature: 1643 for SV(W|O) and mtDNA
aagttattggatcaattgagtatagtagttcgctttgactggtgaagtcttagcatgtactgctcggaggttgggttctgctccgaggtcgccccaaccgaaatttttaatgcaggtttg

SEQ ID NO: 52562 - DNA, 120 bp, Homo sapiens
  misc_feature: 1643 for SV(W|O) and mtDNA
attctaattctactgactatcctagaaatcgctgtcgccttaatccaagcctacgttttcacacttctagtaagcctctacctgcacgacaacacataatgacccaccaatcacatgcct

SEQ ID NO: 52563 - DNA, 120 bp, Homo sapiens
  misc_feature: 1642 for SV(W|O) and mtDNA
ttttagtataaatagtaccgttaacttccaattaactagttttgacaacattcaaaaaagagtaataaacttcgccttaattttaataatcaacaccctcctagccttactactaataat

SEQ ID NO: 52564 - DNA, 120 bp, Homo sapiens
  misc_feature: 1642 for SV(W|O) and mtDNA
taaagtgaaatattagttggcggatgaagcagatagtgaggaaagttgagccaataatgacgtgaagtccgtggaagcctgtggctacaaaaaatgttgagccgtagatgccgtcggaaa

SEQ ID NO: 52565 - DNA, 120 bp, Homo sapiens
  misc_feature: 1642 for SV(W|O) and mtDNA
gatgaacagttggaataggttgttagcggtaactaagattagtatggtaattaggaagatgagtagatatttgaagaactgattaatgtttgggtctgagtttatatatcacagtgagaa

SEQ ID NO: 52566 - DNA, 120 bp, Homo sapiens
  misc_feature: 1642 for SV(W|O) and mtDNA
ttcacaattctaattctactgactatcctagaaatcgctgtcgccttaatccaagcctacgttttcacacttctagtaagcctctacctgcacgacaacacataatgacccaccaatcac

SEQ ID NO: 52567 - DNA, 120 bp, Homo sapiens
  misc_feature: 1642 for SV(W|O) and mtDNA
attaggattgttgtgaagtatagtacggatgctacttgtccaatgatggtaaaagggtagcttactggttgtcctccgattcaggttagaatgaggaggtctgcggctaggagtcaataa

SEQ ID NO: 52568 - DNA, 120 bp, Homo sapiens
  misc_feature: 1642 for SV(W|O) and mtDNA
ccctaattgaaaacaaaatactcaaatgggcctgtccttgtagtataaactaatacaccagtcttgtaaaccggagatgaaaacctttttccaaggacaaatcagagaaaaagtctttaa

SEQ ID NO: 52569 - DNA, 120 bp, Homo sapiens
  misc_feature: 1642 for SV(W|O) and mtDNA
aatatttatgtaaatgaggggcatttggtaaatatgattatcataatttaatgagtcgaaatcattcgttttgtttaaactatataccaattcggttcagtctaatcctttttgtagtca

SEQ ID NO: 52570 - DNA, 120 bp, Homo sapiens
  misc_feature: 1642 for SV(W|O) and mtDNA
agaagtagtctagtttgaagcttagggagagctgggttgtttgggttgtggctcagtgtcagttcgagataataacttcttggtctaggcacatgaatattgttgtggggaagagactga

SEQ ID NO: 52571 - DNA, 120 bp, Homo sapiens
  misc_feature: 1642 for SV(W|O) and mtDNA
atccctgtagcattgttcgttacatggtccatcatagaattctcactgtgatatataaactcagacccaaacattaatcagttcttcaaatatctactcatcttcctaattaccatacta

SEQ ID NO: 52572 - DNA, 120 bp, Homo sapiens
  misc_feature: 1642 for SV(W|O) and mtDNA
ctaggattcatctttcttttcaccgtaggtggcctgactggcattgtattagcaaactcatcactagacatcgtactacacgacacgtactacgttgtagcccacttccactatgtccta

SEQ ID NO: 52573 - DNA, 120 bp, Homo sapiens
  misc_feature: 1642 for SV(W|O) and mtDNA
agagctgttcctctttggactaacagttaaatttacaaggggatttagagggttctgtgggcaaatttaaagttgaactaagattctatcttggacaaccagctatcaccaggctcggta

SEQ ID NO: 52574 - DNA, 120 bp, Homo sapiens
  misc_feature: 1642 for SV(W|O) and mtDNA
gttcctctttggactaacagttaaatttacaaggggatttagagggttctgtgggcaaatttaaagttgaactaagattctatcttggacaaccagctatcaccaggctcggtaggtttg

SEQ ID NO: 52575 - DNA, 120 bp, Homo sapiens
  misc_feature: 1642 for SV(W|O) and mtDNA
ggtcttactcttttagtataaatagtaccgttaacttccaattaactagttttgacaacattcaaaaaagagtaataaacttcgccttaattttaataatcaacaccctcctagccttac

SEQ ID NO: 52576 - DNA, 120 bp, Homo sapiens
  misc_feature: 1642 for SV(W|O) and mtDNA
ctgggttgtttgggttgtggctcagtgtcagttcgagataataacttcttggtctaggcacatgaatattgttgtggggaagagactgataataaaggtggatgcgacaatggattttac

SEQ ID NO: 52577 - DNA, 120 bp, Homo sapiens
  misc_feature: 1642 for SV(W|O) and mtDNA
gcttcatccgccaactaatatttcactttacatccaaacatcactttggcttcgaagccgccgcctgatactggcattttgtagatgtggtttgactatttctgtatgtctccatctatt

SEQ ID NO: 52578 - DNA, 120 bp, Homo sapiens
  misc_feature: 1642 for SV(W|O) and mtDNA
gccctaggattcatctttcttttcaccgtaggtggcctgactggcattgtattagcaaactcatcactagacatcgtactacacgacacgtactacgttgtagcccacttccactatgtc

SEQ ID NO: 52579 - DNA, 120 bp, Homo sapiens
  misc_feature: 1642 for SV(W|O) and mtDNA
gatggggggaattagggaagtcagggttagggtggttatagtagtgtgcatggttattacttttatttggagttgcaccaaaatttttggggcctaagaccaatggatagctgttatcct

SEQ ID NO: 52580 - DNA, 120 bp, Homo sapiens
  misc_feature: 1642 for SV(W|O) and mtDNA
gaacagttggaataggttgttagcggtaactaagattagtatggtaattaggaagatgagtagatatttgaagaactgattaatgtttgggtctgagtttatatatcacagtgagaattc

SEQ ID NO: 52581 - DNA, 120 bp, Homo sapiens
  misc_feature: 1642 for SV(W|O) and mtDNA
cctctttggactaacagttaaatttacaaggggatttagagggttctgtgggcaaatttaaagttgaactaagattctatcttggacaaccagctatcaccaggctcggtaggtttgtcg

SEQ ID NO: 52582 - DNA, 120 bp, Homo sapiens
  misc_feature: 1641 for SV(W|O) and mtDNA
gtttatactacaaggacaggcccatttgagtattttgttttcaattagggagatagttggtattaggattaggattgttgtgaagtatagtacggatgctacttgtccaatgatggtaaa

SEQ ID NO: 52583 - DNA, 120 bp, Homo sapiens
  misc_feature: 1641 for SV(W|O) and mtDNA
tgtttatttctaggcctactcaggtaaaaaatcagtgcgagcttagcgctgtgatgagtgtgcctgcaaagatggtagagtagatgacgggttgggccaggggattaattagtacgggaa

SEQ ID NO: 52584 - DNA, 120 bp, Homo sapiens
  misc_feature: 1641 for SV(W|O) and mtDNA
aggcatagtagggaggatatgaggtgtgagcgatatactagtattcctagaagtgagatggtaaatgctagtataatatttatgtaaatgaggggcatttggtaaatatgattatcataa

SEQ ID NO: 52585 - DNA, 120 bp, Homo sapiens
  misc_feature: 1641 for SV(W|O) and mtDNA
tacggctcaacattttttgtagccacaggcttccacggacttcacgtcattattggctcaactttcctcactatctgcttcatccgccaactaatatttcactttacatccaaacatcac

SEQ ID NO: 52586 - DNA, 120 bp, Homo sapiens
  misc_feature: 1641 for SV(W|O) and mtDNA
atagtagggaggatatgaggtgtgagcgatatactagtattcctagaagtgagatggtaaatgctagtataatatttatgtaaatgaggggcatttggtaaatatgattatcataattta

SEQ ID NO: 52587 - DNA, 120 bp, Homo sapiens
  misc_feature: 1641 for SV(W|O) and mtDNA
gatatactagtattcctagaagtgagatggtaaatgctagtataatatttatgtaaatgaggggcatttggtaaatatgattatcataatttaatgagtcgaaatcattcgttttgttta

SEQ ID NO: 52588 - DNA, 120 bp, Homo sapiens
  misc_feature: 1641 for SV(W|O) and mtDNA
ggttatgttagggttgtacggtagaactgctattattcatcctatgtgggtaattgaggagtatgctaagattttgcgtagctgggtttggtttaatccacctcaactgcctgctatgat

SEQ ID NO: 52589 - DNA, 120 bp, Homo sapiens
  misc_feature: 1641 for SV(W|O) and mtDNA
aacaaaacgaatgatttcgactcattaaattatgataatcatatttaccaaatgcccctcatttacataaatattatactagcatttaccatctcacttctaggaatactagtatatcgc

SEQ ID NO: 52590 - DNA, 120 bp, Homo sapiens
  misc_feature: 1641 for SV(W|O) and mtDNA
gccaaagctaagacccccgaaaccagacgagctacctaagaacagctaaaagagcacacccgtctatgtagcaaaatagtgggaagatttataggtagaggcgacaaacctaccgagcct

SEQ ID NO: 52591 - DNA, 120 bp, Homo sapiens
  misc_feature: 1641 for SV(W|O) and mtDNA
cactatcatattcatcggcgtaaatctaactttcttcccacaacactttctcggcctatccggaatgccccgacgttactcggactaccccgatgcatacaccacatgaaacatcctatc

SEQ ID NO: 52592 - DNA, 120 bp, Homo sapiens
  misc_feature: 1641 for SV(W|O) and mtDNA
accagacgagctacctaagaacagctaaaagagcacacccgtctatgtagcaaaatagtgggaagatttataggtagaggcgacaaacctaccgagcctggtgatagctggttgtccaag

SEQ ID NO: 52593 - DNA, 120 bp, Homo sapiens
  misc_feature: 1641 for SV(W|O) and mtDNA
agtcaacggtcggcgaacatcagtgggggtgaggtaaaatggctgagtgaagcattggactgtaaatctaaagacaggggttaggcctctttttaccagctccgaggtgattttcatatt

SEQ ID NO: 52594 - DNA, 120 bp, Homo sapiens
  misc_feature: 1640 for SV(W|O) and mtDNA
ttgtggatgatggacccggagcacataaatagtatggctttgaagaaggcgtgggtgcagatgtgcaggaatgctaggtgtggttggttgatgccgattgtaactattatgagtcctagt

SEQ ID NO: 52595 - DNA, 120 bp, Homo sapiens
  misc_feature: 1640 for SV(W|O) and mtDNA
tgaggaaagttgagccaataatgacgtgaagtccgtggaagcctgtggctacaaaaaatgttgagccgtagatgccgtcggaaatggtgaagggagactcgaagtactctgaggcttgta

SEQ ID NO: 52596 - DNA, 120 bp, Homo sapiens
  misc_feature: 1640 for SV(W|O) and mtDNA
tcattgttaaggttgtggatgatggacccggagcacataaatagtatggctttgaagaaggcgtgggtgcagatgtgcaggaatgctaggtgtggttggttgatgccgattgtaactatt

SEQ ID NO: 52597 - DNA, 120 bp, Homo sapiens
  misc_feature: 1640 for SV(W|O) and mtDNA
tattattcggcgcatgagctggagtcctaggcacagctctaagcctccttattcgagccgagctgggccagccaggcaaccttctaggtaacgaccacatctacaacgttatcgtcacag

SEQ ID NO: 52598 - DNA, 120 bp, Homo sapiens
  misc_feature: 1640 for SV(W|O) and mtDNA
taggcatagtagggaggatatgaggtgtgagcgatatactagtattcctagaagtgagatggtaaatgctagtataatatttatgtaaatgaggggcatttggtaaatatgattatcata

SEQ ID NO: 52599 - DNA, 120 bp, Homo sapiens
  misc_feature: 1640 for SV(W|O) and mtDNA
tatagggtgatagattggtccaattgggtatgaggagttcagttatatgtttgggattttttaggtagtgggtgttgagcttgaacgctttcttaattggtggctgcttttaggcctact

SEQ ID NO: 52600 - DNA, 120 bp, Homo sapiens
  misc_feature: 1640 for SV(W|O) and mtDNA
taaaaaatagtagagggatgatgctaataattaggctgtgggtggttgtgttgattcaaattatgtgttttttggaaagtcatgtcagtggtagtaatataattgttgggacgattagtt

SEQ ID NO: 52601 - DNA, 120 bp, Homo sapiens
  misc_feature: 1640 for SV(W|O) and mtDNA
ctaatatttcactttacatccaaacatcactttggcttcgaagccgccgcctgatactggcattttgtagatgtggtttgactatttctgtatgtctccatctattgatgagggtcttac

SEQ ID NO: 52602 - DNA, 120 bp, Homo sapiens
  misc_feature: 1640 for SV(W|O) and mtDNA
gcctgtggctacaaaaaatgttgagccgtagatgccgtcggaaatggtgaagggagactcgaagtactctgaggcttgtaggagggtaaaatagagacccagtaaaattgtaataagcag

SEQ ID NO: 52603 - DNA, 120 bp, Homo sapiens
  misc_feature: 1640 for SV(W|O) and mtDNA
aaagtataggcgatagaaattgaaacctggcgcaatagatatagtaccgcaagggaaagatgaaaaattataaccaagcataatatagcaaggactaacccctataccttctgcataatg

SEQ ID NO: 52604 - DNA, 120 bp, Homo sapiens
  misc_feature: 1640 for SV(W|O) and mtDNA
aatcagtgaatgaagcctcctatgatggcaaatacagctcctattgataggacatagtggaagtgggctacaacgtagtacgtgtcgtgtagtacgatgtctagtgatgagtttgctaat

SEQ ID NO: 52605 - DNA, 120 bp, Homo sapiens
  misc_feature: 1639 for SV(W|O) and mtDNA
tcctcattctaacctgaatcggaggacaaccagtaagctacccttttaccatcattggacaagtagcatccgtactatacttcacaacaatcctaatcctaataccaactatctccctaa

SEQ ID NO: 52606 - DNA, 120 bp, Homo sapiens
  misc_feature: 1639 for SV(W|O) and mtDNA
tgtggctacaaaaaatgttgagccgtagatgccgtcggaaatggtgaagggagactcgaagtactctgaggcttgtaggagggtaaaatagagacccagtaaaattgtaataagcagtgc

SEQ ID NO: 52607 - DNA, 120 bp, Homo sapiens
  misc_feature: 1639 for SV(W|O) and mtDNA
cttcacaattctaattctactgactatcctagaaatcgctgtcgccttaatccaagcctacgttttcacacttctagtaagcctctacctgcacgacaacacataatgacccaccaatca

SEQ ID NO: 52608 - DNA, 120 bp, Homo sapiens
  misc_feature: 1639 for SV(W|O) and mtDNA
tgattatcataatttaatgagtcgaaatcattcgttttgtttaaactatataccaattcggttcagtctaatcctttttgtagtcactcataggccagacttagggctaggatgatgatt

SEQ ID NO: 52609 - DNA, 120 bp, Homo sapiens
  misc_feature: 1639 for SV(W|O) and mtDNA
ctcctagccgcagacctcctcattctaacctgaatcggaggacaaccagtaagctacccttttaccatcattggacaagtagcatccgtactatacttcacaacaatcctaatcctaata

SEQ ID NO: 52610 - DNA, 120 bp, Homo sapiens
  misc_feature: 1639 for SV(W|O) and mtDNA
atagtcaacggtcggcgaacatcagtgggggtgaggtaaaatggctgagtgaagcattggactgtaaatctaaagacaggggttaggcctctttttaccagctccgaggtgattttcata

SEQ ID NO: 52611 - DNA, 120 bp, Homo sapiens
  misc_feature: 1639 for SV(W|O) and mtDNA
aaatcatgaaaattattaatattactgctgttagagaaatgaatgagcctacagatgataggatgtttcatgtggtgtatgcatcggggtagtccgagtaacgtcggggcattccggata

SEQ ID NO: 52612 - DNA, 120 bp, Homo sapiens
  misc_feature: 1639 for SV(W|O) and mtDNA
taagattagtatggtaattaggaagatgagtagatatttgaagaactgattaatgtttgggtctgagtttatatatcacagtgagaattctatgatggaccatgtaacgaacaatgctac

SEQ ID NO: 52613 - DNA, 120 bp, Homo sapiens
  misc_feature: 1639 for SV(W|O) and mtDNA
gacagtgagggtaataatgacttgttggttgattgtagatattgggctgttaattgtcagttcagtgttttaatctgacgcaggcttatgcggaggagaatgttttcatgttacttatac

SEQ ID NO: 52614 - DNA, 120 bp, Homo sapiens
  misc_feature: 1639 for SV(W|O) and mtDNA
cctagccgcagacctcctcattctaacctgaatcggaggacaaccagtaagctacccttttaccatcattggacaagtagcatccgtactatacttcacaacaatcctaatcctaatacc

SEQ ID NO: 52615 - DNA, 120 bp, Homo sapiens
  misc_feature: 1639 for SV(W|O) and mtDNA
ggaggatatgaggtgtgagcgatatactagtattcctagaagtgagatggtaaatgctagtataatatttatgtaaatgaggggcatttggtaaatatgattatcataatttaatgagtc

SEQ ID NO: 52616 - DNA, 120 bp, Homo sapiens
  misc_feature: 1639 for SV(W|O) and mtDNA
agccacaggcttccacggacttcacgtcattattggctcaactttcctcactatctgcttcatccgccaactaatatttcactttacatccaaacatcactttggcttcgaagccgccgc

SEQ ID NO: 52617 - DNA, 120 bp, Homo sapiens
  misc_feature: 1639 for SV(W|O) and mtDNA
ctgactggcattgtattagcaaactcatcactagacatcgtactacacgacacgtactacgttgtagcccacttccactatgtcctatcaataggagctgtatttgccatcataggaggc

SEQ ID NO: 52618 - DNA, 120 bp, Homo sapiens
  misc_feature: 1639 for SV(W|O) and mtDNA
aatgaggggcatttggtaaatatgattatcataatttaatgagtcgaaatcattcgttttgtttaaactatataccaattcggttcagtctaatcctttttgtagtcactcataggccag

SEQ ID NO: 52619 - DNA, 120 bp, Homo sapiens
  misc_feature: 1639 for SV(W|O) and mtDNA
aatagtcaacggtcggcgaacatcagtgggggtgaggtaaaatggctgagtgaagcattggactgtaaatctaaagacaggggttaggcctctttttaccagctccgaggtgattttcat

SEQ ID NO: 52620 - DNA, 120 bp, Homo sapiens
  misc_feature: 1639 for SV(W|O) and mtDNA
atactagtatatcgctcacacctcatatcctccctactatgcctagaaggaataatactatcgctgttcattatagctactctcataaccctcaacacccactccctcttagccaatatt

SEQ ID NO: 52621 - DNA, 120 bp, Homo sapiens
  misc_feature: 1638 for SV(W|O) and mtDNA
tttagtataaatagtaccgttaacttccaattaactagttttgacaacattcaaaaaagagtaataaacttcgccttaattttaataatcaacaccctcctagccttactactaataatt

SEQ ID NO: 52622 - DNA, 120 bp, Homo sapiens
  misc_feature: 1638 for SV(W|O) and mtDNA
ttcattgttaaggttgtggatgatggacccggagcacataaatagtatggctttgaagaaggcgtgggtgcagatgtgcaggaatgctaggtgtggttggttgatgccgattgtaactat

SEQ ID NO: 52623 - DNA, 120 bp, Homo sapiens
  misc_feature: 1638 for SV(W|O) and mtDNA
aaatcagtgaatgaagcctcctatgatggcaaatacagctcctattgataggacatagtggaagtgggctacaacgtagtacgtgtcgtgtagtacgatgtctagtgatgagtttgctaa

SEQ ID NO: 52624 - DNA, 120 bp, Homo sapiens
  misc_feature: 1638 for SV(W|O) and mtDNA
caagaactgctaactcatgcccccatgtctaacaacatggctttctcaacttttaaaggataacagctatccattggtcttaggccccaaaaattttggtgcaactccaaataaaagtaa

SEQ ID NO: 52625 - DNA, 120 bp, Homo sapiens
  misc_feature: 1638 for SV(W|O) and mtDNA
tgtttggatgtaaagtgaaatattagttggcggatgaagcagatagtgaggaaagttgagccaataatgacgtgaagtccgtggaagcctgtggctacaaaaaatgttgagccgtagatg

SEQ ID NO: 52626 - DNA, 120 bp, Homo sapiens
  misc_feature: 1638 for SV(W|O) and mtDNA
agaaataactttgcaaggagagccaaagctaagacccccgaaaccagacgagctacctaagaacagctaaaagagcacacccgtctatgtagcaaaatagtgggaagatttataggtaga

SEQ ID NO: 52627 - DNA, 120 bp, Homo sapiens
  misc_feature: 1638 for SV(W|O) and mtDNA
tccgccaactaatatttcactttacatccaaacatcactttggcttcgaagccgccgcctgatactggcattttgtagatgtggtttgactatttctgtatgtctccatctattgatgag

SEQ ID NO: 52628 - DNA, 120 bp, Homo sapiens
  misc_feature: 1638 for SV(W|O) and mtDNA
gtatggtaattaggaagatgagtagatatttgaagaactgattaatgtttgggtctgagtttatatatcacagtgagaattctatgatggaccatgtaacgaacaatgctacagggatga

SEQ ID NO: 52629 - DNA, 120 bp, Homo sapiens
  misc_feature: 1638 for SV(W|O) and mtDNA
atttgggtaccacccaagtattgactcacccatcaacaaccgctatgtatttcgtacattactgccagccaccatgaatattgtacggtaccataaatacttgaccacctgtagtacata

SEQ ID NO: 52630 - DNA, 120 bp, Homo sapiens
  misc_feature: 1638 for SV(W|O) and mtDNA
gatgagtagatatttgaagaactgattaatgtttgggtctgagtttatatatcacagtgagaattctatgatggaccatgtaacgaacaatgctacagggatgaatattatggagaagta

SEQ ID NO: 52631 - DNA, 120 bp, Homo sapiens
  misc_feature: 1638 for SV(W|O) and mtDNA
agttttgcgtattggggtcattggtgttcttgtagttgaaatacaacgatggtttttcatatcattggtcgtggttgtagtccgtgcgagaataatgatgtatgctttgtttctgttgag

SEQ ID NO: 52632 - DNA, 120 bp, Homo sapiens
  misc_feature: 1638 for SV(W|O) and mtDNA
atggggggaattagggaagtcagggttagggtggttatagtagtgtgcatggttattacttttatttggagttgcaccaaaatttttggggcctaagaccaatggatagctgttatcctt

SEQ ID NO: 52633 - DNA, 120 bp, Homo sapiens
  misc_feature: 1638 for SV(W|O) and mtDNA
agggctaagcatagtggggtatctaatcccagtttgggtcttagctattgtgtgttcagatatgttaaagccactttcgtagtctattttgtgtcaactggagttttttacaactcaggt

SEQ ID NO: 52634 - DNA, 120 bp, Homo sapiens
  misc_feature: 1637 for SV(W|O) and mtDNA
ttattaatgcaaacagtacctaacaaacccacaggtcctaaactaccaaacctgcattaaaaatttcggttggggcgacctcggagcagaacccaacctccgagcagtacatgctaagac

SEQ ID NO: 52635 - DNA, 120 bp, Homo sapiens
  misc_feature: 1637 for SV(W|O) and mtDNA
taccatctcacttctaggaatactagtatatcgctcacacctcatatcctccctactatgcctagaaggaataatactatcgctgttcattatagctactctcataaccctcaacaccca

SEQ ID NO: 52636 - DNA, 120 bp, Homo sapiens
  misc_feature: 1637 for SV(W|O) and mtDNA
atgtttatttctaggcctactcaggtaaaaaatcagtgcgagcttagcgctgtgatgagtgtgcctgcaaagatggtagagtagatgacgggttgggccaggggattaattagtacggga

SEQ ID NO: 52637 - DNA, 120 bp, Homo sapiens
  misc_feature: 1637 for SV(W|O) and mtDNA
tagtcaacggtcggcgaacatcagtgggggtgaggtaaaatggctgagtgaagcattggactgtaaatctaaagacaggggttaggcctctttttaccagctccgaggtgattttcatat

SEQ ID NO: 52638 - DNA, 120 bp, Homo sapiens
  misc_feature: 1637 for SV(W|O) and mtDNA
gcctatgagtgactacaaaaaggattagactgaaccgaattggtatatagtttaaacaaaacgaatgatttcgactcattaaattatgataatcatatttaccaaatgcccctcatttac

SEQ ID NO: 52639 - DNA, 120 bp, Homo sapiens
  misc_feature: 1637 for SV(W|O) and mtDNA
ggagagccaaagctaagacccccgaaaccagacgagctacctaagaacagctaaaagagcacacccgtctatgtagcaaaatagtgggaagatttataggtagaggcgacaaacctaccg

SEQ ID NO: 52640 - DNA, 120 bp, Homo sapiens
  misc_feature: 1637 for SV(W|O) and mtDNA
gagtgactacaaaaaggattagactgaaccgaattggtatatagtttaaacaaaacgaatgatttcgactcattaaattatgataatcatatttaccaaatgcccctcatttacataaat

SEQ ID NO: 52641 - DNA, 120 bp, Homo sapiens
  misc_feature: 1637 for SV(W|O) and mtDNA
gactttccaaaaaacacataatttgaatcaacacaaccacccacagcctaattattagcatcatccctctactattttttaaccaaatcaacaacaacctatttagctgttccccaacct

SEQ ID NO: 52642 - DNA, 120 bp, Homo sapiens
  misc_feature: 1637 for SV(W|O) and mtDNA
ctccctaattgaaaacaaaatactcaaatgggcctgtccttgtagtataaactaatacaccagtcttgtaaaccggagatgaaaacctttttccaaggacaaatcagagaaaaagtcttt

SEQ ID NO: 52643 - DNA, 120 bp, Homo sapiens
  misc_feature: 1637 for SV(W|O) and mtDNA
ctagggagaggagggtggatggaattaagggtgttagtcatgttagcttgtttcaggtgcgagatagtagtagggtcgtggtgctggagtttaagttgagtagtaggaatgcggtagtag

SEQ ID NO: 52644 - DNA, 120 bp, Homo sapiens
  misc_feature: 1637 for SV(W|O) and mtDNA
catccgccaactaatatttcactttacatccaaacatcactttggcttcgaagccgccgcctgatactggcattttgtagatgtggtttgactatttctgtatgtctccatctattgatg

SEQ ID NO: 52645 - DNA, 120 bp, Homo sapiens
  misc_feature: 1637 for SV(W|O) and mtDNA
agacccccgaaaccagacgagctacctaagaacagctaaaagagcacacccgtctatgtagcaaaatagtgggaagatttataggtagaggcgacaaacctaccgagcctggtgatagct

SEQ ID NO: 52646 - DNA, 120 bp, Homo sapiens
  misc_feature: 1637 for SV(W|O) and mtDNA
aaaagttgagaaagccatgttgttagacatgggggcatgagttagcagttcttgtgagctttctcggtaaataaggggtcgtaagcctctgttgtcagattcacaatctgatgttttggt

SEQ ID NO: 52647 - DNA, 120 bp, Homo sapiens
  misc_feature: 1636 for SV(W|O) and mtDNA
ttctatagggtgatagattggtccaattgggtatgaggagttcagttatatgtttgggattttttaggtagtgggtgttgagcttgaacgctttcttaattggtggctgcttttaggcct

SEQ ID NO: 52648 - DNA, 120 bp, Homo sapiens
  misc_feature: 1636 for SV(W|O) and mtDNA
tctcacttctaggaatactagtatatcgctcacacctcatatcctccctactatgcctagaaggaataatactatcgctgttcattatagctactctcataaccctcaacacccactccc

SEQ ID NO: 52649 - DNA, 120 bp, Homo sapiens
  misc_feature: 1636 for SV(W|O) and mtDNA
tatactagcatttaccatctcacttctaggaatactagtatatcgctcacacctcatatcctccctactatgcctagaaggaataatactatcgctgttcattatagctactctcataac

SEQ ID NO: 52650 - DNA, 120 bp, Homo sapiens
  misc_feature: 1636 for SV(W|O) and mtDNA
taatttaatgagtcgaaatcattcgttttgtttaaactatataccaattcggttcagtctaatcctttttgtagtcactcataggccagacttagggctaggatgatgattaataagagg

SEQ ID NO: 52651 - DNA, 120 bp, Homo sapiens
  misc_feature: 1636 for SV(W|O) and mtDNA
gcaaggagagccaaagctaagacccccgaaaccagacgagctacctaagaacagctaaaagagcacacccgtctatgtagcaaaatagtgggaagatttataggtagaggcgacaaacct

SEQ ID NO: 52652 - DNA, 120 bp, Homo sapiens
  misc_feature: 1636 for SV(W|O) and mtDNA
ccgccaactaatatttcactttacatccaaacatcactttggcttcgaagccgccgcctgatactggcattttgtagatgtggtttgactatttctgtatgtctccatctattgatgagg

SEQ ID NO: 52653 - DNA, 120 bp, Homo sapiens
  misc_feature: 1636 for SV(W|O) and mtDNA
atcatgaaaattattaatattactgctgttagagaaatgaatgagcctacagatgataggatgtttcatgtggtgtatgcatcggggtagtccgagtaacgtcggggcattccggatagg

SEQ ID NO: 52654 - DNA, 120 bp, Homo sapiens
  misc_feature: 1635 for SV(W|O) and mtDNA
ctcacaagaactgctaactcatgcccccatgtctaacaacatggctttctcaacttttaaaggataacagctatccattggtcttaggccccaaaaattttggtgcaactccaaataaaa

SEQ ID NO: 52655 - DNA, 120 bp, Homo sapiens
  misc_feature: 1635 for SV(W|O) and mtDNA
acagtacctaacaaacccacaggtcctaaactaccaaacctgcattaaaaatttcggttggggcgacctcggagcagaacccaacctccgagcagtacatgctaagacttcaccagtcaa

SEQ ID NO: 52656 - DNA, 120 bp, Homo sapiens
  misc_feature: 1635 for SV(W|O) and mtDNA
cttttactttttttaacctttccttatgagcatgcctgtgttgggttgacagtgagggtaataatgacttgttggttgattgtagatattgggctgttaattgtcagttcagtgttttaa

SEQ ID NO: 52657 - DNA, 120 bp, Homo sapiens
  misc_feature: 1635 for SV(W|O) and mtDNA
caagatagaatcttagttcaactttaaatttgcccacagaaccctctaaatccccttgtaaatttaactgttagtccaaagaggaacagctctttggacactaggaaaaaaccttgtaga

SEQ ID NO: 52658 - DNA, 120 bp, Homo sapiens
  misc_feature: 1635 for SV(W|O) and mtDNA
taaaagttgagaaagccatgttgttagacatgggggcatgagttagcagttcttgtgagctttctcggtaaataaggggtcgtaagcctctgttgtcagattcacaatctgatgttttgg

SEQ ID NO: 52659 - DNA, 120 bp, Homo sapiens
  misc_feature: 1635 for SV(W|O) and mtDNA
accatctcacttctaggaatactagtatatcgctcacacctcatatcctccctactatgcctagaaggaataatactatcgctgttcattatagctactctcataaccctcaacacccac

SEQ ID NO: 52660 - DNA, 120 bp, Homo sapiens
  misc_feature: 1635 for SV(W|O) and mtDNA
gtacctaacaaacccacaggtcctaaactaccaaacctgcattaaaaatttcggttggggcgacctcggagcagaacccaacctccgagcagtacatgctaagacttcaccagtcaaagc

SEQ ID NO: 52661 - DNA, 120 bp, Homo sapiens
  misc_feature: 1635 for SV(W|O) and mtDNA
ggtggcgcttccaattaggtgcatgagtaggtggcctgcagtaatgttagcggttaggcgtacggccagggctattggttgaatgagtaggctgatggtttcgataataactagtatggg

SEQ ID NO: 52662 - DNA, 120 bp, Homo sapiens
  misc_feature: 1635 for SV(W|O) and mtDNA
ggggttagttttgcgtattggggtcattggtgttcttgtagttgaaatacaacgatggtttttcatatcattggtcgtggttgtagtccgtgcgagaataatgatgtatgctttgtttct

SEQ ID NO: 52663 - DNA, 120 bp, Homo sapiens
  misc_feature: 1635 for SV(W|O) and mtDNA
gaaaccagacgagctacctaagaacagctaaaagagcacacccgtctatgtagcaaaatagtgggaagatttataggtagaggcgacaaacctaccgagcctggtgatagctggttgtcc

SEQ ID NO: 52664 - DNA, 120 bp, Homo sapiens
  misc_feature: 1635 for SV(W|O) and mtDNA
gagccaaagctaagacccccgaaaccagacgagctacctaagaacagctaaaagagcacacccgtctatgtagcaaaatagtgggaagatttataggtagaggcgacaaacctaccgagc

SEQ ID NO: 52665 - DNA, 120 bp, Homo sapiens
  misc_feature: 1635 for SV(W|O) and mtDNA
gctcaacattttttgtagccacaggcttccacggacttcacgtcattattggctcaactttcctcactatctgcttcatccgccaactaatatttcactttacatccaaacatcactttg

SEQ ID NO: 52666 - DNA, 120 bp, Homo sapiens
  misc_feature: 1635 for SV(W|O) and mtDNA
catttggtaaatatgattatcataatttaatgagtcgaaatcattcgttttgtttaaactatataccaattcggttcagtctaatcctttttgtagtcactcataggccagacttagggc

SEQ ID NO: 52667 - DNA, 120 bp, Homo sapiens
  misc_feature: 1635 for SV(W|O) and mtDNA
cacaggtcctaaactaccaaacctgcattaaaaatttcggttggggcgacctcggagcagaacccaacctccgagcagtacatgctaagacttcaccagtcaaagcgaactactatactc

SEQ ID NO: 52668 - DNA, 120 bp, Homo sapiens
  misc_feature: 1635 for SV(W|O) and mtDNA
acagtgagaattctatgatggaccatgtaacgaacaatgctacagggatgaatattatggagaagtagtctagtttgaagcttagggagagctgggttgtttgggttgtggctcagtgtc

SEQ ID NO: 52669 - DNA, 120 bp, Homo sapiens
  misc_feature: 1635 for SV(W|O) and mtDNA
ccgatgaacagttggaataggttgttagcggtaactaagattagtatggtaattaggaagatgagtagatatttgaagaactgattaatgtttgggtctgagtttatatatcacagtgag

SEQ ID NO: 52670 - DNA, 120 bp, Homo sapiens
  misc_feature: 1635 for SV(W|O) and mtDNA
ctagtattcctagaagtgagatggtaaatgctagtataatatttatgtaaatgaggggcatttggtaaatatgattatcataatttaatgagtcgaaatcattcgttttgtttaaactat

SEQ ID NO: 52671 - DNA, 120 bp, Homo sapiens
  misc_feature: 1635 for SV(W|O) and mtDNA
aaacaaaacgaatgatttcgactcattaaattatgataatcatatttaccaaatgcccctcatttacataaatattatactagcatttaccatctcacttctaggaatactagtatatcg

SEQ ID NO: 52672 - DNA, 120 bp, Homo sapiens
  misc_feature: 1635 for SV(W|O) and mtDNA
attattggctcaactttcctcactatctgcttcatccgccaactaatatttcactttacatccaaacatcactttggcttcgaagccgccgcctgatactggcattttgtagatgtggtt

SEQ ID NO: 52673 - DNA, 120 bp, Homo sapiens
  misc_feature: 1635 for SV(W|O) and mtDNA
agggggttagttttgcgtattggggtcattggtgttcttgtagttgaaatacaacgatggtttttcatatcattggtcgtggttgtagtccgtgcgagaataatgatgtatgctttgttt

SEQ ID NO: 52674 - DNA, 120 bp, Homo sapiens
  misc_feature: 1635 for SV(W|O) and mtDNA
actttccaaaaaacacataatttgaatcaacacaaccacccacagcctaattattagcatcatccctctactattttttaaccaaatcaacaacaacctatttagctgttccccaacctt

SEQ ID NO: 52675 - DNA, 120 bp, Homo sapiens
  misc_feature: 1634 for SV(W|O) and mtDNA
tttctagttaattcattatgcagaaggtataggggttagtccttgctatattatgcttggttataatttttcatctttcccttgcggtactatatctattgcgccaggtttcaatttcta

SEQ ID NO: 52676 - DNA, 120 bp, Homo sapiens
  misc_feature: 1634 for SV(W|O) and mtDNA
ttatcgaaaccatcagcctactcattcaaccaatagccctggccgtacgcctaaccgctaacattactgcaggccacctactcatgcacctaattggaagcgccaccctagcaatatcaa

SEQ ID NO: 52677 - DNA, 120 bp, Homo sapiens
  misc_feature: 1634 for SV(W|O) and mtDNA
ataaagtataggcgatagaaattgaaacctggcgcaatagatatagtaccgcaagggaaagatgaaaaattataaccaagcataatatagcaaggactaacccctataccttctgcataa

SEQ ID NO: 52678 - DNA, 120 bp, Homo sapiens
  misc_feature: 1634 for SV(W|O) and mtDNA
ttatactacaaggacaggcccatttgagtattttgttttcaattagggagatagttggtattaggattaggattgttgtgaagtatagtacggatgctacttgtccaatgatggtaaaag

SEQ ID NO: 52679 - DNA, 120 bp, Homo sapiens
  misc_feature: 1634 for SV(W|O) and mtDNA
ttaaaagttgagaaagccatgttgttagacatgggggcatgagttagcagttcttgtgagctttctcggtaaataaggggtcgtaagcctctgttgtcagattcacaatctgatgttttg

SEQ ID NO: 52680 - DNA, 120 bp, Homo sapiens
  misc_feature: 1634 for SV(W|O) and mtDNA
ccagacgagctacctaagaacagctaaaagagcacacccgtctatgtagcaaaatagtgggaagatttataggtagaggcgacaaacctaccgagcctggtgatagctggttgtccaaga

SEQ ID NO: 52681 - DNA, 120 bp, Homo sapiens
  misc_feature: 1634 for SV(W|O) and mtDNA
gagagccaaagctaagacccccgaaaccagacgagctacctaagaacagctaaaagagcacacccgtctatgtagcaaaatagtgggaagatttataggtagaggcgacaaacctaccga

SEQ ID NO: 52682 - DNA, 120 bp, Homo sapiens
  misc_feature: 1634 for SV(W|O) and mtDNA
tcatgaaaattattaatattactgctgttagagaaatgaatgagcctacagatgataggatgtttcatgtggtgtatgcatcggggtagtccgagtaacgtcggggcattccggataggc

SEQ ID NO: 52683 - DNA, 120 bp, Homo sapiens
  misc_feature: 1634 for SV(W|O) and mtDNA
atcagtgaatgaagcctcctatgatggcaaatacagctcctattgataggacatagtggaagtgggctacaacgtagtacgtgtcgtgtagtacgatgtctagtgatgagtttgctaata

SEQ ID NO: 52684 - DNA, 120 bp, Homo sapiens
  misc_feature: 1634 for SV(W|O) and mtDNA
tatactacaaggacaggcccatttgagtattttgttttcaattagggagatagttggtattaggattaggattgttgtgaagtatagtacggatgctacttgtccaatgatggtaaaagg

SEQ ID NO: 52685 - DNA, 120 bp, Homo sapiens
  misc_feature: 1634 for SV(W|O) and mtDNA
gaaatcagtgaatgaagcctcctatgatggcaaatacagctcctattgataggacatagtggaagtgggctacaacgtagtacgtgtcgtgtagtacgatgtctagtgatgagtttgcta

SEQ ID NO: 52686 - DNA, 120 bp, Homo sapiens
  misc_feature: 1634 for SV(W|O) and mtDNA
tagaaataactttgcaaggagagccaaagctaagacccccgaaaccagacgagctacctaagaacagctaaaagagcacacccgtctatgtagcaaaatagtgggaagatttataggtag

SEQ ID NO: 52687 - DNA, 120 bp, Homo sapiens
  misc_feature: 1634 for SV(W|O) and mtDNA
aaaatagtagagggatgatgctaataattaggctgtgggtggttgtgttgattcaaattatgtgttttttggaaagtcatgtcagtggtagtaatataattgttgggacgattagtttta

SEQ ID NO: 52688 - DNA, 120 bp, Homo sapiens
  misc_feature: 1634 for SV(W|O) and mtDNA
ggattaggattgttgtgaagtatagtacggatgctacttgtccaatgatggtaaaagggtagcttactggttgtcctccgattcaggttagaatgaggaggtctgcggctaggagtcaat

SEQ ID NO: 52689 - DNA, 120 bp, Homo sapiens
  misc_feature: 1634 for SV(W|O) and mtDNA
caattctaattctactgactatcctagaaatcgctgtcgccttaatccaagcctacgttttcacacttctagtaagcctctacctgcacgacaacacataatgacccaccaatcacatgc

SEQ ID NO: 52690 - DNA, 120 bp, Homo sapiens
  misc_feature: 1634 for SV(W|O) and mtDNA
gaggaaagttgagccaataatgacgtgaagtccgtggaagcctgtggctacaaaaaatgttgagccgtagatgccgtcggaaatggtgaagggagactcgaagtactctgaggcttgtag

SEQ ID NO: 52691 - DNA, 120 bp, Homo sapiens
  misc_feature: 1634 for SV(W|O) and mtDNA
agttgaactaagattctatcttggacaaccagctatcaccaggctcggtaggtttgtcgcctctacctataaatcttcccactattttgctacatagacgggtgtgctcttttagctgtt

SEQ ID NO: 52692 - DNA, 120 bp, Homo sapiens
  misc_feature: 1633 for SV(W|O) and mtDNA
caggtcctaaactaccaaacctgcattaaaaatttcggttggggcgacctcggagcagaacccaacctccgagcagtacatgctaagacttcaccagtcaaagcgaactactatactcaa

SEQ ID NO: 52693 - DNA, 120 bp, Homo sapiens
  misc_feature: 1633 for SV(W|O) and mtDNA
ttaaaaaatagtagagggatgatgctaataattaggctgtgggtggttgtgttgattcaaattatgtgttttttggaaagtcatgtcagtggtagtaatataattgttgggacgattagt

SEQ ID NO: 52694 - DNA, 120 bp, Homo sapiens
  misc_feature: 1633 for SV(W|O) and mtDNA
tcctagggagaggagggtggatggaattaagggtgttagtcatgttagcttgtttcaggtgcgagatagtagtagggtcgtggtgctggagtttaagttgagtagtaggaatgcggtagt

SEQ ID NO: 52695 - DNA, 120 bp, Homo sapiens
  misc_feature: 1633 for SV(W|O) and mtDNA
attattccttctaggcatagtagggaggatatgaggtgtgagcgatatactagtattcctagaagtgagatggtaaatgctagtataatatttatgtaaatgaggggcatttggtaaata

SEQ ID NO: 52696 - DNA, 120 bp, Homo sapiens
  misc_feature: 1633 for SV(W|O) and mtDNA
gattatgagggcgtgatcatgaaaggtgataagctcttctatgataggggaagtagcgtcttgtagacctacttgcgctgcatgtgccattaagatatataggatttagcctataattta

SEQ ID NO: 52697 - DNA, 120 bp, Homo sapiens
  misc_feature: 1633 for SV(W|O) and mtDNA
taaagtataggcgatagaaattgaaacctggcgcaatagatatagtaccgcaagggaaagatgaaaaattataaccaagcataatatagcaaggactaacccctataccttctgcataat

SEQ ID NO: 52698 - DNA, 120 bp, Homo sapiens
  misc_feature: 1633 for SV(W|O) and mtDNA
acaattatattactaccactgacatgactttccaaaaaacacataatttgaatcaacacaaccacccacagcctaattattagcatcatccctctactattttttaaccaaatcaacaac

SEQ ID NO: 52699 - DNA, 120 bp, Homo sapiens
  misc_feature: 1633 for SV(W|O) and mtDNA
ggttgtccaagatagaatcttagttcaactttaaatttgcccacagaaccctctaaatccccttgtaaatttaactgttagtccaaagaggaacagctctttggacactaggaaaaaacc

SEQ ID NO: 52700 - DNA, 120 bp, Homo sapiens
  misc_feature: 1633 for SV(W|O) and mtDNA
ggctacaaaaaatgttgagccgtagatgccgtcggaaatggtgaagggagactcgaagtactctgaggcttgtaggagggtaaaatagagacccagtaaaattgtaataagcagtgcttg

SEQ ID NO: 52701 - DNA, 120 bp, Homo sapiens
  misc_feature: 1633 for SV(W|O) and mtDNA
ccaactaatatttcactttacatccaaacatcactttggcttcgaagccgccgcctgatactggcattttgtagatgtggtttgactatttctgtatgtctccatctattgatgagggtc

SEQ ID NO: 52702 - DNA, 120 bp, Homo sapiens
  misc_feature: 1633 for SV(W|O) and mtDNA
ataatttaatgagtcgaaatcattcgttttgtttaaactatataccaattcggttcagtctaatcctttttgtagtcactcataggccagacttagggctaggatgatgattaataagag

SEQ ID NO: 52703 - DNA, 120 bp, Homo sapiens
  misc_feature: 1633 for SV(W|O) and mtDNA
ccaagatagaatcttagttcaactttaaatttgcccacagaaccctctaaatccccttgtaaatttaactgttagtccaaagaggaacagctctttggacactaggaaaaaaccttgtag

SEQ ID NO: 52704 - DNA, 120 bp, Homo sapiens
  misc_feature: 1633 for SV(W|O) and mtDNA
cctaggattcatctttcttttcaccgtaggtggcctgactggcattgtattagcaaactcatcactagacatcgtactacacgacacgtactacgttgtagcccacttccactatgtcct

SEQ ID NO: 52705 - DNA, 120 bp, Homo sapiens
  misc_feature: 1633 for SV(W|O) and mtDNA
ccagtgagttcaccctctaaatcaccacgatcaaaagggacaagcatcaagcacgcagcaatgcagctcaaaacgcttagcctagccacacccccacgggaaacagcagtgattaacctt

SEQ ID NO: 52706 - DNA, 120 bp, Homo sapiens
  misc_feature: 1633 for SV(W|O) and mtDNA
atttcgcccactaagccaatcactttattgactcctagccgcagacctcctcattctaacctgaatcggaggacaaccagtaagctacccttttaccatcattggacaagtagcatccgt

SEQ ID NO: 52707 - DNA, 120 bp, Homo sapiens
  misc_feature: 1633 for SV(W|O) and mtDNA
aaatgttggttatacccttcccgtactaattaatcccctggcccaacccgtcatctactctaccatctttgcaggcacactcatcacagcgctaagctcgcactgattttttacctgagt

SEQ ID NO: 52708 - DNA, 120 bp, Homo sapiens
  misc_feature: 1633 for SV(W|O) and mtDNA
aaaaaatagtagagggatgatgctaataattaggctgtgggtggttgtgttgattcaaattatgtgttttttggaaagtcatgtcagtggtagtaatataattgttgggacgattagttt

SEQ ID NO: 52709 - DNA, 120 bp, Homo sapiens
  misc_feature: 1632 for SV(W|O) and mtDNA
ttcactatcatattcatcggcgtaaatctaactttcttcccacaacactttctcggcctatccggaatgccccgacgttactcggactaccccgatgcatacaccacatgaaacatccta

SEQ ID NO: 52710 - DNA, 120 bp, Homo sapiens
  misc_feature: 1632 for SV(W|O) and mtDNA
ctttgccgcctgcgaagcagcggtgggcctagccctactagtctcaatctccaacacatatggcctagactacgtacataacctaaacctactccaatgctaaaactaatcgtcccaaca

SEQ ID NO: 52711 - DNA, 120 bp, Homo sapiens
  misc_feature: 1632 for SV(W|O) and mtDNA
taattctactgactatcctagaaatcgctgtcgccttaatccaagcctacgttttcacacttctagtaagcctctacctgcacgacaacacataatgacccaccaatcacatgcctatca

SEQ ID NO: 52712 - DNA, 120 bp, Homo sapiens
  misc_feature: 1632 for SV(W|O) and mtDNA
tctaattctactgactatcctagaaatcgctgtcgccttaatccaagcctacgttttcacacttctagtaagcctctacctgcacgacaacacataatgacccaccaatcacatgcctat

SEQ ID NO: 52713 - DNA, 120 bp, Homo sapiens
  misc_feature: 1632 for SV(W|O) and mtDNA
tcactatcatattcatcggcgtaaatctaactttcttcccacaacactttctcggcctatccggaatgccccgacgttactcggactaccccgatgcatacaccacatgaaacatcctat

SEQ ID NO: 52714 - DNA, 120 bp, Homo sapiens
  misc_feature: 1632 for SV(W|O) and mtDNA
tagtacggatgctacttgtccaatgatggtaaaagggtagcttactggttgtcctccgattcaggttagaatgaggaggtctgcggctaggagtcaataaagtgattggcttagtgggcg

SEQ ID NO: 52715 - DNA, 120 bp, Homo sapiens
  misc_feature: 1632 for SV(W|O) and mtDNA
gttgtggatgatggacccggagcacataaatagtatggctttgaagaaggcgtgggtgcagatgtgcaggaatgctaggtgtggttggttgatgccgattgtaactattatgagtcctag

SEQ ID NO: 52716 - DNA, 120 bp, Homo sapiens
  misc_feature: 1632 for SV(W|O) and mtDNA
gttatgttagggttgtacggtagaactgctattattcatcctatgtgggtaattgaggagtatgctaagattttgcgtagctgggtttggtttaatccacctcaactgcctgctatgatg

SEQ ID NO: 52717 - DNA, 120 bp, Homo sapiens
  misc_feature: 1632 for SV(W|O) and mtDNA
ggtcattggtgttcttgtagttgaaatacaacgatggtttttcatatcattggtcgtggttgtagtccgtgcgagaataatgatgtatgctttgtttctgttgagtgtgggtttagtaat

SEQ ID NO: 52718 - DNA, 120 bp, Homo sapiens
  misc_feature: 1632 for SV(W|O) and mtDNA
gaggatatgaggtgtgagcgatatactagtattcctagaagtgagatggtaaatgctagtataatatttatgtaaatgaggggcatttggtaaatatgattatcataatttaatgagtcg

SEQ ID NO: 52719 - DNA, 120 bp, Homo sapiens
  misc_feature: 1632 for SV(W|O) and mtDNA
aatcatgaaaattattaatattactgctgttagagaaatgaatgagcctacagatgataggatgtttcatgtggtgtatgcatcggggtagtccgagtaacgtcggggcattccggatag

SEQ ID NO: 52720 - DNA, 120 bp, Homo sapiens
  misc_feature: 1632 for SV(W|O) and mtDNA
atgagtagatatttgaagaactgattaatgtttgggtctgagtttatatatcacagtgagaattctatgatggaccatgtaacgaacaatgctacagggatgaatattatggagaagtag

SEQ ID NO: 52721 - DNA, 120 bp, Homo sapiens
  misc_feature: 1632 for SV(W|O) and mtDNA
ccctctaaatcaccacgatcaaaagggacaagcatcaagcacgcagcaatgcagctcaaaacgcttagcctagccacacccccacgggaaacagcagtgattaacctttagcaataaacg

SEQ ID NO: 52722 - DNA, 120 bp, Homo sapiens
  misc_feature: 1632 for SV(W|O) and mtDNA
aatttaatgagtcgaaatcattcgttttgtttaaactatataccaattcggttcagtctaatcctttttgtagtcactcataggccagacttagggctaggatgatgattaataagaggg

SEQ ID NO: 52723 - DNA, 120 bp, Homo sapiens
  misc_feature: 1632 for SV(W|O) and mtDNA
ccatctcacttctaggaatactagtatatcgctcacacctcatatcctccctactatgcctagaaggaataatactatcgctgttcattatagctactctcataaccctcaacacccact

SEQ ID NO: 52724 - DNA, 120 bp, Homo sapiens
  misc_feature: 1632 for SV(W|O) and mtDNA
caaacagtacctaacaaacccacaggtcctaaactaccaaacctgcattaaaaatttcggttggggcgacctcggagcagaacccaacctccgagcagtacatgctaagacttcaccagt

SEQ ID NO: 52725 - DNA, 120 bp, Homo sapiens
  misc_feature: 1632 for SV(W|O) and mtDNA
actagcatttaccatctcacttctaggaatactagtatatcgctcacacctcatatcctccctactatgcctagaaggaataatactatcgctgttcattatagctactctcataaccct

SEQ ID NO: 52726 - DNA, 120 bp, Homo sapiens
  misc_feature: 1631 for SV(W|O) and mtDNA
tttggactaacagttaaatttacaaggggatttagagggttctgtgggcaaatttaaagttgaactaagattctatcttggacaaccagctatcaccaggctcggtaggtttgtcgcctc

SEQ ID NO: 52727 - DNA, 120 bp, Homo sapiens
  misc_feature: 1631 for SV(W|O) and mtDNA
tttcactatcatattcatcggcgtaaatctaactttcttcccacaacactttctcggcctatccggaatgccccgacgttactcggactaccccgatgcatacaccacatgaaacatcct

SEQ ID NO: 52728 - DNA, 120 bp, Homo sapiens
  misc_feature: 1631 for SV(W|O) and mtDNA
gctcacaagaactgctaactcatgcccccatgtctaacaacatggctttctcaacttttaaaggataacagctatccattggtcttaggccccaaaaattttggtgcaactccaaataaa

SEQ ID NO: 52729 - DNA, 120 bp, Homo sapiens
  misc_feature: 1631 for SV(W|O) and mtDNA
ttactcttttagtataaatagtaccgttaacttccaattaactagttttgacaacattcaaaaaagagtaataaacttcgccttaattttaataatcaacaccctcctagccttactact

SEQ ID NO: 52730 - DNA, 120 bp, Homo sapiens
  misc_feature: 1631 for SV(W|O) and mtDNA
tgtggatgatggacccggagcacataaatagtatggctttgaagaaggcgtgggtgcagatgtgcaggaatgctaggtgtggttggttgatgccgattgtaactattatgagtcctagtt

SEQ ID NO: 52731 - DNA, 120 bp, Homo sapiens
  misc_feature: 1631 for SV(W|O) and mtDNA
tgcttcatccgccaactaatatttcactttacatccaaacatcactttggcttcgaagccgccgcctgatactggcattttgtagatgtggtttgactatttctgtatgtctccatctat

SEQ ID NO: 52732 - DNA, 120 bp, Homo sapiens
  misc_feature: 1631 for SV(W|O) and mtDNA
agcctgtggctacaaaaaatgttgagccgtagatgccgtcggaaatggtgaagggagactcgaagtactctgaggcttgtaggagggtaaaatagagacccagtaaaattgtaataagca

SEQ ID NO: 52733 - DNA, 120 bp, Homo sapiens
  misc_feature: 1631 for SV(W|O) and mtDNA
taggcacagctctaagcctccttattcgagccgagctgggccagccaggcaaccttctaggtaacgaccacatctacaacgttatcgtcacagcccatgcatttgtaataatcttcttca

SEQ ID NO: 52734 - DNA, 120 bp, Homo sapiens
  misc_feature: 1631 for SV(W|O) and mtDNA
ccgtactatacttcacaacaatcctaatcctaataccaactatctccctaattgaaaacaaaatactcaaatgggcctgtccttgtagtataaactaatacaccagtcttgtaaaccgga

SEQ ID NO: 52735 - DNA, 120 bp, Homo sapiens
  misc_feature: 1631 for SV(W|O) and mtDNA
tcattattggctcaactttcctcactatctgcttcatccgccaactaatatttcactttacatccaaacatcactttggcttcgaagccgccgcctgatactggcattttgtagatgtgg

SEQ ID NO: 52736 - DNA, 120 bp, Homo sapiens
  misc_feature: 1631 for SV(W|O) and mtDNA
tatagcaaggactaacccctataccttctgcataatgaattaactagaaataactttgcaaggagagccaaagctaagacccccgaaaccagacgagctacctaagaacagctaaaagag

SEQ ID NO: 52737 - DNA, 120 bp, Homo sapiens
  misc_feature: 1631 for SV(W|O) and mtDNA
ccttctaggcatagtagggaggatatgaggtgtgagcgatatactagtattcctagaagtgagatggtaaatgctagtataatatttatgtaaatgaggggcatttggtaaatatgatta

SEQ ID NO: 52738 - DNA, 120 bp, Homo sapiens
  misc_feature: 1631 for SV(W|O) and mtDNA
gtaccgcggccgttaaacatgtgtcactgggcaggcggtgcctctaatactggtgatgctagaggtgatgtttttggtaaacaggcggggtaagatttgccgagttccttttactttttt

SEQ ID NO: 52739 - DNA, 120 bp, Homo sapiens
  misc_feature: 1631 for SV(W|O) and mtDNA
gggaggatatgaggtgtgagcgatatactagtattcctagaagtgagatggtaaatgctagtataatatttatgtaaatgaggggcatttggtaaatatgattatcataatttaatgagt

SEQ ID NO: 52740 - DNA, 120 bp, Homo sapiens
  misc_feature: 1631 for SV(W|O) and mtDNA
ggatggggggaattagggaagtcagggttagggtggttatagtagtgtgcatggttattacttttatttggagttgcaccaaaatttttggggcctaagaccaatggatagctgttatcc

SEQ ID NO: 52741 - DNA, 120 bp, Homo sapiens
  misc_feature: 1631 for SV(W|O) and mtDNA
gcctgcgaagcagcggtgggcctagccctactagtctcaatctccaacacatatggcctagactacgtacataacctaaacctactccaatgctaaaactaatcgtcccaacaattatat

SEQ ID NO: 52742 - DNA, 120 bp, Homo sapiens
  misc_feature: 1631 for SV(W|O) and mtDNA
gcaaacagtacctaacaaacccacaggtcctaaactaccaaacctgcattaaaaatttcggttggggcgacctcggagcagaacccaacctccgagcagtacatgctaagacttcaccag

SEQ ID NO: 52743 - DNA, 120 bp, Homo sapiens
  misc_feature: 1631 for SV(W|O) and mtDNA
gagaagtagtctagtttgaagcttagggagagctgggttgtttgggttgtggctcagtgtcagttcgagataataacttcttggtctaggcacatgaatattgttgtggggaagagactg

SEQ ID NO: 52744 - DNA, 120 bp, Homo sapiens
  misc_feature: 1631 for SV(W|O) and mtDNA
aaacagtacctaacaaacccacaggtcctaaactaccaaacctgcattaaaaatttcggttggggcgacctcggagcagaacccaacctccgagcagtacatgctaagacttcaccagtc

SEQ ID NO: 52745 - DNA, 120 bp, Homo sapiens
  misc_feature: 1631 for SV(W|O) and mtDNA
ctttaaaagttgagaaagccatgttgttagacatgggggcatgagttagcagttcttgtgagctttctcggtaaataaggggtcgtaagcctctgttgtcagattcacaatctgatgttt

SEQ ID NO: 52746 - DNA, 120 bp, Homo sapiens
  misc_feature: 1631 for SV(W|O) and mtDNA
cgccaactaatatttcactttacatccaaacatcactttggcttcgaagccgccgcctgatactggcattttgtagatgtggtttgactatttctgtatgtctccatctattgatgaggg

SEQ ID NO: 52747 - DNA, 120 bp, Homo sapiens
  misc_feature: 1631 for SV(W|O) and mtDNA
cagtggtagtaatataattgttgggacgattagttttagcattggagtaggtttaggttatgtacgtagtctaggccatatgtgttggagattgagactagtagggctaggcccaccgct

SEQ ID NO: 52748 - DNA, 120 bp, Homo sapiens
  misc_feature: 1631 for SV(W|O) and mtDNA
attagggggttagttttgcgtattggggtcattggtgttcttgtagttgaaatacaacgatggtttttcatatcattggtcgtggttgtagtccgtgcgagaataatgatgtatgctttg

SEQ ID NO: 52749 - DNA, 120 bp, Homo sapiens
  misc_feature: 1631 for SV(W|O) and mtDNA
acggctcaacattttttgtagccacaggcttccacggacttcacgtcattattggctcaactttcctcactatctgcttcatccgccaactaatatttcactttacatccaaacatcact

SEQ ID NO: 52750 - DNA, 120 bp, Homo sapiens
  misc_feature: 1631 for SV(W|O) and mtDNA
agccctaggattcatctttcttttcaccgtaggtggcctgactggcattgtattagcaaactcatcactagacatcgtactacacgacacgtactacgttgtagcccacttccactatgt

SEQ ID NO: 52751 - DNA, 120 bp, Homo sapiens
  misc_feature: 1630 for SV(W|O) and mtDNA
tcagtgggggtgaggtaaaatggctgagtgaagcattggactgtaaatctaaagacaggggttaggcctctttttaccagctccgaggtgattttcatattgaattgcaaattcgaagaa

SEQ ID NO: 52752 - DNA, 120 bp, Homo sapiens
  misc_feature: 1630 for SV(W|O) and mtDNA
ttctaattctactgactatcctagaaatcgctgtcgccttaatccaagcctacgttttcacacttctagtaagcctctacctgcacgacaacacataatgacccaccaatcacatgccta

SEQ ID NO: 52753 - DNA, 120 bp, Homo sapiens
  misc_feature: 1630 for SV(W|O) and mtDNA
actcttttagtataaatagtaccgttaacttccaattaactagttttgacaacattcaaaaaagagtaataaacttcgccttaattttaataatcaacaccctcctagccttactactaa

SEQ ID NO: 52754 - DNA, 120 bp, Homo sapiens
  misc_feature: 1630 for SV(W|O) and mtDNA
aaatgaggggcatttggtaaatatgattatcataatttaatgagtcgaaatcattcgttttgtttaaactatataccaattcggttcagtctaatcctttttgtagtcactcataggcca

SEQ ID NO: 52755 - DNA, 120 bp, Homo sapiens
  misc_feature: 1630 for SV(W|O) and mtDNA
tagcatttaccatctcacttctaggaatactagtatatcgctcacacctcatatcctccctactatgcctagaaggaataatactatcgctgttcattatagctactctcataaccctca

SEQ ID NO: 52756 - DNA, 120 bp, Homo sapiens
  misc_feature: 1630 for SV(W|O) and mtDNA
tctatagggtgatagattggtccaattgggtatgaggagttcagttatatgtttgggattttttaggtagtgggtgttgagcttgaacgctttcttaattggtggctgcttttaggccta

SEQ ID NO: 52757 - DNA, 120 bp, Homo sapiens
  misc_feature: 1630 for SV(W|O) and mtDNA
tcctagccgcagacctcctcattctaacctgaatcggaggacaaccagtaagctacccttttaccatcattggacaagtagcatccgtactatacttcacaacaatcctaatcctaatac

SEQ ID NO: 52758 - DNA, 120 bp, Homo sapiens
  misc_feature: 1630 for SV(W|O) and mtDNA
tcagttgatgcagagtggggttttgcagtccttagctgttacagaaattaagtattgcaacttactgagggctttgaaggctcttggtctgtatttaacctaaatttctataagattatt

SEQ ID NO: 52759 - DNA, 120 bp, Homo sapiens
  misc_feature: 1630 for SV(W|O) and mtDNA
tatggtctgagctatgatatcaattggcttcctagggtttatcgtgtgagcacaccatatatttacagtaggaatagacgtagacacacgagcatatttcacctccgctaccataatcat

SEQ ID NO: 52760 - DNA, 120 bp, Homo sapiens
  misc_feature: 1630 for SV(W|O) and mtDNA
ggggaaatcagtgaatgaagcctcctatgatggcaaatacagctcctattgataggacatagtggaagtgggctacaacgtagtacgtgtcgtgtagtacgatgtctagtgatgagtttg

SEQ ID NO: 52761 - DNA, 120 bp, Homo sapiens
  misc_feature: 1630 for SV(W|O) and mtDNA
agccaaagctaagacccccgaaaccagacgagctacctaagaacagctaaaagagcacacccgtctatgtagcaaaatagtgggaagatttataggtagaggcgacaaacctaccgagcc

SEQ ID NO: 52762 - DNA, 120 bp, Homo sapiens
  misc_feature: 1630 for SV(W|O) and mtDNA
gcatagtagggaggatatgaggtgtgagcgatatactagtattcctagaagtgagatggtaaatgctagtataatatttatgtaaatgaggggcatttggtaaatatgattatcataatt

SEQ ID NO: 52763 - DNA, 120 bp, Homo sapiens
  misc_feature: 1630 for SV(W|O) and mtDNA
cctgtggctacaaaaaatgttgagccgtagatgccgtcggaaatggtgaagggagactcgaagtactctgaggcttgtaggagggtaaaatagagacccagtaaaattgtaataagcagt

SEQ ID NO: 52764 - DNA, 120 bp, Homo sapiens
  misc_feature: 1630 for SV(W|O) and mtDNA
catgtttatttctaggcctactcaggtaaaaaatcagtgcgagcttagcgctgtgatgagtgtgcctgcaaagatggtagagtagatgacgggttgggccaggggattaattagtacggg

SEQ ID NO: 52765 - DNA, 120 bp, Homo sapiens
  misc_feature: 1630 for SV(W|O) and mtDNA
aaagttgaactaagattctatcttggacaaccagctatcaccaggctcggtaggtttgtcgcctctacctataaatcttcccactattttgctacatagacgggtgtgctcttttagctg

SEQ ID NO: 52766 - DNA, 120 bp, Homo sapiens
  misc_feature: 1630 for SV(W|O) and mtDNA
agtagggaggatatgaggtgtgagcgatatactagtattcctagaagtgagatggtaaatgctagtataatatttatgtaaatgaggggcatttggtaaatatgattatcataatttaat

SEQ ID NO: 52767 - DNA, 120 bp, Homo sapiens
  misc_feature: 1629 for SV(W|O) and mtDNA
taatatagcaaggactaacccctataccttctgcataatgaattaactagaaataactttgcaaggagagccaaagctaagacccccgaaaccagacgagctacctaagaacagctaaaa

SEQ ID NO: 52768 - DNA, 120 bp, Homo sapiens
  misc_feature: 1629 for SV(W|O) and mtDNA
ttattccttctaggcatagtagggaggatatgaggtgtgagcgatatactagtattcctagaagtgagatggtaaatgctagtataatatttatgtaaatgaggggcatttggtaaatat

SEQ ID NO: 52769 - DNA, 120 bp, Homo sapiens
  misc_feature: 1629 for SV(W|O) and mtDNA
tattccttctaggcatagtagggaggatatgaggtgtgagcgatatactagtattcctagaagtgagatggtaaatgctagtataatatttatgtaaatgaggggcatttggtaaatatg

SEQ ID NO: 52770 - DNA, 120 bp, Homo sapiens
  misc_feature: 1629 for SV(W|O) and mtDNA
tagggggttagttttgcgtattggggtcattggtgttcttgtagttgaaatacaacgatggtttttcatatcattggtcgtggttgtagtccgtgcgagaataatgatgtatgctttgtt

SEQ ID NO: 52771 - DNA, 120 bp, Homo sapiens
  misc_feature: 1629 for SV(W|O) and mtDNA
ggcatttggtaaatatgattatcataatttaatgagtcgaaatcattcgttttgtttaaactatataccaattcggttcagtctaatcctttttgtagtcactcataggccagacttagg

SEQ ID NO: 52772 - DNA, 120 bp, Homo sapiens
  misc_feature: 1629 for SV(W|O) and mtDNA
gaaagttgagccaataatgacgtgaagtccgtggaagcctgtggctacaaaaaatgttgagccgtagatgccgtcggaaatggtgaagggagactcgaagtactctgaggcttgtaggag

SEQ ID NO: 52773 - DNA, 120 bp, Homo sapiens
  misc_feature: 1629 for SV(W|O) and mtDNA
aatatagcaaggactaacccctataccttctgcataatgaattaactagaaataactttgcaaggagagccaaagctaagacccccgaaaccagacgagctacctaagaacagctaaaag

SEQ ID NO: 52774 - DNA, 120 bp, Homo sapiens
  misc_feature: 1629 for SV(W|O) and mtDNA
aagttgagccaataatgacgtgaagtccgtggaagcctgtggctacaaaaaatgttgagccgtagatgccgtcggaaatggtgaagggagactcgaagtactctgaggcttgtaggaggg

SEQ ID NO: 52775 - DNA, 120 bp, Homo sapiens
  misc_feature: 1629 for SV(W|O) and mtDNA
aggggaaatcagtgaatgaagcctcctatgatggcaaatacagctcctattgataggacatagtggaagtgggctacaacgtagtacgtgtcgtgtagtacgatgtctagtgatgagttt

SEQ ID NO: 52776 - DNA, 120 bp, Homo sapiens
  misc_feature: 1629 for SV(W|O) and mtDNA
agctgggttgtttgggttgtggctcagtgtcagttcgagataataacttcttggtctaggcacatgaatattgttgtggggaagagactgataataaaggtggatgcgacaatggatttt

SEQ ID NO: 52777 - DNA, 120 bp, Homo sapiens
  misc_feature: 1628 for SV(W|O) and mtDNA
ttctcaaatcatgaaaattattaatattactgctgttagagaaatgaatgagcctacagatgataggatgtttcatgtggtgtatgcatcggggtagtccgagtaacgtcggggcattcc

SEQ ID NO: 52778 - DNA, 120 bp, Homo sapiens
  misc_feature: 1628 for SV(W|O) and mtDNA
ctctaaatcaccacgatcaaaagggacaagcatcaagcacgcagcaatgcagctcaaaacgcttagcctagccacacccccacgggaaacagcagtgattaacctttagcaataaacgaa

SEQ ID NO: 52779 - DNA, 120 bp, Homo sapiens
  misc_feature: 1628 for SV(W|O) and mtDNA
tgagccctaggattcatctttcttttcaccgtaggtggcctgactggcattgtattagcaaactcatcactagacatcgtactacacgacacgtactacgttgtagcccacttccactat

SEQ ID NO: 52780 - DNA, 120 bp, Homo sapiens
  misc_feature: 1628 for SV(W|O) and mtDNA
tcgcccactaagccaatcactttattgactcctagccgcagacctcctcattctaacctgaatcggaggacaaccagtaagctacccttttaccatcattggacaagtagcatccgtact

SEQ ID NO: 52781 - DNA, 120 bp, Homo sapiens
  misc_feature: 1628 for SV(W|O) and mtDNA
gaatactagtatatcgctcacacctcatatcctccctactatgcctagaaggaataatactatcgctgttcattatagctactctcataaccctcaacacccactccctcttagccaata

SEQ ID NO: 52782 - DNA, 120 bp, Homo sapiens
  misc_feature: 1628 for SV(W|O) and mtDNA
aatgttggttatacccttcccgtactaattaatcccctggcccaacccgtcatctactctaccatctttgcaggcacactcatcacagcgctaagctcgcactgattttttacctgagta

SEQ ID NO: 52783 - DNA, 120 bp, Homo sapiens
  misc_feature: 1628 for SV(W|O) and mtDNA
ataggcgatagaaattgaaacctggcgcaatagatatagtaccgcaagggaaagatgaaaaattataaccaagcataatatagcaaggactaacccctataccttctgcataatgaatta

SEQ ID NO: 52784 - DNA, 120 bp, Homo sapiens
  misc_feature: 1628 for SV(W|O) and mtDNA
ggggggaattagggaagtcagggttagggtggttatagtagtgtgcatggttattacttttatttggagttgcaccaaaatttttggggcctaagaccaatggatagctgttatccttta

SEQ ID NO: 52785 - DNA, 120 bp, Homo sapiens
  misc_feature: 1628 for SV(W|O) and mtDNA
gttagttttgcgtattggggtcattggtgttcttgtagttgaaatacaacgatggtttttcatatcattggtcgtggttgtagtccgtgcgagaataatgatgtatgctttgtttctgtt

SEQ ID NO: 52786 - DNA, 120 bp, Homo sapiens
  misc_feature: 1628 for SV(W|O) and mtDNA
gtggctacaaaaaatgttgagccgtagatgccgtcggaaatggtgaagggagactcgaagtactctgaggcttgtaggagggtaaaatagagacccagtaaaattgtaataagcagtgct

SEQ ID NO: 52787 - DNA, 120 bp, Homo sapiens
  misc_feature: 1628 for SV(W|O) and mtDNA
atatttatgtaaatgaggggcatttggtaaatatgattatcataatttaatgagtcgaaatcattcgttttgtttaaactatataccaattcggttcagtctaatcctttttgtagtcac

SEQ ID NO: 52788 - DNA, 120 bp, Homo sapiens
  misc_feature: 1628 for SV(W|O) and mtDNA
cctattattcggcgcatgagctggagtcctaggcacagctctaagcctccttattcgagccgagctgggccagccaggcaaccttctaggtaacgaccacatctacaacgttatcgtcac

SEQ ID NO: 52789 - DNA, 120 bp, Homo sapiens
  misc_feature: 1628 for SV(W|O) and mtDNA
caattgagtatagtagttcgctttgactggtgaagtcttagcatgtactgctcggaggttgggttctgctccgaggtcgccccaaccgaaatttttaatgcaggtttggtagtttaggac

SEQ ID NO: 52790 - DNA, 120 bp, Homo sapiens
  misc_feature: 1628 for SV(W|O) and mtDNA
gcggccgttaaacatgtgtcactgggcaggcggtgcctctaatactggtgatgctagaggtgatgtttttggtaaacaggcggggtaagatttgccgagttccttttactttttttaacc

SEQ ID NO: 52791 - DNA, 120 bp, Homo sapiens
  misc_feature: 1628 for SV(W|O) and mtDNA
ggtaccgcggccgttaaacatgtgtcactgggcaggcggtgcctctaatactggtgatgctagaggtgatgtttttggtaaacaggcggggtaagatttgccgagttccttttacttttt

SEQ ID NO: 52792 - DNA, 120 bp, Homo sapiens
  misc_feature: 1628 for SV(W|O) and mtDNA
ctttccaaaaaacacataatttgaatcaacacaaccacccacagcctaattattagcatcatccctctactattttttaaccaaatcaacaacaacctatttagctgttccccaaccttt

SEQ ID NO: 52793 - DNA, 120 bp, Homo sapiens
  misc_feature: 1628 for SV(W|O) and mtDNA
ctgttcctctttggactaacagttaaatttacaaggggatttagagggttctgtgggcaaatttaaagttgaactaagattctatcttggacaaccagctatcaccaggctcggtaggtt

SEQ ID NO: 52794 - DNA, 120 bp, Homo sapiens
  misc_feature: 1627 for SV(W|O) and mtDNA
tttatactacaaggacaggcccatttgagtattttgttttcaattagggagatagttggtattaggattaggattgttgtgaagtatagtacggatgctacttgtccaatgatggtaaaa

SEQ ID NO: 52795 - DNA, 120 bp, Homo sapiens
  misc_feature: 1627 for SV(W|O) and mtDNA
tttgccgcctgcgaagcagcggtgggcctagccctactagtctcaatctccaacacatatggcctagactacgtacataacctaaacctactccaatgctaaaactaatcgtcccaacaa

SEQ ID NO: 52796 - DNA, 120 bp, Homo sapiens
  misc_feature: 1627 for SV(W|O) and mtDNA
agcatttaccatctcacttctaggaatactagtatatcgctcacacctcatatcctccctactatgcctagaaggaataatactatcgctgttcattatagctactctcataaccctcaa

SEQ ID NO: 52797 - DNA, 120 bp, Homo sapiens
  misc_feature: 1627 for SV(W|O) and mtDNA
ttcatccgccaactaatatttcactttacatccaaacatcactttggcttcgaagccgccgcctgatactggcattttgtagatgtggtttgactatttctgtatgtctccatctattga

SEQ ID NO: 52798 - DNA, 120 bp, Homo sapiens
  misc_feature: 1627 for SV(W|O) and mtDNA
tggctacaaaaaatgttgagccgtagatgccgtcggaaatggtgaagggagactcgaagtactctgaggcttgtaggagggtaaaatagagacccagtaaaattgtaataagcagtgctt

SEQ ID NO: 52799 - DNA, 120 bp, Homo sapiens
  misc_feature: 1627 for SV(W|O) and mtDNA
tgcctcactcatttacaccaaccacccaactatctataaacctagccatggccatccccttatgagcgggcgcagtgattataggctttcgctctaagattaaaaatgccctagcccact

SEQ ID NO: 52800 - DNA, 120 bp, Homo sapiens
  misc_feature: 1627 for SV(W|O) and mtDNA
ctgcgaagcagcggtgggcctagccctactagtctcaatctccaacacatatggcctagactacgtacataacctaaacctactccaatgctaaaactaatcgtcccaacaattatatta

SEQ ID NO: 52801 - DNA, 120 bp, Homo sapiens
  misc_feature: 1627 for SV(W|O) and mtDNA
taaagttgaactaagattctatcttggacaaccagctatcaccaggctcggtaggtttgtcgcctctacctataaatcttcccactattttgctacatagacgggtgtgctcttttagct

SEQ ID NO: 52802 - DNA, 120 bp, Homo sapiens
  misc_feature: 1627 for SV(W|O) and mtDNA
gtttatttctaggcctactcaggtaaaaaatcagtgcgagcttagcgctgtgatgagtgtgcctgcaaagatggtagagtagatgacgggttgggccaggggattaattagtacgggaag

SEQ ID NO: 52803 - DNA, 120 bp, Homo sapiens
  misc_feature: 1627 for SV(W|O) and mtDNA
atgtcagtggtagtaatataattgttgggacgattagttttagcattggagtaggtttaggttatgtacgtagtctaggccatatgtgttggagattgagactagtagggctaggcccac

SEQ ID NO: 52804 - DNA, 120 bp, Homo sapiens
  misc_feature: 1627 for SV(W|O) and mtDNA
cccccgaaaccagacgagctacctaagaacagctaaaagagcacacccgtctatgtagcaaaatagtgggaagatttataggtagaggcgacaaacctaccgagcctggtgatagctggt

SEQ ID NO: 52805 - DNA, 120 bp, Homo sapiens
  misc_feature: 1627 for SV(W|O) and mtDNA
aagaactgctaactcatgcccccatgtctaacaacatggctttctcaacttttaaaggataacagctatccattggtcttaggccccaaaaattttggtgcaactccaaataaaagtaat

SEQ ID NO: 52806 - DNA, 120 bp, Homo sapiens
  misc_feature: 1627 for SV(W|O) and mtDNA
agtagagggatgatgctaataattaggctgtgggtggttgtgttgattcaaattatgtgttttttggaaagtcatgtcagtggtagtaatataattgttgggacgattagttttagcatt

SEQ ID NO: 52807 - DNA, 120 bp, Homo sapiens
  misc_feature: 1626 for SV(W|O) and mtDNA
tttgggtaccacccaagtattgactcacccatcaacaaccgctatgtatttcgtacattactgccagccaccatgaatattgtacggtaccataaatacttgaccacctgtagtacataa

SEQ ID NO: 52808 - DNA, 120 bp, Homo sapiens
  misc_feature: 1626 for SV(W|O) and mtDNA
tttaaaagttgagaaagccatgttgttagacatgggggcatgagttagcagttcttgtgagctttctcggtaaataaggggtcgtaagcctctgttgtcagattcacaatctgatgtttt

SEQ ID NO: 52809 - DNA, 120 bp, Homo sapiens
  misc_feature: 1626 for SV(W|O) and mtDNA
tcaccctctaaatcaccacgatcaaaagggacaagcatcaagcacgcagcaatgcagctcaaaacgcttagcctagccacacccccacgggaaacagcagtgattaacctttagcaataa

SEQ ID NO: 52810 - DNA, 120 bp, Homo sapiens
  misc_feature: 1626 for SV(W|O) and mtDNA
taggcgatagaaattgaaacctggcgcaatagatatagtaccgcaagggaaagatgaaaaattataaccaagcataatatagcaaggactaacccctataccttctgcataatgaattaa

SEQ ID NO: 52811 - DNA, 120 bp, Homo sapiens
  misc_feature: 1626 for SV(W|O) and mtDNA
gggggaattagggaagtcagggttagggtggttatagtagtgtgcatggttattacttttatttggagttgcaccaaaatttttggggcctaagaccaatggatagctgttatcctttaa

SEQ ID NO: 52812 - DNA, 120 bp, Homo sapiens
  misc_feature: 1626 for SV(W|O) and mtDNA
ccacactccacggaagcaatatgaaatgatctgctgcagtgctctgagccctaggattcatctttcttttcaccgtaggtggcctgactggcattgtattagcaaactcatcactagaca

SEQ ID NO: 52813 - DNA, 120 bp, Homo sapiens
  misc_feature: 1626 for SV(W|O) and mtDNA
tggggggaattagggaagtcagggttagggtggttatagtagtgtgcatggttattacttttatttggagttgcaccaaaatttttggggcctaagaccaatggatagctgttatccttt

SEQ ID NO: 52814 - DNA, 120 bp, Homo sapiens
  misc_feature: 1626 for SV(W|O) and mtDNA
tgattatgagggcgtgatcatgaaaggtgataagctcttctatgataggggaagtagcgtcttgtagacctacttgcgctgcatgtgccattaagatatataggatttagcctataattt

SEQ ID NO: 52815 - DNA, 120 bp, Homo sapiens
  misc_feature: 1626 for SV(W|O) and mtDNA
tctttgccgcctgcgaagcagcggtgggcctagccctactagtctcaatctccaacacatatggcctagactacgtacataacctaaacctactccaatgctaaaactaatcgtcccaac

SEQ ID NO: 52816 - DNA, 120 bp, Homo sapiens
  misc_feature: 1626 for SV(W|O) and mtDNA
tcaactttcctcactatctgcttcatccgccaactaatatttcactttacatccaaacatcactttggcttcgaagccgccgcctgatactggcattttgtagatgtggtttgactattt

SEQ ID NO: 52817 - DNA, 120 bp, Homo sapiens
  misc_feature: 1626 for SV(W|O) and mtDNA
tagtattcctagaagtgagatggtaaatgctagtataatatttatgtaaatgaggggcatttggtaaatatgattatcataatttaatgagtcgaaatcattcgttttgtttaaactata

SEQ ID NO: 52818 - DNA, 120 bp, Homo sapiens
  misc_feature: 1626 for SV(W|O) and mtDNA
tactcttttagtataaatagtaccgttaacttccaattaactagttttgacaacattcaaaaaagagtaataaacttcgccttaattttaataatcaacaccctcctagccttactacta

SEQ ID NO: 52819 - DNA, 120 bp, Homo sapiens
  misc_feature: 1626 for SV(W|O) and mtDNA
cctagggagaggagggtggatggaattaagggtgttagtcatgttagcttgtttcaggtgcgagatagtagtagggtcgtggtgctggagtttaagttgagtagtaggaatgcggtagta

SEQ ID NO: 52820 - DNA, 120 bp, Homo sapiens
  misc_feature: 1626 for SV(W|O) and mtDNA
cctaattgaaaacaaaatactcaaatgggcctgtccttgtagtataaactaatacaccagtcttgtaaaccggagatgaaaacctttttccaaggacaaatcagagaaaaagtctttaac

SEQ ID NO: 52821 - DNA, 120 bp, Homo sapiens
  misc_feature: 1626 for SV(W|O) and mtDNA
ctggtgatagctggttgtccaagatagaatcttagttcaactttaaatttgcccacagaaccctctaaatccccttgtaaatttaactgttagtccaaagaggaacagctctttggacac

SEQ ID NO: 52822 - DNA, 120 bp, Homo sapiens
  misc_feature: 1626 for SV(W|O) and mtDNA
gtcaacggtcggcgaacatcagtgggggtgaggtaaaatggctgagtgaagcattggactgtaaatctaaagacaggggttaggcctctttttaccagctccgaggtgattttcatattg

SEQ ID NO: 52823 - DNA, 120 bp, Homo sapiens
  misc_feature: 1626 for SV(W|O) and mtDNA
gggctaagcatagtggggtatctaatcccagtttgggtcttagctattgtgtgttcagatatgttaaagccactttcgtagtctattttgtgtcaactggagttttttacaactcaggtg

SEQ ID NO: 52824 - DNA, 120 bp, Homo sapiens
  misc_feature: 1626 for SV(W|O) and mtDNA
ggaaatcagtgaatgaagcctcctatgatggcaaatacagctcctattgataggacatagtggaagtgggctacaacgtagtacgtgtcgtgtagtacgatgtctagtgatgagtttgct

SEQ ID NO: 52825 - DNA, 120 bp, Homo sapiens
  misc_feature: 1626 for SV(W|O) and mtDNA
gcttctattgacttgggttaatcgtgtgaccgcggtggctggcacgaaattgaccaaccctggggttagtatagcttagttaaactttcgtttattgctaaaggttaatcactgctgttt

SEQ ID NO: 52826 - DNA, 120 bp, Homo sapiens
  misc_feature: 1626 for SV(W|O) and mtDNA
ctctttggactaacagttaaatttacaaggggatttagagggttctgtgggcaaatttaaagttgaactaagattctatcttggacaaccagctatcaccaggctcggtaggtttgtcgc

SEQ ID NO: 52827 - DNA, 120 bp, Homo sapiens
  misc_feature: 1626 for SV(W|O) and mtDNA
aagatagaatcttagttcaactttaaatttgcccacagaaccctctaaatccccttgtaaatttaactgttagtccaaagaggaacagctctttggacactaggaaaaaaccttgtagag

SEQ ID NO: 52828 - DNA, 120 bp, Homo sapiens
  misc_feature: 1626 for SV(W|O) and mtDNA
cctgcgaagcagcggtgggcctagccctactagtctcaatctccaacacatatggcctagactacgtacataacctaaacctactccaatgctaaaactaatcgtcccaacaattatatt

SEQ ID NO: 52829 - DNA, 120 bp, Homo sapiens
  misc_feature: 1626 for SV(W|O) and mtDNA
aagtcatgtcagtggtagtaatataattgttgggacgattagttttagcattggagtaggtttaggttatgtacgtagtctaggccatatgtgttggagattgagactagtagggctagg

SEQ ID NO: 52830 - DNA, 120 bp, Homo sapiens
  misc_feature: 1626 for SV(W|O) and mtDNA
atactacaaggacaggcccatttgagtattttgttttcaattagggagatagttggtattaggattaggattgttgtgaagtatagtacggatgctacttgtccaatgatggtaaaaggg

SEQ ID NO: 52831 - DNA, 120 bp, Homo sapiens
  misc_feature: 1626 for SV(W|O) and mtDNA
agtggtagtaatataattgttgggacgattagttttagcattggagtaggtttaggttatgtacgtagtctaggccatatgtgttggagattgagactagtagggctaggcccaccgctg

SEQ ID NO: 52832 - DNA, 120 bp, Homo sapiens
  misc_feature: 1626 for SV(W|O) and mtDNA
aagagctgttcctctttggactaacagttaaatttacaaggggatttagagggttctgtgggcaaatttaaagttgaactaagattctatcttggacaaccagctatcaccaggctcggt

SEQ ID NO: 52833 - DNA, 120 bp, Homo sapiens
  misc_feature: 1625 for SV(W|O) and mtDNA
ttcttctatagggtgatagattggtccaattgggtatgaggagttcagttatatgtttgggattttttaggtagtgggtgttgagcttgaacgctttcttaattggtggctgcttttagg

SEQ ID NO: 52834 - DNA, 120 bp, Homo sapiens
  misc_feature: 1625 for SV(W|O) and mtDNA
tgtcagtggtagtaatataattgttgggacgattagttttagcattggagtaggtttaggttatgtacgtagtctaggccatatgtgttggagattgagactagtagggctaggcccacc

SEQ ID NO: 52835 - DNA, 120 bp, Homo sapiens
  misc_feature: 1625 for SV(W|O) and mtDNA
gtttggatgtaaagtgaaatattagttggcggatgaagcagatagtgaggaaagttgagccaataatgacgtgaagtccgtggaagcctgtggctacaaaaaatgttgagccgtagatgc

SEQ ID NO: 52836 - DNA, 120 bp, Homo sapiens
  misc_feature: 1625 for SV(W|O) and mtDNA
accctctaaatcaccacgatcaaaagggacaagcatcaagcacgcagcaatgcagctcaaaacgcttagcctagccacacccccacgggaaacagcagtgattaacctttagcaataaac

SEQ ID NO: 52837 - DNA, 120 bp, Homo sapiens
  misc_feature: 1625 for SV(W|O) and mtDNA
cgcggccgttaaacatgtgtcactgggcaggcggtgcctctaatactggtgatgctagaggtgatgtttttggtaaacaggcggggtaagatttgccgagttccttttactttttttaac

SEQ ID NO: 52838 - DNA, 120 bp, Homo sapiens
  misc_feature: 1625 for SV(W|O) and mtDNA
aattgagtatagtagttcgctttgactggtgaagtcttagcatgtactgctcggaggttgggttctgctccgaggtcgccccaaccgaaatttttaatgcaggtttggtagtttaggacc

SEQ ID NO: 52839 - DNA, 120 bp, Homo sapiens
  misc_feature: 1625 for SV(W|O) and mtDNA
gagctgttcctctttggactaacagttaaatttacaaggggatttagagggttctgtgggcaaatttaaagttgaactaagattctatcttggacaaccagctatcaccaggctcggtag

SEQ ID NO: 52840 - DNA, 120 bp, Homo sapiens
  misc_feature: 1625 for SV(W|O) and mtDNA
cttctcaaatcatgaaaattattaatattactgctgttagagaaatgaatgagcctacagatgataggatgtttcatgtggtgtatgcatcggggtagtccgagtaacgtcggggcattc

SEQ ID NO: 52841 - DNA, 120 bp, Homo sapiens
  misc_feature: 1625 for SV(W|O) and mtDNA
gaaataactttgcaaggagagccaaagctaagacccccgaaaccagacgagctacctaagaacagctaaaagagcacacccgtctatgtagcaaaatagtgggaagatttataggtagag

SEQ ID NO: 52842 - DNA, 120 bp, Homo sapiens
  misc_feature: 1625 for SV(W|O) and mtDNA
agaatagtcaacggtcggcgaacatcagtgggggtgaggtaaaatggctgagtgaagcattggactgtaaatctaaagacaggggttaggcctctttttaccagctccgaggtgattttc

SEQ ID NO: 52843 - DNA, 120 bp, Homo sapiens
  misc_feature: 1625 for SV(W|O) and mtDNA
atgttggttatacccttcccgtactaattaatcccctggcccaacccgtcatctactctaccatctttgcaggcacactcatcacagcgctaagctcgcactgattttttacctgagtag

SEQ ID NO: 52844 - DNA, 120 bp, Homo sapiens
  misc_feature: 1625 for SV(W|O) and mtDNA
ctaagattctatcttggacaaccagctatcaccaggctcggtaggtttgtcgcctctacctataaatcttcccactattttgctacatagacgggtgtgctcttttagctgttcttaggt

SEQ ID NO: 52845 - DNA, 120 bp, Homo sapiens
  misc_feature: 1625 for SV(W|O) and mtDNA
cctttaaaagttgagaaagccatgttgttagacatgggggcatgagttagcagttcttgtgagctttctcggtaaataaggggtcgtaagcctctgttgtcagattcacaatctgatgtt

SEQ ID NO: 52846 - DNA, 120 bp, Homo sapiens
  misc_feature: 1625 for SV(W|O) and mtDNA
aggaaagttgagccaataatgacgtgaagtccgtggaagcctgtggctacaaaaaatgttgagccgtagatgccgtcggaaatggtgaagggagactcgaagtactctgaggcttgtagg

SEQ ID NO: 52847 - DNA, 120 bp, Homo sapiens
  misc_feature: 1625 for SV(W|O) and mtDNA
cagacgagctacctaagaacagctaaaagagcacacccgtctatgtagcaaaatagtgggaagatttataggtagaggcgacaaacctaccgagcctggtgatagctggttgtccaagat

SEQ ID NO: 52848 - DNA, 120 bp, Homo sapiens
  misc_feature: 1625 for SV(W|O) and mtDNA
agtattcctagaagtgagatggtaaatgctagtataatatttatgtaaatgaggggcatttggtaaatatgattatcataatttaatgagtcgaaatcattcgttttgtttaaactatat

SEQ ID NO: 52849 - DNA, 120 bp, Homo sapiens
  misc_feature: 1624 for SV(W|O) and mtDNA
caccctctaaatcaccacgatcaaaagggacaagcatcaagcacgcagcaatgcagctcaaaacgcttagcctagccacacccccacgggaaacagcagtgattaacctttagcaataaa

SEQ ID NO: 52850 - DNA, 120 bp, Homo sapiens
  misc_feature: 1624 for SV(W|O) and mtDNA
ttcaccctctaaatcaccacgatcaaaagggacaagcatcaagcacgcagcaatgcagctcaaaacgcttagcctagccacacccccacgggaaacagcagtgattaacctttagcaata

SEQ ID NO: 52851 - DNA, 120 bp, Homo sapiens
  misc_feature: 1624 for SV(W|O) and mtDNA
attatgagggcgtgatcatgaaaggtgataagctcttctatgataggggaagtagcgtcttgtagacctacttgcgctgcatgtgccattaagatatataggatttagcctataatttaa

SEQ ID NO: 52852 - DNA, 120 bp, Homo sapiens
  misc_feature: 1624 for SV(W|O) and mtDNA
tcttcacaattctaattctactgactatcctagaaatcgctgtcgccttaatccaagcctacgttttcacacttctagtaagcctctacctgcacgacaacacataatgacccaccaatc

SEQ ID NO: 52853 - DNA, 120 bp, Homo sapiens
  misc_feature: 1624 for SV(W|O) and mtDNA
gatagaaattgaaacctggcgcaatagatatagtaccgcaagggaaagatgaaaaattataaccaagcataatatagcaaggactaacccctataccttctgcataatgaattaactaga

SEQ ID NO: 52854 - DNA, 120 bp, Homo sapiens
  misc_feature: 1624 for SV(W|O) and mtDNA
attatctcgaactgacactgagccacaacccaaacaacccagctctccctaagcttcaaactagactacttctccataatattcatccctgtagcattgttcgttacatggtccatcata

SEQ ID NO: 52855 - DNA, 120 bp, Homo sapiens
  misc_feature: 1624 for SV(W|O) and mtDNA
taatatttatgtaaatgaggggcatttggtaaatatgattatcataatttaatgagtcgaaatcattcgttttgtttaaactatataccaattcggttcagtctaatcctttttgtagtc

SEQ ID NO: 52856 - DNA, 120 bp, Homo sapiens
  misc_feature: 1624 for SV(W|O) and mtDNA
gtcattattggctcaactttcctcactatctgcttcatccgccaactaatatttcactttacatccaaacatcactttggcttcgaagccgccgcctgatactggcattttgtagatgtg

SEQ ID NO: 52857 - DNA, 120 bp, Homo sapiens
  misc_feature: 1624 for SV(W|O) and mtDNA
ctatagggtgatagattggtccaattgggtatgaggagttcagttatatgtttgggattttttaggtagtgggtgttgagcttgaacgctttcttaattggtggctgcttttaggcctac

SEQ ID NO: 52858 - DNA, 120 bp, Homo sapiens
  misc_feature: 1624 for SV(W|O) and mtDNA
ggagaagtagtctagtttgaagcttagggagagctgggttgtttgggttgtggctcagtgtcagttcgagataataacttcttggtctaggcacatgaatattgttgtggggaagagact

SEQ ID NO: 52859 - DNA, 120 bp, Homo sapiens
  misc_feature: 1624 for SV(W|O) and mtDNA
gcttctcaaatcatgaaaattattaatattactgctgttagagaaatgaatgagcctacagatgataggatgtttcatgtggtgtatgcatcggggtagtccgagtaacgtcggggcatt

SEQ ID NO: 52860 - DNA, 120 bp, Homo sapiens
  misc_feature: 1624 for SV(W|O) and mtDNA
ctaattctactgactatcctagaaatcgctgtcgccttaatccaagcctacgttttcacacttctagtaagcctctacctgcacgacaacacataatgacccaccaatcacatgcctatc

SEQ ID NO: 52861 - DNA, 120 bp, Homo sapiens
  misc_feature: 1624 for SV(W|O) and mtDNA
attatggagaagtagtctagtttgaagcttagggagagctgggttgtttgggttgtggctcagtgtcagttcgagataataacttcttggtctaggcacatgaatattgttgtggggaag

SEQ ID NO: 52862 - DNA, 120 bp, Homo sapiens
  misc_feature: 1624 for SV(W|O) and mtDNA
cggctcaacattttttgtagccacaggcttccacggacttcacgtcattattggctcaactttcctcactatctgcttcatccgccaactaatatttcactttacatccaaacatcactt

SEQ ID NO: 52863 - DNA, 120 bp, Homo sapiens
  misc_feature: 1624 for SV(W|O) and mtDNA
cacagtgagaattctatgatggaccatgtaacgaacaatgctacagggatgaatattatggagaagtagtctagtttgaagcttagggagagctgggttgtttgggttgtggctcagtgt

SEQ ID NO: 52864 - DNA, 120 bp, Homo sapiens
  misc_feature: 1624 for SV(W|O) and mtDNA
ataatatttatgtaaatgaggggcatttggtaaatatgattatcataatttaatgagtcgaaatcattcgttttgtttaaactatataccaattcggttcagtctaatcctttttgtagt

SEQ ID NO: 52865 - DNA, 120 bp, Homo sapiens
  misc_feature: 1624 for SV(W|O) and mtDNA
acagtgagggtaataatgacttgttggttgattgtagatattgggctgttaattgtcagttcagtgttttaatctgacgcaggcttatgcggaggagaatgttttcatgttacttatact

SEQ ID NO: 52866 - DNA, 120 bp, Homo sapiens
  misc_feature: 1623 for SV(W|O) and mtDNA
ttttcgctttgaagcgaaggcttctcaaatcatgaaaattattaatattactgctgttagagaaatgaatgagcctacagatgataggatgtttcatgtggtgtatgcatcggggtagtc

SEQ ID NO: 52867 - DNA, 120 bp, Homo sapiens
  misc_feature: 1623 for SV(W|O) and mtDNA
ttatttctaggcctactcaggtaaaaaatcagtgcgagcttagcgctgtgatgagtgtgcctgcaaagatggtagagtagatgacgggttgggccaggggattaattagtacgggaaggg

SEQ ID NO: 52868 - DNA, 120 bp, Homo sapiens
  misc_feature: 1623 for SV(W|O) and mtDNA
tagtataaatagtaccgttaacttccaattaactagttttgacaacattcaaaaaagagtaataaacttcgccttaattttaataatcaacaccctcctagccttactactaataattat

SEQ ID NO: 52869 - DNA, 120 bp, Homo sapiens
  misc_feature: 1623 for SV(W|O) and mtDNA
gggggttagttttgcgtattggggtcattggtgttcttgtagttgaaatacaacgatggtttttcatatcattggtcgtggttgtagtccgtgcgagaataatgatgtatgctttgtttc

SEQ ID NO: 52870 - DNA, 120 bp, Homo sapiens
  misc_feature: 1623 for SV(W|O) and mtDNA
aattctaattctactgactatcctagaaatcgctgtcgccttaatccaagcctacgttttcacacttctagtaagcctctacctgcacgacaacacataatgacccaccaatcacatgcc

SEQ ID NO: 52871 - DNA, 120 bp, Homo sapiens
  misc_feature: 1623 for SV(W|O) and mtDNA
aggatggggggaattagggaagtcagggttagggtggttatagtagtgtgcatggttattacttttatttggagttgcaccaaaatttttggggcctaagaccaatggatagctgttatc

SEQ ID NO: 52872 - DNA, 120 bp, Homo sapiens
  misc_feature: 1623 for SV(W|O) and mtDNA
ctagtatatcgctcacacctcatatcctccctactatgcctagaaggaataatactatcgctgttcattatagctactctcataaccctcaacacccactccctcttagccaatattgtg

SEQ ID NO: 52873 - DNA, 120 bp, Homo sapiens
  misc_feature: 1623 for SV(W|O) and mtDNA
ctaggcatagtagggaggatatgaggtgtgagcgatatactagtattcctagaagtgagatggtaaatgctagtataatatttatgtaaatgaggggcatttggtaaatatgattatcat

SEQ ID NO: 52874 - DNA, 120 bp, Homo sapiens
  misc_feature: 1623 for SV(W|O) and mtDNA
ccgcctgcgaagcagcggtgggcctagccctactagtctcaatctccaacacatatggcctagactacgtacataacctaaacctactccaatgctaaaactaatcgtcccaacaattat

SEQ ID NO: 52875 - DNA, 120 bp, Homo sapiens
  misc_feature: 1623 for SV(W|O) and mtDNA
aggtcctaaactaccaaacctgcattaaaaatttcggttggggcgacctcggagcagaacccaacctccgagcagtacatgctaagacttcaccagtcaaagcgaactactatactcaat

SEQ ID NO: 52876 - DNA, 120 bp, Homo sapiens
  misc_feature: 1623 for SV(W|O) and mtDNA
atgattatgagggcgtgatcatgaaaggtgataagctcttctatgataggggaagtagcgtcttgtagacctacttgcgctgcatgtgccattaagatatataggatttagcctataatt

SEQ ID NO: 52877 - DNA, 120 bp, Homo sapiens
  misc_feature: 1623 for SV(W|O) and mtDNA
aatgtgtggtagggtggggggcatccatatagtcactccaggtttatggagggttcttctactattaggacttttcgctttgaagcgaaggcttctcaaatcatgaaaattattaatatt

SEQ ID NO: 52878 - DNA, 120 bp, Homo sapiens
  misc_feature: 1622 for SV(W|O) and mtDNA
gaaagctcacaagaactgctaactcatgcccccatgtctaacaacatggctttctcaacttttaaaggataacagctatccattggtcttaggccccaaaaattttggtgcaactccaaa

SEQ ID NO: 52879 - DNA, 120 bp, Homo sapiens
  misc_feature: 1622 for SV(W|O) and mtDNA
ttatttaccgagaaagctcacaagaactgctaactcatgcccccatgtctaacaacatggctttctcaacttttaaaggataacagctatccattggtcttaggccccaaaaattttggt

SEQ ID NO: 52880 - DNA, 120 bp, Homo sapiens
  misc_feature: 1622 for SV(W|O) and mtDNA
cagtgaatgaagcctcctatgatggcaaatacagctcctattgataggacatagtggaagtgggctacaacgtagtacgtgtcgtgtagtacgatgtctagtgatgagtttgctaataca

SEQ ID NO: 52881 - DNA, 120 bp, Homo sapiens
  misc_feature: 1622 for SV(W|O) and mtDNA
agtctttgccgcctgcgaagcagcggtgggcctagccctactagtctcaatctccaacacatatggcctagactacgtacataacctaaacctactccaatgctaaaactaatcgtccca

SEQ ID NO: 52882 - DNA, 120 bp, Homo sapiens
  misc_feature: 1622 for SV(W|O) and mtDNA
acctattattcggcgcatgagctggagtcctaggcacagctctaagcctccttattcgagccgagctgggccagccaggcaaccttctaggtaacgaccacatctacaacgttatcgtca

SEQ ID NO: 52883 - DNA, 120 bp, Homo sapiens
  misc_feature: 1622 for SV(W|O) and mtDNA
tccttctaggcatagtagggaggatatgaggtgtgagcgatatactagtattcctagaagtgagatggtaaatgctagtataatatttatgtaaatgaggggcatttggtaaatatgatt

SEQ ID NO: 52884 - DNA, 120 bp, Homo sapiens
  misc_feature: 1622 for SV(W|O) and mtDNA
tccaagatagaatcttagttcaactttaaatttgcccacagaaccctctaaatccccttgtaaatttaactgttagtccaaagaggaacagctctttggacactaggaaaaaaccttgta

SEQ ID NO: 52885 - DNA, 120 bp, Homo sapiens
  misc_feature: 1622 for SV(W|O) and mtDNA
cttctaggaatactagtatatcgctcacacctcatatcctccctactatgcctagaaggaataatactatcgctgttcattatagctactctcataaccctcaacacccactccctctta

SEQ ID NO: 52886 - DNA, 120 bp, Homo sapiens
  misc_feature: 1622 for SV(W|O) and mtDNA
atttaaagttgaactaagattctatcttggacaaccagctatcaccaggctcggtaggtttgtcgcctctacctataaatcttcccactattttgctacatagacgggtgtgctctttta

SEQ ID NO: 52887 - DNA, 120 bp, Homo sapiens
  misc_feature: 1622 for SV(W|O) and mtDNA
gtggtagtaatataattgttgggacgattagttttagcattggagtaggtttaggttatgtacgtagtctaggccatatgtgttggagattgagactagtagggctaggcccaccgctgc

SEQ ID NO: 52888 - DNA, 120 bp, Homo sapiens
  misc_feature: 1622 for SV(W|O) and mtDNA
cttctatagggtgatagattggtccaattgggtatgaggagttcagttatatgtttgggattttttaggtagtgggtgttgagcttgaacgctttcttaattggtggctgcttttaggcc

SEQ ID NO: 52889 - DNA, 120 bp, Homo sapiens
  misc_feature: 1622 for SV(W|O) and mtDNA
gccaactaatatttcactttacatccaaacatcactttggcttcgaagccgccgcctgatactggcattttgtagatgtggtttgactatttctgtatgtctccatctattgatgagggt

SEQ ID NO: 52890 - DNA, 120 bp, Homo sapiens
  misc_feature: 1622 for SV(W|O) and mtDNA
agctgttcctctttggactaacagttaaatttacaaggggatttagagggttctgtgggcaaatttaaagttgaactaagattctatcttggacaaccagctatcaccaggctcggtagg

SEQ ID NO: 52891 - DNA, 120 bp, Homo sapiens
  misc_feature: 1622 for SV(W|O) and mtDNA
acaattctaattctactgactatcctagaaatcgctgtcgccttaatccaagcctacgttttcacacttctagtaagcctctacctgcacgacaacacataatgacccaccaatcacatg

SEQ ID NO: 52892 - DNA, 120 bp, Homo sapiens
  misc_feature: 1622 for SV(W|O) and mtDNA
catagtagggaggatatgaggtgtgagcgatatactagtattcctagaagtgagatggtaaatgctagtataatatttatgtaaatgaggggcatttggtaaatatgattatcataattt

SEQ ID NO: 52893 - DNA, 120 bp, Homo sapiens
  misc_feature: 1621 for SV(W|O) and mtDNA
tgggtaccacccaagtattgactcacccatcaacaaccgctatgtatttcgtacattactgccagccaccatgaatattgtacggtaccataaatacttgaccacctgtagtacataaaa

SEQ ID NO: 52894 - DNA, 120 bp, Homo sapiens
  misc_feature: 1621 for SV(W|O) and mtDNA
ttacccaaataaagtataggcgatagaaattgaaacctggcgcaatagatatagtaccgcaagggaaagatgaaaaattataaccaagcataatatagcaaggactaacccctatacctt

SEQ ID NO: 52895 - DNA, 120 bp, Homo sapiens
  misc_feature: 1621 for SV(W|O) and mtDNA
tagtagggaggatatgaggtgtgagcgatatactagtattcctagaagtgagatggtaaatgctagtataatatttatgtaaatgaggggcatttggtaaatatgattatcataatttaa

SEQ ID NO: 52896 - DNA, 120 bp, Homo sapiens
  misc_feature: 1621 for SV(W|O) and mtDNA
ataataggtatagtgttccaatgtctttgtggtttgtagagaatagtcaacggtcggcgaacatcagtgggggtgaggtaaaatggctgagtgaagcattggactgtaaatctaaagaca

SEQ ID NO: 52897 - DNA, 120 bp, Homo sapiens
  misc_feature: 1621 for SV(W|O) and mtDNA
aggcttccacggacttcacgtcattattggctcaactttcctcactatctgcttcatccgccaactaatatttcactttacatccaaacatcactttggcttcgaagccgccgcctgata

SEQ ID NO: 52898 - DNA, 120 bp, Homo sapiens
  misc_feature: 1621 for SV(W|O) and mtDNA
taagattctatcttggacaaccagctatcaccaggctcggtaggtttgtcgcctctacctataaatcttcccactattttgctacatagacgggtgtgctcttttagctgttcttaggta

SEQ ID NO: 52899 - DNA, 120 bp, Homo sapiens
  misc_feature: 1621 for SV(W|O) and mtDNA
atgtgtggtagggtggggggcatccatatagtcactccaggtttatggagggttcttctactattaggacttttcgctttgaagcgaaggcttctcaaatcatgaaaattattaatatta

SEQ ID NO: 52900 - DNA, 120 bp, Homo sapiens
  misc_feature: 1621 for SV(W|O) and mtDNA
gttgaactaagattctatcttggacaaccagctatcaccaggctcggtaggtttgtcgcctctacctataaatcttcccactattttgctacatagacgggtgtgctcttttagctgttc

SEQ ID NO: 52901 - DNA, 120 bp, Homo sapiens
  misc_feature: 1621 for SV(W|O) and mtDNA
gtccaagatagaatcttagttcaactttaaatttgcccacagaaccctctaaatccccttgtaaatttaactgttagtccaaagaggaacagctctttggacactaggaaaaaaccttgt

SEQ ID NO: 52902 - DNA, 120 bp, Homo sapiens
  misc_feature: 1621 for SV(W|O) and mtDNA
catttcactatcatattcatcggcgtaaatctaactttcttcccacaacactttctcggcctatccggaatgccccgacgttactcggactaccccgatgcatacaccacatgaaacatc

SEQ ID NO: 52903 - DNA, 120 bp, Homo sapiens
  misc_feature: 1621 for SV(W|O) and mtDNA
ccgaaaccagacgagctacctaagaacagctaaaagagcacacccgtctatgtagcaaaatagtgggaagatttataggtagaggcgacaaacctaccgagcctggtgatagctggttgt

SEQ ID NO: 52904 - DNA, 120 bp, Homo sapiens
  misc_feature: 1621 for SV(W|O) and mtDNA
atagattggtccaattgggtatgaggagttcagttatatgtttgggattttttaggtagtgggtgttgagcttgaacgctttcttaattggtggctgcttttaggcctactatgggtgtt

SEQ ID NO: 52905 - DNA, 120 bp, Homo sapiens
  misc_feature: 1621 for SV(W|O) and mtDNA
aatttaaagttgaactaagattctatcttggacaaccagctatcaccaggctcggtaggtttgtcgcctctacctataaatcttcccactattttgctacatagacgggtgtgctctttt

SEQ ID NO: 52906 - DNA, 120 bp, Homo sapiens
  misc_feature: 1620 for SV(W|O) and mtDNA
tctaaatcaccacgatcaaaagggacaagcatcaagcacgcagcaatgcagctcaaaacgcttagcctagccacacccccacgggaaacagcagtgattaacctttagcaataaacgaaa

SEQ ID NO: 52907 - DNA, 120 bp, Homo sapiens
  misc_feature: 1620 for SV(W|O) and mtDNA
tgcaaggagagccaaagctaagacccccgaaaccagacgagctacctaagaacagctaaaagagcacacccgtctatgtagcaaaatagtgggaagatttataggtagaggcgacaaacc

SEQ ID NO: 52908 - DNA, 120 bp, Homo sapiens
  misc_feature: 1620 for SV(W|O) and mtDNA
aagtataggcgatagaaattgaaacctggcgcaatagatatagtaccgcaagggaaagatgaaaaattataaccaagcataatatagcaaggactaacccctataccttctgcataatga

SEQ ID NO: 52909 - DNA, 120 bp, Homo sapiens
  misc_feature: 1620 for SV(W|O) and mtDNA
ctaatcgtcccaacaattatattactaccactgacatgactttccaaaaaacacataatttgaatcaacacaaccacccacagcctaattattagcatcatccctctactattttttaac

SEQ ID NO: 52910 - DNA, 120 bp, Homo sapiens
  misc_feature: 1620 for SV(W|O) and mtDNA
gtagggaggatatgaggtgtgagcgatatactagtattcctagaagtgagatggtaaatgctagtataatatttatgtaaatgaggggcatttggtaaatatgattatcataatttaatg

SEQ ID NO: 52911 - DNA, 120 bp, Homo sapiens
  misc_feature: 1620 for SV(W|O) and mtDNA
gagaatagtcaacggtcggcgaacatcagtgggggtgaggtaaaatggctgagtgaagcattggactgtaaatctaaagacaggggttaggcctctttttaccagctccgaggtgatttt

SEQ ID NO: 52912 - DNA, 120 bp, Homo sapiens
  misc_feature: 1620 for SV(W|O) and mtDNA
ccccgaaaccagacgagctacctaagaacagctaaaagagcacacccgtctatgtagcaaaatagtgggaagatttataggtagaggcgacaaacctaccgagcctggtgatagctggtt

SEQ ID NO: 52913 - DNA, 120 bp, Homo sapiens
  misc_feature: 1619 for SV(W|O) and mtDNA
ggggaattagggaagtcagggttagggtggttatagtagtgtgcatggttattacttttatttggagttgcaccaaaatttttggggcctaagaccaatggatagctgttatcctttaaa

SEQ ID NO: 52914 - DNA, 120 bp, Homo sapiens
  misc_feature: 1619 for SV(W|O) and mtDNA
ttgaactaagattctatcttggacaaccagctatcaccaggctcggtaggtttgtcgcctctacctataaatcttcccactattttgctacatagacgggtgtgctcttttagctgttct

SEQ ID NO: 52915 - DNA, 120 bp, Homo sapiens
  misc_feature: 1619 for SV(W|O) and mtDNA
ttatggagaagtagtctagtttgaagcttagggagagctgggttgtttgggttgtggctcagtgtcagttcgagataataacttcttggtctaggcacatgaatattgttgtggggaaga

SEQ ID NO: 52916 - DNA, 120 bp, Homo sapiens
  misc_feature: 1619 for SV(W|O) and mtDNA
catttaccatctcacttctaggaatactagtatatcgctcacacctcatatcctccctactatgcctagaaggaataatactatcgctgttcattatagctactctcataaccctcaaca

SEQ ID NO: 52917 - DNA, 120 bp, Homo sapiens
  misc_feature: 1619 for SV(W|O) and mtDNA
tggagaagtagtctagtttgaagcttagggagagctgggttgtttgggttgtggctcagtgtcagttcgagataataacttcttggtctaggcacatgaatattgttgtggggaagagac

SEQ ID NO: 52918 - DNA, 120 bp, Homo sapiens
  misc_feature: 1619 for SV(W|O) and mtDNA
cagtgagaattctatgatggaccatgtaacgaacaatgctacagggatgaatattatggagaagtagtctagtttgaagcttagggagagctgggttgtttgggttgtggctcagtgtca

SEQ ID NO: 52919 - DNA, 120 bp, Homo sapiens
  misc_feature: 1619 for SV(W|O) and mtDNA
tcctttaaaagttgagaaagccatgttgttagacatgggggcatgagttagcagttcttgtgagctttctcggtaaataaggggtcgtaagcctctgttgtcagattcacaatctgatgt

SEQ ID NO: 52920 - DNA, 120 bp, Homo sapiens
  misc_feature: 1619 for SV(W|O) and mtDNA
tccctcttattaatcatcatcctagccctaagtctggcctatgagtgactacaaaaaggattagactgaaccgaattggtatatagtttaaacaaaacgaatgatttcgactcattaaat

SEQ ID NO: 52921 - DNA, 120 bp, Homo sapiens
  misc_feature: 1619 for SV(W|O) and mtDNA
cagtgagggtaataatgacttgttggttgattgtagatattgggctgttaattgtcagttcagtgttttaatctgacgcaggcttatgcggaggagaatgttttcatgttacttatacta

SEQ ID NO: 52922 - DNA, 120 bp, Homo sapiens
  misc_feature: 1619 for SV(W|O) and mtDNA
agtgagttcaccctctaaatcaccacgatcaaaagggacaagcatcaagcacgcagcaatgcagctcaaaacgcttagcctagccacacccccacgggaaacagcagtgattaaccttta

SEQ ID NO: 52923 - DNA, 120 bp, Homo sapiens
  misc_feature: 1619 for SV(W|O) and mtDNA
ggctcaacattttttgtagccacaggcttccacggacttcacgtcattattggctcaactttcctcactatctgcttcatccgccaactaatatttcactttacatccaaacatcacttt

SEQ ID NO: 52924 - DNA, 120 bp, Homo sapiens
  misc_feature: 1619 for SV(W|O) and mtDNA
ggagaggagggtggatggaattaagggtgttagtcatgttagcttgtttcaggtgcgagatagtagtagggtcgtggtgctggagtttaagttgagtagtaggaatgcggtagtagttag

SEQ ID NO: 52925 - DNA, 120 bp, Homo sapiens
  misc_feature: 1619 for SV(W|O) and mtDNA
gaaatagtcaaaccacatctacaaaatgccagtatcaggcggcggcttcgaagccaaagtgatgtttggatgtaaagtgaaatattagttggcggatgaagcagatagtgaggaaagttg

SEQ ID NO: 52926 - DNA, 120 bp, Homo sapiens
  misc_feature: 1619 for SV(W|O) and mtDNA
ctcctagggagaggagggtggatggaattaagggtgttagtcatgttagcttgtttcaggtgcgagatagtagtagggtcgtggtgctggagtttaagttgagtagtaggaatgcggtag

SEQ ID NO: 52927 - DNA, 120 bp, Homo sapiens
  misc_feature: 1619 for SV(W|O) and mtDNA
agtatgtgcctgcgttcaggcgttctggctggttgcctcatcgggtgatgatagccaaggtggggataagtgtggtttcgaagaagatataaaatatgattagttctgtggctgtgaatg

SEQ ID NO: 52928 - DNA, 120 bp, Homo sapiens
  misc_feature: 1619 for SV(W|O) and mtDNA
cattattggctcaactttcctcactatctgcttcatccgccaactaatatttcactttacatccaaacatcactttggcttcgaagccgccgcctgatactggcattttgtagatgtggt

SEQ ID NO: 52929 - DNA, 120 bp, Homo sapiens
  misc_feature: 1619 for SV(W|O) and mtDNA
caaatcatgaaaattattaatattactgctgttagagaaatgaatgagcctacagatgataggatgtttcatgtggtgtatgcatcggggtagtccgagtaacgtcggggcattccggat

SEQ ID NO: 52930 - DNA, 120 bp, Homo sapiens
  misc_feature: 1619 for SV(W|O) and mtDNA
atcttcacaattctaattctactgactatcctagaaatcgctgtcgccttaatccaagcctacgttttcacacttctagtaagcctctacctgcacgacaacacataatgacccaccaat

SEQ ID NO: 52931 - DNA, 120 bp, Homo sapiens
  misc_feature: 1619 for SV(W|O) and mtDNA
aagttgaactaagattctatcttggacaaccagctatcaccaggctcggtaggtttgtcgcctctacctataaatcttcccactattttgctacatagacgggtgtgctcttttagctgt

SEQ ID NO: 52932 - DNA, 120 bp, Homo sapiens
  misc_feature: 1618 for SV(W|O) and mtDNA
tttaaagttgaactaagattctatcttggacaaccagctatcaccaggctcggtaggtttgtcgcctctacctataaatcttcccactattttgctacatagacgggtgtgctcttttag

SEQ ID NO: 52933 - DNA, 120 bp, Homo sapiens
  misc_feature: 1618 for SV(W|O) and mtDNA
cccaacaattatattactaccactgacatgactttccaaaaaacacataatttgaatcaacacaaccacccacagcctaattattagcatcatccctctactattttttaaccaaatcaa

SEQ ID NO: 52934 - DNA, 120 bp, Homo sapiens
  misc_feature: 1618 for SV(W|O) and mtDNA
ttcgcccactaagccaatcactttattgactcctagccgcagacctcctcattctaacctgaatcggaggacaaccagtaagctacccttttaccatcattggacaagtagcatccgtac

SEQ ID NO: 52935 - DNA, 120 bp, Homo sapiens
  misc_feature: 1618 for SV(W|O) and mtDNA
ttattggctcaactttcctcactatctgcttcatccgccaactaatatttcactttacatccaaacatcactttggcttcgaagccgccgcctgatactggcattttgtagatgtggttt

SEQ ID NO: 52936 - DNA, 120 bp, Homo sapiens
  misc_feature: 1618 for SV(W|O) and mtDNA
ttatctcgaactgacactgagccacaacccaaacaacccagctctccctaagcttcaaactagactacttctccataatattcatccctgtagcattgttcgttacatggtccatcatag

SEQ ID NO: 52937 - DNA, 120 bp, Homo sapiens
  misc_feature: 1618 for SV(W|O) and mtDNA
tcccaacaattatattactaccactgacatgactttccaaaaaacacataatttgaatcaacacaaccacccacagcctaattattagcatcatccctctactattttttaaccaaatca

SEQ ID NO: 52938 - DNA, 120 bp, Homo sapiens
  misc_feature: 1618 for SV(W|O) and mtDNA
gaatagtcaacggtcggcgaacatcagtgggggtgaggtaaaatggctgagtgaagcattggactgtaaatctaaagacaggggttaggcctctttttaccagctccgaggtgattttca

SEQ ID NO: 52939 - DNA, 120 bp, Homo sapiens
  misc_feature: 1618 for SV(W|O) and mtDNA
tcttctatagggtgatagattggtccaattgggtatgaggagttcagttatatgtttgggattttttaggtagtgggtgttgagcttgaacgctttcttaattggtggctgcttttaggc

SEQ ID NO: 52940 - DNA, 120 bp, Homo sapiens
  misc_feature: 1618 for SV(W|O) and mtDNA
tatttctagttaattcattatgcagaaggtataggggttagtccttgctatattatgcttggttataatttttcatctttcccttgcggtactatatctattgcgccaggtttcaatttc

SEQ ID NO: 52941 - DNA, 120 bp, Homo sapiens
  misc_feature: 1618 for SV(W|O) and mtDNA
cgcctgcgaagcagcggtgggcctagccctactagtctcaatctccaacacatatggcctagactacgtacataacctaaacctactccaatgctaaaactaatcgtcccaacaattata

SEQ ID NO: 52942 - DNA, 120 bp, Homo sapiens
  misc_feature: 1618 for SV(W|O) and mtDNA
gtataaatagtaccgttaacttccaattaactagttttgacaacattcaaaaaagagtaataaacttcgccttaattttaataatcaacaccctcctagccttactactaataattatta

SEQ ID NO: 52943 - DNA, 120 bp, Homo sapiens
  misc_feature: 1618 for SV(W|O) and mtDNA
aatatttcgcccactaagccaatcactttattgactcctagccgcagacctcctcattctaacctgaatcggaggacaaccagtaagctacccttttaccatcattggacaagtagcatc

SEQ ID NO: 52944 - DNA, 120 bp, Homo sapiens
  misc_feature: 1618 for SV(W|O) and mtDNA
gatagattggtccaattgggtatgaggagttcagttatatgtttgggattttttaggtagtgggtgttgagcttgaacgctttcttaattggtggctgcttttaggcctactatgggtgt

SEQ ID NO: 52945 - DNA, 120 bp, Homo sapiens
  misc_feature: 1618 for SV(W|O) and mtDNA
ctcactcatttacaccaaccacccaactatctataaacctagccatggccatccccttatgagcgggcgcagtgattataggctttcgctctaagattaaaaatgccctagcccacttct

SEQ ID NO: 52946 - DNA, 120 bp, Homo sapiens
  misc_feature: 1618 for SV(W|O) and mtDNA
cctcattctaacctgaatcggaggacaaccagtaagctacccttttaccatcattggacaagtagcatccgtactatacttcacaacaatcctaatcctaataccaactatctccctaat

SEQ ID NO: 52947 - DNA, 120 bp, Homo sapiens
  misc_feature: 1618 for SV(W|O) and mtDNA
actaagattctatcttggacaaccagctatcaccaggctcggtaggtttgtcgcctctacctataaatcttcccactattttgctacatagacgggtgtgctcttttagctgttcttagg

SEQ ID NO: 52948 - DNA, 120 bp, Homo sapiens
  misc_feature: 1618 for SV(W|O) and mtDNA
cagtgagttcaccctctaaatcaccacgatcaaaagggacaagcatcaagcacgcagcaatgcagctcaaaacgcttagcctagccacacccccacgggaaacagcagtgattaaccttt

SEQ ID NO: 52949 - DNA, 120 bp, Homo sapiens
  misc_feature: 1618 for SV(W|O) and mtDNA
attaggattaggattgttgtgaagtatagtacggatgctacttgtccaatgatggtaaaagggtagcttactggttgtcctccgattcaggttagaatgaggaggtctgcggctaggagt

SEQ ID NO: 52950 - DNA, 120 bp, Homo sapiens
  misc_feature: 1617 for SV(W|O) and mtDNA
tttgcaaggagagccaaagctaagacccccgaaaccagacgagctacctaagaacagctaaaagagcacacccgtctatgtagcaaaatagtgggaagatttataggtagaggcgacaaa

SEQ ID NO: 52951 - DNA, 120 bp, Homo sapiens
  misc_feature: 1617 for SV(W|O) and mtDNA
tattatggagaagtagtctagtttgaagcttagggagagctgggttgtttgggttgtggctcagtgtcagttcgagataataacttcttggtctaggcacatgaatattgttgtggggaa

SEQ ID NO: 52952 - DNA, 120 bp, Homo sapiens
  misc_feature: 1617 for SV(W|O) and mtDNA
ttatttctagttaattcattatgcagaaggtataggggttagtccttgctatattatgcttggttataatttttcatctttcccttgcggtactatatctattgcgccaggtttcaattt

SEQ ID NO: 52953 - DNA, 120 bp, Homo sapiens
  misc_feature: 1617 for SV(W|O) and mtDNA
ggaagcctgtggctacaaaaaatgttgagccgtagatgccgtcggaaatggtgaagggagactcgaagtactctgaggcttgtaggagggtaaaatagagacccagtaaaattgtaataa

SEQ ID NO: 52954 - DNA, 120 bp, Homo sapiens
  misc_feature: 1617 for SV(W|O) and mtDNA
aacagtacctaacaaacccacaggtcctaaactaccaaacctgcattaaaaatttcggttggggcgacctcggagcagaacccaacctccgagcagtacatgctaagacttcaccagtca

SEQ ID NO: 52955 - DNA, 120 bp, Homo sapiens
  misc_feature: 1617 for SV(W|O) and mtDNA
tatttcgcccactaagccaatcactttattgactcctagccgcagacctcctcattctaacctgaatcggaggacaaccagtaagctacccttttaccatcattggacaagtagcatccg

SEQ ID NO: 52956 - DNA, 120 bp, Homo sapiens
  misc_feature: 1617 for SV(W|O) and mtDNA
ctagggtggcgcttccaattaggtgcatgagtaggtggcctgcagtaatgttagcggttaggcgtacggccagggctattggttgaatgagtaggctgatggtttcgataataactagta

SEQ ID NO: 52957 - DNA, 120 bp, Homo sapiens
  misc_feature: 1617 for SV(W|O) and mtDNA
ctaggaatactagtatatcgctcacacctcatatcctccctactatgcctagaaggaataatactatcgctgttcattatagctactctcataaccctcaacacccactccctcttagcc

SEQ ID NO: 52958 - DNA, 120 bp, Homo sapiens
  misc_feature: 1617 for SV(W|O) and mtDNA
ggcatagtagggaggatatgaggtgtgagcgatatactagtattcctagaagtgagatggtaaatgctagtataatatttatgtaaatgaggggcatttggtaaatatgattatcataat

SEQ ID NO: 52959 - DNA, 120 bp, Homo sapiens
  misc_feature: 1617 for SV(W|O) and mtDNA
attcctactactcaacttaaactccagcaccacgaccctactactatctcgcacctgaaacaagctaacatgactaacacccttaattccatccaccctcctctccctaggaggcctgcc

SEQ ID NO: 52960 - DNA, 120 bp, Homo sapiens
  misc_feature: 1617 for SV(W|O) and mtDNA
gctgttcctctttggactaacagttaaatttacaaggggatttagagggttctgtgggcaaatttaaagttgaactaagattctatcttggacaaccagctatcaccaggctcggtaggt

SEQ ID NO: 52961 - DNA, 120 bp, Homo sapiens
  misc_feature: 1617 for SV(W|O) and mtDNA
aaaaccatttcataactttgtcaaagttaaattataggctaaatcctatatatcttaatggcacatgcagcgcaagtaggtctacaagacgctacttcccctatcatagaagagcttatc

SEQ ID NO: 52962 - DNA, 120 bp, Homo sapiens
  misc_feature: 1617 for SV(W|O) and mtDNA
gagtagatatttgaagaactgattaatgtttgggtctgagtttatatatcacagtgagaattctatgatggaccatgtaacgaacaatgctacagggatgaatattatggagaagtagtc

SEQ ID NO: 52963 - DNA, 120 bp, Homo sapiens
  misc_feature: 1617 for SV(W|O) and mtDNA
cgaaaccagacgagctacctaagaacagctaaaagagcacacccgtctatgtagcaaaatagtgggaagatttataggtagaggcgacaaacctaccgagcctggtgatagctggttgtc

SEQ ID NO: 52964 - DNA, 120 bp, Homo sapiens
  misc_feature: 1617 for SV(W|O) and mtDNA
cttctaggcatagtagggaggatatgaggtgtgagcgatatactagtattcctagaagtgagatggtaaatgctagtataatatttatgtaaatgaggggcatttggtaaatatgattat

SEQ ID NO: 52965 - DNA, 120 bp, Homo sapiens
  misc_feature: 1617 for SV(W|O) and mtDNA
cgtactatacttcacaacaatcctaatcctaataccaactatctccctaattgaaaacaaaatactcaaatgggcctgtccttgtagtataaactaatacaccagtcttgtaaaccggag

SEQ ID NO: 52966 - DNA, 120 bp, Homo sapiens
  misc_feature: 1617 for SV(W|O) and mtDNA
cacaggcttccacggacttcacgtcattattggctcaactttcctcactatctgcttcatccgccaactaatatttcactttacatccaaacatcactttggcttcgaagccgccgcctg

SEQ ID NO: 52967 - DNA, 120 bp, Homo sapiens
  misc_feature: 1617 for SV(W|O) and mtDNA
aatgattatgagggcgtgatcatgaaaggtgataagctcttctatgataggggaagtagcgtcttgtagacctacttgcgctgcatgtgccattaagatatataggatttagcctataat

SEQ ID NO: 52968 - DNA, 120 bp, Homo sapiens
  misc_feature: 1617 for SV(W|O) and mtDNA
aattctactgactatcctagaaatcgctgtcgccttaatccaagcctacgttttcacacttctagtaagcctctacctgcacgacaacacataatgacccaccaatcacatgcctatcat

SEQ ID NO: 52969 - DNA, 120 bp, Homo sapiens
  misc_feature: 1617 for SV(W|O) and mtDNA
acttctaggaatactagtatatcgctcacacctcatatcctccctactatgcctagaaggaataatactatcgctgttcattatagctactctcataaccctcaacacccactccctctt

SEQ ID NO: 52970 - DNA, 120 bp, Homo sapiens
  misc_feature: 1616 for SV(W|O) and mtDNA
tttccaaaaaacacataatttgaatcaacacaaccacccacagcctaattattagcatcatccctctactattttttaaccaaatcaacaacaacctatttagctgttccccaacctttt

SEQ ID NO: 52971 - DNA, 120 bp, Homo sapiens
  misc_feature: 1616 for SV(W|O) and mtDNA
tacggtagaactgctattattcatcctatgtgggtaattgaggagtatgctaagattttgcgtagctgggtttggtttaatccacctcaactgcctgctatgatggataagattgagaga

SEQ ID NO: 52972 - DNA, 120 bp, Homo sapiens
  misc_feature: 1616 for SV(W|O) and mtDNA
agatagaatcttagttcaactttaaatttgcccacagaaccctctaaatccccttgtaaatttaactgttagtccaaagaggaacagctctttggacactaggaaaaaaccttgtagaga

SEQ ID NO: 52973 - DNA, 120 bp, Homo sapiens
  misc_feature: 1616 for SV(W|O) and mtDNA
tagggaggatatgaggtgtgagcgatatactagtattcctagaagtgagatggtaaatgctagtataatatttatgtaaatgaggggcatttggtaaatatgattatcataatttaatga

SEQ ID NO: 52974 - DNA, 120 bp, Homo sapiens
  misc_feature: 1616 for SV(W|O) and mtDNA
ggctaagcatagtggggtatctaatcccagtttgggtcttagctattgtgtgttcagatatgttaaagccactttcgtagtctattttgtgtcaactggagttttttacaactcaggtga

SEQ ID NO: 52975 - DNA, 120 bp, Homo sapiens
  misc_feature: 1616 for SV(W|O) and mtDNA
tatttaccgagaaagctcacaagaactgctaactcatgcccccatgtctaacaacatggctttctcaacttttaaaggataacagctatccattggtcttaggccccaaaaattttggtg

SEQ ID NO: 52976 - DNA, 120 bp, Homo sapiens
  misc_feature: 1616 for SV(W|O) and mtDNA
tattggctcaactttcctcactatctgcttcatccgccaactaatatttcactttacatccaaacatcactttggcttcgaagccgccgcctgatactggcattttgtagatgtggtttg

SEQ ID NO: 52977 - DNA, 120 bp, Homo sapiens
  misc_feature: 1616 for SV(W|O) and mtDNA
atactagcatttaccatctcacttctaggaatactagtatatcgctcacacctcatatcctccctactatgcctagaaggaataatactatcgctgttcattatagctactctcataacc

SEQ ID NO: 52978 - DNA, 120 bp, Homo sapiens
  misc_feature: 1616 for SV(W|O) and mtDNA
ggcttctattgacttgggttaatcgtgtgaccgcggtggctggcacgaaattgaccaaccctggggttagtatagcttagttaaactttcgtttattgctaaaggttaatcactgctgtt

SEQ ID NO: 52979 - DNA, 120 bp, Homo sapiens
  misc_feature: 1616 for SV(W|O) and mtDNA
atttcactatcatattcatcggcgtaaatctaactttcttcccacaacactttctcggcctatccggaatgccccgacgttactcggactaccccgatgcatacaccacatgaaacatcc

SEQ ID NO: 52980 - DNA, 120 bp, Homo sapiens
  misc_feature: 1616 for SV(W|O) and mtDNA
cctcactcatttacaccaaccacccaactatctataaacctagccatggccatccccttatgagcgggcgcagtgattataggctttcgctctaagattaaaaatgccctagcccacttc

SEQ ID NO: 52981 - DNA, 120 bp, Homo sapiens
  misc_feature: 1616 for SV(W|O) and mtDNA
cttcatccgccaactaatatttcactttacatccaaacatcactttggcttcgaagccgccgcctgatactggcattttgtagatgtggtttgactatttctgtatgtctccatctattg

SEQ ID NO: 52982 - DNA, 120 bp, Homo sapiens
  misc_feature: 1616 for SV(W|O) and mtDNA
agggtggcgcttccaattaggtgcatgagtaggtggcctgcagtaatgttagcggttaggcgtacggccagggctattggttgaatgagtaggctgatggtttcgataataactagtatg

SEQ ID NO: 52983 - DNA, 120 bp, Homo sapiens
  misc_feature: 1616 for SV(W|O) and mtDNA
attacattttgactaccacaactcaacggctacatagaaaaatccaccccttacgagtgcggcttcgaccctatatcccccgcccgcgtccctttctccataaaattcttcttagtagct

SEQ ID NO: 52984 - DNA, 120 bp, Homo sapiens
  misc_feature: 1615 for SV(W|O) and mtDNA
tttattaatgcaaacagtacctaacaaacccacaggtcctaaactaccaaacctgcattaaaaatttcggttggggcgacctcggagcagaacccaacctccgagcagtacatgctaaga

SEQ ID NO: 52985 - DNA, 120 bp, Homo sapiens
  misc_feature: 1615 for SV(W|O) and mtDNA
ctttgcaaggagagccaaagctaagacccccgaaaccagacgagctacctaagaacagctaaaagagcacacccgtctatgtagcaaaatagtgggaagatttataggtagaggcgacaa

SEQ ID NO: 52986 - DNA, 120 bp, Homo sapiens
  misc_feature: 1615 for SV(W|O) and mtDNA
gtctttgccgcctgcgaagcagcggtgggcctagccctactagtctcaatctccaacacatatggcctagactacgtacataacctaaacctactccaatgctaaaactaatcgtcccaa

SEQ ID NO: 52987 - DNA, 120 bp, Homo sapiens
  misc_feature: 1615 for SV(W|O) and mtDNA
ttgccgcctgcgaagcagcggtgggcctagccctactagtctcaatctccaacacatatggcctagactacgtacataacctaaacctactccaatgctaaaactaatcgtcccaacaat

SEQ ID NO: 52988 - DNA, 120 bp, Homo sapiens
  misc_feature: 1615 for SV(W|O) and mtDNA
ttctaggcatagtagggaggatatgaggtgtgagcgatatactagtattcctagaagtgagatggtaaatgctagtataatatttatgtaaatgaggggcatttggtaaatatgattatc

SEQ ID NO: 52989 - DNA, 120 bp, Homo sapiens
  misc_feature: 1615 for SV(W|O) and mtDNA
ttccttctaggcatagtagggaggatatgaggtgtgagcgatatactagtattcctagaagtgagatggtaaatgctagtataatatttatgtaaatgaggggcatttggtaaatatgat

SEQ ID NO: 52990 - DNA, 120 bp, Homo sapiens
  misc_feature: 1615 for SV(W|O) and mtDNA
agtataggcgatagaaattgaaacctggcgcaatagatatagtaccgcaagggaaagatgaaaaattataaccaagcataatatagcaaggactaacccctataccttctgcataatgaa

SEQ ID NO: 52991 - DNA, 120 bp, Homo sapiens
  misc_feature: 1615 for SV(W|O) and mtDNA
agctcacaagaactgctaactcatgcccccatgtctaacaacatggctttctcaacttttaaaggataacagctatccattggtcttaggccccaaaaattttggtgcaactccaaataa

SEQ ID NO: 52992 - DNA, 120 bp, Homo sapiens
  misc_feature: 1615 for SV(W|O) and mtDNA
tatctcgaactgacactgagccacaacccaaacaacccagctctccctaagcttcaaactagactacttctccataatattcatccctgtagcattgttcgttacatggtccatcataga

SEQ ID NO: 52993 - DNA, 120 bp, Homo sapiens
  misc_feature: 1615 for SV(W|O) and mtDNA
cctctaaatcaccacgatcaaaagggacaagcatcaagcacgcagcaatgcagctcaaaacgcttagcctagccacacccccacgggaaacagcagtgattaacctttagcaataaacga

SEQ ID NO: 52994 - DNA, 120 bp, Homo sapiens
  misc_feature: 1615 for SV(W|O) and mtDNA
atattatggagaagtagtctagtttgaagcttagggagagctgggttgtttgggttgtggctcagtgtcagttcgagataataacttcttggtctaggcacatgaatattgttgtgggga

SEQ ID NO: 52995 - DNA, 120 bp, Homo sapiens
  misc_feature: 1615 for SV(W|O) and mtDNA
tattaggacttttcgctttgaagcgaaggcttctcaaatcatgaaaattattaatattactgctgttagagaaatgaatgagcctacagatgataggatgtttcatgtggtgtatgcatc

SEQ ID NO: 52996 - DNA, 120 bp, Homo sapiens
  misc_feature: 1615 for SV(W|O) and mtDNA
tataggcgatagaaattgaaacctggcgcaatagatatagtaccgcaagggaaagatgaaaaattataaccaagcataatatagcaaggactaacccctataccttctgcataatgaatt

SEQ ID NO: 52997 - DNA, 120 bp, Homo sapiens
  misc_feature: 1615 for SV(W|O) and mtDNA
tactagcatttaccatctcacttctaggaatactagtatatcgctcacacctcatatcctccctactatgcctagaaggaataatactatcgctgttcattatagctactctcataaccc

SEQ ID NO: 52998 - DNA, 120 bp, Homo sapiens
  misc_feature: 1615 for SV(W|O) and mtDNA
gtacggtagaactgctattattcatcctatgtgggtaattgaggagtatgctaagattttgcgtagctgggtttggtttaatccacctcaactgcctgctatgatggataagattgagag

SEQ ID NO: 52999 - DNA, 120 bp, Homo sapiens
  misc_feature: 1615 for SV(W|O) and mtDNA
gactaacagttaaatttacaaggggatttagagggttctgtgggcaaatttaaagttgaactaagattctatcttggacaaccagctatcaccaggctcggtaggtttgtcgcctctacc

SEQ ID NO: 53000 - DNA, 120 bp, Homo sapiens
  misc_feature: 1615 for SV(W|O) and mtDNA
aaatgctagtataatatttatgtaaatgaggggcatttggtaaatatgattatcataatttaatgagtcgaaatcattcgttttgtttaaactatataccaattcggttcagtctaatcc

SEQ ID NO: 53001 - DNA, 120 bp, Homo sapiens
  misc_feature: 1615 for SV(W|O) and mtDNA
ggacttcacgtcattattggctcaactttcctcactatctgcttcatccgccaactaatatttcactttacatccaaacatcactttggcttcgaagccgccgcctgatactggcatttt

SEQ ID NO: 53002 - DNA, 120 bp, Homo sapiens
  misc_feature: 1615 for SV(W|O) and mtDNA
ctgattggtagtattggttatggttcattgtccggagagtatattgttgaagaggatagctattagaaggattatggatgcggttgcttgcgtgaggaaatacttgatggcagcttctgt

SEQ ID NO: 53003 - DNA, 120 bp, Homo sapiens
  misc_feature: 1615 for SV(W|O) and mtDNA
aaaatgttggttatacccttcccgtactaattaatcccctggcccaacccgtcatctactctaccatctttgcaggcacactcatcacagcgctaagctcgcactgattttttacctgag

SEQ ID NO: 53004 - DNA, 120 bp, Homo sapiens
  misc_feature: 1615 for SV(W|O) and mtDNA
ccatttcactatcatattcatcggcgtaaatctaactttcttcccacaacactttctcggcctatccggaatgccccgacgttactcggactaccccgatgcatacaccacatgaaacat

SEQ ID NO: 53005 - DNA, 120 bp, Homo sapiens
  misc_feature: 1615 for SV(W|O) and mtDNA
aggcacagctctaagcctccttattcgagccgagctgggccagccaggcaaccttctaggtaacgaccacatctacaacgttatcgtcacagcccatgcatttgtaataatcttcttcat

SEQ ID NO: 53006 - DNA, 120 bp, Homo sapiens
  misc_feature: 1615 for SV(W|O) and mtDNA
agtataaatagtaccgttaacttccaattaactagttttgacaacattcaaaaaagagtaataaacttcgccttaattttaataatcaacaccctcctagccttactactaataattatt

SEQ ID NO: 53007 - DNA, 120 bp, Homo sapiens
  misc_feature: 1614 for SV(W|O) and mtDNA
atccctcttattaatcatcatcctagccctaagtctggcctatgagtgactacaaaaaggattagactgaaccgaattggtatatagtttaaacaaaacgaatgatttcgactcattaaa

SEQ ID NO: 53008 - DNA, 120 bp, Homo sapiens
  misc_feature: 1614 for SV(W|O) and mtDNA
agtgaatgaagcctcctatgatggcaaatacagctcctattgataggacatagtggaagtgggctacaacgtagtacgtgtcgtgtagtacgatgtctagtgatgagtttgctaatacaa

SEQ ID NO: 53009 - DNA, 120 bp, Homo sapiens
  misc_feature: 1614 for SV(W|O) and mtDNA
gaactgctaactcatgcccccatgtctaacaacatggctttctcaacttttaaaggataacagctatccattggtcttaggccccaaaaattttggtgcaactccaaataaaagtaataa

SEQ ID NO: 53010 - DNA, 120 bp, Homo sapiens
  misc_feature: 1614 for SV(W|O) and mtDNA
cataatatagcaaggactaacccctataccttctgcataatgaattaactagaaataactttgcaaggagagccaaagctaagacccccgaaaccagacgagctacctaagaacagctaa

SEQ ID NO: 53011 - DNA, 120 bp, Homo sapiens
  misc_feature: 1614 for SV(W|O) and mtDNA
tgagaattctatgatggaccatgtaacgaacaatgctacagggatgaatattatggagaagtagtctagtttgaagcttagggagagctgggttgtttgggttgtggctcagtgtcagtt

SEQ ID NO: 53012 - DNA, 120 bp, Homo sapiens
  misc_feature: 1614 for SV(W|O) and mtDNA
gctacaaaaaatgttgagccgtagatgccgtcggaaatggtgaagggagactcgaagtactctgaggcttgtaggagggtaaaatagagacccagtaaaattgtaataagcagtgcttga

SEQ ID NO: 53013 - DNA, 120 bp, Homo sapiens
  misc_feature: 1614 for SV(W|O) and mtDNA
tatggagaagtagtctagtttgaagcttagggagagctgggttgtttgggttgtggctcagtgtcagttcgagataataacttcttggtctaggcacatgaatattgttgtggggaagag

SEQ ID NO: 53014 - DNA, 120 bp, Homo sapiens
  misc_feature: 1614 for SV(W|O) and mtDNA
tatcgaaaccatcagcctactcattcaaccaatagccctggccgtacgcctaaccgctaacattactgcaggccacctactcatgcacctaattggaagcgccaccctagcaatatcaac

SEQ ID NO: 53015 - DNA, 120 bp, Homo sapiens
  misc_feature: 1614 for SV(W|O) and mtDNA
ctgagccctaggattcatctttcttttcaccgtaggtggcctgactggcattgtattagcaaactcatcactagacatcgtactacacgacacgtactacgttgtagcccacttccacta

SEQ ID NO: 53016 - DNA, 120 bp, Homo sapiens
  misc_feature: 1614 for SV(W|O) and mtDNA
taggggaaatcagtgaatgaagcctcctatgatggcaaatacagctcctattgataggacatagtggaagtgggctacaacgtagtacgtgtcgtgtagtacgatgtctagtgatgagtt

SEQ ID NO: 53017 - DNA, 120 bp, Homo sapiens
  misc_feature: 1614 for SV(W|O) and mtDNA
tactatacttcacaacaatcctaatcctaataccaactatctccctaattgaaaacaaaatactcaaatgggcctgtccttgtagtataaactaatacaccagtcttgtaaaccggagat

SEQ ID NO: 53018 - DNA, 120 bp, Homo sapiens
  misc_feature: 1614 for SV(W|O) and mtDNA
gtggatgatggacccggagcacataaatagtatggctttgaagaaggcgtgggtgcagatgtgcaggaatgctaggtgtggttggttgatgccgattgtaactattatgagtcctagttg

SEQ ID NO: 53019 - DNA, 120 bp, Homo sapiens
  misc_feature: 1614 for SV(W|O) and mtDNA
gtataggcgatagaaattgaaacctggcgcaatagatatagtaccgcaagggaaagatgaaaaattataaccaagcataatatagcaaggactaacccctataccttctgcataatgaat

SEQ ID NO: 53020 - DNA, 120 bp, Homo sapiens
  misc_feature: 1614 for SV(W|O) and mtDNA
ggcctcctagggagaggagggtggatggaattaagggtgttagtcatgttagcttgtttcaggtgcgagatagtagtagggtcgtggtgctggagtttaagttgagtagtaggaatgcgg

SEQ ID NO: 53021 - DNA, 120 bp, Homo sapiens
  misc_feature: 1614 for SV(W|O) and mtDNA
aaggcttctcaaatcatgaaaattattaatattactgctgttagagaaatgaatgagcctacagatgataggatgtttcatgtggtgtatgcatcggggtagtccgagtaacgtcggggc

SEQ ID NO: 53022 - DNA, 120 bp, Homo sapiens
  misc_feature: 1614 for SV(W|O) and mtDNA
atggtctgagctatgatatcaattggcttcctagggtttatcgtgtgagcacaccatatatttacagtaggaatagacgtagacacacgagcatatttcacctccgctaccataatcatc

SEQ ID NO: 53023 - DNA, 120 bp, Homo sapiens
  misc_feature: 1614 for SV(W|O) and mtDNA
gaatgtgtggtagggtggggggcatccatatagtcactccaggtttatggagggttcttctactattaggacttttcgctttgaagcgaaggcttctcaaatcatgaaaattattaatat

SEQ ID NO: 53024 - DNA, 120 bp, Homo sapiens
  misc_feature: 1614 for SV(W|O) and mtDNA
cttctattgacttgggttaatcgtgtgaccgcggtggctggcacgaaattgaccaaccctggggttagtatagcttagttaaactttcgtttattgctaaaggttaatcactgctgtttc

SEQ ID NO: 53025 - DNA, 120 bp, Homo sapiens
  misc_feature: 1614 for SV(W|O) and mtDNA
ctcacttctaggaatactagtatatcgctcacacctcatatcctccctactatgcctagaaggaataatactatcgctgttcattatagctactctcataaccctcaacacccactccct

SEQ ID NO: 53026 - DNA, 120 bp, Homo sapiens
  misc_feature: 1614 for SV(W|O) and mtDNA
attaggacttttcgctttgaagcgaaggcttctcaaatcatgaaaattattaatattactgctgttagagaaatgaatgagcctacagatgataggatgtttcatgtggtgtatgcatcg

SEQ ID NO: 53027 - DNA, 120 bp, Homo sapiens
  misc_feature: 1614 for SV(W|O) and mtDNA
actgattggtagtattggttatggttcattgtccggagagtatattgttgaagaggatagctattagaaggattatggatgcggttgcttgcgtgaggaaatacttgatggcagcttctg

SEQ ID NO: 53028 - DNA, 120 bp, Homo sapiens
  misc_feature: 1614 for SV(W|O) and mtDNA
aaataaagtataggcgatagaaattgaaacctggcgcaatagatatagtaccgcaagggaaagatgaaaaattataaccaagcataatatagcaaggactaacccctataccttctgcat

SEQ ID NO: 53029 - DNA, 120 bp, Homo sapiens
  misc_feature: 1613 for SV(W|O) and mtDNA
tttggatgtaaagtgaaatattagttggcggatgaagcagatagtgaggaaagttgagccaataatgacgtgaagtccgtggaagcctgtggctacaaaaaatgttgagccgtagatgcc

SEQ ID NO: 53030 - DNA, 120 bp, Homo sapiens
  misc_feature: 1613 for SV(W|O) and mtDNA
agaaagctcacaagaactgctaactcatgcccccatgtctaacaacatggctttctcaacttttaaaggataacagctatccattggtcttaggccccaaaaattttggtgcaactccaa

SEQ ID NO: 53031 - DNA, 120 bp, Homo sapiens
  misc_feature: 1613 for SV(W|O) and mtDNA
tgcctgcgttcaggcgttctggctggttgcctcatcgggtgatgatagccaaggtggggataagtgtggtttcgaagaagatataaaatatgattagttctgtggctgtgaatgttataa

SEQ ID NO: 53032 - DNA, 120 bp, Homo sapiens
  misc_feature: 1613 for SV(W|O) and mtDNA
tggatgatggacccggagcacataaatagtatggctttgaagaaggcgtgggtgcagatgtgcaggaatgctaggtgtggttggttgatgccgattgtaactattatgagtcctagttga

SEQ ID NO: 53033 - DNA, 120 bp, Homo sapiens
  misc_feature: 1613 for SV(W|O) and mtDNA
caaataaagtataggcgatagaaattgaaacctggcgcaatagatatagtaccgcaagggaaagatgaaaaattataaccaagcataatatagcaaggactaacccctataccttctgca

SEQ ID NO: 53034 - DNA, 120 bp, Homo sapiens
  misc_feature: 1613 for SV(W|O) and mtDNA
atatagcaaggactaacccctataccttctgcataatgaattaactagaaataactttgcaaggagagccaaagctaagacccccgaaaccagacgagctacctaagaacagctaaaaga

SEQ ID NO: 53035 - DNA, 120 bp, Homo sapiens
  misc_feature: 1613 for SV(W|O) and mtDNA
tcaaatcatgaaaattattaatattactgctgttagagaaatgaatgagcctacagatgataggatgtttcatgtggtgtatgcatcggggtagtccgagtaacgtcggggcattccgga

SEQ ID NO: 53036 - DNA, 120 bp, Homo sapiens
  misc_feature: 1613 for SV(W|O) and mtDNA
attccttctaggcatagtagggaggatatgaggtgtgagcgatatactagtattcctagaagtgagatggtaaatgctagtataatatttatgtaaatgaggggcatttggtaaatatga

SEQ ID NO: 53037 - DNA, 120 bp, Homo sapiens
  misc_feature: 1613 for SV(W|O) and mtDNA
acaggcttccacggacttcacgtcattattggctcaactttcctcactatctgcttcatccgccaactaatatttcactttacatccaaacatcactttggcttcgaagccgccgcctga

SEQ ID NO: 53038 - DNA, 120 bp, Homo sapiens
  misc_feature: 1613 for SV(W|O) and mtDNA
agaactgctaactcatgcccccatgtctaacaacatggctttctcaacttttaaaggataacagctatccattggtcttaggccccaaaaattttggtgcaactccaaataaaagtaata

SEQ ID NO: 53039 - DNA, 120 bp, Homo sapiens
  misc_feature: 1613 for SV(W|O) and mtDNA
tagggtggcgcttccaattaggtgcatgagtaggtggcctgcagtaatgttagcggttaggcgtacggccagggctattggttgaatgagtaggctgatggtttcgataataactagtat

SEQ ID NO: 53040 - DNA, 120 bp, Homo sapiens
  misc_feature: 1613 for SV(W|O) and mtDNA
tagagacccagtaaaattgtaataagcagtgcttgaattatttggtttcggttgttttctattagactatggtgagctcaggtgattgatactcctgatgcgagtaatacggatgtgttt

SEQ ID NO: 53041 - DNA, 120 bp, Homo sapiens
  misc_feature: 1613 for SV(W|O) and mtDNA
gagttgtaaaaaactccagttgacacaaaatagactacgaaagtggctttaacatatctgaacacacaatagctaagacccaaactgggattagataccccactatgcttagccctaaac

SEQ ID NO: 53042 - DNA, 120 bp, Homo sapiens
  misc_feature: 1613 for SV(W|O) and mtDNA
gggaaatcagtgaatgaagcctcctatgatggcaaatacagctcctattgataggacatagtggaagtgggctacaacgtagtacgtgtcgtgtagtacgatgtctagtgatgagtttgc

SEQ ID NO: 53043 - DNA, 120 bp, Homo sapiens
  misc_feature: 1613 for SV(W|O) and mtDNA
ccctaggattcatctttcttttcaccgtaggtggcctgactggcattgtattagcaaactcatcactagacatcgtactacacgacacgtactacgttgtagcccacttccactatgtcc

SEQ ID NO: 53044 - DNA, 120 bp, Homo sapiens
  misc_feature: 1613 for SV(W|O) and mtDNA
gcatttggtaaatatgattatcataatttaatgagtcgaaatcattcgttttgtttaaactatataccaattcggttcagtctaatcctttttgtagtcactcataggccagacttaggg

SEQ ID NO: 53045 - DNA, 120 bp, Homo sapiens
  misc_feature: 1613 for SV(W|O) and mtDNA
cccgaaaccagacgagctacctaagaacagctaaaagagcacacccgtctatgtagcaaaatagtgggaagatttataggtagaggcgacaaacctaccgagcctggtgatagctggttg

SEQ ID NO: 53046 - DNA, 120 bp, Homo sapiens
  misc_feature: 1613 for SV(W|O) and mtDNA
atcacagtgagaattctatgatggaccatgtaacgaacaatgctacagggatgaatattatggagaagtagtctagtttgaagcttagggagagctgggttgtttgggttgtggctcagt

SEQ ID NO: 53047 - DNA, 120 bp, Homo sapiens
  misc_feature: 1612 for SV(W|O) and mtDNA
ttgggtaccacccaagtattgactcacccatcaacaaccgctatgtatttcgtacattactgccagccaccatgaatattgtacggtaccataaatacttgaccacctgtagtacataaa

SEQ ID NO: 53048 - DNA, 120 bp, Homo sapiens
  misc_feature: 1612 for SV(W|O) and mtDNA
agtgagggtaataatgacttgttggttgattgtagatattgggctgttaattgtcagttcagtgttttaatctgacgcaggcttatgcggaggagaatgttttcatgttacttatactaa

SEQ ID NO: 53049 - DNA, 120 bp, Homo sapiens
  misc_feature: 1612 for SV(W|O) and mtDNA
ataatatttcgcccactaagccaatcactttattgactcctagccgcagacctcctcattctaacctgaatcggaggacaaccagtaagctacccttttaccatcattggacaagtagca

SEQ ID NO: 53050 - DNA, 120 bp, Homo sapiens
  misc_feature: 1612 for SV(W|O) and mtDNA
aggcttctcaaatcatgaaaattattaatattactgctgttagagaaatgaatgagcctacagatgataggatgtttcatgtggtgtatgcatcggggtagtccgagtaacgtcggggca

SEQ ID NO: 53051 - DNA, 120 bp, Homo sapiens
  misc_feature: 1612 for SV(W|O) and mtDNA
tcacttctaggaatactagtatatcgctcacacctcatatcctccctactatgcctagaaggaataatactatcgctgttcattatagctactctcataaccctcaacacccactccctc

SEQ ID NO: 53052 - DNA, 120 bp, Homo sapiens
  misc_feature: 1612 for SV(W|O) and mtDNA
tcacagtgagaattctatgatggaccatgtaacgaacaatgctacagggatgaatattatggagaagtagtctagtttgaagcttagggagagctgggttgtttgggttgtggctcagtg

SEQ ID NO: 53053 - DNA, 120 bp, Homo sapiens
  misc_feature: 1612 for SV(W|O) and mtDNA
tattatctcgaactgacactgagccacaacccaaacaacccagctctccctaagcttcaaactagactacttctccataatattcatccctgtagcattgttcgttacatggtccatcat

SEQ ID NO: 53054 - DNA, 120 bp, Homo sapiens
  misc_feature: 1612 for SV(W|O) and mtDNA
tagccacaggcttccacggacttcacgtcattattggctcaactttcctcactatctgcttcatccgccaactaatatttcactttacatccaaacatcactttggcttcgaagccgccg

SEQ ID NO: 53055 - DNA, 120 bp, Homo sapiens
  misc_feature: 1612 for SV(W|O) and mtDNA
ccttttactttttttaacctttccttatgagcatgcctgtgttgggttgacagtgagggtaataatgacttgttggttgattgtagatattgggctgttaattgtcagttcagtgtttta

SEQ ID NO: 53056 - DNA, 120 bp, Homo sapiens
  misc_feature: 1612 for SV(W|O) and mtDNA
ggcttccacggacttcacgtcattattggctcaactttcctcactatctgcttcatccgccaactaatatttcactttacatccaaacatcactttggcttcgaagccgccgcctgatac

SEQ ID NO: 53057 - DNA, 120 bp, Homo sapiens
  misc_feature: 1612 for SV(W|O) and mtDNA
atatttcgcccactaagccaatcactttattgactcctagccgcagacctcctcattctaacctgaatcggaggacaaccagtaagctacccttttaccatcattggacaagtagcatcc

SEQ ID NO: 53058 - DNA, 120 bp, Homo sapiens
  misc_feature: 1612 for SV(W|O) and mtDNA
ctcaactttcctcactatctgcttcatccgccaactaatatttcactttacatccaaacatcactttggcttcgaagccgccgcctgatactggcattttgtagatgtggtttgactatt

SEQ ID NO: 53059 - DNA, 120 bp, Homo sapiens
  misc_feature: 1612 for SV(W|O) and mtDNA
attatggtagcggaggtgaaatatgctcgtgtgtctacgtctattcctactgtaaatatatggtgtgctcacacgataaaccctaggaagccaattgatatcatagctcagaccatacct

SEQ ID NO: 53060 - DNA, 120 bp, Homo sapiens
  misc_feature: 1611 for SV(W|O) and mtDNA
ttatgagggcgtgatcatgaaaggtgataagctcttctatgataggggaagtagcgtcttgtagacctacttgcgctgcatgtgccattaagatatataggatttagcctataatttaac

SEQ ID NO: 53061 - DNA, 120 bp, Homo sapiens
  misc_feature: 1611 for SV(W|O) and mtDNA
tggtagtaatataattgttgggacgattagttttagcattggagtaggtttaggttatgtacgtagtctaggccatatgtgttggagattgagactagtagggctaggcccaccgctgct

SEQ ID NO: 53062 - DNA, 120 bp, Homo sapiens
  misc_feature: 1611 for SV(W|O) and mtDNA
tgaagcgaaggcttctcaaatcatgaaaattattaatattactgctgttagagaaatgaatgagcctacagatgataggatgtttcatgtggtgtatgcatcggggtagtccgagtaacg

SEQ ID NO: 53063 - DNA, 120 bp, Homo sapiens
  misc_feature: 1611 for SV(W|O) and mtDNA
tcacgtcattattggctcaactttcctcactatctgcttcatccgccaactaatatttcactttacatccaaacatcactttggcttcgaagccgccgcctgatactggcattttgtaga

SEQ ID NO: 53064 - DNA, 120 bp, Homo sapiens
  misc_feature: 1611 for SV(W|O) and mtDNA
tccacggacttcacgtcattattggctcaactttcctcactatctgcttcatccgccaactaatatttcactttacatccaaacatcactttggcttcgaagccgccgcctgatactggc

SEQ ID NO: 53065 - DNA, 120 bp, Homo sapiens
  misc_feature: 1611 for SV(W|O) and mtDNA
tcagtggtagtaatataattgttgggacgattagttttagcattggagtaggtttaggttatgtacgtagtctaggccatatgtgttggagattgagactagtagggctaggcccaccgc

SEQ ID NO: 53066 - DNA, 120 bp, Homo sapiens
  misc_feature: 1611 for SV(W|O) and mtDNA
tcagtgaatgaagcctcctatgatggcaaatacagctcctattgataggacatagtggaagtgggctacaacgtagtacgtgtcgtgtagtacgatgtctagtgatgagtttgctaatac

SEQ ID NO: 53067 - DNA, 120 bp, Homo sapiens
  misc_feature: 1611 for SV(W|O) and mtDNA
tataatatttatgtaaatgaggggcatttggtaaatatgattatcataatttaatgagtcgaaatcattcgttttgtttaaactatataccaattcggttcagtctaatcctttttgtag

SEQ ID NO: 53068 - DNA, 120 bp, Homo sapiens
  misc_feature: 1611 for SV(W|O) and mtDNA
tagattggtccaattgggtatgaggagttcagttatatgtttgggattttttaggtagtgggtgttgagcttgaacgctttcttaattggtggctgcttttaggcctactatgggtgtta

SEQ ID NO: 53069 - DNA, 120 bp, Homo sapiens
  misc_feature: 1611 for SV(W|O) and mtDNA
tactacaaggacaggcccatttgagtattttgttttcaattagggagatagttggtattaggattaggattgttgtgaagtatagtacggatgctacttgtccaatgatggtaaaagggt

SEQ ID NO: 53070 - DNA, 120 bp, Homo sapiens
  misc_feature: 1611 for SV(W|O) and mtDNA
cctactactcaacttaaactccagcaccacgaccctactactatctcgcacctgaaacaagctaacatgactaacacccttaattccatccaccctcctctccctaggaggcctgccccc

SEQ ID NO: 53071 - DNA, 120 bp, Homo sapiens
  misc_feature: 1611 for SV(W|O) and mtDNA
gcctcactcatttacaccaaccacccaactatctataaacctagccatggccatccccttatgagcgggcgcagtgattataggctttcgctctaagattaaaaatgccctagcccactt

SEQ ID NO: 53072 - DNA, 120 bp, Homo sapiens
  misc_feature: 1611 for SV(W|O) and mtDNA
agttgatgcagagtggggttttgcagtccttagctgttacagaaattaagtattgcaacttactgagggctttgaaggctcttggtctgtatttaacctaaatttctataagattattag

SEQ ID NO: 53073 - DNA, 120 bp, Homo sapiens
  misc_feature: 1611 for SV(W|O) and mtDNA
aactaagattctatcttggacaaccagctatcaccaggctcggtaggtttgtcgcctctacctataaatcttcccactattttgctacatagacgggtgtgctcttttagctgttcttag

SEQ ID NO: 53074 - DNA, 120 bp, Homo sapiens
  misc_feature: 1611 for SV(W|O) and mtDNA
cgtcccaacaattatattactaccactgacatgactttccaaaaaacacataatttgaatcaacacaaccacccacagcctaattattagcatcatccctctactattttttaaccaaat

SEQ ID NO: 53075 - DNA, 120 bp, Homo sapiens
  misc_feature: 1611 for SV(W|O) and mtDNA
aagtatgtgcctgcgttcaggcgttctggctggttgcctcatcgggtgatgatagccaaggtggggataagtgtggtttcgaagaagatataaaatatgattagttctgtggctgtgaat

SEQ ID NO: 53076 - DNA, 120 bp, Homo sapiens
  misc_feature: 1610 for SV(W|O) and mtDNA
ttgttgatttaactgttgaggtttagggctaagcatagtggggtatctaatcccagtttgggtcttagctattgtgtgttcagatatgttaaagccactttcgtagtctattttgtgtca

SEQ ID NO: 53077 - DNA, 120 bp, Homo sapiens
  misc_feature: 1610 for SV(W|O) and mtDNA
ttccagtgagttcaccctctaaatcaccacgatcaaaagggacaagcatcaagcacgcagcaatgcagctcaaaacgcttagcctagccacacccccacgggaaacagcagtgattaacc

SEQ ID NO: 53078 - DNA, 120 bp, Homo sapiens
  misc_feature: 1610 for SV(W|O) and mtDNA
ttcacgtcattattggctcaactttcctcactatctgcttcatccgccaactaatatttcactttacatccaaacatcactttggcttcgaagccgccgcctgatactggcattttgtag

SEQ ID NO: 53079 - DNA, 120 bp, Homo sapiens
  misc_feature: 1610 for SV(W|O) and mtDNA
ttattatctcgaactgacactgagccacaacccaaacaacccagctctccctaagcttcaaactagactacttctccataatattcatccctgtagcattgttcgttacatggtccatca

SEQ ID NO: 53080 - DNA, 120 bp, Homo sapiens
  misc_feature: 1610 for SV(W|O) and mtDNA
aaccatcagcctactcattcaaccaatagccctggccgtacgcctaaccgctaacattactgcaggccacctactcatgcacctaattggaagcgccaccctagcaatatcaaccattaa

SEQ ID NO: 53081 - DNA, 120 bp, Homo sapiens
  misc_feature: 1610 for SV(W|O) and mtDNA
tcgtgtgagcacaccatatatttacagtaggaatagacgtagacacacgagcatatttcacctccgctaccataatcatcgctatccccaccggcgtcaaagtatttagctgactcgcca

SEQ ID NO: 53082 - DNA, 120 bp, Homo sapiens
  misc_feature: 1610 for SV(W|O) and mtDNA
tggactaacagttaaatttacaaggggatttagagggttctgtgggcaaatttaaagttgaactaagattctatcttggacaaccagctatcaccaggctcggtaggtttgtcgcctcta

SEQ ID NO: 53083 - DNA, 120 bp, Homo sapiens
  misc_feature: 1610 for SV(W|O) and mtDNA
tctgagccctaggattcatctttcttttcaccgtaggtggcctgactggcattgtattagcaaactcatcactagacatcgtactacacgacacgtactacgttgtagcccacttccact

SEQ ID NO: 53084 - DNA, 120 bp, Homo sapiens
  misc_feature: 1610 for SV(W|O) and mtDNA
atggagaagtagtctagtttgaagcttagggagagctgggttgtttgggttgtggctcagtgtcagttcgagataataacttcttggtctaggcacatgaatattgttgtggggaagaga

SEQ ID NO: 53085 - DNA, 120 bp, Homo sapiens
  misc_feature: 1610 for SV(W|O) and mtDNA
tctcaaatcatgaaaattattaatattactgctgttagagaaatgaatgagcctacagatgataggatgtttcatgtggtgtatgcatcggggtagtccgagtaacgtcggggcattccg

SEQ ID NO: 53086 - DNA, 120 bp, Homo sapiens
  misc_feature: 1610 for SV(W|O) and mtDNA
tcaacattttttgtagccacaggcttccacggacttcacgtcattattggctcaactttcctcactatctgcttcatccgccaactaatatttcactttacatccaaacatcactttggc

SEQ ID NO: 53087 - DNA, 120 bp, Homo sapiens
  misc_feature: 1610 for SV(W|O) and mtDNA
tatggtagcggaggtgaaatatgctcgtgtgtctacgtctattcctactgtaaatatatggtgtgctcacacgataaaccctaggaagccaattgatatcatagctcagaccatacctat

SEQ ID NO: 53088 - DNA, 120 bp, Homo sapiens
  misc_feature: 1610 for SV(W|O) and mtDNA
gttcattgttaaggttgtggatgatggacccggagcacataaatagtatggctttgaagaaggcgtgggtgcagatgtgcaggaatgctaggtgtggttggttgatgccgattgtaacta

SEQ ID NO: 53089 - DNA, 120 bp, Homo sapiens
  misc_feature: 1610 for SV(W|O) and mtDNA
tacctattattcggcgcatgagctggagtcctaggcacagctctaagcctccttattcgagccgagctgggccagccaggcaaccttctaggtaacgaccacatctacaacgttatcgtc

SEQ ID NO: 53090 - DNA, 120 bp, Homo sapiens
  misc_feature: 1610 for SV(W|O) and mtDNA
taatatttcgcccactaagccaatcactttattgactcctagccgcagacctcctcattctaacctgaatcggaggacaaccagtaagctacccttttaccatcattggacaagtagcat

SEQ ID NO: 53091 - DNA, 120 bp, Homo sapiens
  misc_feature: 1610 for SV(W|O) and mtDNA
aataataggtatagtgttccaatgtctttgtggtttgtagagaatagtcaacggtcggcgaacatcagtgggggtgaggtaaaatggctgagtgaagcattggactgtaaatctaaagac

SEQ ID NO: 53092 - DNA, 120 bp, Homo sapiens
  misc_feature: 1610 for SV(W|O) and mtDNA
agttgtaaaaaactccagttgacacaaaatagactacgaaagtggctttaacatatctgaacacacaatagctaagacccaaactgggattagataccccactatgcttagccctaaacc

SEQ ID NO: 53093 - DNA, 120 bp, Homo sapiens
  misc_feature: 1610 for SV(W|O) and mtDNA
aagcctgtggctacaaaaaatgttgagccgtagatgccgtcggaaatggtgaagggagactcgaagtactctgaggcttgtaggagggtaaaatagagacccagtaaaattgtaataagc

SEQ ID NO: 53094 - DNA, 120 bp, Homo sapiens
  misc_feature: 1610 for SV(W|O) and mtDNA
attctatcttggacaaccagctatcaccaggctcggtaggtttgtcgcctctacctataaatcttcccactattttgctacatagacgggtgtgctcttttagctgttcttaggtagctc

SEQ ID NO: 53095 - DNA, 120 bp, Homo sapiens
  misc_feature: 1610 for SV(W|O) and mtDNA
acggtagaactgctattattcatcctatgtgggtaattgaggagtatgctaagattttgcgtagctgggtttggtttaatccacctcaactgcctgctatgatggataagattgagagag

SEQ ID NO: 53096 - DNA, 120 bp, Homo sapiens
  misc_feature: 1610 for SV(W|O) and mtDNA
ctcaacattttttgtagccacaggcttccacggacttcacgtcattattggctcaactttcctcactatctgcttcatccgccaactaatatttcactttacatccaaacatcactttgg

SEQ ID NO: 53097 - DNA, 120 bp, Homo sapiens
  misc_feature: 1610 for SV(W|O) and mtDNA
cacttctaggaatactagtatatcgctcacacctcatatcctccctactatgcctagaaggaataatactatcgctgttcattatagctactctcataaccctcaacacccactccctct

SEQ ID NO: 53098 - DNA, 120 bp, Homo sapiens
  misc_feature: 1610 for SV(W|O) and mtDNA
aaaaaccatttcataactttgtcaaagttaaattataggctaaatcctatatatcttaatggcacatgcagcgcaagtaggtctacaagacgctacttcccctatcatagaagagcttat

SEQ ID NO: 53099 - DNA, 120 bp, Homo sapiens
  misc_feature: 1610 for SV(W|O) and mtDNA
agtagatatttgaagaactgattaatgtttgggtctgagtttatatatcacagtgagaattctatgatggaccatgtaacgaacaatgctacagggatgaatattatggagaagtagtct

SEQ ID NO: 53100 - DNA, 120 bp, Homo sapiens
  misc_feature: 1610 for SV(W|O) and mtDNA
aatgctagtataatatttatgtaaatgaggggcatttggtaaatatgattatcataatttaatgagtcgaaatcattcgttttgtttaaactatataccaattcggttcagtctaatcct

SEQ ID NO: 53101 - DNA, 120 bp, Homo sapiens
  misc_feature: 1610 for SV(W|O) and mtDNA
acggacttcacgtcattattggctcaactttcctcactatctgcttcatccgccaactaatatttcactttacatccaaacatcactttggcttcgaagccgccgcctgatactggcatt

SEQ ID NO: 53102 - DNA, 120 bp, Homo sapiens
  misc_feature: 1609 for SV(W|O) and mtDNA
gagccaataatgacgtgaagtccgtggaagcctgtggctacaaaaaatgttgagccgtagatgccgtcggaaatggtgaagggagactcgaagtactctgaggcttgtaggagggtaaaa

SEQ ID NO: 53103 - DNA, 120 bp, Homo sapiens
  misc_feature: 1609 for SV(W|O) and mtDNA
ttctactgactatcctagaaatcgctgtcgccttaatccaagcctacgttttcacacttctagtaagcctctacctgcacgacaacacataatgacccaccaatcacatgcctatcatat

SEQ ID NO: 53104 - DNA, 120 bp, Homo sapiens
  misc_feature: 1609 for SV(W|O) and mtDNA
ttcctactactcaacttaaactccagcaccacgaccctactactatctcgcacctgaaacaagctaacatgactaacacccttaattccatccaccctcctctccctaggaggcctgccc

SEQ ID NO: 53105 - DNA, 120 bp, Homo sapiens
  misc_feature: 1609 for SV(W|O) and mtDNA
ttatcctaactactaccgcattcctactactcaacttaaactccagcaccacgaccctactactatctcgcacctgaaacaagctaacatgactaacacccttaattccatccaccctcc

SEQ ID NO: 53106 - DNA, 120 bp, Homo sapiens
  misc_feature: 1609 for SV(W|O) and mtDNA
tgattggtagtattggttatggttcattgtccggagagtatattgttgaagaggatagctattagaaggattatggatgcggttgcttgcgtgaggaaatacttgatggcagcttctgtg

SEQ ID NO: 53107 - DNA, 120 bp, Homo sapiens
  misc_feature: 1609 for SV(W|O) and mtDNA
tcactcatttacaccaaccacccaactatctataaacctagccatggccatccccttatgagcgggcgcagtgattataggctttcgctctaagattaaaaatgccctagcccacttctt

SEQ ID NO: 53108 - DNA, 120 bp, Homo sapiens
  misc_feature: 1609 for SV(W|O) and mtDNA
tatcctaactactaccgcattcctactactcaacttaaactccagcaccacgaccctactactatctcgcacctgaaacaagctaacatgactaacacccttaattccatccaccctcct

SEQ ID NO: 53109 - DNA, 120 bp, Homo sapiens
  misc_feature: 1609 for SV(W|O) and mtDNA
ggtgtggctaggctaagcgttttgagctgcattgctgcgtgcttgatgcttgtcccttttgatcgtggtgatttagagggtgaactcactggaacggggatgcttgcatgtgtaatctta

SEQ ID NO: 53110 - DNA, 120 bp, Homo sapiens
  misc_feature: 1609 for SV(W|O) and mtDNA
ctcatttacaccaaccacccaactatctataaacctagccatggccatccccttatgagcgggcgcagtgattataggctttcgctctaagattaaaaatgccctagcccacttcttacc

SEQ ID NO: 53111 - DNA, 120 bp, Homo sapiens
  misc_feature: 1609 for SV(W|O) and mtDNA
gggtgtggctaggctaagcgttttgagctgcattgctgcgtgcttgatgcttgtcccttttgatcgtggtgatttagagggtgaactcactggaacggggatgcttgcatgtgtaatctt

SEQ ID NO: 53112 - DNA, 120 bp, Homo sapiens
  misc_feature: 1609 for SV(W|O) and mtDNA
agggaaggttaatggttgatattgctagggtggcgcttccaattaggtgcatgagtaggtggcctgcagtaatgttagcggttaggcgtacggccagggctattggttgaatgagtaggc

SEQ ID NO: 53113 - DNA, 120 bp, Homo sapiens
  misc_feature: 1609 for SV(W|O) and mtDNA
gagggaaggttaatggttgatattgctagggtggcgcttccaattaggtgcatgagtaggtggcctgcagtaatgttagcggttaggcgtacggccagggctattggttgaatgagtagg

SEQ ID NO: 53114 - DNA, 120 bp, Homo sapiens
  misc_feature: 1609 for SV(W|O) and mtDNA
gacttcacgtcattattggctcaactttcctcactatctgcttcatccgccaactaatatttcactttacatccaaacatcactttggcttcgaagccgccgcctgatactggcattttg

SEQ ID NO: 53115 - DNA, 120 bp, Homo sapiens
  misc_feature: 1609 for SV(W|O) and mtDNA
ctcaaatcatgaaaattattaatattactgctgttagagaaatgaatgagcctacagatgataggatgtttcatgtggtgtatgcatcggggtagtccgagtaacgtcggggcattccgg

SEQ ID NO: 53116 - DNA, 120 bp, Homo sapiens
  misc_feature: 1609 for SV(W|O) and mtDNA
actatacttcacaacaatcctaatcctaataccaactatctccctaattgaaaacaaaatactcaaatgggcctgtccttgtagtataaactaatacaccagtcttgtaaaccggagatg

SEQ ID NO: 53117 - DNA, 120 bp, Homo sapiens
  misc_feature: 1609 for SV(W|O) and mtDNA
caggcttccacggacttcacgtcattattggctcaactttcctcactatctgcttcatccgccaactaatatttcactttacatccaaacatcactttggcttcgaagccgccgcctgat

SEQ ID NO: 53118 - DNA, 120 bp, Homo sapiens
  misc_feature: 1609 for SV(W|O) and mtDNA
aaagctcacaagaactgctaactcatgcccccatgtctaacaacatggctttctcaacttttaaaggataacagctatccattggtcttaggccccaaaaattttggtgcaactccaaat

SEQ ID NO: 53119 - DNA, 120 bp, Homo sapiens
  misc_feature: 1609 for SV(W|O) and mtDNA
atttctagttaattcattatgcagaaggtataggggttagtccttgctatattatgcttggttataatttttcatctttcccttgcggtactatatctattgcgccaggtttcaatttct

SEQ ID NO: 53120 - DNA, 120 bp, Homo sapiens
  misc_feature: 1608 for SV(W|O) and mtDNA
tttcgctttgaagcgaaggcttctcaaatcatgaaaattattaatattactgctgttagagaaatgaatgagcctacagatgataggatgtttcatgtggtgtatgcatcggggtagtcc

SEQ ID NO: 53121 - DNA, 120 bp, Homo sapiens
  misc_feature: 1608 for SV(W|O) and mtDNA
ttgaagtatacttgaggagggtgacgggcggtgtgtacgcgcttcagggccctgttcaactaagcactctactctcagtttactgctaaatccaccttcgacccttaagtttcataaggg

SEQ ID NO: 53122 - DNA, 120 bp, Homo sapiens
  misc_feature: 1608 for SV(W|O) and mtDNA
catccctcttattaatcatcatcctagccctaagtctggcctatgagtgactacaaaaaggattagactgaaccgaattggtatatagtttaaacaaaacgaatgatttcgactcattaa

SEQ ID NO: 53123 - DNA, 120 bp, Homo sapiens
  misc_feature: 1608 for SV(W|O) and mtDNA
ttaaagttgaactaagattctatcttggacaaccagctatcaccaggctcggtaggtttgtcgcctctacctataaatcttcccactattttgctacatagacgggtgtgctcttttagc

SEQ ID NO: 53124 - DNA, 120 bp, Homo sapiens
  misc_feature: 1608 for SV(W|O) and mtDNA
gtactatacttcacaacaatcctaatcctaataccaactatctccctaattgaaaacaaaatactcaaatgggcctgtccttgtagtataaactaatacaccagtcttgtaaaccggaga

SEQ ID NO: 53125 - DNA, 120 bp, Homo sapiens
  misc_feature: 1608 for SV(W|O) and mtDNA
tattacattttgactaccacaactcaacggctacatagaaaaatccaccccttacgagtgcggcttcgaccctatatcccccgcccgcgtccctttctccataaaattcttcttagtagc

SEQ ID NO: 53126 - DNA, 120 bp, Homo sapiens
  misc_feature: 1608 for SV(W|O) and mtDNA
tatctgcttcatccgccaactaatatttcactttacatccaaacatcactttggcttcgaagccgccgcctgatactggcattttgtagatgtggtttgactatttctgtatgtctccat

SEQ ID NO: 53127 - DNA, 120 bp, Homo sapiens
  misc_feature: 1608 for SV(W|O) and mtDNA
gtgcctgcgttcaggcgttctggctggttgcctcatcgggtgatgatagccaaggtggggataagtgtggtttcgaagaagatataaaatatgattagttctgtggctgtgaatgttata

SEQ ID NO: 53128 - DNA, 120 bp, Homo sapiens
  misc_feature: 1608 for SV(W|O) and mtDNA
tagcatgtactgctcggaggttgggttctgctccgaggtcgccccaaccgaaatttttaatgcaggtttggtagtttaggacctgtgggtttgttaggtactgtttgcattaataaatta

SEQ ID NO: 53129 - DNA, 120 bp, Homo sapiens
  misc_feature: 1608 for SV(W|O) and mtDNA
tacgcatttatatagaggagacaagtcgtaacatggtaagtgtactggaaagtgcacttggacgaaccagagtgtagcttaacacaaagcacccaacttacacttaggagatttcaactt

SEQ ID NO: 53130 - DNA, 120 bp, Homo sapiens
  misc_feature: 1608 for SV(W|O) and mtDNA
taaatgctagtataatatttatgtaaatgaggggcatttggtaaatatgattatcataatttaatgagtcgaaatcattcgttttgtttaaactatataccaattcggttcagtctaatc

SEQ ID NO: 53131 - DNA, 120 bp, Homo sapiens
  misc_feature: 1608 for SV(W|O) and mtDNA
gttttcctcttgtaaatatagtttaaccaaaacatcagattgtgaatctgacaacagaggcttacgaccccttatttaccgagaaagctcacaagaactgctaactcatgcccccatgtc

SEQ ID NO: 53132 - DNA, 120 bp, Homo sapiens
  misc_feature: 1608 for SV(W|O) and mtDNA
gttcaccctctaaatcaccacgatcaaaagggacaagcatcaagcacgcagcaatgcagctcaaaacgcttagcctagccacacccccacgggaaacagcagtgattaacctttagcaat

SEQ ID NO: 53133 - DNA, 120 bp, Homo sapiens
  misc_feature: 1608 for SV(W|O) and mtDNA
cgtgtgagcacaccatatatttacagtaggaatagacgtagacacacgagcatatttcacctccgctaccataatcatcgctatccccaccggcgtcaaagtatttagctgactcgccac

SEQ ID NO: 53134 - DNA, 120 bp, Homo sapiens
  misc_feature: 1608 for SV(W|O) and mtDNA
gtcagtggtagtaatataattgttgggacgattagttttagcattggagtaggtttaggttatgtacgtagtctaggccatatgtgttggagattgagactagtagggctaggcccaccg

SEQ ID NO: 53135 - DNA, 120 bp, Homo sapiens
  misc_feature: 1608 for SV(W|O) and mtDNA
gtcaactaggactcataatagttacaatcggcatcaaccaaccacacctagcattcctgcacatctgcacccacgccttcttcaaagccatactatttatgtgctccgggtccatcatcc

SEQ ID NO: 53136 - DNA, 120 bp, Homo sapiens
  misc_feature: 1608 for SV(W|O) and mtDNA
ggttaatggttgatattgctagggtggcgcttccaattaggtgcatgagtaggtggcctgcagtaatgttagcggttaggcgtacggccagggctattggttgaatgagtaggctgatgg

SEQ ID NO: 53137 - DNA, 120 bp, Homo sapiens
  misc_feature: 1608 for SV(W|O) and mtDNA
ggcttctcaaatcatgaaaattattaatattactgctgttagagaaatgaatgagcctacagatgataggatgtttcatgtggtgtatgcatcggggtagtccgagtaacgtcggggcat

SEQ ID NO: 53138 - DNA, 120 bp, Homo sapiens
  misc_feature: 1608 for SV(W|O) and mtDNA
gccggcttctattgacttgggttaatcgtgtgaccgcggtggctggcacgaaattgaccaaccctggggttagtatagcttagttaaactttcgtttattgctaaaggttaatcactgct

SEQ ID NO: 53139 - DNA, 120 bp, Homo sapiens
  misc_feature: 1608 for SV(W|O) and mtDNA
gattggtagtattggttatggttcattgtccggagagtatattgttgaagaggatagctattagaaggattatggatgcggttgcttgcgtgaggaaatacttgatggcagcttctgtgg

SEQ ID NO: 53140 - DNA, 120 bp, Homo sapiens
  misc_feature: 1608 for SV(W|O) and mtDNA
gattctatcttggacaaccagctatcaccaggctcggtaggtttgtcgcctctacctataaatcttcccactattttgctacatagacgggtgtgctcttttagctgttcttaggtagct

SEQ ID NO: 53141 - DNA, 120 bp, Homo sapiens
  misc_feature: 1608 for SV(W|O) and mtDNA
gagccctaggattcatctttcttttcaccgtaggtggcctgactggcattgtattagcaaactcatcactagacatcgtactacacgacacgtactacgttgtagcccacttccactatg

SEQ ID NO: 53142 - DNA, 120 bp, Homo sapiens
  misc_feature: 1608 for SV(W|O) and mtDNA
aagcgaaggcttctcaaatcatgaaaattattaatattactgctgttagagaaatgaatgagcctacagatgataggatgtttcatgtggtgtatgcatcggggtagtccgagtaacgtc

SEQ ID NO: 53143 - DNA, 120 bp, Homo sapiens
  misc_feature: 1608 for SV(W|O) and mtDNA
gaaaccatcagcctactcattcaaccaatagccctggccgtacgcctaaccgctaacattactgcaggccacctactcatgcacctaattggaagcgccaccctagcaatatcaaccatt

SEQ ID NO: 53144 - DNA, 120 bp, Homo sapiens
  misc_feature: 1608 for SV(W|O) and mtDNA
ctaaatcaccacgatcaaaagggacaagcatcaagcacgcagcaatgcagctcaaaacgcttagcctagccacacccccacgggaaacagcagtgattaacctttagcaataaacgaaag

SEQ ID NO: 53145 - DNA, 120 bp, Homo sapiens
  misc_feature: 1608 for SV(W|O) and mtDNA
cataatcacttgttccttaaatagggacctgtatgaatggctccacgagggttcagctgtctcttacttttaaccagtgaaattgacctgcccgtgaagaggcgggcataacacagcaag

SEQ ID NO: 53146 - DNA, 120 bp, Homo sapiens
  misc_feature: 1608 for SV(W|O) and mtDNA
cggcttctattgacttgggttaatcgtgtgaccgcggtggctggcacgaaattgaccaaccctggggttagtatagcttagttaaactttcgtttattgctaaaggttaatcactgctgt

SEQ ID NO: 53147 - DNA, 120 bp, Homo sapiens
  misc_feature: 1608 for SV(W|O) and mtDNA
aggcctcctagggagaggagggtggatggaattaagggtgttagtcatgttagcttgtttcaggtgcgagatagtagtagggtcgtggtgctggagtttaagttgagtagtaggaatgcg

SEQ ID NO: 53148 - DNA, 120 bp, Homo sapiens
  misc_feature: 1608 for SV(W|O) and mtDNA
ataggggaaatcagtgaatgaagcctcctatgatggcaaatacagctcctattgataggacatagtggaagtgggctacaacgtagtacgtgtcgtgtagtacgatgtctagtgatgagt

SEQ ID NO: 53149 - DNA, 120 bp, Homo sapiens
  misc_feature: 1608 for SV(W|O) and mtDNA
acttcacgtcattattggctcaactttcctcactatctgcttcatccgccaactaatatttcactttacatccaaacatcactttggcttcgaagccgccgcctgatactggcattttgt

SEQ ID NO: 53150 - DNA, 120 bp, Homo sapiens
  misc_feature: 1607 for SV(W|O) and mtDNA
ttagggggttagttttgcgtattggggtcattggtgttcttgtagttgaaatacaacgatggtttttcatatcattggtcgtggttgtagtccgtgcgagaataatgatgtatgctttgt

SEQ ID NO: 53151 - DNA, 120 bp, Homo sapiens
  misc_feature: 1607 for SV(W|O) and mtDNA
tgttggttatacccttcccgtactaattaatcccctggcccaacccgtcatctactctaccatctttgcaggcacactcatcacagcgctaagctcgcactgattttttacctgagtagg

SEQ ID NO: 53152 - DNA, 120 bp, Homo sapiens
  misc_feature: 1607 for SV(W|O) and mtDNA
ccttggctatcatcacccgatgaggcaaccagccagaacgcctgaacgcaggcacatacttcctattctacaccctagtaggctcccttcccctactcatcgcactaatttacactcaca

SEQ ID NO: 53153 - DNA, 120 bp, Homo sapiens
  misc_feature: 1607 for SV(W|O) and mtDNA
taggaatactagtatatcgctcacacctcatatcctccctactatgcctagaaggaataatactatcgctgttcattatagctactctcataaccctcaacacccactccctcttagcca

SEQ ID NO: 53154 - DNA, 120 bp, Homo sapiens
  misc_feature: 1607 for SV(W|O) and mtDNA
tctactgactatcctagaaatcgctgtcgccttaatccaagcctacgttttcacacttctagtaagcctctacctgcacgacaacacataatgacccaccaatcacatgcctatcatata

SEQ ID NO: 53155 - DNA, 120 bp, Homo sapiens
  misc_feature: 1607 for SV(W|O) and mtDNA
ggaaagttgagccaataatgacgtgaagtccgtggaagcctgtggctacaaaaaatgttgagccgtagatgccgtcggaaatggtgaagggagactcgaagtactctgaggcttgtagga

SEQ ID NO: 53156 - DNA, 120 bp, Homo sapiens
  misc_feature: 1607 for SV(W|O) and mtDNA
gccgatgaacagttggaataggttgttagcggtaactaagattagtatggtaattaggaagatgagtagatatttgaagaactgattaatgtttgggtctgagtttatatatcacagtga

SEQ ID NO: 53157 - DNA, 120 bp, Homo sapiens
  misc_feature: 1607 for SV(W|O) and mtDNA
aataaagtataggcgatagaaattgaaacctggcgcaatagatatagtaccgcaagggaaagatgaaaaattataaccaagcataatatagcaaggactaacccctataccttctgcata

SEQ ID NO: 53158 - DNA, 120 bp, Homo sapiens
  misc_feature: 1607 for SV(W|O) and mtDNA
taggacttttcgctttgaagcgaaggcttctcaaatcatgaaaattattaatattactgctgttagagaaatgaatgagcctacagatgataggatgtttcatgtggtgtatgcatcggg

SEQ ID NO: 53159 - DNA, 120 bp, Homo sapiens
  misc_feature: 1607 for SV(W|O) and mtDNA
aagtatacttgaggagggtgacgggcggtgtgtacgcgcttcagggccctgttcaactaagcactctactctcagtttactgctaaatccaccttcgacccttaagtttcataagggcta

SEQ ID NO: 53160 - DNA, 120 bp, Homo sapiens
  misc_feature: 1607 for SV(W|O) and mtDNA
cagttgatgcagagtggggttttgcagtccttagctgttacagaaattaagtattgcaacttactgagggctttgaaggctcttggtctgtatttaacctaaatttctataagattatta

SEQ ID NO: 53161 - DNA, 120 bp, Homo sapiens
  misc_feature: 1607 for SV(W|O) and mtDNA
agttcttctatagggtgatagattggtccaattgggtatgaggagttcagttatatgtttgggattttttaggtagtgggtgttgagcttgaacgctttcttaattggtggctgctttta

SEQ ID NO: 53162 - DNA, 120 bp, Homo sapiens
  misc_feature: 1607 for SV(W|O) and mtDNA
ctttgtggtttgtagagaatagtcaacggtcggcgaacatcagtgggggtgaggtaaaatggctgagtgaagcattggactgtaaatctaaagacaggggttaggcctctttttaccagc

SEQ ID NO: 53163 - DNA, 120 bp, Homo sapiens
  misc_feature: 1607 for SV(W|O) and mtDNA
atcctaactactaccgcattcctactactcaacttaaactccagcaccacgaccctactactatctcgcacctgaaacaagctaacatgactaacacccttaattccatccaccctcctc

SEQ ID NO: 53164 - DNA, 120 bp, Homo sapiens
  misc_feature: 1607 for SV(W|O) and mtDNA
aaataactttgcaaggagagccaaagctaagacccccgaaaccagacgagctacctaagaacagctaaaagagcacacccgtctatgtagcaaaatagtgggaagatttataggtagagg

SEQ ID NO: 53165 - DNA, 120 bp, Homo sapiens
  misc_feature: 1606 for SV(W|O) and mtDNA
ttggactaacagttaaatttacaaggggatttagagggttctgtgggcaaatttaaagttgaactaagattctatcttggacaaccagctatcaccaggctcggtaggtttgtcgcctct

SEQ ID NO: 53166 - DNA, 120 bp, Homo sapiens
  misc_feature: 1606 for SV(W|O) and mtDNA
ttgaggagggtgacgggcggtgtgtacgcgcttcagggccctgttcaactaagcactctactctcagtttactgctaaatccaccttcgacccttaagtttcataagggctatcgtagtt

SEQ ID NO: 53167 - DNA, 120 bp, Homo sapiens
  misc_feature: 1606 for SV(W|O) and mtDNA
aggattaggattgttgtgaagtatagtacggatgctacttgtccaatgatggtaaaagggtagcttactggttgtcctccgattcaggttagaatgaggaggtctgcggctaggagtcaa

SEQ ID NO: 53168 - DNA, 120 bp, Homo sapiens
  misc_feature: 1606 for SV(W|O) and mtDNA
ttgacacaaaatagactacgaaagtggctttaacatatctgaacacacaatagctaagacccaaactgggattagataccccactatgcttagccctaaacctcaacagttaaatcaaca

SEQ ID NO: 53169 - DNA, 120 bp, Homo sapiens
  misc_feature: 1606 for SV(W|O) and mtDNA
ggaaacagcagtgattaacctttagcaataaacgaaagtttaactaagctatactaaccccagggttggtcaatttcgtgccagccaccgcggtcacacgattaacccaagtcaatagaa

SEQ ID NO: 53170 - DNA, 120 bp, Homo sapiens
  misc_feature: 1606 for SV(W|O) and mtDNA
ttctaggaatactagtatatcgctcacacctcatatcctccctactatgcctagaaggaataatactatcgctgttcattatagctactctcataaccctcaacacccactccctcttag

SEQ ID NO: 53171 - DNA, 120 bp, Homo sapiens
  misc_feature: 1606 for SV(W|O) and mtDNA
ttccacggacttcacgtcattattggctcaactttcctcactatctgcttcatccgccaactaatatttcactttacatccaaacatcactttggcttcgaagccgccgcctgatactgg

SEQ ID NO: 53172 - DNA, 120 bp, Homo sapiens
  misc_feature: 1606 for SV(W|O) and mtDNA
ttccaaaaaacacataatttgaatcaacacaaccacccacagcctaattattagcatcatccctctactattttttaaccaaatcaacaacaacctatttagctgttccccaaccttttc

SEQ ID NO: 53173 - DNA, 120 bp, Homo sapiens
  misc_feature: 1606 for SV(W|O) and mtDNA
tatacttcacaacaatcctaatcctaataccaactatctccctaattgaaaacaaaatactcaaatgggcctgtccttgtagtataaactaatacaccagtcttgtaaaccggagatgaa

SEQ ID NO: 53174 - DNA, 120 bp, Homo sapiens
  misc_feature: 1606 for SV(W|O) and mtDNA
cgttccagtgagttcaccctctaaatcaccacgatcaaaagggacaagcatcaagcacgcagcaatgcagctcaaaacgcttagcctagccacacccccacgggaaacagcagtgattaa

SEQ ID NO: 53175 - DNA, 120 bp, Homo sapiens
  misc_feature: 1606 for SV(W|O) and mtDNA
tgtgtggtagggtggggggcatccatatagtcactccaggtttatggagggttcttctactattaggacttttcgctttgaagcgaaggcttctcaaatcatgaaaattattaatattac

SEQ ID NO: 53176 - DNA, 120 bp, Homo sapiens
  misc_feature: 1606 for SV(W|O) and mtDNA
gtgtgagcacaccatatatttacagtaggaatagacgtagacacacgagcatatttcacctccgctaccataatcatcgctatccccaccggcgtcaaagtatttagctgactcgccaca

SEQ ID NO: 53177 - DNA, 120 bp, Homo sapiens
  misc_feature: 1606 for SV(W|O) and mtDNA
tcatcttcacaattctaattctactgactatcctagaaatcgctgtcgccttaatccaagcctacgttttcacacttctagtaagcctctacctgcacgacaacacataatgacccacca

SEQ ID NO: 53178 - DNA, 120 bp, Homo sapiens
  misc_feature: 1606 for SV(W|O) and mtDNA
tgccgcctgcgaagcagcggtgggcctagccctactagtctcaatctccaacacatatggcctagactacgtacataacctaaacctactccaatgctaaaactaatcgtcccaacaatt

SEQ ID NO: 53179 - DNA, 120 bp, Homo sapiens
  misc_feature: 1606 for SV(W|O) and mtDNA
tgatattgctagggtggcgcttccaattaggtgcatgagtaggtggcctgcagtaatgttagcggttaggcgtacggccagggctattggttgaatgagtaggctgatggtttcgataat

SEQ ID NO: 53180 - DNA, 120 bp, Homo sapiens
  misc_feature: 1606 for SV(W|O) and mtDNA
tgaggagggtgacgggcggtgtgtacgcgcttcagggccctgttcaactaagcactctactctcagtttactgctaaatccaccttcgacccttaagtttcataagggctatcgtagttt

SEQ ID NO: 53181 - DNA, 120 bp, Homo sapiens
  misc_feature: 1606 for SV(W|O) and mtDNA
taggattaggattgttgtgaagtatagtacggatgctacttgtccaatgatggtaaaagggtagcttactggttgtcctccgattcaggttagaatgaggaggtctgcggctaggagtca

SEQ ID NO: 53182 - DNA, 120 bp, Homo sapiens
  misc_feature: 1606 for SV(W|O) and mtDNA
tgaatattatggagaagtagtctagtttgaagcttagggagagctgggttgtttgggttgtggctcagtgtcagttcgagataataacttcttggtctaggcacatgaatattgttgtgg

SEQ ID NO: 53183 - DNA, 120 bp, Homo sapiens
  misc_feature: 1606 for SV(W|O) and mtDNA
tgaactaagattctatcttggacaaccagctatcaccaggctcggtaggtttgtcgcctctacctataaatcttcccactattttgctacatagacgggtgtgctcttttagctgttctt

SEQ ID NO: 53184 - DNA, 120 bp, Homo sapiens
  misc_feature: 1606 for SV(W|O) and mtDNA
tatcctttaaaagttgagaaagccatgttgttagacatgggggcatgagttagcagttcttgtgagctttctcggtaaataaggggtcgtaagcctctgttgtcagattcacaatctgat

SEQ ID NO: 53185 - DNA, 120 bp, Homo sapiens
  misc_feature: 1606 for SV(W|O) and mtDNA
gtataatatttatgtaaatgaggggcatttggtaaatatgattatcataatttaatgagtcgaaatcattcgttttgtttaaactatataccaattcggttcagtctaatcctttttgta

SEQ ID NO: 53186 - DNA, 120 bp, Homo sapiens
  misc_feature: 1606 for SV(W|O) and mtDNA
aactgctaactcatgcccccatgtctaacaacatggctttctcaacttttaaaggataacagctatccattggtcttaggccccaaaaattttggtgcaactccaaataaaagtaataac

SEQ ID NO: 53187 - DNA, 120 bp, Homo sapiens
  misc_feature: 1606 for SV(W|O) and mtDNA
atttaccgagaaagctcacaagaactgctaactcatgcccccatgtctaacaacatggctttctcaacttttaaaggataacagctatccattggtcttaggccccaaaaattttggtgc

SEQ ID NO: 53188 - DNA, 120 bp, Homo sapiens
  misc_feature: 1606 for SV(W|O) and mtDNA
cggccgttaaacatgtgtcactgggcaggcggtgcctctaatactggtgatgctagaggtgatgtttttggtaaacaggcggggtaagatttgccgagttccttttactttttttaacct

SEQ ID NO: 53189 - DNA, 120 bp, Homo sapiens
  misc_feature: 1606 for SV(W|O) and mtDNA
aatattatggagaagtagtctagtttgaagcttagggagagctgggttgtttgggttgtggctcagtgtcagttcgagataataacttcttggtctaggcacatgaatattgttgtgggg

SEQ ID NO: 53190 - DNA, 120 bp, Homo sapiens
  misc_feature: 1606 for SV(W|O) and mtDNA
catcgcactaatttacactcacaacaccctaggctcactaaacattctactactcactctcactgcccaagaactatcaaactcctgagccaacaacttaatatgactagcttacacaat

SEQ ID NO: 53191 - DNA, 120 bp, Homo sapiens
  misc_feature: 1606 for SV(W|O) and mtDNA
atcctttaaaagttgagaaagccatgttgttagacatgggggcatgagttagcagttcttgtgagctttctcggtaaataaggggtcgtaagcctctgttgtcagattcacaatctgatg

SEQ ID NO: 53192 - DNA, 120 bp, Homo sapiens
  misc_feature: 1606 for SV(W|O) and mtDNA
cacggacttcacgtcattattggctcaactttcctcactatctgcttcatccgccaactaatatttcactttacatccaaacatcactttggcttcgaagccgccgcctgatactggcat

SEQ ID NO: 53193 - DNA, 120 bp, Homo sapiens
  misc_feature: 1606 for SV(W|O) and mtDNA
atgaatattatggagaagtagtctagtttgaagcttagggagagctgggttgtttgggttgtggctcagtgtcagttcgagataataacttcttggtctaggcacatgaatattgttgtg

SEQ ID NO: 53194 - DNA, 120 bp, Homo sapiens
  misc_feature: 1606 for SV(W|O) and mtDNA
actaacagttaaatttacaaggggatttagagggttctgtgggcaaatttaaagttgaactaagattctatcttggacaaccagctatcaccaggctcggtaggtttgtcgcctctacct

SEQ ID NO: 53195 - DNA, 120 bp, Homo sapiens
  misc_feature: 1606 for SV(W|O) and mtDNA
agaaatagtcaaaccacatctacaaaatgccagtatcaggcggcggcttcgaagccaaagtgatgtttggatgtaaagtgaaatattagttggcggatgaagcagatagtgaggaaagtt

SEQ ID NO: 53196 - DNA, 120 bp, Homo sapiens
  misc_feature: 1605 for SV(W|O) and mtDNA
tgtgcctgcgttcaggcgttctggctggttgcctcatcgggtgatgatagccaaggtggggataagtgtggtttcgaagaagatataaaatatgattagttctgtggctgtgaatgttat

SEQ ID NO: 53197 - DNA, 120 bp, Homo sapiens
  misc_feature: 1605 for SV(W|O) and mtDNA
tcatttacaccaaccacccaactatctataaacctagccatggccatccccttatgagcgggcgcagtgattataggctttcgctctaagattaaaaatgccctagcccacttcttacca

SEQ ID NO: 53198 - DNA, 120 bp, Homo sapiens
  misc_feature: 1605 for SV(W|O) and mtDNA
gctaagagggagtgggtgttgagggttatgagagtagctataatgaacagcgatagtattattccttctaggcatagtagggaggatatgaggtgtgagcgatatactagtattcctaga

SEQ ID NO: 53199 - DNA, 120 bp, Homo sapiens
  misc_feature: 1605 for SV(W|O) and mtDNA
tatgtgcctgcgttcaggcgttctggctggttgcctcatcgggtgatgatagccaaggtggggataagtgtggtttcgaagaagatataaaatatgattagttctgtggctgtgaatgtt

SEQ ID NO: 53200 - DNA, 120 bp, Homo sapiens
  misc_feature: 1605 for SV(W|O) and mtDNA
tagctgttcttaggtagctcgtctggtttcgggggtcttagctttggctctccttgcaaagttatttctagttaattcattatgcagaaggtataggggttagtccttgctatattatgc

SEQ ID NO: 53201 - DNA, 120 bp, Homo sapiens
  misc_feature: 1605 for SV(W|O) and mtDNA
atgtgcctgcgttcaggcgttctggctggttgcctcatcgggtgatgatagccaaggtggggataagtgtggtttcgaagaagatataaaatatgattagttctgtggctgtgaatgtta

SEQ ID NO: 53202 - DNA, 120 bp, Homo sapiens
  misc_feature: 1605 for SV(W|O) and mtDNA
accatcagcctactcattcaaccaatagccctggccgtacgcctaaccgctaacattactgcaggccacctactcatgcacctaattggaagcgccaccctagcaatatcaaccattaac

SEQ ID NO: 53203 - DNA, 120 bp, Homo sapiens
  misc_feature: 1605 for SV(W|O) and mtDNA
gggtggcgcttccaattaggtgcatgagtaggtggcctgcagtaatgttagcggttaggcgtacggccagggctattggttgaatgagtaggctgatggtttcgataataactagtatgg

SEQ ID NO: 53204 - DNA, 120 bp, Homo sapiens
  misc_feature: 1605 for SV(W|O) and mtDNA
gggaaggttaatggttgatattgctagggtggcgcttccaattaggtgcatgagtaggtggcctgcagtaatgttagcggttaggcgtacggccagggctattggttgaatgagtaggct

SEQ ID NO: 53205 - DNA, 120 bp, Homo sapiens
  misc_feature: 1605 for SV(W|O) and mtDNA
gaaggcttctcaaatcatgaaaattattaatattactgctgttagagaaatgaatgagcctacagatgataggatgtttcatgtggtgtatgcatcggggtagtccgagtaacgtcgggg

SEQ ID NO: 53206 - DNA, 120 bp, Homo sapiens
  misc_feature: 1605 for SV(W|O) and mtDNA
ctcattctaacctgaatcggaggacaaccagtaagctacccttttaccatcattggacaagtagcatccgtactatacttcacaacaatcctaatcctaataccaactatctccctaatt

SEQ ID NO: 53207 - DNA, 120 bp, Homo sapiens
  misc_feature: 1605 for SV(W|O) and mtDNA
cggacttcacgtcattattggctcaactttcctcactatctgcttcatccgccaactaatatttcactttacatccaaacatcactttggcttcgaagccgccgcctgatactggcattt

SEQ ID NO: 53208 - DNA, 120 bp, Homo sapiens
  misc_feature: 1605 for SV(W|O) and mtDNA
aggacttttcgctttgaagcgaaggcttctcaaatcatgaaaattattaatattactgctgttagagaaatgaatgagcctacagatgataggatgtttcatgtggtgtatgcatcgggg

SEQ ID NO: 53209 - DNA, 120 bp, Homo sapiens
  misc_feature: 1605 for SV(W|O) and mtDNA
aggttaatggttgatattgctagggtggcgcttccaattaggtgcatgagtaggtggcctgcagtaatgttagcggttaggcgtacggccagggctattggttgaatgagtaggctgatg

SEQ ID NO: 53210 - DNA, 120 bp, Homo sapiens
  misc_feature: 1604 for SV(W|O) and mtDNA
agttcaccctctaaatcaccacgatcaaaagggacaagcatcaagcacgcagcaatgcagctcaaaacgcttagcctagccacacccccacgggaaacagcagtgattaacctttagcaa

SEQ ID NO: 53211 - DNA, 120 bp, Homo sapiens
  misc_feature: 1604 for SV(W|O) and mtDNA
ttattacattttgactaccacaactcaacggctacatagaaaaatccaccccttacgagtgcggcttcgaccctatatcccccgcccgcgtccctttctccataaaattcttcttagtag

SEQ ID NO: 53212 - DNA, 120 bp, Homo sapiens
  misc_feature: 1604 for SV(W|O) and mtDNA
tggctcaactttcctcactatctgcttcatccgccaactaatatttcactttacatccaaacatcactttggcttcgaagccgccgcctgatactggcattttgtagatgtggtttgact

SEQ ID NO: 53213 - DNA, 120 bp, Homo sapiens
  misc_feature: 1604 for SV(W|O) and mtDNA
gccgcctgcgaagcagcggtgggcctagccctactagtctcaatctccaacacatatggcctagactacgtacataacctaaacctactccaatgctaaaactaatcgtcccaacaatta

SEQ ID NO: 53214 - DNA, 120 bp, Homo sapiens
  misc_feature: 1604 for SV(W|O) and mtDNA
aagcagcggtgggcctagccctactagtctcaatctccaacacatatggcctagactacgtacataacctaaacctactccaatgctaaaactaatcgtcccaacaattatattactacc

SEQ ID NO: 53215 - DNA, 120 bp, Homo sapiens
  misc_feature: 1604 for SV(W|O) and mtDNA
gctcaactttcctcactatctgcttcatccgccaactaatatttcactttacatccaaacatcactttggcttcgaagccgccgcctgatactggcattttgtagatgtggtttgactat

SEQ ID NO: 53216 - DNA, 120 bp, Homo sapiens
  misc_feature: 1604 for SV(W|O) and mtDNA
gatgaatattatggagaagtagtctagtttgaagcttagggagagctgggttgtttgggttgtggctcagtgtcagttcgagataataacttcttggtctaggcacatgaatattgttgt

SEQ ID NO: 53217 - DNA, 120 bp, Homo sapiens
  misc_feature: 1604 for SV(W|O) and mtDNA
attatcctaactactaccgcattcctactactcaacttaaactccagcaccacgaccctactactatctcgcacctgaaacaagctaacatgactaacacccttaattccatccaccctc

SEQ ID NO: 53218 - DNA, 120 bp, Homo sapiens
  misc_feature: 1604 for SV(W|O) and mtDNA
aagattctatcttggacaaccagctatcaccaggctcggtaggtttgtcgcctctacctataaatcttcccactattttgctacatagacgggtgtgctcttttagctgttcttaggtag

SEQ ID NO: 53219 - DNA, 120 bp, Homo sapiens
  misc_feature: 1604 for SV(W|O) and mtDNA
agttattatctcgaactgacactgagccacaacccaaacaacccagctctccctaagcttcaaactagactacttctccataatattcatccctgtagcattgttcgttacatggtccat

SEQ ID NO: 53220 - DNA, 120 bp, Homo sapiens
  misc_feature: 1604 for SV(W|O) and mtDNA
atagagacccagtaaaattgtaataagcagtgcttgaattatttggtttcggttgttttctattagactatggtgagctcaggtgattgatactcctgatgcgagtaatacggatgtgtt

SEQ ID NO: 53221 - DNA, 120 bp, Homo sapiens
  misc_feature: 1603 for SV(W|O) and mtDNA
gggtaccacccaagtattgactcacccatcaacaaccgctatgtatttcgtacattactgccagccaccatgaatattgtacggtaccataaatacttgaccacctgtagtacataaaaa

SEQ ID NO: 53222 - DNA, 120 bp, Homo sapiens
  misc_feature: 1603 for SV(W|O) and mtDNA
ttttggaaagtcatgtcagtggtagtaatataattgttgggacgattagttttagcattggagtaggtttaggttatgtacgtagtctaggccatatgtgttggagattgagactagtag

SEQ ID NO: 53223 - DNA, 120 bp, Homo sapiens
  misc_feature: 1603 for SV(W|O) and mtDNA
tttcctcttgtaaatatagtttaaccaaaacatcagattgtgaatctgacaacagaggcttacgaccccttatttaccgagaaagctcacaagaactgctaactcatgcccccatgtcta

SEQ ID NO: 53224 - DNA, 120 bp, Homo sapiens
  misc_feature: 1603 for SV(W|O) and mtDNA
ttcacagccacagaactaatcatattttatatcttcttcgaaaccacacttatccccaccttggctatcatcacccgatgaggcaaccagccagaacgcctgaacgcaggcacatacttc

SEQ ID NO: 53225 - DNA, 120 bp, Homo sapiens
  misc_feature: 1603 for SV(W|O) and mtDNA
gagaaagctcacaagaactgctaactcatgcccccatgtctaacaacatggctttctcaacttttaaaggataacagctatccattggtcttaggccccaaaaattttggtgcaactcca

SEQ ID NO: 53226 - DNA, 120 bp, Homo sapiens
  misc_feature: 1603 for SV(W|O) and mtDNA
tgctctgagccctaggattcatctttcttttcaccgtaggtggcctgactggcattgtattagcaaactcatcactagacatcgtactacacgacacgtactacgttgtagcccacttcc

SEQ ID NO: 53227 - DNA, 120 bp, Homo sapiens
  misc_feature: 1603 for SV(W|O) and mtDNA
tcttcgaatgtgtggtagggtggggggcatccatatagtcactccaggtttatggagggttcttctactattaggacttttcgctttgaagcgaaggcttctcaaatcatgaaaattatt

SEQ ID NO: 53228 - DNA, 120 bp, Homo sapiens
  misc_feature: 1603 for SV(W|O) and mtDNA
attggtagtattggttatggttcattgtccggagagtatattgttgaagaggatagctattagaaggattatggatgcggttgcttgcgtgaggaaatacttgatggcagcttctgtgga

SEQ ID NO: 53229 - DNA, 120 bp, Homo sapiens
  misc_feature: 1603 for SV(W|O) and mtDNA
tcatccctcttattaatcatcatcctagccctaagtctggcctatgagtgactacaaaaaggattagactgaaccgaattggtatatagtttaaacaaaacgaatgatttcgactcatta

SEQ ID NO: 53230 - DNA, 120 bp, Homo sapiens
  misc_feature: 1603 for SV(W|O) and mtDNA
aagctcacaagaactgctaactcatgcccccatgtctaacaacatggctttctcaacttttaaaggataacagctatccattggtcttaggccccaaaaattttggtgcaactccaaata

SEQ ID NO: 53231 - DNA, 120 bp, Homo sapiens
  misc_feature: 1603 for SV(W|O) and mtDNA
tatcatcttcacaattctaattctactgactatcctagaaatcgctgtcgccttaatccaagcctacgttttcacacttctagtaagcctctacctgcacgacaacacataatgacccac

SEQ ID NO: 53232 - DNA, 120 bp, Homo sapiens
  misc_feature: 1603 for SV(W|O) and mtDNA
ctaacagttaaatttacaaggggatttagagggttctgtgggcaaatttaaagttgaactaagattctatcttggacaaccagctatcaccaggctcggtaggtttgtcgcctctaccta

SEQ ID NO: 53233 - DNA, 120 bp, Homo sapiens
  misc_feature: 1603 for SV(W|O) and mtDNA
tacccaaataaagtataggcgatagaaattgaaacctggcgcaatagatatagtaccgcaagggaaagatgaaaaattataaccaagcataatatagcaaggactaacccctataccttc

SEQ ID NO: 53234 - DNA, 120 bp, Homo sapiens
  misc_feature: 1603 for SV(W|O) and mtDNA
ctgcgttcaggcgttctggctggttgcctcatcgggtgatgatagccaaggtggggataagtgtggtttcgaagaagatataaaatatgattagttctgtggctgtgaatgttataatta

SEQ ID NO: 53235 - DNA, 120 bp, Homo sapiens
  misc_feature: 1603 for SV(W|O) and mtDNA
taacagttaaatttacaaggggatttagagggttctgtgggcaaatttaaagttgaactaagattctatcttggacaaccagctatcaccaggctcggtaggtttgtcgcctctacctat

SEQ ID NO: 53236 - DNA, 120 bp, Homo sapiens
  misc_feature: 1603 for SV(W|O) and mtDNA
ggccgttaaacatgtgtcactgggcaggcggtgcctctaatactggtgatgctagaggtgatgtttttggtaaacaggcggggtaagatttgccgagttccttttactttttttaacctt

SEQ ID NO: 53237 - DNA, 120 bp, Homo sapiens
  misc_feature: 1603 for SV(W|O) and mtDNA
gctttgaagcgaaggcttctcaaatcatgaaaattattaatattactgctgttagagaaatgaatgagcctacagatgataggatgtttcatgtggtgtatgcatcggggtagtccgagt

SEQ ID NO: 53238 - DNA, 120 bp, Homo sapiens
  misc_feature: 1603 for SV(W|O) and mtDNA
agtgggggtgaggtaaaatggctgagtgaagcattggactgtaaatctaaagacaggggttaggcctctttttaccagctccgaggtgattttcatattgaattgcaaattcgaagaagc

SEQ ID NO: 53239 - DNA, 120 bp, Homo sapiens
  misc_feature: 1603 for SV(W|O) and mtDNA
agtgagaattctatgatggaccatgtaacgaacaatgctacagggatgaatattatggagaagtagtctagtttgaagcttagggagagctgggttgtttgggttgtggctcagtgtcag

SEQ ID NO: 53240 - DNA, 120 bp, Homo sapiens
  misc_feature: 1603 for SV(W|O) and mtDNA
cgatagaaattgaaacctggcgcaatagatatagtaccgcaagggaaagatgaaaaattataaccaagcataatatagcaaggactaacccctataccttctgcataatgaattaactag

SEQ ID NO: 53241 - DNA, 120 bp, Homo sapiens
  misc_feature: 1603 for SV(W|O) and mtDNA
caacattttttgtagccacaggcttccacggacttcacgtcattattggctcaactttcctcactatctgcttcatccgccaactaatatttcactttacatccaaacatcactttggct

SEQ ID NO: 53242 - DNA, 120 bp, Homo sapiens
  misc_feature: 1602 for SV(W|O) and mtDNA
agattggtccaattgggtatgaggagttcagttatatgtttgggattttttaggtagtgggtgttgagcttgaacgctttcttaattggtggctgcttttaggcctactatgggtgttaa

SEQ ID NO: 53243 - DNA, 120 bp, Homo sapiens
  misc_feature: 1602 for SV(W|O) and mtDNA
ataaatagtaccgttaacttccaattaactagttttgacaacattcaaaaaagagtaataaacttcgccttaattttaataatcaacaccctcctagccttactactaataattattaca

SEQ ID NO: 53244 - DNA, 120 bp, Homo sapiens
  misc_feature: 1602 for SV(W|O) and mtDNA
tccttttactttttttaacctttccttatgagcatgcctgtgttgggttgacagtgagggtaataatgacttgttggttgattgtagatattgggctgttaattgtcagttcagtgtttt

SEQ ID NO: 53245 - DNA, 120 bp, Homo sapiens
  misc_feature: 1602 for SV(W|O) and mtDNA
tattatcctaactactaccgcattcctactactcaacttaaactccagcaccacgaccctactactatctcgcacctgaaacaagctaacatgactaacacccttaattccatccaccct

SEQ ID NO: 53246 - DNA, 120 bp, Homo sapiens
  misc_feature: 1602 for SV(W|O) and mtDNA
tagcatgtttatttctaggcctactcaggtaaaaaatcagtgcgagcttagcgctgtgatgagtgtgcctgcaaagatggtagagtagatgacgggttgggccaggggattaattagtac

SEQ ID NO: 53247 - DNA, 120 bp, Homo sapiens
  misc_feature: 1602 for SV(W|O) and mtDNA
gaacaagtgattatgctacctttgcacggttagggtaccgcggccgttaaacatgtgtcactgggcaggcggtgcctctaatactggtgatgctagaggtgatgtttttggtaaacaggc

SEQ ID NO: 53248 - DNA, 120 bp, Homo sapiens
  misc_feature: 1602 for SV(W|O) and mtDNA
gaagcctgtggctacaaaaaatgttgagccgtagatgccgtcggaaatggtgaagggagactcgaagtactctgaggcttgtaggagggtaaaatagagacccagtaaaattgtaataag

SEQ ID NO: 53249 - DNA, 120 bp, Homo sapiens
  misc_feature: 1602 for SV(W|O) and mtDNA
aaagtcatgtcagtggtagtaatataattgttgggacgattagttttagcattggagtaggtttaggttatgtacgtagtctaggccatatgtgttggagattgagactagtagggctag

SEQ ID NO: 53250 - DNA, 120 bp, Homo sapiens
  misc_feature: 1602 for SV(W|O) and mtDNA
ccggcttctattgacttgggttaatcgtgtgaccgcggtggctggcacgaaattgaccaaccctggggttagtatagcttagttaaactttcgtttattgctaaaggttaatcactgctg

SEQ ID NO: 53251 - DNA, 120 bp, Homo sapiens
  misc_feature: 1602 for SV(W|O) and mtDNA
aaatttaaagttgaactaagattctatcttggacaaccagctatcaccaggctcggtaggtttgtcgcctctacctataaatcttcccactattttgctacatagacgggtgtgctcttt

SEQ ID NO: 53252 - DNA, 120 bp, Homo sapiens
  misc_feature: 1601 for SV(W|O) and mtDNA
tcgtcccaacaattatattactaccactgacatgactttccaaaaaacacataatttgaatcaacacaaccacccacagcctaattattagcatcatccctctactattttttaaccaaa

SEQ ID NO: 53253 - DNA, 120 bp, Homo sapiens
  misc_feature: 1601 for SV(W|O) and mtDNA
tcatcgcactaatttacactcacaacaccctaggctcactaaacattctactactcactctcactgcccaagaactatcaaactcctgagccaacaacttaatatgactagcttacacaa

SEQ ID NO: 53254 - DNA, 120 bp, Homo sapiens
  misc_feature: 1601 for SV(W|O) and mtDNA
atattgctagggtggcgcttccaattaggtgcatgagtaggtggcctgcagtaatgttagcggttaggcgtacggccagggctattggttgaatgagtaggctgatggtttcgataataa

SEQ ID NO: 53255 - DNA, 120 bp, Homo sapiens
  misc_feature: 1601 for SV(W|O) and mtDNA
ttatggtagcggaggtgaaatatgctcgtgtgtctacgtctattcctactgtaaatatatggtgtgctcacacgataaaccctaggaagccaattgatatcatagctcagaccataccta

SEQ ID NO: 53256 - DNA, 120 bp, Homo sapiens
  misc_feature: 1601 for SV(W|O) and mtDNA
ttaggattaggattgttgtgaagtatagtacggatgctacttgtccaatgatggtaaaagggtagcttactggttgtcctccgattcaggttagaatgaggaggtctgcggctaggagtc

SEQ ID NO: 53257 - DNA, 120 bp, Homo sapiens
  misc_feature: 1601 for SV(W|O) and mtDNA
ccacggacttcacgtcattattggctcaactttcctcactatctgcttcatccgccaactaatatttcactttacatccaaacatcactttggcttcgaagccgccgcctgatactggca

SEQ ID NO: 53258 - DNA, 120 bp, Homo sapiens
  misc_feature: 1601 for SV(W|O) and mtDNA
gtatggtctgagctatgatatcaattggcttcctagggtttatcgtgtgagcacaccatatatttacagtaggaatagacgtagacacacgagcatatttcacctccgctaccataatca

SEQ ID NO: 53259 - DNA, 120 bp, Homo sapiens
  misc_feature: 1601 for SV(W|O) and mtDNA
gaataataggtatagtgttccaatgtctttgtggtttgtagagaatagtcaacggtcggcgaacatcagtgggggtgaggtaaaatggctgagtgaagcattggactgtaaatctaaaga

SEQ ID NO: 53260 - DNA, 120 bp, Homo sapiens
  misc_feature: 1601 for SV(W|O) and mtDNA
tatttctaggcctactcaggtaaaaaatcagtgcgagcttagcgctgtgatgagtgtgcctgcaaagatggtagagtagatgacgggttgggccaggggattaattagtacgggaagggt

SEQ ID NO: 53261 - DNA, 120 bp, Homo sapiens
  misc_feature: 1601 for SV(W|O) and mtDNA
ctgcttcatccgccaactaatatttcactttacatccaaacatcactttggcttcgaagccgccgcctgatactggcattttgtagatgtggtttgactatttctgtatgtctccatcta

SEQ ID NO: 53262 - DNA, 120 bp, Homo sapiens
  misc_feature: 1601 for SV(W|O) and mtDNA
cacagaactaatcatattttatatcttcttcgaaaccacacttatccccaccttggctatcatcacccgatgaggcaaccagccagaacgcctgaacgcaggcacatacttcctattcta

SEQ ID NO: 53263 - DNA, 120 bp, Homo sapiens
  misc_feature: 1601 for SV(W|O) and mtDNA
tactactcaacttaaactccagcaccacgaccctactactatctcgcacctgaaacaagctaacatgactaacacccttaattccatccaccctcctctccctaggaggcctgcccccgc

SEQ ID NO: 53264 - DNA, 120 bp, Homo sapiens
  misc_feature: 1601 for SV(W|O) and mtDNA
cttcacgtcattattggctcaactttcctcactatctgcttcatccgccaactaatatttcactttacatccaaacatcactttggcttcgaagccgccgcctgatactggcattttgta

SEQ ID NO: 53265 - DNA, 120 bp, Homo sapiens
  misc_feature: 1601 for SV(W|O) and mtDNA
atatatggtgtgctcacacgataaaccctaggaagccaattgatatcatagctcagaccatacctatgtatccaaatggttctttttttccggagtagtaagttacaatatgggagatta

SEQ ID NO: 53266 - DNA, 120 bp, Homo sapiens
  misc_feature: 1601 for SV(W|O) and mtDNA
gcatttaccatctcacttctaggaatactagtatatcgctcacacctcatatcctccctactatgcctagaaggaataatactatcgctgttcattatagctactctcataaccctcaac

SEQ ID NO: 53267 - DNA, 120 bp, Homo sapiens
  misc_feature: 1601 for SV(W|O) and mtDNA
ggatgaatattatggagaagtagtctagtttgaagcttagggagagctgggttgtttgggttgtggctcagtgtcagttcgagataataacttcttggtctaggcacatgaatattgttg

SEQ ID NO: 53268 - DNA, 120 bp, Homo sapiens
  misc_feature: 1601 for SV(W|O) and mtDNA
gaagcgaaggcttctcaaatcatgaaaattattaatattactgctgttagagaaatgaatgagcctacagatgataggatgtttcatgtggtgtatgcatcggggtagtccgagtaacgt

SEQ ID NO: 53269 - DNA, 120 bp, Homo sapiens
  misc_feature: 1601 for SV(W|O) and mtDNA
cttttcgctttgaagcgaaggcttctcaaatcatgaaaattattaatattactgctgttagagaaatgaatgagcctacagatgataggatgtttcatgtggtgtatgcatcggggtagt

SEQ ID NO: 53270 - DNA, 120 bp, Homo sapiens
  misc_feature: 1601 for SV(W|O) and mtDNA
agttaaatttacaaggggatttagagggttctgtgggcaaatttaaagttgaactaagattctatcttggacaaccagctatcaccaggctcggtaggtttgtcgcctctacctataaat

SEQ ID NO: 53271 - DNA, 120 bp, Homo sapiens
  misc_feature: 1600 for SV(W|O) and mtDNA
cctgaatcggaggacaaccagtaagctacccttttaccatcattggacaagtagcatccgtactatacttcacaacaatcctaatcctaataccaactatctccctaattgaaaacaaaa

SEQ ID NO: 53272 - DNA, 120 bp, Homo sapiens
  misc_feature: 1600 for SV(W|O) and mtDNA
ttttcctcttgtaaatatagtttaaccaaaacatcagattgtgaatctgacaacagaggcttacgaccccttatttaccgagaaagctcacaagaactgctaactcatgcccccatgtct

SEQ ID NO: 53273 - DNA, 120 bp, Homo sapiens
  misc_feature: 1600 for SV(W|O) and mtDNA
tttgaagcgaaggcttctcaaatcatgaaaattattaatattactgctgttagagaaatgaatgagcctacagatgataggatgtttcatgtggtgtatgcatcggggtagtccgagtaa

SEQ ID NO: 53274 - DNA, 120 bp, Homo sapiens
  misc_feature: 1600 for SV(W|O) and mtDNA
catcttcacaattctaattctactgactatcctagaaatcgctgtcgccttaatccaagcctacgttttcacacttctagtaagcctctacctgcacgacaacacataatgacccaccaa

SEQ ID NO: 53275 - DNA, 120 bp, Homo sapiens
  misc_feature: 1600 for SV(W|O) and mtDNA
gtaaagtgaaatattagttggcggatgaagcagatagtgaggaaagttgagccaataatgacgtgaagtccgtggaagcctgtggctacaaaaaatgttgagccgtagatgccgtcggaa

SEQ ID NO: 53276 - DNA, 120 bp, Homo sapiens
  misc_feature: 1600 for SV(W|O) and mtDNA
aaatgattatgagggcgtgatcatgaaaggtgataagctcttctatgataggggaagtagcgtcttgtagacctacttgcgctgcatgtgccattaagatatataggatttagcctataa

SEQ ID NO: 53277 - DNA, 120 bp, Homo sapiens
  misc_feature: 1600 for SV(W|O) and mtDNA
ctcatcgcactaatttacactcacaacaccctaggctcactaaacattctactactcactctcactgcccaagaactatcaaactcctgagccaacaacttaatatgactagcttacaca

SEQ ID NO: 53278 - DNA, 120 bp, Homo sapiens
  misc_feature: 1600 for SV(W|O) and mtDNA
atgaagcctcctatgatggcaaatacagctcctattgataggacatagtggaagtgggctacaacgtagtacgtgtcgtgtagtacgatgtctagtgatgagtttgctaatacaatgcca

SEQ ID NO: 53279 - DNA, 120 bp, Homo sapiens
  misc_feature: 1600 for SV(W|O) and mtDNA
tctaggcatagtagggaggatatgaggtgtgagcgatatactagtattcctagaagtgagatggtaaatgctagtataatatttatgtaaatgaggggcatttggtaaatatgattatca

SEQ ID NO: 53280 - DNA, 120 bp, Homo sapiens
  misc_feature: 1600 for SV(W|O) and mtDNA
acatgcaagcatccccgttccagtgagttcaccctctaaatcaccacgatcaaaagggacaagcatcaagcacgcagcaatgcagctcaaaacgcttagcctagccacacccccacggga

SEQ ID NO: 53281 - DNA, 120 bp, Homo sapiens
  misc_feature: 1600 for SV(W|O) and mtDNA
gaaaatgttggttatacccttcccgtactaattaatcccctggcccaacccgtcatctactctaccatctttgcaggcacactcatcacagcgctaagctcgcactgattttttacctga

SEQ ID NO: 53282 - DNA, 120 bp, Homo sapiens
  misc_feature: 1600 for SV(W|O) and mtDNA
attctactgactatcctagaaatcgctgtcgccttaatccaagcctacgttttcacacttctagtaagcctctacctgcacgacaacacataatgacccaccaatcacatgcctatcata

SEQ ID NO: 53283 - DNA, 120 bp, Homo sapiens
  misc_feature: 1600 for SV(W|O) and mtDNA
ggctcaactttcctcactatctgcttcatccgccaactaatatttcactttacatccaaacatcactttggcttcgaagccgccgcctgatactggcattttgtagatgtggtttgacta

SEQ ID NO: 53284 - DNA, 120 bp, Homo sapiens
  misc_feature: 1600 for SV(W|O) and mtDNA
tagtatatcgctcacacctcatatcctccctactatgcctagaaggaataatactatcgctgttcattatagctactctcataaccctcaacacccactccctcttagccaatattgtgc

SEQ ID NO: 53285 - DNA, 120 bp, Homo sapiens
  misc_feature: 1600 for SV(W|O) and mtDNA
tactcattcaaccaatagccctggccgtacgcctaaccgctaacattactgcaggccacctactcatgcacctaattggaagcgccaccctagcaatatcaaccattaaccttccctcta

SEQ ID NO: 53286 - DNA, 120 bp, Homo sapiens
  misc_feature: 1600 for SV(W|O) and mtDNA
aggcgatagaaattgaaacctggcgcaatagatatagtaccgcaagggaaagatgaaaaattataaccaagcataatatagcaaggactaacccctataccttctgcataatgaattaac

SEQ ID NO: 53287 - DNA, 120 bp, Homo sapiens
  misc_feature: 1600 for SV(W|O) and mtDNA
gtcccaacaattatattactaccactgacatgactttccaaaaaacacataatttgaatcaacacaaccacccacagcctaattattagcatcatccctctactattttttaaccaaatc

SEQ ID NO: 53288 - DNA, 120 bp, Homo sapiens
  misc_feature: 1600 for SV(W|O) and mtDNA
cgagaaagctcacaagaactgctaactcatgcccccatgtctaacaacatggctttctcaacttttaaaggataacagctatccattggtcttaggccccaaaaattttggtgcaactcc

SEQ ID NO: 53289 - DNA, 120 bp, Homo sapiens
  misc_feature: 1600 for SV(W|O) and mtDNA
gcctgcgttcaggcgttctggctggttgcctcatcgggtgatgatagccaaggtggggataagtgtggtttcgaagaagatataaaatatgattagttctgtggctgtgaatgttataat

SEQ ID NO: 53290 - DNA, 120 bp, Homo sapiens
  misc_feature: 1600 for SV(W|O) and mtDNA
gcctcctagggagaggagggtggatggaattaagggtgttagtcatgttagcttgtttcaggtgcgagatagtagtagggtcgtggtgctggagtttaagttgagtagtaggaatgcggt

SEQ ID NO: 53291 - DNA, 120 bp, Homo sapiens
  misc_feature: 1600 for SV(W|O) and mtDNA
agtcatgtcagtggtagtaatataattgttgggacgattagttttagcattggagtaggtttaggttatgtacgtagtctaggccatatgtgttggagattgagactagtagggctaggc

SEQ ID NO: 53292 - DNA, 120 bp, Homo sapiens
  misc_feature: 1600 for SV(W|O) and mtDNA
cagaaatagtcaaaccacatctacaaaatgccagtatcaggcggcggcttcgaagccaaagtgatgtttggatgtaaagtgaaatattagttggcggatgaagcagatagtgaggaaagt

SEQ ID NO: 53293 - DNA, 120 bp, Homo sapiens
  misc_feature: 1600 for SV(W|O) and mtDNA
agccgatgaacagttggaataggttgttagcggtaactaagattagtatggtaattaggaagatgagtagatatttgaagaactgattaatgtttgggtctgagtttatatatcacagtg

SEQ ID NO: 53294 - DNA, 120 bp, Homo sapiens
  misc_feature: 1599 for SV(W|O) and mtDNA
ttaggacttttcgctttgaagcgaaggcttctcaaatcatgaaaattattaatattactgctgttagagaaatgaatgagcctacagatgataggatgtttcatgtggtgtatgcatcgg

SEQ ID NO: 53295 - DNA, 120 bp, Homo sapiens
  misc_feature: 1599 for SV(W|O) and mtDNA
ttacattttgactaccacaactcaacggctacatagaaaaatccaccccttacgagtgcggcttcgaccctatatcccccgcccgcgtccctttctccataaaattcttcttagtagcta

SEQ ID NO: 53296 - DNA, 120 bp, Homo sapiens
  misc_feature: 1599 for SV(W|O) and mtDNA
tctccctaattgaaaacaaaatactcaaatgggcctgtccttgtagtataaactaatacaccagtcttgtaaaccggagatgaaaacctttttccaaggacaaatcagagaaaaagtctt

SEQ ID NO: 53297 - DNA, 120 bp, Homo sapiens
  misc_feature: 1599 for SV(W|O) and mtDNA
tccagtgagttcaccctctaaatcaccacgatcaaaagggacaagcatcaagcacgcagcaatgcagctcaaaacgcttagcctagccacacccccacgggaaacagcagtgattaacct

SEQ ID NO: 53298 - DNA, 120 bp, Homo sapiens
  misc_feature: 1599 for SV(W|O) and mtDNA
atcgcactaatttacactcacaacaccctaggctcactaaacattctactactcactctcactgcccaagaactatcaaactcctgagccaacaacttaatatgactagcttacacaata

SEQ ID NO: 53299 - DNA, 120 bp, Homo sapiens
  misc_feature: 1599 for SV(W|O) and mtDNA
gtattcctagaagtgagatggtaaatgctagtataatatttatgtaaatgaggggcatttggtaaatatgattatcataatttaatgagtcgaaatcattcgttttgtttaaactatata

SEQ ID NO: 53300 - DNA, 120 bp, Homo sapiens
  misc_feature: 1599 for SV(W|O) and mtDNA
tagatatttgaagaactgattaatgtttgggtctgagtttatatatcacagtgagaattctatgatggaccatgtaacgaacaatgctacagggatgaatattatggagaagtagtctag

SEQ ID NO: 53301 - DNA, 120 bp, Homo sapiens
  misc_feature: 1599 for SV(W|O) and mtDNA
ctctgagccctaggattcatctttcttttcaccgtaggtggcctgactggcattgtattagcaaactcatcactagacatcgtactacacgacacgtactacgttgtagcccacttccac

SEQ ID NO: 53302 - DNA, 120 bp, Homo sapiens
  misc_feature: 1599 for SV(W|O) and mtDNA
gtgctctgagccctaggattcatctttcttttcaccgtaggtggcctgactggcattgtattagcaaactcatcactagacatcgtactacacgacacgtactacgttgtagcccacttc

SEQ ID NO: 53303 - DNA, 120 bp, Homo sapiens
  misc_feature: 1599 for SV(W|O) and mtDNA
atcgaaaccatcagcctactcattcaaccaatagccctggccgtacgcctaaccgctaacattactgcaggccacctactcatgcacctaattggaagcgccaccctagcaatatcaacc

SEQ ID NO: 53304 - DNA, 120 bp, Homo sapiens
  misc_feature: 1599 for SV(W|O) and mtDNA
actgctaactcatgcccccatgtctaacaacatggctttctcaacttttaaaggataacagctatccattggtcttaggccccaaaaattttggtgcaactccaaataaaagtaataacc

SEQ ID NO: 53305 - DNA, 120 bp, Homo sapiens
  misc_feature: 1599 for SV(W|O) and mtDNA
aatgacgtgaagtccgtggaagcctgtggctacaaaaaatgttgagccgtagatgccgtcggaaatggtgaagggagactcgaagtactctgaggcttgtaggagggtaaaatagagacc

SEQ ID NO: 53306 - DNA, 120 bp, Homo sapiens
  misc_feature: 1599 for SV(W|O) and mtDNA
atcgtgtgagcacaccatatatttacagtaggaatagacgtagacacacgagcatatttcacctccgctaccataatcatcgctatccccaccggcgtcaaagtatttagctgactcgcc

SEQ ID NO: 53307 - DNA, 120 bp, Homo sapiens
  misc_feature: 1599 for SV(W|O) and mtDNA
gctagggtggcgcttccaattaggtgcatgagtaggtggcctgcagtaatgttagcggttaggcgtacggccagggctattggttgaatgagtaggctgatggtttcgataataactagt

SEQ ID NO: 53308 - DNA, 120 bp, Homo sapiens
  misc_feature: 1599 for SV(W|O) and mtDNA
gatagaatcttagttcaactttaaatttgcccacagaaccctctaaatccccttgtaaatttaactgttagtccaaagaggaacagctctttggacactaggaaaaaaccttgtagagag

SEQ ID NO: 53309 - DNA, 120 bp, Homo sapiens
  misc_feature: 1599 for SV(W|O) and mtDNA
gaatattatggagaagtagtctagtttgaagcttagggagagctgggttgtttgggttgtggctcagtgtcagttcgagataataacttcttggtctaggcacatgaatattgttgtggg

SEQ ID NO: 53310 - DNA, 120 bp, Homo sapiens
  misc_feature: 1599 for SV(W|O) and mtDNA
cagtgggggtgaggtaaaatggctgagtgaagcattggactgtaaatctaaagacaggggttaggcctctttttaccagctccgaggtgattttcatattgaattgcaaattcgaagaag

SEQ ID NO: 53311 - DNA, 120 bp, Homo sapiens
  misc_feature: 1599 for SV(W|O) and mtDNA
cttccacggacttcacgtcattattggctcaactttcctcactatctgcttcatccgccaactaatatttcactttacatccaaacatcactttggcttcgaagccgccgcctgatactg

SEQ ID NO: 53312 - DNA, 120 bp, Homo sapiens
  misc_feature: 1599 for SV(W|O) and mtDNA
cgtcattattggctcaactttcctcactatctgcttcatccgccaactaatatttcactttacatccaaacatcactttggcttcgaagccgccgcctgatactggcattttgtagatgt

SEQ ID NO: 53313 - DNA, 120 bp, Homo sapiens
  misc_feature: 1599 for SV(W|O) and mtDNA
cacgtcattattggctcaactttcctcactatctgcttcatccgccaactaatatttcactttacatccaaacatcactttggcttcgaagccgccgcctgatactggcattttgtagat

SEQ ID NO: 53314 - DNA, 120 bp, Homo sapiens
  misc_feature: 1599 for SV(W|O) and mtDNA
atgatgctaataattaggctgtgggtggttgtgttgattcaaattatgtgttttttggaaagtcatgtcagtggtagtaatataattgttgggacgattagttttagcattggagtaggt

SEQ ID NO: 53315 - DNA, 120 bp, Homo sapiens
  misc_feature: 1599 for SV(W|O) and mtDNA
atacttgaggagggtgacgggcggtgtgtacgcgcttcagggccctgttcaactaagcactctactctcagtttactgctaaatccaccttcgacccttaagtttcataagggctatcgt

SEQ ID NO: 53316 - DNA, 120 bp, Homo sapiens
  misc_feature: 1598 for SV(W|O) and mtDNA
ttttttggaaagtcatgtcagtggtagtaatataattgttgggacgattagttttagcattggagtaggtttaggttatgtacgtagtctaggccatatgtgttggagattgagactagt

SEQ ID NO: 53317 - DNA, 120 bp, Homo sapiens
  misc_feature: 1598 for SV(W|O) and mtDNA
ttggctatcatcacccgatgaggcaaccagccagaacgcctgaacgcaggcacatacttcctattctacaccctagtaggctcccttcccctactcatcgcactaatttacactcacaac

SEQ ID NO: 53318 - DNA, 120 bp, Homo sapiens
  misc_feature: 1598 for SV(W|O) and mtDNA
aggaatactagtatatcgctcacacctcatatcctccctactatgcctagaaggaataatactatcgctgttcattatagctactctcataaccctcaacacccactccctcttagccaa

SEQ ID NO: 53319 - DNA, 120 bp, Homo sapiens
  misc_feature: 1598 for SV(W|O) and mtDNA
tgttcttaggtagctcgtctggtttcgggggtcttagctttggctctccttgcaaagttatttctagttaattcattatgcagaaggtataggggttagtccttgctatattatgcttgg

SEQ ID NO: 53320 - DNA, 120 bp, Homo sapiens
  misc_feature: 1598 for SV(W|O) and mtDNA
catgtcagtggtagtaatataattgttgggacgattagttttagcattggagtaggtttaggttatgtacgtagtctaggccatatgtgttggagattgagactagtagggctaggccca

SEQ ID NO: 53321 - DNA, 120 bp, Homo sapiens
  misc_feature: 1598 for SV(W|O) and mtDNA
tattagggggttagttttgcgtattggggtcattggtgttcttgtagttgaaatacaacgatggtttttcatatcattggtcgtggttgtagtccgtgcgagaataatgatgtatgcttt

SEQ ID NO: 53322 - DNA, 120 bp, Homo sapiens
  misc_feature: 1598 for SV(W|O) and mtDNA
gtgtggtagggtggggggcatccatatagtcactccaggtttatggagggttcttctactattaggacttttcgctttgaagcgaaggcttctcaaatcatgaaaattattaatattact

SEQ ID NO: 53323 - DNA, 120 bp, Homo sapiens
  misc_feature: 1598 for SV(W|O) and mtDNA
gtgagaattctatgatggaccatgtaacgaacaatgctacagggatgaatattatggagaagtagtctagtttgaagcttagggagagctgggttgtttgggttgtggctcagtgtcagt

SEQ ID NO: 53324 - DNA, 120 bp, Homo sapiens
  misc_feature: 1598 for SV(W|O) and mtDNA
gggggtgtggctaggctaagcgttttgagctgcattgctgcgtgcttgatgcttgtcccttttgatcgtggtgatttagagggtgaactcactggaacggggatgcttgcatgtgtaatc

SEQ ID NO: 53325 - DNA, 120 bp, Homo sapiens
  misc_feature: 1598 for SV(W|O) and mtDNA
gcttccacggacttcacgtcattattggctcaactttcctcactatctgcttcatccgccaactaatatttcactttacatccaaacatcactttggcttcgaagccgccgcctgatact

SEQ ID NO: 53326 - DNA, 120 bp, Homo sapiens
  misc_feature: 1598 for SV(W|O) and mtDNA
cattcctactactcaacttaaactccagcaccacgaccctactactatctcgcacctgaaacaagctaacatgactaacacccttaattccatccaccctcctctccctaggaggcctgc

SEQ ID NO: 53327 - DNA, 120 bp, Homo sapiens
  misc_feature: 1598 for SV(W|O) and mtDNA
aataggggaaatcagtgaatgaagcctcctatgatggcaaatacagctcctattgataggacatagtggaagtgggctacaacgtagtacgtgtcgtgtagtacgatgtctagtgatgag

SEQ ID NO: 53328 - DNA, 120 bp, Homo sapiens
  misc_feature: 1598 for SV(W|O) and mtDNA
caaatttaaagttgaactaagattctatcttggacaaccagctatcaccaggctcggtaggtttgtcgcctctacctataaatcttcccactattttgctacatagacgggtgtgctctt

SEQ ID NO: 53329 - DNA, 120 bp, Homo sapiens
  misc_feature: 1598 for SV(W|O) and mtDNA
agtgctctgagccctaggattcatctttcttttcaccgtaggtggcctgactggcattgtattagcaaactcatcactagacatcgtactacacgacacgtactacgttgtagcccactt

SEQ ID NO: 53330 - DNA, 120 bp, Homo sapiens
  misc_feature: 1598 for SV(W|O) and mtDNA
agagaatagtcaacggtcggcgaacatcagtgggggtgaggtaaaatggctgagtgaagcattggactgtaaatctaaagacaggggttaggcctctttttaccagctccgaggtgattt

SEQ ID NO: 53331 - DNA, 120 bp, Homo sapiens
  misc_feature: 1597 for SV(W|O) and mtDNA
ttggatgtaaagtgaaatattagttggcggatgaagcagatagtgaggaaagttgagccaataatgacgtgaagtccgtggaagcctgtggctacaaaaaatgttgagccgtagatgccg

SEQ ID NO: 53332 - DNA, 120 bp, Homo sapiens
  misc_feature: 1597 for SV(W|O) and mtDNA
ttgaggttgcggtctgttagtagtatagtgatgccagcagctaggactgggagagataggagaagtaggactgctgtgattaggacggatcagacgaagaggggcgtttggtattgggtt

SEQ ID NO: 53333 - DNA, 120 bp, Homo sapiens
  misc_feature: 1597 for SV(W|O) and mtDNA
ttgaagcgaaggcttctcaaatcatgaaaattattaatattactgctgttagagaaatgaatgagcctacagatgataggatgtttcatgtggtgtatgcatcggggtagtccgagtaac

SEQ ID NO: 53334 - DNA, 120 bp, Homo sapiens
  misc_feature: 1597 for SV(W|O) and mtDNA
ttcttcgaatgtgtggtagggtggggggcatccatatagtcactccaggtttatggagggttcttctactattaggacttttcgctttgaagcgaaggcttctcaaatcatgaaaattat

SEQ ID NO: 53335 - DNA, 120 bp, Homo sapiens
  misc_feature: 1597 for SV(W|O) and mtDNA
actttgcaaggagagccaaagctaagacccccgaaaccagacgagctacctaagaacagctaaaagagcacacccgtctatgtagcaaaatagtgggaagatttataggtagaggcgaca

SEQ ID NO: 53336 - DNA, 120 bp, Homo sapiens
  misc_feature: 1597 for SV(W|O) and mtDNA
tcatgtcagtggtagtaatataattgttgggacgattagttttagcattggagtaggtttaggttatgtacgtagtctaggccatatgtgttggagattgagactagtagggctaggccc

SEQ ID NO: 53337 - DNA, 120 bp, Homo sapiens
  misc_feature: 1597 for SV(W|O) and mtDNA
ctatacttcacaacaatcctaatcctaataccaactatctccctaattgaaaacaaaatactcaaatgggcctgtccttgtagtataaactaatacaccagtcttgtaaaccggagatga

SEQ ID NO: 53338 - DNA, 120 bp, Homo sapiens
  misc_feature: 1597 for SV(W|O) and mtDNA
tataaatagtaccgttaacttccaattaactagttttgacaacattcaaaaaagagtaataaacttcgccttaattttaataatcaacaccctcctagccttactactaataattattac

SEQ ID NO: 53339 - DNA, 120 bp, Homo sapiens
  misc_feature: 1597 for SV(W|O) and mtDNA
cgaagcagcggtgggcctagccctactagtctcaatctccaacacatatggcctagactacgtacataacctaaacctactccaatgctaaaactaatcgtcccaacaattatattacta

SEQ ID NO: 53340 - DNA, 120 bp, Homo sapiens
  misc_feature: 1597 for SV(W|O) and mtDNA
cctcctagggagaggagggtggatggaattaagggtgttagtcatgttagcttgtttcaggtgcgagatagtagtagggtcgtggtgctggagtttaagttgagtagtaggaatgcggta

SEQ ID NO: 53341 - DNA, 120 bp, Homo sapiens
  misc_feature: 1597 for SV(W|O) and mtDNA
taccacccaagtattgactcacccatcaacaaccgctatgtatttcgtacattactgccagccaccatgaatattgtacggtaccataaatacttgaccacctgtagtacataaaaaccc

SEQ ID NO: 53342 - DNA, 120 bp, Homo sapiens
  misc_feature: 1597 for SV(W|O) and mtDNA
taatttaactatttatattatcctaactactaccgcattcctactactcaacttaaactccagcaccacgaccctactactatctcgcacctgaaacaagctaacatgactaacaccctt

SEQ ID NO: 53343 - DNA, 120 bp, Homo sapiens
  misc_feature: 1597 for SV(W|O) and mtDNA
ggaaggttaatggttgatattgctagggtggcgcttccaattaggtgcatgagtaggtggcctgcagtaatgttagcggttaggcgtacggccagggctattggttgaatgagtaggctg

SEQ ID NO: 53344 - DNA, 120 bp, Homo sapiens
  misc_feature: 1597 for SV(W|O) and mtDNA
agtcaactaggactcataatagttacaatcggcatcaaccaaccacacctagcattcctgcacatctgcacccacgccttcttcaaagccatactatttatgtgctccgggtccatcatc

SEQ ID NO: 53345 - DNA, 120 bp, Homo sapiens
  misc_feature: 1597 for SV(W|O) and mtDNA
ctactactcaacttaaactccagcaccacgaccctactactatctcgcacctgaaacaagctaacatgactaacacccttaattccatccaccctcctctccctaggaggcctgcccccg

SEQ ID NO: 53346 - DNA, 120 bp, Homo sapiens
  misc_feature: 1597 for SV(W|O) and mtDNA
acgataaaccctaggaagccaattgatatcatagctcagaccatacctatgtatccaaatggttctttttttccggagtagtaagttacaatatgggagattattccgaagcctggtagg

SEQ ID NO: 53347 - DNA, 120 bp, Homo sapiens
  misc_feature: 1596 for SV(W|O) and mtDNA
gggaattagggaagtcagggttagggtggttatagtagtgtgcatggttattacttttatttggagttgcaccaaaatttttggggcctaagaccaatggatagctgttatcctttaaaa

SEQ ID NO: 53348 - DNA, 120 bp, Homo sapiens
  misc_feature: 1596 for SV(W|O) and mtDNA
atctcgaactgacactgagccacaacccaaacaacccagctctccctaagcttcaaactagactacttctccataatattcatccctgtagcattgttcgttacatggtccatcatagaa

SEQ ID NO: 53349 - DNA, 120 bp, Homo sapiens
  misc_feature: 1596 for SV(W|O) and mtDNA
gagttgtggtagtcaaaatgtaataattattagtagtaaggctaggagggtgttgattattaaaattaaggcgaagtttattactcttttttgaatgttgtcaaaactagttaattggaa

SEQ ID NO: 53350 - DNA, 120 bp, Homo sapiens
  misc_feature: 1596 for SV(W|O) and mtDNA
aatttattaatgcaaacagtacctaacaaacccacaggtcctaaactaccaaacctgcattaaaaatttcggttggggcgacctcggagcagaacccaacctccgagcagtacatgctaa

SEQ ID NO: 53351 - DNA, 120 bp, Homo sapiens
  misc_feature: 1596 for SV(W|O) and mtDNA
tgtaaaaaactccagttgacacaaaatagactacgaaagtggctttaacatatctgaacacacaatagctaagacccaaactgggattagataccccactatgcttagccctaaacctca

SEQ ID NO: 53352 - DNA, 120 bp, Homo sapiens
  misc_feature: 1596 for SV(W|O) and mtDNA
tgctagggtggcgcttccaattaggtgcatgagtaggtggcctgcagtaatgttagcggttaggcgtacggccagggctattggttgaatgagtaggctgatggtttcgataataactag

SEQ ID NO: 53353 - DNA, 120 bp, Homo sapiens
  misc_feature: 1596 for SV(W|O) and mtDNA
taactttgcaaggagagccaaagctaagacccccgaaaccagacgagctacctaagaacagctaaaagagcacacccgtctatgtagcaaaatagtgggaagatttataggtagaggcga

SEQ ID NO: 53354 - DNA, 120 bp, Homo sapiens
  misc_feature: 1596 for SV(W|O) and mtDNA
attattacattttgactaccacaactcaacggctacatagaaaaatccaccccttacgagtgcggcttcgaccctatatcccccgcccgcgtccctttctccataaaattcttcttagta

SEQ ID NO: 53355 - DNA, 120 bp, Homo sapiens
  misc_feature: 1596 for SV(W|O) and mtDNA
gaactaagattctatcttggacaaccagctatcaccaggctcggtaggtttgtcgcctctacctataaatcttcccactattttgctacatagacgggtgtgctcttttagctgttctta

SEQ ID NO: 53356 - DNA, 120 bp, Homo sapiens
  misc_feature: 1596 for SV(W|O) and mtDNA
aactttgcaaggagagccaaagctaagacccccgaaaccagacgagctacctaagaacagctaaaagagcacacccgtctatgtagcaaaatagtgggaagatttataggtagaggcgac

SEQ ID NO: 53357 - DNA, 120 bp, Homo sapiens
  misc_feature: 1596 for SV(W|O) and mtDNA
atcatcttcacaattctaattctactgactatcctagaaatcgctgtcgccttaatccaagcctacgttttcacacttctagtaagcctctacctgcacgacaacacataatgacccacc

SEQ ID NO: 53358 - DNA, 120 bp, Homo sapiens
  misc_feature: 1596 for SV(W|O) and mtDNA
ggaacaagtgattatgctacctttgcacggttagggtaccgcggccgttaaacatgtgtcactgggcaggcggtgcctctaatactggtgatgctagaggtgatgtttttggtaaacagg

SEQ ID NO: 53359 - DNA, 120 bp, Homo sapiens
  misc_feature: 1596 for SV(W|O) and mtDNA
agattctatcttggacaaccagctatcaccaggctcggtaggtttgtcgcctctacctataaatcttcccactattttgctacatagacgggtgtgctcttttagctgttcttaggtagc

SEQ ID NO: 53360 - DNA, 120 bp, Homo sapiens
  misc_feature: 1596 for SV(W|O) and mtDNA
cgctttgaagcgaaggcttctcaaatcatgaaaattattaatattactgctgttagagaaatgaatgagcctacagatgataggatgtttcatgtggtgtatgcatcggggtagtccgag

SEQ ID NO: 53361 - DNA, 120 bp, Homo sapiens
  misc_feature: 1596 for SV(W|O) and mtDNA
cacccaagtattgactcacccatcaacaaccgctatgtatttcgtacattactgccagccaccatgaatattgtacggtaccataaatacttgaccacctgtagtacataaaaacccaat

SEQ ID NO: 53362 - DNA, 120 bp, Homo sapiens
  misc_feature: 1595 for SV(W|O) and mtDNA
tttaactatttatattatcctaactactaccgcattcctactactcaacttaaactccagcaccacgaccctactactatctcgcacctgaaacaagctaacatgactaacacccttaat

SEQ ID NO: 53363 - DNA, 120 bp, Homo sapiens
  misc_feature: 1595 for SV(W|O) and mtDNA
atcgtcccaacaattatattactaccactgacatgactttccaaaaaacacataatttgaatcaacacaaccacccacagcctaattattagcatcatccctctactattttttaaccaa

SEQ ID NO: 53364 - DNA, 120 bp, Homo sapiens
  misc_feature: 1595 for SV(W|O) and mtDNA
ttgcaaggagagccaaagctaagacccccgaaaccagacgagctacctaagaacagctaaaagagcacacccgtctatgtagcaaaatagtgggaagatttataggtagaggcgacaaac

SEQ ID NO: 53365 - DNA, 120 bp, Homo sapiens
  misc_feature: 1595 for SV(W|O) and mtDNA
ctacaaaaaatgttgagccgtagatgccgtcggaaatggtgaagggagactcgaagtactctgaggcttgtaggagggtaaaatagagacccagtaaaattgtaataagcagtgcttgaa

SEQ ID NO: 53366 - DNA, 120 bp, Homo sapiens
  misc_feature: 1595 for SV(W|O) and mtDNA
ttatatatcacagtgagaattctatgatggaccatgtaacgaacaatgctacagggatgaatattatggagaagtagtctagtttgaagcttagggagagctgggttgtttgggttgtgg

SEQ ID NO: 53367 - DNA, 120 bp, Homo sapiens
  misc_feature: 1595 for SV(W|O) and mtDNA
tgcgttcaggcgttctggctggttgcctcatcgggtgatgatagccaaggtggggataagtgtggtttcgaagaagatataaaatatgattagttctgtggctgtgaatgttataattaa

SEQ ID NO: 53368 - DNA, 120 bp, Homo sapiens
  misc_feature: 1595 for SV(W|O) and mtDNA
tgagggtaataatgacttgttggttgattgtagatattgggctgttaattgtcagttcagtgttttaatctgacgcaggcttatgcggaggagaatgttttcatgttacttatactaaca

SEQ ID NO: 53369 - DNA, 120 bp, Homo sapiens
  misc_feature: 1595 for SV(W|O) and mtDNA
atttacaccaaccacccaactatctataaacctagccatggccatccccttatgagcgggcgcagtgattataggctttcgctctaagattaaaaatgccctagcccacttcttaccaca

SEQ ID NO: 53370 - DNA, 120 bp, Homo sapiens
  misc_feature: 1595 for SV(W|O) and mtDNA
tgggggtgtggctaggctaagcgttttgagctgcattgctgcgtgcttgatgcttgtcccttttgatcgtggtgatttagagggtgaactcactggaacggggatgcttgcatgtgtaat

SEQ ID NO: 53371 - DNA, 120 bp, Homo sapiens
  misc_feature: 1595 for SV(W|O) and mtDNA
aagttattatctcgaactgacactgagccacaacccaaacaacccagctctccctaagcttcaaactagactacttctccataatattcatccctgtagcattgttcgttacatggtcca

SEQ ID NO: 53372 - DNA, 120 bp, Homo sapiens
  misc_feature: 1595 for SV(W|O) and mtDNA
gtgggggtgaggtaaaatggctgagtgaagcattggactgtaaatctaaagacaggggttaggcctctttttaccagctccgaggtgattttcatattgaattgcaaattcgaagaagca

SEQ ID NO: 53373 - DNA, 120 bp, Homo sapiens
  misc_feature: 1595 for SV(W|O) and mtDNA
tgcgaagcagcggtgggcctagccctactagtctcaatctccaacacatatggcctagactacgtacataacctaaacctactccaatgctaaaactaatcgtcccaacaattatattac

SEQ ID NO: 53374 - DNA, 120 bp, Homo sapiens
  misc_feature: 1595 for SV(W|O) and mtDNA
agaggagggtggatggaattaagggtgttagtcatgttagcttgtttcaggtgcgagatagtagtagggtcgtggtgctggagtttaagttgagtagtaggaatgcggtagtagttagga

SEQ ID NO: 53375 - DNA, 120 bp, Homo sapiens
  misc_feature: 1595 for SV(W|O) and mtDNA
tcaagtcaactaggactcataatagttacaatcggcatcaaccaaccacacctagcattcctgcacatctgcacccacgccttcttcaaagccatactatttatgtgctccgggtccatc

SEQ ID NO: 53376 - DNA, 120 bp, Homo sapiens
  misc_feature: 1595 for SV(W|O) and mtDNA
gcgatagaaattgaaacctggcgcaatagatatagtaccgcaagggaaagatgaaaaattataaccaagcataatatagcaaggactaacccctataccttctgcataatgaattaacta

SEQ ID NO: 53377 - DNA, 120 bp, Homo sapiens
  misc_feature: 1595 for SV(W|O) and mtDNA
gacttttcgctttgaagcgaaggcttctcaaatcatgaaaattattaatattactgctgttagagaaatgaatgagcctacagatgataggatgtttcatgtggtgtatgcatcggggta

SEQ ID NO: 53378 - DNA, 120 bp, Homo sapiens
  misc_feature: 1595 for SV(W|O) and mtDNA
cttcgaatgtgtggtagggtggggggcatccatatagtcactccaggtttatggagggttcttctactattaggacttttcgctttgaagcgaaggcttctcaaatcatgaaaattatta

SEQ ID NO: 53379 - DNA, 120 bp, Homo sapiens
  misc_feature: 1595 for SV(W|O) and mtDNA
aatttaactatttatattatcctaactactaccgcattcctactactcaacttaaactccagcaccacgaccctactactatctcgcacctgaaacaagctaacatgactaacaccctta

SEQ ID NO: 53380 - DNA, 120 bp, Homo sapiens
  misc_feature: 1595 for SV(W|O) and mtDNA
gtgaatgaagcctcctatgatggcaaatacagctcctattgataggacatagtggaagtgggctacaacgtagtacgtgtcgtgtagtacgatgtctagtgatgagtttgctaatacaat

SEQ ID NO: 53381 - DNA, 120 bp, Homo sapiens
  misc_feature: 1595 for SV(W|O) and mtDNA
gctaagcatagtggggtatctaatcccagtttgggtcttagctattgtgtgttcagatatgttaaagccactttcgtagtctattttgtgtcaactggagttttttacaactcaggtgag

SEQ ID NO: 53382 - DNA, 120 bp, Homo sapiens
  misc_feature: 1595 for SV(W|O) and mtDNA
atctgcttcatccgccaactaatatttcactttacatccaaacatcactttggcttcgaagccgccgcctgatactggcattttgtagatgtggtttgactatttctgtatgtctccatc

SEQ ID NO: 53383 - DNA, 120 bp, Homo sapiens
  misc_feature: 1595 for SV(W|O) and mtDNA
gagaattctatgatggaccatgtaacgaacaatgctacagggatgaatattatggagaagtagtctagtttgaagcttagggagagctgggttgtttgggttgtggctcagtgtcagttc

SEQ ID NO: 53384 - DNA, 120 bp, Homo sapiens
  misc_feature: 1595 for SV(W|O) and mtDNA
ctttcctcactatctgcttcatccgccaactaatatttcactttacatccaaacatcactttggcttcgaagccgccgcctgatactggcattttgtagatgtggtttgactatttctgt

SEQ ID NO: 53385 - DNA, 120 bp, Homo sapiens
  misc_feature: 1595 for SV(W|O) and mtDNA
atttattaatgcaaacagtacctaacaaacccacaggtcctaaactaccaaacctgcattaaaaatttcggttggggcgacctcggagcagaacccaacctccgagcagtacatgctaag

SEQ ID NO: 53386 - DNA, 120 bp, Homo sapiens
  misc_feature: 1595 for SV(W|O) and mtDNA
cacgggaaacagcagtgattaacctttagcaataaacgaaagtttaactaagctatactaaccccagggttggtcaatttcgtgccagccaccgcggtcacacgattaacccaagtcaat

SEQ ID NO: 53387 - DNA, 120 bp, Homo sapiens
  misc_feature: 1595 for SV(W|O) and mtDNA
atgctagtataatatttatgtaaatgaggggcatttggtaaatatgattatcataatttaatgagtcgaaatcattcgttttgtttaaactatataccaattcggttcagtctaatcctt

SEQ ID NO: 53388 - DNA, 120 bp, Homo sapiens
  misc_feature: 1595 for SV(W|O) and mtDNA
atacctattattcggcgcatgagctggagtcctaggcacagctctaagcctccttattcgagccgagctgggccagccaggcaaccttctaggtaacgaccacatctacaacgttatcgt

SEQ ID NO: 53389 - DNA, 120 bp, Homo sapiens
  misc_feature: 1594 for SV(W|O) and mtDNA
tttacagtccaatgcttcactcagccattttacctcacccccactgatgttcgccgaccgttgactattctctacaaaccacaaagacattggaacactatacctattattcggcgcatg

SEQ ID NO: 53390 - DNA, 120 bp, Homo sapiens
  misc_feature: 1594 for SV(W|O) and mtDNA
ccacccaagtattgactcacccatcaacaaccgctatgtatttcgtacattactgccagccaccatgaatattgtacggtaccataaatacttgaccacctgtagtacataaaaacccaa

SEQ ID NO: 53391 - DNA, 120 bp, Homo sapiens
  misc_feature: 1594 for SV(W|O) and mtDNA
ttacagtccaatgcttcactcagccattttacctcacccccactgatgttcgccgaccgttgactattctctacaaaccacaaagacattggaacactatacctattattcggcgcatga

SEQ ID NO: 53392 - DNA, 120 bp, Homo sapiens
  misc_feature: 1594 for SV(W|O) and mtDNA
ttaatttaactatttatattatcctaactactaccgcattcctactactcaacttaaactccagcaccacgaccctactactatctcgcacctgaaacaagctaacatgactaacaccct

SEQ ID NO: 53393 - DNA, 120 bp, Homo sapiens
  misc_feature: 1594 for SV(W|O) and mtDNA
tgaatcggaggacaaccagtaagctacccttttaccatcattggacaagtagcatccgtactatacttcacaacaatcctaatcctaataccaactatctccctaattgaaaacaaaata

SEQ ID NO: 53394 - DNA, 120 bp, Homo sapiens
  misc_feature: 1594 for SV(W|O) and mtDNA
tctgcttcatccgccaactaatatttcactttacatccaaacatcactttggcttcgaagccgccgcctgatactggcattttgtagatgtggtttgactatttctgtatgtctccatct

SEQ ID NO: 53395 - DNA, 120 bp, Homo sapiens
  misc_feature: 1594 for SV(W|O) and mtDNA
tcctactactcaacttaaactccagcaccacgaccctactactatctcgcacctgaaacaagctaacatgactaacacccttaattccatccaccctcctctccctaggaggcctgcccc

SEQ ID NO: 53396 - DNA, 120 bp, Homo sapiens
  misc_feature: 1594 for SV(W|O) and mtDNA
taaatagtaccgttaacttccaattaactagttttgacaacattcaaaaaagagtaataaacttcgccttaattttaataatcaacaccctcctagccttactactaataattattacat

SEQ ID NO: 53397 - DNA, 120 bp, Homo sapiens
  misc_feature: 1594 for SV(W|O) and mtDNA
gttgacacaaaatagactacgaaagtggctttaacatatctgaacacacaatagctaagacccaaactgggattagataccccactatgcttagccctaaacctcaacagttaaatcaac

SEQ ID NO: 53398 - DNA, 120 bp, Homo sapiens
  misc_feature: 1594 for SV(W|O) and mtDNA
gtgagggtaataatgacttgttggttgattgtagatattgggctgttaattgtcagttcagtgttttaatctgacgcaggcttatgcggaggagaatgttttcatgttacttatactaac

SEQ ID NO: 53399 - DNA, 120 bp, Homo sapiens
  misc_feature: 1594 for SV(W|O) and mtDNA
caatatgaaatgatctgctgcagtgctctgagccctaggattcatctttcttttcaccgtaggtggcctgactggcattgtattagcaaactcatcactagacatcgtactacacgacac

SEQ ID NO: 53400 - DNA, 120 bp, Homo sapiens
  misc_feature: 1594 for SV(W|O) and mtDNA
ggtgttgaggttgcggtctgttagtagtatagtgatgccagcagctaggactgggagagataggagaagtaggactgctgtgattaggacggatcagacgaagaggggcgtttggtattg

SEQ ID NO: 53401 - DNA, 120 bp, Homo sapiens
  misc_feature: 1594 for SV(W|O) and mtDNA
ggcgatagaaattgaaacctggcgcaatagatatagtaccgcaagggaaagatgaaaaattataaccaagcataatatagcaaggactaacccctataccttctgcataatgaattaact

SEQ ID NO: 53402 - DNA, 120 bp, Homo sapiens
  misc_feature: 1594 for SV(W|O) and mtDNA
cataatatttcgcccactaagccaatcactttattgactcctagccgcagacctcctcattctaacctgaatcggaggacaaccagtaagctacccttttaccatcattggacaagtagc

SEQ ID NO: 53403 - DNA, 120 bp, Homo sapiens
  misc_feature: 1594 for SV(W|O) and mtDNA
gagaggagggtggatggaattaagggtgttagtcatgttagcttgtttcaggtgcgagatagtagtagggtcgtggtgctggagtttaagttgagtagtaggaatgcggtagtagttagg

SEQ ID NO: 53404 - DNA, 120 bp, Homo sapiens
  misc_feature: 1594 for SV(W|O) and mtDNA
ctcgaactgacactgagccacaacccaaacaacccagctctccctaagcttcaaactagactacttctccataatattcatccctgtagcattgttcgttacatggtccatcatagaatt

SEQ ID NO: 53405 - DNA, 120 bp, Homo sapiens
  misc_feature: 1594 for SV(W|O) and mtDNA
ctattaggacttttcgctttgaagcgaaggcttctcaaatcatgaaaattattaatattactgctgttagagaaatgaatgagcctacagatgataggatgtttcatgtggtgtatgcat

SEQ ID NO: 53406 - DNA, 120 bp, Homo sapiens
  misc_feature: 1594 for SV(W|O) and mtDNA
agccaataatgacgtgaagtccgtggaagcctgtggctacaaaaaatgttgagccgtagatgccgtcggaaatggtgaagggagactcgaagtactctgaggcttgtaggagggtaaaat

SEQ ID NO: 53407 - DNA, 120 bp, Homo sapiens
  misc_feature: 1594 for SV(W|O) and mtDNA
atatcgctcacacctcatatcctccctactatgcctagaaggaataatactatcgctgttcattatagctactctcataaccctcaacacccactccctcttagccaatattgtgcctat

SEQ ID NO: 53408 - DNA, 120 bp, Homo sapiens
  misc_feature: 1594 for SV(W|O) and mtDNA
aattattacattttgactaccacaactcaacggctacatagaaaaatccaccccttacgagtgcggcttcgaccctatatcccccgcccgcgtccctttctccataaaattcttcttagt

SEQ ID NO: 53409 - DNA, 120 bp, Homo sapiens
  misc_feature: 1594 for SV(W|O) and mtDNA
aacattttttgtagccacaggcttccacggacttcacgtcattattggctcaactttcctcactatctgcttcatccgccaactaatatttcactttacatccaaacatcactttggctt

SEQ ID NO: 53410 - DNA, 120 bp, Homo sapiens
  misc_feature: 1593 for SV(W|O) and mtDNA
tttacaccaaccacccaactatctataaacctagccatggccatccccttatgagcgggcgcagtgattataggctttcgctctaagattaaaaatgccctagcccacttcttaccacaa

SEQ ID NO: 53411 - DNA, 120 bp, Homo sapiens
  misc_feature: 1593 for SV(W|O) and mtDNA
cttggctatcatcacccgatgaggcaaccagccagaacgcctgaacgcaggcacatacttcctattctacaccctagtaggctcccttcccctactcatcgcactaatttacactcacaa

SEQ ID NO: 53412 - DNA, 120 bp, Homo sapiens
  misc_feature: 1593 for SV(W|O) and mtDNA
ttctatcttggacaaccagctatcaccaggctcggtaggtttgtcgcctctacctataaatcttcccactattttgctacatagacgggtgtgctcttttagctgttcttaggtagctcg

SEQ ID NO: 53413 - DNA, 120 bp, Homo sapiens
  misc_feature: 1593 for SV(W|O) and mtDNA
tatacccttcccgtactaattaatcccctggcccaacccgtcatctactctaccatctttgcaggcacactcatcacagcgctaagctcgcactgattttttacctgagtaggcctagaa

SEQ ID NO: 53414 - DNA, 120 bp, Homo sapiens
  misc_feature: 1593 for SV(W|O) and mtDNA
tccatttcactatcatattcatcggcgtaaatctaactttcttcccacaacactttctcggcctatccggaatgccccgacgttactcggactaccccgatgcatacaccacatgaaaca

SEQ ID NO: 53415 - DNA, 120 bp, Homo sapiens
  misc_feature: 1593 for SV(W|O) and mtDNA
ccgggttttcctcttgtaaatatagtttaaccaaaacatcagattgtgaatctgacaacagaggcttacgaccccttatttaccgagaaagctcacaagaactgctaactcatgccccca

SEQ ID NO: 53416 - DNA, 120 bp, Homo sapiens
  misc_feature: 1593 for SV(W|O) and mtDNA
tacagtccaatgcttcactcagccattttacctcacccccactgatgttcgccgaccgttgactattctctacaaaccacaaagacattggaacactatacctattattcggcgcatgag

SEQ ID NO: 53417 - DNA, 120 bp, Homo sapiens
  misc_feature: 1593 for SV(W|O) and mtDNA
aaaccatcagcctactcattcaaccaatagccctggccgtacgcctaaccgctaacattactgcaggccacctactcatgcacctaattggaagcgccaccctagcaatatcaaccatta

SEQ ID NO: 53418 - DNA, 120 bp, Homo sapiens
  misc_feature: 1593 for SV(W|O) and mtDNA
cactcatttacaccaaccacccaactatctataaacctagccatggccatccccttatgagcgggcgcagtgattataggctttcgctctaagattaaaaatgccctagcccacttctta

SEQ ID NO: 53419 - DNA, 120 bp, Homo sapiens
  misc_feature: 1593 for SV(W|O) and mtDNA
gttatttctagttaattcattatgcagaaggtataggggttagtccttgctatattatgcttggttataatttttcatctttcccttgcggtactatatctattgcgccaggtttcaatt

SEQ ID NO: 53420 - DNA, 120 bp, Homo sapiens
  misc_feature: 1593 for SV(W|O) and mtDNA
gcataatatttcgcccactaagccaatcactttattgactcctagccgcagacctcctcattctaacctgaatcggaggacaaccagtaagctacccttttaccatcattggacaagtag

SEQ ID NO: 53421 - DNA, 120 bp, Homo sapiens
  misc_feature: 1593 for SV(W|O) and mtDNA
ctgaatcggaggacaaccagtaagctacccttttaccatcattggacaagtagcatccgtactatacttcacaacaatcctaatcctaataccaactatctccctaattgaaaacaaaat

SEQ ID NO: 53422 - DNA, 120 bp, Homo sapiens
  misc_feature: 1593 for SV(W|O) and mtDNA
agagggaaggttaatggttgatattgctagggtggcgcttccaattaggtgcatgagtaggtggcctgcagtaatgttagcggttaggcgtacggccagggctattggttgaatgagtag

SEQ ID NO: 53423 - DNA, 120 bp, Homo sapiens
  misc_feature: 1592 for SV(W|O) and mtDNA
tttgttgatttaactgttgaggtttagggctaagcatagtggggtatctaatcccagtttgggtcttagctattgtgtgttcagatatgttaaagccactttcgtagtctattttgtgtc

SEQ ID NO: 53424 - DNA, 120 bp, Homo sapiens
  misc_feature: 1592 for SV(W|O) and mtDNA
atacccttcccgtactaattaatcccctggcccaacccgtcatctactctaccatctttgcaggcacactcatcacagcgctaagctcgcactgattttttacctgagtaggcctagaaa

SEQ ID NO: 53425 - DNA, 120 bp, Homo sapiens
  misc_feature: 1592 for SV(W|O) and mtDNA
ttgtaaaaaactccagttgacacaaaatagactacgaaagtggctttaacatatctgaacacacaatagctaagacccaaactgggattagataccccactatgcttagccctaaacctc

SEQ ID NO: 53426 - DNA, 120 bp, Homo sapiens
  misc_feature: 1592 for SV(W|O) and mtDNA
tgtaaagtgaaatattagttggcggatgaagcagatagtgaggaaagttgagccaataatgacgtgaagtccgtggaagcctgtggctacaaaaaatgttgagccgtagatgccgtcgga

SEQ ID NO: 53427 - DNA, 120 bp, Homo sapiens
  misc_feature: 1592 for SV(W|O) and mtDNA
tgggggtgaggtaaaatggctgagtgaagcattggactgtaaatctaaagacaggggttaggcctctttttaccagctccgaggtgattttcatattgaattgcaaattcgaagaagcag

SEQ ID NO: 53428 - DNA, 120 bp, Homo sapiens
  misc_feature: 1592 for SV(W|O) and mtDNA
gctctgagccctaggattcatctttcttttcaccgtaggtggcctgactggcattgtattagcaaactcatcactagacatcgtactacacgacacgtactacgttgtagcccacttcca

SEQ ID NO: 53429 - DNA, 120 bp, Homo sapiens
  misc_feature: 1592 for SV(W|O) and mtDNA
gatattgctagggtggcgcttccaattaggtgcatgagtaggtggcctgcagtaatgttagcggttaggcgtacggccagggctattggttgaatgagtaggctgatggtttcgataata

SEQ ID NO: 53430 - DNA, 120 bp, Homo sapiens
  misc_feature: 1592 for SV(W|O) and mtDNA
tatatcgctcacacctcatatcctccctactatgcctagaaggaataatactatcgctgttcattatagctactctcataaccctcaacacccactccctcttagccaatattgtgccta

SEQ ID NO: 53431 - DNA, 120 bp, Homo sapiens
  misc_feature: 1592 for SV(W|O) and mtDNA
gtagatatttgaagaactgattaatgtttgggtctgagtttatatatcacagtgagaattctatgatggaccatgtaacgaacaatgctacagggatgaatattatggagaagtagtcta

SEQ ID NO: 53432 - DNA, 120 bp, Homo sapiens
  misc_feature: 1592 for SV(W|O) and mtDNA
gaagccaattgatatcatagctcagaccatacctatgtatccaaatggttctttttttccggagtagtaagttacaatatgggagattattccgaagcctggtaggataagaatataaac

SEQ ID NO: 53433 - DNA, 120 bp, Homo sapiens
  misc_feature: 1592 for SV(W|O) and mtDNA
actaataatcttatagaaatttaggttaaatacagaccaagagccttcaaagccctcagtaagttgcaatacttaatttctgtaacagctaaggactgcaaaaccccactctgcatcaac

SEQ ID NO: 53434 - DNA, 120 bp, Homo sapiens
  misc_feature: 1592 for SV(W|O) and mtDNA
gtgagttcaccctctaaatcaccacgatcaaaagggacaagcatcaagcacgcagcaatgcagctcaaaacgcttagcctagccacacccccacgggaaacagcagtgattaacctttag

SEQ ID NO: 53435 - DNA, 120 bp, Homo sapiens
  misc_feature: 1592 for SV(W|O) and mtDNA
gggatgaatattatggagaagtagtctagtttgaagcttagggagagctgggttgtttgggttgtggctcagtgtcagttcgagataataacttcttggtctaggcacatgaatattgtt

SEQ ID NO: 53436 - DNA, 120 bp, Homo sapiens
  misc_feature: 1592 for SV(W|O) and mtDNA
gctgttcttaggtagctcgtctggtttcgggggtcttagctttggctctccttgcaaagttatttctagttaattcattatgcagaaggtataggggttagtccttgctatattatgctt

SEQ ID NO: 53437 - DNA, 120 bp, Homo sapiens
  misc_feature: 1592 for SV(W|O) and mtDNA
ctgttcttaggtagctcgtctggtttcgggggtcttagctttggctctccttgcaaagttatttctagttaattcattatgcagaaggtataggggttagtccttgctatattatgcttg

SEQ ID NO: 53438 - DNA, 120 bp, Homo sapiens
  misc_feature: 1592 for SV(W|O) and mtDNA
ataactttgcaaggagagccaaagctaagacccccgaaaccagacgagctacctaagaacagctaaaagagcacacccgtctatgtagcaaaatagtgggaagatttataggtagaggcg

SEQ ID NO: 53439 - DNA, 120 bp, Homo sapiens
  misc_feature: 1591 for SV(W|O) and mtDNA
tttttggaaagtcatgtcagtggtagtaatataattgttgggacgattagttttagcattggagtaggtttaggttatgtacgtagtctaggccatatgtgttggagattgagactagta
